United States Patent Application Publication US 2014/0004565 A1 - sequence listing, part 130

SEQ ID NO: 3264021 - RNA, 19 nt, Artificial Sequence
  Description of Artificial Sequence: Synthetic oligonucleotide
ugaaucacuagaacuaucc

SEQ ID NO: 3264022 - RNA, 19 nt, Artificial Sequence
  Description of Artificial Sequence: Synthetic oligonucleotide
uucucuuucaaugucaucc

SEQ ID NO: 3264023 - RNA, 19 nt, Artificial Sequence
  Description of Artificial Sequence: Synthetic oligonucleotide
gauguccugagcuauaugc

SEQ ID NO: 3264024 - RNA, 19 nt, Artificial Sequence
  Description of Artificial Sequence: Synthetic oligonucleotide
auuuaaucuuaauucaaag

SEQ ID NO: 3264025 - RNA, 19 nt, Artificial Sequence
  Description of Artificial Sequence: Synthetic oligonucleotide
aguauuuaaucuuaauuca

SEQ ID NO: 3264026 - RNA, 19 nt, Artificial Sequence
  Description of Artificial Sequence: Synthetic oligonucleotide
aaaauucugaaucaauuua

SEQ ID NO: 3264027 - RNA, 19 nt, Artificial Sequence
  Description of Artificial Sequence: Synthetic oligonucleotide
uuuaaucuuaauucaaagu

SEQ ID NO: 3264028 - RNA, 19 nt, Artificial Sequence
  Description of Artificial Sequence: Synthetic oligonucleotide
ugaaaacugugacuggugg

SEQ ID NO: 3264029 - RNA, 19 nt, Artificial Sequence
  Description of Artificial Sequence: Synthetic oligonucleotide
aucuauugcagcuagccuc

SEQ ID NO: 3264030 - RNA, 19 nt, Artificial Sequence
  Description of Artificial Sequence: Synthetic oligonucleotide
uuaauucaaaguagauugg

SEQ ID NO: 3264031 - RNA, 19 nt, Artificial Sequence
  Description of Artificial Sequence: Synthetic oligonucleotide
aaaguagauuggcacaguc

SEQ ID NO: 3264032 - RNA, 19 nt, Artificial Sequence
  Description of Artificial Sequence: Synthetic oligonucleotide
uuuauagcaaaugugacau

SEQ ID NO: 3264033 - RNA, 19 nt, Artificial Sequence
  Description of Artificial Sequence: Synthetic oligonucleotide
ucaaaaugcauucuuuuaa

SEQ ID NO: 3264034 - RNA, 19 nt, Artificial Sequence
  Description of Artificial Sequence: Synthetic oligonucleotide
uaauaaucaaaaugcauuc

SEQ ID NO: 3264035 - RNA, 19 nt, Artificial Sequence
  Description of Artificial Sequence: Synthetic oligonucleotide
ugaaaucuauugcagcuag

SEQ ID NO: 3264036 - RNA, 19 nt, Artificial Sequence
  Description of Artificial Sequence: Synthetic oligonucleotide
aacauugcuucagucaucg

SEQ ID NO: 3264037 - RNA, 19 nt, Artificial Sequence
  Description of Artificial Sequence: Synthetic oligonucleotide
auucuuuuaaguaaggucu

SEQ ID NO: 3264038 - RNA, 19 nt, Artificial Sequence
  Description of Artificial Sequence: Synthetic oligonucleotide
aaguaaggucucuuggaac

SEQ ID NO: 3264039 - RNA, 19 nt, Artificial Sequence
  Description of Artificial Sequence: Synthetic oligonucleotide
aguaucgugguuaauaauc

SEQ ID NO: 3264040 - RNA, 19 nt, Artificial Sequence
  Description of Artificial Sequence: Synthetic oligonucleotide
uauacugaauuuuacuacu

SEQ ID NO: 3264041 - RNA, 19 nt, Artificial Sequence
  Description of Artificial Sequence: Synthetic oligonucleotide
ucuauacugaauuuuacua

SEQ ID NO: 3264042 - RNA, 19 nt, Artificial Sequence
  Description of Artificial Sequence: Synthetic oligonucleotide
aaaguacucaucagaaggg

SEQ ID NO: 3264043 - RNA, 19 nt, Artificial Sequence
  Description of Artificial Sequence: Synthetic oligonucleotide
uauuuaaucuuaauucaaa

SEQ ID NO: 3264044 - RNA, 19 nt, Artificial Sequence
  Description of Artificial Sequence: Synthetic oligonucleotide
ugaaaauucugaaucaauu

SEQ ID NO: 3264045 - RNA, 19 nt, Artificial Sequence
  Description of Artificial Sequence: Synthetic oligonucleotide
caauuuaauucuuuauagc

SEQ ID NO: 3264046 - RNA, 19 nt, Artificial Sequence
  Description of Artificial Sequence: Synthetic oligonucleotide
guuguucuagucuauacug

SEQ ID NO: 3264047 - RNA, 19 nt, Artificial Sequence
  Description of Artificial Sequence: Synthetic oligonucleotide
aagauuggaaguccuaggu

SEQ ID NO: 3264048 - RNA, 19 nt, Artificial Sequence
  Description of Artificial Sequence: Synthetic oligonucleotide
gucgcaacuacucaucugg

SEQ ID NO: 3264049 - RNA, 19 nt, Artificial Sequence
  Description of Artificial Sequence: Synthetic oligonucleotide
aaaaugcauucuuuuaagu

SEQ ID NO: 3264050 - RNA, 19 nt, Artificial Sequence
  Description of Artificial Sequence: Synthetic oligonucleotide
uguacugugaccuggcaga

SEQ ID NO: 3264051 - RNA, 19 nt, Artificial Sequence
  Description of Artificial Sequence: Synthetic oligonucleotide
cauuagacuagcuucugcc

SEQ ID NO: 3264052 - RNA, 19 nt, Artificial Sequence
  Description of Artificial Sequence: Synthetic oligonucleotide
uuuuccuuagucacaggag

SEQ ID NO: 3264053 - RNA, 19 nt, Artificial Sequence
  Description of Artificial Sequence: Synthetic oligonucleotide
ugacauauuuuccuuaguc

SEQ ID NO: 3264054 - RNA, 19 nt, Artificial Sequence
  Description of Artificial Sequence: Synthetic oligonucleotide
aguaucuggaguccuguac

SEQ ID NO: 3264055 - RNA, 19 nt, Artificial Sequence
  Description of Artificial Sequence: Synthetic oligonucleotide
ugugacauauuuuccuuag

SEQ ID NO: 3264056 - RNA, 19 nt, Artificial Sequence
  Description of Artificial Sequence: Synthetic oligonucleotide
uuuuggaaucugaugaacu

SEQ ID NO: 3264057 - RNA, 19 nt, Artificial Sequence
  Description of Artificial Sequence: Synthetic oligonucleotide
aaucaaaaugcauucuuuu

SEQ ID NO: 3264058 - RNA, 19 nt, Artificial Sequence
  Description of Artificial Sequence: Synthetic oligonucleotide
cuauacugaauuuuacuac

SEQ ID NO: 3264059 - RNA, 19 nt, Artificial Sequence
  Description of Artificial Sequence: Synthetic oligonucleotide
aaguacucaucagaagggc

SEQ ID NO: 3264060 - RNA, 19 nt, Artificial Sequence
  Description of Artificial Sequence: Synthetic oligonucleotide
uuuucuaggcgacacuccc

SEQ ID NO: 3264061 - RNA, 19 nt, Artificial Sequence
  Description of Artificial Sequence: Synthetic oligonucleotide
uuuccuuagucacaggagu

SEQ ID NO: 3264062 - RNA, 19 nt, Artificial Sequence
  Description of Artificial Sequence: Synthetic oligonucleotide
ucaacauugcuucagucau

SEQ ID NO: 3264063 - RNA, 19 nt, Artificial Sequence
  Description of Artificial Sequence: Synthetic oligonucleotide
ucguaaaguacucaucaga

SEQ ID NO: 3264064 - RNA, 19 nt, Artificial Sequence
  Description of Artificial Sequence: Synthetic oligonucleotide
guggauuccacauuuguug

SEQ ID NO: 3264065 - RNA, 19 nt, Artificial Sequence
  Description of Artificial Sequence: Synthetic oligonucleotide
agaaugguguucaagauug

SEQ ID NO: 3264066 - RNA, 19 nt, Artificial Sequence
  Description of Artificial Sequence: Synthetic oligonucleotide
ucuuuauagcaaaugugac

SEQ ID NO: 3264067 - RNA, 19 nt, Artificial Sequence
  Description of Artificial Sequence: Synthetic oligonucleotide
ugaacugucgcaacuacuc

SEQ ID NO: 3264068 - RNA, 19 nt, Artificial Sequence
  Description of Artificial Sequence: Synthetic oligonucleotide
uccaugagagacauuggag

SEQ ID NO: 3264069 - RNA, 19 nt, Artificial Sequence
  Description of Artificial Sequence: Synthetic oligonucleotide
aaaucacuucguaaaguac

SEQ ID NO: 3264070 - RNA, 19 nt, Artificial Sequence
  Description of Artificial Sequence: Synthetic oligonucleotide
aguugaaccuucuauauuu

SEQ ID NO: 3264071 - RNA, 19 nt, Artificial Sequence
  Description of Artificial Sequence: Synthetic oligonucleotide
aaucacuucguaaaguacu

SEQ ID NO: 3264072 - RNA, 19 nt, Artificial Sequence
  Description of Artificial Sequence: Synthetic oligonucleotide
ucaugaaaucuauugcagc

SEQ ID NO: 3264073 - RNA, 19 nt, Artificial Sequence
  Description of Artificial Sequence: Synthetic oligonucleotide
uguuguucuagucuauacu

SEQ ID NO: 3264074 - RNA, 19 nt, Artificial Sequence
  Description of Artificial Sequence: Synthetic oligonucleotide
uucugauggagaauggugu

SEQ ID NO: 3264075 - RNA, 19 nt, Artificial Sequence
  Description of Artificial Sequence: Synthetic oligonucleotide
aaucuuaauucaaaguaga

SEQ ID NO: 3264076 - RNA, 19 nt, Artificial Sequence
  Description of Artificial Sequence: Synthetic oligonucleotide
auuuuccuuagucacagga

SEQ ID NO: 3264077 - RNA, 19 nt, Artificial Sequence
  Description of Artificial Sequence: Synthetic oligonucleotide
gaaucugaugaacugucgc

SEQ ID NO: 3264078 - RNA, 19 nt, Artificial Sequence
  Description of Artificial Sequence: Synthetic oligonucleotide
ugacugguggaguugaacc

SEQ ID NO: 3264079 - RNA, 19 nt, Artificial Sequence
  Description of Artificial Sequence: Synthetic oligonucleotide
ucuuucaaugucauccaug

SEQ ID NO: 3264080 - RNA, 19 nt, Artificial Sequence
  Description of Artificial Sequence: Synthetic oligonucleotide
acuagaacuauccucacua

SEQ ID NO: 3264081 - RNA, 19 nt, Artificial Sequence
  Description of Artificial Sequence: Synthetic oligonucleotide
ugcaaaucacuucguaaag

SEQ ID NO: 3264082 - RNA, 19 nt, Artificial Sequence
  Description of Artificial Sequence: Synthetic oligonucleotide
aguugaaaauucugaauca

SEQ ID NO: 3264083 - RNA, 19 nt, Artificial Sequence
  Description of Artificial Sequence: Synthetic oligonucleotide
uuuuaacucaacauugcuu

SEQ ID NO: 3264084 - RNA, 19 nt, Artificial Sequence
  Description of Artificial Sequence: Synthetic oligonucleotide
ucgugguuaauaaucaaaa

SEQ ID NO: 3264085 - RNA, 19 nt, Artificial Sequence
  Description of Artificial Sequence: Synthetic oligonucleotide
aauaaucaaaaugcauucu

SEQ ID NO: 3264086 - RNA, 19 nt, Artificial Sequence
  Description of Artificial Sequence: Synthetic oligonucleotide
ucaagauuggaaguccuag

SEQ ID NO: 3264087 - RNA, 19 nt, Artificial Sequence
  Description of Artificial Sequence: Synthetic oligonucleotide
caaaugugacauauuuucc

SEQ ID NO: 3264088 - RNA, 19 nt, Artificial Sequence
  Description of Artificial Sequence: Synthetic oligonucleotide
aagaugagguacuuuugga

SEQ ID NO: 3264089 - RNA, 19 nt, Artificial Sequence
  Description of Artificial Sequence: Synthetic oligonucleotide
ucuauugcagcuagccuca

SEQ ID NO: 3264090 - RNA, 19 nt, Artificial Sequence
  Description of Artificial Sequence: Synthetic oligonucleotide
uuuuacuacuuccuucaac

SEQ ID NO: 3264091 - RNA, 19 nt, Artificial Sequence
  Description of Artificial Sequence: Synthetic oligonucleotide
aaauucugaaucaauuuaa

SEQ ID NO: 3264092 - RNA, 19 nt, Artificial Sequence
  Description of Artificial Sequence: Synthetic oligonucleotide
uauccucacuacuugaaga

SEQ ID NO: 3264093 - RNA, 19 nt, Artificial Sequence
  Description of Artificial Sequence: Synthetic oligonucleotide
auauuuuccuuagucacag

SEQ ID NO: 3264094 - RNA, 19 nt, Artificial Sequence
  Description of Artificial Sequence: Synthetic oligonucleotide
gcaaaugugacauauuuuc

SEQ ID NO: 3264095 - RNA, 19 nt, Artificial Sequence
  Description of Artificial Sequence: Synthetic oligonucleotide
ucuucugaaucacuagaac

SEQ ID NO: 3264096 - RNA, 19 nt, Artificial Sequence
  Description of Artificial Sequence: Synthetic oligonucleotide
cuuucaaugucauccauga

SEQ ID NO: 3264097 - RNA, 19 nt, Artificial Sequence
  Description of Artificial Sequence: Synthetic oligonucleotide
aauucaaaguagauuggca

SEQ ID NO: 3264098 - RNA, 19 nt, Artificial Sequence
  Description of Artificial Sequence: Synthetic oligonucleotide
ugcauucuuuuaaguaagg

SEQ ID NO: 3264099 - RNA, 19 nt, Artificial Sequence
  Description of Artificial Sequence: Synthetic oligonucleotide
uuugaaaacugugacuggu

SEQ ID NO: 3264100 - RNA, 19 nt, Artificial Sequence
  Description of Artificial Sequence: Synthetic oligonucleotide
gucacuuucugauucaguc

SEQ ID NO: 3264101 - RNA, 19 nt, Artificial Sequence
  Description of Artificial Sequence: Synthetic oligonucleotide
ugcuaggauguccugagcu

SEQ ID NO: 3264102 - RNA, 19 nt, Artificial Sequence
  Description of Artificial Sequence: Synthetic oligonucleotide
caagauuggaaguccuagg

SEQ ID NO: 3264103 - RNA, 19 nt, Artificial Sequence
  Description of Artificial Sequence: Synthetic oligonucleotide
auuggagacaucuugucuu

SEQ ID NO: 3264104 - RNA, 19 nt, Artificial Sequence
  Description of Artificial Sequence: Synthetic oligonucleotide
uguccugagcuauaugccc

SEQ ID NO: 3264105 - RNA, 19 nt, Artificial Sequence
  Description of Artificial Sequence: Synthetic oligonucleotide
aauaguauaaaacacagag

SEQ ID NO: 3264106 - RNA, 19 nt, Artificial Sequence
  Description of Artificial Sequence: Synthetic oligonucleotide
auuaaaagcacuaaaacac

SEQ ID NO: 3264107 - RNA, 19 nt, Artificial Sequence
  Description of Artificial Sequence: Synthetic oligonucleotide
aaacccaugcuauacaccc

SEQ ID NO: 3264108 - RNA, 19 nt, Artificial Sequence
  Description of Artificial Sequence: Synthetic oligonucleotide
uauuacaucagccuuacag

SEQ ID NO: 3264109 - RNA, 19 nt, Artificial Sequence
  Description of Artificial Sequence: Synthetic oligonucleotide
aaugguuuauuacaucagc

SEQ ID NO: 3264110 - RNA, 19 nt, Artificial Sequence
  Description of Artificial Sequence: Synthetic oligonucleotide
auauuaaaagcacuaaaac

SEQ ID NO: 3264111 - RNA, 19 nt, Artificial Sequence
  Description of Artificial Sequence: Synthetic oligonucleotide
agguacauaaaauagcagc

SEQ ID NO: 3264112 - RNA, 19 nt, Artificial Sequence
  Description of Artificial Sequence: Synthetic oligonucleotide
acuacaauaguauaaaaca

SEQ ID NO: 3264113 - RNA, 19 nt, Artificial Sequence
  Description of Artificial Sequence: Synthetic oligonucleotide
aaagcaauggguuacagau

SEQ ID NO: 3264114 - RNA, 19 nt, Artificial Sequence
  Description of Artificial Sequence: Synthetic oligonucleotide
augaugaaaauguaagagc

SEQ ID NO: 3264115 - RNA, 19 nt, Artificial Sequence
  Description of Artificial Sequence: Synthetic oligonucleotide
aauacuacuacuucauuga

SEQ ID NO: 3264116 - RNA, 19 nt, Artificial Sequence
  Description of Artificial Sequence: Synthetic oligonucleotide
uguggcaccaaucaaaccc

SEQ ID NO: 3264117 - RNA, 19 nt, Artificial Sequence
  Description of Artificial Sequence: Synthetic oligonucleotide
aacuacaauaguauaaaac

SEQ ID NO: 3264118 - RNA, 19 nt, Artificial Sequence
  Description of Artificial Sequence: Synthetic oligonucleotide
aacacaauacuacuacuuc

SEQ ID NO: 3264119 - RNA, 19 nt, Artificial Sequence
  Description of Artificial Sequence: Synthetic oligonucleotide
ugaugaaaauguaagagcu

SEQ ID NO: 3264120 - RNA, 19 nt, Artificial Sequence
  Description of Artificial Sequence: Synthetic oligonucleotide
aaaaggauauuaaaagcac

SEQ ID NO: 3264121 - RNA, 19 nt, Artificial Sequence
  Description of Artificial Sequence: Synthetic oligonucleotide
aauagcagcagacccaaag

SEQ ID NO: 3264122 - RNA, 19 nt, Artificial Sequence
  Description of Artificial Sequence: Synthetic oligonucleotide
aguagauuuaauccggagg

SEQ ID NO: 3264123 - RNA, 19 nt, Artificial Sequence
  Description of Artificial Sequence: Synthetic oligonucleotide
uuuagagcaaguuugacau

SEQ ID NO: 3264124 - RNA, 19 nt, Artificial Sequence
  Description of Artificial Sequence: Synthetic oligonucleotide
uacuucauugauaaaagug

SEQ ID NO: 3264125 - RNA, 19 nt, Artificial Sequence
  Description of Artificial Sequence: Synthetic oligonucleotide
aagaucacagaaguaaugg

SEQ ID NO: 3264126 - RNA, 19 nt, Artificial Sequence
  Description of Artificial Sequence: Synthetic oligonucleotide
acauccuuauuucucaggc

SEQ ID NO: 3264127 - RNA, 19 nt, Artificial Sequence
  Description of Artificial Sequence: Synthetic oligonucleotide
agcaauggguuacagaugg

SEQ ID NO: 3264128 - RNA, 19 nt, Artificial Sequence
  Description of Artificial Sequence: Synthetic oligonucleotide
uucaguagauuuaauccgg

SEQ ID NO: 3264129 - RNA, 19 nt, Artificial Sequence
  Description of Artificial Sequence: Synthetic oligonucleotide
cuugauaugacaucacagc

SEQ ID NO: 3264130 - RNA, 19 nt, Artificial Sequence
  Description of Artificial Sequence: Synthetic oligonucleotide
aaaauguaagagcucagga

SEQ ID NO: 3264131 - RNA, 19 nt, Artificial Sequence
  Description of Artificial Sequence: Synthetic oligonucleotide
aauguaagagcucaggaua

SEQ ID NO: 3264132 - RNA, 19 nt, Artificial Sequence
  Description of Artificial Sequence: Synthetic oligonucleotide
gaaguaaugguuuauuaca

SEQ ID NO: 3264133 - RNA, 19 nt, Artificial Sequence
  Description of Artificial Sequence: Synthetic oligonucleotide
acuacuacuucauugauaa

SEQ ID NO: 3264134 - RNA, 19 nt, Artificial Sequence
  Description of Artificial Sequence: Synthetic oligonucleotide
cuucaguagauuuaauccg

SEQ ID NO: 3264135 - RNA, 19 nt, Artificial Sequence
  Description of Artificial Sequence: Synthetic oligonucleotide
uugauaaaagugcuggagc

SEQ ID NO: 3264136 - RNA, 19 nt, Artificial Sequence
  Description of Artificial Sequence: Synthetic oligonucleotide
agcauuguaaagcaauggg

SEQ ID NO: 3264137 - RNA, 19 nt, Artificial Sequence
  Description of Artificial Sequence: Synthetic oligonucleotide
cuucuuuagagcaaguuug

SEQ ID NO: 3264138 - RNA, 19 nt, Artificial Sequence
  Description of Artificial Sequence: Synthetic oligonucleotide
acucuuagcaugcagacug

SEQ ID NO: 3264139 - RNA, 19 nt, Artificial Sequence
  Description of Artificial Sequence: Synthetic oligonucleotide
aaagcacuaaaacacaaua

SEQ ID NO: 3264140 - RNA, 19 nt, Artificial Sequence
  Description of Artificial Sequence: Synthetic oligonucleotide
uugauaugacaucacagca

SEQ ID NO: 3264141 - RNA, 19 nt, Artificial Sequence
  Description of Artificial Sequence: Synthetic oligonucleotide
agcacuaaaacacaauacu

SEQ ID NO: 3264142 - RNA, 19 nt, Artificial Sequence
  Description of Artificial Sequence: Synthetic oligonucleotide
gaaaaggauauuaaaagca

SEQ ID NO: 3264143 - RNA, 19 nt, Artificial Sequence
  Description of Artificial Sequence: Synthetic oligonucleotide
ggucauaugacauugcugc

SEQ ID NO: 3264144 - RNA, 19 nt, Artificial Sequence
  Description of Artificial Sequence: Synthetic oligonucleotide
cauacaacuucuuuagagc

SEQ ID NO: 3264145 - RNA, 19 nt, Artificial Sequence
  Description of Artificial Sequence: Synthetic oligonucleotide
aaauguaagagcucaggau

SEQ ID NO: 3264146 - RNA, 19 nt, Artificial Sequence
  Description of Artificial Sequence: Synthetic oligonucleotide
gaucacaggauucagcaug

SEQ ID NO: 3264147 - RNA, 19 nt, Artificial Sequence
  Description of Artificial Sequence: Synthetic oligonucleotide
agugcugaaggcuuuggac

SEQ ID NO: 3264148 - RNA, 19 nt, Artificial Sequence
  Description of Artificial Sequence: Synthetic oligonucleotide
aguuugacauccuuauuuc

SEQ ID NO: 3264149 - RNA, 19 nt, Artificial Sequence
  Description of Artificial Sequence: Synthetic oligonucleotide
uagaucacaggauucagca

SEQ ID NO: 3264150 - RNA, 19 nt, Artificial Sequence
  Description of Artificial Sequence: Synthetic oligonucleotide
cacuaaaacacaauacuac

SEQ ID NO: 3264151 - RNA, 19 nt, Artificial Sequence
  Description of Artificial Sequence: Synthetic oligonucleotide
ccaaauaucauccaggaac

SEQ ID NO: 3264152 - RNA, 19 nt, Artificial Sequence
  Description of Artificial Sequence: Synthetic oligonucleotide
acacagaggacacuuuccc

SEQ ID NO: 3264153 - RNA, 19 nt, Artificial Sequence
  Description of Artificial Sequence: Synthetic oligonucleotide
ugcuauacaccccaaauau

SEQ ID NO: 3264154 - RNA, 19 nt, Artificial Sequence
  Description of Artificial Sequence: Synthetic oligonucleotide
guagauuuaauccggagga

SEQ ID NO: 3264155 - RNA, 19 nt, Artificial Sequence
  Description of Artificial Sequence: Synthetic oligonucleotide
gaaaauguaagagcucagg

SEQ ID NO: 3264156 - RNA, 19 nt, Artificial Sequence
  Description of Artificial Sequence: Synthetic oligonucleotide
acaaacuugauaugacauc

SEQ ID NO: 3264157 - RNA, 19 nt, Artificial Sequence
  Description of Artificial Sequence: Synthetic oligonucleotide
agaagacagcaacagcugc

SEQ ID NO: 3264158 - RNA, 19 nt, Artificial Sequence
  Description of Artificial Sequence: Synthetic oligonucleotide
uuucucaggcuguagauca

SEQ ID NO: 3264159 - RNA, 19 nt, Artificial Sequence
  Description of Artificial Sequence: Synthetic oligonucleotide
aagcacuaaaacacaauac

SEQ ID NO: 3264160 - RNA, 19 nt, Artificial Sequence
  Description of Artificial Sequence: Synthetic oligonucleotide
acccaaagaagacagcaac

SEQ ID NO: 3264161 - RNA, 19 nt, Artificial Sequence
  Description of Artificial Sequence: Synthetic oligonucleotide
gauauuaaaagcacuaaaa

SEQ ID NO: 3264162 - RNA, 19 nt, Artificial Sequence
  Description of Artificial Sequence: Synthetic oligonucleotide
uuaauccggaggaugcugg

SEQ ID NO: 3264163 - RNA, 19 nt, Artificial Sequence
  Description of Artificial Sequence: Synthetic oligonucleotide
aaaugcacucuuagcaugc

SEQ ID NO: 3264164 - RNA, 19 nt, Artificial Sequence
  Description of Artificial Sequence: Synthetic oligonucleotide
aagagcucaggauacucag

SEQ ID NO: 3264165 - RNA, 19 nt, Artificial Sequence
  Description of Artificial Sequence: Synthetic oligonucleotide
guaaugguuuauuacauca

SEQ ID NO: 3264166 - RNA, 19 nt, Artificial Sequence
  Description of Artificial Sequence: Synthetic oligonucleotide
caauacuacuacuucauug

SEQ ID NO: 3264167 - RNA, 19 nt, Artificial Sequence
  Description of Artificial Sequence: Synthetic oligonucleotide
uaaugguuuauuacaucag

SEQ ID NO: 3264168 - RNA, 19 nt, Artificial Sequence
  Description of Artificial Sequence: Synthetic oligonucleotide
aucagccuuacagaaaugc

SEQ ID NO: 3264169 - RNA, 19 nt, Artificial Sequence
  Description of Artificial Sequence: Synthetic oligonucleotide
aagugcuggagcaagacag

SEQ ID NO: 3264170 - RNA, 19 nt, Artificial Sequence
  Description of Artificial Sequence: Synthetic oligonucleotide
aacuugauaugacaucaca

SEQ ID NO: 3264171 - RNA, 19 nt, Artificial Sequence
  Description of Artificial Sequence: Synthetic oligonucleotide
uuauuucucaggcuguaga

SEQ ID NO: 3264172 - RNA, 19 nt, Artificial Sequence
  Description of Artificial Sequence: Synthetic oligonucleotide
uuugacauccuuauuucuc

SEQ ID NO: 3264173 - RNA, 19 nt, Artificial Sequence
  Description of Artificial Sequence: Synthetic oligonucleotide
uggagcugacugaugaugg

SEQ ID NO: 3264174 - RNA, 19 nt, Artificial Sequence
  Description of Artificial Sequence: Synthetic oligonucleotide
auugauaaaagugcuggag

SEQ ID NO: 3264175 - RNA, 19 nt, Artificial Sequence
  Description of Artificial Sequence: Synthetic oligonucleotide
aacacagaggacacuuucc

SEQ ID NO: 3264176 - RNA, 19 nt, Artificial Sequence
  Description of Artificial Sequence: Synthetic oligonucleotide
augguuuauuacaucagcc

SEQ ID NO: 3264177 - RNA, 19 nt, Artificial Sequence
  Description of Artificial Sequence: Synthetic oligonucleotide
aguaaugguuuauuacauc

SEQ ID NO: 3264178 - RNA, 19 nt, Artificial Sequence
  Description of Artificial Sequence: Synthetic oligonucleotide
gauuuaauccggaggaugc

SEQ ID NO: 3264179 - RNA, 19 nt, Artificial Sequence
  Description of Artificial Sequence: Synthetic oligonucleotide
cuauacaccccaaauauca

SEQ ID NO: 3264180 - RNA, 19 nt, Artificial Sequence
  Description of Artificial Sequence: Synthetic oligonucleotide
auacaacuucuuuagagca

SEQ ID NO: 3264181 - RNA, 19 nt, Artificial Sequence
  Description of Artificial Sequence: Synthetic oligonucleotide
auccuuauuucucaggcug

SEQ ID NO: 3264182 - RNA, 19 nt, Artificial Sequence
  Description of Artificial Sequence: Synthetic oligonucleotide
uagagcaaguuugacaucc

SEQ ID NO: 3264183 - RNA, 19 nt, Artificial Sequence
  Description of Artificial Sequence: Synthetic oligonucleotide
auaguauaaaacacagagg

SEQ ID NO: 3264184 - RNA, 19 nt, Artificial Sequence
  Description of Artificial Sequence: Synthetic oligonucleotide
ccuucaguagauuuaaucc

SEQ ID NO: 3264185 - RNA, 19 nt, Artificial Sequence
  Description of Artificial Sequence: Synthetic oligonucleotide
augaaaauguaagagcuca

SEQ ID NO: 3264186 - RNA, 19 nt, Artificial Sequence
  Description of Artificial Sequence: Synthetic oligonucleotide
uugacauccuuauuucuca

SEQ ID NO: 3264187 - RNA, 19 nt, Artificial Sequence
  Description of Artificial Sequence: Synthetic oligonucleotide
auggguuacagauggccac

SEQ ID NO: 3264188 - RNA, 19 nt, Artificial Sequence
  Description of Artificial Sequence: Synthetic oligonucleotide
aacaaacuugauaugacau

SEQ ID NO: 3264189 - RNA, 19 nt, Artificial Sequence
  Description of Artificial Sequence: Synthetic oligonucleotide
aaaggauauuaaaagcacu

SEQ ID NO: 3264190 - RNA, 19 nt, Artificial Sequence
  Description of Artificial Sequence: Synthetic oligonucleotide
ugcacucuuagcaugcaga

SEQ ID NO: 3264191 - RNA, 19 nt, Artificial Sequence
  Description of Artificial Sequence: Synthetic oligonucleotide
aaagaucacagaaguaaug

SEQ ID NO: 3264192 - RNA, 19 nt, Artificial Sequence
  Description of Artificial Sequence: Synthetic oligonucleotide
cagaaaugcacucuuagca

SEQ ID NO: 3264193 - RNA, 19 nt, Artificial Sequence
  Description of Artificial Sequence: Synthetic oligonucleotide
cacauaacggucauaugac

SEQ ID NO: 3264194 - RNA, 19 nt, Artificial Sequence
  Description of Artificial Sequence: Synthetic oligonucleotide
uaugacaucacagcauugu

SEQ ID NO: 3264195 - RNA, 19 nt, Artificial Sequence
  Description of Artificial Sequence: Synthetic oligonucleotide
ucaggauacucaguguagg

SEQ ID NO: 3264196 - RNA, 19 nt, Artificial Sequence
  Description of Artificial Sequence: Synthetic oligonucleotide
gaacaaacuugauaugaca

SEQ ID NO: 3264197 - RNA, 19 nt, Artificial Sequence
  Description of Artificial Sequence: Synthetic oligonucleotide
acacaauacuacuacuuca

SEQ ID NO: 3264198 - RNA, 19 nt, Artificial Sequence
  Description of Artificial Sequence: Synthetic oligonucleotide
ucaaacccaugcuauacac

SEQ ID NO: 3264199 - RNA, 19 nt, Artificial Sequence
  Description of Artificial Sequence: Synthetic oligonucleotide
gagcucaggauacucagug

SEQ ID NO: 3264200 - RNA, 19 nt, Artificial Sequence
  Description of Artificial Sequence: Synthetic oligonucleotide
uaagagcucaggauacuca

SEQ ID NO: 3264201 - RNA, 19 nt, Artificial Sequence
  Description of Artificial Sequence: Synthetic oligonucleotide
uucagcaugggaacuacaa

SEQ ID NO: 3264202 - RNA, 19 nt, Artificial Sequence
  Description of Artificial Sequence: Synthetic oligonucleotide
gauggcugcagguacauaa

SEQ ID NO: 3264203 - RNA, 19 nt, Artificial Sequence
  Description of Artificial Sequence: Synthetic oligonucleotide
aaggcuuuggaccugccuu

SEQ ID NO: 3264204 - RNA, 19 nt, Artificial Sequence
  Description of Artificial Sequence: Synthetic oligonucleotide
gacauccuuauuucucagg

SEQ ID NO: 3264205 - RNA, 19 nt, Artificial Sequence
  Description of Artificial Sequence: Synthetic oligonucleotide
aauaaguagaaauaugggg

SEQ ID NO: 3264206 - RNA, 19 nt, Artificial Sequence
  Description of Artificial Sequence: Synthetic oligonucleotide
uuugugauugcucugaacg

SEQ ID NO: 3264207 - RNA, 19 nt, Artificial Sequence
  Description of Artificial Sequence: Synthetic oligonucleotide
ucuagauaugucaagaacg

SEQ ID NO: 3264208 - RNA, 19 nt, Artificial Sequence
  Description of Artificial Sequence: Synthetic oligonucleotide
uuaauggcaaacuauauug

SEQ ID NO: 3264209 - RNA, 19 nt, Artificial Sequence
  Description of Artificial Sequence: Synthetic oligonucleotide
aaaauucugacuuacggca

SEQ ID NO: 3264210 - RNA, 19 nt, Artificial Sequence
  Description of Artificial Sequence: Synthetic oligonucleotide
ucgauuaaacagaugaugg

SEQ ID NO: 3264211 - RNA, 19 nt, Artificial Sequence
  Description of Artificial Sequence: Synthetic oligonucleotide
aauaguugcucacuuacag

SEQ ID NO: 3264212 - RNA, 19 nt, Artificial Sequence
  Description of Artificial Sequence: Synthetic oligonucleotide
auuacagccacauaaagca

SEQ ID NO: 3264213 - RNA, 19 nt, Artificial Sequence
  Description of Artificial Sequence: Synthetic oligonucleotide
uuuccuaucacugaaaaug

SEQ ID NO: 3264214 - RNA, 19 nt, Artificial Sequence
  Description of Artificial Sequence: Synthetic oligonucleotide
ugugacuauuaauacaugg

SEQ ID NO: 3264215 - RNA, 19 nt, Artificial Sequence
  Description of Artificial Sequence: Synthetic oligonucleotide
auuguccaaaaccagauuc

SEQ ID NO: 3264216 - RNA, 19 nt, Artificial Sequence
  Description of Artificial Sequence: Synthetic oligonucleotide
ucaagaacgauuuauuuac

SEQ ID NO: 3264217 - RNA, 19 nt, Artificial Sequence
  Description of Artificial Sequence: Synthetic oligonucleotide
guaaaauucugacuuacgg

SEQ ID NO: 3264218 - RNA, 19 nt, Artificial Sequence
  Description of Artificial Sequence: Synthetic oligonucleotide
cagguuauggauuacagcc

SEQ ID NO: 3264219 - RNA, 19 nt, Artificial Sequence
  Description of Artificial Sequence: Synthetic oligonucleotide
uuuggaaugagauuuagau

SEQ ID NO: 3264220 - RNA, 19 nt, Artificial Sequence
  Description of Artificial Sequence: Synthetic oligonucleotide
aauaaagguaagaggauac

SEQ ID NO: 3264221 - RNA, 19 nt, Artificial Sequence
  Description of Artificial Sequence: Synthetic oligonucleotide
aacauugcuaacaacaaag

SEQ ID NO: 3264222 - RNA, 19 nt, Artificial Sequence
  Description of Artificial Sequence: Synthetic oligonucleotide
ugaagugugcaaauuagag

SEQ ID NO: 3264223 - RNA, 19 nt, Artificial Sequence
  Description of Artificial Sequence: Synthetic oligonucleotide
acuuacggcaaacuguucc

SEQ ID NO: 3264224 - RNA, 19 nt, Artificial Sequence
  Description of Artificial Sequence: Synthetic oligonucleotide
auugacauuaaacccaaag

SEQ ID NO: 3264225 - RNA, 19 nt, Artificial Sequence
  Description of Artificial Sequence: Synthetic oligonucleotide
auaaucucgucucaguuuc

SEQ ID NO: 3264226 - RNA, 19 nt, Artificial Sequence
  Description of Artificial Sequence: Synthetic oligonucleotide
uaagauagguaaaauagaa

SEQ ID NO: 3264227 - RNA, 19 nt, Artificial Sequence
  Description of Artificial Sequence: Synthetic oligonucleotide
uagaucaaugaaaagauau

SEQ ID NO: 3264228 - RNA, 19 nt, Artificial Sequence
  Description of Artificial Sequence: Synthetic oligonucleotide
cuaacaacaaagcagcuac

SEQ ID NO: 3264229 - RNA, 19 nt, Artificial Sequence
  Description of Artificial Sequence: Synthetic oligonucleotide
uuuaaggcgauauauucca

SEQ ID NO: 3264230 - RNA, 19 nt, Artificial Sequence
  Description of Artificial Sequence: Synthetic oligonucleotide
gaacgauuuauuuacaaca

SEQ ID NO: 3264231 - RNA, 19 nt, Artificial Sequence
  Description of Artificial Sequence: Synthetic oligonucleotide
aaaaccaauuaagaucuac

SEQ ID NO: 3264232 - RNA, 19 nt, Artificial Sequence
  Description of Artificial Sequence: Synthetic oligonucleotide
agaacgauuuauuuacaac

SEQ ID NO: 3264233 - RNA, 19 nt, Artificial Sequence
  Description of Artificial Sequence: Synthetic oligonucleotide
acauaaagcaauuacugca

SEQ ID NO: 3264234 - RNA, 19 nt, Artificial Sequence
  Description of Artificial Sequence: Synthetic oligonucleotide
gagaggaugucuucgaggg

SEQ ID NO: 3264235 - RNA, 19 nt, Artificial Sequence
  Description of Artificial Sequence: Synthetic oligonucleotide
ugagauuuagaugaugugc

SEQ ID NO: 3264236 - RNA, 19 nt, Artificial Sequence
  Description of Artificial Sequence: Synthetic oligonucleotide
gauuaaacagaugauggcc

SEQ ID NO: 3264237 - RNA, 19 nt, Artificial Sequence
  Description of Artificial Sequence: Synthetic oligonucleotide
uuuaggguggcccaauaag

SEQ ID NO: 3264238 - RNA, 19 nt, Artificial Sequence
  Description of Artificial Sequence: Synthetic oligonucleotide
gcuaauaccgcuaauaccg

SEQ ID NO: 3264239 - RNA, 19 nt, Artificial Sequence
  Description of Artificial Sequence: Synthetic oligonucleotide
gagguuuuaaaauaagaca

SEQ ID NO: 3264240 - RNA, 19 nt, Artificial Sequence
  Description of Artificial Sequence: Synthetic oligonucleotide
aacgauuuauuuacaacac

SEQ ID NO: 3264241 - RNA, 19 nt, Artificial Sequence
  Description of Artificial Sequence: Synthetic oligonucleotide
ucaggaaggaaccgcagcg

SEQ ID NO: 3264242 - RNA, 19 nt, Artificial Sequence
  Description of Artificial Sequence: Synthetic oligonucleotide
cuagguuucuaacucaucc

SEQ ID NO: 3264243 - RNA, 19 nt, Artificial Sequence
  Description of Artificial Sequence: Synthetic oligonucleotide
agcuguacaggguaaauuc

SEQ ID NO: 3264244 - RNA, 19 nt, Artificial Sequence
  Description of Artificial Sequence: Synthetic oligonucleotide
aguucugaauguuucaaag

SEQ ID NO: 3264245 - RNA, 19 nt, Artificial Sequence
  Description of Artificial Sequence: Synthetic oligonucleotide
aguagaaauauggggaccc

SEQ ID NO: 3264246 - RNA, 19 nt, Artificial Sequence
  Description of Artificial Sequence: Synthetic oligonucleotide
aaugagauuuagaugaugu

SEQ ID NO: 3264247 - RNA, 19 nt, Artificial Sequence
  Description of Artificial Sequence: Synthetic oligonucleotide
uccaaaaccagauucaaua

SEQ ID NO: 3264248 - RNA, 19 nt, Artificial Sequence
  Description of Artificial Sequence: Synthetic oligonucleotide
ugacuauuaauacauggaa

SEQ ID NO: 3264249 - RNA, 19 nt, Artificial Sequence
  Description of Artificial Sequence: Synthetic oligonucleotide
augucuucgagggagacgc

SEQ ID NO: 3264250 - RNA, 19 nt, Artificial Sequence
  Description of Artificial Sequence: Synthetic oligonucleotide
auaaaacucauauuuuaga

SEQ ID NO: 3264251 - RNA, 19 nt, Artificial Sequence
  Description of Artificial Sequence: Synthetic oligonucleotide
uuagaggaaaaccaauuaa

SEQ ID NO: 3264252 - RNA, 19 nt, Artificial Sequence
  Description of Artificial Sequence: Synthetic oligonucleotide
aaagcaauuacugcacaag

SEQ ID NO: 3264253 - RNA, 19 nt, Artificial Sequence
  Description of Artificial Sequence: Synthetic oligonucleotide
aagguaagaggauacagua

SEQ ID NO: 3264254 - RNA, 19 nt, Artificial Sequence
  Description of Artificial Sequence: Synthetic oligonucleotide
acaccaaugaauucacuag

SEQ ID NO: 3264255 - RNA, 19 nt, Artificial Sequence
  Description of Artificial Sequence: Synthetic oligonucleotide
uaaccuguaaaauucugac

SEQ ID NO: 3264256 - RNA, 19 nt, Artificial Sequence
  Description of Artificial Sequence: Synthetic oligonucleotide
gaugaauguguuaaugaag

SEQ ID NO: 3264257 - RNA, 19 nt, Artificial Sequence
  Description of Artificial Sequence: Synthetic oligonucleotide
aucaguuuagguccgcgcg

SEQ ID NO: 3264258 - RNA, 19 nt, Artificial Sequence
  Description of Artificial Sequence: Synthetic oligonucleotide
uuuccuaacgucguguucc

SEQ ID NO: 3264259 - RNA, 19 nt, Artificial Sequence
  Description of Artificial Sequence: Synthetic oligonucleotide
accaauuaagaucuacgag

SEQ ID NO: 3264260 - RNA, 19 nt, Artificial Sequence
  Description of Artificial Sequence: Synthetic oligonucleotide
uggcaaacuauauugggug

SEQ ID NO: 3264261 - RNA, 19 nt, Artificial Sequence
  Description of Artificial Sequence: Synthetic oligonucleotide
aaguagaaauauggggacc

SEQ ID NO: 3264262 - RNA, 19 nt, Artificial Sequence
  Description of Artificial Sequence: Synthetic oligonucleotide
aauauggggacccaugcuu

SEQ ID NO: 3264263 - RNA, 19 nt, Artificial Sequence
  Description of Artificial Sequence: Synthetic oligonucleotide
gguaagaggauacaguacc

SEQ ID NO: 3264264 - RNA, 19 nt, Artificial Sequence
  Description of Artificial Sequence: Synthetic oligonucleotide
uuuagaggaaaaccaauua

SEQ ID NO: 3264265 - RNA, 19 nt, Artificial Sequence
  Description of Artificial Sequence: Synthetic oligonucleotide
uaaagguaagaggauacag

SEQ ID NO: 3264266 - RNA, 19 nt, Artificial Sequence
  Description of Artificial Sequence: Synthetic oligonucleotide
aauggcaguggaaaccggc

SEQ ID NO: 3264267 - RNA, 19 nt, Artificial Sequence
  Description of Artificial Sequence: Synthetic oligonucleotide
aaccagauucaauaaauua

SEQ ID NO: 3264268 - RNA, 19 nt, Artificial Sequence
  Description of Artificial Sequence: Synthetic oligonucleotide
gauuacagccacauaaagc

SEQ ID NO: 3264269 - RNA, 19 nt, Artificial Sequence
  Description of Artificial Sequence: Synthetic oligonucleotide
aagcaauuacugcacaagu

SEQ ID NO: 3264270 - RNA, 19 nt, Artificial Sequence
  Description of Artificial Sequence: Synthetic oligonucleotide
uuuugauuauaaaacucau

SEQ ID NO: 3264271 - RNA, 19 nt, Artificial Sequence
  Description of Artificial Sequence: Synthetic oligonucleotide
uaugaugaauguguuaaug

SEQ ID NO: 3264272 - RNA, 19 nt, Artificial Sequence
  Description of Artificial Sequence: Synthetic oligonucleotide
agagauacagcuguacagg

SEQ ID NO: 3264273 - RNA, 19 nt, Artificial Sequence
  Description of Artificial Sequence: Synthetic oligonucleotide
uuuuagaggaaaaccaauu

SEQ ID NO: 3264274 - RNA, 19 nt, Artificial Sequence
  Description of Artificial Sequence: Synthetic oligonucleotide
uuggaaugagauuuagaug

SEQ ID NO: 3264275 - RNA, 19 nt, Artificial Sequence
  Description of Artificial Sequence: Synthetic oligonucleotide
aacccuuugaccccugucu

SEQ ID NO: 3264276 - RNA, 19 nt, Artificial Sequence
  Description of Artificial Sequence: Synthetic oligonucleotide
uuaugcaagcggaaucucc

SEQ ID NO: 3264277 - RNA, 19 nt, Artificial Sequence
  Description of Artificial Sequence: Synthetic oligonucleotide
caauaaauuaauggcaaac

SEQ ID NO: 3264278 - RNA, 19 nt, Artificial Sequence
  Description of Artificial Sequence: Synthetic oligonucleotide
uccaguuugugauugcucu

SEQ ID NO: 3264279 - RNA, 19 nt, Artificial Sequence
  Description of Artificial Sequence: Synthetic oligonucleotide
uacaguaccaggacgugca

SEQ ID NO: 3264280 - RNA, 19 nt, Artificial Sequence
  Description of Artificial Sequence: Synthetic oligonucleotide
auuagaguuuaugcaagcg

SEQ ID NO: 3264281 - RNA, 19 nt, Artificial Sequence
  Description of Artificial Sequence: Synthetic oligonucleotide
auuaagaucuacgagcuaa

SEQ ID NO: 3264282 - RNA, 19 nt, Artificial Sequence
  Description of Artificial Sequence: Synthetic oligonucleotide
ugcuaauaccgcuaauacc

SEQ ID NO: 3264283 - RNA, 19 nt, Artificial Sequence
  Description of Artificial Sequence: Synthetic oligonucleotide
aaagguaagaggauacagu

SEQ ID NO: 3264284 - RNA, 19 nt, Artificial Sequence
  Description of Artificial Sequence: Synthetic oligonucleotide
aacaacaaagcagcuaccu

SEQ ID NO: 3264285 - RNA, 19 nt, Artificial Sequence
  Description of Artificial Sequence: Synthetic oligonucleotide
aggauacaguaccaggacg

SEQ ID NO: 3264286 - RNA, 19 nt, Artificial Sequence
  Description of Artificial Sequence: Synthetic oligonucleotide
gaauuauauuuauagagau

SEQ ID NO: 3264287 - RNA, 19 nt, Artificial Sequence
  Description of Artificial Sequence: Synthetic oligonucleotide
auagagauacagcuguaca

SEQ ID NO: 3264288 - RNA, 19 nt, Artificial Sequence
  Description of Artificial Sequence: Synthetic oligonucleotide
aaauaaagguaagaggaua

SEQ ID NO: 3264289 - RNA, 19 nt, Artificial Sequence
  Description of Artificial Sequence: Synthetic oligonucleotide
uuguccaaaaccagauuca

SEQ ID NO: 3264290 - RNA, 19 nt, Artificial Sequence
  Description of Artificial Sequence: Synthetic oligonucleotide
guacaggguaaauucacag

SEQ ID NO: 3264291 - RNA, 19 nt, Artificial Sequence
  Description of Artificial Sequence: Synthetic oligonucleotide
acauugcuaacaacaaagc

SEQ ID NO: 3264292 - RNA, 19 nt, Artificial Sequence
  Description of Artificial Sequence: Synthetic oligonucleotide
aaauauggggacccaugcu

SEQ ID NO: 3264293 - RNA, 19 nt, Artificial Sequence
  Description of Artificial Sequence: Synthetic oligonucleotide
uacaggguaaauucacagc

SEQ ID NO: 3264294 - RNA, 19 nt, Artificial Sequence
  Description of Artificial Sequence: Synthetic oligonucleotide
uguguuaaugaagagguuu

SEQ ID NO: 3264295 - RNA, 19 nt, Artificial Sequence
  Description of Artificial Sequence: Synthetic oligonucleotide
uuccuaucacugaaaaugu

SEQ ID NO: 3264296 - RNA, 19 nt, Artificial Sequence
  Description of Artificial Sequence: Synthetic oligonucleotide
uguacaggguaaauucaca

SEQ ID NO: 3264297 - RNA, 19 nt, Artificial Sequence
  Description of Artificial Sequence: Synthetic oligonucleotide
aguaccaggacgugcagcu

SEQ ID NO: 3264298 - RNA, 19 nt, Artificial Sequence
  Description of Artificial Sequence: Synthetic oligonucleotide
gaggaugucuucgagggag

SEQ ID NO: 3264299 - RNA, 19 nt, Artificial Sequence
  Description of Artificial Sequence: Synthetic oligonucleotide
agguuucuaacucauccug

SEQ ID NO: 3264300 - RNA, 19 nt, Artificial Sequence
  Description of Artificial Sequence: Synthetic oligonucleotide
cucgauuaaacagaugaug

SEQ ID NO: 3264301 - RNA, 19 nt, Artificial Sequence
  Description of Artificial Sequence: Synthetic oligonucleotide
ggcgauauauuccaguuug

SEQ ID NO: 3264302 - RNA, 19 nt, Artificial Sequence
  Description of Artificial Sequence: Synthetic oligonucleotide
cuuacggcaaacuguuccc

SEQ ID NO: 3264303 - RNA, 19 nt, Artificial Sequence
  Description of Artificial Sequence: Synthetic oligonucleotide
cuacacuacagaagcauug

SEQ ID NO: 3264304 - RNA, 19 nt, Artificial Sequence
  Description of Artificial Sequence: Synthetic oligonucleotide
gccaaucucgauuaaacag

SEQ ID NO: 3264305 - RNA, 19 nt, Artificial Sequence
  Description of Artificial Sequence: Synthetic oligonucleotide
aacucagagauccaccugc

SEQ ID NO: 3264306 - RNA, 19 nt, Artificial Sequence
  Description of Artificial Sequence: Synthetic oligonucleotide
ugugccaccacuaccaggc

SEQ ID NO: 3264307 - RNA, 19 nt, Artificial Sequence
  Description of Artificial Sequence: Synthetic oligonucleotide
aggguuucuuuguauagcc

SEQ ID NO: 3264308 - RNA, 19 nt, Artificial Sequence
  Description of Artificial Sequence: Synthetic oligonucleotide
uuuguauagcccuagcugu

SEQ ID NO: 3264309 - RNA, 19 nt, Artificial Sequence
  Description of Artificial Sequence: Synthetic oligonucleotide
ugucguagaacucacucug

SEQ ID NO: 3264310 - RNA, 19 nt, Artificial Sequence
  Description of Artificial Sequence: Synthetic oligonucleotide
uggccauaaacucagagau

SEQ ID NO: 3264311 - RNA, 19 nt, Artificial Sequence
  Description of Artificial Sequence: Synthetic oligonucleotide
ucagagauccaccugcccc

SEQ ID NO: 3264312 - RNA, 19 nt, Artificial Sequence
  Description of Artificial Sequence: Synthetic oligonucleotide
cuuuguauagcccuagcug

SEQ ID NO: 3264313 - RNA, 19 nt, Artificial Sequence
  Description of Artificial Sequence: Synthetic oligonucleotide
aggguuaaaggugugugcc

SEQ ID NO: 3264314 - RNA, 19 nt, Artificial Sequence
  Description of Artificial Sequence: Synthetic oligonucleotide
aaaggugugugccaccacu

SEQ ID NO: 3264315 - RNA, 19 nt, Artificial Sequence
  Description of Artificial Sequence: Synthetic oligonucleotide
auaaacucagagauccacc

SEQ ID NO: 3264316 - RNA, 19 nt, Artificial Sequence
  Description of Artificial Sequence: Synthetic oligonucleotide
uaaacucagagauccaccu

SEQ ID NO: 3264317 - RNA, 19 nt, Artificial Sequence
  Description of Artificial Sequence: Synthetic oligonucleotide
ucuuuguauagcccuagcu

SEQ ID NO: 3264318 - RNA, 19 nt, Artificial Sequence
  Description of Artificial Sequence: Synthetic oligonucleotide
agaacucacucuguagacc

SEQ ID NO: 3264319 - RNA, 19 nt, Artificial Sequence
  Description of Artificial Sequence: Synthetic oligonucleotide
gaacucacucuguagacca

SEQ ID NO: 3264320 - RNA, 19 nt, Artificial Sequence
  Description of Artificial Sequence: Synthetic oligonucleotide
guagaacucacucuguaga

SEQ ID NO: 3264321 - RNA, 19 nt, Artificial Sequence
  Description of Artificial Sequence: Synthetic oligonucleotide
cacucuguagaccaggcug

SEQ ID NO: 3264322 - RNA, 19 nt, Artificial Sequence
  Description of Artificial Sequence: Synthetic oligonucleotide
acaggguuucuuuguauag

SEQ ID NO: 3264323 - RNA, 19 nt, Artificial Sequence
  Description of Artificial Sequence: Synthetic oligonucleotide
aaacucagagauccaccug

SEQ ID NO: 3264324 - RNA, 19 nt, Artificial Sequence
  Description of Artificial Sequence: Synthetic oligonucleotide
uguauagcccuagcugucg

SEQ ID NO: 3264325 - RNA, 19 nt, Artificial Sequence
  Description of Artificial Sequence: Synthetic oligonucleotide
accacuaccaggcugccgu

SEQ ID NO: 3264326 - RNA, 19 nt, Artificial Sequence
  Description of Artificial Sequence: Synthetic oligonucleotide
gccauaaacucagagaucc

SEQ ID NO: 3264327 - RNA, 19 nt, Artificial Sequence
  Description of Artificial Sequence: Synthetic oligonucleotide
agauccaccugccccugcc

SEQ ID NO: 3264328 - RNA, 19 nt, Artificial Sequence
  Description of Artificial Sequence: Synthetic oligonucleotide
aagugcaggguuaaaggug

SEQ ID NO: 3264329 - RNA, 19 nt, Artificial Sequence
  Description of Artificial Sequence: Synthetic oligonucleotide
cauaaacucagagauccac

SEQ ID NO: 3264330 - RNA, 19 nt, Artificial Sequence
  Description of Artificial Sequence: Synthetic oligonucleotide
uuaaaggugugugccacca

SEQ ID NO: 3264331 - RNA, 19 nt, Artificial Sequence
  Description of Artificial Sequence: Synthetic oligonucleotide
uagaacucacucuguagac

SEQ ID NO: 3264332 - RNA, 19 nt, Artificial Sequence
  Description of Artificial Sequence: Synthetic oligonucleotide
uuucuuuguauagcccuag

SEQ ID NO: 3264333 - RNA, 19 nt, Artificial Sequence
  Description of Artificial Sequence: Synthetic oligonucleotide
acuaccaggcugccgugcg

SEQ ID NO: 3264334 - RNA, 19 nt, Artificial Sequence
  Description of Artificial Sequence: Synthetic oligonucleotide
uucuuuguauagcccuagc

SEQ ID NO: 3264335 - RNA, 19 nt, Artificial Sequence
  Description of Artificial Sequence: Synthetic oligonucleotide
ccaagugcaggguuaaagg

SEQ ID NO: 3264336 - RNA, 19 nt, Artificial Sequence
  Description of Artificial Sequence: Synthetic oligonucleotide
caggguuaaaggugugugc

SEQ ID NO: 3264337 - RNA, 19 nt, Artificial Sequence
  Description of Artificial Sequence: Synthetic oligonucleotide
acucuguagaccaggcugg

SEQ ID NO: 3264338 - RNA, 19 nt, Artificial Sequence
  Description of Artificial Sequence: Synthetic oligonucleotide
aggugugugccaccacuac

SEQ ID NO: 3264339 - RNA, 19 nt, Artificial Sequence
  Description of Artificial Sequence: Synthetic oligonucleotide
gaccaggcuggccauaaac

SEQ ID NO: 3264340 - RNA, 19 nt, Artificial Sequence
  Description of Artificial Sequence: Synthetic oligonucleotide
cucacucuguagaccaggc

SEQ ID NO: 3264341 - RNA, 19 nt, Artificial Sequence
  Description of Artificial Sequence: Synthetic oligonucleotide
auagcccuagcugucguag

SEQ ID NO: 3264342 - RNA, 19 nt, Artificial Sequence
  Description of Artificial Sequence: Synthetic oligonucleotide
uuguauagcccuagcuguc

SEQ ID NO: 3264343 - RNA, 19 nt, Artificial Sequence
  Description of Artificial Sequence: Synthetic oligonucleotide
cuggccauaaacucagaga

SEQ ID NO: 3264344 - RNA, 19 nt, Artificial Sequence
  Description of Artificial Sequence: Synthetic oligonucleotide
agugcaggguuaaaggugu

SEQ ID NO: 3264345 - RNA, 19 nt, Artificial Sequence
  Description of Artificial Sequence: Synthetic oligonucleotide
ugugugccaccacuaccag

SEQ ID NO: 3264346 - RNA, 19 nt, Artificial Sequence
  Description of Artificial Sequence: Synthetic oligonucleotide
guuaaaggugugugccacc

SEQ ID NO: 3264347 - RNA, 19 nt, Artificial Sequence
  Description of Artificial Sequence: Synthetic oligonucleotide
cuagcugucguagaacuca

SEQ ID NO: 3264348 - RNA, 19 nt, Artificial Sequence
  Description of Artificial Sequence: Synthetic oligonucleotide
acucacucuguagaccagg

SEQ ID NO: 3264349 - RNA, 19 nt, Artificial Sequence
  Description of Artificial Sequence: Synthetic oligonucleotide
ucguagaacucacucugua

SEQ ID NO: 3264350 - RNA, 19 nt, Artificial Sequence
  Description of Artificial Sequence: Synthetic oligonucleotide
acucagagauccaccugcc

SEQ ID NO: 3264351 - RNA, 19 nt, Artificial Sequence
  Description of Artificial Sequence: Synthetic oligonucleotide
cuguagaccaggcuggcca

SEQ ID NO: 3264352 - RNA, 19 nt, Artificial Sequence
  Description of Artificial Sequence: Synthetic oligonucleotide
gacaggguuucuuuguaua

SEQ ID NO: 3264353 - RNA, 19 nt, Artificial Sequence
  Description of Artificial Sequence: Synthetic oligonucleotide
caggguuucuuuguauagc

SEQ ID NO: 3264354 - RNA, 19 nt, Artificial Sequence
  Description of Artificial Sequence: Synthetic oligonucleotide
ucacucuguagaccaggcu

SEQ ID NO: 3264355 - RNA, 19 nt, Artificial Sequence
  Description of Artificial Sequence: Synthetic oligonucleotide
uaccaggcugccgugcgcg

SEQ ID NO: 3264356 - RNA, 19 nt, Artificial Sequence
  Description of Artificial Sequence: Synthetic oligonucleotide
ugccaccacuaccaggcug

SEQ ID NO: 3264357 - RNA, 19 nt, Artificial Sequence
  Description of Artificial Sequence: Synthetic oligonucleotide
cugccucccaagugcaggg

SEQ ID NO: 3264358 - RNA, 19 nt, Artificial Sequence
  Description of Artificial Sequence: Synthetic oligonucleotide
gcugucguagaacucacuc

SEQ ID NO: 3264359 - RNA, 19 nt, Artificial Sequence
  Description of Artificial Sequence: Synthetic oligonucleotide
gguuucuuuguauagcccu

SEQ ID NO: 3264360 - RNA, 19 nt, Artificial Sequence
  Description of Artificial Sequence: Synthetic oligonucleotide
uaaaggugugugccaccac

SEQ ID NO: 3264361 - RNA, 19 nt, Artificial Sequence
  Description of Artificial Sequence: Synthetic oligonucleotide
gcuggccauaaacucagag

SEQ ID NO: 3264362 - RNA, 19 nt, Artificial Sequence
  Description of Artificial Sequence: Synthetic oligonucleotide
auccaccugccccugccuc

SEQ ID NO: 3264363 - RNA, 19 nt, Artificial Sequence
  Description of Artificial Sequence: Synthetic oligonucleotide
uagcugucguagaacucac

SEQ ID NO: 3264364 - RNA, 19 nt, Artificial Sequence
  Description of Artificial Sequence: Synthetic oligonucleotide
gugugugccaccacuacca

SEQ ID NO: 3264365 - RNA, 19 nt, Artificial Sequence
  Description of Artificial Sequence: Synthetic oligonucleotide
gugugccaccacuaccagg

SEQ ID NO: 3264366 - RNA, 19 nt, Artificial Sequence
  Description of Artificial Sequence: Synthetic oligonucleotide
cucagagauccaccugccc

SEQ ID NO: 3264367 - RNA, 19 nt, Artificial Sequence
  Description of Artificial Sequence: Synthetic oligonucleotide
ggugugugccaccacuacc

SEQ ID NO: 3264368 - RNA, 19 nt, Artificial Sequence
  Description of Artificial Sequence: Synthetic oligonucleotide
agacaggguuucuuuguau

SEQ ID NO: 3264369 - RNA, 19 nt, Artificial Sequence
  Description of Artificial Sequence: Synthetic oligonucleotide
uccaccugccccugccucc

SEQ ID NO: 3264370 - RNA, 19 nt, Artificial Sequence
  Description of Artificial Sequence: Synthetic oligonucleotide
uguagaccaggcuggccau

SEQ ID NO: 3264371 - RNA, 19 nt, Artificial Sequence
  Description of Artificial Sequence: Synthetic oligonucleotide
ugcaggguuaaaggugugu

SEQ ID NO: 3264372 - RNA, 19 nt, Artificial Sequence
  Description of Artificial Sequence: Synthetic oligonucleotide
aggcuggccauaaacucag

SEQ ID NO: 3264373 - RNA, 19 nt, Artificial Sequence
  Description of Artificial Sequence: Synthetic oligonucleotide
gguuaaaggugugugccac

SEQ ID NO: 3264374 - RNA, 19 nt, Artificial Sequence
  Description of Artificial Sequence: Synthetic oligonucleotide
ucuguagaccaggcuggcc

SEQ ID NO: 3264375 - RNA, 19 nt, Artificial Sequence
  Description of Artificial Sequence: Synthetic oligonucleotide
caggcuggccauaaacuca

SEQ ID NO: 3264376 - RNA, 19 nt, Artificial Sequence
  Description of Artificial Sequence: Synthetic oligonucleotide
accaggcuggccauaaacu

SEQ ID NO: 3264377 - RNA, 19 nt, Artificial Sequence
  Description of Artificial Sequence: Synthetic oligonucleotide
aacucacucuguagaccag

SEQ ID NO: 3264378 - RNA, 19 nt, Artificial Sequence
  Description of Artificial Sequence: Synthetic oligonucleotide
caagugcaggguuaaaggu

SEQ ID NO: 3264379 - RNA, 19 nt, Artificial Sequence
  Description of Artificial Sequence: Synthetic oligonucleotide
ugccccugccucccaagug

SEQ ID NO: 3264380 - RNA, 19 nt, Artificial Sequence
  Description of Artificial Sequence: Synthetic oligonucleotide
uauagcccuagcugucgua

SEQ ID NO: 3264381 - RNA, 19 nt, Artificial Sequence
  Description of Artificial Sequence: Synthetic oligonucleotide
gcaggguuaaaggugugug

SEQ ID NO: 3264382 - RNA, 19 nt, Artificial Sequence
  Description of Artificial Sequence: Synthetic oligonucleotide
agcccuagcugucguagaa

SEQ ID NO: 3264383 - RNA, 19 nt, Artificial Sequence
  Description of Artificial Sequence: Synthetic oligonucleotide
cguagaacucacucuguag

SEQ ID NO: 3264384 - RNA, 19 nt, Artificial Sequence
  Description of Artificial Sequence: Synthetic oligonucleotide
accaggcugccgugcgcgc

SEQ ID NO: 3264385 - RNA, 19 nt, Artificial Sequence
  Description of Artificial Sequence: Synthetic oligonucleotide
uagaccaggcuggccauaa

SEQ ID NO: 3264386 - RNA, 19 nt, Artificial Sequence
  Description of Artificial Sequence: Synthetic oligonucleotide
aaggugugugccaccacua

SEQ ID NO: 3264387 - RNA, 19 nt, Artificial Sequence
  Description of Artificial Sequence: Synthetic oligonucleotide
uagcccuagcugucguaga

SEQ ID NO: 3264388 - RNA, 19 nt, Artificial Sequence
  Description of Artificial Sequence: Synthetic oligonucleotide
ccaggcuggccauaaacuc

SEQ ID NO: 3264389 - RNA, 19 nt, Artificial Sequence
  Description of Artificial Sequence: Synthetic oligonucleotide
gccaccacuaccaggcugc

SEQ ID NO: 3264390 - RNA, 19 nt, Artificial Sequence
  Description of Artificial Sequence: Synthetic oligonucleotide
cccaagugcaggguuaaag

SEQ ID NO: 3264391 - RNA, 19 nt, Artificial Sequence
  Description of Artificial Sequence: Synthetic oligonucleotide
guuucuuuguauagcccua

SEQ ID NO: 3264392 - RNA, 19 nt, Artificial Sequence
  Description of Artificial Sequence: Synthetic oligonucleotide
cugucguagaacucacucu

SEQ ID NO: 3264393 - RNA, 19 nt, Artificial Sequence
  Description of Artificial Sequence: Synthetic oligonucleotide
cucuguagaccaggcuggc

SEQ ID NO: 3264394 - RNA, 19 nt, Artificial Sequence
  Description of Artificial Sequence: Synthetic oligonucleotide
cuaccaggcugccgugcgc

SEQ ID NO: 3264395 - RNA, 19 nt, Artificial Sequence
  Description of Artificial Sequence: Synthetic oligonucleotide
gagauccaccugccccugc

SEQ ID NO: 3264396 - RNA, 19 nt, Artificial Sequence
  Description of Artificial Sequence: Synthetic oligonucleotide
gccccugccucccaagugc

SEQ ID NO: 3264397 - RNA, 19 nt, Artificial Sequence
  Description of Artificial Sequence: Synthetic oligonucleotide
ggguuaaaggugugugcca

SEQ ID NO: 3264398 - RNA, 19 nt, Artificial Sequence
  Description of Artificial Sequence: Synthetic oligonucleotide
ggguuucuuuguauagccc

SEQ ID NO: 3264399 - RNA, 19 nt, Artificial Sequence
  Description of Artificial Sequence: Synthetic oligonucleotide
cagagauccaccugccccu

SEQ ID NO: 3264400 - RNA, 19 nt, Artificial Sequence
  Description of Artificial Sequence: Synthetic oligonucleotide
cacuaccaggcugccgugc

SEQ ID NO: 3264401 - RNA, 19 nt, Artificial Sequence
  Description of Artificial Sequence: Synthetic oligonucleotide
agagauccaccugccccug

SEQ ID NO: 3264402 - RNA, 19 nt, Artificial Sequence
  Description of Artificial Sequence: Synthetic oligonucleotide
caggcugccgugcgcgcgc

SEQ ID NO: 3264403 - RNA, 19 nt, Artificial Sequence
  Description of Artificial Sequence: Synthetic oligonucleotide
ccugccucccaagugcagg

SEQ ID NO: 3264404 - RNA, 19 nt, Artificial Sequence
  Description of Artificial Sequence: Synthetic oligonucleotide
ugccgugcgcgcgcgcgcg

SEQ ID NO: 3264405 - RNA, 19 nt, Artificial Sequence
  Description of Artificial Sequence: Synthetic oligonucleotide
aacaaaaucauauauauau

SEQ ID NO: 3264406 - RNA, 19 nt, Artificial Sequence
  Description of Artificial Sequence: Synthetic oligonucleotide
uauguauauauauauaugg

SEQ ID NO: 3264407 - RNA, 19 nt, Artificial Sequence
  Description of Artificial Sequence: Synthetic oligonucleotide
uauauauauauauauaugu

SEQ ID NO: 3264408 - RNA, 19 nt, Artificial Sequence
  Description of Artificial Sequence: Synthetic oligonucleotide
uacuuaaacaacaaaauca

SEQ ID NO: 3264409 - RNA, 19 nt, Artificial Sequence
  Description of Artificial Sequence: Synthetic oligonucleotide
aaaucauauauauauauau

SEQ ID NO: 3264410 - RNA, 19 nt, Artificial Sequence
  Description of Artificial Sequence: Synthetic oligonucleotide
agcuguggaaacuagaugc

SEQ ID NO: 3264411 - RNA, 19 nt, Artificial Sequence
  Description of Artificial Sequence: Synthetic oligonucleotide
uuaaacaacaaaaucauau

SEQ ID NO: 3264412 - RNA, 19 nt, Artificial Sequence
  Description of Artificial Sequence: Synthetic oligonucleotide
aaagauggcuaacuguugc

SEQ ID NO: 3264413 - RNA, 19 nt, Artificial Sequence
  Description of Artificial Sequence: Synthetic oligonucleotide
uauauauauauauauauau

SEQ ID NO: 3264414 - RNA, 19 nt, Artificial Sequence
  Description of Artificial Sequence: Synthetic oligonucleotide
uuuuauuguacuuaaacaa

SEQ ID NO: 3264415 - RNA, 19 nt, Artificial Sequence
  Description of Artificial Sequence: Synthetic oligonucleotide
uauauauguauauauauau

SEQ ID NO: 3264416 - RNA, 19 nt, Artificial Sequence
  Description of Artificial Sequence: Synthetic oligonucleotide
uauauauauauguauauau

SEQ ID NO: 3264417 - RNA, 19 nt, Artificial Sequence
  Description of Artificial Sequence: Synthetic oligonucleotide
aauaucuacccacauuuag

SEQ ID NO: 3264418 - RNA, 19 nt, Artificial Sequence
  Description of Artificial Sequence: Synthetic oligonucleotide
uagaauaugaagcugcuga

SEQ ID NO: 3264419 - RNA, 19 nt, Artificial Sequence
  Description of Artificial Sequence: Synthetic oligonucleotide
uauauguauauauauauau

SEQ ID NO: 3264420 - RNA, 19 nt, Artificial Sequence
  Description of Artificial Sequence: Synthetic oligonucleotide
ucuugaaaacuuuauaagc

SEQ ID NO: 3264421 - RNA, 19 nt, Artificial Sequence
  Description of Artificial Sequence: Synthetic oligonucleotide
gauaacacaaagcagcagc

SEQ ID NO: 3264422 - RNA, 19 nt, Artificial Sequence
  Description of Artificial Sequence: Synthetic oligonucleotide
auauauauggcucccaaag

SEQ ID NO: 3264423 - RNA, 19 nt, Artificial Sequence
  Description of Artificial Sequence: Synthetic oligonucleotide
uguauauauauauauggcu

SEQ ID NO: 3264424 - RNA, 19 nt, Artificial Sequence
  Description of Artificial Sequence: Synthetic oligonucleotide
uauauauauguauauauau

SEQ ID NO: 3264425 - RNA, 19 nt, Artificial Sequence
  Description of Artificial Sequence: Synthetic oligonucleotide
uauauauauauauauguau

SEQ ID NO: 3264426 - RNA, 19 nt, Artificial Sequence
  Description of Artificial Sequence: Synthetic oligonucleotide
aauaugaagcugcugaaga

SEQ ID NO: 3264427 - RNA, 19 nt, Artificial Sequence
  Description of Artificial Sequence: Synthetic oligonucleotide
uauauauauauauggcucc

SEQ ID NO: 3264428 - RNA, 19 nt, Artificial Sequence
  Description of Artificial Sequence: Synthetic oligonucleotide
uuguacuuaaacaacaaaa

SEQ ID NO: 3264429 - RNA, 19 nt, Artificial Sequence
  Description of Artificial Sequence: Synthetic oligonucleotide
guugauaacacaaagcagc

SEQ ID NO: 3264430 - RNA, 19 nt, Artificial Sequence
  Description of Artificial Sequence: Synthetic oligonucleotide
uuuauuguacuuaaacaac

SEQ ID NO: 3264431 - RNA, 19 nt, Artificial Sequence
  Description of Artificial Sequence: Synthetic oligonucleotide
ugaauaucuacccacauuu

SEQ ID NO: 3264432 - RNA, 19 nt, Artificial Sequence
  Description of Artificial Sequence: Synthetic oligonucleotide
aucauauauauauauauau

SEQ ID NO: 3264433 - RNA, 19 nt, Artificial Sequence
  Description of Artificial Sequence: Synthetic oligonucleotide
aauacuuccaucuccuggu

SEQ ID NO: 3264434 - RNA, 19 nt, Artificial Sequence
  Description of Artificial Sequence: Synthetic oligonucleotide
aaacaacaaaaucauauau

SEQ ID NO: 3264435 - RNA, 19 nt, Artificial Sequence
  Description of Artificial Sequence: Synthetic oligonucleotide
aaguguucauuccuuaguc

SEQ ID NO: 3264436 - RNA, 19 nt, Artificial Sequence
  Description of Artificial Sequence: Synthetic oligonucleotide
acaacaaaaucauauauau

SEQ ID NO: 3264437 - RNA, 19 nt, Artificial Sequence
  Description of Artificial Sequence: Synthetic oligonucleotide
uuauuguacuuaaacaaca

SEQ ID NO: 3264438 - RNA, 19 nt, Artificial Sequence
  Description of Artificial Sequence: Synthetic oligonucleotide
uguacuuaaacaacaaaau

SEQ ID NO: 3264439 - RNA, 19 nt, Artificial Sequence
  Description of Artificial Sequence: Synthetic oligonucleotide
gaguugauaacacaaagca

SEQ ID NO: 3264440 - RNA, 19 nt, Artificial Sequence
  Description of Artificial Sequence: Synthetic oligonucleotide
aaaacuuuauaagcugugg

SEQ ID NO: 3264441 - RNA, 19 nt, Artificial Sequence
  Description of Artificial Sequence: Synthetic oligonucleotide
gacaagggcauccaggacg

SEQ ID NO: 3264442 - RNA, 19 nt, Artificial Sequence
  Description of Artificial Sequence: Synthetic oligonucleotide
ugccaguagaauaugaagc

SEQ ID NO: 3264443 - RNA, 19 nt, Artificial Sequence
  Description of Artificial Sequence: Synthetic oligonucleotide
uauauauauauauguauau

SEQ ID NO: 3264444 - RNA, 19 nt, Artificial Sequence
  Description of Artificial Sequence: Synthetic oligonucleotide
ugaguugauaacacaaagc

SEQ ID NO: 3264445 - RNA, 19 nt, Artificial Sequence
  Description of Artificial Sequence: Synthetic oligonucleotide
aaagcagcagcagagagug

SEQ ID NO: 3264446 - RNA, 19 nt, Artificial Sequence
  Description of Artificial Sequence: Synthetic oligonucleotide
aagauggcuaacuguugcc

SEQ ID NO: 3264447 - RNA, 19 nt, Artificial Sequence
  Description of Artificial Sequence: Synthetic oligonucleotide
aaacuuuauaagcugugga

SEQ ID NO: 3264448 - RNA, 19 nt, Artificial Sequence
  Description of Artificial Sequence: Synthetic oligonucleotide
auguauauauauauauggc

SEQ ID NO: 3264449 - RNA, 19 nt, Artificial Sequence
  Description of Artificial Sequence: Synthetic oligonucleotide
uugaaaacuuuauaagcug

SEQ ID NO: 3264450 - RNA, 19 nt, Artificial Sequence
  Description of Artificial Sequence: Synthetic oligonucleotide
aagaaagauggcuaacugu

SEQ ID NO: 3264451 - RNA, 19 nt, Artificial Sequence
  Description of Artificial Sequence: Synthetic oligonucleotide
aacuuuauaagcuguggaa

SEQ ID NO: 3264452 - RNA, 19 nt, Artificial Sequence
  Description of Artificial Sequence: Synthetic oligonucleotide
agucuugaaaacuuuauaa

SEQ ID NO: 3264453 - RNA, 19 nt, Artificial Sequence
  Description of Artificial Sequence: Synthetic oligonucleotide
aguguucauuccuuagucc

SEQ ID NO: 3264454 - RNA, 19 nt, Artificial Sequence
  Description of Artificial Sequence: Synthetic oligonucleotide
ugaaaacuuuauaagcugu

SEQ ID NO: 3264455 - RNA, 19 nt, Artificial Sequence
  Description of Artificial Sequence: Synthetic oligonucleotide
ugaagaguuccacaguggc

SEQ ID NO: 3264456 - RNA, 19 nt, Artificial Sequence
  Description of Artificial Sequence: Synthetic oligonucleotide
ucauauauauauauauaua

SEQ ID NO: 3264457 - RNA, 19 nt, Artificial Sequence
  Description of Artificial Sequence: Synthetic oligonucleotide
uauauauggcucccaaagc

SEQ ID NO: 3264458 - RNA, 19 nt, Artificial Sequence
  Description of Artificial Sequence: Synthetic oligonucleotide
gucuugaaaacuuuauaag

SEQ ID NO: 3264459 - RNA, 19 nt, Artificial Sequence
  Description of Artificial Sequence: Synthetic oligonucleotide
auauauggcucccaaagca

SEQ ID NO: 3264460 - RNA, 19 nt, Artificial Sequence
  Description of Artificial Sequence: Synthetic oligonucleotide
aacacaaagcagcagcaga

SEQ ID NO: 3264461 - RNA, 19 nt, Artificial Sequence
  Description of Artificial Sequence: Synthetic oligonucleotide
uauauggcucccaaagcag

SEQ ID NO: 3264462 - RNA, 19 nt, Artificial Sequence
  Description of Artificial Sequence: Synthetic oligonucleotide
auauauauauauggcuccc

SEQ ID NO: 3264463 - RNA, 19 nt, Artificial Sequence
  Description of Artificial Sequence: Synthetic oligonucleotide
caguagaauaugaagcugc

SEQ ID NO: 3264464 - RNA, 19 nt, Artificial Sequence
  Description of Artificial Sequence: Synthetic oligonucleotide
ucuacccacauuuaguagu

SEQ ID NO: 3264465 - RNA, 19 nt, Artificial Sequence
  Description of Artificial Sequence: Synthetic oligonucleotide
cuuuauaagcuguggaaac

SEQ ID NO: 3264466 - RNA, 19 nt, Artificial Sequence
  Description of Artificial Sequence: Synthetic oligonucleotide
auauauauauauauauaug

SEQ ID NO: 3264467 - RNA, 19 nt, Artificial Sequence
  Description of Artificial Sequence: Synthetic oligonucleotide
aagaguuccacaguggcca

SEQ ID NO: 3264468 - RNA, 19 nt, Artificial Sequence
  Description of Artificial Sequence: Synthetic oligonucleotide
uaguccaauacuuccaucu

SEQ ID NO: 3264469 - RNA, 19 nt, Artificial Sequence
  Description of Artificial Sequence: Synthetic oligonucleotide
uguggaaacuagaugcuga

SEQ ID NO: 3264470 - RNA, 19 nt, Artificial Sequence
  Description of Artificial Sequence: Synthetic oligonucleotide
uaaacaacaaaaucauaua

SEQ ID NO: 3264471 - RNA, 19 nt, Artificial Sequence
  Description of Artificial Sequence: Synthetic oligonucleotide
guauauauauauauggcuc

SEQ ID NO: 3264472 - RNA, 19 nt, Artificial Sequence
  Description of Artificial Sequence: Synthetic oligonucleotide
uugauaacacaaagcagca

SEQ ID NO: 3264473 - RNA, 19 nt, Artificial Sequence
  Description of Artificial Sequence: Synthetic oligonucleotide
uccaggacgaaguugucag

SEQ ID NO: 3264474 - RNA, 19 nt, Artificial Sequence
  Description of Artificial Sequence: Synthetic oligonucleotide
uugccaguagaauaugaag

SEQ ID NO: 3264475 - RNA, 19 nt, Artificial Sequence
  Description of Artificial Sequence: Synthetic oligonucleotide
uauaagcuguggaaacuag

SEQ ID NO: 3264476 - RNA, 19 nt, Artificial Sequence
  Description of Artificial Sequence: Synthetic oligonucleotide
caauacuuccaucuccugg

SEQ ID NO: 3264477 - RNA, 19 nt, Artificial Sequence
  Description of Artificial Sequence: Synthetic oligonucleotide
cauauauauauauauauau

SEQ ID NO: 3264478 - RNA, 19 nt, Artificial Sequence
  Description of Artificial Sequence: Synthetic oligonucleotide
uccuuaguccaauacuucc

SEQ ID NO: 3264479 - RNA, 19 nt, Artificial Sequence
  Description of Artificial Sequence: Synthetic oligonucleotide
aaacuagaugcugacacca

SEQ ID NO: 3264480 - RNA, 19 nt, Artificial Sequence
  Description of Artificial Sequence: Synthetic oligonucleotide
gacaccacugaauaucuac

SEQ ID NO: 3264481 - RNA, 19 nt, Artificial Sequence
  Description of Artificial Sequence: Synthetic oligonucleotide
guacuuaaacaacaaaauc

SEQ ID NO: 3264482 - RNA, 19 nt, Artificial Sequence
  Description of Artificial Sequence: Synthetic oligonucleotide
uaagcuguggaaacuagau

SEQ ID NO: 3264483 - RNA, 19 nt, Artificial Sequence
  Description of Artificial Sequence: Synthetic oligonucleotide
aacggaaguguucauuccu

SEQ ID NO: 3264484 - RNA, 19 nt, Artificial Sequence
  Description of Artificial Sequence: Synthetic oligonucleotide
uauuguacuuaaacaacaa

SEQ ID NO: 3264485 - RNA, 19 nt, Artificial Sequence
  Description of Artificial Sequence: Synthetic oligonucleotide
auaugaagcugcugaagag

SEQ ID NO: 3264486 - RNA, 19 nt, Artificial Sequence
  Description of Artificial Sequence: Synthetic oligonucleotide
cugaguugauaacacaaag

SEQ ID NO: 3264487 - RNA, 19 nt, Artificial Sequence
  Description of Artificial Sequence: Synthetic oligonucleotide
aacuguugccaguagaaua

SEQ ID NO: 3264488 - RNA, 19 nt, Artificial Sequence
  Description of Artificial Sequence: Synthetic oligonucleotide
ugucaggccaagaaagaug

SEQ ID NO: 3264489 - RNA, 19 nt, Artificial Sequence
  Description of Artificial Sequence: Synthetic oligonucleotide
uccaauacuuccaucuccu

SEQ ID NO: 3264490 - RNA, 19 nt, Artificial Sequence
  Description of Artificial Sequence: Synthetic oligonucleotide
gucaggccaagaaagaugg

SEQ ID NO: 3264491 - RNA, 19 nt, Artificial Sequence
  Description of Artificial Sequence: Synthetic oligonucleotide
gaaacuagaugcugacacc

SEQ ID NO: 3264492 - RNA, 19 nt, Artificial Sequence
  Description of Artificial Sequence: Synthetic oligonucleotide
auauguauauauauauaug

SEQ ID NO: 3264493 - RNA, 19 nt, Artificial Sequence
  Description of Artificial Sequence: Synthetic oligonucleotide
aaaaucauauauauauaua

SEQ ID NO: 3264494 - RNA, 19 nt, Artificial Sequence
  Description of Artificial Sequence: Synthetic oligonucleotide
ggaaacuagaugcugacac

SEQ ID NO: 3264495 - RNA, 19 nt, Artificial Sequence
  Description of Artificial Sequence: Synthetic oligonucleotide
cagagagugauggacaagg

SEQ ID NO: 3264496 - RNA, 19 nt, Artificial Sequence
  Description of Artificial Sequence: Synthetic oligonucleotide
aguugucaggccaagaaag

SEQ ID NO: 3264497 - RNA, 19 nt, Artificial Sequence
  Description of Artificial Sequence: Synthetic oligonucleotide
gaagcugcugaagaguucc

SEQ ID NO: 3264498 - RNA, 19 nt, Artificial Sequence
  Description of Artificial Sequence: Synthetic oligonucleotide
acaaagcagcagcagagag

SEQ ID NO: 3264499 - RNA, 19 nt, Artificial Sequence
  Description of Artificial Sequence: Synthetic oligonucleotide
aacaacaaaaucauauaua

SEQ ID NO: 3264500 - RNA, 19 nt, Artificial Sequence
  Description of Artificial Sequence: Synthetic oligonucleotide
agagugauggacaagggca

SEQ ID NO: 3264501 - RNA, 19 nt, Artificial Sequence
  Description of Artificial Sequence: Synthetic oligonucleotide
aaucauauauauauauaua

SEQ ID NO: 3264502 - RNA, 19 nt, Artificial Sequence
  Description of Artificial Sequence: Synthetic oligonucleotide
aagcuguggaaacuagaug

SEQ ID NO: 3264503 - RNA, 19 nt, Artificial Sequence
  Description of Artificial Sequence: Synthetic oligonucleotide
acuuaaacaacaaaaucau

SEQ ID NO: 3264504 - RNA, 19 nt, Artificial Sequence
  Description of Artificial Sequence: Synthetic oligonucleotide
gaaaacuuuauaagcugug

SEQ ID NO: 3264505 - RNA, 19 nt, Artificial Sequence
  Description of Artificial Sequence: Synthetic oligonucleotide
gauaauuuggcuuaggcug

SEQ ID NO: 3264506 - RNA, 19 nt, Artificial Sequence
  Description of Artificial Sequence: Synthetic oligonucleotide
ucaggaaccauaaauaugu

SEQ ID NO: 3264507 - RNA, 19 nt, Artificial Sequence
  Description of Artificial Sequence: Synthetic oligonucleotide
uaauauuccaagcucuugg

SEQ ID NO: 3264508 - RNA, 19 nt, Artificial Sequence
  Description of Artificial Sequence: Synthetic oligonucleotide
uucugugacauuaggaucg

SEQ ID NO: 3264509 - RNA, 19 nt, Artificial Sequence
  Description of Artificial Sequence: Synthetic oligonucleotide
aauaccagggcagaaaggg

SEQ ID NO: 3264510 - RNA, 19 nt, Artificial Sequence
  Description of Artificial Sequence: Synthetic oligonucleotide
uuuucaacaaucucuuggg

SEQ ID NO: 3264511 - RNA, 19 nt, Artificial Sequence
  Description of Artificial Sequence: Synthetic oligonucleotide
aaacauaaaauuuguaaaa

SEQ ID NO: 3264512 - RNA, 19 nt, Artificial Sequence
  Description of Artificial Sequence: Synthetic oligonucleotide
aacugaggguaacagaugg

SEQ ID NO: 3264513 - RNA, 19 nt, Artificial Sequence
  Description of Artificial Sequence: Synthetic oligonucleotide
uuguaaaauacacucaaga

SEQ ID NO: 3264514 - RNA, 19 nt, Artificial Sequence
  Description of Artificial Sequence: Synthetic oligonucleotide
aacaguucugaacaggcag

SEQ ID NO: 3264515 - RNA, 19 nt, Artificial Sequence
  Description of Artificial Sequence: Synthetic oligonucleotide
ucaauuuuccuccaagagc

SEQ ID NO: 3264516 - RNA, 19 nt, Artificial Sequence
  Description of Artificial Sequence: Synthetic oligonucleotide
uacauuacaacuuuuaguu

SEQ ID NO: 3264517 - RNA, 19 nt, Artificial Sequence
  Description of Artificial Sequence: Synthetic oligonucleotide
auuacucccaucuauaaca

SEQ ID NO: 3264518 - RNA, 19 nt, Artificial Sequence
  Description of Artificial Sequence: Synthetic oligonucleotide
auaauggcucuguagaagg

SEQ ID NO: 3264519 - RNA, 19 nt, Artificial Sequence
  Description of Artificial Sequence: Synthetic oligonucleotide
uccuccaagagcaauaaug

SEQ ID NO: 3264520 - RNA, 19 nt, Artificial Sequence
  Description of Artificial Sequence: Synthetic oligonucleotide
uguagaagggccauacucc

SEQ ID NO: 3264521 - RNA, 19 nt, Artificial Sequence
  Description of Artificial Sequence: Synthetic oligonucleotide
gaaucaauaugaucagagg

SEQ ID NO: 3264522 - RNA, 19 nt, Artificial Sequence
  Description of Artificial Sequence: Synthetic oligonucleotide
aaauacucaacugcaauug

SEQ ID NO: 3264523 - RNA, 19 nt, Artificial Sequence
  Description of Artificial Sequence: Synthetic oligonucleotide
aaauguuaaaucuguaaua

SEQ ID NO: 3264524 - RNA, 19 nt, Artificial Sequence
  Description of Artificial Sequence: Synthetic oligonucleotide
uauuccacggcaacuaaag

SEQ ID NO: 3264525 - RNA, 19 nt, Artificial Sequence
  Description of Artificial Sequence: Synthetic oligonucleotide
cuuuaggacuagaagaggc

SEQ ID NO: 3264526 - RNA, 19 nt, Artificial Sequence
  Description of Artificial Sequence: Synthetic oligonucleotide
ucgcguaucaguaacugag

SEQ ID NO: 3264527 - RNA, 19 nt, Artificial Sequence
  Description of Artificial Sequence: Synthetic oligonucleotide
auuuguaaaauacacucaa

SEQ ID NO: 3264528 - RNA, 19 nt, Artificial Sequence
  Description of Artificial Sequence: Synthetic oligonucleotide
uuuguaaaauacacucaag

SEQ ID NO: 3264529 - RNA, 19 nt, Artificial Sequence
  Description of Artificial Sequence: Synthetic oligonucleotide
auaauuucucuccaggaca

SEQ ID NO: 3264530 - RNA, 19 nt, Artificial Sequence
  Description of Artificial Sequence: Synthetic oligonucleotide
uguacaaaacaagugggcc

SEQ ID NO: 3264531 - RNA, 19 nt, Artificial Sequence
  Description of Artificial Sequence: Synthetic oligonucleotide
uguucugugacauuaggau

SEQ ID NO: 3264532 - RNA, 19 nt, Artificial Sequence
  Description of Artificial Sequence: Synthetic oligonucleotide
ugagguacacgguuuagag

SEQ ID NO: 3264533 - RNA, 19 nt, Artificial Sequence
  Description of Artificial Sequence: Synthetic oligonucleotide
uuauuuagaaaggcuaacc

SEQ ID NO: 3264534 - RNA, 19 nt, Artificial Sequence
  Description of Artificial Sequence: Synthetic oligonucleotide
uguugaaagccauuuucag

SEQ ID NO: 3264535 - RNA, 19 nt, Artificial Sequence
  Description of Artificial Sequence: Synthetic oligonucleotide
uuuaguucuggggugagcc

SEQ ID NO: 3264536 - RNA, 19 nt, Artificial Sequence
  Description of Artificial Sequence: Synthetic oligonucleotide
auugcuauuccacggcaac

SEQ ID NO: 3264537 - RNA, 19 nt, Artificial Sequence
  Description of Artificial Sequence: Synthetic oligonucleotide
uguaccuuuucaacaaucu

SEQ ID NO: 3264538 - RNA, 19 nt, Artificial Sequence
  Description of Artificial Sequence: Synthetic oligonucleotide
uaauuccuagcuuguacgg

SEQ ID NO: 3264539 - RNA, 19 nt, Artificial Sequence
  Description of Artificial Sequence: Synthetic oligonucleotide
ucuguugugagcucauuug

SEQ ID NO: 3264540 - RNA, 19 nt, Artificial Sequence
  Description of Artificial Sequence: Synthetic oligonucleotide
aacugaggaaucaauauga

SEQ ID NO: 3264541 - RNA, 19 nt, Artificial Sequence
  Description of Artificial Sequence: Synthetic oligonucleotide
gaaguuaucauucguuaca

SEQ ID NO: 3264542 - RNA, 19 nt, Artificial Sequence
  Description of Artificial Sequence: Synthetic oligonucleotide
aaccauauucauuugucaa

SEQ ID NO: 3264543 - RNA, 19 nt, Artificial Sequence
  Description of Artificial Sequence: Synthetic oligonucleotide
uuaauuucugcaguuugag

SEQ ID NO: 3264544 - RNA, 19 nt, Artificial Sequence
  Description of Artificial Sequence: Synthetic oligonucleotide
aacuuuuaguucuggggug

SEQ ID NO: 3264545 - RNA, 19 nt, Artificial Sequence
  Description of Artificial Sequence: Synthetic oligonucleotide
cuaagaaagaccuccuuuc

SEQ ID NO: 3264546 - RNA, 19 nt, Artificial Sequence
  Description of Artificial Sequence: Synthetic oligonucleotide
aaaucuuugaaccccugua

SEQ ID NO: 3264547 - RNA, 19 nt, Artificial Sequence
  Description of Artificial Sequence: Synthetic oligonucleotide
caauaugcuucaaaucugc

SEQ ID NO: 3264548 - RNA, 19 nt, Artificial Sequence
  Description of Artificial Sequence: Synthetic oligonucleotide
aagugcucgguccucuugg

SEQ ID NO: 3264549 - RNA, 19 nt, Artificial Sequence
  Description of Artificial Sequence: Synthetic oligonucleotide
uccacggcaacuaaagaac

SEQ ID NO: 3264550 - RNA, 19 nt, Artificial Sequence
  Description of Artificial Sequence: Synthetic oligonucleotide
uuuaguccaauaccagggc

SEQ ID NO: 3264551 - RNA, 19 nt, Artificial Sequence
  Description of Artificial Sequence: Synthetic oligonucleotide
aaauaaagcugacuucuuu

SEQ ID NO: 3264552 - RNA, 19 nt, Artificial Sequence
  Description of Artificial Sequence: Synthetic oligonucleotide
ucaaggucuacauuacaac

SEQ ID NO: 3264553 - RNA, 19 nt, Artificial Sequence
  Description of Artificial Sequence: Synthetic oligonucleotide
ucugaaguuaucauucguu

SEQ ID NO: 3264554 - RNA, 19 nt, Artificial Sequence
  Description of Artificial Sequence: Synthetic oligonucleotide
guuuagagucuuugaacgg

SEQ ID NO: 3264555 - RNA, 19 nt, Artificial Sequence
  Description of Artificial Sequence: Synthetic oligonucleotide
aaaacaagugggcccucag

SEQ ID NO: 3264556 - RNA, 19 nt, Artificial Sequence
  Description of Artificial Sequence: Synthetic oligonucleotide
cagaagaucucugugcugg

SEQ ID NO: 3264557 - RNA, 19 nt, Artificial Sequence
  Description of Artificial Sequence: Synthetic oligonucleotide
aaaggcuaaccauauucau

SEQ ID NO: 3264558 - RNA, 19 nt, Artificial Sequence
  Description of Artificial Sequence: Synthetic oligonucleotide
uuuggaguagagucuguug

SEQ ID NO: 3264559 - RNA, 19 nt, Artificial Sequence
  Description of Artificial Sequence: Synthetic oligonucleotide
uugaaauaaagcugacuuc

SEQ ID NO: 3264560 - RNA, 19 nt, Artificial Sequence
  Description of Artificial Sequence: Synthetic oligonucleotide
cuguauacugggaagggug

SEQ ID NO: 3264561 - RNA, 19 nt, Artificial Sequence
  Description of Artificial Sequence: Synthetic oligonucleotide
aacugcaauugcuauucca

SEQ ID NO: 3264562 - RNA, 19 nt, Artificial Sequence
  Description of Artificial Sequence: Synthetic oligonucleotide
uuaguccaauaccagggca

SEQ ID NO: 3264563 - RNA, 19 nt, Artificial Sequence
  Description of Artificial Sequence: Synthetic oligonucleotide
gcauaauuuauauauagaa

SEQ ID NO: 3264564 - RNA, 19 nt, Artificial Sequence
  Description of Artificial Sequence: Synthetic oligonucleotide
ucaagaguaacugcuauua

SEQ ID NO: 3264565 - RNA, 19 nt, Artificial Sequence
  Description of Artificial Sequence: Synthetic oligonucleotide
aagccaggaucaaacgugc

SEQ ID NO: 3264566 - RNA, 19 nt, Artificial Sequence
  Description of Artificial Sequence: Synthetic oligonucleotide
uuuagagucuuugaacggu

SEQ ID NO: 3264567 - RNA, 19 nt, Artificial Sequence
  Description of Artificial Sequence: Synthetic oligonucleotide
ucuuuaggacuagaagagg

SEQ ID NO: 3264568 - RNA, 19 nt, Artificial Sequence
  Description of Artificial Sequence: Synthetic oligonucleotide
ucauuugugcugcucccag

SEQ ID NO: 3264569 - RNA, 19 nt, Artificial Sequence
  Description of Artificial Sequence: Synthetic oligonucleotide
ucaaacgugcccacauuug

SEQ ID NO: 3264570 - RNA, 19 nt, Artificial Sequence
  Description of Artificial Sequence: Synthetic oligonucleotide
cacacacacacacacacac

SEQ ID NO: 3264571 - RNA, 19 nt, Artificial Sequence
  Description of Artificial Sequence: Synthetic oligonucleotide
acagaaaauguuaaaucug

SEQ ID NO: 3264572 - RNA, 19 nt, Artificial Sequence
  Description of Artificial Sequence: Synthetic oligonucleotide
auauuccaagcucuuggag

SEQ ID NO: 3264573 - RNA, 19 nt, Artificial Sequence
  Description of Artificial Sequence: Synthetic oligonucleotide
gaaaagcugggcuucucug

SEQ ID NO: 3264574 - RNA, 19 nt, Artificial Sequence
  Description of Artificial Sequence: Synthetic oligonucleotide
aaagaccuccuuucggaga

SEQ ID NO: 3264575 - RNA, 19 nt, Artificial Sequence
  Description of Artificial Sequence: Synthetic oligonucleotide
gaaagaccuccuuucggag

SEQ ID NO: 3264576 - RNA, 19 nt, Artificial Sequence
  Description of Artificial Sequence: Synthetic oligonucleotide
agauaauauuccaagcucu

SEQ ID NO: 3264577 - RNA, 19 nt, Artificial Sequence
  Description of Artificial Sequence: Synthetic oligonucleotide
gucuuugaacgguaacugg

SEQ ID NO: 3264578 - RNA, 19 nt, Artificial Sequence
  Description of Artificial Sequence: Synthetic oligonucleotide
auuuggcuuaggcugagga

SEQ ID NO: 3264579 - RNA, 19 nt, Artificial Sequence
  Description of Artificial Sequence: Synthetic oligonucleotide
aaucgcguaucaguaacug

SEQ ID NO: 3264580 - RNA, 19 nt, Artificial Sequence
  Description of Artificial Sequence: Synthetic oligonucleotide
gacauugaguaucggcugc

SEQ ID NO: 3264581 - RNA, 19 nt, Artificial Sequence
  Description of Artificial Sequence: Synthetic oligonucleotide
cugcaauugcuauuccacg

SEQ ID NO: 3264582 - RNA, 19 nt, Artificial Sequence
  Description of Artificial Sequence: Synthetic oligonucleotide
gguucugcuguauacuggg

SEQ ID NO: 3264583 - RNA, 19 nt, Artificial Sequence
  Description of Artificial Sequence: Synthetic oligonucleotide
aucuggucaaucuucaguu

SEQ ID NO: 3264584 - RNA, 19 nt, Artificial Sequence
  Description of Artificial Sequence: Synthetic oligonucleotide
caggucuuuucauguaugg

SEQ ID NO: 3264585 - RNA, 19 nt, Artificial Sequence
  Description of Artificial Sequence: Synthetic oligonucleotide
uccgcuaaguguagcagga

SEQ ID NO: 3264586 - RNA, 19 nt, Artificial Sequence
  Description of Artificial Sequence: Synthetic oligonucleotide
uccgucacaaacucucuga

SEQ ID NO: 3264587 - RNA, 19 nt, Artificial Sequence
  Description of Artificial Sequence: Synthetic oligonucleotide
guagaagggccauacuccc

SEQ ID NO: 3264588 - RNA, 19 nt, Artificial Sequence
  Description of Artificial Sequence: Synthetic oligonucleotide
agucuuugaacgguaacug

SEQ ID NO: 3264589 - RNA, 19 nt, Artificial Sequence
  Description of Artificial Sequence: Synthetic oligonucleotide
accauauucauuugucaau

SEQ ID NO: 3264590 - RNA, 19 nt, Artificial Sequence
  Description of Artificial Sequence: Synthetic oligonucleotide
agaagaucucugugcuggc

SEQ ID NO: 3264591 - RNA, 19 nt, Artificial Sequence
  Description of Artificial Sequence: Synthetic oligonucleotide
gagaagcaauucuuucucc

SEQ ID NO: 3264592 - RNA, 19 nt, Artificial Sequence
  Description of Artificial Sequence: Synthetic oligonucleotide
gaaaggcuaaccauauuca

SEQ ID NO: 3264593 - RNA, 19 nt, Artificial Sequence
  Description of Artificial Sequence: Synthetic oligonucleotide
uuugaaccccuguaacuga

SEQ ID NO: 3264594 - RNA, 19 nt, Artificial Sequence
  Description of Artificial Sequence: Synthetic oligonucleotide
aaguuaucauucguuacaa

SEQ ID NO: 3264595 - RNA, 19 nt, Artificial Sequence
  Description of Artificial Sequence: Synthetic oligonucleotide
gaucagaggauccugccaa

SEQ ID NO: 3264596 - RNA, 19 nt, Artificial Sequence
  Description of Artificial Sequence: Synthetic oligonucleotide
cagaggauccugccaaucg

SEQ ID NO: 3264597 - RNA, 19 nt, Artificial Sequence
  Description of Artificial Sequence: Synthetic oligonucleotide
uucaggucuuuucauguau

SEQ ID NO: 3264598 - RNA, 19 nt, Artificial Sequence
  Description of Artificial Sequence: Synthetic oligonucleotide
ucaugagaagcaauucuuu

SEQ ID NO: 3264599 - RNA, 19 nt, Artificial Sequence
  Description of Artificial Sequence: Synthetic oligonucleotide
guaucaguaacugagggua

SEQ ID NO: 3264600 - RNA, 19 nt, Artificial Sequence
  Description of Artificial Sequence: Synthetic oligonucleotide
cacauuucauguuucuguc

SEQ ID NO: 3264601 - RNA, 19 nt, Artificial Sequence
  Description of Artificial Sequence: Synthetic oligonucleotide
guuaagaagugcuguucug

SEQ ID NO: 3264602 - RNA, 19 nt, Artificial Sequence
  Description of Artificial Sequence: Synthetic oligonucleotide
uaggaucgcgccuuguucu

SEQ ID NO: 3264603 - RNA, 19 nt, Artificial Sequence
  Description of Artificial Sequence: Synthetic oligonucleotide
uuucauguuucuguccuac

SEQ ID NO: 3264604 - RNA, 19 nt, Artificial Sequence
  Description of Artificial Sequence: Synthetic oligonucleotide
ugaaccccuguaacugagg

SEQ ID NO: 3264605 - RNA, 19 nt, Artificial Sequence
  Description of Artificial Sequence: Synthetic oligonucleotide
aaguaagucaaucuugucc

SEQ ID NO: 3264606 - RNA, 19 nt, Artificial Sequence
  Description of Artificial Sequence: Synthetic oligonucleotide
agugaaauggccuucagcc

SEQ ID NO: 3264607 - RNA, 19 nt, Artificial Sequence
  Description of Artificial Sequence: Synthetic oligonucleotide
uuugucaggauucaaaagc

SEQ ID NO: 3264608 - RNA, 19 nt, Artificial Sequence
  Description of Artificial Sequence: Synthetic oligonucleotide
aguaagucaaucuuguccg

SEQ ID NO: 3264609 - RNA, 19 nt, Artificial Sequence
  Description of Artificial Sequence: Synthetic oligonucleotide
ucuacagucucuaaggugc

SEQ ID NO: 3264610 - RNA, 19 nt, Artificial Sequence
  Description of Artificial Sequence: Synthetic oligonucleotide
gucagaaauaauaacaucc

SEQ ID NO: 3264611 - RNA, 19 nt, Artificial Sequence
  Description of Artificial Sequence: Synthetic oligonucleotide
aagugaaauggccuucagc

SEQ ID NO: 3264612 - RNA, 19 nt, Artificial Sequence
  Description of Artificial Sequence: Synthetic oligonucleotide
auguaauauacaucuggcc

SEQ ID NO: 3264613 - RNA, 19 nt, Artificial Sequence
  Description of Artificial Sequence: Synthetic oligonucleotide
ucagaaauaauaacaucca

SEQ ID NO: 3264614 - RNA, 19 nt, Artificial Sequence
  Description of Artificial Sequence: Synthetic oligonucleotide
ucuuuuccuaacuugaacu

SEQ ID NO: 3264615 - RNA, 19 nt, Artificial Sequence
  Description of Artificial Sequence: Synthetic oligonucleotide
gaaggugacaccuugucug

SEQ ID NO: 3264616 - RNA, 19 nt, Artificial Sequence
  Description of Artificial Sequence: Synthetic oligonucleotide
ugaaauggccuucagccag

SEQ ID NO: 3264617 - RNA, 19 nt, Artificial Sequence
  Description of Artificial Sequence: Synthetic oligonucleotide
acccauguaauauacaucu

SEQ ID NO: 3264618 - RNA, 19 nt, Artificial Sequence
  Description of Artificial Sequence: Synthetic oligonucleotide
ugguaguucuguaacagag

SEQ ID NO: 3264619 - RNA, 19 nt, Artificial Sequence
  Description of Artificial Sequence: Synthetic oligonucleotide
uugaaguaagucaaucuug

SEQ ID NO: 3264620 - RNA, 19 nt, Artificial Sequence
  Description of Artificial Sequence: Synthetic oligonucleotide
uuuccaaagugaaauggcc

SEQ ID NO: 3264621 - RNA, 19 nt, Artificial Sequence
  Description of Artificial Sequence: Synthetic oligonucleotide
uuuacauaugaaugcaucu

SEQ ID NO: 3264622 - RNA, 19 nt, Artificial Sequence
  Description of Artificial Sequence: Synthetic oligonucleotide
ucuuuccaaagugaaaugg

SEQ ID NO: 3264623 - RNA, 19 nt, Artificial Sequence
  Description of Artificial Sequence: Synthetic oligonucleotide
cauguaauauacaucuggc

SEQ ID NO: 3264624 - RNA, 19 nt, Artificial Sequence
  Description of Artificial Sequence: Synthetic oligonucleotide
aagucuuugcauuucauua

SEQ ID NO: 3264625 - RNA, 19 nt, Artificial Sequence
  Description of Artificial Sequence: Synthetic oligonucleotide
aaggauggucccaaggucc

SEQ ID NO: 3264626 - RNA, 19 nt, Artificial Sequence
  Description of Artificial Sequence: Synthetic oligonucleotide
ugaaguaagucaaucuugu

SEQ ID NO: 3264627 - RNA, 19 nt, Artificial Sequence
  Description of Artificial Sequence: Synthetic oligonucleotide
ugggaugucagaaauaaua

SEQ ID NO: 3264628 - RNA, 19 nt, Artificial Sequence
  Description of Artificial Sequence: Synthetic oligonucleotide
ugauguaccaguucuuuug

SEQ ID NO: 3264629 - RNA, 19 nt, Artificial Sequence
  Description of Artificial Sequence: Synthetic oligonucleotide
cauucaagaaguucuuucc

SEQ ID NO: 3264630 - RNA, 19 nt, Artificial Sequence
  Description of Artificial Sequence: Synthetic oligonucleotide
ugggaagucaagaggaugc

SEQ ID NO: 3264631 - RNA, 19 nt, Artificial Sequence
  Description of Artificial Sequence: Synthetic oligonucleotide
aaucuuguccgcaagaccu

SEQ ID NO: 3264632 - RNA, 19 nt, Artificial Sequence
  Description of Artificial Sequence: Synthetic oligonucleotide
aagaaguucuuuccaaagu

SEQ ID NO: 3264633 - RNA, 19 nt, Artificial Sequence
  Description of Artificial Sequence: Synthetic oligonucleotide
uaguccagaagcaugugcc

SEQ ID NO: 3264634 - RNA, 19 nt, Artificial Sequence
  Description of Artificial Sequence: Synthetic oligonucleotide
ucagugauauuuuccuggg

SEQ ID NO: 3264635 - RNA, 19 nt, Artificial Sequence
  Description of Artificial Sequence: Synthetic oligonucleotide
uacauaugaaugcaucugu

SEQ ID NO: 3264636 - RNA, 19 nt, Artificial Sequence
  Description of Artificial Sequence: Synthetic oligonucleotide
uguaccaguucuuuuguca

SEQ ID NO: 3264637 - RNA, 19 nt, Artificial Sequence
  Description of Artificial Sequence: Synthetic oligonucleotide
aagaggaugcugcugccuc

SEQ ID NO: 3264638 - RNA, 19 nt, Artificial Sequence
  Description of Artificial Sequence: Synthetic oligonucleotide
uuguagaaugcuuuugaug

SEQ ID NO: 3264639 - RNA, 19 nt, Artificial Sequence
  Description of Artificial Sequence: Synthetic oligonucleotide
uucagauugucacaugcac

SEQ ID NO: 3264640 - RNA, 19 nt, Artificial Sequence
  Description of Artificial Sequence: Synthetic oligonucleotide
uccuggaucaucauuuaca

SEQ ID NO: 3264641 - RNA, 19 nt, Artificial Sequence
  Description of Artificial Sequence: Synthetic oligonucleotide
ucagauugucacaugcacc

SEQ ID NO: 3264642 - RNA, 19 nt, Artificial Sequence
  Description of Artificial Sequence: Synthetic oligonucleotide
ugcaccaaguaacugugag

SEQ ID NO: 3264643 - RNA, 19 nt, Artificial Sequence
  Description of Artificial Sequence: Synthetic oligonucleotide
gaugcugcugccucuacag

SEQ ID NO: 3264644 - RNA, 19 nt, Artificial Sequence
  Description of Artificial Sequence: Synthetic oligonucleotide
gaagucaagaggaugcugc

SEQ ID NO: 3264645 - RNA, 19 nt, Artificial Sequence
  Description of Artificial Sequence: Synthetic oligonucleotide
ugaaccacaggccaacacu

SEQ ID NO: 3264646 - RNA, 19 nt, Artificial Sequence
  Description of Artificial Sequence: Synthetic oligonucleotide
guaauauacaucuggccac

SEQ ID NO: 3264647 - RNA, 19 nt, Artificial Sequence
  Description of Artificial Sequence: Synthetic oligonucleotide
uugucaggauucaaaagca

SEQ ID NO: 3264648 - RNA, 19 nt, Artificial Sequence
  Description of Artificial Sequence: Synthetic oligonucleotide
ucuuguauuuacauaugaa

SEQ ID NO: 3264649 - RNA, 19 nt, Artificial Sequence
  Description of Artificial Sequence: Synthetic oligonucleotide
uccugggaagucaagagga

SEQ ID NO: 3264650 - RNA, 19 nt, Artificial Sequence
  Description of Artificial Sequence: Synthetic oligonucleotide
uuccugggaagucaagagg

SEQ ID NO: 3264651 - RNA, 19 nt, Artificial Sequence
  Description of Artificial Sequence: Synthetic oligonucleotide
uuaugugaaggugacaccu

SEQ ID NO: 3264652 - RNA, 19 nt, Artificial Sequence
  Description of Artificial Sequence: Synthetic oligonucleotide
aacacgcaacacucuuucc

SEQ ID NO: 3264653 - RNA, 19 nt, Artificial Sequence
  Description of Artificial Sequence: Synthetic oligonucleotide
aauaacauccacacuuugu

SEQ ID NO: 3264654 - RNA, 19 nt, Artificial Sequence
  Description of Artificial Sequence: Synthetic oligonucleotide
gagcucuggggcuauaagg

SEQ ID NO: 3264655 - RNA, 19 nt, Artificial Sequence
  Description of Artificial Sequence: Synthetic oligonucleotide
ugagucgcugacaucagca

SEQ ID NO: 3264656 - RNA, 19 nt, Artificial Sequence
  Description of Artificial Sequence: Synthetic oligonucleotide
auaugaaugcaucuguuuu

SEQ ID NO: 3264657 - RNA, 19 nt, Artificial Sequence
  Description of Artificial Sequence: Synthetic oligonucleotide
gauugucacaugcaccaag

SEQ ID NO: 3264658 - RNA, 19 nt, Artificial Sequence
  Description of Artificial Sequence: Synthetic oligonucleotide
gacaucagcacccauguaa

SEQ ID NO: 3264659 - RNA, 19 nt, Artificial Sequence
  Description of Artificial Sequence: Synthetic oligonucleotide
acaugcaccaaguaacugu

SEQ ID NO: 3264660 - RNA, 19 nt, Artificial Sequence
  Description of Artificial Sequence: Synthetic oligonucleotide
agcagcaagaccauaguuc

SEQ ID NO: 3264661 - RNA, 19 nt, Artificial Sequence
  Description of Artificial Sequence: Synthetic oligonucleotide
agcaagaccauaguuccac

SEQ ID NO: 3264662 - RNA, 19 nt, Artificial Sequence
  Description of Artificial Sequence: Synthetic oligonucleotide
uauaaggaauccuggggac

SEQ ID NO: 3264663 - RNA, 19 nt, Artificial Sequence
  Description of Artificial Sequence: Synthetic oligonucleotide
uaauaacauccacacuuug

SEQ ID NO: 3264664 - RNA, 19 nt, Artificial Sequence
  Description of Artificial Sequence: Synthetic oligonucleotide
cuucauuucagggucagug

SEQ ID NO: 3264665 - RNA, 19 nt, Artificial Sequence
  Description of Artificial Sequence: Synthetic oligonucleotide
accauaguuccaccaacac

SEQ ID NO: 3264666 - RNA, 19 nt, Artificial Sequence
  Description of Artificial Sequence: Synthetic oligonucleotide
aguuccaccaacacgcaac

SEQ ID NO: 3264667 - RNA, 19 nt, Artificial Sequence
  Description of Artificial Sequence: Synthetic oligonucleotide
ugugccuucuuguauuuac

SEQ ID NO: 3264668 - RNA, 19 nt, Artificial Sequence
  Description of Artificial Sequence: Synthetic oligonucleotide
uggcuuuaugugaagguga

SEQ ID NO: 3264669 - RNA, 19 nt, Artificial Sequence
  Description of Artificial Sequence: Synthetic oligonucleotide
acuuugaagcacuccacug

SEQ ID NO: 3264670 - RNA, 19 nt, Artificial Sequence
  Description of Artificial Sequence: Synthetic oligonucleotide
uauuuacauaugaaugcau

SEQ ID NO: 3264671 - RNA, 19 nt, Artificial Sequence
  Description of Artificial Sequence: Synthetic oligonucleotide
uucaagaaguucuuuccaa

SEQ ID NO: 3264672 - RNA, 19 nt, Artificial Sequence
  Description of Artificial Sequence: Synthetic oligonucleotide
uauacaucuggccacucuu

SEQ ID NO: 3264673 - RNA, 19 nt, Artificial Sequence
  Description of Artificial Sequence: Synthetic oligonucleotide
cuauaaggaauccugggga

SEQ ID NO: 3264674 - RNA, 19 nt, Artificial Sequence
  Description of Artificial Sequence: Synthetic oligonucleotide
agugguaguucuguaacag

SEQ ID NO: 3264675 - RNA, 19 nt, Artificial Sequence
  Description of Artificial Sequence: Synthetic oligonucleotide
ugcagauaguccagaagca

SEQ ID NO: 3264676 - RNA, 19 nt, Artificial Sequence
  Description of Artificial Sequence: Synthetic oligonucleotide
aagaccauaguuccaccaa

SEQ ID NO: 3264677 - RNA, 19 nt, Artificial Sequence
  Description of Artificial Sequence: Synthetic oligonucleotide
uucauuucagggucaguga

SEQ ID NO: 3264678 - RNA, 19 nt, Artificial Sequence
  Description of Artificial Sequence: Synthetic oligonucleotide
uuuccuaacuugaacuuuu

SEQ ID NO: 3264679 - RNA, 19 nt, Artificial Sequence
  Description of Artificial Sequence: Synthetic oligonucleotide
acuuugugaaggcaguggu

SEQ ID NO: 3264680 - RNA, 19 nt, Artificial Sequence
  Description of Artificial Sequence: Synthetic oligonucleotide
ugaaggugacaccuugucu

SEQ ID NO: 3264681 - RNA, 19 nt, Artificial Sequence
  Description of Artificial Sequence: Synthetic oligonucleotide
uacaagucuuugcauuuca

SEQ ID NO: 3264682 - RNA, 19 nt, Artificial Sequence
  Description of Artificial Sequence: Synthetic oligonucleotide
ccaaggcugacuuugaagc

SEQ ID NO: 3264683 - RNA, 19 nt, Artificial Sequence
  Description of Artificial Sequence: Synthetic oligonucleotide
cagauugucacaugcacca

SEQ ID NO: 3264684 - RNA, 19 nt, Artificial Sequence
  Description of Artificial Sequence: Synthetic oligonucleotide
caugcaccaaguaacugug

SEQ ID NO: 3264685 - RNA, 19 nt, Artificial Sequence
  Description of Artificial Sequence: Synthetic oligonucleotide
cagaaauaauaacauccac

SEQ ID NO: 3264686 - RNA, 19 nt, Artificial Sequence
  Description of Artificial Sequence: Synthetic oligonucleotide
gacuggggaauucuugcag

SEQ ID NO: 3264687 - RNA, 19 nt, Artificial Sequence
  Description of Artificial Sequence: Synthetic oligonucleotide
uucuuuccaaagugaaaug

SEQ ID NO: 3264688 - RNA, 19 nt, Artificial Sequence
  Description of Artificial Sequence: Synthetic oligonucleotide
acacgcaacacucuuucca

SEQ ID NO: 3264689 - RNA, 19 nt, Artificial Sequence
  Description of Artificial Sequence: Synthetic oligonucleotide
guaacugugagucgcugac

SEQ ID NO: 3264690 - RNA, 19 nt, Artificial Sequence
  Description of Artificial Sequence: Synthetic oligonucleotide
aguucuguaacagagccuu

SEQ ID NO: 3264691 - RNA, 19 nt, Artificial Sequence
  Description of Artificial Sequence: Synthetic oligonucleotide
agggucagugauauuuucc

SEQ ID NO: 3264692 - RNA, 19 nt, Artificial Sequence
  Description of Artificial Sequence: Synthetic oligonucleotide
gcagcaagaccauaguucc

SEQ ID NO: 3264693 - RNA, 19 nt, Artificial Sequence
  Description of Artificial Sequence: Synthetic oligonucleotide
aagucaagaggaugcugcu

SEQ ID NO: 3264694 - RNA, 19 nt, Artificial Sequence
  Description of Artificial Sequence: Synthetic oligonucleotide
ucucuaaggugccugcggu

SEQ ID NO: 3264695 - RNA, 19 nt, Artificial Sequence
  Description of Artificial Sequence: Synthetic oligonucleotide
ucagccagcuuccuggauc

SEQ ID NO: 3264696 - RNA, 19 nt, Artificial Sequence
  Description of Artificial Sequence: Synthetic oligonucleotide
uacaucuggccacucuuca

SEQ ID NO: 3264697 - RNA, 19 nt, Artificial Sequence
  Description of Artificial Sequence: Synthetic oligonucleotide
aagaccugcggccuucaga

SEQ ID NO: 3264698 - RNA, 19 nt, Artificial Sequence
  Description of Artificial Sequence: Synthetic oligonucleotide
uauuuuccugggaagucaa

SEQ ID NO: 3264699 - RNA, 19 nt, Artificial Sequence
  Description of Artificial Sequence: Synthetic oligonucleotide
ucacaugcaccaaguaacu

SEQ ID NO: 3264700 - RNA, 19 nt, Artificial Sequence
  Description of Artificial Sequence: Synthetic oligonucleotide
aagucaaucuuguccgcaa

SEQ ID NO: 3264701 - RNA, 19 nt, Artificial Sequence
  Description of Artificial Sequence: Synthetic oligonucleotide
agaccugcggccuucagau

SEQ ID NO: 3264702 - RNA, 19 nt, Artificial Sequence
  Description of Artificial Sequence: Synthetic oligonucleotide
aaggugacaccuugucuga

SEQ ID NO: 3264703 - RNA, 19 nt, Artificial Sequence
  Description of Artificial Sequence: Synthetic oligonucleotide
caaucuuguccgcaagacc

SEQ ID NO: 3264704 - RNA, 19 nt, Artificial Sequence
  Description of Artificial Sequence: Synthetic oligonucleotide
uccacuggcaccagugaac

SEQ ID NO: 3264705 - RNA, 19 nt, Artificial Sequence
  Description of Artificial Sequence: Synthetic oligonucleotide
acaaaauuuccauugagcg

SEQ ID NO: 3264706 - RNA, 19 nt, Artificial Sequence
  Description of Artificial Sequence: Synthetic oligonucleotide
aaaauuuccauugagcguc

SEQ ID NO: 3264707 - RNA, 19 nt, Artificial Sequence
  Description of Artificial Sequence: Synthetic oligonucleotide
cuguuaauuucaaagagcg

SEQ ID NO: 3264708 - RNA, 19 nt, Artificial Sequence
  Description of Artificial Sequence: Synthetic oligonucleotide
aagauagugacaaaauuuc

SEQ ID NO: 3264709 - RNA, 19 nt, Artificial Sequence
  Description of Artificial Sequence: Synthetic oligonucleotide
guuuaaauccucuagggug

SEQ ID NO: 3264710 - RNA, 19 nt, Artificial Sequence
  Description of Artificial Sequence: Synthetic oligonucleotide
ucaaauuccuuggaaaucg

SEQ ID NO: 3264711 - RNA, 19 nt, Artificial Sequence
  Description of Artificial Sequence: Synthetic oligonucleotide
agugacaaaauuuccauug

SEQ ID NO: 3264712 - RNA, 19 nt, Artificial Sequence
  Description of Artificial Sequence: Synthetic oligonucleotide
uguacguuccaucauguag

SEQ ID NO: 3264713 - RNA, 19 nt, Artificial Sequence
  Description of Artificial Sequence: Synthetic oligonucleotide
aaagucagugcguaacaac

SEQ ID NO: 3264714 - RNA, 19 nt, Artificial Sequence
  Description of Artificial Sequence: Synthetic oligonucleotide
gugcguaacaaccauaugg

SEQ ID NO: 3264715 - RNA, 19 nt, Artificial Sequence
  Description of Artificial Sequence: Synthetic oligonucleotide
ucuguuaauuucaaagagc

SEQ ID NO: 3264716 - RNA, 19 nt, Artificial Sequence
  Description of Artificial Sequence: Synthetic oligonucleotide
aagucagugcguaacaacc

SEQ ID NO: 3264717 - RNA, 19 nt, Artificial Sequence
  Description of Artificial Sequence: Synthetic oligonucleotide
guaacaaccauauggacac

SEQ ID NO: 3264718 - RNA, 19 nt, Artificial Sequence
  Description of Artificial Sequence: Synthetic oligonucleotide
gugucuguuaauuucaaag

SEQ ID NO: 3264719 - RNA, 19 nt, Artificial Sequence
  Description of Artificial Sequence: Synthetic oligonucleotide
ucuggagagcuucagaggc

SEQ ID NO: 3264720 - RNA, 19 nt, Artificial Sequence
  Description of Artificial Sequence: Synthetic oligonucleotide
ugcauggugaaccaguggc

SEQ ID NO: 3264721 - RNA, 19 nt, Artificial Sequence
  Description of Artificial Sequence: Synthetic oligonucleotide
uuuaaauccucuagggugu

SEQ ID NO: 3264722 - RNA, 19 nt, Artificial Sequence
  Description of Artificial Sequence: Synthetic oligonucleotide
auugacauaggcuucaaau

SEQ ID NO: 3264723 - RNA, 19 nt, Artificial Sequence
  Description of Artificial Sequence: Synthetic oligonucleotide
ucauucauggucacugggg

SEQ ID NO: 3264724 - RNA, 19 nt, Artificial Sequence
  Description of Artificial Sequence: Synthetic oligonucleotide
aaucacgaugccaugcucc

SEQ ID NO: 3264725 - RNA, 19 nt, Artificial Sequence
  Description of Artificial Sequence: Synthetic oligonucleotide
uuucaaagagcgcucuggg

SEQ ID NO: 3264726 - RNA, 19 nt, Artificial Sequence
  Description of Artificial Sequence: Synthetic oligonucleotide
uaggcuucaaauuccuugg

SEQ ID NO: 3264727 - RNA, 19 nt, Artificial Sequence
  Description of Artificial Sequence: Synthetic oligonucleotide
uuagggaccuccaacauaa

SEQ ID NO: 3264728 - RNA, 19 nt, Artificial Sequence
  Description of Artificial Sequence: Synthetic oligonucleotide
auaggcuucaaauuccuug

SEQ ID NO: 3264729 - RNA, 19 nt, Artificial Sequence
  Description of Artificial Sequence: Synthetic oligonucleotide
ugucuguuaauuucaaaga

SEQ ID NO: 3264730 - RNA, 19 nt, Artificial Sequence
  Description of Artificial Sequence: Synthetic oligonucleotide
uccaacauaaagucagugc

SEQ ID NO: 3264731 - RNA, 19 nt, Artificial Sequence
  Description of Artificial Sequence: Synthetic oligonucleotide
ugacauaggcuucaaauuc

SEQ ID NO: 3264732 - RNA, 19 nt, Artificial Sequence
  Description of Artificial Sequence: Synthetic oligonucleotide
accgauugcauggugaacc

SEQ ID NO: 3264733 - RNA, 19 nt, Artificial Sequence
  Description of Artificial Sequence: Synthetic oligonucleotide
ugacaaaauuuccauugag

SEQ ID NO: 3264734 - RNA, 19 nt, Artificial Sequence
  Description of Artificial Sequence: Synthetic oligonucleotide
ucaaagagcgcucugggaa

SEQ ID NO: 3264735 - RNA, 19 nt, Artificial Sequence
  Description of Artificial Sequence: Synthetic oligonucleotide
ugcguaacaaccauaugga

SEQ ID NO: 3264736 - RNA, 19 nt, Artificial Sequence
  Description of Artificial Sequence: Synthetic oligonucleotide
aaaaucacgaugccaugcu

SEQ ID NO: 3264737 - RNA, 19 nt, Artificial Sequence
  Description of Artificial Sequence: Synthetic oligonucleotide
cugacgaggucauucaugg

SEQ ID NO: 3264738 - RNA, 19 nt, Artificial Sequence
  Description of Artificial Sequence: Synthetic oligonucleotide
ucuguagcacuuuugaaaa

SEQ ID NO: 3264739 - RNA, 19 nt, Artificial Sequence
  Description of Artificial Sequence: Synthetic oligonucleotide
gucuguuaauuucaaagag

SEQ ID NO: 3264740 - RNA, 19 nt, Artificial Sequence
  Description of Artificial Sequence: Synthetic oligonucleotide
gacaaaauuuccauugagc

SEQ ID NO: 3264741 - RNA, 19 nt, Artificial Sequence
  Description of Artificial Sequence: Synthetic oligonucleotide
aacgaagaccauguugggc

SEQ ID NO: 3264742 - RNA, 19 nt, Artificial Sequence
  Description of Artificial Sequence: Synthetic oligonucleotide
gaauguacguuccaucaug

SEQ ID NO: 3264743 - RNA, 19 nt, Artificial Sequence
  Description of Artificial Sequence: Synthetic oligonucleotide
aaauuccuuggaaaucggc

SEQ ID NO: 3264744 - RNA, 19 nt, Artificial Sequence
  Description of Artificial Sequence: Synthetic oligonucleotide
gaacucccgguuuaaaucc

SEQ ID NO: 3264745 - RNA, 19 nt, Artificial Sequence
  Description of Artificial Sequence: Synthetic oligonucleotide
uuggaaaucggcuuucccu

SEQ ID NO: 3264746 - RNA, 19 nt, Artificial Sequence
  Description of Artificial Sequence: Synthetic oligonucleotide
caucauguaggcgaggugg

SEQ ID NO: 3264747 - RNA, 19 nt, Artificial Sequence
  Description of Artificial Sequence: Synthetic oligonucleotide
ccaacauaaagucagugcg

SEQ ID NO: 3264748 - RNA, 19 nt, Artificial Sequence
  Description of Artificial Sequence: Synthetic oligonucleotide
ccaacgaagaccauguugg

SEQ ID NO: 3264749 - RNA, 19 nt, Artificial Sequence
  Description of Artificial Sequence: Synthetic oligonucleotide
aaucggcuuucccuggugg

SEQ ID NO: 3264750 - RNA, 19 nt, Artificial Sequence
  Description of Artificial Sequence: Synthetic oligonucleotide
aaaucacgaugccaugcuc

SEQ ID NO: 3264751 - RNA, 19 nt, Artificial Sequence
  Description of Artificial Sequence: Synthetic oligonucleotide
uuaauuucaaagagcgcuc

SEQ ID NO: 3264752 - RNA, 19 nt, Artificial Sequence
  Description of Artificial Sequence: Synthetic oligonucleotide
aaccauauggacacuugac

SEQ ID NO: 3264753 - RNA, 19 nt, Artificial Sequence
  Description of Artificial Sequence: Synthetic oligonucleotide
acgaagaccauguugggca

SEQ ID NO: 3264754 - RNA, 19 nt, Artificial Sequence
  Description of Artificial Sequence: Synthetic oligonucleotide
gaugccaugcuccccagag

SEQ ID NO: 3264755 - RNA, 19 nt, Artificial Sequence
  Description of Artificial Sequence: Synthetic oligonucleotide
ucaagauagugacaaaauu

SEQ ID NO: 3264756 - RNA, 19 nt, Artificial Sequence
  Description of Artificial Sequence: Synthetic oligonucleotide
guacguuccaucauguagg

SEQ ID NO: 3264757 - RNA, 19 nt, Artificial Sequence
  Description of Artificial Sequence: Synthetic oligonucleotide
auuucaaagagcgcucugg

SEQ ID NO: 3264758 - RNA, 19 nt, Artificial Sequence
  Description of Artificial Sequence: Synthetic oligonucleotide
auagugacaaaauuuccau

SEQ ID NO: 3264759 - RNA, 19 nt, Artificial Sequence
  Description of Artificial Sequence: Synthetic oligonucleotide
uucaagauagugacaaaau

SEQ ID NO: 3264760 - RNA, 19 nt, Artificial Sequence
  Description of Artificial Sequence: Synthetic oligonucleotide
aauuccuuggaaaucggcu

SEQ ID NO: 3264761 - RNA, 19 nt, Artificial Sequence
  Description of Artificial Sequence: Synthetic oligonucleotide
agauagugacaaaauuucc

SEQ ID NO: 3264762 - RNA, 19 nt, Artificial Sequence
  Description of Artificial Sequence: Synthetic oligonucleotide
gauagugacaaaauuucca

SEQ ID NO: 3264763 - RNA, 19 nt, Artificial Sequence
  Description of Artificial Sequence: Synthetic oligonucleotide
uggaaaucggcuuucccug

SEQ ID NO: 3264764 - RNA, 19 nt, Artificial Sequence
  Description of Artificial Sequence: Synthetic oligonucleotide
aucacgaugccaugcuccc

SEQ ID NO: 3264765 - RNA, 19 nt, Artificial Sequence
  Description of Artificial Sequence: Synthetic oligonucleotide
agguuuagggaccuccaac

SEQ ID NO: 3264766 - RNA, 19 nt, Artificial Sequence
  Description of Artificial Sequence: Synthetic oligonucleotide
uguuaauuucaaagagcgc

SEQ ID NO: 3264767 - RNA, 19 nt, Artificial Sequence
  Description of Artificial Sequence: Synthetic oligonucleotide
guuaauuucaaagagcgcu

SEQ ID NO: 3264768 - RNA, 19 nt, Artificial Sequence
  Description of Artificial Sequence: Synthetic oligonucleotide
ugaacucccgguuuaaauc

SEQ ID NO: 3264769 - RNA, 19 nt, Artificial Sequence
  Description of Artificial Sequence: Synthetic oligonucleotide
ugugucucgaucacguacu

SEQ ID NO: 3264770 - RNA, 19 nt, Artificial Sequence
  Description of Artificial Sequence: Synthetic oligonucleotide
gacgaggucauucaugguc

SEQ ID NO: 3264771 - RNA, 19 nt, Artificial Sequence
  Description of Artificial Sequence: Synthetic oligonucleotide
gaaaaucacgaugccaugc

SEQ ID NO: 3264772 - RNA, 19 nt, Artificial Sequence
  Description of Artificial Sequence: Synthetic oligonucleotide
aauuucaaagagcgcucug

SEQ ID NO: 3264773 - RNA, 19 nt, Artificial Sequence
  Description of Artificial Sequence: Synthetic oligonucleotide
ugccaugcuccccagaggc

SEQ ID NO: 3264774 - RNA, 19 nt, Artificial Sequence
  Description of Artificial Sequence: Synthetic oligonucleotide
auguaggcgaggugguucc

SEQ ID NO: 3264775 - RNA, 19 nt, Artificial Sequence
  Description of Artificial Sequence: Synthetic oligonucleotide
accauauggacacuugacu

SEQ ID NO: 3264776 - RNA, 19 nt, Artificial Sequence
  Description of Artificial Sequence: Synthetic oligonucleotide
ucagaggcaaugucuguag

SEQ ID NO: 3264777 - RNA, 19 nt, Artificial Sequence
  Description of Artificial Sequence: Synthetic oligonucleotide
cauggcagaauguacguuc

SEQ ID NO: 3264778 - RNA, 19 nt, Artificial Sequence
  Description of Artificial Sequence: Synthetic oligonucleotide
uugugucucgaucacguac

SEQ ID NO: 3264779 - RNA, 19 nt, Artificial Sequence
  Description of Artificial Sequence: Synthetic oligonucleotide
cauaaagucagugcguaac

SEQ ID NO: 3264780 - RNA, 19 nt, Artificial Sequence
  Description of Artificial Sequence: Synthetic oligonucleotide
ucgaucacguacuccaccc

SEQ ID NO: 3264781 - RNA, 19 nt, Artificial Sequence
  Description of Artificial Sequence: Synthetic oligonucleotide
accuccaacauaaagucag

SEQ ID NO: 3264782 - RNA, 19 nt, Artificial Sequence
  Description of Artificial Sequence: Synthetic oligonucleotide
auggugaaccaguggcucc

SEQ ID NO: 3264783 - RNA, 19 nt, Artificial Sequence
  Description of Artificial Sequence: Synthetic oligonucleotide
auaaagucagugcguaaca

SEQ ID NO: 3264784 - RNA, 19 nt, Artificial Sequence
  Description of Artificial Sequence: Synthetic oligonucleotide
augucuguagcacuuuuga

SEQ ID NO: 3264785 - RNA, 19 nt, Artificial Sequence
  Description of Artificial Sequence: Synthetic oligonucleotide
auauggacacuugacugac

SEQ ID NO: 3264786 - RNA, 19 nt, Artificial Sequence
  Description of Artificial Sequence: Synthetic oligonucleotide
uugacauaggcuucaaauu

SEQ ID NO: 3264787 - RNA, 19 nt, Artificial Sequence
  Description of Artificial Sequence: Synthetic oligonucleotide
ugguuccagacucucuccg

SEQ ID NO: 3264788 - RNA, 19 nt, Artificial Sequence
  Description of Artificial Sequence: Synthetic oligonucleotide
aaggcauggcagaauguac

SEQ ID NO: 3264789 - RNA, 19 nt, Artificial Sequence
  Description of Artificial Sequence: Synthetic oligonucleotide
gucacuggggucuggagag

SEQ ID NO: 3264790 - RNA, 19 nt, Artificial Sequence
  Description of Artificial Sequence: Synthetic oligonucleotide
gacauaggcuucaaauucc

SEQ ID NO: 3264791 - RNA, 19 nt, Artificial Sequence
  Description of Artificial Sequence: Synthetic oligonucleotide
aaauuuccauugagcgucc

SEQ ID NO: 3264792 - RNA, 19 nt, Artificial Sequence
  Description of Artificial Sequence: Synthetic oligonucleotide
aacauaaagucagugcgua

SEQ ID NO: 3264793 - RNA, 19 nt, Artificial Sequence
  Description of Artificial Sequence: Synthetic oligonucleotide
uucauggucacuggggucu

SEQ ID NO: 3264794 - RNA, 19 nt, Artificial Sequence
  Description of Artificial Sequence: Synthetic oligonucleotide
gucauucauggucacuggg

SEQ ID NO: 3264795 - RNA, 19 nt, Artificial Sequence
  Description of Artificial Sequence: Synthetic oligonucleotide
accauguugggcaucacag

SEQ ID NO: 3264796 - RNA, 19 nt, Artificial Sequence
  Description of Artificial Sequence: Synthetic oligonucleotide
gucuguagcacuuuugaaa

SEQ ID NO: 3264797 - RNA, 19 nt, Artificial Sequence
  Description of Artificial Sequence: Synthetic oligonucleotide
gucucgaucacguacucca

SEQ ID NO: 3264798 - RNA, 19 nt, Artificial Sequence
  Description of Artificial Sequence: Synthetic oligonucleotide
aaaggcauggcagaaugua

SEQ ID NO: 3264799 - RNA, 19 nt, Artificial Sequence
  Description of Artificial Sequence: Synthetic oligonucleotide
agaggcaaugucuguagca

SEQ ID NO: 3264800 - RNA, 19 nt, Artificial Sequence
  Description of Artificial Sequence: Synthetic oligonucleotide
aaugucuguagcacuuuug

SEQ ID NO: 3264801 - RNA, 19 nt, Artificial Sequence
  Description of Artificial Sequence: Synthetic oligonucleotide
ggucuggagagcuucagag

SEQ ID NO: 3264802 - RNA, 19 nt, Artificial Sequence
  Description of Artificial Sequence: Synthetic oligonucleotide
aucggcuuucccugguggc

SEQ ID NO: 3264803 - RNA, 19 nt, Artificial Sequence
  Description of Artificial Sequence: Synthetic oligonucleotide
uugcauggugaaccagugg

SEQ ID NO: 3264804 - RNA, 19 nt, Artificial Sequence
  Description of Artificial Sequence: Synthetic oligonucleotide
aauguacguuccaucaugu

SEQ ID NO: 3264805 - RNA, 19 nt, Artificial Sequence
  Description of Artificial Sequence: Synthetic oligonucleotide
uaaggaaugaaacaaaaca

SEQ ID NO: 3264806 - RNA, 19 nt, Artificial Sequence
  Description of Artificial Sequence: Synthetic oligonucleotide
uuaacuguacccaaagucc

SEQ ID NO: 3264807 - RNA, 19 nt, Artificial Sequence
  Description of Artificial Sequence: Synthetic oligonucleotide
uuugcaacauaauuuaaag

SEQ ID NO: 3264808 - RNA, 19 nt, Artificial Sequence
  Description of Artificial Sequence: Synthetic oligonucleotide
uaaaacaggaagcacagca

SEQ ID NO: 3264809 - RNA, 19 nt, Artificial Sequence
  Description of Artificial Sequence: Synthetic oligonucleotide
guuguuaacaguauguugg

SEQ ID NO: 3264810 - RNA, 19 nt, Artificial Sequence
  Description of Artificial Sequence: Synthetic oligonucleotide
uuuugaaaauauucaauag

SEQ ID NO: 3264811 - RNA, 19 nt, Artificial Sequence
  Description of Artificial Sequence: Synthetic oligonucleotide
aaauauucaauagagcuga

SEQ ID NO: 3264812 - RNA, 19 nt, Artificial Sequence
  Description of Artificial Sequence: Synthetic oligonucleotide
aaacaucccagccagucac

SEQ ID NO: 3264813 - RNA, 19 nt, Artificial Sequence
  Description of Artificial Sequence: Synthetic oligonucleotide
uaaacuacaaugauucccu

SEQ ID NO: 3264814 - RNA, 19 nt, Artificial Sequence
  Description of Artificial Sequence: Synthetic oligonucleotide
aauugagcucucuauaugu

SEQ ID NO: 3264815 - RNA, 19 nt, Artificial Sequence
  Description of Artificial Sequence: Synthetic oligonucleotide
aaucuugauaaaguggcac

SEQ ID NO: 3264816 - RNA, 19 nt, Artificial Sequence
  Description of Artificial Sequence: Synthetic oligonucleotide
auaaagguucaaaucaucc

SEQ ID NO: 3264817 - RNA, 19 nt, Artificial Sequence
  Description of Artificial Sequence: Synthetic oligonucleotide
  modified_base (4)..(4): a, c, u, g, unknown or other
uccnguuuugacaugacgu

SEQ ID NO: 3264818 - RNA, 19 nt, Artificial Sequence
  Description of Artificial Sequence: Synthetic oligonucleotide
uaaaguggcacccuugggc

SEQ ID NO: 3264819 - RNA, 19 nt, Artificial Sequence
  Description of Artificial Sequence: Synthetic oligonucleotide
uacgccaugaagauaagug

SEQ ID NO: 3264820 - RNA, 19 nt, Artificial Sequence
  Description of Artificial Sequence: Synthetic oligonucleotide
aucuugauaaaguggcacc

SEQ ID NO: 3264821 - RNA, 19 nt, Artificial Sequence
  Description of Artificial Sequence: Synthetic oligonucleotide
acacaagucaaccugaacu

SEQ ID NO: 3264822 - RNA, 19 nt, Artificial Sequence
  Description of Artificial Sequence: Synthetic oligonucleotide
ggagaaauggaccaaaacc

SEQ ID NO: 3264823 - RNA, 19 nt, Artificial Sequence
  Description of Artificial Sequence: Synthetic oligonucleotide
uugcuuuugagaacuagag

SEQ ID NO: 3264824 - RNA, 19 nt, Artificial Sequence
  Description of Artificial Sequence: Synthetic oligonucleotide
uuuuaaaugggacaugcuu

SEQ ID NO: 3264825 - RNA, 19 nt, Artificial Sequence
  Description of Artificial Sequence: Synthetic oligonucleotide
guggcaaucacauuuggag

SEQ ID NO: 3264826 - RNA, 19 nt, Artificial Sequence
  Description of Artificial Sequence: Synthetic oligonucleotide
ggagagaucgauuucaucc

SEQ ID NO: 3264827 - RNA, 19 nt, Artificial Sequence
  Description of Artificial Sequence: Synthetic oligonucleotide
uuaacaguauguugggaag

SEQ ID NO: 3264828 - RNA, 19 nt, Artificial Sequence
  Description of Artificial Sequence: Synthetic oligonucleotide
agugauucuucuuuguuug

SEQ ID NO: 3264829 - RNA, 19 nt, Artificial Sequence
  Description of Artificial Sequence: Synthetic oligonucleotide
agcucauuagaaauuacgc

SEQ ID NO: 3264830 - RNA, 19 nt, Artificial Sequence
  Description of Artificial Sequence: Synthetic oligonucleotide
  modified_base (19)..(19): a, c, u, g, unknown or other
aauggcugcaaguuguccn

SEQ ID NO: 3264831 - RNA, 19 nt, Artificial Sequence
  Description of Artificial Sequence: Synthetic oligonucleotide
aaugggacaugcuucuuug

SEQ ID NO: 3264832 - RNA, 19 nt, Artificial Sequence
  Description of Artificial Sequence: Synthetic oligonucleotide
acgccaugaagauaagugc

SEQ ID NO: 3264833 - RNA, 19 nt, Artificial Sequence
  Description of Artificial Sequence: Synthetic oligonucleotide
ugaugggcauaucuggugg

SEQ ID NO: 3264834 - RNA, 19 nt, Artificial Sequence
  Description of Artificial Sequence: Synthetic oligonucleotide
uuuccuagcauguguuucg

SEQ ID NO: 3264835 - RNA, 19 nt, Artificial Sequence
  Description of Artificial Sequence: Synthetic oligonucleotide
  modified_base (4)..(4): a, c, u, g, unknown or other
aagnaccguaguauguugc

SEQ ID NO: 3264836 - RNA, 19 nt, Artificial Sequence
  Description of Artificial Sequence: Synthetic oligonucleotide
  modified_base (7)..(7): a, c, u, g, unknown or other
ugaaagnaccguaguaugu

SEQ ID NO: 3264837 - RNA, 19 nt, Artificial Sequence
  Description of Artificial Sequence: Synthetic oligonucleotide
uauaaccucagcucauuag

SEQ ID NO: 3264838 - RNA, 19 nt, Artificial Sequence
  Description of Artificial Sequence: Synthetic oligonucleotide
gagaaauggaccaaaacca

SEQ ID NO: 3264839 - RNA, 19 nt, Artificial Sequence
  Description of Artificial Sequence: Synthetic oligonucleotide
  modified_base (5)..(5): a, c, u, g, unknown or other
aaagnaccguaguauguug

SEQ ID NO: 3264840 - RNA, 19 nt, Artificial Sequence
  Description of Artificial Sequence: Synthetic oligonucleotide
cacauaaagguucaaauca

SEQ ID NO: 3264841 - RNA, 19 nt, Artificial Sequence
  Description of Artificial Sequence: Synthetic oligonucleotide
ucuucaacauguuaauuuc

SEQ ID NO: 3264842 - RNA, 19 nt, Artificial Sequence
  Description of Artificial Sequence: Synthetic oligonucleotide
aacuuagaaauaaggaaug

SEQ ID NO: 3264843 - RNA, 19 nt, Artificial Sequence
  Description of Artificial Sequence: Synthetic oligonucleotide
gacaugacgucccuuauac

SEQ ID NO: 3264844 - RNA, 19 nt, Artificial Sequence
  Description of Artificial Sequence: Synthetic oligonucleotide
ucuauaugucuccuggaga

SEQ ID NO: 3264845 - RNA, 19 nt, Artificial Sequence
  Description of Artificial Sequence: Synthetic oligonucleotide
agguucucagaauuuuggc

SEQ ID NO: 3264846 - RNA, 19 nt, Artificial Sequence
  Description of Artificial Sequence: Synthetic oligonucleotide
uaacuguacccaaaguccc

SEQ ID NO: 3264847 - RNA, 19 nt, Artificial Sequence
  Description of Artificial Sequence: Synthetic oligonucleotide
aagaccacccuucauuaca

SEQ ID NO: 3264848 - RNA, 19 nt, Artificial Sequence
  Description of Artificial Sequence: Synthetic oligonucleotide
agcacagauaccauuuugc

SEQ ID NO: 3264849 - RNA, 19 nt, Artificial Sequence
  Description of Artificial Sequence: Synthetic oligonucleotide
agacauaucaacuccucca

SEQ ID NO: 3264850 - RNA, 19 nt, Artificial Sequence
  Description of Artificial Sequence: Synthetic oligonucleotide
uuagaaauuacgccaugaa

SEQ ID NO: 3264851 - RNA, 19 nt, Artificial Sequence
  Description of Artificial Sequence: Synthetic oligonucleotide
auaaccucagcucauuaga

SEQ ID NO: 3264852 - RNA, 19 nt, Artificial Sequence
  Description of Artificial Sequence: Synthetic oligonucleotide
auuacauuccuggugucac

SEQ ID NO: 3264853 - RNA, 19 nt, Artificial Sequence
  Description of Artificial Sequence: Synthetic oligonucleotide
auaaggaaugaaacaaaac

SEQ ID NO: 3264854 - RNA, 19 nt, Artificial Sequence
  Description of Artificial Sequence: Synthetic oligonucleotide
cauuuguuuaggcaaaauc

SEQ ID NO: 3264855 - RNA, 19 nt, Artificial Sequence
  Description of Artificial Sequence: Synthetic oligonucleotide
  modified_base (8)..(8): a, c, u, g, unknown or other
augaaagnaccguaguaug

SEQ ID NO: 3264856 - RNA, 19 nt, Artificial Sequence
  Description of Artificial Sequence: Synthetic oligonucleotide
ugcugugaugaacagagaa

SEQ ID NO: 3264857 - RNA, 19 nt, Artificial Sequence
  Description of Artificial Sequence: Synthetic oligonucleotide
acuauuauuuugaaaauau

SEQ ID NO: 3264858 - RNA, 19 nt, Artificial Sequence
  Description of Artificial Sequence: Synthetic oligonucleotide
gaccuuaucauuucuuuca

SEQ ID NO: 3264859 - RNA, 19 nt, Artificial Sequence
  Description of Artificial Sequence: Synthetic oligonucleotide
agugagaucccgaucuucc

SEQ ID NO: 3264860 - RNA, 19 nt, Artificial Sequence
  Description of Artificial Sequence: Synthetic oligonucleotide
ucauuucuuucacauagaa

SEQ ID NO: 3264861 - RNA, 19 nt, Artificial Sequence
  Description of Artificial Sequence: Synthetic oligonucleotide
cugagauugcccaauugag

SEQ ID NO: 3264862 - RNA, 19 nt, Artificial Sequence
  Description of Artificial Sequence: Synthetic oligonucleotide
uuucccacggaauuugaga

SEQ ID NO: 3264863 - RNA, 19 nt, Artificial Sequence
  Description of Artificial Sequence: Synthetic oligonucleotide
uacuccauccaaauguccu

SEQ ID NO: 3264864 - RNA, 19 nt, Artificial Sequence
  Description of Artificial Sequence: Synthetic oligonucleotide
ucauuagaaauuacgccau

SEQ ID NO: 3264865 - RNA, 19 nt, Artificial Sequence
  Description of Artificial Sequence: Synthetic oligonucleotide
acaaacaaaacgagguagg

SEQ ID NO: 3264866 - RNA, 19 nt, Artificial Sequence
  Description of Artificial Sequence: Synthetic oligonucleotide
ucuuagugauucuucuuug

SEQ ID NO: 3264867 - RNA, 19 nt, Artificial Sequence
  Description of Artificial Sequence: Synthetic oligonucleotide
ugaugaacagagaaacaaa

SEQ ID NO: 3264868 - RNA, 19 nt, Artificial Sequence
  Description of Artificial Sequence: Synthetic oligonucleotide
gagucuagucccuugacuc

SEQ ID NO: 3264869 - RNA, 19 nt, Artificial Sequence
  Description of Artificial Sequence: Synthetic oligonucleotide
uccaauuccaguaguugcu

SEQ ID NO: 3264870 - RNA, 19 nt, Artificial Sequence
  Description of Artificial Sequence: Synthetic oligonucleotide
  modified_base (9)..(9): a, c, u, g, unknown or other
aguuguccnguuuugacau

SEQ ID NO: 3264871 - RNA, 19 nt, Artificial Sequence
  Description of Artificial Sequence: Synthetic oligonucleotide
ucgcuuaugcauaaauacu

SEQ ID NO: 3264872 - RNA, 19 nt, Artificial Sequence
  Description of Artificial Sequence: Synthetic oligonucleotide
ucuugauaaaguggcaccc

SEQ ID NO: 3264873 - RNA, 19 nt, Artificial Sequence
  Description of Artificial Sequence: Synthetic oligonucleotide
  modified_base (14)..(14): a, c, u, g, unknown or other
uucuugaugaaagnaccgu

SEQ ID NO: 3264874 - RNA, 19 nt, Artificial Sequence
  Description of Artificial Sequence: Synthetic oligonucleotide
guuaacaguauguugggaa

SEQ ID NO: 3264875 - RNA, 19 nt, Artificial Sequence
  Description of Artificial Sequence: Synthetic oligonucleotide
aggcaaaaucaguaggauc

SEQ ID NO: 3264876 - RNA, 19 nt, Artificial Sequence
  Description of Artificial Sequence: Synthetic oligonucleotide
gaaguuuggaggaacauaa

SEQ ID NO: 3264877 - RNA, 19 nt, Artificial Sequence
  Description of Artificial Sequence: Synthetic oligonucleotide
cuuccgagagugucgaucc

SEQ ID NO: 3264878 - RNA, 19 nt, Artificial Sequence
  Description of Artificial Sequence: Synthetic oligonucleotide
uuugacaugacgucccuua

SEQ ID NO: 3264879 - RNA, 19 nt, Artificial Sequence
  Description of Artificial Sequence: Synthetic oligonucleotide
gucauauaaccucagcuca

SEQ ID NO: 3264880 - RNA, 19 nt, Artificial Sequence
  Description of Artificial Sequence: Synthetic oligonucleotide
aaguuccaccaacucaaag

SEQ ID NO: 3264881 - RNA, 19 nt, Artificial Sequence
  Description of Artificial Sequence: Synthetic oligonucleotide
uaaccuuugagcucgcuua

SEQ ID NO: 3264882 - RNA, 19 nt, Artificial Sequence
  Description of Artificial Sequence: Synthetic oligonucleotide
uacauuagcugcucauuug

SEQ ID NO: 3264883 - RNA, 19 nt, Artificial Sequence
  Description of Artificial Sequence: Synthetic oligonucleotide
gacacagcagcucagaagu

SEQ ID NO: 3264884 - RNA, 19 nt, Artificial Sequence
  Description of Artificial Sequence: Synthetic oligonucleotide
acauuagcugcucauuugu

SEQ ID NO: 3264885 - RNA, 19 nt, Artificial Sequence
  Description of Artificial Sequence: Synthetic oligonucleotide
augaagauaagugccaagu

SEQ ID NO: 3264886 - RNA, 19 nt, Artificial Sequence
  Description of Artificial Sequence: Synthetic oligonucleotide
guccuguuuccacugaccg

SEQ ID NO: 3264887 - RNA, 19 nt, Artificial Sequence
  Description of Artificial Sequence: Synthetic oligonucleotide
uuuucccacggaauuugag

SEQ ID NO: 3264888 - RNA, 19 nt, Artificial Sequence
  Description of Artificial Sequence: Synthetic oligonucleotide
agcccauucauccaugccu

SEQ ID NO: 3264889 - RNA, 19 nt, Artificial Sequence
  Description of Artificial Sequence: Synthetic oligonucleotide
uucgcgggagaaauggacc

SEQ ID NO: 3264890 - RNA, 19 nt, Artificial Sequence
  Description of Artificial Sequence: Synthetic oligonucleotide
auggaccaaaaccagccag

SEQ ID NO: 3264891 - RNA, 19 nt, Artificial Sequence
  Description of Artificial Sequence: Synthetic oligonucleotide
caguauguugggaaguuug

SEQ ID NO: 3264892 - RNA, 19 nt, Artificial Sequence
  Description of Artificial Sequence: Synthetic oligonucleotide
cuaaauacacacacaccuc

SEQ ID NO: 3264893 - RNA, 19 nt, Artificial Sequence
  Description of Artificial Sequence: Synthetic oligonucleotide
uuuugagaacuagagggac

SEQ ID NO: 3264894 - RNA, 19 nt, Artificial Sequence
  Description of Artificial Sequence: Synthetic oligonucleotide
ugcuuuagauaacugcaaa

SEQ ID NO: 3264895 - RNA, 19 nt, Artificial Sequence
  Description of Artificial Sequence: Synthetic oligonucleotide
ugcacagauguuguuaaca

SEQ ID NO: 3264896 - RNA, 19 nt, Artificial Sequence
  Description of Artificial Sequence: Synthetic oligonucleotide
gcaugguugucauauaacc

SEQ ID NO: 3264897 - RNA, 19 nt, Artificial Sequence
  Description of Artificial Sequence: Synthetic oligonucleotide
caugaauagguucucagaa

SEQ ID NO: 3264898 - RNA, 19 nt, Artificial Sequence
  Description of Artificial Sequence: Synthetic oligonucleotide
gguucaaacugucacagca

SEQ ID NO: 3264899 - RNA, 19 nt, Artificial Sequence
  Description of Artificial Sequence: Synthetic oligonucleotide
gcucauuagaaauuacgcc

SEQ ID NO: 3264900 - RNA, 19 nt, Artificial Sequence
  Description of Artificial Sequence: Synthetic oligonucleotide
auaucugguggucaccuga

SEQ ID NO: 3264901 - RNA, 19 nt, Artificial Sequence
  Description of Artificial Sequence: Synthetic oligonucleotide
uccccugugacauccauaa

SEQ ID NO: 3264902 - RNA, 19 nt, Artificial Sequence
  Description of Artificial Sequence: Synthetic oligonucleotide
cccauuuccgacaaguucc

SEQ ID NO: 3264903 - RNA, 19 nt, Artificial Sequence
  Description of Artificial Sequence: Synthetic oligonucleotide
uuagugauucuucuuuguu

SEQ ID NO: 3264904 - RNA, 19 nt, Artificial Sequence
  Description of Artificial Sequence: Synthetic oligonucleotide
auuagaaauuacgccauga

SEQ ID NO: 3264905 - RNA, 19 nt, Artificial Sequence
  Description of Artificial Sequence: Synthetic oligonucleotide
auauauauauauaagauac

SEQ ID NO: 3264906 - RNA, 19 nt, Artificial Sequence
  Description of Artificial Sequence: Synthetic oligonucleotide
uauauauauauauauaaga

SEQ ID NO: 3264907 - RNA, 19 nt, Artificial Sequence
  Description of Artificial Sequence: Synthetic oligonucleotide
acuucuuuaaaguuuaaac

SEQ ID NO: 3264908 - RNA, 19 nt, Artificial Sequence
  Description of Artificial Sequence: Synthetic oligonucleotide
aaguuuauccucuacuuac

SEQ ID NO: 3264909 - RNA, 19 nt, Artificial Sequence
  Description of Artificial Sequence: Synthetic oligonucleotide
uauauauauauauauauaa

SEQ ID NO: 3264910 - RNA, 19 nt, Artificial Sequence
  Description of Artificial Sequence: Synthetic oligonucleotide
auauauaagauacacaacu

SEQ ID NO: 3264911 - RNA, 19 nt, Artificial Sequence
  Description of Artificial Sequence: Synthetic oligonucleotide
uauauauauauauauauau

SEQ ID NO: 3264912 - RNA, 19 nt, Artificial Sequence
  Description of Artificial Sequence: Synthetic oligonucleotide
aaaaguaauguaaguaacc

SEQ ID NO: 3264913 - RNA, 19 nt, Artificial Sequence
  Description of Artificial Sequence: Synthetic oligonucleotide
uauguaaucaucaagccau

SEQ ID NO: 3264914 - RNA, 19 nt, Artificial Sequence
  Description of Artificial Sequence: Synthetic oligonucleotide
acauuaaaagaaaauaagc

SEQ ID NO: 3264915 - RNA, 19 nt, Artificial Sequence
  Description of Artificial Sequence: Synthetic oligonucleotide
aaguaaguagguccaacgc

SEQ ID NO: 3264916 - RNA, 19 nt, Artificial Sequence
  Description of Artificial Sequence: Synthetic oligonucleotide
uauaagauacacaacuuca

SEQ ID NO: 3264917 - RNA, 19 nt, Artificial Sequence
  Description of Artificial Sequence: Synthetic oligonucleotide
uucuuuaaaguuuaaacac

SEQ ID NO: 3264918 - RNA, 19 nt, Artificial Sequence
  Description of Artificial Sequence: Synthetic oligonucleotide
uauguuggagcauugacag

SEQ ID NO: 3264919 - RNA, 19 nt, Artificial Sequence
  Description of Artificial Sequence: Synthetic oligonucleotide
aguaaguagguccaacgcc

SEQ ID NO: 3264920 - RNA, 19 nt, Artificial Sequence
  Description of Artificial Sequence: Synthetic oligonucleotide
auugauuucagcuaaggaa

SEQ ID NO: 3264921 - RNA, 19 nt, Artificial Sequence
  Description of Artificial Sequence: Synthetic oligonucleotide
ucagcaaguaaguaggucc

SEQ ID NO: 3264922 - RNA, 19 nt, Artificial Sequence
  Description of Artificial Sequence: Synthetic oligonucleotide
uuaccuaaugaacacuggg

SEQ ID NO: 3264923 - RNA, 19 nt, Artificial Sequence
  Description of Artificial Sequence: Synthetic oligonucleotide
cacauuaaaagaaaauaag

SEQ ID NO: 3264924 - RNA, 19 nt, Artificial Sequence
  Description of Artificial Sequence: Synthetic oligonucleotide
aucaguuucagaaacgagc

SEQ ID NO: 3264925 - RNA, 19 nt, Artificial Sequence
  Description of Artificial Sequence: Synthetic oligonucleotide
ucuauucaaagacaauugc

SEQ ID NO: 3264926 - RNA, 19 nt, Artificial Sequence
  Description of Artificial Sequence: Synthetic oligonucleotide
agaaacgagcguuuggagc

SEQ ID NO: 3264927 - RNA, 19 nt, Artificial Sequence
  Description of Artificial Sequence: Synthetic oligonucleotide
uauauauauauauaagaua

SEQ ID NO: 3264928 - RNA, 19 nt, Artificial Sequence
  Description of Artificial Sequence: Synthetic oligonucleotide
ucugcaaauagccucaccu

SEQ ID NO: 3264929 - RNA, 19 nt, Artificial Sequence
  Description of Artificial Sequence: Synthetic oligonucleotide
ggaguuugcauuuaguugg

SEQ ID NO: 3264930 - RNA, 19 nt, Artificial Sequence
  Description of Artificial Sequence: Synthetic oligonucleotide
uaaguaaccaauaaauaua

SEQ ID NO: 3264931 - RNA, 19 nt, Artificial Sequence
  Description of Artificial Sequence: Synthetic oligonucleotide
cauugaacaagacauacac

SEQ ID NO: 3264932 - RNA, 19 nt, Artificial Sequence
  Description of Artificial Sequence: Synthetic oligonucleotide
uuuaaacacuucaaggugu

SEQ ID NO: 3264933 - RNA, 19 nt, Artificial Sequence
  Description of Artificial Sequence: Synthetic oligonucleotide
uccauauagacauauuuac

SEQ ID NO: 3264934 - RNA, 19 nt, Artificial Sequence
  Description of Artificial Sequence: Synthetic oligonucleotide
gaaacgagcguuuggagcc

SEQ ID NO: 3264935 - RNA, 19 nt, Artificial Sequence
  Description of Artificial Sequence: Synthetic oligonucleotide
uguaaaagccuccaacccc

SEQ ID NO: 3264936 - RNA, 19 nt, Artificial Sequence
  Description of Artificial Sequence: Synthetic oligonucleotide
uucacaagcauguacacaa

SEQ ID NO: 3264937 - RNA, 19 nt, Artificial Sequence
  Description of Artificial Sequence: Synthetic oligonucleotide
aaagccacgucauagcaga

SEQ ID NO: 3264938 - RNA, 19 nt, Artificial Sequence
  Description of Artificial Sequence: Synthetic oligonucleotide
uccaacgccaagcagcugg

SEQ ID NO: 3264939 - RNA, 19 nt, Artificial Sequence
  Description of Artificial Sequence: Synthetic oligonucleotide
ucagauaaccuuccugagg

SEQ ID NO: 3264940 - RNA, 19 nt, Artificial Sequence
  Description of Artificial Sequence: Synthetic oligonucleotide
uggaucagcaaguaaguag

SEQ ID NO: 3264941 - RNA, 19 nt, Artificial Sequence
  Description of Artificial Sequence: Synthetic oligonucleotide
uuuacugcauggaaaacgu

SEQ ID NO: 3264942 - RNA, 19 nt, Artificial Sequence
  Description of Artificial Sequence: Synthetic oligonucleotide
augccuauggcacagaaca

SEQ ID NO: 3264943 - RNA, 19 nt, Artificial Sequence
  Description of Artificial Sequence: Synthetic oligonucleotide
uauucgauacucuacuucu

SEQ ID NO: 3264944 - RNA, 19 nt, Artificial Sequence
  Description of Artificial Sequence: Synthetic oligonucleotide
uauguauuuauguauuuau

SEQ ID NO: 3264945 - RNA, 19 nt, Artificial Sequence
  Description of Artificial Sequence: Synthetic oligonucleotide
uauauauauauaagauaca

SEQ ID NO: 3264946 - RNA, 19 nt, Artificial Sequence
  Description of Artificial Sequence: Synthetic oligonucleotide
uuauccucuacuuacacua

SEQ ID NO: 3264947 - RNA, 19 nt, Artificial Sequence
  Description of Artificial Sequence: Synthetic oligonucleotide
auauauauauauauauaag

SEQ ID NO: 3264948 - RNA, 19 nt, Artificial Sequence
  Description of Artificial Sequence: Synthetic oligonucleotide
agauacacaacuucauaag

SEQ ID NO: 3264949 - RNA, 19 nt, Artificial Sequence
  Description of Artificial Sequence: Synthetic oligonucleotide
cagauaaccuuccugaggc

SEQ ID NO: 3264950 - RNA, 19 nt, Artificial Sequence
  Description of Artificial Sequence: Synthetic oligonucleotide
uggagcauugacagcaugg

SEQ ID NO: 3264951 - RNA, 19 nt, Artificial Sequence
  Description of Artificial Sequence: Synthetic oligonucleotide
uuuaccuaaugaacacugg

SEQ ID NO: 3264952 - RNA, 19 nt, Artificial Sequence
  Description of Artificial Sequence: Synthetic oligonucleotide
uguggugguaguauuuuag

SEQ ID NO: 3264953 - RNA, 19 nt, Artificial Sequence
  Description of Artificial Sequence: Synthetic oligonucleotide
aaaaugauugugugguggu

SEQ ID NO: 3264954 - RNA, 19 nt, Artificial Sequence
  Description of Artificial Sequence: Synthetic oligonucleotide
uacucuacuucuuucagga

SEQ ID NO: 3264955 - RNA, 19 nt, Artificial Sequence
  Description of Artificial Sequence: Synthetic oligonucleotide
agguguaacagguacaaca

SEQ ID NO: 3264956 - RNA, 19 nt, Artificial Sequence
  Description of Artificial Sequence: Synthetic oligonucleotide
aguuggaucagcaaguaag

SEQ ID NO: 3264957 - RNA, 19 nt, Artificial Sequence
  Description of Artificial Sequence: Synthetic oligonucleotide
auauauauauauauaagau

SEQ ID NO: 3264958 - RNA, 19 nt, Artificial Sequence
  Description of Artificial Sequence: Synthetic oligonucleotide
cuuuacugcauggaaaacg

SEQ ID NO: 3264959 - RNA, 19 nt, Artificial Sequence
  Description of Artificial Sequence: Synthetic oligonucleotide
aagaacauugcuucuuggu

SEQ ID NO: 3264960 - RNA, 19 nt, Artificial Sequence
  Description of Artificial Sequence: Synthetic oligonucleotide
caaguaaguagguccaacg

SEQ ID NO: 3264961 - RNA, 19 nt, Artificial Sequence
  Description of Artificial Sequence: Synthetic oligonucleotide
auuuaauucacaagcaugu

SEQ ID NO: 3264962 - RNA, 19 nt, Artificial Sequence
  Description of Artificial Sequence: Synthetic oligonucleotide
uucuccuauguaaucauca

SEQ ID NO: 3264963 - RNA, 19 nt, Artificial Sequence
  Description of Artificial Sequence: Synthetic oligonucleotide
aaaugauccagccaucauu

SEQ ID NO: 3264964 - RNA, 19 nt, Artificial Sequence
  Description of Artificial Sequence: Synthetic oligonucleotide
uaauguaaguaaccaauaa

SEQ ID NO: 3264965 - RNA, 19 nt, Artificial Sequence
  Description of Artificial Sequence: Synthetic oligonucleotide
aaugauggaguuugcauuu

SEQ ID NO: 3264966 - RNA, 19 nt, Artificial Sequence
  Description of Artificial Sequence: Synthetic oligonucleotide
  modified_base (4)..(4): a, c, u, g, unknown or other
accnuuaaaaucucucugu

SEQ ID NO: 3264967 - RNA, 19 nt, Artificial Sequence
  Description of Artificial Sequence: Synthetic oligonucleotide
uacacacauauauauauau

SEQ ID NO: 3264968 - RNA, 19 nt, Artificial Sequence
  Description of Artificial Sequence: Synthetic oligonucleotide
agguacaacaguugcuggc

SEQ ID NO: 3264969 - RNA, 19 nt, Artificial Sequence
  Description of Artificial Sequence: Synthetic oligonucleotide
ucaucaagccaucauuuac

SEQ ID NO: 3264970 - RNA, 19 nt, Artificial Sequence
  Description of Artificial Sequence: Synthetic oligonucleotide
ugcacauuaaaagaaaaua

SEQ ID NO: 3264971 - RNA, 19 nt, Artificial Sequence
  Description of Artificial Sequence: Synthetic oligonucleotide
caucaagccaucauuuacc

SEQ ID NO: 3264972 - RNA, 19 nt, Artificial Sequence
  Description of Artificial Sequence: Synthetic oligonucleotide
gauacucuacuucuuucag

SEQ ID NO: 3264973 - RNA, 19 nt, Artificial Sequence
  Description of Artificial Sequence: Synthetic oligonucleotide
cauagcagaaccgauacug

SEQ ID NO: 3264974 - RNA, 19 nt, Artificial Sequence
  Description of Artificial Sequence: Synthetic oligonucleotide
aaacacuucaagguguuca

SEQ ID NO: 3264975 - RNA, 19 nt, Artificial Sequence
  Description of Artificial Sequence: Synthetic oligonucleotide
cucuauucaaagacaauug

SEQ ID NO: 3264976 - RNA, 19 nt, Artificial Sequence
  Description of Artificial Sequence: Synthetic oligonucleotide
uucagaaacgagcguuugg

SEQ ID NO: 3264977 - RNA, 19 nt, Artificial Sequence
  Description of Artificial Sequence: Synthetic oligonucleotide
uaccuaaugaacacuggga

SEQ ID NO: 3264978 - RNA, 19 nt, Artificial Sequence
  Description of Artificial Sequence: Synthetic oligonucleotide
cauauauauauauauauau

SEQ ID NO: 3264979 - RNA, 19 nt, Artificial Sequence
  Description of Artificial Sequence: Synthetic oligonucleotide
agaacaugccacugcggcc

SEQ ID NO: 3264980 - RNA, 19 nt, Artificial Sequence
  Description of Artificial Sequence: Synthetic oligonucleotide
uaaucaucaagccaucauu

SEQ ID NO: 3264981 - RNA, 19 nt, Artificial Sequence
  Description of Artificial Sequence: Synthetic oligonucleotide
aguaauguaaguaaccaau

SEQ ID NO: 3264982 - RNA, 19 nt, Artificial Sequence
  Description of Artificial Sequence: Synthetic oligonucleotide
uacacaacuucauaagaaa

SEQ ID NO: 3264983 - RNA, 19 nt, Artificial Sequence
  Description of Artificial Sequence: Synthetic oligonucleotide
aagcaguggaugaucgucc

SEQ ID NO: 3264984 - RNA, 19 nt, Artificial Sequence
  Description of Artificial Sequence: Synthetic oligonucleotide
aaguaaccaauaaauauaa

SEQ ID NO: 3264985 - RNA, 19 nt, Artificial Sequence
  Description of Artificial Sequence: Synthetic oligonucleotide
auacucuacuucuuucagg

SEQ ID NO: 3264986 - RNA, 19 nt, Artificial Sequence
  Description of Artificial Sequence: Synthetic oligonucleotide
aauacguuugccucuccaa

SEQ ID NO: 3264987 - RNA, 19 nt, Artificial Sequence
  Description of Artificial Sequence: Synthetic oligonucleotide
uucaccaucucaacaacaa

SEQ ID NO: 3264988 - RNA, 19 nt, Artificial Sequence
  Description of Artificial Sequence: Synthetic oligonucleotide
aaauacguuugccucucca

SEQ ID NO: 3264989 - RNA, 19 nt, Artificial Sequence
  Description of Artificial Sequence: Synthetic oligonucleotide
uuuggagccgggcacuucc

SEQ ID NO: 3264990 - RNA, 19 nt, Artificial Sequence
  Description of Artificial Sequence: Synthetic oligonucleotide
guaaguaaccaauaaauau

SEQ ID NO: 3264991 - RNA, 19 nt, Artificial Sequence
  Description of Artificial Sequence: Synthetic oligonucleotide
ucagaaacgagcguuugga

SEQ ID NO: 3264992 - RNA, 19 nt, Artificial Sequence
  Description of Artificial Sequence: Synthetic oligonucleotide
ugcaccaucagauaaccuu

SEQ ID NO: 3264993 - RNA, 19 nt, Artificial Sequence
  Description of Artificial Sequence: Synthetic oligonucleotide
ggaucagcaaguaaguagg

SEQ ID NO: 3264994 - RNA, 19 nt, Artificial Sequence
  Description of Artificial Sequence: Synthetic oligonucleotide
ugcuucuuccauauagaca

SEQ ID NO: 3264995 - RNA, 19 nt, Artificial Sequence
  Description of Artificial Sequence: Synthetic oligonucleotide
ucaccuaacuaugaggacu

SEQ ID NO: 3264996 - RNA, 19 nt, Artificial Sequence
  Description of Artificial Sequence: Synthetic oligonucleotide
acugaucacaucgcagucc

SEQ ID NO: 3264997 - RNA, 19 nt, Artificial Sequence
  Description of Artificial Sequence: Synthetic oligonucleotide
acagcauggguuucguguc

SEQ ID NO: 3264998 - RNA, 19 nt, Artificial Sequence
  Description of Artificial Sequence: Synthetic oligonucleotide
gacagccacaacuuguaug

SEQ ID NO: 3264999 - RNA, 19 nt, Artificial Sequence
  Description of Artificial Sequence: Synthetic oligonucleotide
ugauggaguuugcauuuag

SEQ ID NO: 3265000 - RNA, 19 nt, Artificial Sequence
  Description of Artificial Sequence: Synthetic oligonucleotide
gacauauuuacacuugagu

SEQ ID NO: 3265001 - RNA, 19 nt, Artificial Sequence
  Description of Artificial Sequence: Synthetic oligonucleotide
acagguacaacaguugcug

SEQ ID NO: 3265002 - RNA, 19 nt, Artificial Sequence
  Description of Artificial Sequence: Synthetic oligonucleotide
accuaaugaacacugggaa

SEQ ID NO: 3265003 - RNA, 19 nt, Artificial Sequence
  Description of Artificial Sequence: Synthetic oligonucleotide
uugcacauuaaaagaaaau

SEQ ID NO: 3265004 - RNA, 19 nt, Artificial Sequence
  Description of Artificial Sequence: Synthetic oligonucleotide
ucgccaaugauggaguuug

SEQ ID NO: 3265005 - RNA, 19 nt, Artificial Sequence
  Description of Artificial Sequence: Synthetic oligonucleotide
aacaaaaugggcuuauucg

SEQ ID NO: 3265006 - RNA, 19 nt, Artificial Sequence
  Description of Artificial Sequence: Synthetic oligonucleotide
auuaaaacagcccacaguc

SEQ ID NO: 3265007 - RNA, 19 nt, Artificial Sequence
  Description of Artificial Sequence: Synthetic oligonucleotide
ugugucuccaacaaaaugg

SEQ ID NO: 3265008 - RNA, 19 nt, Artificial Sequence
  Description of Artificial Sequence: Synthetic oligonucleotide
aaauuugacauucugugug

SEQ ID NO: 3265009 - RNA, 19 nt, Artificial Sequence
  Description of Artificial Sequence: Synthetic oligonucleotide
uuuaauacagcuuccaugu

SEQ ID NO: 3265010 - RNA, 19 nt, Artificial Sequence
  Description of Artificial Sequence: Synthetic oligonucleotide
ucaaacacaaauuugacau

SEQ ID NO: 3265011 - RNA, 19 nt, Artificial Sequence
  Description of Artificial Sequence: Synthetic oligonucleotide
uuucuuuugaugauaaugu

SEQ ID NO: 3265012 - RNA, 19 nt, Artificial Sequence
  Description of Artificial Sequence: Synthetic oligonucleotide
acaaauuugacauucugug

SEQ ID NO: 3265013 - RNA, 19 nt, Artificial Sequence
  Description of Artificial Sequence: Synthetic oligonucleotide
aaaacaguuguaagcaugc

SEQ ID NO: 3265014 - RNA, 19 nt, Artificial Sequence
  Description of Artificial Sequence: Synthetic oligonucleotide
cuugaaaacaguuguaagc

SEQ ID NO: 3265015 - RNA, 19 nt, Artificial Sequence
  Description of Artificial Sequence: Synthetic oligonucleotide
uuuuaauacagcuuccaug

SEQ ID NO: 3265016 - RNA, 19 nt, Artificial Sequence
  Description of Artificial Sequence: Synthetic oligonucleotide
aaacacaaauuugacauuc

SEQ ID NO: 3265017 - RNA, 19 nt, Artificial Sequence
  Description of Artificial Sequence: Synthetic oligonucleotide
uguagaauguacaucugag

SEQ ID NO: 3265018 - RNA, 19 nt, Artificial Sequence
  Description of Artificial Sequence: Synthetic oligonucleotide
uuaguuuucuguaaacagc

SEQ ID NO: 3265019 - RNA, 19 nt, Artificial Sequence
  Description of Artificial Sequence: Synthetic oligonucleotide
uuuucuuuugaugauaaug

SEQ ID NO: 3265020 - RNA, 19 nt, Artificial Sequence
  Description of Artificial Sequence: Synthetic oligonucleotide
ucuguaaacagccucucag

SEQ ID NO: 3265021 - RNA, 19 nt, Artificial Sequence
  Description of Artificial Sequence: Synthetic oligonucleotide
ugagguuuucuuuugauga

SEQ ID NO: 3265022 - RNA, 19 nt, Artificial Sequence
  Description of Artificial Sequence: Synthetic oligonucleotide
aaggaagugaccuucauua

SEQ ID NO: 3265023 - RNA, 19 nt, Artificial Sequence
  Description of Artificial Sequence: Synthetic oligonucleotide
acuacuugaaaacaguugu

SEQ ID NO: 3265024 - RNA, 19 nt, Artificial Sequence
  Description of Artificial Sequence: Synthetic oligonucleotide
uuucccuucaguuagauuu

SEQ ID NO: 3265025 - RNA, 19 nt, Artificial Sequence
  Description of Artificial Sequence: Synthetic oligonucleotide
cuuuugaugauaaugucug

SEQ ID NO: 3265026 - RNA, 19 nt, Artificial Sequence
  Description of Artificial Sequence: Synthetic oligonucleotide
uaguuuucuguaaacagcc

SEQ ID NO: 3265027 - RNA, 19 nt, Artificial Sequence
  Description of Artificial Sequence: Synthetic oligonucleotide
uguaacugcaucaaacaca

SEQ ID NO: 3265028 - RNA, 19 nt, Artificial Sequence
  Description of Artificial Sequence: Synthetic oligonucleotide
ugcgaaguagguaaggaag

SEQ ID NO: 3265029 - RNA, 19 nt, Artificial Sequence
  Description of Artificial Sequence: Synthetic oligonucleotide
ucuuuaaacuguacuagcc

SEQ ID NO: 3265030 - RNA, 19 nt, Artificial Sequence
  Description of Artificial Sequence: Synthetic oligonucleotide
aaaauuucuacugugcuaa

SEQ ID NO: 3265031 - RNA, 19 nt, Artificial Sequence
  Description of Artificial Sequence: Synthetic oligonucleotide
uacugugcuaagcagaacc

SEQ ID NO: 3265032 - RNA, 19 nt, Artificial Sequence
  Description of Artificial Sequence: Synthetic oligonucleotide
aggaacugagcauuaaaac

SEQ ID NO: 3265033 - RNA, 19 nt, Artificial Sequence
  Description of Artificial Sequence: Synthetic oligonucleotide
auucccagcauccucauag

SEQ ID NO: 3265034 - RNA, 19 nt, Artificial Sequence
  Description of Artificial Sequence: Synthetic oligonucleotide
gaacugagcauuaaaacag

SEQ ID NO: 3265035 - RNA, 19 nt, Artificial Sequence
  Description of Artificial Sequence: Synthetic oligonucleotide
aaugucuguaacugcauca

SEQ ID NO: 3265036 - RNA, 19 nt, Artificial Sequence
  Description of Artificial Sequence: Synthetic oligonucleotide
aauuucuacugugcuaagc

SEQ ID NO: 3265037 - RNA, 19 nt, Artificial Sequence
  Description of Artificial Sequence: Synthetic oligonucleotide
uucauuauauaggcgaggg

SEQ ID NO: 3265038 - RNA, 19 nt, Artificial Sequence
  Description of Artificial Sequence: Synthetic oligonucleotide
uguagcacaggucauguga

SEQ ID NO: 3265039 - RNA, 19 nt, Artificial Sequence
  Description of Artificial Sequence: Synthetic oligonucleotide
ugaccuucauuauauaggc

SEQ ID NO: 3265040 - RNA, 19 nt, Artificial Sequence
  Description of Artificial Sequence: Synthetic oligonucleotide
uugaaaacaguuguaagca

SEQ ID NO: 3265041 - RNA, 19 nt, Artificial Sequence
  Description of Artificial Sequence: Synthetic oligonucleotide
aaguagguaaggaagugac

SEQ ID NO: 3265042 - RNA, 19 nt, Artificial Sequence
  Description of Artificial Sequence: Synthetic oligonucleotide
uuuaaacuguacuagccac

SEQ ID NO: 3265043 - RNA, 19 nt, Artificial Sequence
  Description of Artificial Sequence: Synthetic oligonucleotide
aacuguacuagccacacua

SEQ ID NO: 3265044 - RNA, 19 nt, Artificial Sequence
  Description of Artificial Sequence: Synthetic oligonucleotide
uaaacagccucucaguuuc

SEQ ID NO: 3265045 - RNA, 19 nt, Artificial Sequence
  Description of Artificial Sequence: Synthetic oligonucleotide
uuuucuguaaacagccucu

SEQ ID NO: 3265046 - RNA, 19 nt, Artificial Sequence
  Description of Artificial Sequence: Synthetic oligonucleotide
auuucuacugugcuaagca

SEQ ID NO: 3265047 - RNA, 19 nt, Artificial Sequence
  Description of Artificial Sequence: Synthetic oligonucleotide
accuucauuauauaggcga

SEQ ID NO: 3265048 - RNA, 19 nt, Artificial Sequence
  Description of Artificial Sequence: Synthetic oligonucleotide
aacaguuguaagcaugccu

SEQ ID NO: 3265049 - RNA, 19 nt, Artificial Sequence
  Description of Artificial Sequence: Synthetic oligonucleotide
ucuguaacugcaucaaaca

SEQ ID NO: 3265050 - RNA, 19 nt, Artificial Sequence
  Description of Artificial Sequence: Synthetic oligonucleotide
ugcaucaaacacaaauuug

SEQ ID NO: 3265051 - RNA, 19 nt, Artificial Sequence
  Description of Artificial Sequence: Synthetic oligonucleotide
acaucugaggaacugagca

SEQ ID NO: 3265052 - RNA, 19 nt, Artificial Sequence
  Description of Artificial Sequence: Synthetic oligonucleotide
agauuugugcucuugagaa

SEQ ID NO: 3265053 - RNA, 19 nt, Artificial Sequence
  Description of Artificial Sequence: Synthetic oligonucleotide
uuagauuugugcucuugag

SEQ ID NO: 3265054 - RNA, 19 nt, Artificial Sequence
  Description of Artificial Sequence: Synthetic oligonucleotide
uuucauguugaggucaagg

SEQ ID NO: 3265055 - RNA, 19 nt, Artificial Sequence
  Description of Artificial Sequence: Synthetic oligonucleotide
uugagaauggcccugcgaa

SEQ ID NO: 3265056 - RNA, 19 nt, Artificial Sequence
  Description of Artificial Sequence: Synthetic oligonucleotide
acaaaaugggcuuauucgu

SEQ ID NO: 3265057 - RNA, 19 nt, Artificial Sequence
  Description of Artificial Sequence: Synthetic oligonucleotide
uaagccugcuuguagaaug

SEQ ID NO: 3265058 - RNA, 19 nt, Artificial Sequence
  Description of Artificial Sequence: Synthetic oligonucleotide
guagaauguacaucugagg

SEQ ID NO: 3265059 - RNA, 19 nt, Artificial Sequence
  Description of Artificial Sequence: Synthetic oligonucleotide
gauucuuggccacacauuc

SEQ ID NO: 3265060 - RNA, 19 nt, Artificial Sequence
  Description of Artificial Sequence: Synthetic oligonucleotide
aauuugacauucugugugu

SEQ ID NO: 3265061 - RNA, 19 nt, Artificial Sequence
  Description of Artificial Sequence: Synthetic oligonucleotide
uucuuuaaacuguacuagc

SEQ ID NO: 3265062 - RNA, 19 nt, Artificial Sequence
  Description of Artificial Sequence: Synthetic oligonucleotide
acauucuuuaaacuguacu

SEQ ID NO: 3265063 - RNA, 19 nt, Artificial Sequence
  Description of Artificial Sequence: Synthetic oligonucleotide
uggcucuugauauaauucc

SEQ ID NO: 3265064 - RNA, 19 nt, Artificial Sequence
  Description of Artificial Sequence: Synthetic oligonucleotide
acuugaaaacaguuguaag

SEQ ID NO: 3265065 - RNA, 19 nt, Artificial Sequence
  Description of Artificial Sequence: Synthetic oligonucleotide
uuguagaauguacaucuga

SEQ ID NO: 3265066 - RNA, 19 nt, Artificial Sequence
  Description of Artificial Sequence: Synthetic oligonucleotide
gaauguacaucugaggaac

SEQ ID NO: 3265067 - RNA, 19 nt, Artificial Sequence
  Description of Artificial Sequence: Synthetic oligonucleotide
agccacacuacuugaaaac

SEQ ID NO: 3265068 - RNA, 19 nt, Artificial Sequence
  Description of Artificial Sequence: Synthetic oligonucleotide
cuaagcagaaccaguacug

SEQ ID NO: 3265069 - RNA, 19 nt, Artificial Sequence
  Description of Artificial Sequence: Synthetic oligonucleotide
uuucuaagccugcuuguag

SEQ ID NO: 3265070 - RNA, 19 nt, Artificial Sequence
  Description of Artificial Sequence: Synthetic oligonucleotide
ucuugauauaauucccagc

SEQ ID NO: 3265071 - RNA, 19 nt, Artificial Sequence
  Description of Artificial Sequence: Synthetic oligonucleotide
aacugagcauuaaaacagc

SEQ ID NO: 3265072 - RNA, 19 nt, Artificial Sequence
  Description of Artificial Sequence: Synthetic oligonucleotide
gugaccuucauuauauagg

SEQ ID NO: 3265073 - RNA, 19 nt, Artificial Sequence
  Description of Artificial Sequence: Synthetic oligonucleotide
uauaauucccagcauccuc

SEQ ID NO: 3265074 - RNA, 19 nt, Artificial Sequence
  Description of Artificial Sequence: Synthetic oligonucleotide
uuaaacuguacuagccaca

SEQ ID NO: 3265075 - RNA, 19 nt, Artificial Sequence
  Description of Artificial Sequence: Synthetic oligonucleotide
ugaugauaaugucuguaac

SEQ ID NO: 3265076 - RNA, 19 nt, Artificial Sequence
  Description of Artificial Sequence: Synthetic oligonucleotide
uucuacugugcuaagcaga

SEQ ID NO: 3265077 - RNA, 19 nt, Artificial Sequence
  Description of Artificial Sequence: Synthetic oligonucleotide
uccucauaggaguuguucc

SEQ ID NO: 3265078 - RNA, 19 nt, Artificial Sequence
  Description of Artificial Sequence: Synthetic oligonucleotide
uuaaaacagcccacagucc

SEQ ID NO: 3265079 - RNA, 19 nt, Artificial Sequence
  Description of Artificial Sequence: Synthetic oligonucleotide
uugaggucaaggaacuggc

SEQ ID NO: 3265080 - RNA, 19 nt, Artificial Sequence
  Description of Artificial Sequence: Synthetic oligonucleotide
agccucucaguuucuaagc

SEQ ID NO: 3265081 - RNA, 19 nt, Artificial Sequence
  Description of Artificial Sequence: Synthetic oligonucleotide
aauacagcuuccaugugcu

SEQ ID NO: 3265082 - RNA, 19 nt, Artificial Sequence
  Description of Artificial Sequence: Synthetic oligonucleotide
uugagguuuucuuuugaug

SEQ ID NO: 3265083 - RNA, 19 nt, Artificial Sequence
  Description of Artificial Sequence: Synthetic oligonucleotide
ugugcucuugagaauggcc

SEQ ID NO: 3265084 - RNA, 19 nt, Artificial Sequence
  Description of Artificial Sequence: Synthetic oligonucleotide
aaacaguuguaagcaugcc

SEQ ID NO: 3265085 - RNA, 19 nt, Artificial Sequence
  Description of Artificial Sequence: Synthetic oligonucleotide
uuugugcucuugagaaugg

SEQ ID NO: 3265086 - RNA, 19 nt, Artificial Sequence
  Description of Artificial Sequence: Synthetic oligonucleotide
guugaggucaaggaacugg

SEQ ID NO: 3265087 - RNA, 19 nt, Artificial Sequence
  Description of Artificial Sequence: Synthetic oligonucleotide
ugugcuaagcagaaccagu

SEQ ID NO: 3265088 - RNA, 19 nt, Artificial Sequence
  Description of Artificial Sequence: Synthetic oligonucleotide
ucuacugugcuaagcagaa

SEQ ID NO: 3265089 - RNA, 19 nt, Artificial Sequence
  Description of Artificial Sequence: Synthetic oligonucleotide
ugggucuuacgauucuugg

SEQ ID NO: 3265090 - RNA, 19 nt, Artificial Sequence
  Description of Artificial Sequence: Synthetic oligonucleotide
auaggaguuguucccauca

SEQ ID NO: 3265091 - RNA, 19 nt, Artificial Sequence
  Description of Artificial Sequence: Synthetic oligonucleotide
auuugugcucuugagaaug

SEQ ID NO: 3265092 - RNA, 19 nt, Artificial Sequence
  Description of Artificial Sequence: Synthetic oligonucleotide
ggucuuacgauucuuggcc

SEQ ID NO: 3265093 - RNA, 19 nt, Artificial Sequence
  Description of Artificial Sequence: Synthetic oligonucleotide
ggaauuuugcuacagaaaa

SEQ ID NO: 3265094 - RNA, 19 nt, Artificial Sequence
  Description of Artificial Sequence: Synthetic oligonucleotide
gaugauaaugucuguaacu

SEQ ID NO: 3265095 - RNA, 19 nt, Artificial Sequence
  Description of Artificial Sequence: Synthetic oligonucleotide
uucaguuagauuugugcuc

SEQ ID NO: 3265096 - RNA, 19 nt, Artificial Sequence
  Description of Artificial Sequence: Synthetic oligonucleotide
aguacuggagccugggucu

SEQ ID NO: 3265097 - RNA, 19 nt, Artificial Sequence
  Description of Artificial Sequence: Synthetic oligonucleotide
ugauuaguuuucuguaaac

SEQ ID NO: 3265098 - RNA, 19 nt, Artificial Sequence
  Description of Artificial Sequence: Synthetic oligonucleotide
acacaaauuugacauucug

SEQ ID NO: 3265099 - RNA, 19 nt, Artificial Sequence
  Description of Artificial Sequence: Synthetic oligonucleotide
ucaguuagauuugugcucu

SEQ ID NO: 3265100 - RNA, 19 nt, Artificial Sequence
  Description of Artificial Sequence: Synthetic oligonucleotide
cucuugauauaauucccag

SEQ ID NO: 3265101 - RNA, 19 nt, Artificial Sequence
  Description of Artificial Sequence: Synthetic oligonucleotide
uaagcagaaccaguacugg

SEQ ID NO: 3265102 - RNA, 19 nt, Artificial Sequence
  Description of Artificial Sequence: Synthetic oligonucleotide
uguacuagccacacuacuu

SEQ ID NO: 3265103 - RNA, 19 nt, Artificial Sequence
  Description of Artificial Sequence: Synthetic oligonucleotide
uucuaagccugcuuguaga

SEQ ID NO: 3265104 - RNA, 19 nt, Artificial Sequence
  Description of Artificial Sequence: Synthetic oligonucleotide
caucaaacacaaauuugac

SEQ ID NO: 3265105 - RNA, 19 nt, Artificial Sequence
  Description of Artificial Sequence: Synthetic oligonucleotide
auaaauacccaugagaacc

SEQ ID NO: 3265106 - RNA, 19 nt, Artificial Sequence
  Description of Artificial Sequence: Synthetic oligonucleotide
uuuaaaauccucuagggug

SEQ ID NO: 3265107 - RNA, 19 nt, Artificial Sequence
  Description of Artificial Sequence: Synthetic oligonucleotide
uauuccuucauaaauaccc

SEQ ID NO: 3265108 - RNA, 19 nt, Artificial Sequence
  Description of Artificial Sequence: Synthetic oligonucleotide
ucauaaauacccaugagaa

SEQ ID NO: 3265109 - RNA, 19 nt, Artificial Sequence
  Description of Artificial Sequence: Synthetic oligonucleotide
uucauaaauacccaugaga

SEQ ID NO: 3265110 - RNA, 19 nt, Artificial Sequence
  Description of Artificial Sequence: Synthetic oligonucleotide
caagguuuuccauugagcg

SEQ ID NO: 3265111 - RNA, 19 nt, Artificial Sequence
  Description of Artificial Sequence: Synthetic oligonucleotide
uauuguauucuucgcaagg

SEQ ID NO: 3265112 - RNA, 19 nt, Artificial Sequence
  Description of Artificial Sequence: Synthetic oligonucleotide
uuaaaauccucuagggugu

SEQ ID NO: 3265113 - RNA, 19 nt, Artificial Sequence
  Description of Artificial Sequence: Synthetic oligonucleotide
ugauuguucuccuuguagc

SEQ ID NO: 3265114 - RNA, 19 nt, Artificial Sequence
  Description of Artificial Sequence: Synthetic oligonucleotide
acccaugagaaccagagug

SEQ ID NO: 3265115 - RNA, 19 nt, Artificial Sequence
  Description of Artificial Sequence: Synthetic oligonucleotide
agacgcaugauuguucucc

SEQ ID NO: 3265116 - RNA, 19 nt, Artificial Sequence
  Description of Artificial Sequence: Synthetic oligonucleotide
gguuuaaaauccucuaggg

SEQ ID NO: 3265117 - RNA, 19 nt, Artificial Sequence
  Description of Artificial Sequence: Synthetic oligonucleotide
agcagacacacacacagag

SEQ ID NO: 3265118 - RNA, 19 nt, Artificial Sequence
  Description of Artificial Sequence: Synthetic oligonucleotide
aucauuuugggguagccga

SEQ ID NO: 3265119 - RNA, 19 nt, Artificial Sequence
  Description of Artificial Sequence: Synthetic oligonucleotide
augauuguucuccuuguag

SEQ ID NO: 3265120 - RNA, 19 nt, Artificial Sequence
  Description of Artificial Sequence: Synthetic oligonucleotide
aacucccgguuuaaaaucc

SEQ ID NO: 3265121 - RNA, 19 nt, Artificial Sequence
  Description of Artificial Sequence: Synthetic oligonucleotide
uccuucauaaauacccaug

SEQ ID NO: 3265122 - RNA, 19 nt, Artificial Sequence
  Description of Artificial Sequence: Synthetic oligonucleotide
gauugcaugguugaaccag

SEQ ID NO: 3265123 - RNA, 19 nt, Artificial Sequence
  Description of Artificial Sequence: Synthetic oligonucleotide
agguuuuccauugagcguc

SEQ ID NO: 3265124 - RNA, 19 nt, Artificial Sequence
  Description of Artificial Sequence: Synthetic oligonucleotide
uaaauacccaugagaacca

SEQ ID NO: 3265125 - RNA, 19 nt, Artificial Sequence
  Description of Artificial Sequence: Synthetic oligonucleotide
uucgcaagguuuuccauug

SEQ ID NO: 3265126 - RNA, 19 nt, Artificial Sequence
  Description of Artificial Sequence: Synthetic oligonucleotide
gacacacacacagaggaag

SEQ ID NO: 3265127 - RNA, 19 nt, Artificial Sequence
  Description of Artificial Sequence: Synthetic oligonucleotide
ugcaugguugaaccagugg

SEQ ID NO: 3265128 - RNA, 19 nt, Artificial Sequence
  Description of Artificial Sequence: Synthetic oligonucleotide
uggagaacccgcaggagcc

SEQ ID NO: 3265129 - RNA, 19 nt, Artificial Sequence
  Description of Artificial Sequence: Synthetic oligonucleotide
ugaacucccgguuuaaaau

SEQ ID NO: 3265130 - RNA, 19 nt, Artificial Sequence
  Description of Artificial Sequence: Synthetic oligonucleotide
uguauucuucgcaagguuu

SEQ ID NO: 3265131 - RNA, 19 nt, Artificial Sequence
  Description of Artificial Sequence: Synthetic oligonucleotide
aagguuuuccauugagcgu

SEQ ID NO: 3265132 - RNA, 19 nt, Artificial Sequence
  Description of Artificial Sequence: Synthetic oligonucleotide
cuggacagacgcaugauug

SEQ ID NO: 3265133 - RNA, 19 nt, Artificial Sequence
  Description of Artificial Sequence: Synthetic oligonucleotide
gaucauuuugggguagccg

SEQ ID NO: 3265134 - RNA, 19 nt, Artificial Sequence
  Description of Artificial Sequence: Synthetic oligonucleotide
cauaaauacccaugagaac

SEQ ID NO: 3265135 - RNA, 19 nt, Artificial Sequence
  Description of Artificial Sequence: Synthetic oligonucleotide
gcagcagacacacacacag

SEQ ID NO: 3265136 - RNA, 19 nt, Artificial Sequence
  Description of Artificial Sequence: Synthetic oligonucleotide
auacccaugagaaccagag

SEQ ID NO: 3265137 - RNA, 19 nt, Artificial Sequence
  Description of Artificial Sequence: Synthetic oligonucleotide
cacacacagaggaagggag

SEQ ID NO: 3265138 - RNA, 19 nt, Artificial Sequence
  Description of Artificial Sequence: Synthetic oligonucleotide
cuucauaaauacccaugag

SEQ ID NO: 3265139 - RNA, 19 nt, Artificial Sequence
  Description of Artificial Sequence: Synthetic oligonucleotide
cagacacacacacagagga

SEQ ID NO: 3265140 - RNA, 19 nt, Artificial Sequence
  Description of Artificial Sequence: Synthetic oligonucleotide
gaagggaggcuggagaacc

SEQ ID NO: 3265141 - RNA, 19 nt, Artificial Sequence
  Description of Artificial Sequence: Synthetic oligonucleotide
auucuucgcaagguuuucc

SEQ ID NO: 3265142 - RNA, 19 nt, Artificial Sequence
  Description of Artificial Sequence: Synthetic oligonucleotide
uugaacucccgguuuaaaa

SEQ ID NO: 3265143 - RNA, 19 nt, Artificial Sequence
  Description of Artificial Sequence: Synthetic oligonucleotide
gcaugguugaaccaguggc

SEQ ID NO: 3265144 - RNA, 19 nt, Artificial Sequence
  Description of Artificial Sequence: Synthetic oligonucleotide
acagacgcaugauuguucu

SEQ ID NO: 3265145 - RNA, 19 nt, Artificial Sequence
  Description of Artificial Sequence: Synthetic oligonucleotide
gaacucccgguuuaaaauc

SEQ ID NO: 3265146 - RNA, 19 nt, Artificial Sequence
  Description of Artificial Sequence: Synthetic oligonucleotide
auuguauucuucgcaaggu

SEQ ID NO: 3265147 - RNA, 19 nt, Artificial Sequence
  Description of Artificial Sequence: Synthetic oligonucleotide
uucuucgcaagguuuucca

SEQ ID NO: 3265148 - RNA, 19 nt, Artificial Sequence
  Description of Artificial Sequence: Synthetic oligonucleotide
cuggagaacccgcaggagc

SEQ ID NO: 3265149 - RNA, 19 nt, Artificial Sequence
  Description of Artificial Sequence: Synthetic oligonucleotide
accgauugcaugguugaac

SEQ ID NO: 3265150 - RNA, 19 nt, Artificial Sequence
  Description of Artificial Sequence: Synthetic oligonucleotide
ucccgguuuaaaauccucu

SEQ ID NO: 3265151 - RNA, 19 nt, Artificial Sequence
  Description of Artificial Sequence: Synthetic oligonucleotide
auuguucuccuuguagcuc

SEQ ID NO: 3265152 - RNA, 19 nt, Artificial Sequence
  Description of Artificial Sequence: Synthetic oligonucleotide
uagccgauuuuacaaguau

SEQ ID NO: 3265153 - RNA, 19 nt, Artificial Sequence
  Description of Artificial Sequence: Synthetic oligonucleotide
aaauacccaugagaaccag

SEQ ID NO: 3265154 - RNA, 19 nt, Artificial Sequence
  Description of Artificial Sequence: Synthetic oligonucleotide
augguugaaccaguggcuc

SEQ ID NO: 3265155 - RNA, 19 nt, Artificial Sequence
  Description of Artificial Sequence: Synthetic oligonucleotide
uuguauucuucgcaagguu

SEQ ID NO: 3265156 - RNA, 19 nt, Artificial Sequence
  Description of Artificial Sequence: Synthetic oligonucleotide
guuuaaaauccucuagggu

SEQ ID NO: 3265157 - RNA, 19 nt, Artificial Sequence
  Description of Artificial Sequence: Synthetic oligonucleotide
ugggguagccgauuuuaca

SEQ ID NO: 3265158 - RNA, 19 nt, Artificial Sequence
  Description of Artificial Sequence: Synthetic oligonucleotide
uuugggguagccgauuuua

SEQ ID NO: 3265159 - RNA, 19 nt, Artificial Sequence
  Description of Artificial Sequence: Synthetic oligonucleotide
uggacagacgcaugauugu

SEQ ID NO: 3265160 - RNA, 19 nt, Artificial Sequence
  Description of Artificial Sequence: Synthetic oligonucleotide
gauuguucuccuuguagcu

SEQ ID NO: 3265161 - RNA, 19 nt, Artificial Sequence
  Description of Artificial Sequence: Synthetic oligonucleotide
gaggaagggaggcuggaga

SEQ ID NO: 3265162 - RNA, 19 nt, Artificial Sequence
  Description of Artificial Sequence: Synthetic oligonucleotide
ucuggacagacgcaugauu

SEQ ID NO: 3265163 - RNA, 19 nt, Artificial Sequence
  Description of Artificial Sequence: Synthetic oligonucleotide
ugguugaaccaguggcucc

SEQ ID NO: 3265164 - RNA, 19 nt, Artificial Sequence
  Description of Artificial Sequence: Synthetic oligonucleotide
cacacagaggaagggaggc

SEQ ID NO: 3265165 - RNA, 19 nt, Artificial Sequence
  Description of Artificial Sequence: Synthetic oligonucleotide
acaaccgauugcaugguug

SEQ ID NO: 3265166 - RNA, 19 nt, Artificial Sequence
  Description of Artificial Sequence: Synthetic oligonucleotide
uugcaugguugaaccagug

SEQ ID NO: 3265167 - RNA, 19 nt, Artificial Sequence
  Description of Artificial Sequence: Synthetic oligonucleotide
uuccuucauaaauacccau

SEQ ID NO: 3265168 - RNA, 19 nt, Artificial Sequence
  Description of Artificial Sequence: Synthetic oligonucleotide
aagggaggcuggagaaccc

SEQ ID NO: 3265169 - RNA, 19 nt, Artificial Sequence
  Description of Artificial Sequence: Synthetic oligonucleotide
acacacacacagaggaagg

SEQ ID NO: 3265170 - RNA, 19 nt, Artificial Sequence
  Description of Artificial Sequence: Synthetic oligonucleotide
aggcuggagaacccgcagg

SEQ ID NO: 3265171 - RNA, 19 nt, Artificial Sequence
  Description of Artificial Sequence: Synthetic oligonucleotide
aauacccaugagaaccaga

SEQ ID NO: 3265172 - RNA, 19 nt, Artificial Sequence
  Description of Artificial Sequence: Synthetic oligonucleotide
gaacccgcaggagccaugg

SEQ ID NO: 3265173 - RNA, 19 nt, Artificial Sequence
  Description of Artificial Sequence: Synthetic oligonucleotide
ucauuuugggguagccgau

SEQ ID NO: 3265174 - RNA, 19 nt, Artificial Sequence
  Description of Artificial Sequence: Synthetic oligonucleotide
ccgauugcaugguugaacc

SEQ ID NO: 3265175 - RNA, 19 nt, Artificial Sequence
  Description of Artificial Sequence: Synthetic oligonucleotide
uugggguagccgauuuuac

SEQ ID NO: 3265176 - RNA, 19 nt, Artificial Sequence
  Description of Artificial Sequence: Synthetic oligonucleotide
gccgauuuuacaaguauug

SEQ ID NO: 3265177 - RNA, 19 nt, Artificial Sequence
  Description of Artificial Sequence: Synthetic oligonucleotide
cagcagcagacacacacac

SEQ ID NO: 3265178 - RNA, 19 nt, Artificial Sequence
  Description of Artificial Sequence: Synthetic oligonucleotide
cgguuuaaaauccucuagg

SEQ ID NO: 3265179 - RNA, 19 nt, Artificial Sequence
  Description of Artificial Sequence: Synthetic oligonucleotide
gccagcagcagacacacac

SEQ ID NO: 3265180 - RNA, 19 nt, Artificial Sequence
  Description of Artificial Sequence: Synthetic oligonucleotide
cacacacacagaggaaggg

SEQ ID NO: 3265181 - RNA, 19 nt, Artificial Sequence
  Description of Artificial Sequence: Synthetic oligonucleotide
auuccuucauaaauaccca

SEQ ID NO: 3265182 - RNA, 19 nt, Artificial Sequence
  Description of Artificial Sequence: Synthetic oligonucleotide
gaggcuggagaacccgcag

SEQ ID NO: 3265183 - RNA, 19 nt, Artificial Sequence
  Description of Artificial Sequence: Synthetic oligonucleotide
aggaagggaggcuggagaa

SEQ ID NO: 3265184 - RNA, 19 nt, Artificial Sequence
  Description of Artificial Sequence: Synthetic oligonucleotide
acacacagaggaagggagg

SEQ ID NO: 3265185 - RNA, 19 nt, Artificial Sequence
  Description of Artificial Sequence: Synthetic oligonucleotide
cacagaggaagggaggcug

SEQ ID NO: 3265186 - RNA, 19 nt, Artificial Sequence
  Description of Artificial Sequence: Synthetic oligonucleotide
auuuugggguagccgauuu

SEQ ID NO: 3265187 - RNA, 19 nt, Artificial Sequence
  Description of Artificial Sequence: Synthetic oligonucleotide
ucuucgcaagguuuuccau

SEQ ID NO: 3265188 - RNA, 19 nt, Artificial Sequence
  Description of Artificial Sequence: Synthetic oligonucleotide
caaccgauugcaugguuga

SEQ ID NO: 3265189 - RNA, 19 nt, Artificial Sequence
  Description of Artificial Sequence: Synthetic oligonucleotide
uacccaugagaaccagagu

SEQ ID NO: 3265190 - RNA, 19 nt, Artificial Sequence
  Description of Artificial Sequence: Synthetic oligonucleotide
uaaaauccucuagggugug

SEQ ID NO: 3265191 - RNA, 19 nt, Artificial Sequence
  Description of Artificial Sequence: Synthetic oligonucleotide
acacacacagaggaaggga

SEQ ID NO: 3265192 - RNA, 19 nt, Artificial Sequence
  Description of Artificial Sequence: Synthetic oligonucleotide
ccuucauaaauacccauga

SEQ ID NO: 3265193 - RNA, 19 nt, Artificial Sequence
  Description of Artificial Sequence: Synthetic oligonucleotide
uauucuucgcaagguuuuc

SEQ ID NO: 3265194 - RNA, 19 nt, Artificial Sequence
  Description of Artificial Sequence: Synthetic oligonucleotide
auugcaugguugaaccagu

SEQ ID NO: 3265195 - RNA, 19 nt, Artificial Sequence
  Description of Artificial Sequence: Synthetic oligonucleotide
gacagacgcaugauuguuc

SEQ ID NO: 3265196 - RNA, 19 nt, Artificial Sequence
  Description of Artificial Sequence: Synthetic oligonucleotide
acagaggaagggaggcugg

SEQ ID NO: 3265197 - RNA, 19 nt, Artificial Sequence
  Description of Artificial Sequence: Synthetic oligonucleotide
ggguagccgauuuuacaag

SEQ ID NO: 3265198 - RNA, 19 nt, Artificial Sequence
  Description of Artificial Sequence: Synthetic oligonucleotide
uuuugggguagccgauuuu

SEQ ID NO: 3265199 - RNA, 19 nt, Artificial Sequence
  Description of Artificial Sequence: Synthetic oligonucleotide
gcaagguuuuccauugagc

SEQ ID NO: 3265200 - RNA, 19 nt, Artificial Sequence
  Description of Artificial Sequence: Synthetic oligonucleotide
ccgguuuaaaauccucuag

SEQ ID NO: 3265201 - RNA, 19 nt, Artificial Sequence
  Description of Artificial Sequence: Synthetic oligonucleotide
gggguagccgauuuuacaa

SEQ ID NO: 3265202 - RNA, 19 nt, Artificial Sequence
  Description of Artificial Sequence: Synthetic oligonucleotide
agaggaagggaggcuggag

SEQ ID NO: 3265203 - RNA, 19 nt, Artificial Sequence
  Description of Artificial Sequence: Synthetic oligonucleotide
agggaggcuggagaacccg

SEQ ID NO: 3265204 - RNA, 19 nt, Artificial Sequence
  Description of Artificial Sequence: Synthetic oligonucleotide
caugguugaaccaguggcu

SEQ ID NO: 3265205 - RNA, 19 nt, Artificial Sequence
  Description of Artificial Sequence: Synthetic oligonucleotide
uuaacuaacucuuuguugg

SEQ ID NO: 3265206 - RNA, 19 nt, Artificial Sequence
  Description of Artificial Sequence: Synthetic oligonucleotide
aagaauugaacagaaaagc

SEQ ID NO: 3265207 - RNA, 19 nt, Artificial Sequence
  Description of Artificial Sequence: Synthetic oligonucleotide
aauacuuaggauuugggcu

SEQ ID NO: 3265208 - RNA, 19 nt, Artificial Sequence
  Description of Artificial Sequence: Synthetic oligonucleotide
agaaauaugucuccgaguc

SEQ ID NO: 3265209 - RNA, 19 nt, Artificial Sequence
  Description of Artificial Sequence: Synthetic oligonucleotide
uuuauaaugagagagcagc

SEQ ID NO: 3265210 - RNA, 19 nt, Artificial Sequence
  Description of Artificial Sequence: Synthetic oligonucleotide
uaagaauugaacagaaaag

SEQ ID NO: 3265211 - RNA, 19 nt, Artificial Sequence
  Description of Artificial Sequence: Synthetic oligonucleotide
aaguuauccccacaggggc

SEQ ID NO: 3265212 - RNA, 19 nt, Artificial Sequence
  Description of Artificial Sequence: Synthetic oligonucleotide
ugaucuuugucauaaauca

SEQ ID NO: 3265213 - RNA, 19 nt, Artificial Sequence
  Description of Artificial Sequence: Synthetic oligonucleotide
ugaaacaccgccaugguca

SEQ ID NO: 3265214 - RNA, 19 nt, Artificial Sequence
  Description of Artificial Sequence: Synthetic oligonucleotide
aauugaacagaaaagccuc

SEQ ID NO: 3265215 - RNA, 19 nt, Artificial Sequence
  Description of Artificial Sequence: Synthetic oligonucleotide
agugcuaagaauugaacag

SEQ ID NO: 3265216 - RNA, 19 nt, Artificial Sequence
  Description of Artificial Sequence: Synthetic oligonucleotide
aaaucuuccuuggugaugg

SEQ ID NO: 3265217 - RNA, 19 nt, Artificial Sequence
  Description of Artificial Sequence: Synthetic oligonucleotide
uguuucuccacacauaaac

SEQ ID NO: 3265218 - RNA, 19 nt, Artificial Sequence
  Description of Artificial Sequence: Synthetic oligonucleotide
uguuccaucaaccugggcu

SEQ ID NO: 3265219 - RNA, 19 nt, Artificial Sequence
  Description of Artificial Sequence: Synthetic oligonucleotide
agaaguuauccccacaggg

SEQ ID NO: 3265220 - RNA, 19 nt, Artificial Sequence
  Description of Artificial Sequence: Synthetic oligonucleotide
uuugucauaaaucacuuuu

SEQ ID NO: 3265221 - RNA, 19 nt, Artificial Sequence
  Description of Artificial Sequence: Synthetic oligonucleotide
aaaguccucgaucuccacc

SEQ ID NO: 3265222 - RNA, 19 nt, Artificial Sequence
  Description of Artificial Sequence: Synthetic oligonucleotide
uuuaacuaacucuuuguug

SEQ ID NO: 3265223 - RNA, 19 nt, Artificial Sequence
  Description of Artificial Sequence: Synthetic oligonucleotide
ugagagagcagcuaggaca

SEQ ID NO: 3265224 - RNA, 19 nt, Artificial Sequence
  Description of Artificial Sequence: Synthetic oligonucleotide
ucagcauuuaacuaacucu

SEQ ID NO: 3265225 - RNA, 19 nt, Artificial Sequence
  Description of Artificial Sequence: Synthetic oligonucleotide
uauugaaaguccucgaucu

SEQ ID NO: 3265226 - RNA, 19 nt, Artificial Sequence
  Description of Artificial Sequence: Synthetic oligonucleotide
agaauugaacagaaaagcc

SEQ ID NO: 3265227 - RNA, 19 nt, Artificial Sequence
  Description of Artificial Sequence: Synthetic oligonucleotide
uaauacuuaggauuugggc

SEQ ID NO: 3265228 - RNA, 19 nt, Artificial Sequence
  Description of Artificial Sequence: Synthetic oligonucleotide
gagaaagugcucuuaaccc

SEQ ID NO: 3265229 - RNA, 19 nt, Artificial Sequence
  Description of Artificial Sequence: Synthetic oligonucleotide
auaaugagagagcagcuag

SEQ ID NO: 3265230 - RNA, 19 nt, Artificial Sequence
  Description of Artificial Sequence: Synthetic oligonucleotide
ugcucuuaacccaugaccc

SEQ ID NO: 3265231 - RNA, 19 nt, Artificial Sequence
  Description of Artificial Sequence: Synthetic oligonucleotide
uaacccaugacccaucuga

SEQ ID NO: 3265232 - RNA, 19 nt, Artificial Sequence
  Description of Artificial Sequence: Synthetic oligonucleotide
uagaagaggagaaagugcu

SEQ ID NO: 3265233 - RNA, 19 nt, Artificial Sequence
  Description of Artificial Sequence: Synthetic oligonucleotide
auauugaaaguccucgauc

SEQ ID NO: 3265234 - RNA, 19 nt, Artificial Sequence
  Description of Artificial Sequence: Synthetic oligonucleotide
aacagaaaagccucuagaa

SEQ ID NO: 3265235 - RNA, 19 nt, Artificial Sequence
  Description of Artificial Sequence: Synthetic oligonucleotide
auacuuaggauuugggcuc

SEQ ID NO: 3265236 - RNA, 19 nt, Artificial Sequence
  Description of Artificial Sequence: Synthetic oligonucleotide
acauaaacugaucuuuguc

SEQ ID NO: 3265237 - RNA, 19 nt, Artificial Sequence
  Description of Artificial Sequence: Synthetic oligonucleotide
ugauggagaaguuaucccc

SEQ ID NO: 3265238 - RNA, 19 nt, Artificial Sequence
  Description of Artificial Sequence: Synthetic oligonucleotide
uuuuauaaugagagagcag

SEQ ID NO: 3265239 - RNA, 19 nt, Artificial Sequence
  Description of Artificial Sequence: Synthetic oligonucleotide
aaauaugucuccgaguccu

SEQ ID NO: 3265240 - RNA, 19 nt, Artificial Sequence
  Description of Artificial Sequence: Synthetic oligonucleotide
uucuccauucuccaaaucu

SEQ ID NO: 3265241 - RNA, 19 nt, Artificial Sequence
  Description of Artificial Sequence: Synthetic oligonucleotide
uuucuccacacauaaacug

SEQ ID NO: 3265242 - RNA, 19 nt, Artificial Sequence
  Description of Artificial Sequence: Synthetic oligonucleotide
ucuagaagaggagaaagug

SEQ ID NO: 3265243 - RNA, 19 nt, Artificial Sequence
  Description of Artificial Sequence: Synthetic oligonucleotide
cuaagaauugaacagaaaa

SEQ ID NO: 3265244 - RNA, 19 nt, Artificial Sequence
  Description of Artificial Sequence: Synthetic oligonucleotide
uccacacauaaacugaucu

SEQ ID NO: 3265245 - RNA, 19 nt, Artificial Sequence
  Description of Artificial Sequence: Synthetic oligonucleotide
gaacaggaguuacagacag

SEQ ID NO: 3265246 - RNA, 19 nt, Artificial Sequence
  Description of Artificial Sequence: Synthetic oligonucleotide
acagaaaagccucuagaag

SEQ ID NO: 3265247 - RNA, 19 nt, Artificial Sequence
  Description of Artificial Sequence: Synthetic oligonucleotide
guccucgucauauugaaag

SEQ ID NO: 3265248 - RNA, 19 nt, Artificial Sequence
  Description of Artificial Sequence: Synthetic oligonucleotide
aggaguuacagacaguugu

SEQ ID NO: 3265249 - RNA, 19 nt, Artificial Sequence
  Description of Artificial Sequence: Synthetic oligonucleotide
acuuguuccaucaaccugg

SEQ ID NO: 3265250 - RNA, 19 nt, Artificial Sequence
  Description of Artificial Sequence: Synthetic oligonucleotide
cuagaagaggagaaagugc

SEQ ID NO: 3265251 - RNA, 19 nt, Artificial Sequence
  Description of Artificial Sequence: Synthetic oligonucleotide
gucauauugaaaguccucg

SEQ ID NO: 3265252 - RNA, 19 nt, Artificial Sequence
  Description of Artificial Sequence: Synthetic oligonucleotide
guagaaauaugucuccgag

SEQ ID NO: 3265253 - RNA, 19 nt, Artificial Sequence
  Description of Artificial Sequence: Synthetic oligonucleotide
uguugguugaaggugcugg

SEQ ID NO: 3265254 - RNA, 19 nt, Artificial Sequence
  Description of Artificial Sequence: Synthetic oligonucleotide
ugaacagaaaagccucuag

SEQ ID NO: 3265255 - RNA, 19 nt, Artificial Sequence
  Description of Artificial Sequence: Synthetic oligonucleotide
cuuuguugguugaaggugc

SEQ ID NO: 3265256 - RNA, 19 nt, Artificial Sequence
  Description of Artificial Sequence: Synthetic oligonucleotide
uccaaaucuuccuugguga

SEQ ID NO: 3265257 - RNA, 19 nt, Artificial Sequence
  Description of Artificial Sequence: Synthetic oligonucleotide
gaaguuauccccacagggg

SEQ ID NO: 3265258 - RNA, 19 nt, Artificial Sequence
  Description of Artificial Sequence: Synthetic oligonucleotide
uucccuaauacuuaggauu

SEQ ID NO: 3265259 - RNA, 19 nt, Artificial Sequence
  Description of Artificial Sequence: Synthetic oligonucleotide
cuaauacuuaggauuuggg

SEQ ID NO: 3265260 - RNA, 19 nt, Artificial Sequence
  Description of Artificial Sequence: Synthetic oligonucleotide
uaaugagagagcagcuagg

SEQ ID NO: 3265261 - RNA, 19 nt, Artificial Sequence
  Description of Artificial Sequence: Synthetic oligonucleotide
ucaaccugggcucauuccc

SEQ ID NO: 3265262 - RNA, 19 nt, Artificial Sequence
  Description of Artificial Sequence: Synthetic oligonucleotide
aacaccgccauggucaccg

SEQ ID NO: 3265263 - RNA, 19 nt, Artificial Sequence
  Description of Artificial Sequence: Synthetic oligonucleotide
uuacagacaguugugagcu

SEQ ID NO: 3265264 - RNA, 19 nt, Artificial Sequence
  Description of Artificial Sequence: Synthetic oligonucleotide
agcuuguuaacccagcacu

SEQ ID NO: 3265265 - RNA, 19 nt, Artificial Sequence
  Description of Artificial Sequence: Synthetic oligonucleotide
acucuuuguugguugaagg

SEQ ID NO: 3265266 - RNA, 19 nt, Artificial Sequence
  Description of Artificial Sequence: Synthetic oligonucleotide
cauaaacugaucuuuguca

SEQ ID NO: 3265267 - RNA, 19 nt, Artificial Sequence
  Description of Artificial Sequence: Synthetic oligonucleotide
ucgugaaacaccgccaugg

SEQ ID NO: 3265268 - RNA, 19 nt, Artificial Sequence
  Description of Artificial Sequence: Synthetic oligonucleotide
ucuuccuuggugauggaga

SEQ ID NO: 3265269 - RNA, 19 nt, Artificial Sequence
  Description of Artificial Sequence: Synthetic oligonucleotide
aaguccucgaucuccaccu

SEQ ID NO: 3265270 - RNA, 19 nt, Artificial Sequence
  Description of Artificial Sequence: Synthetic oligonucleotide
uucagcauuuaacuaacuc

SEQ ID NO: 3265271 - RNA, 19 nt, Artificial Sequence
  Description of Artificial Sequence: Synthetic oligonucleotide
agcuaggacacguugccac

SEQ ID NO: 3265272 - RNA, 19 nt, Artificial Sequence
  Description of Artificial Sequence: Synthetic oligonucleotide
guuacagacaguugugagc

SEQ ID NO: 3265273 - RNA, 19 nt, Artificial Sequence
  Description of Artificial Sequence: Synthetic oligonucleotide
cucgucauauugaaagucc

SEQ ID NO: 3265274 - RNA, 19 nt, Artificial Sequence
  Description of Artificial Sequence: Synthetic oligonucleotide
cagaaaagccucuagaaga

SEQ ID NO: 3265275 - RNA, 19 nt, Artificial Sequence
  Description of Artificial Sequence: Synthetic oligonucleotide
uucuccaaaucuuccuugg

SEQ ID NO: 3265276 - RNA, 19 nt, Artificial Sequence
  Description of Artificial Sequence: Synthetic oligonucleotide
acuaacucuuuguugguug

SEQ ID NO: 3265277 - RNA, 19 nt, Artificial Sequence
  Description of Artificial Sequence: Synthetic oligonucleotide
gagugcuaagaauugaaca

SEQ ID NO: 3265278 - RNA, 19 nt, Artificial Sequence
  Description of Artificial Sequence: Synthetic oligonucleotide
agcacuuguuccaucaacc

SEQ ID NO: 3265279 - RNA, 19 nt, Artificial Sequence
  Description of Artificial Sequence: Synthetic oligonucleotide
uuauaaugagagagcagcu

SEQ ID NO: 3265280 - RNA, 19 nt, Artificial Sequence
  Description of Artificial Sequence: Synthetic oligonucleotide
aguuacagacaguugugag

SEQ ID NO: 3265281 - RNA, 19 nt, Artificial Sequence
  Description of Artificial Sequence: Synthetic oligonucleotide
uucuccacacauaaacuga

SEQ ID NO: 3265282 - RNA, 19 nt, Artificial Sequence
  Description of Artificial Sequence: Synthetic oligonucleotide
aaacugaucuuugucauaa

SEQ ID NO: 3265283 - RNA, 19 nt, Artificial Sequence
  Description of Artificial Sequence: Synthetic oligonucleotide
uccuucagcauuuaacuaa

SEQ ID NO: 3265284 - RNA, 19 nt, Artificial Sequence
  Description of Artificial Sequence: Synthetic oligonucleotide
uuaacccagcacuuguucc

SEQ ID NO: 3265285 - RNA, 19 nt, Artificial Sequence
  Description of Artificial Sequence: Synthetic oligonucleotide
ucuuuguugguugaaggug

SEQ ID NO: 3265286 - RNA, 19 nt, Artificial Sequence
  Description of Artificial Sequence: Synthetic oligonucleotide
uuggugauggagaaguuau

SEQ ID NO: 3265287 - RNA, 19 nt, Artificial Sequence
  Description of Artificial Sequence: Synthetic oligonucleotide
cugaucuuugucauaaauc

SEQ ID NO: 3265288 - RNA, 19 nt, Artificial Sequence
  Description of Artificial Sequence: Synthetic oligonucleotide
cacaucuucuccauucucc

SEQ ID NO: 3265289 - RNA, 19 nt, Artificial Sequence
  Description of Artificial Sequence: Synthetic oligonucleotide
aaggugcugggacuguuuc

SEQ ID NO: 3265290 - RNA, 19 nt, Artificial Sequence
  Description of Artificial Sequence: Synthetic oligonucleotide
ggagaaagugcucuuaacc

SEQ ID NO: 3265291 - RNA, 19 nt, Artificial Sequence
  Description of Artificial Sequence: Synthetic oligonucleotide
auaaacugaucuuugucau

SEQ ID NO: 3265292 - RNA, 19 nt, Artificial Sequence
  Description of Artificial Sequence: Synthetic oligonucleotide
agaaagugcucuuaaccca

SEQ ID NO: 3265293 - RNA, 19 nt, Artificial Sequence
  Description of Artificial Sequence: Synthetic oligonucleotide
acuguuucuccacacauaa

SEQ ID NO: 3265294 - RNA, 19 nt, Artificial Sequence
  Description of Artificial Sequence: Synthetic oligonucleotide
ucugagcuuguuaacccag

SEQ ID NO: 3265295 - RNA, 19 nt, Artificial Sequence
  Description of Artificial Sequence: Synthetic oligonucleotide
acagacaguugugagcugc

SEQ ID NO: 3265296 - RNA, 19 nt, Artificial Sequence
  Description of Artificial Sequence: Synthetic oligonucleotide
uugaaaguccucgaucucc

SEQ ID NO: 3265297 - RNA, 19 nt, Artificial Sequence
  Description of Artificial Sequence: Synthetic oligonucleotide
uuaggauuugggcuccuca

SEQ ID NO: 3265298 - RNA, 19 nt, Artificial Sequence
  Description of Artificial Sequence: Synthetic oligonucleotide
aucaaccugggcucauucc

SEQ ID NO: 3265299 - RNA, 19 nt, Artificial Sequence
  Description of Artificial Sequence: Synthetic oligonucleotide
aaaagccucuagaagagga

SEQ ID NO: 3265300 - RNA, 19 nt, Artificial Sequence
  Description of Artificial Sequence: Synthetic oligonucleotide
aaugagagagcagcuagga

SEQ ID NO: 3265301 - RNA, 19 nt, Artificial Sequence
  Description of Artificial Sequence: Synthetic oligonucleotide
uccauucuccaaaucuucc

SEQ ID NO: 3265302 - RNA, 19 nt, Artificial Sequence
  Description of Artificial Sequence: Synthetic oligonucleotide
ugagugcuaagaauugaac

SEQ ID NO: 3265303 - RNA, 19 nt, Artificial Sequence
  Description of Artificial Sequence: Synthetic oligonucleotide
auuuaacuaacucuuuguu

SEQ ID NO: 3265304 - RNA, 19 nt, Artificial Sequence
  Description of Artificial Sequence: Synthetic oligonucleotide
gagaaguuauccccacagg

SEQ ID NO: 3265305 - RNA, 19 nt, Artificial Sequence
  Description of Artificial Sequence: Synthetic oligonucleotide
aaugaaaugaucuugguug

SEQ ID NO: 3265306 - RNA, 19 nt, Artificial Sequence
  Description of Artificial Sequence: Synthetic oligonucleotide
aaucuuaauuuccaaaucc

SEQ ID NO: 3265307 - RNA, 19 nt, Artificial Sequence
  Description of Artificial Sequence: Synthetic oligonucleotide
uuccaaauccucuagaugg

SEQ ID NO: 3265308 - RNA, 19 nt, Artificial Sequence
  Description of Artificial Sequence: Synthetic oligonucleotide
aaucuagccaacuaaaucu

SEQ ID NO: 3265309 - RNA, 19 nt, Artificial Sequence
  Description of Artificial Sequence: Synthetic oligonucleotide
uggacaauaaauaauauau

SEQ ID NO: 3265310 - RNA, 19 nt, Artificial Sequence
  Description of Artificial Sequence: Synthetic oligonucleotide
aauaaucugagugauauug

SEQ ID NO: 3265311 - RNA, 19 nt, Artificial Sequence
  Description of Artificial Sequence: Synthetic oligonucleotide
aaaucuagccaacuaaauc

SEQ ID NO: 3265312 - RNA, 19 nt, Artificial Sequence
  Description of Artificial Sequence: Synthetic oligonucleotide
uucacaaguauuuucacag

SEQ ID NO: 3265313 - RNA, 19 nt, Artificial Sequence
  Description of Artificial Sequence: Synthetic oligonucleotide
aaaucuuaauuuccaaauc

SEQ ID NO: 3265314 - RNA, 19 nt, Artificial Sequence
  Description of Artificial Sequence: Synthetic oligonucleotide
guaggaaucauuuugcaag

SEQ ID NO: 3265315 - RNA, 19 nt, Artificial Sequence
  Description of Artificial Sequence: Synthetic oligonucleotide
cuuaaugaaaugaucuugg

SEQ ID NO: 3265316 - RNA, 19 nt, Artificial Sequence
  Description of Artificial Sequence: Synthetic oligonucleotide
agaggaaauaaucugagug

SEQ ID NO: 3265317 - RNA, 19 nt, Artificial Sequence
  Description of Artificial Sequence: Synthetic oligonucleotide
ucacuuaaugaaaugaucu

SEQ ID NO: 3265318 - RNA, 19 nt, Artificial Sequence
  Description of Artificial Sequence: Synthetic oligonucleotide
uuaagaggaaauaaucuga

SEQ ID NO: 3265319 - RNA, 19 nt, Artificial Sequence
  Description of Artificial Sequence: Synthetic oligonucleotide
ucaaucuuaguucaucuug

SEQ ID NO: 3265320 - RNA, 19 nt, Artificial Sequence
  Description of Artificial Sequence: Synthetic oligonucleotide
uguuaagaggaaauaaucu

SEQ ID NO: 3265321 - RNA, 19 nt, Artificial Sequence
  Description of Artificial Sequence: Synthetic oligonucleotide
aaagguuucucuuccguag

SEQ ID NO: 3265322 - RNA, 19 nt, Artificial Sequence
  Description of Artificial Sequence: Synthetic oligonucleotide
ugauauugaaaucuagcca

SEQ ID NO: 3265323 - RNA, 19 nt, Artificial Sequence
  Description of Artificial Sequence: Synthetic oligonucleotide
uucaucuugucucuguagg

SEQ ID NO: 3265324 - RNA, 19 nt, Artificial Sequence
  Description of Artificial Sequence: Synthetic oligonucleotide
uguuucacaaguauuuuca

SEQ ID NO: 3265325 - RNA, 19 nt, Artificial Sequence
  Description of Artificial Sequence: Synthetic oligonucleotide
ugauucucuaccuagagaa

SEQ ID NO: 3265326 - RNA, 19 nt, Artificial Sequence
  Description of Artificial Sequence: Synthetic oligonucleotide
gauauugaaaucuagccaa

SEQ ID NO: 3265327 - RNA, 19 nt, Artificial Sequence
  Description of Artificial Sequence: Synthetic oligonucleotide
cauuuugcaagucacauug

SEQ ID NO: 3265328 - RNA, 19 nt, Artificial Sequence
  Description of Artificial Sequence: Synthetic oligonucleotide
uuuugcaagucacauuggg

SEQ ID NO: 3265329 - RNA, 19 nt, Artificial Sequence
  Description of Artificial Sequence: Synthetic oligonucleotide
uaaaucuuaauuuccaaau

SEQ ID NO: 3265330 - RNA, 19 nt, Artificial Sequence
  Description of Artificial Sequence: Synthetic oligonucleotide
guuaagaggaaauaaucug

SEQ ID NO: 3265331 - RNA, 19 nt, Artificial Sequence
  Description of Artificial Sequence: Synthetic oligonucleotide
aacauauugcuugucuccc

SEQ ID NO: 3265332 - RNA, 19 nt, Artificial Sequence
  Description of Artificial Sequence: Synthetic oligonucleotide
agugauauugaaaucuagc

SEQ ID NO: 3265333 - RNA, 19 nt, Artificial Sequence
  Description of Artificial Sequence: Synthetic oligonucleotide
uaagaggaaauaaucugag

SEQ ID NO: 3265334 - RNA, 19 nt, Artificial Sequence
  Description of Artificial Sequence: Synthetic oligonucleotide
ugagccaucgcuuucuuag

SEQ ID NO: 3265335 - RNA, 19 nt, Artificial Sequence
  Description of Artificial Sequence: Synthetic oligonucleotide
gugauauugaaaucuagcc

SEQ ID NO: 3265336 - RNA, 19 nt, Artificial Sequence
  Description of Artificial Sequence: Synthetic oligonucleotide
aaaugaucuugguuguuuc

SEQ ID NO: 3265337 - RNA, 19 nt, Artificial Sequence
  Description of Artificial Sequence: Synthetic oligonucleotide
ucuaccuagagaaauggac

SEQ ID NO: 3265338 - RNA, 19 nt, Artificial Sequence
  Description of Artificial Sequence: Synthetic oligonucleotide
uuagaaagguuucucuucc

SEQ ID NO: 3265339 - RNA, 19 nt, Artificial Sequence
  Description of Artificial Sequence: Synthetic oligonucleotide
ucuuaguucaucuugucuc

SEQ ID NO: 3265340 - RNA, 19 nt, Artificial Sequence
  Description of Artificial Sequence: Synthetic oligonucleotide
ucuguaggaaucauuuugc

SEQ ID NO: 3265341 - RNA, 19 nt, Artificial Sequence
  Description of Artificial Sequence: Synthetic oligonucleotide
ugucagaaauuccauuggg

SEQ ID NO: 3265342 - RNA, 19 nt, Artificial Sequence
  Description of Artificial Sequence: Synthetic oligonucleotide
gaguaguuguguuaagagg

SEQ ID NO: 3265343 - RNA, 19 nt, Artificial Sequence
  Description of Artificial Sequence: Synthetic oligonucleotide
agaaauuccauuggguuac

SEQ ID NO: 3265344 - RNA, 19 nt, Artificial Sequence
  Description of Artificial Sequence: Synthetic oligonucleotide
auugggcugaucuggaugg

SEQ ID NO: 3265345 - RNA, 19 nt, Artificial Sequence
  Description of Artificial Sequence: Synthetic oligonucleotide
agaguaguuguguuaagag

SEQ ID NO: 3265346 - RNA, 19 nt, Artificial Sequence
  Description of Artificial Sequence: Synthetic oligonucleotide
uugcuugucucccugagcc

SEQ ID NO: 3265347 - RNA, 19 nt, Artificial Sequence
  Description of Artificial Sequence: Synthetic oligonucleotide
agaaauggacaauaaauaa

SEQ ID NO: 3265348 - RNA, 19 nt, Artificial Sequence
  Description of Artificial Sequence: Synthetic oligonucleotide
auuuucacaguccugacaa

SEQ ID NO: 3265349 - RNA, 19 nt, Artificial Sequence
  Description of Artificial Sequence: Synthetic oligonucleotide
aucugagugauauugaaau

SEQ ID NO: 3265350 - RNA, 19 nt, Artificial Sequence
  Description of Artificial Sequence: Synthetic oligonucleotide
uguguuaagaggaaauaau

SEQ ID NO: 3265351 - RNA, 19 nt, Artificial Sequence
  Description of Artificial Sequence: Synthetic oligonucleotide
ucuugguuguuucacaagu

SEQ ID NO: 3265352 - RNA, 19 nt, Artificial Sequence
  Description of Artificial Sequence: Synthetic oligonucleotide
aaauggacaauaaauaaua

SEQ ID NO: 3265353 - RNA, 19 nt, Artificial Sequence
  Description of Artificial Sequence: Synthetic oligonucleotide
uugaaaucuagccaacuaa

SEQ ID NO: 3265354 - RNA, 19 nt, Artificial Sequence
  Description of Artificial Sequence: Synthetic oligonucleotide
uugcaagucacauugggcu

SEQ ID NO: 3265355 - RNA, 19 nt, Artificial Sequence
  Description of Artificial Sequence: Synthetic oligonucleotide
acaacauauugcuugucuc

SEQ ID NO: 3265356 - RNA, 19 nt, Artificial Sequence
  Description of Artificial Sequence: Synthetic oligonucleotide
aaucuuaguucaucuuguc

SEQ ID NO: 3265357 - RNA, 19 nt, Artificial Sequence
  Description of Artificial Sequence: Synthetic oligonucleotide
aauuccauuggguuacagu

SEQ ID NO: 3265358 - RNA, 19 nt, Artificial Sequence
  Description of Artificial Sequence: Synthetic oligonucleotide
uuugcaagucacauugggc

SEQ ID NO: 3265359 - RNA, 19 nt, Artificial Sequence
  Description of Artificial Sequence: Synthetic oligonucleotide
ugaaaucuagccaacuaaa

SEQ ID NO: 3265360 - RNA, 19 nt, Artificial Sequence
  Description of Artificial Sequence: Synthetic oligonucleotide
acaaguauuuucacagucc

SEQ ID NO: 3265361 - RNA, 19 nt, Artificial Sequence
  Description of Artificial Sequence: Synthetic oligonucleotide
aguauuuucacaguccuga

SEQ ID NO: 3265362 - RNA, 19 nt, Artificial Sequence
  Description of Artificial Sequence: Synthetic oligonucleotide
auuugcacagaguaguugu

SEQ ID NO: 3265363 - RNA, 19 nt, Artificial Sequence
  Description of Artificial Sequence: Synthetic oligonucleotide
aguccugacaacauauugc

SEQ ID NO: 3265364 - RNA, 19 nt, Artificial Sequence
  Description of Artificial Sequence: Synthetic oligonucleotide
caacuaaaucuuaauuucc

SEQ ID NO: 3265365 - RNA, 19 nt, Artificial Sequence
  Description of Artificial Sequence: Synthetic oligonucleotide
caaaauuucggccagaugu

SEQ ID NO: 3265366 - RNA, 19 nt, Artificial Sequence
  Description of Artificial Sequence: Synthetic oligonucleotide
uaauuuccaaauccucuag

SEQ ID NO: 3265367 - RNA, 19 nt, Artificial Sequence
  Description of Artificial Sequence: Synthetic oligonucleotide
guuacaguaguguucaauc

SEQ ID NO: 3265368 - RNA, 19 nt, Artificial Sequence
  Description of Artificial Sequence: Synthetic oligonucleotide
uuuccaaauccucuagaug

SEQ ID NO: 3265369 - RNA, 19 nt, Artificial Sequence
  Description of Artificial Sequence: Synthetic oligonucleotide
agagaaauggacaauaaau

SEQ ID NO: 3265370 - RNA, 19 nt, Artificial Sequence
  Description of Artificial Sequence: Synthetic oligonucleotide
aguaguuguguuaagagga

SEQ ID NO: 3265371 - RNA, 19 nt, Artificial Sequence
  Description of Artificial Sequence: Synthetic oligonucleotide
gaggaaauaaucugaguga

SEQ ID NO: 3265372 - RNA, 19 nt, Artificial Sequence
  Description of Artificial Sequence: Synthetic oligonucleotide
uaguguucaaucuuaguuc

SEQ ID NO: 3265373 - RNA, 19 nt, Artificial Sequence
  Description of Artificial Sequence: Synthetic oligonucleotide
agucacauugggcugaucu

SEQ ID NO: 3265374 - RNA, 19 nt, Artificial Sequence
  Description of Artificial Sequence: Synthetic oligonucleotide
uuuguccucacuuaaugaa

SEQ ID NO: 3265375 - RNA, 19 nt, Artificial Sequence
  Description of Artificial Sequence: Synthetic oligonucleotide
aauuuccaaauccucuaga

SEQ ID NO: 3265376 - RNA, 19 nt, Artificial Sequence
  Description of Artificial Sequence: Synthetic oligonucleotide
auuccauuggguuacagua

SEQ ID NO: 3265377 - RNA, 19 nt, Artificial Sequence
  Description of Artificial Sequence: Synthetic oligonucleotide
aaauccucuagauggccug

SEQ ID NO: 3265378 - RNA, 19 nt, Artificial Sequence
  Description of Artificial Sequence: Synthetic oligonucleotide
ucuuaauuuccaaauccuc

SEQ ID NO: 3265379 - RNA, 19 nt, Artificial Sequence
  Description of Artificial Sequence: Synthetic oligonucleotide
aagguuucucuuccguagg

SEQ ID NO: 3265380 - RNA, 19 nt, Artificial Sequence
  Description of Artificial Sequence: Synthetic oligonucleotide
uagccaucccaaaauuucg

SEQ ID NO: 3265381 - RNA, 19 nt, Artificial Sequence
  Description of Artificial Sequence: Synthetic oligonucleotide
uuucacaaguauuuucaca

SEQ ID NO: 3265382 - RNA, 19 nt, Artificial Sequence
  Description of Artificial Sequence: Synthetic oligonucleotide
aguguucaaucuuaguuca

SEQ ID NO: 3265383 - RNA, 19 nt, Artificial Sequence
  Description of Artificial Sequence: Synthetic oligonucleotide
uuucucuuccguagggagg

SEQ ID NO: 3265384 - RNA, 19 nt, Artificial Sequence
  Description of Artificial Sequence: Synthetic oligonucleotide
caacauauugcuugucucc

SEQ ID NO: 3265385 - RNA, 19 nt, Artificial Sequence
  Description of Artificial Sequence: Synthetic oligonucleotide
uuaauuuccaaauccucua

SEQ ID NO: 3265386 - RNA, 19 nt, Artificial Sequence
  Description of Artificial Sequence: Synthetic oligonucleotide
acuuaaugaaaugaucuug

SEQ ID NO: 3265387 - RNA, 19 nt, Artificial Sequence
  Description of Artificial Sequence: Synthetic oligonucleotide
gacaauaaauaauauauuu

SEQ ID NO: 3265388 - RNA, 19 nt, Artificial Sequence
  Description of Artificial Sequence: Synthetic oligonucleotide
cucuguaggaaucauuuug

SEQ ID NO: 3265389 - RNA, 19 nt, Artificial Sequence
  Description of Artificial Sequence: Synthetic oligonucleotide
ucagaaauuccauuggguu

SEQ ID NO: 3265390 - RNA, 19 nt, Artificial Sequence
  Description of Artificial Sequence: Synthetic oligonucleotide
ucucuaccuagagaaaugg

SEQ ID NO: 3265391 - RNA, 19 nt, Artificial Sequence
  Description of Artificial Sequence: Synthetic oligonucleotide
ucacauugggcugaucugg

SEQ ID NO: 3265392 - RNA, 19 nt, Artificial Sequence
  Description of Artificial Sequence: Synthetic oligonucleotide
aacuaaaucuuaauuucca

SEQ ID NO: 3265393 - RNA, 19 nt, Artificial Sequence
  Description of Artificial Sequence: Synthetic oligonucleotide
aaugaucuugguuguuuca

SEQ ID NO: 3265394 - RNA, 19 nt, Artificial Sequence
  Description of Artificial Sequence: Synthetic oligonucleotide
cuuagaaagguuucucuuc

SEQ ID NO: 3265395 - RNA, 19 nt, Artificial Sequence
  Description of Artificial Sequence: Synthetic oligonucleotide
auagccaucccaaaauuuc

SEQ ID NO: 3265396 - RNA, 19 nt, Artificial Sequence
  Description of Artificial Sequence: Synthetic oligonucleotide
uuuuguccucacuuaauga

SEQ ID NO: 3265397 - RNA, 19 nt, Artificial Sequence
  Description of Artificial Sequence: Synthetic oligonucleotide
uauuuucacaguccugaca

SEQ ID NO: 3265398 - RNA, 19 nt, Artificial Sequence
  Description of Artificial Sequence: Synthetic oligonucleotide
uaaugaaaugaucuugguu

SEQ ID NO: 3265399 - RNA, 19 nt, Artificial Sequence
  Description of Artificial Sequence: Synthetic oligonucleotide
uucuuagaaagguuucucu

SEQ ID NO: 3265400 - RNA, 19 nt, Artificial Sequence
  Description of Artificial Sequence: Synthetic oligonucleotide
aaaauuucggccagaugug

SEQ ID NO: 3265401 - RNA, 19 nt, Artificial Sequence
  Description of Artificial Sequence: Synthetic oligonucleotide
auugcuugucucccugagc

SEQ ID NO: 3265402 - RNA, 19 nt, Artificial Sequence
  Description of Artificial Sequence: Synthetic oligonucleotide
gaaucauuuugcaagucac

SEQ ID NO: 3265403 - RNA, 19 nt, Artificial Sequence
  Description of Artificial Sequence: Synthetic oligonucleotide
ggugucagaaauuccauug

SEQ ID NO: 3265404 - RNA, 19 nt, Artificial Sequence
  Description of Artificial Sequence: Synthetic oligonucleotide
uagagaaauggacaauaaa

SEQ ID NO: 3265405 - RNA, 19 nt, Artificial Sequence
  Description of Artificial Sequence: Synthetic oligonucleotide
uaagcuccgccuccaaucg

SEQ ID NO: 3265406 - RNA, 19 nt, Artificial Sequence
  Description of Artificial Sequence: Synthetic oligonucleotide
aacgucuaagcuccgccuc

SEQ ID NO: 3265407 - RNA, 19 nt, Artificial Sequence
  Description of Artificial Sequence: Synthetic oligonucleotide
acucggugcaagcugcgcc

SEQ ID NO: 3265408 - RNA, 19 nt, Artificial Sequence
  Description of Artificial Sequence: Synthetic oligonucleotide
ccuguaacgucuaagcucc

SEQ ID NO: 3265409 - RNA, 19 nt, Artificial Sequence
  Description of Artificial Sequence: Synthetic oligonucleotide
aaucgcugcaccuggcgcu

SEQ ID NO: 3265410 - RNA, 19 nt, Artificial Sequence
  Description of Artificial Sequence: Synthetic oligonucleotide
gacuggcucuuccagaggc

SEQ ID NO: 3265411 - RNA, 19 nt, Artificial Sequence
  Description of Artificial Sequence: Synthetic oligonucleotide
uucugccucugccagcgcg

SEQ ID NO: 3265412 - RNA, 19 nt, Artificial Sequence
  Description of Artificial Sequence: Synthetic oligonucleotide
guaacgucuaagcuccgcc

SEQ ID NO: 3265413 - RNA, 19 nt, Artificial Sequence
  Description of Artificial Sequence: Synthetic oligonucleotide
aacgcgccgcgccagcgcc

SEQ ID NO: 3265414 - RNA, 19 nt, Artificial Sequence
  Description of Artificial Sequence: Synthetic oligonucleotide
cuaagcuccgccuccaauc

SEQ ID NO: 3265415 - RNA, 19 nt, Artificial Sequence
  Description of Artificial Sequence: Synthetic oligonucleotide
acgucuaagcuccgccucc

SEQ ID NO: 3265416 - RNA, 19 nt, Artificial Sequence
  Description of Artificial Sequence: Synthetic oligonucleotide
agcagcuuccgggaugucc

SEQ ID NO: 3265417 - RNA, 19 nt, Artificial Sequence
  Description of Artificial Sequence: Synthetic oligonucleotide
auguccgacuggcucuucc

SEQ ID NO: 3265418 - RNA, 19 nt, Artificial Sequence
  Description of Artificial Sequence: Synthetic oligonucleotide
ucugccagcgcgcccugcg

SEQ ID NO: 3265419 - RNA, 19 nt, Artificial Sequence
  Description of Artificial Sequence: Synthetic oligonucleotide
aagcuccgccuccaaucgc

SEQ ID NO: 3265420 - RNA, 19 nt, Artificial Sequence
  Description of Artificial Sequence: Synthetic oligonucleotide
cucggugcaagcugcgccg

SEQ ID NO: 3265421 - RNA, 19 nt, Artificial Sequence
  Description of Artificial Sequence: Synthetic oligonucleotide
uaacgucuaagcuccgccu

SEQ ID NO: 3265422 - RNA, 19 nt, Artificial Sequence
  Description of Artificial Sequence: Synthetic oligonucleotide
ugcaagcugcgccgcaccg

SEQ ID NO: 3265423 - RNA, 19 nt, Artificial Sequence
  Description of Artificial Sequence: Synthetic oligonucleotide
gugcgcagcagcuuccggg

SEQ ID NO: 3265424 - RNA, 19 nt, Artificial Sequence
  Description of Artificial Sequence: Synthetic oligonucleotide
uguaacgucuaagcuccgc

SEQ ID NO: 3265425 - RNA, 19 nt, Artificial Sequence
  Description of Artificial Sequence: Synthetic oligonucleotide
ucugccucugccagcgcgc

SEQ ID NO: 3265426 - RNA, 19 nt, Artificial Sequence
  Description of Artificial Sequence: Synthetic oligonucleotide
cucgcugcagcuugugcgc

SEQ ID NO: 3265427 - RNA, 19 nt, Artificial Sequence
  Description of Artificial Sequence: Synthetic oligonucleotide
ugcaccuggcgcugcaugc

SEQ ID NO: 3265428 - RNA, 19 nt, Artificial Sequence
  Description of Artificial Sequence: Synthetic oligonucleotide
gcucgcugcagcuugugcg

SEQ ID NO: 3265429 - RNA, 19 nt, Artificial Sequence
  Description of Artificial Sequence: Synthetic oligonucleotide
cuccaaucgcugcaccugg

SEQ ID NO: 3265430 - RNA, 19 nt, Artificial Sequence
  Description of Artificial Sequence: Synthetic oligonucleotide
caaucgcugcaccuggcgc

SEQ ID NO: 3265431 - RNA, 19 nt, Artificial Sequence
  Description of Artificial Sequence: Synthetic oligonucleotide
accuguccccgcugcagcc

SEQ ID NO: 3265432 - RNA, 19 nt, Artificial Sequence
  Description of Artificial Sequence: Synthetic oligonucleotide
uccgccuccaaucgcugca

SEQ ID NO: 3265433 - RNA, 19 nt, Artificial Sequence
  Description of Artificial Sequence: Synthetic oligonucleotide
ucuaagcuccgccuccaau

SEQ ID NO: 3265434 - RNA, 19 nt, Artificial Sequence
  Description of Artificial Sequence: Synthetic oligonucleotide
cugcaugcggggaacgcgc

SEQ ID NO: 3265435 - RNA, 19 nt, Artificial Sequence
  Description of Artificial Sequence: Synthetic oligonucleotide
caagcugcgccgcaccgcc

SEQ ID NO: 3265436 - RNA, 19 nt, Artificial Sequence
  Description of Artificial Sequence: Synthetic oligonucleotide
uccgggauguccgacuggc

SEQ ID NO: 3265437 - RNA, 19 nt, Artificial Sequence
  Description of Artificial Sequence: Synthetic oligonucleotide
ugcgcagcagcuuccggga

SEQ ID NO: 3265438 - RNA, 19 nt, Artificial Sequence
  Description of Artificial Sequence: Synthetic oligonucleotide
ugugcgcagcagcuuccgg

SEQ ID NO: 3265439 - RNA, 19 nt, Artificial Sequence
  Description of Artificial Sequence: Synthetic oligonucleotide
cuugugcgcagcagcuucc

SEQ ID NO: 3265440 - RNA, 19 nt, Artificial Sequence
  Description of Artificial Sequence: Synthetic oligonucleotide
uguccgacuggcucuucca

SEQ ID NO: 3265441 - RNA, 19 nt, Artificial Sequence
  Description of Artificial Sequence: Synthetic oligonucleotide
uccgacuggcucuuccaga

SEQ ID NO: 3265442 - RNA, 19 nt, Artificial Sequence
  Description of Artificial Sequence: Synthetic oligonucleotide
acuggcucuuccagaggcc

SEQ ID NO: 3265443 - RNA, 19 nt, Artificial Sequence
  Description of Artificial Sequence: Synthetic oligonucleotide
uuccgggauguccgacugg

SEQ ID NO: 3265444 - RNA, 19 nt, Artificial Sequence
  Description of Artificial Sequence: Synthetic oligonucleotide
gugcuucugccucugccag

SEQ ID NO: 3265445 - RNA, 19 nt, Artificial Sequence
  Description of Artificial Sequence: Synthetic oligonucleotide
gcagcuuccgggauguccg

SEQ ID NO: 3265446 - RNA, 19 nt, Artificial Sequence
  Description of Artificial Sequence: Synthetic oligonucleotide
uccaaucgcugcaccuggc

SEQ ID NO: 3265447 - RNA, 19 nt, Artificial Sequence
  Description of Artificial Sequence: Synthetic oligonucleotide
cuuccgggauguccgacug

SEQ ID NO: 3265448 - RNA, 19 nt, Artificial Sequence
  Description of Artificial Sequence: Synthetic oligonucleotide
gcagcuugugcgcagcagc

SEQ ID NO: 3265449 - RNA, 19 nt, Artificial Sequence
  Description of Artificial Sequence: Synthetic oligonucleotide
uugugcgcagcagcuuccg

SEQ ID NO: 3265450 - RNA, 19 nt, Artificial Sequence
  Description of Artificial Sequence: Synthetic oligonucleotide
agcgccuccagcucccgca

SEQ ID NO: 3265451 - RNA, 19 nt, Artificial Sequence
  Description of Artificial Sequence: Synthetic oligonucleotide
ugcaugcggggaacgcgcc

SEQ ID NO: 3265452 - RNA, 19 nt, Artificial Sequence
  Description of Artificial Sequence: Synthetic oligonucleotide
gcuucugccucugccagcg

SEQ ID NO: 3265453 - RNA, 19 nt, Artificial Sequence
  Description of Artificial Sequence: Synthetic oligonucleotide
ugcagcuugugcgcagcag

SEQ ID NO: 3265454 - RNA, 19 nt, Artificial Sequence
  Description of Artificial Sequence: Synthetic oligonucleotide
guccgacuggcucuuccag

SEQ ID NO: 3265455 - RNA, 19 nt, Artificial Sequence
  Description of Artificial Sequence: Synthetic oligonucleotide
ugcgcagccgcaccuccac

SEQ ID NO: 3265456 - RNA, 19 nt, Artificial Sequence
  Description of Artificial Sequence: Synthetic oligonucleotide
caugcggggaacgcgccgc

SEQ ID NO: 3265457 - RNA, 19 nt, Artificial Sequence
  Description of Artificial Sequence: Synthetic oligonucleotide
ugccgggccuccucggugc

SEQ ID NO: 3265458 - RNA, 19 nt, Artificial Sequence
  Description of Artificial Sequence: Synthetic oligonucleotide
ugcuucugccucugccagc

SEQ ID NO: 3265459 - RNA, 19 nt, Artificial Sequence
  Description of Artificial Sequence: Synthetic oligonucleotide
ugcgccgcaccgccugccg

SEQ ID NO: 3265460 - RNA, 19 nt, Artificial Sequence
  Description of Artificial Sequence: Synthetic oligonucleotide
uccagcucccgcacucggu

SEQ ID NO: 3265461 - RNA, 19 nt, Artificial Sequence
  Description of Artificial Sequence: Synthetic oligonucleotide
ccgacuggcucuuccagag

SEQ ID NO: 3265462 - RNA, 19 nt, Artificial Sequence
  Description of Artificial Sequence: Synthetic oligonucleotide
ucggugcgcagccgcaccu

SEQ ID NO: 3265463 - RNA, 19 nt, Artificial Sequence
  Description of Artificial Sequence: Synthetic oligonucleotide
caccuguccccgcugcagc

SEQ ID NO: 3265464 - RNA, 19 nt, Artificial Sequence
  Description of Artificial Sequence: Synthetic oligonucleotide
uccaccuguccccgcugca

SEQ ID NO: 3265465 - RNA, 19 nt, Artificial Sequence
  Description of Artificial Sequence: Synthetic oligonucleotide
caccuggcgcugcaugcgg

SEQ ID NO: 3265466 - RNA, 19 nt, Artificial Sequence
  Description of Artificial Sequence: Synthetic oligonucleotide
agcugcgccgcaccgccug

SEQ ID NO: 3265467 - RNA, 19 nt, Artificial Sequence
  Description of Artificial Sequence: Synthetic oligonucleotide
cuccucggugcgcagccgc

SEQ ID NO: 3265468 - RNA, 19 nt, Artificial Sequence
  Description of Artificial Sequence: Synthetic oligonucleotide
ugccagcgcgcccugcgcu

SEQ ID NO: 3265469 - RNA, 19 nt, Artificial Sequence
  Description of Artificial Sequence: Synthetic oligonucleotide
gaacgcgccgcgccagcgc

SEQ ID NO: 3265470 - RNA, 19 nt, Artificial Sequence
  Description of Artificial Sequence: Synthetic oligonucleotide
cuguaacgucuaagcuccg

SEQ ID NO: 3265471 - RNA, 19 nt, Artificial Sequence
  Description of Artificial Sequence: Synthetic oligonucleotide
ccaaucgcugcaccuggcg

SEQ ID NO: 3265472 - RNA, 19 nt, Artificial Sequence
  Description of Artificial Sequence: Synthetic oligonucleotide
accuccaccuguccccgcu

SEQ ID NO: 3265473 - RNA, 19 nt, Artificial Sequence
  Description of Artificial Sequence: Synthetic oligonucleotide
cuccagcucccgcacucgg

SEQ ID NO: 3265474 - RNA, 19 nt, Artificial Sequence
  Description of Artificial Sequence: Synthetic oligonucleotide
gcugcaugcggggaacgcg

SEQ ID NO: 3265475 - RNA, 19 nt, Artificial Sequence
  Description of Artificial Sequence: Synthetic oligonucleotide
uccucggugcgcagccgca

SEQ ID NO: 3265476 - RNA, 19 nt, Artificial Sequence
  Description of Artificial Sequence: Synthetic oligonucleotide
agcuuccgggauguccgac

SEQ ID NO: 3265477 - RNA, 19 nt, Artificial Sequence
  Description of Artificial Sequence: Synthetic oligonucleotide
agcucccgcacucggugca

SEQ ID NO: 3265478 - RNA, 19 nt, Artificial Sequence
  Description of Artificial Sequence: Synthetic oligonucleotide
gcuugugcgcagcagcuuc

SEQ ID NO: 3265479 - RNA, 19 nt, Artificial Sequence
  Description of Artificial Sequence: Synthetic oligonucleotide
cugcgcucgcugcagcuug

SEQ ID NO: 3265480 - RNA, 19 nt, Artificial Sequence
  Description of Artificial Sequence: Synthetic oligonucleotide
ucccgcacucggugcaagc

SEQ ID NO: 3265481 - RNA, 19 nt, Artificial Sequence
  Description of Artificial Sequence: Synthetic oligonucleotide
cucggugcgcagccgcacc

SEQ ID NO: 3265482 - RNA, 19 nt, Artificial Sequence
  Description of Artificial Sequence: Synthetic oligonucleotide
cuccaccuguccccgcugc

SEQ ID NO: 3265483 - RNA, 19 nt, Artificial Sequence
  Description of Artificial Sequence: Synthetic oligonucleotide
gugcaagcugcgccgcacc

SEQ ID NO: 3265484 - RNA, 19 nt, Artificial Sequence
  Description of Artificial Sequence: Synthetic oligonucleotide
augcggggaacgcgccgcg

SEQ ID NO: 3265485 - RNA, 19 nt, Artificial Sequence
  Description of Artificial Sequence: Synthetic oligonucleotide
cuccgccuccaaucgcugc

SEQ ID NO: 3265486 - RNA, 19 nt, Artificial Sequence
  Description of Artificial Sequence: Synthetic oligonucleotide
agcuccgccuccaaucgcu

SEQ ID NO: 3265487 - RNA, 19 nt, Artificial Sequence
  Description of Artificial Sequence: Synthetic oligonucleotide
cugcaccuggcgcugcaug

SEQ ID NO: 3265488 - RNA, 19 nt, Artificial Sequence
  Description of Artificial Sequence: Synthetic oligonucleotide
uggcgcugcaugcggggaa

SEQ ID NO: 3265489 - RNA, 19 nt, Artificial Sequence
  Description of Artificial Sequence: Synthetic oligonucleotide
cuguccccgcugcagccgc

SEQ ID NO: 3265490 - RNA, 19 nt, Artificial Sequence
  Description of Artificial Sequence: Synthetic oligonucleotide
cagcucccgcacucggugc

SEQ ID NO: 3265491 - RNA, 19 nt, Artificial Sequence
  Description of Artificial Sequence: Synthetic oligonucleotide
gcgugcuucugccucugcc

SEQ ID NO: 3265492 - RNA, 19 nt, Artificial Sequence
  Description of Artificial Sequence: Synthetic oligonucleotide
aucgcugcaccuggcgcug

SEQ ID NO: 3265493 - RNA, 19 nt, Artificial Sequence
  Description of Artificial Sequence: Synthetic oligonucleotide
ucggugcaagcugcgccgc

SEQ ID NO: 3265494 - RNA, 19 nt, Artificial Sequence
  Description of Artificial Sequence: Synthetic oligonucleotide
ugcgcucgcugcagcuugu

SEQ ID NO: 3265495 - RNA, 19 nt, Artificial Sequence
  Description of Artificial Sequence: Synthetic oligonucleotide
uccccgcugcagccgccgg

SEQ ID NO: 3265496 - RNA, 19 nt, Artificial Sequence
  Description of Artificial Sequence: Synthetic oligonucleotide
cacucggugcaagcugcgc

SEQ ID NO: 3265497 - RNA, 19 nt, Artificial Sequence
  Description of Artificial Sequence: Synthetic oligonucleotide
uggcucuuccagaggccua

SEQ ID NO: 3265498 - RNA, 19 nt, Artificial Sequence
  Description of Artificial Sequence: Synthetic oligonucleotide
gcugcagccgccgggcgcg

SEQ ID NO: 3265499 - RNA, 19 nt, Artificial Sequence
  Description of Artificial Sequence: Synthetic oligonucleotide
ggugcgcagccgcaccucc

SEQ ID NO: 3265500 - RNA, 19 nt, Artificial Sequence
  Description of Artificial Sequence: Synthetic oligonucleotide
agccgcaccuccaccuguc

SEQ ID NO: 3265501 - RNA, 19 nt, Artificial Sequence
  Description of Artificial Sequence: Synthetic oligonucleotide
ugccucugccagcgcgccc

SEQ ID NO: 3265502 - RNA, 19 nt, Artificial Sequence
  Description of Artificial Sequence: Synthetic oligonucleotide
cgcacucggugcaagcugc

SEQ ID NO: 3265503 - RNA, 19 nt, Artificial Sequence
  Description of Artificial Sequence: Synthetic oligonucleotide
gcaugcggggaacgcgccg

SEQ ID NO: 3265504 - RNA, 19 nt, Artificial Sequence
  Description of Artificial Sequence: Synthetic oligonucleotide
cgcaccuccaccugucccc

SEQ ID NO: 3265505 - RNA, 19 nt, Artificial Sequence
  Description of Artificial Sequence: Synthetic oligonucleotide
agugauauaagauagaaag

SEQ ID NO: 3265506 - RNA, 19 nt, Artificial Sequence
  Description of Artificial Sequence: Synthetic oligonucleotide
acauaaaucacguaagcgc

SEQ ID NO: 3265507 - RNA, 19 nt, Artificial Sequence
  Description of Artificial Sequence: Synthetic oligonucleotide
aacauuccgauuuauaagg

SEQ ID NO: 3265508 - RNA, 19 nt, Artificial Sequence
  Description of Artificial Sequence: Synthetic oligonucleotide
aauaaugaaagugauacag

SEQ ID NO: 3265509 - RNA, 19 nt, Artificial Sequence
  Description of Artificial Sequence: Synthetic oligonucleotide
augacuauuagcuuguggc

SEQ ID NO: 3265510 - RNA, 19 nt, Artificial Sequence
  Description of Artificial Sequence: Synthetic oligonucleotide
acuaaagugaauucaaaac

SEQ ID NO: 3265511 - RNA, 19 nt, Artificial Sequence
  Description of Artificial Sequence: Synthetic oligonucleotide
auuaagaauggcuuauucc

SEQ ID NO: 3265512 - RNA, 19 nt, Artificial Sequence
  Description of Artificial Sequence: Synthetic oligonucleotide
uaauuauugggacaaagag

SEQ ID NO: 3265513 - RNA, 19 nt, Artificial Sequence
  Description of Artificial Sequence: Synthetic oligonucleotide
aaacauaaaucacguaagc

SEQ ID NO: 3265514 - RNA, 19 nt, Artificial Sequence
  Description of Artificial Sequence: Synthetic oligonucleotide
uuaagaauggcuuauuccc

SEQ ID NO: 3265515 - RNA, 19 nt, Artificial Sequence
  Description of Artificial Sequence: Synthetic oligonucleotide
auuaugguuagcuagacug

SEQ ID NO: 3265516 - RNA, 19 nt, Artificial Sequence
  Description of Artificial Sequence: Synthetic oligonucleotide
ugagaaugaaaacugaucu

SEQ ID NO: 3265517 - RNA, 19 nt, Artificial Sequence
  Description of Artificial Sequence: Synthetic oligonucleotide
gauaagaucaccucuuucc

SEQ ID NO: 3265518 - RNA, 19 nt, Artificial Sequence
  Description of Artificial Sequence: Synthetic oligonucleotide
aaggugaacacuaaagacc

SEQ ID NO: 3265519 - RNA, 19 nt, Artificial Sequence
  Description of Artificial Sequence: Synthetic oligonucleotide
uuuauaaaggcacuuaaaa

SEQ ID NO: 3265520 - RNA, 19 nt, Artificial Sequence
  Description of Artificial Sequence: Synthetic oligonucleotide
aaagaagacucauugaccu

SEQ ID NO: 3265521 - RNA, 19 nt, Artificial Sequence
  Description of Artificial Sequence: Synthetic oligonucleotide
uauucauagaaauaggaac

SEQ ID NO: 3265522 - RNA, 19 nt, Artificial Sequence
  Description of Artificial Sequence: Synthetic oligonucleotide
agaaauauguacaaggacg

SEQ ID NO: 3265523 - RNA, 19 nt, Artificial Sequence
  Description of Artificial Sequence: Synthetic oligonucleotide
ucuaacuggaaauacaugu

SEQ ID NO: 3265524 - RNA, 19 nt, Artificial Sequence
  Description of Artificial Sequence: Synthetic oligonucleotide
auaaauggaaugcugcugg

SEQ ID NO: 3265525 - RNA, 19 nt, Artificial Sequence
  Description of Artificial Sequence: Synthetic oligonucleotide
auucauagaaauaggaacc

SEQ ID NO: 3265526 - RNA, 19 nt, Artificial Sequence
  Description of Artificial Sequence: Synthetic oligonucleotide
ucaaagaagacucauugac

SEQ ID NO: 3265527 - RNA, 19 nt, Artificial Sequence
  Description of Artificial Sequence: Synthetic oligonucleotide
aaacauuccgauuuauaag

SEQ ID NO: 3265528 - RNA, 19 nt, Artificial Sequence
  Description of Artificial Sequence: Synthetic oligonucleotide
uuuuaaacauaaaucacgu

SEQ ID NO: 3265529 - RNA, 19 nt, Artificial Sequence
  Description of Artificial Sequence: Synthetic oligonucleotide
auauuaauauuuauaaagg

SEQ ID NO: 3265530 - RNA, 19 nt, Artificial Sequence
  Description of Artificial Sequence: Synthetic oligonucleotide
aaaacagugcuaaggaccc

SEQ ID NO: 3265531 - RNA, 19 nt, Artificial Sequence
  Description of Artificial Sequence: Synthetic oligonucleotide
uaauacaaaguccugaaaa

SEQ ID NO: 3265532 - RNA, 19 nt, Artificial Sequence
  Description of Artificial Sequence: Synthetic oligonucleotide
uguauucauagaaauagga

SEQ ID NO: 3265533 - RNA, 19 nt, Artificial Sequence
  Description of Artificial Sequence: Synthetic oligonucleotide
aacacuccuauauacauga

SEQ ID NO: 3265534 - RNA, 19 nt, Artificial Sequence
  Description of Artificial Sequence: Synthetic oligonucleotide
uauuuauacuagcacauca

SEQ ID NO: 3265535 - RNA, 19 nt, Artificial Sequence
  Description of Artificial Sequence: Synthetic oligonucleotide
ucaacaugagcacacagca

SEQ ID NO: 3265536 - RNA, 19 nt, Artificial Sequence
  Description of Artificial Sequence: Synthetic oligonucleotide
auuuauaaggcaugaagug

SEQ ID NO: 3265537 - RNA, 19 nt, Artificial Sequence
  Description of Artificial Sequence: Synthetic oligonucleotide
ucguuuaaguaaaacauca

SEQ ID NO: 3265538 - RNA, 19 nt, Artificial Sequence
  Description of Artificial Sequence: Synthetic oligonucleotide
aaaguuaaacauuaugguu

SEQ ID NO: 3265539 - RNA, 19 nt, Artificial Sequence
  Description of Artificial Sequence: Synthetic oligonucleotide
aagaauacaauugucagaa

SEQ ID NO: 3265540 - RNA, 19 nt, Artificial Sequence
  Description of Artificial Sequence: Synthetic oligonucleotide
ugauauaagauagaaagaa

SEQ ID NO: 3265541 - RNA, 19 nt, Artificial Sequence
  Description of Artificial Sequence: Synthetic oligonucleotide
auauacaugacuauuagcu

SEQ ID NO: 3265542 - RNA, 19 nt, Artificial Sequence
  Description of Artificial Sequence: Synthetic oligonucleotide
uaaguuugcagcuauaaua

SEQ ID NO: 3265543 - RNA, 19 nt, Artificial Sequence
  Description of Artificial Sequence: Synthetic oligonucleotide
acaaucaccauuguaugcc

SEQ ID NO: 3265544 - RNA, 19 nt, Artificial Sequence
  Description of Artificial Sequence: Synthetic oligonucleotide
uaacucauuugaaacauca

SEQ ID NO: 3265545 - RNA, 19 nt, Artificial Sequence
  Description of Artificial Sequence: Synthetic oligonucleotide
uuauacuagcacaucaucu

SEQ ID NO: 3265546 - RNA, 19 nt, Artificial Sequence
  Description of Artificial Sequence: Synthetic oligonucleotide
agaaaccauaauuauuggg

SEQ ID NO: 3265547 - RNA, 19 nt, Artificial Sequence
  Description of Artificial Sequence: Synthetic oligonucleotide
augaaagugauacaguagu

SEQ ID NO: 3265548 - RNA, 19 nt, Artificial Sequence
  Description of Artificial Sequence: Synthetic oligonucleotide
acuaaccuaaccuucaaca

SEQ ID NO: 3265549 - RNA, 19 nt, Artificial Sequence
  Description of Artificial Sequence: Synthetic oligonucleotide
uaaagugaauucaaaacau

SEQ ID NO: 3265550 - RNA, 19 nt, Artificial Sequence
  Description of Artificial Sequence: Synthetic oligonucleotide
gauaaaagggugaaggaug

SEQ ID NO: 3265551 - RNA, 19 nt, Artificial Sequence
  Description of Artificial Sequence: Synthetic oligonucleotide
agcuauaauauuuauacua

SEQ ID NO: 3265552 - RNA, 19 nt, Artificial Sequence
  Description of Artificial Sequence: Synthetic oligonucleotide
guauuguagaauuugauaa

SEQ ID NO: 3265553 - RNA, 19 nt, Artificial Sequence
  Description of Artificial Sequence: Synthetic oligonucleotide
gcagcuauaauauuuauac

SEQ ID NO: 3265554 - RNA, 19 nt, Artificial Sequence
  Description of Artificial Sequence: Synthetic oligonucleotide
gaaaccauaauuauuggga

SEQ ID NO: 3265555 - RNA, 19 nt, Artificial Sequence
  Description of Artificial Sequence: Synthetic oligonucleotide
uugaucauuuugaaaagac

SEQ ID NO: 3265556 - RNA, 19 nt, Artificial Sequence
  Description of Artificial Sequence: Synthetic oligonucleotide
aaaagagugcuguuaguga

SEQ ID NO: 3265557 - RNA, 19 nt, Artificial Sequence
  Description of Artificial Sequence: Synthetic oligonucleotide
uacaacagggcacuccugg

SEQ ID NO: 3265558 - RNA, 19 nt, Artificial Sequence
  Description of Artificial Sequence: Synthetic oligonucleotide
ugaagugauuuuaauguga

SEQ ID NO: 3265559 - RNA, 19 nt, Artificial Sequence
  Description of Artificial Sequence: Synthetic oligonucleotide
gaaacauuccgauuuauaa

SEQ ID NO: 3265560 - RNA, 19 nt, Artificial Sequence
  Description of Artificial Sequence: Synthetic oligonucleotide
cuugaacugaaacauuccg

SEQ ID NO: 3265561 - RNA, 19 nt, Artificial Sequence
  Description of Artificial Sequence: Synthetic oligonucleotide
uagucguuuaaguaaaaca

SEQ ID NO: 3265562 - RNA, 19 nt, Artificial Sequence
  Description of Artificial Sequence: Synthetic oligonucleotide
cuaaagugaauucaaaaca

SEQ ID NO: 3265563 - RNA, 19 nt, Artificial Sequence
  Description of Artificial Sequence: Synthetic oligonucleotide
uucaacaugagcacacagc

SEQ ID NO: 3265564 - RNA, 19 nt, Artificial Sequence
  Description of Artificial Sequence: Synthetic oligonucleotide
agaaggaacuuacuuuugg

SEQ ID NO: 3265565 - RNA, 19 nt, Artificial Sequence
  Description of Artificial Sequence: Synthetic oligonucleotide
aagugcuuugaccagaaaa

SEQ ID NO: 3265566 - RNA, 19 nt, Artificial Sequence
  Description of Artificial Sequence: Synthetic oligonucleotide
ugccuuaucauguuguuga

SEQ ID NO: 3265567 - RNA, 19 nt, Artificial Sequence
  Description of Artificial Sequence: Synthetic oligonucleotide
gauauuaauuaagaauggc

SEQ ID NO: 3265568 - RNA, 19 nt, Artificial Sequence
  Description of Artificial Sequence: Synthetic oligonucleotide
uggacuaauucaaauuagc

SEQ ID NO: 3265569 - RNA, 19 nt, Artificial Sequence
  Description of Artificial Sequence: Synthetic oligonucleotide
ugaacuuguacaacagggc

SEQ ID NO: 3265570 - RNA, 19 nt, Artificial Sequence
  Description of Artificial Sequence: Synthetic oligonucleotide
uccugaguuguauucauag

SEQ ID NO: 3265571 - RNA, 19 nt, Artificial Sequence
  Description of Artificial Sequence: Synthetic oligonucleotide
uauauacaugacuauuagc

SEQ ID NO: 3265572 - RNA, 19 nt, Artificial Sequence
  Description of Artificial Sequence: Synthetic oligonucleotide
gacaagucauacuucaaug

SEQ ID NO: 3265573 - RNA, 19 nt, Artificial Sequence
  Description of Artificial Sequence: Synthetic oligonucleotide
uguauuguagaauuugaua

SEQ ID NO: 3265574 - RNA, 19 nt, Artificial Sequence
  Description of Artificial Sequence: Synthetic oligonucleotide
uaugugggaaaggagagag

SEQ ID NO: 3265575 - RNA, 19 nt, Artificial Sequence
  Description of Artificial Sequence: Synthetic oligonucleotide
acuacagcgggcccaaggc

SEQ ID NO: 3265576 - RNA, 19 nt, Artificial Sequence
  Description of Artificial Sequence: Synthetic oligonucleotide
aaguuaaacauuaugguua

SEQ ID NO: 3265577 - RNA, 19 nt, Artificial Sequence
  Description of Artificial Sequence: Synthetic oligonucleotide
aggaguuaaaccccagugg

SEQ ID NO: 3265578 - RNA, 19 nt, Artificial Sequence
  Description of Artificial Sequence: Synthetic oligonucleotide
uagaccuuucuauaaaaca

SEQ ID NO: 3265579 - RNA, 19 nt, Artificial Sequence
  Description of Artificial Sequence: Synthetic oligonucleotide
uccuucguaacucauuuga

SEQ ID NO: 3265580 - RNA, 19 nt, Artificial Sequence
  Description of Artificial Sequence: Synthetic oligonucleotide
aauaggaaccagugugauc

SEQ ID NO: 3265581 - RNA, 19 nt, Artificial Sequence
  Description of Artificial Sequence: Synthetic oligonucleotide
aaauacauguuugucagau

SEQ ID NO: 3265582 - RNA, 19 nt, Artificial Sequence
  Description of Artificial Sequence: Synthetic oligonucleotide
uuggacuaauucaaauuag

SEQ ID NO: 3265583 - RNA, 19 nt, Artificial Sequence
  Description of Artificial Sequence: Synthetic oligonucleotide
aagccucuuguacuuaagg

SEQ ID NO: 3265584 - RNA, 19 nt, Artificial Sequence
  Description of Artificial Sequence: Synthetic oligonucleotide
gaauacaauugucagaaaa

SEQ ID NO: 3265585 - RNA, 19 nt, Artificial Sequence
  Description of Artificial Sequence: Synthetic oligonucleotide
uguagauacuacacaaaac

SEQ ID NO: 3265586 - RNA, 19 nt, Artificial Sequence
  Description of Artificial Sequence: Synthetic oligonucleotide
aguugggcgucuuuguggc

SEQ ID NO: 3265587 - RNA, 19 nt, Artificial Sequence
  Description of Artificial Sequence: Synthetic oligonucleotide
aaagagugcuguuagugau

SEQ ID NO: 3265588 - RNA, 19 nt, Artificial Sequence
  Description of Artificial Sequence: Synthetic oligonucleotide
acauuaauaaugaaaguga

SEQ ID NO: 3265589 - RNA, 19 nt, Artificial Sequence
  Description of Artificial Sequence: Synthetic oligonucleotide
uuuggcuuauuacaacgug

SEQ ID NO: 3265590 - RNA, 19 nt, Artificial Sequence
  Description of Artificial Sequence: Synthetic oligonucleotide
ugcgcagucagugauacag

SEQ ID NO: 3265591 - RNA, 19 nt, Artificial Sequence
  Description of Artificial Sequence: Synthetic oligonucleotide
uccuacauauauuguauug

SEQ ID NO: 3265592 - RNA, 19 nt, Artificial Sequence
  Description of Artificial Sequence: Synthetic oligonucleotide
aguaaaacaucaucauucu

SEQ ID NO: 3265593 - RNA, 19 nt, Artificial Sequence
  Description of Artificial Sequence: Synthetic oligonucleotide
gacaaagagugauauaaga

SEQ ID NO: 3265594 - RNA, 19 nt, Artificial Sequence
  Description of Artificial Sequence: Synthetic oligonucleotide
uugaacugaaacauuccga

SEQ ID NO: 3265595 - RNA, 19 nt, Artificial Sequence
  Description of Artificial Sequence: Synthetic oligonucleotide
auaacccaaauuuuaaaau

SEQ ID NO: 3265596 - RNA, 19 nt, Artificial Sequence
  Description of Artificial Sequence: Synthetic oligonucleotide
uucuuuagagggcuguacc

SEQ ID NO: 3265597 - RNA, 19 nt, Artificial Sequence
  Description of Artificial Sequence: Synthetic oligonucleotide
aacguguagauacuacaca

SEQ ID NO: 3265598 - RNA, 19 nt, Artificial Sequence
  Description of Artificial Sequence: Synthetic oligonucleotide
auuaaaucagggcagugaa

SEQ ID NO: 3265599 - RNA, 19 nt, Artificial Sequence
  Description of Artificial Sequence: Synthetic oligonucleotide
uuugauaagaucaccucuu

SEQ ID NO: 3265600 - RNA, 19 nt, Artificial Sequence
  Description of Artificial Sequence: Synthetic oligonucleotide
ucaaacucuuagaagggcu

SEQ ID NO: 3265601 - RNA, 19 nt, Artificial Sequence
  Description of Artificial Sequence: Synthetic oligonucleotide
aacuuguacaacagggcac

SEQ ID NO: 3265602 - RNA, 19 nt, Artificial Sequence
  Description of Artificial Sequence: Synthetic oligonucleotide
uugguuaccauucaucauu

SEQ ID NO: 3265603 - RNA, 19 nt, Artificial Sequence
  Description of Artificial Sequence: Synthetic oligonucleotide
uauacuagcacaucaucua

SEQ ID NO: 3265604 - RNA, 19 nt, Artificial Sequence
  Description of Artificial Sequence: Synthetic oligonucleotide
ucuauaucaccaucuguca

SEQ ID NO: 3265605 - RNA, 19 nt, Artificial Sequence
  Description of Artificial Sequence: Synthetic oligonucleotide
aaauauugaauauaaagga

SEQ ID NO: 3265606 - RNA, 19 nt, Artificial Sequence
  Description of Artificial Sequence: Synthetic oligonucleotide
aaacaucacauuuagucac

SEQ ID NO: 3265607 - RNA, 19 nt, Artificial Sequence
  Description of Artificial Sequence: Synthetic oligonucleotide
aguguuagcugcuacaugc

SEQ ID NO: 3265608 - RNA, 19 nt, Artificial Sequence
  Description of Artificial Sequence: Synthetic oligonucleotide
aacacuaaaugacucaggg

SEQ ID NO: 3265609 - RNA, 19 nt, Artificial Sequence
  Description of Artificial Sequence: Synthetic oligonucleotide
auagaaauuauucagagaa

SEQ ID NO: 3265610 - RNA, 19 nt, Artificial Sequence
  Description of Artificial Sequence: Synthetic oligonucleotide
uuuaccuuuauuaacauau

SEQ ID NO: 3265611 - RNA, 19 nt, Artificial Sequence
  Description of Artificial Sequence: Synthetic oligonucleotide
uagaaaauagaguaaaggc

SEQ ID NO: 3265612 - RNA, 19 nt, Artificial Sequence
  Description of Artificial Sequence: Synthetic oligonucleotide
ucuaaauggauacaguaug

SEQ ID NO: 3265613 - RNA, 19 nt, Artificial Sequence
  Description of Artificial Sequence: Synthetic oligonucleotide
uuuacuucuaaacugccca

SEQ ID NO: 3265614 - RNA, 19 nt, Artificial Sequence
  Description of Artificial Sequence: Synthetic oligonucleotide
aauauaaaggaugugauuu

SEQ ID NO: 3265615 - RNA, 19 nt, Artificial Sequence
  Description of Artificial Sequence: Synthetic oligonucleotide
auagaaaauagaguaaagg

SEQ ID NO: 3265616 - RNA, 19 nt, Artificial Sequence
  Description of Artificial Sequence: Synthetic oligonucleotide
ucuacuucaaaccaacacu

SEQ ID NO: 3265617 - RNA, 19 nt, Artificial Sequence
  Description of Artificial Sequence: Synthetic oligonucleotide
uggaaaaucaaaccaagcu

SEQ ID NO: 3265618 - RNA, 19 nt, Artificial Sequence
  Description of Artificial Sequence: Synthetic oligonucleotide
ugaguacuuaagcucaucg

SEQ ID NO: 3265619 - RNA, 19 nt, Artificial Sequence
  Description of Artificial Sequence: Synthetic oligonucleotide
aauucuaaaaguugacaga

SEQ ID NO: 3265620 - RNA, 19 nt, Artificial Sequence
  Description of Artificial Sequence: Synthetic oligonucleotide
aauauuaggaucaauggau

SEQ ID NO: 3265621 - RNA, 19 nt, Artificial Sequence
  Description of Artificial Sequence: Synthetic oligonucleotide
aauuuuauccccaacagaa

SEQ ID NO: 3265622 - RNA, 19 nt, Artificial Sequence
  Description of Artificial Sequence: Synthetic oligonucleotide
uugaauauaaaggauguga

SEQ ID NO: 3265623 - RNA, 19 nt, Artificial Sequence
  Description of Artificial Sequence: Synthetic oligonucleotide
guagaugucauucacaguc

SEQ ID NO: 3265624 - RNA, 19 nt, Artificial Sequence
  Description of Artificial Sequence: Synthetic oligonucleotide
uuaaccauggaacuucuga

SEQ ID NO: 3265625 - RNA, 19 nt, Artificial Sequence
  Description of Artificial Sequence: Synthetic oligonucleotide
auuaacauaucccuagugu

SEQ ID NO: 3265626 - RNA, 19 nt, Artificial Sequence
  Description of Artificial Sequence: Synthetic oligonucleotide
ucaccaaugaaacugcaca

SEQ ID NO: 3265627 - RNA, 19 nt, Artificial Sequence
  Description of Artificial Sequence: Synthetic oligonucleotide
cacacaaacacacacacac

SEQ ID NO: 3265628 - RNA, 19 nt, Artificial Sequence
  Description of Artificial Sequence: Synthetic oligonucleotide
auagaguaaaggcaacugg

SEQ ID NO: 3265629 - RNA, 19 nt, Artificial Sequence
  Description of Artificial Sequence: Synthetic oligonucleotide
uuuaacucaagucuacuuc

SEQ ID NO: 3265630 - RNA, 19 nt, Artificial Sequence
  Description of Artificial Sequence: Synthetic oligonucleotide
uauuccaauuagaacaccc

SEQ ID NO: 3265631 - RNA, 19 nt, Artificial Sequence
  Description of Artificial Sequence: Synthetic oligonucleotide
aaggcuuguggagagaucg

SEQ ID NO: 3265632 - RNA, 19 nt, Artificial Sequence
  Description of Artificial Sequence: Synthetic oligonucleotide
agaauaauacaccacggca

SEQ ID NO: 3265633 - RNA, 19 nt, Artificial Sequence
  Description of Artificial Sequence: Synthetic oligonucleotide
uauguagacaggauaguug

SEQ ID NO: 3265634 - RNA, 19 nt, Artificial Sequence
  Description of Artificial Sequence: Synthetic oligonucleotide
uauuauacuaugcauuuua

SEQ ID NO: 3265635 - RNA, 19 nt, Artificial Sequence
  Description of Artificial Sequence: Synthetic oligonucleotide
accuuuauuaacauauccc

SEQ ID NO: 3265636 - RNA, 19 nt, Artificial Sequence
  Description of Artificial Sequence: Synthetic oligonucleotide
acuucuaaacugcccagcc

SEQ ID NO: 3265637 - RNA, 19 nt, Artificial Sequence
  Description of Artificial Sequence: Synthetic oligonucleotide
aaugacucaggguaauucu

SEQ ID NO: 3265638 - RNA, 19 nt, Artificial Sequence
  Description of Artificial Sequence: Synthetic oligonucleotide
caaacauccucuaaccucc

SEQ ID NO: 3265639 - RNA, 19 nt, Artificial Sequence
  Description of Artificial Sequence: Synthetic oligonucleotide
ucuauauuauacuaugcau

SEQ ID NO: 3265640 - RNA, 19 nt, Artificial Sequence
  Description of Artificial Sequence: Synthetic oligonucleotide
ucuaguaacaaaugucucu

SEQ ID NO: 3265641 - RNA, 19 nt, Artificial Sequence
  Description of Artificial Sequence: Synthetic oligonucleotide
aauggauacaguaugaauu

SEQ ID NO: 3265642 - RNA, 19 nt, Artificial Sequence
  Description of Artificial Sequence: Synthetic oligonucleotide
augugauuuauuuugacaa

SEQ ID NO: 3265643 - RNA, 19 nt, Artificial Sequence
  Description of Artificial Sequence: Synthetic oligonucleotide
uaccuuuauuaacauaucc

SEQ ID NO: 3265644 - RNA, 19 nt, Artificial Sequence
  Description of Artificial Sequence: Synthetic oligonucleotide
aacacacacacacacagaa

SEQ ID NO: 3265645 - RNA, 19 nt, Artificial Sequence
  Description of Artificial Sequence: Synthetic oligonucleotide
ugaauauaaaggaugugau

SEQ ID NO: 3265646 - RNA, 19 nt, Artificial Sequence
  Description of Artificial Sequence: Synthetic oligonucleotide
uuaacucaagucuacuuca

SEQ ID NO: 3265647 - RNA, 19 nt, Artificial Sequence
  Description of Artificial Sequence: Synthetic oligonucleotide
cacacacacacacagaacc

SEQ ID NO: 3265648 - RNA, 19 nt, Artificial Sequence
  Description of Artificial Sequence: Synthetic oligonucleotide
uuauacuaugcauuuuacc

SEQ ID NO: 3265649 - RNA, 19 nt, Artificial Sequence
  Description of Artificial Sequence: Synthetic oligonucleotide
ugauguggaaaaucaaacc

SEQ ID NO: 3265650 - RNA, 19 nt, Artificial Sequence
  Description of Artificial Sequence: Synthetic oligonucleotide
caaacacacacacacacag

SEQ ID NO: 3265651 - RNA, 19 nt, Artificial Sequence
  Description of Artificial Sequence: Synthetic oligonucleotide
uucuagagguauaugaggu

SEQ ID NO: 3265652 - RNA, 19 nt, Artificial Sequence
  Description of Artificial Sequence: Synthetic oligonucleotide
aauagaguaaaggcaacug

SEQ ID NO: 3265653 - RNA, 19 nt, Artificial Sequence
  Description of Artificial Sequence: Synthetic oligonucleotide
uugcuauucuauauuauac

SEQ ID NO: 3265654 - RNA, 19 nt, Artificial Sequence
  Description of Artificial Sequence: Synthetic oligonucleotide
aauggccuaacacuuaaaa

SEQ ID NO: 3265655 - RNA, 19 nt, Artificial Sequence
  Description of Artificial Sequence: Synthetic oligonucleotide
uuucuaaauggauacagua

SEQ ID NO: 3265656 - RNA, 19 nt, Artificial Sequence
  Description of Artificial Sequence: Synthetic oligonucleotide
uauuaacauaucccuagug

SEQ ID NO: 3265657 - RNA, 19 nt, Artificial Sequence
  Description of Artificial Sequence: Synthetic oligonucleotide
uuuauugugcaauuuuauc

SEQ ID NO: 3265658 - RNA, 19 nt, Artificial Sequence
  Description of Artificial Sequence: Synthetic oligonucleotide
guuccuaaaagaaauggcc

SEQ ID NO: 3265659 - RNA, 19 nt, Artificial Sequence
  Description of Artificial Sequence: Synthetic oligonucleotide
uaucccauuuccaaaacuc

SEQ ID NO: 3265660 - RNA, 19 nt, Artificial Sequence
  Description of Artificial Sequence: Synthetic oligonucleotide
ucugaugcuaaauauugaa

SEQ ID NO: 3265661 - RNA, 19 nt, Artificial Sequence
  Description of Artificial Sequence: Synthetic oligonucleotide
uuccuaaaagaaauggccu

SEQ ID NO: 3265662 - RNA, 19 nt, Artificial Sequence
  Description of Artificial Sequence: Synthetic oligonucleotide
aacacccgaaauaauuagc

SEQ ID NO: 3265663 - RNA, 19 nt, Artificial Sequence
  Description of Artificial Sequence: Synthetic oligonucleotide
augauguggaaaaucaaac

SEQ ID NO: 3265664 - RNA, 19 nt, Artificial Sequence
  Description of Artificial Sequence: Synthetic oligonucleotide
aagucuacuucaaaccaac

SEQ ID NO: 3265665 - RNA, 19 nt, Artificial Sequence
  Description of Artificial Sequence: Synthetic oligonucleotide
uaccuaauaacagacaaaa

SEQ ID NO: 3265666 - RNA, 19 nt, Artificial Sequence
  Description of Artificial Sequence: Synthetic oligonucleotide
cuuuucuaaauggauacag

SEQ ID NO: 3265667 - RNA, 19 nt, Artificial Sequence
  Description of Artificial Sequence: Synthetic oligonucleotide
auaaaugcugucccuguag

SEQ ID NO: 3265668 - RNA, 19 nt, Artificial Sequence
  Description of Artificial Sequence: Synthetic oligonucleotide
ggcaaugucacuauuaacc

SEQ ID NO: 3265669 - RNA, 19 nt, Artificial Sequence
  Description of Artificial Sequence: Synthetic oligonucleotide
uuugcuauucuauauuaua

SEQ ID NO: 3265670 - RNA, 19 nt, Artificial Sequence
  Description of Artificial Sequence: Synthetic oligonucleotide
uucuaaacugcccagccaa

SEQ ID NO: 3265671 - RNA, 19 nt, Artificial Sequence
  Description of Artificial Sequence: Synthetic oligonucleotide
ucgagaaugauguggaaaa

SEQ ID NO: 3265672 - RNA, 19 nt, Artificial Sequence
  Description of Artificial Sequence: Synthetic oligonucleotide
agguauaugagguaagaaa

SEQ ID NO: 3265673 - RNA, 19 nt, Artificial Sequence
  Description of Artificial Sequence: Synthetic oligonucleotide
gacuucgagaaugaugugg

SEQ ID NO: 3265674 - RNA, 19 nt, Artificial Sequence
  Description of Artificial Sequence: Synthetic oligonucleotide
uuuucuaaauggauacagu

SEQ ID NO: 3265675 - RNA, 19 nt, Artificial Sequence
  Description of Artificial Sequence: Synthetic oligonucleotide
auguagacaggauaguugu

SEQ ID NO: 3265676 - RNA, 19 nt, Artificial Sequence
  Description of Artificial Sequence: Synthetic oligonucleotide
uucuaaauggauacaguau

SEQ ID NO: 3265677 - RNA, 19 nt, Artificial Sequence
  Description of Artificial Sequence: Synthetic oligonucleotide
aguaugaauuucuauccca

SEQ ID NO: 3265678 - RNA, 19 nt, Artificial Sequence
  Description of Artificial Sequence: Synthetic oligonucleotide
ucaggguaauucuaaaagu

SEQ ID NO: 3265679 - RNA, 19 nt, Artificial Sequence
  Description of Artificial Sequence: Synthetic oligonucleotide
uaacauaucccuagugugu

SEQ ID NO: 3265680 - RNA, 19 nt, Artificial Sequence
  Description of Artificial Sequence: Synthetic oligonucleotide
ugcuauucuauauuauacu

SEQ ID NO: 3265681 - RNA, 19 nt, Artificial Sequence
  Description of Artificial Sequence: Synthetic oligonucleotide
acccgaaauaauuagcucu

SEQ ID NO: 3265682 - RNA, 19 nt, Artificial Sequence
  Description of Artificial Sequence: Synthetic oligonucleotide
uuuagucacgacagccugg

SEQ ID NO: 3265683 - RNA, 19 nt, Artificial Sequence
  Description of Artificial Sequence: Synthetic oligonucleotide
cauagaaaauagaguaaag

SEQ ID NO: 3265684 - RNA, 19 nt, Artificial Sequence
  Description of Artificial Sequence: Synthetic oligonucleotide
uugacuuuuccuuuuccca

SEQ ID NO: 3265685 - RNA, 19 nt, Artificial Sequence
  Description of Artificial Sequence: Synthetic oligonucleotide
aaacaacuuacucuucuau

SEQ ID NO: 3265686 - RNA, 19 nt, Artificial Sequence
  Description of Artificial Sequence: Synthetic oligonucleotide
cacacacacacaaacacac

SEQ ID NO: 3265687 - RNA, 19 nt, Artificial Sequence
  Description of Artificial Sequence: Synthetic oligonucleotide
ucagacauggcaccuuuug

SEQ ID NO: 3265688 - RNA, 19 nt, Artificial Sequence
  Description of Artificial Sequence: Synthetic oligonucleotide
cacaaacacacacacacac

SEQ ID NO: 3265689 - RNA, 19 nt, Artificial Sequence
  Description of Artificial Sequence: Synthetic oligonucleotide
ugcagaggcacacacgcgc

SEQ ID NO: 3265690 - RNA, 19 nt, Artificial Sequence
  Description of Artificial Sequence: Synthetic oligonucleotide
uguuugcucguuauguaga

SEQ ID NO: 3265691 - RNA, 19 nt, Artificial Sequence
  Description of Artificial Sequence: Synthetic oligonucleotide
ugaguuuuguguugggaga

SEQ ID NO: 3265692 - RNA, 19 nt, Artificial Sequence
  Description of Artificial Sequence: Synthetic oligonucleotide
ucgguugugaaaacaaauc

SEQ ID NO: 3265693 - RNA, 19 nt, Artificial Sequence
  Description of Artificial Sequence: Synthetic oligonucleotide
uuacucuucuauauaaauu

SEQ ID NO: 3265694 - RNA, 19 nt, Artificial Sequence
  Description of Artificial Sequence: Synthetic oligonucleotide
auuuagucacgacagccug

SEQ ID NO: 3265695 - RNA, 19 nt, Artificial Sequence
  Description of Artificial Sequence: Synthetic oligonucleotide
auuauacuaugcauuuuac

SEQ ID NO: 3265696 - RNA, 19 nt, Artificial Sequence
  Description of Artificial Sequence: Synthetic oligonucleotide
cacaguacaaucaaauaga

SEQ ID NO: 3265697 - RNA, 19 nt, Artificial Sequence
  Description of Artificial Sequence: Synthetic oligonucleotide
aacaacuuacucuucuaua

SEQ ID NO: 3265698 - RNA, 19 nt, Artificial Sequence
  Description of Artificial Sequence: Synthetic oligonucleotide
gacuuuaccuaauaacaga

SEQ ID NO: 3265699 - RNA, 19 nt, Artificial Sequence
  Description of Artificial Sequence: Synthetic oligonucleotide
ucuccacaaguauucauca

SEQ ID NO: 3265700 - RNA, 19 nt, Artificial Sequence
  Description of Artificial Sequence: Synthetic oligonucleotide
cacacacacacacaaacac

SEQ ID NO: 3265701 - RNA, 19 nt, Artificial Sequence
  Description of Artificial Sequence: Synthetic oligonucleotide
cacacacacacacacaaac

SEQ ID NO: 3265702 - RNA, 19 nt, Artificial Sequence
  Description of Artificial Sequence: Synthetic oligonucleotide
cacacacaaacacacacac

SEQ ID NO: 3265703 - RNA, 19 nt, Artificial Sequence
  Description of Artificial Sequence: Synthetic oligonucleotide
aaacuggccuccccaaaag

SEQ ID NO: 3265704 - RNA, 19 nt, Artificial Sequence
  Description of Artificial Sequence: Synthetic oligonucleotide
aguugugagaagcaggcau

SEQ ID NO: 3265705 - RNA, 19 nt, Artificial Sequence
  Description of Artificial Sequence: Synthetic oligonucleotide
acuucuuuauuuuaaacac

SEQ ID NO: 3265706 - RNA, 19 nt, Artificial Sequence
  Description of Artificial Sequence: Synthetic oligonucleotide
agauuuucagauaugaugc

SEQ ID NO: 3265707 - RNA, 19 nt, Artificial Sequence
  Description of Artificial Sequence: Synthetic oligonucleotide
aauuaaaaccacucggaag

SEQ ID NO: 3265708 - RNA, 19 nt, Artificial Sequence
  Description of Artificial Sequence: Synthetic oligonucleotide
uuugacaagaaucaagugu

SEQ ID NO: 3265709 - RNA, 19 nt, Artificial Sequence
  Description of Artificial Sequence: Synthetic oligonucleotide
uuugccaucugacugauug

SEQ ID NO: 3265710 - RNA, 19 nt, Artificial Sequence
  Description of Artificial Sequence: Synthetic oligonucleotide
gagauuuucagauaugaug

SEQ ID NO: 3265711 - RNA, 19 nt, Artificial Sequence
  Description of Artificial Sequence: Synthetic oligonucleotide
auaugaguacaucugaagg

SEQ ID NO: 3265712 - RNA, 19 nt, Artificial Sequence
  Description of Artificial Sequence: Synthetic oligonucleotide
uucuuuauuuuaaacacug

SEQ ID NO: 3265713 - RNA, 19 nt, Artificial Sequence
  Description of Artificial Sequence: Synthetic oligonucleotide
uauuugacaagaaucaagu

SEQ ID NO: 3265714 - RNA, 19 nt, Artificial Sequence
  Description of Artificial Sequence: Synthetic oligonucleotide
uuuauuuuaaacacuguau

SEQ ID NO: 3265715 - RNA, 19 nt, Artificial Sequence
  Description of Artificial Sequence: Synthetic oligonucleotide
aaucaaguguuucuggaag

SEQ ID NO: 3265716 - RNA, 19 nt, Artificial Sequence
  Description of Artificial Sequence: Synthetic oligonucleotide
aacgccaacaaacacacca

SEQ ID NO: 3265717 - RNA, 19 nt, Artificial Sequence
  Description of Artificial Sequence: Synthetic oligonucleotide
gaagcaauagacgugaagc

SEQ ID NO: 3265718 - RNA, 19 nt, Artificial Sequence
  Description of Artificial Sequence: Synthetic oligonucleotide
gauaugaugcugcagggag

SEQ ID NO: 3265719 - RNA, 19 nt, Artificial Sequence
  Description of Artificial Sequence: Synthetic oligonucleotide
uacuucuuuauuuuaaaca

SEQ ID NO: 3265720 - RNA, 19 nt, Artificial Sequence
  Description of Artificial Sequence: Synthetic oligonucleotide
uuuucagauaugaugcugc

SEQ ID NO: 3265721 - RNA, 19 nt, Artificial Sequence
  Description of Artificial Sequence: Synthetic oligonucleotide
gauaaugaugcuuugcuuc

SEQ ID NO: 3265722 - RNA, 19 nt, Artificial Sequence
  Description of Artificial Sequence: Synthetic oligonucleotide
ucgguuggcaauuaaaacc

SEQ ID NO: 3265723 - RNA, 19 nt, Artificial Sequence
  Description of Artificial Sequence: Synthetic oligonucleotide
acuguauuugacaagaauc

SEQ ID NO: 3265724 - RNA, 19 nt, Artificial Sequence
  Description of Artificial Sequence: Synthetic oligonucleotide
uauaugaguacaucugaag

SEQ ID NO: 3265725 - RNA, 19 nt, Artificial Sequence
  Description of Artificial Sequence: Synthetic oligonucleotide
aaugaugcuuugcuucugg

SEQ ID NO: 3265726 - RNA, 19 nt, Artificial Sequence
  Description of Artificial Sequence: Synthetic oligonucleotide
uuuuaaacacuguauuuga

SEQ ID NO: 3265727 - RNA, 19 nt, Artificial Sequence
  Description of Artificial Sequence: Synthetic oligonucleotide
aguuccauaaccuuccuga

SEQ ID NO: 3265728 - RNA, 19 nt, Artificial Sequence
  Description of Artificial Sequence: Synthetic oligonucleotide
auuuuaaacacuguauuug

SEQ ID NO: 3265729 - RNA, 19 nt, Artificial Sequence
  Description of Artificial Sequence: Synthetic oligonucleotide
cuaaggagagccaaucucc

SEQ ID NO: 3265730 - RNA, 19 nt, Artificial Sequence
  Description of Artificial Sequence: Synthetic oligonucleotide
uugacaagaaucaaguguu

SEQ ID NO: 3265731 - RNA, 19 nt, Artificial Sequence
  Description of Artificial Sequence: Synthetic oligonucleotide
aacacuguauuugacaaga

SEQ ID NO: 3265732 - RNA, 19 nt, Artificial Sequence
  Description of Artificial Sequence: Synthetic oligonucleotide
ugaccaaaggagauaacgc

SEQ ID NO: 3265733 - RNA, 19 nt, Artificial Sequence
  Description of Artificial Sequence: Synthetic oligonucleotide
uaugaguacaucugaaggu

SEQ ID NO: 3265734 - RNA, 19 nt, Artificial Sequence
  Description of Artificial Sequence: Synthetic oligonucleotide
uccuauaugaguacaucug

SEQ ID NO: 3265735 - RNA, 19 nt, Artificial Sequence
  Description of Artificial Sequence: Synthetic oligonucleotide
aucaaguguuucuggaagc

SEQ ID NO: 3265736 - RNA, 19 nt, Artificial Sequence
  Description of Artificial Sequence: Synthetic oligonucleotide
ugaagguccgaaaaugucu

SEQ ID NO: 3265737 - RNA, 19 nt, Artificial Sequence
  Description of Artificial Sequence: Synthetic oligonucleotide
gaaaugcacaugcuugugg

SEQ ID NO: 3265738 - RNA, 19 nt, Artificial Sequence
  Description of Artificial Sequence: Synthetic oligonucleotide
uggcaauuaaaaccacucg

SEQ ID NO: 3265739 - RNA, 19 nt, Artificial Sequence
  Description of Artificial Sequence: Synthetic oligonucleotide
auaacgccaacaaacacac

SEQ ID NO: 3265740 - RNA, 19 nt, Artificial Sequence
  Description of Artificial Sequence: Synthetic oligonucleotide
ucccgaagcgaucugaaag

SEQ ID NO: 3265741 - RNA, 19 nt, Artificial Sequence
  Description of Artificial Sequence: Synthetic oligonucleotide
uccuuuucuaaggagagcc

SEQ ID NO: 3265742 - RNA, 19 nt, Artificial Sequence
  Description of Artificial Sequence: Synthetic oligonucleotide
ggcaauuaaaaccacucgg

SEQ ID NO: 3265743 - RNA, 19 nt, Artificial Sequence
  Description of Artificial Sequence: Synthetic oligonucleotide
gaccaaaggagauaacgcc

SEQ ID NO: 3265744 - RNA, 19 nt, Artificial Sequence
  Description of Artificial Sequence: Synthetic oligonucleotide
uuggcaauuaaaaccacuc

SEQ ID NO: 3265745 - RNA, 19 nt, Artificial Sequence
  Description of Artificial Sequence: Synthetic oligonucleotide
aaggagauaacgccaacaa

SEQ ID NO: 3265746 - RNA, 19 nt, Artificial Sequence
  Description of Artificial Sequence: Synthetic oligonucleotide
uccaagagaggagagaagc

SEQ ID NO: 3265747 - RNA, 19 nt, Artificial Sequence
  Description of Artificial Sequence: Synthetic oligonucleotide
gaagccaggccccaaaggc

SEQ ID NO: 3265748 - RNA, 19 nt, Artificial Sequence
  Description of Artificial Sequence: Synthetic oligonucleotide
ucuaaggagagccaaucuc

SEQ ID NO: 3265749 - RNA, 19 nt, Artificial Sequence
  Description of Artificial Sequence: Synthetic oligonucleotide
acaagaaucaaguguuucu

SEQ ID NO: 3265750 - RNA, 19 nt, Artificial Sequence
  Description of Artificial Sequence: Synthetic oligonucleotide
acuuuguaagaucgguugg

SEQ ID NO: 3265751 - RNA, 19 nt, Artificial Sequence
  Description of Artificial Sequence: Synthetic oligonucleotide
uauuuuaaacacuguauuu

SEQ ID NO: 3265752 - RNA, 19 nt, Artificial Sequence
  Description of Artificial Sequence: Synthetic oligonucleotide
aagcaauagacgugaagcu

SEQ ID NO: 3265753 - RNA, 19 nt, Artificial Sequence
  Description of Artificial Sequence: Synthetic oligonucleotide
cugaccaaaggagauaacg

SEQ ID NO: 3265754 - RNA, 19 nt, Artificial Sequence
  Description of Artificial Sequence: Synthetic oligonucleotide
uguggaggauccaaggucu

SEQ ID NO: 3265755 - RNA, 19 nt, Artificial Sequence
  Description of Artificial Sequence: Synthetic oligonucleotide
acaguuuggggauguaggg

SEQ ID NO: 3265756 - RNA, 19 nt, Artificial Sequence
  Description of Artificial Sequence: Synthetic oligonucleotide
cacaguuuggggauguagg

SEQ ID NO: 3265757 - RNA, 19 nt, Artificial Sequence
  Description of Artificial Sequence: Synthetic oligonucleotide
aaacacuguauuugacaag

SEQ ID NO: 3265758 - RNA, 19 nt, Artificial Sequence
  Description of Artificial Sequence: Synthetic oligonucleotide
uuuacuucuuuauuuuaaa

SEQ ID NO: 3265759 - RNA, 19 nt, Artificial Sequence
  Description of Artificial Sequence: Synthetic oligonucleotide
aggacuaccacaguuuggg

SEQ ID NO: 3265760 - RNA, 19 nt, Artificial Sequence
  Description of Artificial Sequence: Synthetic oligonucleotide
uuuaaacacuguauuugac

SEQ ID NO: 3265761 - RNA, 19 nt, Artificial Sequence
  Description of Artificial Sequence: Synthetic oligonucleotide
cuucacuugaucaucugug

SEQ ID NO: 3265762 - RNA, 19 nt, Artificial Sequence
  Description of Artificial Sequence: Synthetic oligonucleotide
ugcagggaguuccauaacc

SEQ ID NO: 3265763 - RNA, 19 nt, Artificial Sequence
  Description of Artificial Sequence: Synthetic oligonucleotide
uaaccuuccugacagcuac

SEQ ID NO: 3265764 - RNA, 19 nt, Artificial Sequence
  Description of Artificial Sequence: Synthetic oligonucleotide
ucacuuucgcuccccaagg

SEQ ID NO: 3265765 - RNA, 19 nt, Artificial Sequence
  Description of Artificial Sequence: Synthetic oligonucleotide
uuacuucuuuauuuuaaac

SEQ ID NO: 3265766 - RNA, 19 nt, Artificial Sequence
  Description of Artificial Sequence: Synthetic oligonucleotide
aagguccgaaaaugucucc

SEQ ID NO: 3265767 - RNA, 19 nt, Artificial Sequence
  Description of Artificial Sequence: Synthetic oligonucleotide
guauuugacaagaaucaag

SEQ ID NO: 3265768 - RNA, 19 nt, Artificial Sequence
  Description of Artificial Sequence: Synthetic oligonucleotide
uguaagaucgguuggcaau

SEQ ID NO: 3265769 - RNA, 19 nt, Artificial Sequence
  Description of Artificial Sequence: Synthetic oligonucleotide
augaguacaucugaagguc

SEQ ID NO: 3265770 - RNA, 19 nt, Artificial Sequence
  Description of Artificial Sequence: Synthetic oligonucleotide
aguuuggggauguagggca

SEQ ID NO: 3265771 - RNA, 19 nt, Artificial Sequence
  Description of Artificial Sequence: Synthetic oligonucleotide
acucggaagcaauagacgu

SEQ ID NO: 3265772 - RNA, 19 nt, Artificial Sequence
  Description of Artificial Sequence: Synthetic oligonucleotide
aagagaggagagaagcagg

SEQ ID NO: 3265773 - RNA, 19 nt, Artificial Sequence
  Description of Artificial Sequence: Synthetic oligonucleotide
cuuccuuuucuaaggagag

SEQ ID NO: 3265774 - RNA, 19 nt, Artificial Sequence
  Description of Artificial Sequence: Synthetic oligonucleotide
cuuucgcuccccaaggugc

SEQ ID NO: 3265775 - RNA, 19 nt, Artificial Sequence
  Description of Artificial Sequence: Synthetic oligonucleotide
ugcugagauuuucagauau

SEQ ID NO: 3265776 - RNA, 19 nt, Artificial Sequence
  Description of Artificial Sequence: Synthetic oligonucleotide
augcuuguggaucucacug

SEQ ID NO: 3265777 - RNA, 19 nt, Artificial Sequence
  Description of Artificial Sequence: Synthetic oligonucleotide
ggagauaacgccaacaaac

SEQ ID NO: 3265778 - RNA, 19 nt, Artificial Sequence
  Description of Artificial Sequence: Synthetic oligonucleotide
ucuucacuugaucaucugu

SEQ ID NO: 3265779 - RNA, 19 nt, Artificial Sequence
  Description of Artificial Sequence: Synthetic oligonucleotide
caaagggcuguucagaguc

SEQ ID NO: 3265780 - RNA, 19 nt, Artificial Sequence
  Description of Artificial Sequence: Synthetic oligonucleotide
ugaguacaucugaaggucc

SEQ ID NO: 3265781 - RNA, 19 nt, Artificial Sequence
  Description of Artificial Sequence: Synthetic oligonucleotide
acuuugcugagauuuucag

SEQ ID NO: 3265782 - RNA, 19 nt, Artificial Sequence
  Description of Artificial Sequence: Synthetic oligonucleotide
uuuccaagagaggagagaa

SEQ ID NO: 3265783 - RNA, 19 nt, Artificial Sequence
  Description of Artificial Sequence: Synthetic oligonucleotide
aaaggagauaacgccaaca

SEQ ID NO: 3265784 - RNA, 19 nt, Artificial Sequence
  Description of Artificial Sequence: Synthetic oligonucleotide
gcacucaugauaaugaugc

SEQ ID NO: 3265785 - RNA, 19 nt, Artificial Sequence
  Description of Artificial Sequence: Synthetic oligonucleotide
aucucacugccauuggcgg

SEQ ID NO: 3265786 - RNA, 19 nt, Artificial Sequence
  Description of Artificial Sequence: Synthetic oligonucleotide
auuugacaagaaucaagug

SEQ ID NO: 3265787 - RNA, 19 nt, Artificial Sequence
  Description of Artificial Sequence: Synthetic oligonucleotide
uuucuuccuuuucuaagga

SEQ ID NO: 3265788 - RNA, 19 nt, Artificial Sequence
  Description of Artificial Sequence: Synthetic oligonucleotide
agaagcaggacuaccacag

SEQ ID NO: 3265789 - RNA, 19 nt, Artificial Sequence
  Description of Artificial Sequence: Synthetic oligonucleotide
uccagcaaagggcuguuca

SEQ ID NO: 3265790 - RNA, 19 nt, Artificial Sequence
  Description of Artificial Sequence: Synthetic oligonucleotide
ucuccauuuccaagagagg

SEQ ID NO: 3265791 - RNA, 19 nt, Artificial Sequence
  Description of Artificial Sequence: Synthetic oligonucleotide
ugaugcuuugcuucugggc

SEQ ID NO: 3265792 - RNA, 19 nt, Artificial Sequence
  Description of Artificial Sequence: Synthetic oligonucleotide
uccugacagcuacacacgg

SEQ ID NO: 3265793 - RNA, 19 nt, Artificial Sequence
  Description of Artificial Sequence: Synthetic oligonucleotide
gaagcgaucugaaagcuga

SEQ ID NO: 3265794 - RNA, 19 nt, Artificial Sequence
  Description of Artificial Sequence: Synthetic oligonucleotide
gagacaaggcuucuucccc

SEQ ID NO: 3265795 - RNA, 19 nt, Artificial Sequence
  Description of Artificial Sequence: Synthetic oligonucleotide
aaguguuucuggaagcucu

SEQ ID NO: 3265796 - RNA, 19 nt, Artificial Sequence
  Description of Artificial Sequence: Synthetic oligonucleotide
uguagggcacacuuugcug

SEQ ID NO: 3265797 - RNA, 19 nt, Artificial Sequence
  Description of Artificial Sequence: Synthetic oligonucleotide
agucucuggcaacagcagg

SEQ ID NO: 3265798 - RNA, 19 nt, Artificial Sequence
  Description of Artificial Sequence: Synthetic oligonucleotide
uaaggagagccaaucucca

SEQ ID NO: 3265799 - RNA, 19 nt, Artificial Sequence
  Description of Artificial Sequence: Synthetic oligonucleotide
cacucggaagcaauagacg

SEQ ID NO: 3265800 - RNA, 19 nt, Artificial Sequence
  Description of Artificial Sequence: Synthetic oligonucleotide
aggagcucagccauguccc

SEQ ID NO: 3265801 - RNA, 19 nt, Artificial Sequence
  Description of Artificial Sequence: Synthetic oligonucleotide
uucuuccuuuucuaaggag

SEQ ID NO: 3265802 - RNA, 19 nt, Artificial Sequence
  Description of Artificial Sequence: Synthetic oligonucleotide
ggauccaaggucuggagag

SEQ ID NO: 3265803 - RNA, 19 nt, Artificial Sequence
  Description of Artificial Sequence: Synthetic oligonucleotide
uucacuugaucaucugugu

SEQ ID NO: 3265804 - RNA, 19 nt, Artificial Sequence
  Description of Artificial Sequence: Synthetic oligonucleotide
acuaccacaguuuggggau

SEQ ID NO: 3265805 - RNA, 19 nt, Artificial Sequence
  Description of Artificial Sequence: Synthetic oligonucleotide
uucuuuaaaauuuagaccu

SEQ ID NO: 3265806 - RNA, 19 nt, Artificial Sequence
  Description of Artificial Sequence: Synthetic oligonucleotide
aacaguugcacuuggaaac

SEQ ID NO: 3265807 - RNA, 19 nt, Artificial Sequence
  Description of Artificial Sequence: Synthetic oligonucleotide
gaguuuaccacuuugagug

SEQ ID NO: 3265808 - RNA, 19 nt, Artificial Sequence
  Description of Artificial Sequence: Synthetic oligonucleotide
aaauuuagaccuuacagga

SEQ ID NO: 3265809 - RNA, 19 nt, Artificial Sequence
  Description of Artificial Sequence: Synthetic oligonucleotide
aauaucacuggacaagggg

SEQ ID NO: 3265810 - RNA, 19 nt, Artificial Sequence
  Description of Artificial Sequence: Synthetic oligonucleotide
aaugaaauaaguuuccaaa

SEQ ID NO: 3265811 - RNA, 19 nt, Artificial Sequence
  Description of Artificial Sequence: Synthetic oligonucleotide
uaauuuaugagaaugacuu

SEQ ID NO: 3265812 - RNA, 19 nt, Artificial Sequence
  Description of Artificial Sequence: Synthetic oligonucleotide
ucugcauucauacuugagg

SEQ ID NO: 3265813 - RNA, 19 nt, Artificial Sequence
  Description of Artificial Sequence: Synthetic oligonucleotide
ugacguauuacccaguuag

SEQ ID NO: 3265814 - RNA, 19 nt, Artificial Sequence
  Description of Artificial Sequence: Synthetic oligonucleotide
uccauauacacauaaauac

SEQ ID NO: 3265815 - RNA, 19 nt, Artificial Sequence
  Description of Artificial Sequence: Synthetic oligonucleotide
uagguuuggucauagaucg

SEQ ID NO: 3265816 - RNA, 19 nt, Artificial Sequence
  Description of Artificial Sequence: Synthetic oligonucleotide
ugcacuaagacucucaugu

SEQ ID NO: 3265817 - RNA, 19 nt, Artificial Sequence
  Description of Artificial Sequence: Synthetic oligonucleotide
aaaucugucucagugauag

SEQ ID NO: 3265818 - RNA, 19 nt, Artificial Sequence
  Description of Artificial Sequence: Synthetic oligonucleotide
gauuauuugucauuugaag

SEQ ID NO: 3265819 - RNA, 19 nt, Artificial Sequence
  Description of Artificial Sequence: Synthetic oligonucleotide
ucaaccaacagcuauuuug

SEQ ID NO: 3265820 - RNA, 19 nt, Artificial Sequence
  Description of Artificial Sequence: Synthetic oligonucleotide
ugaagauccacucaguuaa

SEQ ID NO: 3265821 - RNA, 19 nt, Artificial Sequence
  Description of Artificial Sequence: Synthetic oligonucleotide
ucuauguuccggauuaggg

SEQ ID NO: 3265822 - RNA, 19 nt, Artificial Sequence
  Description of Artificial Sequence: Synthetic oligonucleotide
uuuaauaucacuggacaag

SEQ ID NO: 3265823 - RNA, 19 nt, Artificial Sequence
  Description of Artificial Sequence: Synthetic oligonucleotide
ugaaacaucguccccauca

SEQ ID NO: 3265824 - RNA, 19 nt, Artificial Sequence
  Description of Artificial Sequence: Synthetic oligonucleotide
cuucucaucgcucacaccg

SEQ ID NO: 3265825 - RNA, 19 nt, Artificial Sequence
  Description of Artificial Sequence: Synthetic oligonucleotide
uuaauuuaugagaaugacu

SEQ ID NO: 3265826 - RNA, 19 nt, Artificial Sequence
  Description of Artificial Sequence: Synthetic oligonucleotide
aagcauugaaaguagguga

SEQ ID NO: 3265827 - RNA, 19 nt, Artificial Sequence
  Description of Artificial Sequence: Synthetic oligonucleotide
accacugaaguccacagac

SEQ ID NO: 3265828 - RNA, 19 nt, Artificial Sequence
  Description of Artificial Sequence: Synthetic oligonucleotide
aauacugcaaguaauuaca

SEQ ID NO: 3265829 - RNA, 19 nt, Artificial Sequence
  Description of Artificial Sequence: Synthetic oligonucleotide
uugauuauuugucauuuga

SEQ ID NO: 3265830 - RNA, 19 nt, Artificial Sequence
  Description of Artificial Sequence: Synthetic oligonucleotide
uauuacccaguuaggaucg

SEQ ID NO: 3265831 - RNA, 19 nt, Artificial Sequence
  Description of Artificial Sequence: Synthetic oligonucleotide
uuuccuaguaacaggagca

SEQ ID NO: 3265832 - RNA, 19 nt, Artificial Sequence
  Description of Artificial Sequence: Synthetic oligonucleotide
aacugugcguauuaagguc

SEQ ID NO: 3265833 - RNA, 19 nt, Artificial Sequence
  Description of Artificial Sequence: Synthetic oligonucleotide
caaucauuuucuauguucc

SEQ ID NO: 3265834 - RNA, 19 nt, Artificial Sequence
  Description of Artificial Sequence: Synthetic oligonucleotide
uuaggcaagagcaacuucu

SEQ ID NO: 3265835 - RNA, 19 nt, Artificial Sequence
  Description of Artificial Sequence: Synthetic oligonucleotide
aaauaaguuuccaaauuag

SEQ ID NO: 3265836 - RNA, 19 nt, Artificial Sequence
  Description of Artificial Sequence: Synthetic oligonucleotide
uacauauuuguuauuuugu

SEQ ID NO: 3265837 - RNA, 19 nt, Artificial Sequence
  Description of Artificial Sequence: Synthetic oligonucleotide
cacgucaucaauaucuggg

SEQ ID NO: 3265838 - RNA, 19 nt, Artificial Sequence
  Description of Artificial Sequence: Synthetic oligonucleotide
ucaugugacuaucuucugg

SEQ ID NO: 3265839 - RNA, 19 nt, Artificial Sequence
  Description of Artificial Sequence: Synthetic oligonucleotide
gaucgauuuguguaguucc

SEQ ID NO: 3265840 - RNA, 19 nt, Artificial Sequence
  Description of Artificial Sequence: Synthetic oligonucleotide
gcagucauuauacagagag

SEQ ID NO: 3265841 - RNA, 19 nt, Artificial Sequence
  Description of Artificial Sequence: Synthetic oligonucleotide
uuucaugcuuaauuuauga

SEQ ID NO: 3265842 - RNA, 19 nt, Artificial Sequence
  Description of Artificial Sequence: Synthetic oligonucleotide
uuggacuuggugcugauga

SEQ ID NO: 3265843 - RNA, 19 nt, Artificial Sequence
  Description of Artificial Sequence: Synthetic oligonucleotide
uauuucaaccaacagcuau

SEQ ID NO: 3265844 - RNA, 19 nt, Artificial Sequence
  Description of Artificial Sequence: Synthetic oligonucleotide
gacuuauacacaauauucc

SEQ ID NO: 3265845 - RNA, 19 nt, Artificial Sequence
  Description of Artificial Sequence: Synthetic oligonucleotide
aauuccaucuuuaucaaaa

SEQ ID NO: 3265846 - RNA, 19 nt, Artificial Sequence
  Description of Artificial Sequence: Synthetic oligonucleotide
aauucauuuaauaaauauu

SEQ ID NO: 3265847 - RNA, 19 nt, Artificial Sequence
  Description of Artificial Sequence: Synthetic oligonucleotide
ugaaauaaguuuccaaauu

SEQ ID NO: 3265848 - RNA, 19 nt, Artificial Sequence
  Description of Artificial Sequence: Synthetic oligonucleotide
aggcaaugcagcaacaugc

SEQ ID NO: 3265849 - RNA, 19 nt, Artificial Sequence
  Description of Artificial Sequence: Synthetic oligonucleotide
gaaauaaguuuccaaauua

SEQ ID NO: 3265850 - RNA, 19 nt, Artificial Sequence
  Description of Artificial Sequence: Synthetic oligonucleotide
caguguuguagacauaggg

SEQ ID NO: 3265851 - RNA, 19 nt, Artificial Sequence
  Description of Artificial Sequence: Synthetic oligonucleotide
uggaguuuaccacuuugag

SEQ ID NO: 3265852 - RNA, 19 nt, Artificial Sequence
  Description of Artificial Sequence: Synthetic oligonucleotide
aguguuguagacauagggg

SEQ ID NO: 3265853 - RNA, 19 nt, Artificial Sequence
  Description of Artificial Sequence: Synthetic oligonucleotide
ugaaaucugucucagugau

SEQ ID NO: 3265854 - RNA, 19 nt, Artificial Sequence
  Description of Artificial Sequence: Synthetic oligonucleotide
ugauuauuugucauuugaa

SEQ ID NO: 3265855 - RNA, 19 nt, Artificial Sequence
  Description of Artificial Sequence: Synthetic oligonucleotide
ucaggugccaccuguaggc

SEQ ID NO: 3265856 - RNA, 19 nt, Artificial Sequence
  Description of Artificial Sequence: Synthetic oligonucleotide
cuuuccuucaugcacuaag

SEQ ID NO: 3265857 - RNA, 19 nt, Artificial Sequence
  Description of Artificial Sequence: Synthetic oligonucleotide
uuaucucccagucuguuuc

SEQ ID NO: 3265858 - RNA, 19 nt, Artificial Sequence
  Description of Artificial Sequence: Synthetic oligonucleotide
uuauacacaauauucccuu

SEQ ID NO: 3265859 - RNA, 19 nt, Artificial Sequence
  Description of Artificial Sequence: Synthetic oligonucleotide
agggcgaguuaucacaucg

SEQ ID NO: 3265860 - RNA, 19 nt, Artificial Sequence
  Description of Artificial Sequence: Synthetic oligonucleotide
aaggcaaugcagcaacaug

SEQ ID NO: 3265861 - RNA, 19 nt, Artificial Sequence
  Description of Artificial Sequence: Synthetic oligonucleotide
auuuugucauggcuuagag

SEQ ID NO: 3265862 - RNA, 19 nt, Artificial Sequence
  Description of Artificial Sequence: Synthetic oligonucleotide
cuuaauuuaugagaaugac

SEQ ID NO: 3265863 - RNA, 19 nt, Artificial Sequence
  Description of Artificial Sequence: Synthetic oligonucleotide
uggguugaagaccagucug

SEQ ID NO: 3265864 - RNA, 19 nt, Artificial Sequence
  Description of Artificial Sequence: Synthetic oligonucleotide
cauggggucacugaagugg

SEQ ID NO: 3265865 - RNA, 19 nt, Artificial Sequence
  Description of Artificial Sequence: Synthetic oligonucleotide
auagguuuggucauagauc

SEQ ID NO: 3265866 - RNA, 19 nt, Artificial Sequence
  Description of Artificial Sequence: Synthetic oligonucleotide
ugucauagucuaacugacg

SEQ ID NO: 3265867 - RNA, 19 nt, Artificial Sequence
  Description of Artificial Sequence: Synthetic oligonucleotide
gaauagugacaacauuaag

SEQ ID NO: 3265868 - RNA, 19 nt, Artificial Sequence
  Description of Artificial Sequence: Synthetic oligonucleotide
agcugcaaguaucaagacg

SEQ ID NO: 3265869 - RNA, 19 nt, Artificial Sequence
  Description of Artificial Sequence: Synthetic oligonucleotide
guuuucacuccacagugag

SEQ ID NO: 3265870 - RNA, 19 nt, Artificial Sequence
  Description of Artificial Sequence: Synthetic oligonucleotide
uagacauaggggcaguugu

SEQ ID NO: 3265871 - RNA, 19 nt, Artificial Sequence
  Description of Artificial Sequence: Synthetic oligonucleotide
acugugcguauuaaggucc

SEQ ID NO: 3265872 - RNA, 19 nt, Artificial Sequence
  Description of Artificial Sequence: Synthetic oligonucleotide
uguaucuuuauaucauuau

SEQ ID NO: 3265873 - RNA, 19 nt, Artificial Sequence
  Description of Artificial Sequence: Synthetic oligonucleotide
aacaaaacaguugcacuug

SEQ ID NO: 3265874 - RNA, 19 nt, Artificial Sequence
  Description of Artificial Sequence: Synthetic oligonucleotide
acauaaauacugcaaguaa

SEQ ID NO: 3265875 - RNA, 19 nt, Artificial Sequence
  Description of Artificial Sequence: Synthetic oligonucleotide
uuuguguaguucccuuggg

SEQ ID NO: 3265876 - RNA, 19 nt, Artificial Sequence
  Description of Artificial Sequence: Synthetic oligonucleotide
uguagcacauggauggaac

SEQ ID NO: 3265877 - RNA, 19 nt, Artificial Sequence
  Description of Artificial Sequence: Synthetic oligonucleotide
cuugucauaugcuuauuuc

SEQ ID NO: 3265878 - RNA, 19 nt, Artificial Sequence
  Description of Artificial Sequence: Synthetic oligonucleotide
auuuaugagaaugacuuau

SEQ ID NO: 3265879 - RNA, 19 nt, Artificial Sequence
  Description of Artificial Sequence: Synthetic oligonucleotide
ugaccaaguaacuaacuau

SEQ ID NO: 3265880 - RNA, 19 nt, Artificial Sequence
  Description of Artificial Sequence: Synthetic oligonucleotide
gaugcccagauggagaucc

SEQ ID NO: 3265881 - RNA, 19 nt, Artificial Sequence
  Description of Artificial Sequence: Synthetic oligonucleotide
ucaucuaauuuugcaauca

SEQ ID NO: 3265882 - RNA, 19 nt, Artificial Sequence
  Description of Artificial Sequence: Synthetic oligonucleotide
cuaagacucucauguagcc

SEQ ID NO: 3265883 - RNA, 19 nt, Artificial Sequence
  Description of Artificial Sequence: Synthetic oligonucleotide
cauacuugaggucugagaa

SEQ ID NO: 3265884 - RNA, 19 nt, Artificial Sequence
  Description of Artificial Sequence: Synthetic oligonucleotide
ucucuggucaguguuguag

SEQ ID NO: 3265885 - RNA, 19 nt, Artificial Sequence
  Description of Artificial Sequence: Synthetic oligonucleotide
ugaaucagccaugacuugc

SEQ ID NO: 3265886 - RNA, 19 nt, Artificial Sequence
  Description of Artificial Sequence: Synthetic oligonucleotide
ugucucagugauagcauug

SEQ ID NO: 3265887 - RNA, 19 nt, Artificial Sequence
  Description of Artificial Sequence: Synthetic oligonucleotide
ucauacuugaggucugaga

SEQ ID NO: 3265888 - RNA, 19 nt, Artificial Sequence
  Description of Artificial Sequence: Synthetic oligonucleotide
aaccugcuuccacaucacc

SEQ ID NO: 3265889 - RNA, 19 nt, Artificial Sequence
  Description of Artificial Sequence: Synthetic oligonucleotide
aaguuccugaaaucugucu

SEQ ID NO: 3265890 - RNA, 19 nt, Artificial Sequence
  Description of Artificial Sequence: Synthetic oligonucleotide
aauuuaugagaaugacuua

SEQ ID NO: 3265891 - RNA, 19 nt, Artificial Sequence
  Description of Artificial Sequence: Synthetic oligonucleotide
ucgguuuucacuccacagu

SEQ ID NO: 3265892 - RNA, 19 nt, Artificial Sequence
  Description of Artificial Sequence: Synthetic oligonucleotide
agucaugugacuaucuucu

SEQ ID NO: 3265893 - RNA, 19 nt, Artificial Sequence
  Description of Artificial Sequence: Synthetic oligonucleotide
uacauguaaacgucauucu

SEQ ID NO: 3265894 - RNA, 19 nt, Artificial Sequence
  Description of Artificial Sequence: Synthetic oligonucleotide
uuuaugagaaugacuuaua

SEQ ID NO: 3265895 - RNA, 19 nt, Artificial Sequence
  Description of Artificial Sequence: Synthetic oligonucleotide
ugauaaguguaucuuuaua

SEQ ID NO: 3265896 - RNA, 19 nt, Artificial Sequence
  Description of Artificial Sequence: Synthetic oligonucleotide
ucuggguugaagaccaguc

SEQ ID NO: 3265897 - RNA, 19 nt, Artificial Sequence
  Description of Artificial Sequence: Synthetic oligonucleotide
gacggaccgacuuuucuag

SEQ ID NO: 3265898 - RNA, 19 nt, Artificial Sequence
  Description of Artificial Sequence: Synthetic oligonucleotide
aaacagugucuguagcaca

SEQ ID NO: 3265899 - RNA, 19 nt, Artificial Sequence
  Description of Artificial Sequence: Synthetic oligonucleotide
auugucaucaucagaguca

SEQ ID NO: 3265900 - RNA, 19 nt, Artificial Sequence
  Description of Artificial Sequence: Synthetic oligonucleotide
uugaaaguaggugagcaau

SEQ ID NO: 3265901 - RNA, 19 nt, Artificial Sequence
  Description of Artificial Sequence: Synthetic oligonucleotide
acugacggggaguugaaga

SEQ ID NO: 3265902 - RNA, 19 nt, Artificial Sequence
  Description of Artificial Sequence: Synthetic oligonucleotide
acauauuuguuauuuugua

SEQ ID NO: 3265903 - RNA, 19 nt, Artificial Sequence
  Description of Artificial Sequence: Synthetic oligonucleotide
uuggucauagaucgguccu

SEQ ID NO: 3265904 - RNA, 19 nt, Artificial Sequence
  Description of Artificial Sequence: Synthetic oligonucleotide
guuauucagaagccuagac

SEQ ID NO: 3265905 - RNA, 19 nt, Artificial Sequence
  Description of Artificial Sequence: Synthetic oligonucleotide
aauauagugaagaugaugg

SEQ ID NO: 3265906 - RNA, 19 nt, Artificial Sequence
  Description of Artificial Sequence: Synthetic oligonucleotide
aacugcuacaacuuucucc

SEQ ID NO: 3265907 - RNA, 19 nt, Artificial Sequence
  Description of Artificial Sequence: Synthetic oligonucleotide
gauuuagagacccaaacag

SEQ ID NO: 3265908 - RNA, 19 nt, Artificial Sequence
  Description of Artificial Sequence: Synthetic oligonucleotide
aacuaguauguauaggcac

SEQ ID NO: 3265909 - RNA, 19 nt, Artificial Sequence
  Description of Artificial Sequence: Synthetic oligonucleotide
ucuaacaagacuuucuagc

SEQ ID NO: 3265910 - RNA, 19 nt, Artificial Sequence
  Description of Artificial Sequence: Synthetic oligonucleotide
uauaauuuuccauagcacu

SEQ ID NO: 3265911 - RNA, 19 nt, Artificial Sequence
  Description of Artificial Sequence: Synthetic oligonucleotide
ucagucuucaccaagcuca

SEQ ID NO: 3265912 - RNA, 19 nt, Artificial Sequence
  Description of Artificial Sequence: Synthetic oligonucleotide
cuuggugauaaauagacac

SEQ ID NO: 3265913 - RNA, 19 nt, Artificial Sequence
  Description of Artificial Sequence: Synthetic oligonucleotide
uguuaaccagaacacagcg

SEQ ID NO: 3265914 - RNA, 19 nt, Artificial Sequence
  Description of Artificial Sequence: Synthetic oligonucleotide
ugauaaauagacacacagg

SEQ ID NO: 3265915 - RNA, 19 nt, Artificial Sequence
  Description of Artificial Sequence: Synthetic oligonucleotide
ucuccauucagcauuaucu

SEQ ID NO: 3265916 - RNA, 19 nt, Artificial Sequence
  Description of Artificial Sequence: Synthetic oligonucleotide
aaaauauccuuauccuuuc

SEQ ID NO: 3265917 - RNA, 19 nt, Artificial Sequence
  Description of Artificial Sequence: Synthetic oligonucleotide
gugauaaauagacacacag

SEQ ID NO: 3265918 - RNA, 19 nt, Artificial Sequence
  Description of Artificial Sequence: Synthetic oligonucleotide
gauaggaccacauuucccc

SEQ ID NO: 3265919 - RNA, 19 nt, Artificial Sequence
  Description of Artificial Sequence: Synthetic oligonucleotide
aacaagacuuucuagcuca

SEQ ID NO: 3265920 - RNA, 19 nt, Artificial Sequence
  Description of Artificial Sequence: Synthetic oligonucleotide
aaaagucaagggcacagag

SEQ ID NO: 3265921 - RNA, 19 nt, Artificial Sequence
  Description of Artificial Sequence: Synthetic oligonucleotide
auauauuuggucucuguag

SEQ ID NO: 3265922 - RNA, 19 nt, Artificial Sequence
  Description of Artificial Sequence: Synthetic oligonucleotide
aggacuuccaacucucucc

SEQ ID NO: 3265923 - RNA, 19 nt, Artificial Sequence
  Description of Artificial Sequence: Synthetic oligonucleotide
uuaucuccuauccacauac

SEQ ID NO: 3265924 - RNA, 19 nt, Artificial Sequence
  Description of Artificial Sequence: Synthetic oligonucleotide
guugguuguggcuagaugc

SEQ ID NO: 3265925 - RNA, 19 nt, Artificial Sequence
  Description of Artificial Sequence: Synthetic oligonucleotide
augaaaagcagccuauguc

SEQ ID NO: 3265926 - RNA, 19 nt, Artificial Sequence
  Description of Artificial Sequence: Synthetic oligonucleotide
aaauauagugaagaugaug

SEQ ID NO: 3265927 - RNA, 19 nt, Artificial Sequence
  Description of Artificial Sequence: Synthetic oligonucleotide
acauucuucaaaccuuccc

SEQ ID NO: 3265928 - RNA, 19 nt, Artificial Sequence
  Description of Artificial Sequence: Synthetic oligonucleotide
aaaaggaacuaguauguau

SEQ ID NO: 3265929 - RNA, 19 nt, Artificial Sequence
  Description of Artificial Sequence: Synthetic oligonucleotide
acugcuacaacuuucuccu

SEQ ID NO: 3265930 - RNA, 19 nt, Artificial Sequence
  Description of Artificial Sequence: Synthetic oligonucleotide
ggaacuaguauguauaggc

SEQ ID NO: 3265931 - RNA, 19 nt, Artificial Sequence
  Description of Artificial Sequence: Synthetic oligonucleotide
aucuccuauccacauaccc

SEQ ID NO: 3265932 - RNA, 19 nt, Artificial Sequence
  Description of Artificial Sequence: Synthetic oligonucleotide
  modified_base (3)..(3): a, c, u, g, unknown or other
aanacgacccuguccaucu

SEQ ID NO: 3265933 - RNA, 19 nt, Artificial Sequence
  Description of Artificial Sequence: Synthetic oligonucleotide
auauagugaagaugauggc

SEQ ID NO: 3265934 - RNA, 19 nt, Artificial Sequence
  Description of Artificial Sequence: Synthetic oligonucleotide
aaggaacuaguauguauag

SEQ ID NO: 3265935 - RNA, 19 nt, Artificial Sequence
  Description of Artificial Sequence: Synthetic oligonucleotide
ucuggguuuauuauaauuu

SEQ ID NO: 3265936 - RNA, 19 nt, Artificial Sequence
  Description of Artificial Sequence: Synthetic oligonucleotide
augaucuaaguuuauucag

SEQ ID NO: 3265937 - RNA, 19 nt, Artificial Sequence
  Description of Artificial Sequence: Synthetic oligonucleotide
ugaugcccuagaaagacag

SEQ ID NO: 3265938 - RNA, 19 nt, Artificial Sequence
  Description of Artificial Sequence: Synthetic oligonucleotide
auucauuucaaaagccugc

SEQ ID NO: 3265939 - RNA, 19 nt, Artificial Sequence
  Description of Artificial Sequence: Synthetic oligonucleotide
ugaguugguaaaaccauca

SEQ ID NO: 3265940 - RNA, 19 nt, Artificial Sequence
  Description of Artificial Sequence: Synthetic oligonucleotide
aaauucuaacaagacuuuc

SEQ ID NO: 3265941 - RNA, 19 nt, Artificial Sequence
  Description of Artificial Sequence: Synthetic oligonucleotide
aacaacugcuuucucucuc

SEQ ID NO: 3265942 - RNA, 19 nt, Artificial Sequence
  Description of Artificial Sequence: Synthetic oligonucleotide
gaaacaacugcuuucucuc

SEQ ID NO: 3265943 - RNA, 19 nt, Artificial Sequence
  Description of Artificial Sequence: Synthetic oligonucleotide
uaccagacuuguuugaugc

SEQ ID NO: 3265944 - RNA, 19 nt, Artificial Sequence
  Description of Artificial Sequence: Synthetic oligonucleotide
guuggaacauaucaagcag

SEQ ID NO: 3265945 - RNA, 19 nt, Artificial Sequence
  Description of Artificial Sequence: Synthetic oligonucleotide
ugccuuuggaacuuuaugu

SEQ ID NO: 3265946 - RNA, 19 nt, Artificial Sequence
  Description of Artificial Sequence: Synthetic oligonucleotide
aguugaaaucaaaagcugg

SEQ ID NO: 3265947 - RNA, 19 nt, Artificial Sequence
  Description of Artificial Sequence: Synthetic oligonucleotide
uguauaggcacuuccuaug

SEQ ID NO: 3265948 - RNA, 19 nt, Artificial Sequence
  Description of Artificial Sequence: Synthetic oligonucleotide
uggagaucacaucuuauac

SEQ ID NO: 3265949 - RNA, 19 nt, Artificial Sequence
  Description of Artificial Sequence: Synthetic oligonucleotide
cuauccaauauucuucaag

SEQ ID NO: 3265950 - RNA, 19 nt, Artificial Sequence
  Description of Artificial Sequence: Synthetic oligonucleotide
gggaauaagaaauugccug

SEQ ID NO: 3265951 - RNA, 19 nt, Artificial Sequence
  Description of Artificial Sequence: Synthetic oligonucleotide
uucgacacauucuucaaac

SEQ ID NO: 3265952 - RNA, 19 nt, Artificial Sequence
  Description of Artificial Sequence: Synthetic oligonucleotide
uauagugaagaugauggcu

SEQ ID NO: 3265953 - RNA, 19 nt, Artificial Sequence
  Description of Artificial Sequence: Synthetic oligonucleotide
auagugaagaugauggcuc

SEQ ID NO: 3265954 - RNA, 19 nt, Artificial Sequence
  Description of Artificial Sequence: Synthetic oligonucleotide
aggaguaccaaacuucucu

SEQ ID NO: 3265955 - RNA, 19 nt, Artificial Sequence
  Description of Artificial Sequence: Synthetic oligonucleotide
guguacaacagaaagauga

SEQ ID NO: 3265956 - RNA, 19 nt, Artificial Sequence
  Description of Artificial Sequence: Synthetic oligonucleotide
auguuuuguugucauauug

SEQ ID NO: 3265957 - RNA, 19 nt, Artificial Sequence
  Description of Artificial Sequence: Synthetic oligonucleotide
uguaggauagauacgggua

SEQ ID NO: 3265958 - RNA, 19 nt, Artificial Sequence
  Description of Artificial Sequence: Synthetic oligonucleotide
cauucauuucaaaagccug

SEQ ID NO: 3265959 - RNA, 19 nt, Artificial Sequence
  Description of Artificial Sequence: Synthetic oligonucleotide
ucaacugcuacaacuuucu

SEQ ID NO: 3265960 - RNA, 19 nt, Artificial Sequence
  Description of Artificial Sequence: Synthetic oligonucleotide
uugauagagucugugagca

SEQ ID NO: 3265961 - RNA, 19 nt, Artificial Sequence
  Description of Artificial Sequence: Synthetic oligonucleotide
caggagagaagcuaugggc

SEQ ID NO: 3265962 - RNA, 19 nt, Artificial Sequence
  Description of Artificial Sequence: Synthetic oligonucleotide
auuaagaaaugauguuuug

SEQ ID NO: 3265963 - RNA, 19 nt, Artificial Sequence
  Description of Artificial Sequence: Synthetic oligonucleotide
ccuagaaagacagaaaagg

SEQ ID NO: 3265964 - RNA, 19 nt, Artificial Sequence
  Description of Artificial Sequence: Synthetic oligonucleotide
ucaaacucucccagcaaag

SEQ ID NO: 3265965 - RNA, 19 nt, Artificial Sequence
  Description of Artificial Sequence: Synthetic oligonucleotide
uuugaugcccuagaaagac

SEQ ID NO: 3265966 - RNA, 19 nt, Artificial Sequence
  Description of Artificial Sequence: Synthetic oligonucleotide
aaagucaagggcacagagg

SEQ ID NO: 3265967 - RNA, 19 nt, Artificial Sequence
  Description of Artificial Sequence: Synthetic oligonucleotide
ucucccagcaaagacaccc

SEQ ID NO: 3265968 - RNA, 19 nt, Artificial Sequence
  Description of Artificial Sequence: Synthetic oligonucleotide
cuauggggcucuuuggugg

SEQ ID NO: 3265969 - RNA, 19 nt, Artificial Sequence
  Description of Artificial Sequence: Synthetic oligonucleotide
ucaucucacugucuuaaug

SEQ ID NO: 3265970 - RNA, 19 nt, Artificial Sequence
  Description of Artificial Sequence: Synthetic oligonucleotide
gaucuaaguuuauucagga

SEQ ID NO: 3265971 - RNA, 19 nt, Artificial Sequence
  Description of Artificial Sequence: Synthetic oligonucleotide
gaucacaucuuauaccaga

SEQ ID NO: 3265972 - RNA, 19 nt, Artificial Sequence
  Description of Artificial Sequence: Synthetic oligonucleotide
aaaggaacuaguauguaua

SEQ ID NO: 3265973 - RNA, 19 nt, Artificial Sequence
  Description of Artificial Sequence: Synthetic oligonucleotide
aacacagcgguccacccga

SEQ ID NO: 3265974 - RNA, 19 nt, Artificial Sequence
  Description of Artificial Sequence: Synthetic oligonucleotide
caugaucuaaguuuauuca

SEQ ID NO: 3265975 - RNA, 19 nt, Artificial Sequence
  Description of Artificial Sequence: Synthetic oligonucleotide
uguacaacagaaagaugaa

SEQ ID NO: 3265976 - RNA, 19 nt, Artificial Sequence
  Description of Artificial Sequence: Synthetic oligonucleotide
uguuacuguguacaacaga

SEQ ID NO: 3265977 - RNA, 19 nt, Artificial Sequence
  Description of Artificial Sequence: Synthetic oligonucleotide
ucaaaagccugcuaucauc

SEQ ID NO: 3265978 - RNA, 19 nt, Artificial Sequence
  Description of Artificial Sequence: Synthetic oligonucleotide
ugaagcggcaaauuccugu

SEQ ID NO: 3265979 - RNA, 19 nt, Artificial Sequence
  Description of Artificial Sequence: Synthetic oligonucleotide
ucucagggcagacuucuag

SEQ ID NO: 3265980 - RNA, 19 nt, Artificial Sequence
  Description of Artificial Sequence: Synthetic oligonucleotide
uuagagacccaaacagaca

SEQ ID NO: 3265981 - RNA, 19 nt, Artificial Sequence
  Description of Artificial Sequence: Synthetic oligonucleotide
uagcucaacugcuacaacu

SEQ ID NO: 3265982 - RNA, 19 nt, Artificial Sequence
  Description of Artificial Sequence: Synthetic oligonucleotide
ucggccuauagucuuguug

SEQ ID NO: 3265983 - RNA, 19 nt, Artificial Sequence
  Description of Artificial Sequence: Synthetic oligonucleotide
gaagaagaggaagaucccc

SEQ ID NO: 3265984 - RNA, 19 nt, Artificial Sequence
  Description of Artificial Sequence: Synthetic oligonucleotide
ugcggcuuguccaucagca

SEQ ID NO: 3265985 - RNA, 19 nt, Artificial Sequence
  Description of Artificial Sequence: Synthetic oligonucleotide
uggguuuauuauaauuuuc

SEQ ID NO: 3265986 - RNA, 19 nt, Artificial Sequence
  Description of Artificial Sequence: Synthetic oligonucleotide
ucuugggcaugucuuagcu

SEQ ID NO: 3265987 - RNA, 19 nt, Artificial Sequence
  Description of Artificial Sequence: Synthetic oligonucleotide
uuuuguugguuguggcuag

SEQ ID NO: 3265988 - RNA, 19 nt, Artificial Sequence
  Description of Artificial Sequence: Synthetic oligonucleotide
gacagaccagaccuagagg

SEQ ID NO: 3265989 - RNA, 19 nt, Artificial Sequence
  Description of Artificial Sequence: Synthetic oligonucleotide
agaacacagcgguccaccc

SEQ ID NO: 3265990 - RNA, 19 nt, Artificial Sequence
  Description of Artificial Sequence: Synthetic oligonucleotide
ucuuaaugucacauucuuc

SEQ ID NO: 3265991 - RNA, 19 nt, Artificial Sequence
  Description of Artificial Sequence: Synthetic oligonucleotide
auguaggauagauacgggu

SEQ ID NO: 3265992 - RNA, 19 nt, Artificial Sequence
  Description of Artificial Sequence: Synthetic oligonucleotide
auagucuuguugccuuugg

SEQ ID NO: 3265993 - RNA, 19 nt, Artificial Sequence
  Description of Artificial Sequence: Synthetic oligonucleotide
agaccuagagguuuauccu

SEQ ID NO: 3265994 - RNA, 19 nt, Artificial Sequence
  Description of Artificial Sequence: Synthetic oligonucleotide
gacccuguccaucuugucc

SEQ ID NO: 3265995 - RNA, 19 nt, Artificial Sequence
  Description of Artificial Sequence: Synthetic oligonucleotide
aaauauccuuauccuuucu

SEQ ID NO: 3265996 - RNA, 19 nt, Artificial Sequence
  Description of Artificial Sequence: Synthetic oligonucleotide
uaacaagacuuucuagcuc

SEQ ID NO: 3265997 - RNA, 19 nt, Artificial Sequence
  Description of Artificial Sequence: Synthetic oligonucleotide
ugccugagcaaguugaaau

SEQ ID NO: 3265998 - RNA, 19 nt, Artificial Sequence
  Description of Artificial Sequence: Synthetic oligonucleotide
aagauguuacuguguacaa

SEQ ID NO: 3265999 - RNA, 19 nt, Artificial Sequence
  Description of Artificial Sequence: Synthetic oligonucleotide
uaacacuguggcuuccucc

SEQ ID NO: 3266000 - RNA, 19 nt, Artificial Sequence
  Description of Artificial Sequence: Synthetic oligonucleotide
cuguaauuccuguugucug

SEQ ID NO: 3266001 - RNA, 19 nt, Artificial Sequence
  Description of Artificial Sequence: Synthetic oligonucleotide
cacaaggaaaugucucacg

SEQ ID NO: 3266002 - RNA, 19 nt, Artificial Sequence
  Description of Artificial Sequence: Synthetic oligonucleotide
aagaagaggaagaucccca

SEQ ID NO: 3266003 - RNA, 19 nt, Artificial Sequence
  Description of Artificial Sequence: Synthetic oligonucleotide
agccugucacaacagauca

SEQ ID NO: 3266004 - RNA, 19 nt, Artificial Sequence
  Description of Artificial Sequence: Synthetic oligonucleotide
aaagacagaaaaggaacua

SEQ ID NO: 3266005 - RNA, 19 nt, Artificial Sequence
  Description of Artificial Sequence: Synthetic oligonucleotide
ugaaaggcuuuucagagcc

SEQ ID NO: 3266006 - RNA, 19 nt, Artificial Sequence
  Description of Artificial Sequence: Synthetic oligonucleotide
aagaucuugucuccaacac

SEQ ID NO: 3266007 - RNA, 19 nt, Artificial Sequence
  Description of Artificial Sequence: Synthetic oligonucleotide
aacacuucggccaucaggg

SEQ ID NO: 3266008 - RNA, 19 nt, Artificial Sequence
  Description of Artificial Sequence: Synthetic oligonucleotide
uuuuauagcgagagaaggc

SEQ ID NO: 3266009 - RNA, 19 nt, Artificial Sequence
  Description of Artificial Sequence: Synthetic oligonucleotide
aaaggcuuuucagagcccc

SEQ ID NO: 3266010 - RNA, 19 nt, Artificial Sequence
  Description of Artificial Sequence: Synthetic oligonucleotide
ucugucaugcucagaaagg

SEQ ID NO: 3266011 - RNA, 19 nt, Artificial Sequence
  Description of Artificial Sequence: Synthetic oligonucleotide
aaggcagccuuauuguggg

SEQ ID NO: 3266012 - RNA, 19 nt, Artificial Sequence
  Description of Artificial Sequence: Synthetic oligonucleotide
uuuauagcgagagaaggca

SEQ ID NO: 3266013 - RNA, 19 nt, Artificial Sequence
  Description of Artificial Sequence: Synthetic oligonucleotide
uauggcggcauucucagca

SEQ ID NO: 3266014 - RNA, 19 nt, Artificial Sequence
  Description of Artificial Sequence: Synthetic oligonucleotide
ucuugucuccaacacuucg

SEQ ID NO: 3266015 - RNA, 19 nt, Artificial Sequence
  Description of Artificial Sequence: Synthetic oligonucleotide
aaaggcagccuuauugugg

SEQ ID NO: 3266016 - RNA, 19 nt, Artificial Sequence
  Description of Artificial Sequence: Synthetic oligonucleotide
ucuauggcggcauucucag

SEQ ID NO: 3266017 - RNA, 19 nt, Artificial Sequence
  Description of Artificial Sequence: Synthetic oligonucleotide
cagaaaggcagccuuauug

SEQ ID NO: 3266018 - RNA, 19 nt, Artificial Sequence
  Description of Artificial Sequence: Synthetic oligonucleotide
cauucucagcagcagaacg

SEQ ID NO: 3266019 - RNA, 19 nt, Artificial Sequence
  Description of Artificial Sequence: Synthetic oligonucleotide
cuugucuccaacacuucgg

SEQ ID NO: 3266020 - RNA, 19 nt, Artificial Sequence
  Description of Artificial Sequence: Synthetic oligonucleotide
gaucagcugcucuauggcg

SEQ ID NO: 3266021 - RNA, 19 nt, Artificial Sequence
  Description of Artificial Sequence: Synthetic oligonucleotide
agaaaggcagccuuauugu

SEQ ID NO: 3266022 - RNA, 19 nt, Artificial Sequence
  Description of Artificial Sequence: Synthetic oligonucleotide
gucugucaugcucagaaag

SEQ ID NO: 3266023 - RNA, 19 nt, Artificial Sequence
  Description of Artificial Sequence: Synthetic oligonucleotide
uccugggcaucccugaaag

SEQ ID NO: 3266024 - RNA, 19 nt, Artificial Sequence
  Description of Artificial Sequence: Synthetic oligonucleotide
uccacgucugucaugcuca

SEQ ID NO: 3266025 - RNA, 19 nt, Artificial Sequence
  Description of Artificial Sequence: Synthetic oligonucleotide
caacacuucggccaucagg

SEQ ID NO: 3266026 - RNA, 19 nt, Artificial Sequence
  Description of Artificial Sequence: Synthetic oligonucleotide
cucagcagcagaacguggg

SEQ ID NO: 3266027 - RNA, 19 nt, Artificial Sequence
  Description of Artificial Sequence: Synthetic oligonucleotide
uugucuccaacacuucggc

SEQ ID NO: 3266028 - RNA, 19 nt, Artificial Sequence
  Description of Artificial Sequence: Synthetic oligonucleotide
ucagcagcagaacgugggg

SEQ ID NO: 3266029 - RNA, 19 nt, Artificial Sequence
  Description of Artificial Sequence: Synthetic oligonucleotide
ucuguguccacgucuguca

SEQ ID NO: 3266030 - RNA, 19 nt, Artificial Sequence
  Description of Artificial Sequence: Synthetic oligonucleotide
gaagaucuugucuccaaca

SEQ ID NO: 3266031 - RNA, 19 nt, Artificial Sequence
  Description of Artificial Sequence: Synthetic oligonucleotide
uuauuguggggugcgauca

SEQ ID NO: 3266032 - RNA, 19 nt, Artificial Sequence
  Description of Artificial Sequence: Synthetic oligonucleotide
ugaagaucuugucuccaac

SEQ ID NO: 3266033 - RNA, 19 nt, Artificial Sequence
  Description of Artificial Sequence: Synthetic oligonucleotide
gaaaggcagccuuauugug

SEQ ID NO: 3266034 - RNA, 19 nt, Artificial Sequence
  Description of Artificial Sequence: Synthetic oligonucleotide
gucaugcucagaaaggcag

SEQ ID NO: 3266035 - RNA, 19 nt, Artificial Sequence
  Description of Artificial Sequence: Synthetic oligonucleotide
ugucaugcucagaaaggca

SEQ ID NO: 3266036 - RNA, 19 nt, Artificial Sequence
  Description of Artificial Sequence: Synthetic oligonucleotide
acgucugucaugcucagaa

SEQ ID NO: 3266037 - RNA, 19 nt, Artificial Sequence
  Description of Artificial Sequence: Synthetic oligonucleotide
ucccugaaaggcuuuucag

SEQ ID NO: 3266038 - RNA, 19 nt, Artificial Sequence
  Description of Artificial Sequence: Synthetic oligonucleotide
agcagcagaacguggggag

SEQ ID NO: 3266039 - RNA, 19 nt, Artificial Sequence
  Description of Artificial Sequence: Synthetic oligonucleotide
acguggggaggccagcugc

SEQ ID NO: 3266040 - RNA, 19 nt, Artificial Sequence
  Description of Artificial Sequence: Synthetic oligonucleotide
ucaugcucagaaaggcagc

SEQ ID NO: 3266041 - RNA, 19 nt, Artificial Sequence
  Description of Artificial Sequence: Synthetic oligonucleotide
ccugaaaggcuuuucagag

SEQ ID NO: 3266042 - RNA, 19 nt, Artificial Sequence
  Description of Artificial Sequence: Synthetic oligonucleotide
ucucagcagcagaacgugg

SEQ ID NO: 3266043 - RNA, 19 nt, Artificial Sequence
  Description of Artificial Sequence: Synthetic oligonucleotide
cugggcaucccugaaaggc

SEQ ID NO: 3266044 - RNA, 19 nt, Artificial Sequence
  Description of Artificial Sequence: Synthetic oligonucleotide
gucuccaacacuucggcca

SEQ ID NO: 3266045 - RNA, 19 nt, Artificial Sequence
  Description of Artificial Sequence: Synthetic oligonucleotide
agaucuugucuccaacacu

SEQ ID NO: 3266046 - RNA, 19 nt, Artificial Sequence
  Description of Artificial Sequence: Synthetic oligonucleotide
guccugaagaucuugucuc

SEQ ID NO: 3266047 - RNA, 19 nt, Artificial Sequence
  Description of Artificial Sequence: Synthetic oligonucleotide
cugaaaggcuuuucagagc

SEQ ID NO: 3266048 - RNA, 19 nt, Artificial Sequence
  Description of Artificial Sequence: Synthetic oligonucleotide
aucagcugcucuauggcgg

SEQ ID NO: 3266049 - RNA, 19 nt, Artificial Sequence
  Description of Artificial Sequence: Synthetic oligonucleotide
cugucaugcucagaaaggc

SEQ ID NO: 3266050 - RNA, 19 nt, Artificial Sequence
  Description of Artificial Sequence: Synthetic oligonucleotide
cuuauuguggggugcgauc

SEQ ID NO: 3266051 - RNA, 19 nt, Artificial Sequence
  Description of Artificial Sequence: Synthetic oligonucleotide
uccugaagaucuugucucc

SEQ ID NO: 3266052 - RNA, 19 nt, Artificial Sequence
  Description of Artificial Sequence: Synthetic oligonucleotide
auuguggggugcgaucagc

SEQ ID NO: 3266053 - RNA, 19 nt, Artificial Sequence
  Description of Artificial Sequence: Synthetic oligonucleotide
uucucagcagcagaacgug

SEQ ID NO: 3266054 - RNA, 19 nt, Artificial Sequence
  Description of Artificial Sequence: Synthetic oligonucleotide
ugcucagaaaggcagccuu

SEQ ID NO: 3266055 - RNA, 19 nt, Artificial Sequence
  Description of Artificial Sequence: Synthetic oligonucleotide
aucccugaaaggcuuuuca

SEQ ID NO: 3266056 - RNA, 19 nt, Artificial Sequence
  Description of Artificial Sequence: Synthetic oligonucleotide
guggggugcgaucagcugc

SEQ ID NO: 3266057 - RNA, 19 nt, Artificial Sequence
  Description of Artificial Sequence: Synthetic oligonucleotide
ugggcaucccugaaaggcu

SEQ ID NO: 3266058 - RNA, 19 nt, Artificial Sequence
  Description of Artificial Sequence: Synthetic oligonucleotide
uauuguggggugcgaucag

SEQ ID NO: 3266059 - RNA, 19 nt, Artificial Sequence
  Description of Artificial Sequence: Synthetic oligonucleotide
guguccacgucugucaugc

SEQ ID NO: 3266060 - RNA, 19 nt, Artificial Sequence
  Description of Artificial Sequence: Synthetic oligonucleotide
caugcucagaaaggcagcc

SEQ ID NO: 3266061 - RNA, 19 nt, Artificial Sequence
  Description of Artificial Sequence: Synthetic oligonucleotide
aggccagcugcccuccagc

SEQ ID NO: 3266062 - RNA, 19 nt, Artificial Sequence
  Description of Artificial Sequence: Synthetic oligonucleotide
ucagcugcucuauggcggc

SEQ ID NO: 3266063 - RNA, 19 nt, Artificial Sequence
  Description of Artificial Sequence: Synthetic oligonucleotide
ucggccaucagggaagagu

SEQ ID NO: 3266064 - RNA, 19 nt, Artificial Sequence
  Description of Artificial Sequence: Synthetic oligonucleotide
agccugccugcacaucucc

SEQ ID NO: 3266065 - RNA, 19 nt, Artificial Sequence
  Description of Artificial Sequence: Synthetic oligonucleotide
ugucuccaacacuucggcc

SEQ ID NO: 3266066 - RNA, 19 nt, Artificial Sequence
  Description of Artificial Sequence: Synthetic oligonucleotide
uuguggggugcgaucagcu

SEQ ID NO: 3266067 - RNA, 19 nt, Artificial Sequence
  Description of Artificial Sequence: Synthetic oligonucleotide
acuucggccaucagggaag

SEQ ID NO: 3266068 - RNA, 19 nt, Artificial Sequence
  Description of Artificial Sequence: Synthetic oligonucleotide
aucagggaagagugcagcu

SEQ ID NO: 3266069 - RNA, 19 nt, Artificial Sequence
  Description of Artificial Sequence: Synthetic oligonucleotide
gcgaucagcugcucuaugg

SEQ ID NO: 3266070 - RNA, 19 nt, Artificial Sequence
  Description of Artificial Sequence: Synthetic oligonucleotide
caucagggaagagugcagc

SEQ ID NO: 3266071 - RNA, 19 nt, Artificial Sequence
  Description of Artificial Sequence: Synthetic oligonucleotide
auucucagcagcagaacgu

SEQ ID NO: 3266072 - RNA, 19 nt, Artificial Sequence
  Description of Artificial Sequence: Synthetic oligonucleotide
cugccugcacaucuccugg

SEQ ID NO: 3266073 - RNA, 19 nt, Artificial Sequence
  Description of Artificial Sequence: Synthetic oligonucleotide
aacguggggaggccagcug

SEQ ID NO: 3266074 - RNA, 19 nt, Artificial Sequence
  Description of Artificial Sequence: Synthetic oligonucleotide
cucuauggcggcauucuca

SEQ ID NO: 3266075 - RNA, 19 nt, Artificial Sequence
  Description of Artificial Sequence: Synthetic oligonucleotide
ucuccaacacuucggccau

SEQ ID NO: 3266076 - RNA, 19 nt, Artificial Sequence
  Description of Artificial Sequence: Synthetic oligonucleotide
uccaacacuucggccauca

SEQ ID NO: 3266077 - RNA, 19 nt, Artificial Sequence
  Description of Artificial Sequence: Synthetic oligonucleotide
uguggggugcgaucagcug

SEQ ID NO: 3266078 - RNA, 19 nt, Artificial Sequence
  Description of Artificial Sequence: Synthetic oligonucleotide
uggggugcgaucagcugcu

SEQ ID NO: 3266079 - RNA, 19 nt, Artificial Sequence
  Description of Artificial Sequence: Synthetic oligonucleotide
ugcucuauggcggcauucu

SEQ ID NO: 3266080 - RNA, 19 nt, Artificial Sequence
  Description of Artificial Sequence: Synthetic oligonucleotide
ugccugcacaucuccuggg

SEQ ID NO: 3266081 - RNA, 19 nt, Artificial Sequence
  Description of Artificial Sequence: Synthetic oligonucleotide
gaucuugucuccaacacuu

SEQ ID NO: 3266082 - RNA, 19 nt, Artificial Sequence
  Description of Artificial Sequence: Synthetic oligonucleotide
agccuuauuguggggugcg

SEQ ID NO: 3266083 - RNA, 19 nt, Artificial Sequence
  Description of Artificial Sequence: Synthetic oligonucleotide
agaacguggggaggccagc

SEQ ID NO: 3266084 - RNA, 19 nt, Artificial Sequence
  Description of Artificial Sequence: Synthetic oligonucleotide
uguguccacgucugucaug

SEQ ID NO: 3266085 - RNA, 19 nt, Artificial Sequence
  Description of Artificial Sequence: Synthetic oligonucleotide
agcagaacguggggaggcc

SEQ ID NO: 3266086 - RNA, 19 nt, Artificial Sequence
  Description of Artificial Sequence: Synthetic oligonucleotide
cagaacguggggaggccag

SEQ ID NO: 3266087 - RNA, 19 nt, Artificial Sequence
  Description of Artificial Sequence: Synthetic oligonucleotide
auggcggcauucucagcag

SEQ ID NO: 3266088 - RNA, 19 nt, Artificial Sequence
  Description of Artificial Sequence: Synthetic oligonucleotide
ugcgaucagcugcucuaug

SEQ ID NO: 3266089 - RNA, 19 nt, Artificial Sequence
  Description of Artificial Sequence: Synthetic oligonucleotide
cugcccuccagccugccug

SEQ ID NO: 3266090 - RNA, 19 nt, Artificial Sequence
  Description of Artificial Sequence: Synthetic oligonucleotide
aucuccugggcaucccuga

SEQ ID NO: 3266091 - RNA, 19 nt, Artificial Sequence
  Description of Artificial Sequence: Synthetic oligonucleotide
ucagaaaggcagccuuauu

SEQ ID NO: 3266092 - RNA, 19 nt, Artificial Sequence
  Description of Artificial Sequence: Synthetic oligonucleotide
gaaaggcuuuucagagccc

SEQ ID NO: 3266093 - RNA, 19 nt, Artificial Sequence
  Description of Artificial Sequence: Synthetic oligonucleotide
acaucuccugggcaucccu

SEQ ID NO: 3266094 - RNA, 19 nt, Artificial Sequence
  Description of Artificial Sequence: Synthetic oligonucleotide
caucuccugggcaucccug

SEQ ID NO: 3266095 - RNA, 19 nt, Artificial Sequence
  Description of Artificial Sequence: Synthetic oligonucleotide
guccacgucugucaugcuc

SEQ ID NO: 3266096 - RNA, 19 nt, Artificial Sequence
  Description of Artificial Sequence: Synthetic oligonucleotide
ucagggaagagugcagcuu

SEQ ID NO: 3266097 - RNA, 19 nt, Artificial Sequence
  Description of Artificial Sequence: Synthetic oligonucleotide
uggcggcauucucagcagc

SEQ ID NO: 3266098 - RNA, 19 nt, Artificial Sequence
  Description of Artificial Sequence: Synthetic oligonucleotide
cagcagaacguggggaggc

SEQ ID NO: 3266099 - RNA, 19 nt, Artificial Sequence
  Description of Artificial Sequence: Synthetic oligonucleotide
gaggccagcugcccuccag

SEQ ID NO: 3266100 - RNA, 19 nt, Artificial Sequence
  Description of Artificial Sequence: Synthetic oligonucleotide
aucuugucuccaacacuuc

SEQ ID NO: 3266101 - RNA, 19 nt, Artificial Sequence
  Description of Artificial Sequence: Synthetic oligonucleotide
ucuccugggcaucccugaa

SEQ ID NO: 3266102 - RNA, 19 nt, Artificial Sequence
  Description of Artificial Sequence: Synthetic oligonucleotide
uggggaggccagcugcccu

SEQ ID NO: 3266103 - RNA, 19 nt, Artificial Sequence
  Description of Artificial Sequence: Synthetic oligonucleotide
cugaagaucuugucuccaa

SEQ ID NO: 3266104 - RNA, 19 nt, Artificial Sequence
  Description of Artificial Sequence: Synthetic oligonucleotide
cuauggcggcauucucagc

SEQ ID NO: 3266105 - RNA, 19 nt, Artificial Sequence
  Description of Artificial Sequence: Synthetic oligonucleotide
ucaaugaagaaaagcaagg

SEQ ID NO: 3266106 - RNA, 19 nt, Artificial Sequence
  Description of Artificial Sequence: Synthetic oligonucleotide
ugugccaucucaaagaggc

SEQ ID NO: 3266107 - RNA, 19 nt, Artificial Sequence
  Description of Artificial Sequence: Synthetic oligonucleotide
acugguagaggguauagcc

SEQ ID NO: 3266108 - RNA, 19 nt, Artificial Sequence
  Description of Artificial Sequence: Synthetic oligonucleotide
aaugugagcaccgcgaugg

SEQ ID NO: 3266109 - RNA, 19 nt, Artificial Sequence
  Description of Artificial Sequence: Synthetic oligonucleotide
aucucaauuuccuggaagc

SEQ ID NO: 3266110 - RNA, 19 nt, Artificial Sequence
  Description of Artificial Sequence: Synthetic oligonucleotide
agaggaagagcccauaaag

SEQ ID NO: 3266111 - RNA, 19 nt, Artificial Sequence
  Description of Artificial Sequence: Synthetic oligonucleotide
uccuuaacguucacaaucg

SEQ ID NO: 3266112 - RNA, 19 nt, Artificial Sequence
  Description of Artificial Sequence: Synthetic oligonucleotide
gaguaggaaaccaagaccc

SEQ ID NO: 3266113 - RNA, 19 nt, Artificial Sequence
  Description of Artificial Sequence: Synthetic oligonucleotide
gaggguauagcccagccag

SEQ ID NO: 3266114 - RNA, 19 nt, Artificial Sequence
  Description of Artificial Sequence: Synthetic oligonucleotide
uuguaucugaacuugcuca

SEQ ID NO: 3266115 - RNA, 19 nt, Artificial Sequence
  Description of Artificial Sequence: Synthetic oligonucleotide
aaucccguauugaugaugg

SEQ ID NO: 3266116 - RNA, 19 nt, Artificial Sequence
  Description of Artificial Sequence: Synthetic oligonucleotide
aagaaaagcaaggagagua

SEQ ID NO: 3266117 - RNA, 19 nt, Artificial Sequence
  Description of Artificial Sequence: Synthetic oligonucleotide
uuuucuugaacugguagag

SEQ ID NO: 3266118 - RNA, 19 nt, Artificial Sequence
  Description of Artificial Sequence: Synthetic oligonucleotide
uaaagcacagguuugggaa

SEQ ID NO: 3266119 - RNA, 19 nt, Artificial Sequence
  Description of Artificial Sequence: Synthetic oligonucleotide
gagaguaggaaaccaagac

SEQ ID NO: 3266120 - RNA, 19 nt, Artificial Sequence
  Description of Artificial Sequence: Synthetic oligonucleotide
uauggagcuuuccaugaag

SEQ ID NO: 3266121 - RNA, 19 nt, Artificial Sequence
  Description of Artificial Sequence: Synthetic oligonucleotide
guauagcccagccagagug

SEQ ID NO: 3266122 - RNA, 19 nt, Artificial Sequence
  Description of Artificial Sequence: Synthetic oligonucleotide
acuugcucaucucaauuuc

SEQ ID NO: 3266123 - RNA, 19 nt, Artificial Sequence
  Description of Artificial Sequence: Synthetic oligonucleotide
uuagaguuucugccaaugc

SEQ ID NO: 3266124 - RNA, 19 nt, Artificial Sequence
  Description of Artificial Sequence: Synthetic oligonucleotide
uucacaaucguuucguaua

SEQ ID NO: 3266125 - RNA, 19 nt, Artificial Sequence
  Description of Artificial Sequence: Synthetic oligonucleotide
agguuugggaauccacugc

SEQ ID NO: 3266126 - RNA, 19 nt, Artificial Sequence
  Description of Artificial Sequence: Synthetic oligonucleotide
ucuauggagcuuuccauga

SEQ ID NO: 3266127 - RNA, 19 nt, Artificial Sequence
  Description of Artificial Sequence: Synthetic oligonucleotide
uccacuaaggccagugccc

SEQ ID NO: 3266128 - RNA, 19 nt, Artificial Sequence
  Description of Artificial Sequence: Synthetic oligonucleotide
gaucugugccaucucaaag

SEQ ID NO: 3266129 - RNA, 19 nt, Artificial Sequence
  Description of Artificial Sequence: Synthetic oligonucleotide
aacugguagaggguauagc

SEQ ID NO: 3266130 - RNA, 19 nt, Artificial Sequence
  Description of Artificial Sequence: Synthetic oligonucleotide
ucaauuuccuggaagccau

SEQ ID NO: 3266131 - RNA, 19 nt, Artificial Sequence
  Description of Artificial Sequence: Synthetic oligonucleotide
acugcuguagccugacccg

SEQ ID NO: 3266132 - RNA, 19 nt, Artificial Sequence
  Description of Artificial Sequence: Synthetic oligonucleotide
uaugaugucugcuccuuga

SEQ ID NO: 3266133 - RNA, 19 nt, Artificial Sequence
  Description of Artificial Sequence: Synthetic oligonucleotide
ggaucucacgcacacaugg

SEQ ID NO: 3266134 - RNA, 19 nt, Artificial Sequence
  Description of Artificial Sequence: Synthetic oligonucleotide
caaugcacaguguucauuc

SEQ ID NO: 3266135 - RNA, 19 nt, Artificial Sequence
  Description of Artificial Sequence: Synthetic oligonucleotide
ugguagaggguauagccca

SEQ ID NO: 3266136 - RNA, 19 nt, Artificial Sequence
  Description of Artificial Sequence: Synthetic oligonucleotide
aaagcaaggagaguaggaa

SEQ ID NO: 3266137 - RNA, 19 nt, Artificial Sequence
  Description of Artificial Sequence: Synthetic oligonucleotide
uuugggaauccacugcagu

SEQ ID NO: 3266138 - RNA, 19 nt, Artificial Sequence
  Description of Artificial Sequence: Synthetic oligonucleotide
aucugugccaucucaaaga

SEQ ID NO: 3266139 - RNA, 19 nt, Artificial Sequence
  Description of Artificial Sequence: Synthetic oligonucleotide
ugcacaguguucauucugu

SEQ ID NO: 3266140 - RNA, 19 nt, Artificial Sequence
  Description of Artificial Sequence: Synthetic oligonucleotide
auaggagccgaugagggag

SEQ ID NO: 3266141 - RNA, 19 nt, Artificial Sequence
  Description of Artificial Sequence: Synthetic oligonucleotide
auaugugcccauucuccac

SEQ ID NO: 3266142 - RNA, 19 nt, Artificial Sequence
  Description of Artificial Sequence: Synthetic oligonucleotide
aacuugcucaucucaauuu

SEQ ID NO: 3266143 - RNA, 19 nt, Artificial Sequence
  Description of Artificial Sequence: Synthetic oligonucleotide
aagccauaggagccgauga

SEQ ID NO: 3266144 - RNA, 19 nt, Artificial Sequence
  Description of Artificial Sequence: Synthetic oligonucleotide
acguuccuccacuaaggcc

SEQ ID NO: 3266145 - RNA, 19 nt, Artificial Sequence
  Description of Artificial Sequence: Synthetic oligonucleotide
aucucuauggagcuuucca

SEQ ID NO: 3266146 - RNA, 19 nt, Artificial Sequence
  Description of Artificial Sequence: Synthetic oligonucleotide
cuugcucaucucaauuucc

SEQ ID NO: 3266147 - RNA, 19 nt, Artificial Sequence
  Description of Artificial Sequence: Synthetic oligonucleotide
ucucacgcacacaugggug

SEQ ID NO: 3266148 - RNA, 19 nt, Artificial Sequence
  Description of Artificial Sequence: Synthetic oligonucleotide
auggagcuuuccaugaagc

SEQ ID NO: 3266149 - RNA, 19 nt, Artificial Sequence
  Description of Artificial Sequence: Synthetic oligonucleotide
aagcaaggagaguaggaaa

SEQ ID NO: 3266150 - RNA, 19 nt, Artificial Sequence
  Description of Artificial Sequence: Synthetic oligonucleotide
cugguguuagaguuucugc

SEQ ID NO: 3266151 - RNA, 19 nt, Artificial Sequence
  Description of Artificial Sequence: Synthetic oligonucleotide
caucucaauuuccuggaag

SEQ ID NO: 3266152 - RNA, 19 nt, Artificial Sequence
  Description of Artificial Sequence: Synthetic oligonucleotide
gugagcgcgauguagagga

SEQ ID NO: 3266153 - RNA, 19 nt, Artificial Sequence
  Description of Artificial Sequence: Synthetic oligonucleotide
cugguagaggguauagccc

SEQ ID NO: 3266154 - RNA, 19 nt, Artificial Sequence
  Description of Artificial Sequence: Synthetic oligonucleotide
aguaguggaucuuccuuug

SEQ ID NO: 3266155 - RNA, 19 nt, Artificial Sequence
  Description of Artificial Sequence: Synthetic oligonucleotide
ccuugauggacagagagcg

SEQ ID NO: 3266156 - RNA, 19 nt, Artificial Sequence
  Description of Artificial Sequence: Synthetic oligonucleotide
augggcagggcacagucag

SEQ ID NO: 3266157 - RNA, 19 nt, Artificial Sequence
  Description of Artificial Sequence: Synthetic oligonucleotide
aaugcacaguguucauucu

SEQ ID NO: 3266158 - RNA, 19 nt, Artificial Sequence
  Description of Artificial Sequence: Synthetic oligonucleotide
uuucuugaacugguagagg

SEQ ID NO: 3266159 - RNA, 19 nt, Artificial Sequence
  Description of Artificial Sequence: Synthetic oligonucleotide
aaagcacagguuugggaau

SEQ ID NO: 3266160 - RNA, 19 nt, Artificial Sequence
  Description of Artificial Sequence: Synthetic oligonucleotide
uggaucuuccuuuggggca

SEQ ID NO: 3266161 - RNA, 19 nt, Artificial Sequence
  Description of Artificial Sequence: Synthetic oligonucleotide
gacacuggcgcccagcgca

SEQ ID NO: 3266162 - RNA, 19 nt, Artificial Sequence
  Description of Artificial Sequence: Synthetic oligonucleotide
cucuauggagcuuuccaug

SEQ ID NO: 3266163 - RNA, 19 nt, Artificial Sequence
  Description of Artificial Sequence: Synthetic oligonucleotide
gauguaguguguggguggg

SEQ ID NO: 3266164 - RNA, 19 nt, Artificial Sequence
  Description of Artificial Sequence: Synthetic oligonucleotide
gauguagaggaagagccca

SEQ ID NO: 3266165 - RNA, 19 nt, Artificial Sequence
  Description of Artificial Sequence: Synthetic oligonucleotide
gaugagggagaaugugagc

SEQ ID NO: 3266166 - RNA, 19 nt, Artificial Sequence
  Description of Artificial Sequence: Synthetic oligonucleotide
gacaggaucucacgcacac

SEQ ID NO: 3266167 - RNA, 19 nt, Artificial Sequence
  Description of Artificial Sequence: Synthetic oligonucleotide
uggcucaaugaagaaaagc

SEQ ID NO: 3266168 - RNA, 19 nt, Artificial Sequence
  Description of Artificial Sequence: Synthetic oligonucleotide
ucucaauuuccuggaagcc

SEQ ID NO: 3266169 - RNA, 19 nt, Artificial Sequence
  Description of Artificial Sequence: Synthetic oligonucleotide
ucucuauggagcuuuccau

SEQ ID NO: 3266170 - RNA, 19 nt, Artificial Sequence
  Description of Artificial Sequence: Synthetic oligonucleotide
aagcacagguuugggaauc

SEQ ID NO: 3266171 - RNA, 19 nt, Artificial Sequence
  Description of Artificial Sequence: Synthetic oligonucleotide
cacacgugagaagagcugg

SEQ ID NO: 3266172 - RNA, 19 nt, Artificial Sequence
  Description of Artificial Sequence: Synthetic oligonucleotide
ucacaaucguuucguauau

SEQ ID NO: 3266173 - RNA, 19 nt, Artificial Sequence
  Description of Artificial Sequence: Synthetic oligonucleotide
uucguauaugugcccauuc

SEQ ID NO: 3266174 - RNA, 19 nt, Artificial Sequence
  Description of Artificial Sequence: Synthetic oligonucleotide
agaaaagcaaggagaguag

SEQ ID NO: 3266175 - RNA, 19 nt, Artificial Sequence
  Description of Artificial Sequence: Synthetic oligonucleotide
guuguaucugaacuugcuc

SEQ ID NO: 3266176 - RNA, 19 nt, Artificial Sequence
  Description of Artificial Sequence: Synthetic oligonucleotide
ugagcacugcuguagccug

SEQ ID NO: 3266177 - RNA, 19 nt, Artificial Sequence
  Description of Artificial Sequence: Synthetic oligonucleotide
cacacguuccuccacuaag

SEQ ID NO: 3266178 - RNA, 19 nt, Artificial Sequence
  Description of Artificial Sequence: Synthetic oligonucleotide
ucccguauugaugauggca

SEQ ID NO: 3266179 - RNA, 19 nt, Artificial Sequence
  Description of Artificial Sequence: Synthetic oligonucleotide
ggcucaaugaagaaaagca

SEQ ID NO: 3266180 - RNA, 19 nt, Artificial Sequence
  Description of Artificial Sequence: Synthetic oligonucleotide
uaggcagcauggauccagg

SEQ ID NO: 3266181 - RNA, 19 nt, Artificial Sequence
  Description of Artificial Sequence: Synthetic oligonucleotide
ggcacagucagacaggauc

SEQ ID NO: 3266182 - RNA, 19 nt, Artificial Sequence
  Description of Artificial Sequence: Synthetic oligonucleotide
cuuuccaugaagcuggugu

SEQ ID NO: 3266183 - RNA, 19 nt, Artificial Sequence
  Description of Artificial Sequence: Synthetic oligonucleotide
uagaggaagagcccauaaa

SEQ ID NO: 3266184 - RNA, 19 nt, Artificial Sequence
  Description of Artificial Sequence: Synthetic oligonucleotide
agugugcccagcaugauga

SEQ ID NO: 3266185 - RNA, 19 nt, Artificial Sequence
  Description of Artificial Sequence: Synthetic oligonucleotide
ucaccagccuggcucaaug

SEQ ID NO: 3266186 - RNA, 19 nt, Artificial Sequence
  Description of Artificial Sequence: Synthetic oligonucleotide
acgugagaagagcugguug

SEQ ID NO: 3266187 - RNA, 19 nt, Artificial Sequence
  Description of Artificial Sequence: Synthetic oligonucleotide
auagggacaaucccguauu

SEQ ID NO: 3266188 - RNA, 19 nt, Artificial Sequence
  Description of Artificial Sequence: Synthetic oligonucleotide
uaggggcuuuucuugaacu

SEQ ID NO: 3266189 - RNA, 19 nt, Artificial Sequence
  Description of Artificial Sequence: Synthetic oligonucleotide
agagcugguugccauccag

SEQ ID NO: 3266190 - RNA, 19 nt, Artificial Sequence
  Description of Artificial Sequence: Synthetic oligonucleotide
guuagaguuucugccaaug

SEQ ID NO: 3266191 - RNA, 19 nt, Artificial Sequence
  Description of Artificial Sequence: Synthetic oligonucleotide
agaaucugcaggccuguga

SEQ ID NO: 3266192 - RNA, 19 nt, Artificial Sequence
  Description of Artificial Sequence: Synthetic oligonucleotide
aucucacgcacacaugggu

SEQ ID NO: 3266193 - RNA, 19 nt, Artificial Sequence
  Description of Artificial Sequence: Synthetic oligonucleotide
caugcaguggggagugggg

SEQ ID NO: 3266194 - RNA, 19 nt, Artificial Sequence
  Description of Artificial Sequence: Synthetic oligonucleotide
cagguuugggaauccacug

SEQ ID NO: 3266195 - RNA, 19 nt, Artificial Sequence
  Description of Artificial Sequence: Synthetic oligonucleotide
augcacaguguucauucug

SEQ ID NO: 3266196 - RNA, 19 nt, Artificial Sequence
  Description of Artificial Sequence: Synthetic oligonucleotide
cauggauccaggguagccc

SEQ ID NO: 3266197 - RNA, 19 nt, Artificial Sequence
  Description of Artificial Sequence: Synthetic oligonucleotide
aagaggcucucgcuggggu

SEQ ID NO: 3266198 - RNA, 19 nt, Artificial Sequence
  Description of Artificial Sequence: Synthetic oligonucleotide
ggccuugauggacagagag

SEQ ID NO: 3266199 - RNA, 19 nt, Artificial Sequence
  Description of Artificial Sequence: Synthetic oligonucleotide
cuugauggacagagagcgg

SEQ ID NO: 3266200 - RNA, 19 nt, Artificial Sequence
  Description of Artificial Sequence: Synthetic oligonucleotide
ggagaaugugagcaccgcg

SEQ ID NO: 3266201 - RNA, 19 nt, Artificial Sequence
  Description of Artificial Sequence: Synthetic oligonucleotide
agacccauggugcugccga

SEQ ID NO: 3266202 - RNA, 19 nt, Artificial Sequence
  Description of Artificial Sequence: Synthetic oligonucleotide
aaagaggcucucgcugggg

SEQ ID NO: 3266203 - RNA, 19 nt, Artificial Sequence
  Description of Artificial Sequence: Synthetic oligonucleotide
agcccgaauagggacaauc

SEQ ID NO: 3266204 - RNA, 19 nt, Artificial Sequence
  Description of Artificial Sequence: Synthetic oligonucleotide
cagguaggggcuuuucuug

SEQ ID NO: 3266205 - RNA, 19 nt, Artificial Sequence
  Description of Artificial Sequence: Synthetic oligonucleotide
ugauaauugagcuugagga

SEQ ID NO: 3266206 - RNA, 19 nt, Artificial Sequence
  Description of Artificial Sequence: Synthetic oligonucleotide
acagaguucagcaagagcc

SEQ ID NO: 3266207 - RNA, 19 nt, Artificial Sequence
  Description of Artificial Sequence: Synthetic oligonucleotide
aaaacgaaacgcuccaaac

SEQ ID NO: 3266208 - RNA, 19 nt, Artificial Sequence
  Description of Artificial Sequence: Synthetic oligonucleotide
cuagacuuaaacuagcagc

SEQ ID NO: 3266209 - RNA, 19 nt, Artificial Sequence
  Description of Artificial Sequence: Synthetic oligonucleotide
auuaaauugucucuccaac

SEQ ID NO: 3266210 - RNA, 19 nt, Artificial Sequence
  Description of Artificial Sequence: Synthetic oligonucleotide
ucauaaaagacccuggggu

SEQ ID NO: 3266211 - RNA, 19 nt, Artificial Sequence
  Description of Artificial Sequence: Synthetic oligonucleotide
aacgaaacgcuccaaacag

SEQ ID NO: 3266212 - RNA, 19 nt, Artificial Sequence
  Description of Artificial Sequence: Synthetic oligonucleotide
aauggaggugaucugagag

SEQ ID NO: 3266213 - RNA, 19 nt, Artificial Sequence
  Description of Artificial Sequence: Synthetic oligonucleotide
ugaagaauccuccacagcu

SEQ ID NO: 3266214 - RNA, 19 nt, Artificial Sequence
  Description of Artificial Sequence: Synthetic oligonucleotide
uucagcgugacacugauga

SEQ ID NO: 3266215 - RNA, 19 nt, Artificial Sequence
  Description of Artificial Sequence: Synthetic oligonucleotide
uuaaauugucucuccaacg

SEQ ID NO: 3266216 - RNA, 19 nt, Artificial Sequence
  Description of Artificial Sequence: Synthetic oligonucleotide
uauguuuugagccaucuuc

SEQ ID NO: 3266217 - RNA, 19 nt, Artificial Sequence
  Description of Artificial Sequence: Synthetic oligonucleotide
uaaauugucucuccaacgc

SEQ ID NO: 3266218 - RNA, 19 nt, Artificial Sequence
  Description of Artificial Sequence: Synthetic oligonucleotide
cuaccaacuaacuagccgg

SEQ ID NO: 3266219 - RNA, 19 nt, Artificial Sequence
  Description of Artificial Sequence: Synthetic oligonucleotide
aaucugggaagucaagauc

SEQ ID NO: 3266220 - RNA, 19 nt, Artificial Sequence
  Description of Artificial Sequence: Synthetic oligonucleotide
aaacgcuccaaacagguga

SEQ ID NO: 3266221 - RNA, 19 nt, Artificial Sequence
  Description of Artificial Sequence: Synthetic oligonucleotide
uagauguucccaaaguugc

SEQ ID NO: 3266222 - RNA, 19 nt, Artificial Sequence
  Description of Artificial Sequence: Synthetic oligonucleotide
accaacaugacccugggug

SEQ ID NO: 3266223 - RNA, 19 nt, Artificial Sequence
  Description of Artificial Sequence: Synthetic oligonucleotide
aggguugaaaacgaaacgc

SEQ ID NO: 3266224 - RNA, 19 nt, Artificial Sequence
  Description of Artificial Sequence: Synthetic oligonucleotide
agguaagagaugcuggccc

SEQ ID NO: 3266225 - RNA, 19 nt, Artificial Sequence
  Description of Artificial Sequence: Synthetic oligonucleotide
aaacgaaacgcuccaaaca

SEQ ID NO: 3266226 - RNA, 19 nt, Artificial Sequence
  Description of Artificial Sequence: Synthetic oligonucleotide
uggucacuugcuuagagag

SEQ ID NO: 3266227 - RNA, 19 nt, Artificial Sequence
  Description of Artificial Sequence: Synthetic oligonucleotide
acuaugcagguauagaucu

SEQ ID NO: 3266228 - RNA, 19 nt, Artificial Sequence
  Description of Artificial Sequence: Synthetic oligonucleotide
uccuccuauguuuugagcc

SEQ ID NO: 3266229 - RNA, 19 nt, Artificial Sequence
  Description of Artificial Sequence: Synthetic oligonucleotide
aaacaggugaaggccaagc

SEQ ID NO: 3266230 - RNA, 19 nt, Artificial Sequence
  Description of Artificial Sequence: Synthetic oligonucleotide
gauaauugagcuugaggac

SEQ ID NO: 3266231 - RNA, 19 nt, Artificial Sequence
  Description of Artificial Sequence: Synthetic oligonucleotide
gaguacagaugucagguag

SEQ ID NO: 3266232 - RNA, 19 nt, Artificial Sequence
  Description of Artificial Sequence: Synthetic oligonucleotide
uugagcuugaggacuaugc

SEQ ID NO: 3266233 - RNA, 19 nt, Artificial Sequence
  Description of Artificial Sequence: Synthetic oligonucleotide
acugauuaaauugucucuc

SEQ ID NO: 3266234 - RNA, 19 nt, Artificial Sequence
  Description of Artificial Sequence: Synthetic oligonucleotide
ucaauagcauacaggagcu

SEQ ID NO: 3266235 - RNA, 19 nt, Artificial Sequence
  Description of Artificial Sequence: Synthetic oligonucleotide
aagguaagagaugcuggcc

SEQ ID NO: 3266236 - RNA, 19 nt, Artificial Sequence
  Description of Artificial Sequence: Synthetic oligonucleotide
cugauaauugagcuugagg

SEQ ID NO: 3266237 - RNA, 19 nt, Artificial Sequence
  Description of Artificial Sequence: Synthetic oligonucleotide
uuuguuuguaugguggcag

SEQ ID NO: 3266238 - RNA, 19 nt, Artificial Sequence
  Description of Artificial Sequence: Synthetic oligonucleotide
ucacugauuaaauugucuc

SEQ ID NO: 3266239 - RNA, 19 nt, Artificial Sequence
  Description of Artificial Sequence: Synthetic oligonucleotide
uauacgugaauccuccuau

SEQ ID NO: 3266240 - RNA, 19 nt, Artificial Sequence
  Description of Artificial Sequence: Synthetic oligonucleotide
uccuauacgugaauccucc

SEQ ID NO: 3266241 - RNA, 19 nt, Artificial Sequence
  Description of Artificial Sequence: Synthetic oligonucleotide
aacuuggucuggcaaucac

SEQ ID NO: 3266242 - RNA, 19 nt, Artificial Sequence
  Description of Artificial Sequence: Synthetic oligonucleotide
aauccuccuauguuuugag

SEQ ID NO: 3266243 - RNA, 19 nt, Artificial Sequence
  Description of Artificial Sequence: Synthetic oligonucleotide
aaggagucccuugaaguac

SEQ ID NO: 3266244 - RNA, 19 nt, Artificial Sequence
  Description of Artificial Sequence: Synthetic oligonucleotide
agaggauucuggaaggccc

SEQ ID NO: 3266245 - RNA, 19 nt, Artificial Sequence
  Description of Artificial Sequence: Synthetic oligonucleotide
agguauagaucuuccuugg

SEQ ID NO: 3266246 - RNA, 19 nt, Artificial Sequence
  Description of Artificial Sequence: Synthetic oligonucleotide
agaauucucgauccccaac

SEQ ID NO: 3266247 - RNA, 19 nt, Artificial Sequence
  Description of Artificial Sequence: Synthetic oligonucleotide
agcugguaccaacaugacc

SEQ ID NO: 3266248 - RNA, 19 nt, Artificial Sequence
  Description of Artificial Sequence: Synthetic oligonucleotide
guagagauaauggagguga

SEQ ID NO: 3266249 - RNA, 19 nt, Artificial Sequence
  Description of Artificial Sequence: Synthetic oligonucleotide
uguaugcuggccugcagag

SEQ ID NO: 3266250 - RNA, 19 nt, Artificial Sequence
  Description of Artificial Sequence: Synthetic oligonucleotide
auaauugagcuugaggacu

SEQ ID NO: 3266251 - RNA, 19 nt, Artificial Sequence
  Description of Artificial Sequence: Synthetic oligonucleotide
uguuuguuuguaugguggc

SEQ ID NO: 3266252 - RNA, 19 nt, Artificial Sequence
  Description of Artificial Sequence: Synthetic oligonucleotide
acuagcagccucccuaggg

SEQ ID NO: 3266253 - RNA, 19 nt, Artificial Sequence
  Description of Artificial Sequence: Synthetic oligonucleotide
cagguauagaucuuccuug

SEQ ID NO: 3266254 - RNA, 19 nt, Artificial Sequence
  Description of Artificial Sequence: Synthetic oligonucleotide
ugagcuugaggacuaugca

SEQ ID NO: 3266255 - RNA, 19 nt, Artificial Sequence
  Description of Artificial Sequence: Synthetic oligonucleotide
uguacugguaauagcugcu

SEQ ID NO: 3266256 - RNA, 19 nt, Artificial Sequence
  Description of Artificial Sequence: Synthetic oligonucleotide
cuguacugguaauagcugc

SEQ ID NO: 3266257 - RNA, 19 nt, Artificial Sequence
  Description of Artificial Sequence: Synthetic oligonucleotide
aauagcauacaggagcuuu

SEQ ID NO: 3266258 - RNA, 19 nt, Artificial Sequence
  Description of Artificial Sequence: Synthetic oligonucleotide
cauaaaagacccugggguc

SEQ ID NO: 3266259 - RNA, 19 nt, Artificial Sequence
  Description of Artificial Sequence: Synthetic oligonucleotide
guagauguucccaaaguug

SEQ ID NO: 3266260 - RNA, 19 nt, Artificial Sequence
  Description of Artificial Sequence: Synthetic oligonucleotide
gauuaaauugucucuccaa

SEQ ID NO: 3266261 - RNA, 19 nt, Artificial Sequence
  Description of Artificial Sequence: Synthetic oligonucleotide
caggguugaaaacgaaacg

SEQ ID NO: 3266262 - RNA, 19 nt, Artificial Sequence
  Description of Artificial Sequence: Synthetic oligonucleotide
cuugucugacugcagcugg

SEQ ID NO: 3266263 - RNA, 19 nt, Artificial Sequence
  Description of Artificial Sequence: Synthetic oligonucleotide
caggacaucuuccaaggag

SEQ ID NO: 3266264 - RNA, 19 nt, Artificial Sequence
  Description of Artificial Sequence: Synthetic oligonucleotide
ucuuuccugaguacagaug

SEQ ID NO: 3266265 - RNA, 19 nt, Artificial Sequence
  Description of Artificial Sequence: Synthetic oligonucleotide
uuguuuguaugguggcagg

SEQ ID NO: 3266266 - RNA, 19 nt, Artificial Sequence
  Description of Artificial Sequence: Synthetic oligonucleotide
ucugaggagauccggucca

SEQ ID NO: 3266267 - RNA, 19 nt, Artificial Sequence
  Description of Artificial Sequence: Synthetic oligonucleotide
cugcugauaauugagcuug

SEQ ID NO: 3266268 - RNA, 19 nt, Artificial Sequence
  Description of Artificial Sequence: Synthetic oligonucleotide
uucaggacggguagcagcu

SEQ ID NO: 3266269 - RNA, 19 nt, Artificial Sequence
  Description of Artificial Sequence: Synthetic oligonucleotide
ccugucacugauuaaauug

SEQ ID NO: 3266270 - RNA, 19 nt, Artificial Sequence
  Description of Artificial Sequence: Synthetic oligonucleotide
gacuuaaacuagcagccuc

SEQ ID NO: 3266271 - RNA, 19 nt, Artificial Sequence
  Description of Artificial Sequence: Synthetic oligonucleotide
uaggucuucugguucagga

SEQ ID NO: 3266272 - RNA, 19 nt, Artificial Sequence
  Description of Artificial Sequence: Synthetic oligonucleotide
cuagcagccucccuagggg

SEQ ID NO: 3266273 - RNA, 19 nt, Artificial Sequence
  Description of Artificial Sequence: Synthetic oligonucleotide
gguaauagcugcugugggg

SEQ ID NO: 3266274 - RNA, 19 nt, Artificial Sequence
  Description of Artificial Sequence: Synthetic oligonucleotide
agcaagcagguagagggcc

SEQ ID NO: 3266275 - RNA, 19 nt, Artificial Sequence
  Description of Artificial Sequence: Synthetic oligonucleotide
ugauuaugcccaauggcuu

SEQ ID NO: 3266276 - RNA, 19 nt, Artificial Sequence
  Description of Artificial Sequence: Synthetic oligonucleotide
gcuccaaguacacaugagg

SEQ ID NO: 3266277 - RNA, 19 nt, Artificial Sequence
  Description of Artificial Sequence: Synthetic oligonucleotide
gguucaguugcucugagga

SEQ ID NO: 3266278 - RNA, 19 nt, Artificial Sequence
  Description of Artificial Sequence: Synthetic oligonucleotide
gaaaacgaaacgcuccaaa

SEQ ID NO: 3266279 - RNA, 19 nt, Artificial Sequence
  Description of Artificial Sequence: Synthetic oligonucleotide
ugagagacucugcuccaag

SEQ ID NO: 3266280 - RNA, 19 nt, Artificial Sequence
  Description of Artificial Sequence: Synthetic oligonucleotide
uguagagauaauggaggug

SEQ ID NO: 3266281 - RNA, 19 nt, Artificial Sequence
  Description of Artificial Sequence: Synthetic oligonucleotide
guguccuauacgugaaucc

SEQ ID NO: 3266282 - RNA, 19 nt, Artificial Sequence
  Description of Artificial Sequence: Synthetic oligonucleotide
acuccugggacccuccuug

SEQ ID NO: 3266283 - RNA, 19 nt, Artificial Sequence
  Description of Artificial Sequence: Synthetic oligonucleotide
agcugggaaaucaucagag

SEQ ID NO: 3266284 - RNA, 19 nt, Artificial Sequence
  Description of Artificial Sequence: Synthetic oligonucleotide
aguacagaugucagguagg

SEQ ID NO: 3266285 - RNA, 19 nt, Artificial Sequence
  Description of Artificial Sequence: Synthetic oligonucleotide
gagcuugucugacugcagc

SEQ ID NO: 3266286 - RNA, 19 nt, Artificial Sequence
  Description of Artificial Sequence: Synthetic oligonucleotide
uggccauggugauucgugg

SEQ ID NO: 3266287 - RNA, 19 nt, Artificial Sequence
  Description of Artificial Sequence: Synthetic oligonucleotide
ggagcugccagaauucucg

SEQ ID NO: 3266288 - RNA, 19 nt, Artificial Sequence
  Description of Artificial Sequence: Synthetic oligonucleotide
agauccgguccauccaagg

SEQ ID NO: 3266289 - RNA, 19 nt, Artificial Sequence
  Description of Artificial Sequence: Synthetic oligonucleotide
guucaggacggguagcagc

SEQ ID NO: 3266290 - RNA, 19 nt, Artificial Sequence
  Description of Artificial Sequence: Synthetic oligonucleotide
ugcuccaaguacacaugag

SEQ ID NO: 3266291 - RNA, 19 nt, Artificial Sequence
  Description of Artificial Sequence: Synthetic oligonucleotide
guacagaugucagguaggg

SEQ ID NO: 3266292 - RNA, 19 nt, Artificial Sequence
  Description of Artificial Sequence: Synthetic oligonucleotide
guggucauguucaauagca

SEQ ID NO: 3266293 - RNA, 19 nt, Artificial Sequence
  Description of Artificial Sequence: Synthetic oligonucleotide
gagaugcuggcccagcuuc

SEQ ID NO: 3266294 - RNA, 19 nt, Artificial Sequence
  Description of Artificial Sequence: Synthetic oligonucleotide
gaauucucgauccccaacu

SEQ ID NO: 3266295 - RNA, 19 nt, Artificial Sequence
  Description of Artificial Sequence: Synthetic oligonucleotide
caaggaggacccagcaagg

SEQ ID NO: 3266296 - RNA, 19 nt, Artificial Sequence
  Description of Artificial Sequence: Synthetic oligonucleotide
agggucucggaggagcugc

SEQ ID NO: 3266297 - RNA, 19 nt, Artificial Sequence
  Description of Artificial Sequence: Synthetic oligonucleotide
ugguaccacacagaguuca

SEQ ID NO: 3266298 - RNA, 19 nt, Artificial Sequence
  Description of Artificial Sequence: Synthetic oligonucleotide
agggcuagacuuaaacuag

SEQ ID NO: 3266299 - RNA, 19 nt, Artificial Sequence
  Description of Artificial Sequence: Synthetic oligonucleotide
uaggauccucuuuguagag

SEQ ID NO: 3266300 - RNA, 19 nt, Artificial Sequence
  Description of Artificial Sequence: Synthetic oligonucleotide
auaauggaggugaucugag

SEQ ID NO: 3266301 - RNA, 19 nt, Artificial Sequence
  Description of Artificial Sequence: Synthetic oligonucleotide
acuaacuagccggagcuca

SEQ ID NO: 3266302 - RNA, 19 nt, Artificial Sequence
  Description of Artificial Sequence: Synthetic oligonucleotide
ucauggacccgcuucuggu

SEQ ID NO: 3266303 - RNA, 19 nt, Artificial Sequence
  Description of Artificial Sequence: Synthetic oligonucleotide
aacuaacuagccggagcuc

SEQ ID NO: 3266304 - RNA, 19 nt, Artificial Sequence
  Description of Artificial Sequence: Synthetic oligonucleotide
uguguccuauacgugaauc

SEQ ID NO: 3266305 - RNA, 19 nt, Artificial Sequence
  Description of Artificial Sequence: Synthetic oligonucleotide
agaucauccauuuuguagc

SEQ ID NO: 3266306 - RNA, 19 nt, Artificial Sequence
  Description of Artificial Sequence: Synthetic oligonucleotide
aaguaggugaagcuaacgc

SEQ ID NO: 3266307 - RNA, 19 nt, Artificial Sequence
  Description of Artificial Sequence: Synthetic oligonucleotide
uggcaaacagaucagagcc

SEQ ID NO: 3266308 - RNA, 19 nt, Artificial Sequence
  Description of Artificial Sequence: Synthetic oligonucleotide
aucuccuuuacucuucacc

SEQ ID NO: 3266309 - RNA, 19 nt, Artificial Sequence
  Description of Artificial Sequence: Synthetic oligonucleotide
gagaucauccauuuuguag

SEQ ID NO: 3266310 - RNA, 19 nt, Artificial Sequence
  Description of Artificial Sequence: Synthetic oligonucleotide
gucaaaagagcucaguugc

SEQ ID NO: 3266311 - RNA, 19 nt, Artificial Sequence
  Description of Artificial Sequence: Synthetic oligonucleotide
gucucuuacaccaagaggc

SEQ ID NO: 3266312 - RNA, 19 nt, Artificial Sequence
  Description of Artificial Sequence: Synthetic oligonucleotide
auggcaaacagaucagagc

SEQ ID NO: 3266313 - RNA, 19 nt, Artificial Sequence
  Description of Artificial Sequence: Synthetic oligonucleotide
agcauugucucuuacacca

SEQ ID NO: 3266314 - RNA, 19 nt, Artificial Sequence
  Description of Artificial Sequence: Synthetic oligonucleotide
aaagagcucaguugcuugg

SEQ ID NO: 3266315 - RNA, 19 nt, Artificial Sequence
  Description of Artificial Sequence: Synthetic oligonucleotide
ugucucuuacaccaagagg

SEQ ID NO: 3266316 - RNA, 19 nt, Artificial Sequence
  Description of Artificial Sequence: Synthetic oligonucleotide
uccauuuuguagcccagcg

SEQ ID NO: 3266317 - RNA, 19 nt, Artificial Sequence
  Description of Artificial Sequence: Synthetic oligonucleotide
aaacagaucagagcccagc

SEQ ID NO: 3266318 - RNA, 19 nt, Artificial Sequence
  Description of Artificial Sequence: Synthetic oligonucleotide
aaaagagcucaguugcuug

SEQ ID NO: 3266319 - RNA, 19 nt, Artificial Sequence
  Description of Artificial Sequence: Synthetic oligonucleotide
acagcaaaguaggugaagc

SEQ ID NO: 3266320 - RNA, 19 nt, Artificial Sequence
  Description of Artificial Sequence: Synthetic oligonucleotide
gauguaggaagucaggaga

SEQ ID NO: 3266321 - RNA, 19 nt, Artificial Sequence
  Description of Artificial Sequence: Synthetic oligonucleotide
uuguucauggcugugagca

SEQ ID NO: 3266322 - RNA, 19 nt, Artificial Sequence
  Description of Artificial Sequence: Synthetic oligonucleotide
uaugaccagggccugagcc

SEQ ID NO: 3266323 - RNA, 19 nt, Artificial Sequence
  Description of Artificial Sequence: Synthetic oligonucleotide
ucuccuuuacucuucaccu

SEQ ID NO: 3266324 - RNA, 19 nt, Artificial Sequence
  Description of Artificial Sequence: Synthetic oligonucleotide
agucaaaagagcucaguug

SEQ ID NO: 3266325 - RNA, 19 nt, Artificial Sequence
  Description of Artificial Sequence: Synthetic oligonucleotide
agaaagucaaaagagcuca

SEQ ID NO: 3266326 - RNA, 19 nt, Artificial Sequence
  Description of Artificial Sequence: Synthetic oligonucleotide
uuuacucuucaccugccgc

SEQ ID NO: 3266327 - RNA, 19 nt, Artificial Sequence
  Description of Artificial Sequence: Synthetic oligonucleotide
ugauguaggaagucaggag

SEQ ID NO: 3266328 - RNA, 19 nt, Artificial Sequence
  Description of Artificial Sequence: Synthetic oligonucleotide
uugucucuuacaccaagag

SEQ ID NO: 3266329 - RNA, 19 nt, Artificial Sequence
  Description of Artificial Sequence: Synthetic oligonucleotide
aaaguaggugaagcuaacg

SEQ ID NO: 3266330 - RNA, 19 nt, Artificial Sequence
  Description of Artificial Sequence: Synthetic oligonucleotide
uccuuuacucuucaccugc

SEQ ID NO: 3266331 - RNA, 19 nt, Artificial Sequence
  Description of Artificial Sequence: Synthetic oligonucleotide
caggagaucauccauuuug

SEQ ID NO: 3266332 - RNA, 19 nt, Artificial Sequence
  Description of Artificial Sequence: Synthetic oligonucleotide
aguaggugaagcuaacgca

SEQ ID NO: 3266333 - RNA, 19 nt, Artificial Sequence
  Description of Artificial Sequence: Synthetic oligonucleotide
aagucaaaagagcucaguu

SEQ ID NO: 3266334 - RNA, 19 nt, Artificial Sequence
  Description of Artificial Sequence: Synthetic oligonucleotide
gauggugauguggaaauag

SEQ ID NO: 3266335 - RNA, 19 nt, Artificial Sequence
  Description of Artificial Sequence: Synthetic oligonucleotide
ugccuauaugaccagggcc

SEQ ID NO: 3266336 - RNA, 19 nt, Artificial Sequence
  Description of Artificial Sequence: Synthetic oligonucleotide
ucauccauuuuguagccca

SEQ ID NO: 3266337 - RNA, 19 nt, Artificial Sequence
  Description of Artificial Sequence: Synthetic oligonucleotide
ugagcuggucucaaucagg

SEQ ID NO: 3266338 - RNA, 19 nt, Artificial Sequence
  Description of Artificial Sequence: Synthetic oligonucleotide
gaggccacagcaaaguagg

SEQ ID NO: 3266339 - RNA, 19 nt, Artificial Sequence
  Description of Artificial Sequence: Synthetic oligonucleotide
agcgaugucucgcagagca

SEQ ID NO: 3266340 - RNA, 19 nt, Artificial Sequence
  Description of Artificial Sequence: Synthetic oligonucleotide
ggaaguucugacuccaugg

SEQ ID NO: 3266341 - RNA, 19 nt, Artificial Sequence
  Description of Artificial Sequence: Synthetic oligonucleotide
aacagaucagagcccagca

SEQ ID NO: 3266342 - RNA, 19 nt, Artificial Sequence
  Description of Artificial Sequence: Synthetic oligonucleotide
uaacgcaggcaccagaggu

SEQ ID NO: 3266343 - RNA, 19 nt, Artificial Sequence
  Description of Artificial Sequence: Synthetic oligonucleotide
auggcugugagcaucuggc

SEQ ID NO: 3266344 - RNA, 19 nt, Artificial Sequence
  Description of Artificial Sequence: Synthetic oligonucleotide
cauggcaaacagaucagag

SEQ ID NO: 3266345 - RNA, 19 nt, Artificial Sequence
  Description of Artificial Sequence: Synthetic oligonucleotide
cuggucucaaucaggagag

SEQ ID NO: 3266346 - RNA, 19 nt, Artificial Sequence
  Description of Artificial Sequence: Synthetic oligonucleotide
gaaguucugacuccauggc

SEQ ID NO: 3266347 - RNA, 19 nt, Artificial Sequence
  Description of Artificial Sequence: Synthetic oligonucleotide
ucaggagagguguccaggg

SEQ ID NO: 3266348 - RNA, 19 nt, Artificial Sequence
  Description of Artificial Sequence: Synthetic oligonucleotide
ucgcagagcagcuugcucc

SEQ ID NO: 3266349 - RNA, 19 nt, Artificial Sequence
  Description of Artificial Sequence: Synthetic oligonucleotide
ugcagggaaguucugacuc

SEQ ID NO: 3266350 - RNA, 19 nt, Artificial Sequence
  Description of Artificial Sequence: Synthetic oligonucleotide
acagaaagucaaaagagcu

SEQ ID NO: 3266351 - RNA, 19 nt, Artificial Sequence
  Description of Artificial Sequence: Synthetic oligonucleotide
ucuuacaccaagaggccac

SEQ ID NO: 3266352 - RNA, 19 nt, Artificial Sequence
  Description of Artificial Sequence: Synthetic oligonucleotide
acaccaagaggccacagca

SEQ ID NO: 3266353 - RNA, 19 nt, Artificial Sequence
  Description of Artificial Sequence: Synthetic oligonucleotide
agauguggucagucaagcc

SEQ ID NO: 3266354 - RNA, 19 nt, Artificial Sequence
  Description of Artificial Sequence: Synthetic oligonucleotide
aucagagcccagcagaugu

SEQ ID NO: 3266355 - RNA, 19 nt, Artificial Sequence
  Description of Artificial Sequence: Synthetic oligonucleotide
cucuguuuguucauggcug

SEQ ID NO: 3266356 - RNA, 19 nt, Artificial Sequence
  Description of Artificial Sequence: Synthetic oligonucleotide
uguccagggagcauugucu

SEQ ID NO: 3266357 - RNA, 19 nt, Artificial Sequence
  Description of Artificial Sequence: Synthetic oligonucleotide
uuuuguagcccagcgaugu

SEQ ID NO: 3266358 - RNA, 19 nt, Artificial Sequence
  Description of Artificial Sequence: Synthetic oligonucleotide
cuccauggcaaacagauca

SEQ ID NO: 3266359 - RNA, 19 nt, Artificial Sequence
  Description of Artificial Sequence: Synthetic oligonucleotide
uaggugaagcuaacgcagg

SEQ ID NO: 3266360 - RNA, 19 nt, Artificial Sequence
  Description of Artificial Sequence: Synthetic oligonucleotide
aucuggcugauguaggaag

SEQ ID NO: 3266361 - RNA, 19 nt, Artificial Sequence
  Description of Artificial Sequence: Synthetic oligonucleotide
guaggugaagcuaacgcag

SEQ ID NO: 3266362 - RNA, 19 nt, Artificial Sequence
  Description of Artificial Sequence: Synthetic oligonucleotide
ucucuuacaccaagaggcc

SEQ ID NO: 3266363 - RNA, 19 nt, Artificial Sequence
  Description of Artificial Sequence: Synthetic oligonucleotide
aggugaagcuaacgcaggc

SEQ ID NO: 3266364 - RNA, 19 nt, Artificial Sequence
  Description of Artificial Sequence: Synthetic oligonucleotide
uggugauguggaaauaggu

SEQ ID NO: 3266365 - RNA, 19 nt, Artificial Sequence
  Description of Artificial Sequence: Synthetic oligonucleotide
aaguucugacuccauggca

SEQ ID NO: 3266366 - RNA, 19 nt, Artificial Sequence
  Description of Artificial Sequence: Synthetic oligonucleotide
ucucaaucaggagaggugu

SEQ ID NO: 3266367 - RNA, 19 nt, Artificial Sequence
  Description of Artificial Sequence: Synthetic oligonucleotide
uuccucuguuuguucaugg

SEQ ID NO: 3266368 - RNA, 19 nt, Artificial Sequence
  Description of Artificial Sequence: Synthetic oligonucleotide
gaucauccauuuuguagcc

SEQ ID NO: 3266369 - RNA, 19 nt, Artificial Sequence
  Description of Artificial Sequence: Synthetic oligonucleotide
aaucaggagagguguccag

SEQ ID NO: 3266370 - RNA, 19 nt, Artificial Sequence
  Description of Artificial Sequence: Synthetic oligonucleotide
guuuguucauggcugugag

SEQ ID NO: 3266371 - RNA, 19 nt, Artificial Sequence
  Description of Artificial Sequence: Synthetic oligonucleotide
aaagucaaaagagcucagu

SEQ ID NO: 3266372 - RNA, 19 nt, Artificial Sequence
  Description of Artificial Sequence: Synthetic oligonucleotide
ugucucgcagagcagcuug

SEQ ID NO: 3266373 - RNA, 19 nt, Artificial Sequence
  Description of Artificial Sequence: Synthetic oligonucleotide
aggagagguguccagggag

SEQ ID NO: 3266374 - RNA, 19 nt, Artificial Sequence
  Description of Artificial Sequence: Synthetic oligonucleotide
gauguggucagucaagccu

SEQ ID NO: 3266375 - RNA, 19 nt, Artificial Sequence
  Description of Artificial Sequence: Synthetic oligonucleotide
uuacucuucaccugccgcu

SEQ ID NO: 3266376 - RNA, 19 nt, Artificial Sequence
  Description of Artificial Sequence: Synthetic oligonucleotide
uauaugaccagggccugag

SEQ ID NO: 3266377 - RNA, 19 nt, Artificial Sequence
  Description of Artificial Sequence: Synthetic oligonucleotide
uccauggcaaacagaucag

SEQ ID NO: 3266378 - RNA, 19 nt, Artificial Sequence
  Description of Artificial Sequence: Synthetic oligonucleotide
uucccgauggugaugugga

SEQ ID NO: 3266379 - RNA, 19 nt, Artificial Sequence
  Description of Artificial Sequence: Synthetic oligonucleotide
aagucaggagaucauccau

SEQ ID NO: 3266380 - RNA, 19 nt, Artificial Sequence
  Description of Artificial Sequence: Synthetic oligonucleotide
ucaaucaggagaggugucc

SEQ ID NO: 3266381 - RNA, 19 nt, Artificial Sequence
  Description of Artificial Sequence: Synthetic oligonucleotide
uacaccaagaggccacagc

SEQ ID NO: 3266382 - RNA, 19 nt, Artificial Sequence
  Description of Artificial Sequence: Synthetic oligonucleotide
ugaagcuaacgcaggcacc

SEQ ID NO: 3266383 - RNA, 19 nt, Artificial Sequence
  Description of Artificial Sequence: Synthetic oligonucleotide
cagaaagucaaaagagcuc

SEQ ID NO: 3266384 - RNA, 19 nt, Artificial Sequence
  Description of Artificial Sequence: Synthetic oligonucleotide
ggagcauugucucuuacac

SEQ ID NO: 3266385 - RNA, 19 nt, Artificial Sequence
  Description of Artificial Sequence: Synthetic oligonucleotide
ucagucaagccucccugcc

SEQ ID NO: 3266386 - RNA, 19 nt, Artificial Sequence
  Description of Artificial Sequence: Synthetic oligonucleotide
ucaaaagagcucaguugcu

SEQ ID NO: 3266387 - RNA, 19 nt, Artificial Sequence
  Description of Artificial Sequence: Synthetic oligonucleotide
agcucaguugcuuggugag

SEQ ID NO: 3266388 - RNA, 19 nt, Artificial Sequence
  Description of Artificial Sequence: Synthetic oligonucleotide
gaagucaggagaucaucca

SEQ ID NO: 3266389 - RNA, 19 nt, Artificial Sequence
  Description of Artificial Sequence: Synthetic oligonucleotide
gugaagcuaacgcaggcac

SEQ ID NO: 3266390 - RNA, 19 nt, Artificial Sequence
  Description of Artificial Sequence: Synthetic oligonucleotide
ucaccugccgcuccuggag

SEQ ID NO: 3266391 - RNA, 19 nt, Artificial Sequence
  Description of Artificial Sequence: Synthetic oligonucleotide
ucugacuccauggcaaaca

SEQ ID NO: 3266392 - RNA, 19 nt, Artificial Sequence
  Description of Artificial Sequence: Synthetic oligonucleotide
uguuuguucauggcuguga

SEQ ID NO: 3266393 - RNA, 19 nt, Artificial Sequence
  Description of Artificial Sequence: Synthetic oligonucleotide
ucuggcugauguaggaagu

SEQ ID NO: 3266394 - RNA, 19 nt, Artificial Sequence
  Description of Artificial Sequence: Synthetic oligonucleotide
cuuuacucuucaccugccg

SEQ ID NO: 3266395 - RNA, 19 nt, Artificial Sequence
  Description of Artificial Sequence: Synthetic oligonucleotide
ucuguuuguucauggcugu

SEQ ID NO: 3266396 - RNA, 19 nt, Artificial Sequence
  Description of Artificial Sequence: Synthetic oligonucleotide
cauugucucuuacaccaag

SEQ ID NO: 3266397 - RNA, 19 nt, Artificial Sequence
  Description of Artificial Sequence: Synthetic oligonucleotide
acagaucagagcccagcag

SEQ ID NO: 3266398 - RNA, 19 nt, Artificial Sequence
  Description of Artificial Sequence: Synthetic oligonucleotide
uuuguucauggcugugagc

SEQ ID NO: 3266399 - RNA, 19 nt, Artificial Sequence
  Description of Artificial Sequence: Synthetic oligonucleotide
auucccgauggugaugugg

SEQ ID NO: 3266400 - RNA, 19 nt, Artificial Sequence
  Description of Artificial Sequence: Synthetic oligonucleotide
gaagcuaacgcaggcacca

SEQ ID NO: 3266401 - RNA, 19 nt, Artificial Sequence
  Description of Artificial Sequence: Synthetic oligonucleotide
gagcaucuggcugauguag

SEQ ID NO: 3266402 - RNA, 19 nt, Artificial Sequence
  Description of Artificial Sequence: Synthetic oligonucleotide
gagcauugucucuuacacc

SEQ ID NO: 3266403 - RNA, 19 nt, Artificial Sequence
  Description of Artificial Sequence: Synthetic oligonucleotide
uucauggcugugagcaucu

SEQ ID NO: 3266404 - RNA, 19 nt, Artificial Sequence
  Description of Artificial Sequence: Synthetic oligonucleotide
cauggcugugagcaucugg

SEQ ID NO: 3266405 - RNA, 19 nt, Artificial Sequence
  Description of Artificial Sequence: Synthetic oligonucleotide
aaaugaauaacauccacgg

SEQ ID NO: 3266406 - RNA, 19 nt, Artificial Sequence
  Description of Artificial Sequence: Synthetic oligonucleotide
aucacauaaagccagaagg

SEQ ID NO: 3266407 - RNA, 19 nt, Artificial Sequence
  Description of Artificial Sequence: Synthetic oligonucleotide
caggaaaugaauaacaucc

SEQ ID NO: 3266408 - RNA, 19 nt, Artificial Sequence
  Description of Artificial Sequence: Synthetic oligonucleotide
ugugguaaggauaaugugg

SEQ ID NO: 3266409 - RNA, 19 nt, Artificial Sequence
  Description of Artificial Sequence: Synthetic oligonucleotide
gugguuaucacauaaagcc

SEQ ID NO: 3266410 - RNA, 19 nt, Artificial Sequence
  Description of Artificial Sequence: Synthetic oligonucleotide
aaugggcauauccacaggc

SEQ ID NO: 3266411 - RNA, 19 nt, Artificial Sequence
  Description of Artificial Sequence: Synthetic oligonucleotide
aaauacaugaggaaugaac

SEQ ID NO: 3266412 - RNA, 19 nt, Artificial Sequence
  Description of Artificial Sequence: Synthetic oligonucleotide
ggaaugaacacauaugugg

SEQ ID NO: 3266413 - RNA, 19 nt, Artificial Sequence
  Description of Artificial Sequence: Synthetic oligonucleotide
gaagacaucaccugucugg

SEQ ID NO: 3266414 - RNA, 19 nt, Artificial Sequence
  Description of Artificial Sequence: Synthetic oligonucleotide
ucacauaaagccagaaggg

SEQ ID NO: 3266415 - RNA, 19 nt, Artificial Sequence
  Description of Artificial Sequence: Synthetic oligonucleotide
gaaaugaauaacauccacg

SEQ ID NO: 3266416 - RNA, 19 nt, Artificial Sequence
  Description of Artificial Sequence: Synthetic oligonucleotide
augaauaacauccacggga

SEQ ID NO: 3266417 - RNA, 19 nt, Artificial Sequence
  Description of Artificial Sequence: Synthetic oligonucleotide
uuuccaaaugggcauaucc

SEQ ID NO: 3266418 - RNA, 19 nt, Artificial Sequence
  Description of Artificial Sequence: Synthetic oligonucleotide
aauacaugaggaaugaaca

SEQ ID NO: 3266419 - RNA, 19 nt, Artificial Sequence
  Description of Artificial Sequence: Synthetic oligonucleotide
ugaauaacauccacgggag

SEQ ID NO: 3266420 - RNA, 19 nt, Artificial Sequence
  Description of Artificial Sequence: Synthetic oligonucleotide
aaugaauaacauccacggg

SEQ ID NO: 3266421 - RNA, 19 nt, Artificial Sequence
  Description of Artificial Sequence: Synthetic oligonucleotide
uguuuugaagacaucaccu

SEQ ID NO: 3266422 - RNA, 19 nt, Artificial Sequence
  Description of Artificial Sequence: Synthetic oligonucleotide
uaugugguaaggauaaugu

SEQ ID NO: 3266423 - RNA, 19 nt, Artificial Sequence
  Description of Artificial Sequence: Synthetic oligonucleotide
aauuccgucucggauaugg

SEQ ID NO: 3266424 - RNA, 19 nt, Artificial Sequence
  Description of Artificial Sequence: Synthetic oligonucleotide
auauccacaggccaugacg

SEQ ID NO: 3266425 - RNA, 19 nt, Artificial Sequence
  Description of Artificial Sequence: Synthetic oligonucleotide
ugugguuaucacauaaagc

SEQ ID NO: 3266426 - RNA, 19 nt, Artificial Sequence
  Description of Artificial Sequence: Synthetic oligonucleotide
ugaggaaugaacacauaug

SEQ ID NO: 3266427 - RNA, 19 nt, Artificial Sequence
  Description of Artificial Sequence: Synthetic oligonucleotide
aauaacauccacgggagga

SEQ ID NO: 3266428 - RNA, 19 nt, Artificial Sequence
  Description of Artificial Sequence: Synthetic oligonucleotide
uaucacauaaagccagaag

SEQ ID NO: 3266429 - RNA, 19 nt, Artificial Sequence
  Description of Artificial Sequence: Synthetic oligonucleotide
auacaugaggaaugaacac

SEQ ID NO: 3266430 - RNA, 19 nt, Artificial Sequence
  Description of Artificial Sequence: Synthetic oligonucleotide
guuaaauacaugaggaaug

SEQ ID NO: 3266431 - RNA, 19 nt, Artificial Sequence
  Description of Artificial Sequence: Synthetic oligonucleotide
uuuugaagacaucaccugu

SEQ ID NO: 3266432 - RNA, 19 nt, Artificial Sequence
  Description of Artificial Sequence: Synthetic oligonucleotide
gacaucaccugucuggucc

SEQ ID NO: 3266433 - RNA, 19 nt, Artificial Sequence
  Description of Artificial Sequence: Synthetic oligonucleotide
aucucagacaucaaugcgc

SEQ ID NO: 3266434 - RNA, 19 nt, Artificial Sequence
  Description of Artificial Sequence: Synthetic oligonucleotide
uguuaaauacaugaggaau

SEQ ID NO: 3266435 - RNA, 19 nt, Artificial Sequence
  Description of Artificial Sequence: Synthetic oligonucleotide
aggauaaugugguuaucac

SEQ ID NO: 3266436 - RNA, 19 nt, Artificial Sequence
  Description of Artificial Sequence: Synthetic oligonucleotide
augugguuaucacauaaag

SEQ ID NO: 3266437 - RNA, 19 nt, Artificial Sequence
  Description of Artificial Sequence: Synthetic oligonucleotide
uuaaauacaugaggaauga

SEQ ID NO: 3266438 - RNA, 19 nt, Artificial Sequence
  Description of Artificial Sequence: Synthetic oligonucleotide
uaaugugguuaucacauaa

SEQ ID NO: 3266439 - RNA, 19 nt, Artificial Sequence
  Description of Artificial Sequence: Synthetic oligonucleotide
aaggauaaugugguuauca

SEQ ID NO: 3266440 - RNA, 19 nt, Artificial Sequence
  Description of Artificial Sequence: Synthetic oligonucleotide
aaagccagaagggcaaagg

SEQ ID NO: 3266441 - RNA, 19 nt, Artificial Sequence
  Description of Artificial Sequence: Synthetic oligonucleotide
caggccaugacgaauuccg

SEQ ID NO: 3266442 - RNA, 19 nt, Artificial Sequence
  Description of Artificial Sequence: Synthetic oligonucleotide
uuccaaaugggcauaucca

SEQ ID NO: 3266443 - RNA, 19 nt, Artificial Sequence
  Description of Artificial Sequence: Synthetic oligonucleotide
uccgucucggauauggugc

SEQ ID NO: 3266444 - RNA, 19 nt, Artificial Sequence
  Description of Artificial Sequence: Synthetic oligonucleotide
uauccacaggccaugacga

SEQ ID NO: 3266445 - RNA, 19 nt, Artificial Sequence
  Description of Artificial Sequence: Synthetic oligonucleotide
gacaucaaugcgcaucucc

SEQ ID NO: 3266446 - RNA, 19 nt, Artificial Sequence
  Description of Artificial Sequence: Synthetic oligonucleotide
caaaugggcauauccacag

SEQ ID NO: 3266447 - RNA, 19 nt, Artificial Sequence
  Description of Artificial Sequence: Synthetic oligonucleotide
ucggauauggugcgaagcc

SEQ ID NO: 3266448 - RNA, 19 nt, Artificial Sequence
  Description of Artificial Sequence: Synthetic oligonucleotide
ucucagacaucaaugcgca

SEQ ID NO: 3266449 - RNA, 19 nt, Artificial Sequence
  Description of Artificial Sequence: Synthetic oligonucleotide
uuugaagacaucaccuguc

SEQ ID NO: 3266450 - RNA, 19 nt, Artificial Sequence
  Description of Artificial Sequence: Synthetic oligonucleotide
cuguuuugaagacaucacc

SEQ ID NO: 3266451 - RNA, 19 nt, Artificial Sequence
  Description of Artificial Sequence: Synthetic oligonucleotide
uccuguuuugaagacauca

SEQ ID NO: 3266452 - RNA, 19 nt, Artificial Sequence
  Description of Artificial Sequence: Synthetic oligonucleotide
ugguuaucacauaaagcca

SEQ ID NO: 3266453 - RNA, 19 nt, Artificial Sequence
  Description of Artificial Sequence: Synthetic oligonucleotide
gucccuguuaaauacauga

SEQ ID NO: 3266454 - RNA, 19 nt, Artificial Sequence
  Description of Artificial Sequence: Synthetic oligonucleotide
augaggaaugaacacauau

SEQ ID NO: 3266455 - RNA, 19 nt, Artificial Sequence
  Description of Artificial Sequence: Synthetic oligonucleotide
ucuggucccuguuaaauac

SEQ ID NO: 3266456 - RNA, 19 nt, Artificial Sequence
  Description of Artificial Sequence: Synthetic oligonucleotide
gaggaaugaacacauaugu

SEQ ID NO: 3266457 - RNA, 19 nt, Artificial Sequence
  Description of Artificial Sequence: Synthetic oligonucleotide
uauggugcgaagcccagga

SEQ ID NO: 3266458 - RNA, 19 nt, Artificial Sequence
  Description of Artificial Sequence: Synthetic oligonucleotide
guuuugaagacaucaccug

SEQ ID NO: 3266459 - RNA, 19 nt, Artificial Sequence
  Description of Artificial Sequence: Synthetic oligonucleotide
uccaaaugggcauauccac

SEQ ID NO: 3266460 - RNA, 19 nt, Artificial Sequence
  Description of Artificial Sequence: Synthetic oligonucleotide
aaaugggcauauccacagg

SEQ ID NO: 3266461 - RNA, 19 nt, Artificial Sequence
  Description of Artificial Sequence: Synthetic oligonucleotide
uacaugaggaaugaacaca

SEQ ID NO: 3266462 - RNA, 19 nt, Artificial Sequence
  Description of Artificial Sequence: Synthetic oligonucleotide
ucuccuguuuugaagacau

SEQ ID NO: 3266463 - RNA, 19 nt, Artificial Sequence
  Description of Artificial Sequence: Synthetic oligonucleotide
aacacauaugugguaagga

SEQ ID NO: 3266464 - RNA, 19 nt, Artificial Sequence
  Description of Artificial Sequence: Synthetic oligonucleotide
gaacacauaugugguaagg

SEQ ID NO: 3266465 - RNA, 19 nt, Artificial Sequence
  Description of Artificial Sequence: Synthetic oligonucleotide
ucccuguuaaauacaugag

SEQ ID NO: 3266466 - RNA, 19 nt, Artificial Sequence
  Description of Artificial Sequence: Synthetic oligonucleotide
gauaaugugguuaucacau

SEQ ID NO: 3266467 - RNA, 19 nt, Artificial Sequence
  Description of Artificial Sequence: Synthetic oligonucleotide
aagccagaagggcaaagga

SEQ ID NO: 3266468 - RNA, 19 nt, Artificial Sequence
  Description of Artificial Sequence: Synthetic oligonucleotide
uugaagacaucaccugucu

SEQ ID NO: 3266469 - RNA, 19 nt, Artificial Sequence
  Description of Artificial Sequence: Synthetic oligonucleotide
agcaccaugugucucugag

SEQ ID NO: 3266470 - RNA, 19 nt, Artificial Sequence
  Description of Artificial Sequence: Synthetic oligonucleotide
auaugugguaaggauaaug

SEQ ID NO: 3266471 - RNA, 19 nt, Artificial Sequence
  Description of Artificial Sequence: Synthetic oligonucleotide
aaugaacacauauguggua

SEQ ID NO: 3266472 - RNA, 19 nt, Artificial Sequence
  Description of Artificial Sequence: Synthetic oligonucleotide
agaagggcaaaggagaagu

SEQ ID NO: 3266473 - RNA, 19 nt, Artificial Sequence
  Description of Artificial Sequence: Synthetic oligonucleotide
aagcccaggaaaugaauaa

SEQ ID NO: 3266474 - RNA, 19 nt, Artificial Sequence
  Description of Artificial Sequence: Synthetic oligonucleotide
ugaacacauaugugguaag

SEQ ID NO: 3266475 - RNA, 19 nt, Artificial Sequence
  Description of Artificial Sequence: Synthetic oligonucleotide
ugggcauauccacaggcca

SEQ ID NO: 3266476 - RNA, 19 nt, Artificial Sequence
  Description of Artificial Sequence: Synthetic oligonucleotide
ucagacaucaaugcgcauc

SEQ ID NO: 3266477 - RNA, 19 nt, Artificial Sequence
  Description of Artificial Sequence: Synthetic oligonucleotide
acacauaugugguaaggau

SEQ ID NO: 3266478 - RNA, 19 nt, Artificial Sequence
  Description of Artificial Sequence: Synthetic oligonucleotide
aacauccacgggaggaagc

SEQ ID NO: 3266479 - RNA, 19 nt, Artificial Sequence
  Description of Artificial Sequence: Synthetic oligonucleotide
cacauaaagccagaagggc

SEQ ID NO: 3266480 - RNA, 19 nt, Artificial Sequence
  Description of Artificial Sequence: Synthetic oligonucleotide
augugguaaggauaaugug

SEQ ID NO: 3266481 - RNA, 19 nt, Artificial Sequence
  Description of Artificial Sequence: Synthetic oligonucleotide
aucaaugcgcaucuccugu

SEQ ID NO: 3266482 - RNA, 19 nt, Artificial Sequence
  Description of Artificial Sequence: Synthetic oligonucleotide
gaauaacauccacgggagg

SEQ ID NO: 3266483 - RNA, 19 nt, Artificial Sequence
  Description of Artificial Sequence: Synthetic oligonucleotide
gguuaucacauaaagccag

SEQ ID NO: 3266484 - RNA, 19 nt, Artificial Sequence
  Description of Artificial Sequence: Synthetic oligonucleotide
ugaagacaucaccugucug

SEQ ID NO: 3266485 - RNA, 19 nt, Artificial Sequence
  Description of Artificial Sequence: Synthetic oligonucleotide
acaucaccugucugguccc

SEQ ID NO: 3266486 - RNA, 19 nt, Artificial Sequence
  Description of Artificial Sequence: Synthetic oligonucleotide
acauaugugguaaggauaa

SEQ ID NO: 3266487 - RNA, 19 nt, Artificial Sequence
  Description of Artificial Sequence: Synthetic oligonucleotide
ccuguuaaauacaugagga

SEQ ID NO: 3266488 - RNA, 19 nt, Artificial Sequence
  Description of Artificial Sequence: Synthetic oligonucleotide
ggaaaugaauaacauccac

SEQ ID NO: 3266489 - RNA, 19 nt, Artificial Sequence
  Description of Artificial Sequence: Synthetic oligonucleotide
aagacaucaccugucuggu

SEQ ID NO: 3266490 - RNA, 19 nt, Artificial Sequence
  Description of Artificial Sequence: Synthetic oligonucleotide
acauaaagccagaagggca

SEQ ID NO: 3266491 - RNA, 19 nt, Artificial Sequence
  Description of Artificial Sequence: Synthetic oligonucleotide
uuccgucucggauauggug

SEQ ID NO: 3266492 - RNA, 19 nt, Artificial Sequence
  Description of Artificial Sequence: Synthetic oligonucleotide
augggcauauccacaggcc

SEQ ID NO: 3266493 - RNA, 19 nt, Artificial Sequence
  Description of Artificial Sequence: Synthetic oligonucleotide
cccuguuaaauacaugagg

SEQ ID NO: 3266494 - RNA, 19 nt, Artificial Sequence
  Description of Artificial Sequence: Synthetic oligonucleotide
uggugcgaagcccaggaaa

SEQ ID NO: 3266495 - RNA, 19 nt, Artificial Sequence
  Description of Artificial Sequence: Synthetic oligonucleotide
augaacacauaugugguaa

SEQ ID NO: 3266496 - RNA, 19 nt, Artificial Sequence
  Description of Artificial Sequence: Synthetic oligonucleotide
cauaaagccagaagggcaa

SEQ ID NO: 3266497 - RNA, 19 nt, Artificial Sequence
  Description of Artificial Sequence: Synthetic oligonucleotide
aaugugguuaucacauaaa

SEQ ID NO: 3266498 - RNA, 19 nt, Artificial Sequence
  Description of Artificial Sequence: Synthetic oligonucleotide
agcccaggaaaugaauaac

SEQ ID NO: 3266499 - RNA, 19 nt, Artificial Sequence
  Description of Artificial Sequence: Synthetic oligonucleotide
auccacgggaggaagcacc

SEQ ID NO: 3266500 - RNA, 19 nt, Artificial Sequence
  Description of Artificial Sequence: Synthetic oligonucleotide
acgaauuccgucucggaua

SEQ ID NO: 3266501 - RNA, 19 nt, Artificial Sequence
  Description of Artificial Sequence: Synthetic oligonucleotide
caugacgaauuccgucucg

SEQ ID NO: 3266502 - RNA, 19 nt, Artificial Sequence
  Description of Artificial Sequence: Synthetic oligonucleotide
augacgaauuccgucucgg

SEQ ID NO: 3266503 - RNA, 19 nt, Artificial Sequence
  Description of Artificial Sequence: Synthetic oligonucleotide
ugcgaagcccaggaaauga

SEQ ID NO: 3266504 - RNA, 19 nt, Artificial Sequence
  Description of Artificial Sequence: Synthetic oligonucleotide
gaaugaacacauauguggu

SEQ ID NO: 3266505 - RNA, 19 nt, Artificial Sequence
  Description of Artificial Sequence: Synthetic oligonucleotide
uaauaaagcaguaauauca

SEQ ID NO: 3266506 - RNA, 19 nt, Artificial Sequence
  Description of Artificial Sequence: Synthetic oligonucleotide
aaaagacuaacacaucacc

SEQ ID NO: 3266507 - RNA, 19 nt, Artificial Sequence
  Description of Artificial Sequence: Synthetic oligonucleotide
aauuaugcaugcaaaaucc

SEQ ID NO: 3266508 - RNA, 19 nt, Artificial Sequence
  Description of Artificial Sequence: Synthetic oligonucleotide
agaaugaaaagacuaacac

SEQ ID NO: 3266509 - RNA, 19 nt, Artificial Sequence
  Description of Artificial Sequence: Synthetic oligonucleotide
cuuaucaugaauugaaucc

SEQ ID NO: 3266510 - RNA, 19 nt, Artificial Sequence
  Description of Artificial Sequence: Synthetic oligonucleotide
aaaaucuuuuaauaaagca

SEQ ID NO: 3266511 - RNA, 19 nt, Artificial Sequence
  Description of Artificial Sequence: Synthetic oligonucleotide
uuauccuuaauauucacag

SEQ ID NO: 3266512 - RNA, 19 nt, Artificial Sequence
  Description of Artificial Sequence: Synthetic oligonucleotide
agaauaaucuuaauuaugc

SEQ ID NO: 3266513 - RNA, 19 nt, Artificial Sequence
  Description of Artificial Sequence: Synthetic oligonucleotide
auuaacuugaaaccaaccg

SEQ ID NO: 3266514 - RNA, 19 nt, Artificial Sequence
  Description of Artificial Sequence: Synthetic oligonucleotide
agaagaguuguuuacauuc

SEQ ID NO: 3266515 - RNA, 19 nt, Artificial Sequence
  Description of Artificial Sequence: Synthetic oligonucleotide
aaugccauuuguguuaucc

SEQ ID NO: 3266516 - RNA, 19 nt, Artificial Sequence
  Description of Artificial Sequence: Synthetic oligonucleotide
uuaacugcacuucuaaggg

SEQ ID NO: 3266517 - RNA, 19 nt, Artificial Sequence
  Description of Artificial Sequence: Synthetic oligonucleotide
uuguauacagaccagaaga

SEQ ID NO: 3266518 - RNA, 19 nt, Artificial Sequence
  Description of Artificial Sequence: Synthetic oligonucleotide
aaagaugauacucuaguca

SEQ ID NO: 3266519 - RNA, 19 nt, Artificial Sequence
  Description of Artificial Sequence: Synthetic oligonucleotide
uaagaugugaauuuuguga

SEQ ID NO: 3266520 - RNA, 19 nt, Artificial Sequence
  Description of Artificial Sequence: Synthetic oligonucleotide
uucacuuucacuucuuugg

SEQ ID NO: 3266521 - RNA, 19 nt, Artificial Sequence
  Description of Artificial Sequence: Synthetic oligonucleotide
uguucuaugcuuaucauga

SEQ ID NO: 3266522 - RNA, 19 nt, Artificial Sequence
  Description of Artificial Sequence: Synthetic oligonucleotide
aaaauccaaagguuacugc

SEQ ID NO: 3266523 - RNA, 19 nt, Artificial Sequence
  Description of Artificial Sequence: Synthetic oligonucleotide
aaaauauuaugcuggaaga

SEQ ID NO: 3266524 - RNA, 19 nt, Artificial Sequence
  Description of Artificial Sequence: Synthetic oligonucleotide
aauaaauccuaucaggaaa

SEQ ID NO: 3266525 - RNA, 19 nt, Artificial Sequence
  Description of Artificial Sequence: Synthetic oligonucleotide
caaaauauuaugcuggaag

SEQ ID NO: 3266526 - RNA, 19 nt, Artificial Sequence
  Description of Artificial Sequence: Synthetic oligonucleotide
aauuuugugaauaagguaa

SEQ ID NO: 3266527 - RNA, 19 nt, Artificial Sequence
  Description of Artificial Sequence: Synthetic oligonucleotide
uaucuucaaaauauuaugc

SEQ ID NO: 3266528 - RNA, 19 nt, Artificial Sequence
  Description of Artificial Sequence: Synthetic oligonucleotide
aauuguagggcacaaagau

SEQ ID NO: 3266529 - RNA, 19 nt, Artificial Sequence
  Description of Artificial Sequence: Synthetic oligonucleotide
uaucaauugaagaauaauc

SEQ ID NO: 3266530 - RNA, 19 nt, Artificial Sequence
  Description of Artificial Sequence: Synthetic oligonucleotide
aagguaauuaucugagguc

SEQ ID NO: 3266531 - RNA, 19 nt, Artificial Sequence
  Description of Artificial Sequence: Synthetic oligonucleotide
uguucauaaaggcugagcu

SEQ ID NO: 3266532 - RNA, 19 nt, Artificial Sequence
  Description of Artificial Sequence: Synthetic oligonucleotide
aaauccaaagguuacugca

SEQ ID NO: 3266533 - RNA, 19 nt, Artificial Sequence
  Description of Artificial Sequence: Synthetic oligonucleotide
uaagaugugauccauuuuc

SEQ ID NO: 3266534 - RNA, 19 nt, Artificial Sequence
  Description of Artificial Sequence: Synthetic oligonucleotide
uaagguaauuaucugaggu

SEQ ID NO: 3266535 - RNA, 19 nt, Artificial Sequence
  Description of Artificial Sequence: Synthetic oligonucleotide
uuaacuugaaaccaaccgu

SEQ ID NO: 3266536 - RNA, 19 nt, Artificial Sequence
  Description of Artificial Sequence: Synthetic oligonucleotide
uaauaucaaaaccauaaaa

SEQ ID NO: 3266537 - RNA, 19 nt, Artificial Sequence
  Description of Artificial Sequence: Synthetic oligonucleotide
aaauauuaugcuggaagac

SEQ ID NO: 3266538 - RNA, 19 nt, Artificial Sequence
  Description of Artificial Sequence: Synthetic oligonucleotide
aucccauuaauuuguauac

SEQ ID NO: 3266539 - RNA, 19 nt, Artificial Sequence
  Description of Artificial Sequence: Synthetic oligonucleotide
augaauugaauccuuccac

SEQ ID NO: 3266540 - RNA, 19 nt, Artificial Sequence
  Description of Artificial Sequence: Synthetic oligonucleotide
gaauacacaugcuaaagac

SEQ ID NO: 3266541 - RNA, 19 nt, Artificial Sequence
  Description of Artificial Sequence: Synthetic oligonucleotide
uuuaagaugugaauuuugu

SEQ ID NO: 3266542 - RNA, 19 nt, Artificial Sequence
  Description of Artificial Sequence: Synthetic oligonucleotide
auuaauuuguauacagacc

SEQ ID NO: 3266543 - RNA, 19 nt, Artificial Sequence
  Description of Artificial Sequence: Synthetic oligonucleotide
uuuucaaugccauuugugu

SEQ ID NO: 3266544 - RNA, 19 nt, Artificial Sequence
  Description of Artificial Sequence: Synthetic oligonucleotide
aauuaacuugaaaccaacc

SEQ ID NO: 3266545 - RNA, 19 nt, Artificial Sequence
  Description of Artificial Sequence: Synthetic oligonucleotide
uuaugucucauaaggaagc

SEQ ID NO: 3266546 - RNA, 19 nt, Artificial Sequence
  Description of Artificial Sequence: Synthetic oligonucleotide
gaguaauuggcucuugggg

SEQ ID NO: 3266547 - RNA, 19 nt, Artificial Sequence
  Description of Artificial Sequence: Synthetic oligonucleotide
uucuuuagacuucagauau

SEQ ID NO: 3266548 - RNA, 19 nt, Artificial Sequence
  Description of Artificial Sequence: Synthetic oligonucleotide
aacagaggaauuguagggc

SEQ ID NO: 3266549 - RNA, 19 nt, Artificial Sequence
  Description of Artificial Sequence: Synthetic oligonucleotide
uaauuaugcaugcaaaauc

SEQ ID NO: 3266550 - RNA, 19 nt, Artificial Sequence
  Description of Artificial Sequence: Synthetic oligonucleotide
aauuucuuuagacuucaga

SEQ ID NO: 3266551 - RNA, 19 nt, Artificial Sequence
  Description of Artificial Sequence: Synthetic oligonucleotide
aaauaagcuaacuuuguua

SEQ ID NO: 3266552 - RNA, 19 nt, Artificial Sequence
  Description of Artificial Sequence: Synthetic oligonucleotide
uaacuugaaaccaaccgug

SEQ ID NO: 3266553 - RNA, 19 nt, Artificial Sequence
  Description of Artificial Sequence: Synthetic oligonucleotide
aaucccauuaauuuguaua

SEQ ID NO: 3266554 - RNA, 19 nt, Artificial Sequence
  Description of Artificial Sequence: Synthetic oligonucleotide
cuaucaggaaagaugauac

SEQ ID NO: 3266555 - RNA, 19 nt, Artificial Sequence
  Description of Artificial Sequence: Synthetic oligonucleotide
aagaugauacucuagucaa

SEQ ID NO: 3266556 - RNA, 19 nt, Artificial Sequence
  Description of Artificial Sequence: Synthetic oligonucleotide
agagauagcguccaccagg

SEQ ID NO: 3266557 - RNA, 19 nt, Artificial Sequence
  Description of Artificial Sequence: Synthetic oligonucleotide
aauauuaugcuggaagaca

SEQ ID NO: 3266558 - RNA, 19 nt, Artificial Sequence
  Description of Artificial Sequence: Synthetic oligonucleotide
aaauuaacuugaaaccaac

SEQ ID NO: 3266559 - RNA, 19 nt, Artificial Sequence
  Description of Artificial Sequence: Synthetic oligonucleotide
augugauccauuuucaaug

SEQ ID NO: 3266560 - RNA, 19 nt, Artificial Sequence
  Description of Artificial Sequence: Synthetic oligonucleotide
aagaugugaauuuugugaa

SEQ ID NO: 3266561 - RNA, 19 nt, Artificial Sequence
  Description of Artificial Sequence: Synthetic oligonucleotide
gugaauuuugugaauaagg

SEQ ID NO: 3266562 - RNA, 19 nt, Artificial Sequence
  Description of Artificial Sequence: Synthetic oligonucleotide
uugaagaauaaucuuaauu

SEQ ID NO: 3266563 - RNA, 19 nt, Artificial Sequence
  Description of Artificial Sequence: Synthetic oligonucleotide
auaaucuuaauuaugcaug

SEQ ID NO: 3266564 - RNA, 19 nt, Artificial Sequence
  Description of Artificial Sequence: Synthetic oligonucleotide
aguaauaucaaaaccauaa

SEQ ID NO: 3266565 - RNA, 19 nt, Artificial Sequence
  Description of Artificial Sequence: Synthetic oligonucleotide
uaaucuuaauuaugcaugc

SEQ ID NO: 3266566 - RNA, 19 nt, Artificial Sequence
  Description of Artificial Sequence: Synthetic oligonucleotide
gaauccuuccacuuaacug

SEQ ID NO: 3266567 - RNA, 19 nt, Artificial Sequence
  Description of Artificial Sequence: Synthetic oligonucleotide
uuuuaauaaagcaguaaua

SEQ ID NO: 3266568 - RNA, 19 nt, Artificial Sequence
  Description of Artificial Sequence: Synthetic oligonucleotide
aggaugaacauuucuguuc

SEQ ID NO: 3266569 - RNA, 19 nt, Artificial Sequence
  Description of Artificial Sequence: Synthetic oligonucleotide
ugcaaaaucccauuaauuu

SEQ ID NO: 3266570 - RNA, 19 nt, Artificial Sequence
  Description of Artificial Sequence: Synthetic oligonucleotide
aaaugcuaaaggugaaugu

SEQ ID NO: 3266571 - RNA, 19 nt, Artificial Sequence
  Description of Artificial Sequence: Synthetic oligonucleotide
ugaguaauuggcucuuggg

SEQ ID NO: 3266572 - RNA, 19 nt, Artificial Sequence
  Description of Artificial Sequence: Synthetic oligonucleotide
aagguuacugcauccucgg

SEQ ID NO: 3266573 - RNA, 19 nt, Artificial Sequence
  Description of Artificial Sequence: Synthetic oligonucleotide
aagacuaacacaucaccaa

SEQ ID NO: 3266574 - RNA, 19 nt, Artificial Sequence
  Description of Artificial Sequence: Synthetic oligonucleotide
auuaugcuggaagacaugg

SEQ ID NO: 3266575 - RNA, 19 nt, Artificial Sequence
  Description of Artificial Sequence: Synthetic oligonucleotide
ucaggaaagaugauacucu

SEQ ID NO: 3266576 - RNA, 19 nt, Artificial Sequence
  Description of Artificial Sequence: Synthetic oligonucleotide
aaagguuacugcauccucg

SEQ ID NO: 3266577 - RNA, 19 nt, Artificial Sequence
  Description of Artificial Sequence: Synthetic oligonucleotide
uaagcuaacuuuguuaaga

SEQ ID NO: 3266578 - RNA, 19 nt, Artificial Sequence
  Description of Artificial Sequence: Synthetic oligonucleotide
aguaauuggcucuuggggu

SEQ ID NO: 3266579 - RNA, 19 nt, Artificial Sequence
  Description of Artificial Sequence: Synthetic oligonucleotide
gaaaaucuuuuaauaaagc

SEQ ID NO: 3266580 - RNA, 19 nt, Artificial Sequence
  Description of Artificial Sequence: Synthetic oligonucleotide
cuucuuugggaaauguagg

SEQ ID NO: 3266581 - RNA, 19 nt, Artificial Sequence
  Description of Artificial Sequence: Synthetic oligonucleotide
aaaccaaccguguucuaug

SEQ ID NO: 3266582 - RNA, 19 nt, Artificial Sequence
  Description of Artificial Sequence: Synthetic oligonucleotide
aucaauugaagaauaaucu

SEQ ID NO: 3266583 - RNA, 19 nt, Artificial Sequence
  Description of Artificial Sequence: Synthetic oligonucleotide
ugaacauuucuguuccuag

SEQ ID NO: 3266584 - RNA, 19 nt, Artificial Sequence
  Description of Artificial Sequence: Synthetic oligonucleotide
aucaggaaagaugauacuc

SEQ ID NO: 3266585 - RNA, 19 nt, Artificial Sequence
  Description of Artificial Sequence: Synthetic oligonucleotide
uuuguuaagaugugaucca

SEQ ID NO: 3266586 - RNA, 19 nt, Artificial Sequence
  Description of Artificial Sequence: Synthetic oligonucleotide
ucucaguucacuuucacuu

SEQ ID NO: 3266587 - RNA, 19 nt, Artificial Sequence
  Description of Artificial Sequence: Synthetic oligonucleotide
uaucugaggucucaguuca

SEQ ID NO: 3266588 - RNA, 19 nt, Artificial Sequence
  Description of Artificial Sequence: Synthetic oligonucleotide
ucacuuucacuucuuuggg

SEQ ID NO: 3266589 - RNA, 19 nt, Artificial Sequence
  Description of Artificial Sequence: Synthetic oligonucleotide
aaccaaccguguucuaugc

SEQ ID NO: 3266590 - RNA, 19 nt, Artificial Sequence
  Description of Artificial Sequence: Synthetic oligonucleotide
uguuguguccauaacguuc

SEQ ID NO: 3266591 - RNA, 19 nt, Artificial Sequence
  Description of Artificial Sequence: Synthetic oligonucleotide
uuaccacaaagaaugaaaa

SEQ ID NO: 3266592 - RNA, 19 nt, Artificial Sequence
  Description of Artificial Sequence: Synthetic oligonucleotide
ucaugaauugaauccuucc

SEQ ID NO: 3266593 - RNA, 19 nt, Artificial Sequence
  Description of Artificial Sequence: Synthetic oligonucleotide
agcaguaauaucaaaacca

SEQ ID NO: 3266594 - RNA, 19 nt, Artificial Sequence
  Description of Artificial Sequence: Synthetic oligonucleotide
gaugauacucuagucaagc

SEQ ID NO: 3266595 - RNA, 19 nt, Artificial Sequence
  Description of Artificial Sequence: Synthetic oligonucleotide
aguuaugucucauaaggaa

SEQ ID NO: 3266596 - RNA, 19 nt, Artificial Sequence
  Description of Artificial Sequence: Synthetic oligonucleotide
aauugaagaauaaucuuaa

SEQ ID NO: 3266597 - RNA, 19 nt, Artificial Sequence
  Description of Artificial Sequence: Synthetic oligonucleotide
uucacagggagaacagagg

SEQ ID NO: 3266598 - RNA, 19 nt, Artificial Sequence
  Description of Artificial Sequence: Synthetic oligonucleotide
acuucuuugggaaauguag

SEQ ID NO: 3266599 - RNA, 19 nt, Artificial Sequence
  Description of Artificial Sequence: Synthetic oligonucleotide
ugaauugaauccuuccacu

SEQ ID NO: 3266600 - RNA, 19 nt, Artificial Sequence
  Description of Artificial Sequence: Synthetic oligonucleotide
cucuguuguguccauaacg

SEQ ID NO: 3266601 - RNA, 19 nt, Artificial Sequence
  Description of Artificial Sequence: Synthetic oligonucleotide
acaucaccaaauuagaaua

SEQ ID NO: 3266602 - RNA, 19 nt, Artificial Sequence
  Description of Artificial Sequence: Synthetic oligonucleotide
ugauacucuagucaagcaa

SEQ ID NO: 3266603 - RNA, 19 nt, Artificial Sequence
  Description of Artificial Sequence: Synthetic oligonucleotide
auaagguaauuaucugagg

SEQ ID NO: 3266604 - RNA, 19 nt, Artificial Sequence
  Description of Artificial Sequence: Synthetic oligonucleotide
uucuaagggagacaccuca

SEQ ID NO: 3266605 - RNA, 19 nt, Artificial Sequence
  Description of Artificial Sequence: Synthetic oligonucleotide
acuaagacucuuaagaucc

SEQ ID NO: 3266606 - RNA, 19 nt, Artificial Sequence
  Description of Artificial Sequence: Synthetic oligonucleotide
uccacuaagacucuuaaga

SEQ ID NO: 3266607 - RNA, 19 nt, Artificial Sequence
  Description of Artificial Sequence: Synthetic oligonucleotide
uuuauuaucauacuccaau

SEQ ID NO: 3266608 - RNA, 19 nt, Artificial Sequence
  Description of Artificial Sequence: Synthetic oligonucleotide
auuaucauacuccaauagg

SEQ ID NO: 3266609 - RNA, 19 nt, Artificial Sequence
  Description of Artificial Sequence: Synthetic oligonucleotide
gaagagaugauguugcggc

SEQ ID NO: 3266610 - RNA, 19 nt, Artificial Sequence
  Description of Artificial Sequence: Synthetic oligonucleotide
aucauacuccaauaggccc

SEQ ID NO: 3266611 - RNA, 19 nt, Artificial Sequence
  Description of Artificial Sequence: Synthetic oligonucleotide
aaugucagaacagggacuc

SEQ ID NO: 3266612 - RNA, 19 nt, Artificial Sequence
  Description of Artificial Sequence: Synthetic oligonucleotide
aggucgguaacccagcagc

SEQ ID NO: 3266613 - RNA, 19 nt, Artificial Sequence
  Description of Artificial Sequence: Synthetic oligonucleotide
ucaaagacguccaugucgc

SEQ ID NO: 3266614 - RNA, 19 nt, Artificial Sequence
  Description of Artificial Sequence: Synthetic oligonucleotide
acucuuaagauccuggcug

SEQ ID NO: 3266615 - RNA, 19 nt, Artificial Sequence
  Description of Artificial Sequence: Synthetic oligonucleotide
ggaauaacggaccaagucg

SEQ ID NO: 3266616 - RNA, 19 nt, Artificial Sequence
  Description of Artificial Sequence: Synthetic oligonucleotide
ugucgcacaggaauaacgg

SEQ ID NO: 3266617 - RNA, 19 nt, Artificial Sequence
  Description of Artificial Sequence: Synthetic oligonucleotide
aagagugaaagcacgaaag

SEQ ID NO: 3266618 - RNA, 19 nt, Artificial Sequence
  Description of Artificial Sequence: Synthetic oligonucleotide
acuaucaagagugaaagca

SEQ ID NO: 3266619 - RNA, 19 nt, Artificial Sequence
  Description of Artificial Sequence: Synthetic oligonucleotide
uguacuaucaagagugaaa

SEQ ID NO: 3266620 - RNA, 19 nt, Artificial Sequence
  Description of Artificial Sequence: Synthetic oligonucleotide
gucuguacuaucaagagug

SEQ ID NO: 3266621 - RNA, 19 nt, Artificial Sequence
  Description of Artificial Sequence: Synthetic oligonucleotide
cuaaugucagaacagggac

SEQ ID NO: 3266622 - RNA, 19 nt, Artificial Sequence
  Description of Artificial Sequence: Synthetic oligonucleotide
aagagguccagagagaggu

SEQ ID NO: 3266623 - RNA, 19 nt, Artificial Sequence
  Description of Artificial Sequence: Synthetic oligonucleotide
agacucuuaagauccuggc

SEQ ID NO: 3266624 - RNA, 19 nt, Artificial Sequence
  Description of Artificial Sequence: Synthetic oligonucleotide
aaugcggccucugcaaugc

SEQ ID NO: 3266625 - RNA, 19 nt, Artificial Sequence
  Description of Artificial Sequence: Synthetic oligonucleotide
acuugaauuuguccaugcc

SEQ ID NO: 3266626 - RNA, 19 nt, Artificial Sequence
  Description of Artificial Sequence: Synthetic oligonucleotide
aaagacguccaugucgcac

SEQ ID NO: 3266627 - RNA, 19 nt, Artificial Sequence
  Description of Artificial Sequence: Synthetic oligonucleotide
ugcugaaucuugucgaaag

SEQ ID NO: 3266628 - RNA, 19 nt, Artificial Sequence
  Description of Artificial Sequence: Synthetic oligonucleotide
guacuaucaagagugaaag

SEQ ID NO: 3266629 - RNA, 19 nt, Artificial Sequence
  Description of Artificial Sequence: Synthetic oligonucleotide
aagacaucuggguguuggc

SEQ ID NO: 3266630 - RNA, 19 nt, Artificial Sequence
  Description of Artificial Sequence: Synthetic oligonucleotide
gagguaggcaucaaagacg

SEQ ID NO: 3266631 - RNA, 19 nt, Artificial Sequence
  Description of Artificial Sequence: Synthetic oligonucleotide
aagagaugauguugcggcg

SEQ ID NO: 3266632 - RNA, 19 nt, Artificial Sequence
  Description of Artificial Sequence: Synthetic oligonucleotide
guagcgaucuugcaggaag

SEQ ID NO: 3266633 - RNA, 19 nt, Artificial Sequence
  Description of Artificial Sequence: Synthetic oligonucleotide
cuaucaagagugaaagcac

SEQ ID NO: 3266634 - RNA, 19 nt, Artificial Sequence
  Description of Artificial Sequence: Synthetic oligonucleotide
auugucccgggccagcgcc

SEQ ID NO: 3266635 - RNA, 19 nt, Artificial Sequence
  Description of Artificial Sequence: Synthetic oligonucleotide
gaauaacggaccaagucgc

SEQ ID NO: 3266636 - RNA, 19 nt, Artificial Sequence
  Description of Artificial Sequence: Synthetic oligonucleotide
aaggcuucacggugugagc

SEQ ID NO: 3266637 - RNA, 19 nt, Artificial Sequence
  Description of Artificial Sequence: Synthetic oligonucleotide
gaccugcugaaucuugucg

SEQ ID NO: 3266638 - RNA, 19 nt, Artificial Sequence
  Description of Artificial Sequence: Synthetic oligonucleotide
uuauuaucauacuccaaua

SEQ ID NO: 3266639 - RNA, 19 nt, Artificial Sequence
  Description of Artificial Sequence: Synthetic oligonucleotide
ucgguaacccagcagcugc

SEQ ID NO: 3266640 - RNA, 19 nt, Artificial Sequence
  Description of Artificial Sequence: Synthetic oligonucleotide
gaaggcuucacggugugag

SEQ ID NO: 3266641 - RNA, 19 nt, Artificial Sequence
  Description of Artificial Sequence: Synthetic oligonucleotide
ucgcacaggaauaacggac

SEQ ID NO: 3266642 - RNA, 19 nt, Artificial Sequence
  Description of Artificial Sequence: Synthetic oligonucleotide
ugugcaucgguggaggaag

SEQ ID NO: 3266643 - RNA, 19 nt, Artificial Sequence
  Description of Artificial Sequence: Synthetic oligonucleotide
agcccacuugaauuugucc

SEQ ID NO: 3266644 - RNA, 19 nt, Artificial Sequence
  Description of Artificial Sequence: Synthetic oligonucleotide
ugagccaugugugauguug

SEQ ID NO: 3266645 - RNA, 19 nt, Artificial Sequence
  Description of Artificial Sequence: Synthetic oligonucleotide
uaaugucagaacagggacu

SEQ ID NO: 3266646 - RNA, 19 nt, Artificial Sequence
  Description of Artificial Sequence: Synthetic oligonucleotide
agagaugauguugcggcgc

SEQ ID NO: 3266647 - RNA, 19 nt, Artificial Sequence
  Description of Artificial Sequence: Synthetic oligonucleotide
ugucgaaaggcagugugag

SEQ ID NO: 3266648 - RNA, 19 nt, Artificial Sequence
  Description of Artificial Sequence: Synthetic oligonucleotide
ucaagcucagagugcacag

SEQ ID NO: 3266649 - RNA, 19 nt, Artificial Sequence
  Description of Artificial Sequence: Synthetic oligonucleotide
aggucuguacuaucaagag

SEQ ID NO: 3266650 - RNA, 19 nt, Artificial Sequence
  Description of Artificial Sequence: Synthetic oligonucleotide
cacggugugagccuggccc

SEQ ID NO: 3266651 - RNA, 19 nt, Artificial Sequence
  Description of Artificial Sequence: Synthetic oligonucleotide
uaugcaaugcggccucugc

SEQ ID NO: 3266652 - RNA, 19 nt, Artificial Sequence
  Description of Artificial Sequence: Synthetic oligonucleotide
ucccacacgugccaagccg

SEQ ID NO: 3266653 - RNA, 19 nt, Artificial Sequence
  Description of Artificial Sequence: Synthetic oligonucleotide
uggaugaggucuugaaggc

SEQ ID NO: 3266654 - RNA, 19 nt, Artificial Sequence
  Description of Artificial Sequence: Synthetic oligonucleotide
gacaucuggguguuggcug

SEQ ID NO: 3266655 - RNA, 19 nt, Artificial Sequence
  Description of Artificial Sequence: Synthetic oligonucleotide
auaacggaccaagucgcgc

SEQ ID NO: 3266656 - RNA, 19 nt, Artificial Sequence
  Description of Artificial Sequence: Synthetic oligonucleotide
uguuccucugguuucucca

SEQ ID NO: 3266657 - RNA, 19 nt, Artificial Sequence
  Description of Artificial Sequence: Synthetic oligonucleotide
cacuaagacucuuaagauc

SEQ ID NO: 3266658 - RNA, 19 nt, Artificial Sequence
  Description of Artificial Sequence: Synthetic oligonucleotide
caauaggcccuaaugucag

SEQ ID NO: 3266659 - RNA, 19 nt, Artificial Sequence
  Description of Artificial Sequence: Synthetic oligonucleotide
aauaacggaccaagucgcg

SEQ ID NO: 3266660 - RNA, 19 nt, Artificial Sequence
  Description of Artificial Sequence: Synthetic oligonucleotide
uagcgaucuugcaggaagg

SEQ ID NO: 3266661 - RNA, 19 nt, Artificial Sequence
  Description of Artificial Sequence: Synthetic oligonucleotide
aacggaccaagucgcgcac

SEQ ID NO: 3266662 - RNA, 19 nt, Artificial Sequence
  Description of Artificial Sequence: Synthetic oligonucleotide
auuuguccaugccucuagg

SEQ ID NO: 3266663 - RNA, 19 nt, Artificial Sequence
  Description of Artificial Sequence: Synthetic oligonucleotide
uugccgggagaccaggaag

SEQ ID NO: 3266664 - RNA, 19 nt, Artificial Sequence
  Description of Artificial Sequence: Synthetic oligonucleotide
gauguugcggcgccacggg

SEQ ID NO: 3266665 - RNA, 19 nt, Artificial Sequence
  Description of Artificial Sequence: Synthetic oligonucleotide
ugauguugcggcgccacgg

SEQ ID NO: 3266666 - RNA, 19 nt, Artificial Sequence
  Description of Artificial Sequence: Synthetic oligonucleotide
guucaggccgguaaaggcg

SEQ ID NO: 3266667 - RNA, 19 nt, Artificial Sequence
  Description of Artificial Sequence: Synthetic oligonucleotide
uaggcgguagcgaucuugc

SEQ ID NO: 3266668 - RNA, 19 nt, Artificial Sequence
  Description of Artificial Sequence: Synthetic oligonucleotide
uacuaucaagagugaaagc

SEQ ID NO: 3266669 - RNA, 19 nt, Artificial Sequence
  Description of Artificial Sequence: Synthetic oligonucleotide
uaacggaccaagucgcgca

SEQ ID NO: 3266670 - RNA, 19 nt, Artificial Sequence
  Description of Artificial Sequence: Synthetic oligonucleotide
acacuguuccucugguuuc

SEQ ID NO: 3266671 - RNA, 19 nt, Artificial Sequence
  Description of Artificial Sequence: Synthetic oligonucleotide
uguugcggcgccacgggag

SEQ ID NO: 3266672 - RNA, 19 nt, Artificial Sequence
  Description of Artificial Sequence: Synthetic oligonucleotide
gaucugagugagugggucc

SEQ ID NO: 3266673 - RNA, 19 nt, Artificial Sequence
  Description of Artificial Sequence: Synthetic oligonucleotide
ucuccacuaagacucuuaa

SEQ ID NO: 3266674 - RNA, 19 nt, Artificial Sequence
  Description of Artificial Sequence: Synthetic oligonucleotide
auccucguagcgcacuagg

SEQ ID NO: 3266675 - RNA, 19 nt, Artificial Sequence
  Description of Artificial Sequence: Synthetic oligonucleotide
gagugaaagcacgaaagca

SEQ ID NO: 3266676 - RNA, 19 nt, Artificial Sequence
  Description of Artificial Sequence: Synthetic oligonucleotide
cacuugaauuuguccaugc

SEQ ID NO: 3266677 - RNA, 19 nt, Artificial Sequence
  Description of Artificial Sequence: Synthetic oligonucleotide
uucaggccgguaaaggcgu

SEQ ID NO: 3266678 - RNA, 19 nt, Artificial Sequence
  Description of Artificial Sequence: Synthetic oligonucleotide
cuaggaugcaggucuguac

SEQ ID NO: 3266679 - RNA, 19 nt, Artificial Sequence
  Description of Artificial Sequence: Synthetic oligonucleotide
ugcacacgcucccuguugc

SEQ ID NO: 3266680 - RNA, 19 nt, Artificial Sequence
  Description of Artificial Sequence: Synthetic oligonucleotide
gguaaaggcguagagcucc

SEQ ID NO: 3266681 - RNA, 19 nt, Artificial Sequence
  Description of Artificial Sequence: Synthetic oligonucleotide
cugagcgccacgaggacag

SEQ ID NO: 3266682 - RNA, 19 nt, Artificial Sequence
  Description of Artificial Sequence: Synthetic oligonucleotide
augucgcacaggaauaacg

SEQ ID NO: 3266683 - RNA, 19 nt, Artificial Sequence
  Description of Artificial Sequence: Synthetic oligonucleotide
agugcacaggucgguaacc

SEQ ID NO: 3266684 - RNA, 19 nt, Artificial Sequence
  Description of Artificial Sequence: Synthetic oligonucleotide
acagcacuagcacgugcac

SEQ ID NO: 3266685 - RNA, 19 nt, Artificial Sequence
  Description of Artificial Sequence: Synthetic oligonucleotide
gagccugagcgccacgagg

SEQ ID NO: 3266686 - RNA, 19 nt, Artificial Sequence
  Description of Artificial Sequence: Synthetic oligonucleotide
uugggacacacugagcgca

SEQ ID NO: 3266687 - RNA, 19 nt, Artificial Sequence
  Description of Artificial Sequence: Synthetic oligonucleotide
guagaagacaucugggugu

SEQ ID NO: 3266688 - RNA, 19 nt, Artificial Sequence
  Description of Artificial Sequence: Synthetic oligonucleotide
acccacgugccguugguuc

SEQ ID NO: 3266689 - RNA, 19 nt, Artificial Sequence
  Description of Artificial Sequence: Synthetic oligonucleotide
ucuugcaggaaggguggcg

SEQ ID NO: 3266690 - RNA, 19 nt, Artificial Sequence
  Description of Artificial Sequence: Synthetic oligonucleotide
uccucguagcgcacuaggc

SEQ ID NO: 3266691 - RNA, 19 nt, Artificial Sequence
  Description of Artificial Sequence: Synthetic oligonucleotide
cuugaauuuguccaugccu

SEQ ID NO: 3266692 - RNA, 19 nt, Artificial Sequence
  Description of Artificial Sequence: Synthetic oligonucleotide
uuccucugguuucuccaag

SEQ ID NO: 3266693 - RNA, 19 nt, Artificial Sequence
  Description of Artificial Sequence: Synthetic oligonucleotide
ucaagagugaaagcacgaa

SEQ ID NO: 3266694 - RNA, 19 nt, Artificial Sequence
  Description of Artificial Sequence: Synthetic oligonucleotide
ugugagacgccaggcuugg

SEQ ID NO: 3266695 - RNA, 19 nt, Artificial Sequence
  Description of Artificial Sequence: Synthetic oligonucleotide
ucccggaucugagugagug

SEQ ID NO: 3266696 - RNA, 19 nt, Artificial Sequence
  Description of Artificial Sequence: Synthetic oligonucleotide
uagcacgugcacacgcucc

SEQ ID NO: 3266697 - RNA, 19 nt, Artificial Sequence
  Description of Artificial Sequence: Synthetic oligonucleotide
agugugagacgccaggcuu

SEQ ID NO: 3266698 - RNA, 19 nt, Artificial Sequence
  Description of Artificial Sequence: Synthetic oligonucleotide
ucgcgcacggccaugugga

SEQ ID NO: 3266699 - RNA, 19 nt, Artificial Sequence
  Description of Artificial Sequence: Synthetic oligonucleotide
uccuggaccugcugaaucu

SEQ ID NO: 3266700 - RNA, 19 nt, Artificial Sequence
  Description of Artificial Sequence: Synthetic oligonucleotide
gagcucccggaucugagug

SEQ ID NO: 3266701 - RNA, 19 nt, Artificial Sequence
  Description of Artificial Sequence: Synthetic oligonucleotide
uguuggcugaagaccuggc

SEQ ID NO: 3266702 - RNA, 19 nt, Artificial Sequence
  Description of Artificial Sequence: Synthetic oligonucleotide
uugaaggcuucacggugug

SEQ ID NO: 3266703 - RNA, 19 nt, Artificial Sequence
  Description of Artificial Sequence: Synthetic oligonucleotide
uggcggcuuaugcaaugcg

SEQ ID NO: 3266704 - RNA, 19 nt, Artificial Sequence
  Description of Artificial Sequence: Synthetic oligonucleotide
uuugccgggagaccaggaa

SEQ ID NO: 3266705 - RNA, 19 nt, Artificial Sequence
  Description of Artificial Sequence: Synthetic oligonucleotide
uacacguacaccaaguugu

SEQ ID NO: 3266706 - RNA, 19 nt, Artificial Sequence
  Description of Artificial Sequence: Synthetic oligonucleotide
gauaaaacuggaauggccc

SEQ ID NO: 3266707 - RNA, 19 nt, Artificial Sequence
  Description of Artificial Sequence: Synthetic oligonucleotide
ugauaaaacuggaauggcc

SEQ ID NO: 3266708 - RNA, 19 nt, Artificial Sequence
  Description of Artificial Sequence: Synthetic oligonucleotide
guugguacaaagcagcugc

SEQ ID NO: 3266709 - RNA, 19 nt, Artificial Sequence
  Description of Artificial Sequence: Synthetic oligonucleotide
guaaucugcuuacaggugg

SEQ ID NO: 3266710 - RNA, 19 nt, Artificial Sequence
  Description of Artificial Sequence: Synthetic oligonucleotide
ucuguauccagcagcagcc

SEQ ID NO: 3266711 - RNA, 19 nt, Artificial Sequence
  Description of Artificial Sequence: Synthetic oligonucleotide
ucuggggaaaagcugacca

SEQ ID NO: 3266712 - RNA, 19 nt, Artificial Sequence
  Description of Artificial Sequence: Synthetic oligonucleotide
auaaaacuggaauggcccg

SEQ ID NO: 3266713 - RNA, 19 nt, Artificial Sequence
  Description of Artificial Sequence: Synthetic oligonucleotide
ugguaaucugcuuacaggu

SEQ ID NO: 3266714 - RNA, 19 nt, Artificial Sequence
  Description of Artificial Sequence: Synthetic oligonucleotide
aguacagaaucucguaguc

SEQ ID NO: 3266715 - RNA, 19 nt, Artificial Sequence
  Description of Artificial Sequence: Synthetic oligonucleotide
ggugauaaaacuggaaugg

SEQ ID NO: 3266716 - RNA, 19 nt, Artificial Sequence
  Description of Artificial Sequence: Synthetic oligonucleotide
cauuccacauuccucacgg

SEQ ID NO: 3266717 - RNA, 19 nt, Artificial Sequence
  Description of Artificial Sequence: Synthetic oligonucleotide
acggaaaucugcucauugc

SEQ ID NO: 3266718 - RNA, 19 nt, Artificial Sequence
  Description of Artificial Sequence: Synthetic oligonucleotide
cucauugccaucugugugg

SEQ ID NO: 3266719 - RNA, 19 nt, Artificial Sequence
  Description of Artificial Sequence: Synthetic oligonucleotide
ugggugauaaaacuggaau

SEQ ID NO: 3266720 - RNA, 19 nt, Artificial Sequence
  Description of Artificial Sequence: Synthetic oligonucleotide
aaucucguagucuccggag

SEQ ID NO: 3266721 - RNA, 19 nt, Artificial Sequence
  Description of Artificial Sequence: Synthetic oligonucleotide
cuugcggccacccuggucc

SEQ ID NO: 3266722 - RNA, 19 nt, Artificial Sequence
  Description of Artificial Sequence: Synthetic oligonucleotide
uacagaaucucguagucuc

SEQ ID NO: 3266723 - RNA, 19 nt, Artificial Sequence
  Description of Artificial Sequence: Synthetic oligonucleotide
cugguaaucugcuuacagg

SEQ ID NO: 3266724 - RNA, 19 nt, Artificial Sequence
  Description of Artificial Sequence: Synthetic oligonucleotide
aaagcagcugcuguccugg

SEQ ID NO: 3266725 - RNA, 19 nt, Artificial Sequence
  Description of Artificial Sequence: Synthetic oligonucleotide
acugguaaucugcuuacag

SEQ ID NO: 3266726 - RNA, 19 nt, Artificial Sequence
  Description of Artificial Sequence: Synthetic oligonucleotide
uccagcagcagccaccugc

SEQ ID NO: 3266727 - RNA, 19 nt, Artificial Sequence
  Description of Artificial Sequence: Synthetic oligonucleotide
aaaucugcucauugccauc

SEQ ID NO: 3266728 - RNA, 19 nt, Artificial Sequence
  Description of Artificial Sequence: Synthetic oligonucleotide
acuggaauggcccgagcac

SEQ ID NO: 3266729 - RNA, 19 nt, Artificial Sequence
  Description of Artificial Sequence: Synthetic oligonucleotide
auugccaucuguguggauc

SEQ ID NO: 3266730 - RNA, 19 nt, Artificial Sequence
  Description of Artificial Sequence: Synthetic oligonucleotide
aacuggaauggcccgagca

SEQ ID NO: 3266731 - RNA, 19 nt, Artificial Sequence
  Description of Artificial Sequence: Synthetic oligonucleotide
aagcugaccacggaaaucu

SEQ ID NO: 3266732 - RNA, 19 nt, Artificial Sequence
  Description of Artificial Sequence: Synthetic oligonucleotide
aguagcgguagcccauucc

SEQ ID NO: 3266733 - RNA, 19 nt, Artificial Sequence
  Description of Artificial Sequence: Synthetic oligonucleotide
accaaguugucgugggagc

SEQ ID NO: 3266734 - RNA, 19 nt, Artificial Sequence
  Description of Artificial Sequence: Synthetic oligonucleotide
accguguacacguacacca

SEQ ID NO: 3266735 - RNA, 19 nt, Artificial Sequence
  Description of Artificial Sequence: Synthetic oligonucleotide
uugccaucuguguggaucg

SEQ ID NO: 3266736 - RNA, 19 nt, Artificial Sequence
  Description of Artificial Sequence: Synthetic oligonucleotide
ucugcuuacagguggcggc

SEQ ID NO: 3266737 - RNA, 19 nt, Artificial Sequence
  Description of Artificial Sequence: Synthetic oligonucleotide
uggggaaaagcugaccacg

SEQ ID NO: 3266738 - RNA, 19 nt, Artificial Sequence
  Description of Artificial Sequence: Synthetic oligonucleotide
aaagcugaccacggaaauc

SEQ ID NO: 3266739 - RNA, 19 nt, Artificial Sequence
  Description of Artificial Sequence: Synthetic oligonucleotide
uacaccaaguugucguggg

SEQ ID NO: 3266740 - RNA, 19 nt, Artificial Sequence
  Description of Artificial Sequence: Synthetic oligonucleotide
aaaagcugaccacggaaau

SEQ ID NO: 3266741 - RNA, 19 nt, Artificial Sequence
  Description of Artificial Sequence: Synthetic oligonucleotide
aucuguguggaucgccacc

SEQ ID NO: 3266742 - RNA, 19 nt, Artificial Sequence
  Description of Artificial Sequence: Synthetic oligonucleotide
ugcacugguaaucugcuua

SEQ ID NO: 3266743 - RNA, 19 nt, Artificial Sequence
  Description of Artificial Sequence: Synthetic oligonucleotide
aucugcacugguaaucugc

SEQ ID NO: 3266744 - RNA, 19 nt, Artificial Sequence
  Description of Artificial Sequence: Synthetic oligonucleotide
uguguggaucgccaccagg

SEQ ID NO: 3266745 - RNA, 19 nt, Artificial Sequence
  Description of Artificial Sequence: Synthetic oligonucleotide
aaaacuggaauggcccgag

SEQ ID NO: 3266746 - RNA, 19 nt, Artificial Sequence
  Description of Artificial Sequence: Synthetic oligonucleotide
aaacuggaauggcccgagc

SEQ ID NO: 3266747 - RNA, 19 nt, Artificial Sequence
  Description of Artificial Sequence: Synthetic oligonucleotide
uaaucugcuuacagguggc

SEQ ID NO: 3266748 - RNA, 19 nt, Artificial Sequence
  Description of Artificial Sequence: Synthetic oligonucleotide
gucuguauccagcagcagc

SEQ ID NO: 3266749 - RNA, 19 nt, Artificial Sequence
  Description of Artificial Sequence: Synthetic oligonucleotide
acguacaccaaguugucgu

SEQ ID NO: 3266750 - RNA, 19 nt, Artificial Sequence
  Description of Artificial Sequence: Synthetic oligonucleotide
ugguccaccguguacacgu

SEQ ID NO: 3266751 - RNA, 19 nt, Artificial Sequence
  Description of Artificial Sequence: Synthetic oligonucleotide
acacaaguagcgguagccc

SEQ ID NO: 3266752 - RNA, 19 nt, Artificial Sequence
  Description of Artificial Sequence: Synthetic oligonucleotide
uccggaguugguacaaagc

SEQ ID NO: 3266753 - RNA, 19 nt, Artificial Sequence
  Description of Artificial Sequence: Synthetic oligonucleotide
aaucugcucauugccaucu

SEQ ID NO: 3266754 - RNA, 19 nt, Artificial Sequence
  Description of Artificial Sequence: Synthetic oligonucleotide
uccacauuccucacgguau

SEQ ID NO: 3266755 - RNA, 19 nt, Artificial Sequence
  Description of Artificial Sequence: Synthetic oligonucleotide
ucugcacugguaaucugcu

SEQ ID NO: 3266756 - RNA, 19 nt, Artificial Sequence
  Description of Artificial Sequence: Synthetic oligonucleotide
uguccugggcccaauccag

SEQ ID NO: 3266757 - RNA, 19 nt, Artificial Sequence
  Description of Artificial Sequence: Synthetic oligonucleotide
guacacguacaccaaguug

SEQ ID NO: 3266758 - RNA, 19 nt, Artificial Sequence
  Description of Artificial Sequence: Synthetic oligonucleotide
aggugggugauaaaacugg

SEQ ID NO: 3266759 - RNA, 19 nt, Artificial Sequence
  Description of Artificial Sequence: Synthetic oligonucleotide
uacaaagcagcugcugucc

SEQ ID NO: 3266760 - RNA, 19 nt, Artificial Sequence
  Description of Artificial Sequence: Synthetic oligonucleotide
cauuccucacgguaucugc

SEQ ID NO: 3266761 - RNA, 19 nt, Artificial Sequence
  Description of Artificial Sequence: Synthetic oligonucleotide
aggcggcugaccuugcggc

SEQ ID NO: 3266762 - RNA, 19 nt, Artificial Sequence
  Description of Artificial Sequence: Synthetic oligonucleotide
acacacaaguagcgguagc

SEQ ID NO: 3266763 - RNA, 19 nt, Artificial Sequence
  Description of Artificial Sequence: Synthetic oligonucleotide
agcagcagccaccugccgg

SEQ ID NO: 3266764 - RNA, 19 nt, Artificial Sequence
  Description of Artificial Sequence: Synthetic oligonucleotide
uccaggugggugauaaaac

SEQ ID NO: 3266765 - RNA, 19 nt, Artificial Sequence
  Description of Artificial Sequence: Synthetic oligonucleotide
ugaccuugcggccacccug

SEQ ID NO: 3266766 - RNA, 19 nt, Artificial Sequence
  Description of Artificial Sequence: Synthetic oligonucleotide
aauggcccgagcacuugcc

SEQ ID NO: 3266767 - RNA, 19 nt, Artificial Sequence
  Description of Artificial Sequence: Synthetic oligonucleotide
aucgccaccaggucauggg

SEQ ID NO: 3266768 - RNA, 19 nt, Artificial Sequence
  Description of Artificial Sequence: Synthetic oligonucleotide
gggugauaaaacuggaaug

SEQ ID NO: 3266769 - RNA, 19 nt, Artificial Sequence
  Description of Artificial Sequence: Synthetic oligonucleotide
agaaucucguagucuccgg

SEQ ID NO: 3266770 - RNA, 19 nt, Artificial Sequence
  Description of Artificial Sequence: Synthetic oligonucleotide
cugggcccaauccaggugg

SEQ ID NO: 3266771 - RNA, 19 nt, Artificial Sequence
  Description of Artificial Sequence: Synthetic oligonucleotide
augggugucuguauccagc

SEQ ID NO: 3266772 - RNA, 19 nt, Artificial Sequence
  Description of Artificial Sequence: Synthetic oligonucleotide
ggugucuguauccagcagc

SEQ ID NO: 3266773 - RNA, 19 nt, Artificial Sequence
  Description of Artificial Sequence: Synthetic oligonucleotide
aaucugcuuacagguggcg

SEQ ID NO: 3266774 - RNA, 19 nt, Artificial Sequence
  Description of Artificial Sequence: Synthetic oligonucleotide
gucgugggagcccacagcc

SEQ ID NO: 3266775 - RNA, 19 nt, Artificial Sequence
  Description of Artificial Sequence: Synthetic oligonucleotide
uuccacauuccucacggua

SEQ ID NO: 3266776 - RNA, 19 nt, Artificial Sequence
  Description of Artificial Sequence: Synthetic oligonucleotide
gaccacggaaaucugcuca

SEQ ID NO: 3266777 - RNA, 19 nt, Artificial Sequence
  Description of Artificial Sequence: Synthetic oligonucleotide
ucccaguacagaaucucgu

SEQ ID NO: 3266778 - RNA, 19 nt, Artificial Sequence
  Description of Artificial Sequence: Synthetic oligonucleotide
caggugggugauaaaacug

SEQ ID NO: 3266779 - RNA, 19 nt, Artificial Sequence
  Description of Artificial Sequence: Synthetic oligonucleotide
ugcucauugccaucugugu

SEQ ID NO: 3266780 - RNA, 19 nt, Artificial Sequence
  Description of Artificial Sequence: Synthetic oligonucleotide
cacacaaguagcgguagcc

SEQ ID NO: 3266781 - RNA, 19 nt, Artificial Sequence
  Description of Artificial Sequence: Synthetic oligonucleotide
uguacacguacaccaaguu

SEQ ID NO: 3266782 - RNA, 19 nt, Artificial Sequence
  Description of Artificial Sequence: Synthetic oligonucleotide
ucuguguggaucgccacca

SEQ ID NO: 3266783 - RNA, 19 nt, Artificial Sequence
  Description of Artificial Sequence: Synthetic oligonucleotide
uccaccguguacacguaca

SEQ ID NO: 3266784 - RNA, 19 nt, Artificial Sequence
  Description of Artificial Sequence: Synthetic oligonucleotide
ggaguugguacaaagcagc

SEQ ID NO: 3266785 - RNA, 19 nt, Artificial Sequence
  Description of Artificial Sequence: Synthetic oligonucleotide
uagucuccggaguugguac

SEQ ID NO: 3266786 - RNA, 19 nt, Artificial Sequence
  Description of Artificial Sequence: Synthetic oligonucleotide
ucugcucauugccaucugu

SEQ ID NO: 3266787 - RNA, 19 nt, Artificial Sequence
  Description of Artificial Sequence: Synthetic oligonucleotide
gucaugggugucuguaucc

SEQ ID NO: 3266788 - RNA, 19 nt, Artificial Sequence
  Description of Artificial Sequence: Synthetic oligonucleotide
uguauccagcagcagccac

SEQ ID NO: 3266789 - RNA, 19 nt, Artificial Sequence
  Description of Artificial Sequence: Synthetic oligonucleotide
uaaaacuggaauggcccga

SEQ ID NO: 3266790 - RNA, 19 nt, Artificial Sequence
  Description of Artificial Sequence: Synthetic oligonucleotide
acagaaucucguagucucc

SEQ ID NO: 3266791 - RNA, 19 nt, Artificial Sequence
  Description of Artificial Sequence: Synthetic oligonucleotide
uagcccauuccacauuccu

SEQ ID NO: 3266792 - RNA, 19 nt, Artificial Sequence
  Description of Artificial Sequence: Synthetic oligonucleotide
guagcgguagcccauucca

SEQ ID NO: 3266793 - RNA, 19 nt, Artificial Sequence
  Description of Artificial Sequence: Synthetic oligonucleotide
acgguaucugcacugguaa

SEQ ID NO: 3266794 - RNA, 19 nt, Artificial Sequence
  Description of Artificial Sequence: Synthetic oligonucleotide
ugggugucuguauccagca

SEQ ID NO: 3266795 - RNA, 19 nt, Artificial Sequence
  Description of Artificial Sequence: Synthetic oligonucleotide
ucguagucuccggaguugg

SEQ ID NO: 3266796 - RNA, 19 nt, Artificial Sequence
  Description of Artificial Sequence: Synthetic oligonucleotide
cacggaaaucugcucauug

SEQ ID NO: 3266797 - RNA, 19 nt, Artificial Sequence
  Description of Artificial Sequence: Synthetic oligonucleotide
gugauaaaacuggaauggc

SEQ ID NO: 3266798 - RNA, 19 nt, Artificial Sequence
  Description of Artificial Sequence: Synthetic oligonucleotide
agcagcugcuguccugggc

SEQ ID NO: 3266799 - RNA, 19 nt, Artificial Sequence
  Description of Artificial Sequence: Synthetic oligonucleotide
aaguagcgguagcccauuc

SEQ ID NO: 3266800 - RNA, 19 nt, Artificial Sequence
  Description of Artificial Sequence: Synthetic oligonucleotide
uugucgugggagcccacag

SEQ ID NO: 3266801 - RNA, 19 nt, Artificial Sequence
  Description of Artificial Sequence: Synthetic oligonucleotide
cugcucauugccaucugug

SEQ ID NO: 3266802 - RNA, 19 nt, Artificial Sequence
  Description of Artificial Sequence: Synthetic oligonucleotide
auggcccgagcacuugccc

SEQ ID NO: 3266803 - RNA, 19 nt, Artificial Sequence
  Description of Artificial Sequence: Synthetic oligonucleotide
gaaaagcugaccacggaaa

SEQ ID NO: 3266804 - RNA, 19 nt, Artificial Sequence
  Description of Artificial Sequence: Synthetic oligonucleotide
cagaaucucguagucuccg

SEQ ID NO: 3266805 - RNA, 19 nt, Artificial Sequence
  Description of Artificial Sequence: Synthetic oligonucleotide
uuuaguuuaaauaaauggc

SEQ ID NO: 3266806 - RNA, 19 nt, Artificial Sequence
  Description of Artificial Sequence: Synthetic oligonucleotide
uuaguuuaaauaaauggca

SEQ ID NO: 3266807 - RNA, 19 nt, Artificial Sequence
  Description of Artificial Sequence: Synthetic oligonucleotide
ugugaaaucuccauuccgg

SEQ ID NO: 3266808 - RNA, 19 nt, Artificial Sequence
  Description of Artificial Sequence: Synthetic oligonucleotide
uaaauaaauggcaggggcg

SEQ ID NO: 3266809 - RNA, 19 nt, Artificial Sequence
  Description of Artificial Sequence: Synthetic oligonucleotide
aauggcaggggcgagaggc

SEQ ID NO: 3266810 - RNA, 19 nt, Artificial Sequence
  Description of Artificial Sequence: Synthetic oligonucleotide
gaaaucuccauuccggugg

SEQ ID NO: 3266811 - RNA, 19 nt, Artificial Sequence
  Description of Artificial Sequence: Synthetic oligonucleotide
aguuuaaauaaauggcagg

SEQ ID NO: 3266812 - RNA, 19 nt, Artificial Sequence
  Description of Artificial Sequence: Synthetic oligonucleotide
uaguuuaaauaaauggcag

SEQ ID NO: 3266813 - RNA, 19 nt, Artificial Sequence
  Description of Artificial Sequence: Synthetic oligonucleotide
guuuaaauaaauggcaggg

SEQ ID NO: 3266814 - RNA, 19 nt, Artificial Sequence
  Description of Artificial Sequence: Synthetic oligonucleotide
ucgacuuuuguccaguucc

SEQ ID NO: 3266815 - RNA, 19 nt, Artificial Sequence
  Description of Artificial Sequence: Synthetic oligonucleotide
aguuccuuugcucucuucc

SEQ ID NO: 3266816 - RNA, 19 nt, Artificial Sequence
  Description of Artificial Sequence: Synthetic oligonucleotide
cuucccaccauacaggacc

SEQ ID NO: 3266817 - RNA, 19 nt, Artificial Sequence
  Description of Artificial Sequence: Synthetic oligonucleotide
aaaucuccauuccgguggc

SEQ ID NO: 3266818 - RNA, 19 nt, Artificial Sequence
  Description of Artificial Sequence: Synthetic oligonucleotide
ucucuucccaccauacagg

SEQ ID NO: 3266819 - RNA, 19 nt, Artificial Sequence
  Description of Artificial Sequence: Synthetic oligonucleotide
aaauaaauggcaggggcga

SEQ ID NO: 3266820 - RNA, 19 nt, Artificial Sequence
  Description of Artificial Sequence: Synthetic oligonucleotide
ucuggcucuacuuugccug

SEQ ID NO: 3266821 - RNA, 19 nt, Artificial Sequence
  Description of Artificial Sequence: Synthetic oligonucleotide
cuguccucgacuuuugucc

SEQ ID NO: 3266822 - RNA, 19 nt, Artificial Sequence
  Description of Artificial Sequence: Synthetic oligonucleotide
ucacagggaucccugaugc

SEQ ID NO: 3266823 - RNA, 19 nt, Artificial Sequence
  Description of Artificial Sequence: Synthetic oligonucleotide
cucuacuuugccuggaccc

SEQ ID NO: 3266824 - RNA, 19 nt, Artificial Sequence
  Description of Artificial Sequence: Synthetic oligonucleotide
acuggcaacgcugugcggc

SEQ ID NO: 3266825 - RNA, 19 nt, Artificial Sequence
  Description of Artificial Sequence: Synthetic oligonucleotide
cucucuucccaccauacag

SEQ ID NO: 3266826 - RNA, 19 nt, Artificial Sequence
  Description of Artificial Sequence: Synthetic oligonucleotide
gauccuggccagcagaccc

SEQ ID NO: 3266827 - RNA, 19 nt, Artificial Sequence
  Description of Artificial Sequence: Synthetic oligonucleotide
aucgugguggauccuggcc

SEQ ID NO: 3266828 - RNA, 19 nt, Artificial Sequence
  Description of Artificial Sequence: Synthetic oligonucleotide
uccugugaaaucuccauuc

SEQ ID NO: 3266829 - RNA, 19 nt, Artificial Sequence
  Description of Artificial Sequence: Synthetic oligonucleotide
cuuuuguccaguuccuuug

SEQ ID NO: 3266830 - RNA, 19 nt, Artificial Sequence
  Description of Artificial Sequence: Synthetic oligonucleotide
uguccaguuccuuugcucu

SEQ ID NO: 3266831 - RNA, 19 nt, Artificial Sequence
  Description of Artificial Sequence: Synthetic oligonucleotide
ugaaaucuccauuccggug

SEQ ID NO: 3266832 - RNA, 19 nt, Artificial Sequence
  Description of Artificial Sequence: Synthetic oligonucleotide
ucccugaugccacagcacc

SEQ ID NO: 3266833 - RNA, 19 nt, Artificial Sequence
  Description of Artificial Sequence: Synthetic oligonucleotide
gugggucuggcucagggcg

SEQ ID NO: 3266834 - RNA, 19 nt, Artificial Sequence
  Description of Artificial Sequence: Synthetic oligonucleotide
ucuggcaagggacuggcaa

SEQ ID NO: 3266835 - RNA, 19 nt, Artificial Sequence
  Description of Artificial Sequence: Synthetic oligonucleotide
acuguccucgacuuuuguc

SEQ ID NO: 3266836 - RNA, 19 nt, Artificial Sequence
  Description of Artificial Sequence: Synthetic oligonucleotide
uuuuguccaguuccuuugc

SEQ ID NO: 3266837 - RNA, 19 nt, Artificial Sequence
  Description of Artificial Sequence: Synthetic oligonucleotide
cugugaaaucuccauuccg

SEQ ID NO: 3266838 - RNA, 19 nt, Artificial Sequence
  Description of Artificial Sequence: Synthetic oligonucleotide
auacaggaccuuccucugc

SEQ ID NO: 3266839 - RNA, 19 nt, Artificial Sequence
  Description of Artificial Sequence: Synthetic oligonucleotide
uacaggaccuuccucugca

SEQ ID NO: 3266840 - RNA, 19 nt, Artificial Sequence
  Description of Artificial Sequence: Synthetic oligonucleotide
aacgcugugcggcucccuc

SEQ ID NO: 3266841 - RNA, 19 nt, Artificial Sequence
  Description of Artificial Sequence: Synthetic oligonucleotide
uaaauggcaggggcgagag

SEQ ID NO: 3266842 - RNA, 19 nt, Artificial Sequence
  Description of Artificial Sequence: Synthetic oligonucleotide
ucgugguggauccuggcca

SEQ ID NO: 3266843 - RNA, 19 nt, Artificial Sequence
  Description of Artificial Sequence: Synthetic oligonucleotide
aauaaauggcaggggcgag

SEQ ID NO: 3266844 - RNA, 19 nt, Artificial Sequence
  Description of Artificial Sequence: Synthetic oligonucleotide
aggaccuuccucugcagag

SEQ ID NO: 3266845 - RNA, 19 nt, Artificial Sequence
  Description of Artificial Sequence: Synthetic oligonucleotide
uuugccuggacccuccgua

SEQ ID NO: 3266846 - RNA, 19 nt, Artificial Sequence
  Description of Artificial Sequence: Synthetic oligonucleotide
ugccacagcaccccugucc

SEQ ID NO: 3266847 - RNA, 19 nt, Artificial Sequence
  Description of Artificial Sequence: Synthetic oligonucleotide
ucuccauuccgguggcagg

SEQ ID NO: 3266848 - RNA, 19 nt, Artificial Sequence
  Description of Artificial Sequence: Synthetic oligonucleotide
caagggacuggcaacgcug

SEQ ID NO: 3266849 - RNA, 19 nt, Artificial Sequence
  Description of Artificial Sequence: Synthetic oligonucleotide
aggguauggagcggcagcc

SEQ ID NO: 3266850 - RNA, 19 nt, Artificial Sequence
  Description of Artificial Sequence: Synthetic oligonucleotide
uuccuuugcucucuuccca

SEQ ID NO: 3266851 - RNA, 19 nt, Artificial Sequence
  Description of Artificial Sequence: Synthetic oligonucleotide
uccucugcagagcccagcc

SEQ ID NO: 3266852 - RNA, 19 nt, Artificial Sequence
  Description of Artificial Sequence: Synthetic oligonucleotide
gaucccugaugccacagca

SEQ ID NO: 3266853 - RNA, 19 nt, Artificial Sequence
  Description of Artificial Sequence: Synthetic oligonucleotide
aaagucuggcaagggacug

SEQ ID NO: 3266854 - RNA, 19 nt, Artificial Sequence
  Description of Artificial Sequence: Synthetic oligonucleotide
ucagggcgaacccugggcu

SEQ ID NO: 3266855 - RNA, 19 nt, Artificial Sequence
  Description of Artificial Sequence: Synthetic oligonucleotide
guuccuuugcucucuuccc

SEQ ID NO: 3266856 - RNA, 19 nt, Artificial Sequence
  Description of Artificial Sequence: Synthetic oligonucleotide
accauacaggaccuuccuc

SEQ ID NO: 3266857 - RNA, 19 nt, Artificial Sequence
  Description of Artificial Sequence: Synthetic oligonucleotide
agucuggcaagggacuggc

SEQ ID NO: 3266858 - RNA, 19 nt, Artificial Sequence
  Description of Artificial Sequence: Synthetic oligonucleotide
gaggguauggagcggcagc

SEQ ID NO: 3266859 - RNA, 19 nt, Artificial Sequence
  Description of Artificial Sequence: Synthetic oligonucleotide
cuccguacugccauuccag

SEQ ID NO: 3266860 - RNA, 19 nt, Artificial Sequence
  Description of Artificial Sequence: Synthetic oligonucleotide
aagucuggcaagggacugg

SEQ ID NO: 3266861 - RNA, 19 nt, Artificial Sequence
  Description of Artificial Sequence: Synthetic oligonucleotide
uuuguccaguuccuuugcu

SEQ ID NO: 3266862 - RNA, 19 nt, Artificial Sequence
  Description of Artificial Sequence: Synthetic oligonucleotide
uggcaagggacuggcaacg

SEQ ID NO: 3266863 - RNA, 19 nt, Artificial Sequence
  Description of Artificial Sequence: Synthetic oligonucleotide
ucuggcucagggcgaaccc

SEQ ID NO: 3266864 - RNA, 19 nt, Artificial Sequence
  Description of Artificial Sequence: Synthetic oligonucleotide
agggccgaggguauggagc

SEQ ID NO: 3266865 - RNA, 19 nt, Artificial Sequence
  Description of Artificial Sequence: Synthetic oligonucleotide
ggcagagcggcccaggcgg

SEQ ID NO: 3266866 - RNA, 19 nt, Artificial Sequence
  Description of Artificial Sequence: Synthetic oligonucleotide
ucugcagagcccagccugc

SEQ ID NO: 3266867 - RNA, 19 nt, Artificial Sequence
  Description of Artificial Sequence: Synthetic oligonucleotide
uccucuggcucuacuuugc

SEQ ID NO: 3266868 - RNA, 19 nt, Artificial Sequence
  Description of Artificial Sequence: Synthetic oligonucleotide
acuuuuguccaguuccuuu

SEQ ID NO: 3266869 - RNA, 19 nt, Artificial Sequence
  Description of Artificial Sequence: Synthetic oligonucleotide
cucugcagagcccagccug

SEQ ID NO: 3266870 - RNA, 19 nt, Artificial Sequence
  Description of Artificial Sequence: Synthetic oligonucleotide
gaccuuccucugcagagcc

SEQ ID NO: 3266871 - RNA, 19 nt, Artificial Sequence
  Description of Artificial Sequence: Synthetic oligonucleotide
agaggcagcacaggguggg

SEQ ID NO: 3266872 - RNA, 19 nt, Artificial Sequence
  Description of Artificial Sequence: Synthetic oligonucleotide
acugccauuccagucccgg

SEQ ID NO: 3266873 - RNA, 19 nt, Artificial Sequence
  Description of Artificial Sequence: Synthetic oligonucleotide
cagccugccccaaaugcgg

SEQ ID NO: 3266874 - RNA, 19 nt, Artificial Sequence
  Description of Artificial Sequence: Synthetic oligonucleotide
uguccucgacuuuugucca

SEQ ID NO: 3266875 - RNA, 19 nt, Artificial Sequence
  Description of Artificial Sequence: Synthetic oligonucleotide
agcaccccuguccucuggc

SEQ ID NO: 3266876 - RNA, 19 nt, Artificial Sequence
  Description of Artificial Sequence: Synthetic oligonucleotide
ugcucucuucccaccauac

SEQ ID NO: 3266877 - RNA, 19 nt, Artificial Sequence
  Description of Artificial Sequence: Synthetic oligonucleotide
cuggcugcagggccgaggg

SEQ ID NO: 3266878 - RNA, 19 nt, Artificial Sequence
  Description of Artificial Sequence: Synthetic oligonucleotide
aaauggcaggggcgagagg

SEQ ID NO: 3266879 - RNA, 19 nt, Artificial Sequence
  Description of Artificial Sequence: Synthetic oligonucleotide
cauacaggaccuuccucug

SEQ ID NO: 3266880 - RNA, 19 nt, Artificial Sequence
  Description of Artificial Sequence: Synthetic oligonucleotide
ucuacuuugccuggacccu

SEQ ID NO: 3266881 - RNA, 19 nt, Artificial Sequence
  Description of Artificial Sequence: Synthetic oligonucleotide
ugggcuggcugcagggccg

SEQ ID NO: 3266882 - RNA, 19 nt, Artificial Sequence
  Description of Artificial Sequence: Synthetic oligonucleotide
ggacuggcaacgcugugcg

SEQ ID NO: 3266883 - RNA, 19 nt, Artificial Sequence
  Description of Artificial Sequence: Synthetic oligonucleotide
acagggaucccugaugcca

SEQ ID NO: 3266884 - RNA, 19 nt, Artificial Sequence
  Description of Artificial Sequence: Synthetic oligonucleotide
uuguccaguuccuuugcuc

SEQ ID NO: 3266885 - RNA, 19 nt, Artificial Sequence
  Description of Artificial Sequence: Synthetic oligonucleotide
uggauccuggccagcagac

SEQ ID NO: 3266886 - RNA, 19 nt, Artificial Sequence
  Description of Artificial Sequence: Synthetic oligonucleotide
uacuuugccuggacccucc

SEQ ID NO: 3266887 - RNA, 19 nt, Artificial Sequence
  Description of Artificial Sequence: Synthetic oligonucleotide
ggaaagucuggcaagggac

SEQ ID NO: 3266888 - RNA, 19 nt, Artificial Sequence
  Description of Artificial Sequence: Synthetic oligonucleotide
uguccucuggcucuacuuu

SEQ ID NO: 3266889 - RNA, 19 nt, Artificial Sequence
  Description of Artificial Sequence: Synthetic oligonucleotide
cucacagggaucccugaug

SEQ ID NO: 3266890 - RNA, 19 nt, Artificial Sequence
  Description of Artificial Sequence: Synthetic oligonucleotide
gguauggagcggcagccgg

SEQ ID NO: 3266891 - RNA, 19 nt, Artificial Sequence
  Description of Artificial Sequence: Synthetic oligonucleotide
gagguggaggcagagcggc

SEQ ID NO: 3266892 - RNA, 19 nt, Artificial Sequence
  Description of Artificial Sequence: Synthetic oligonucleotide
acuccagagguggaggcag

SEQ ID NO: 3266893 - RNA, 19 nt, Artificial Sequence
  Description of Artificial Sequence: Synthetic oligonucleotide
uccuuugcucucuucccac

SEQ ID NO: 3266894 - RNA, 19 nt, Artificial Sequence
  Description of Artificial Sequence: Synthetic oligonucleotide
cuggcaagggacuggcaac

SEQ ID NO: 3266895 - RNA, 19 nt, Artificial Sequence
  Description of Artificial Sequence: Synthetic oligonucleotide
aucuccauuccgguggcag

SEQ ID NO: 3266896 - RNA, 19 nt, Artificial Sequence
  Description of Artificial Sequence: Synthetic oligonucleotide
cacagggugggucuggcuc

SEQ ID NO: 3266897 - RNA, 19 nt, Artificial Sequence
  Description of Artificial Sequence: Synthetic oligonucleotide
uggagcggcagccggacuc

SEQ ID NO: 3266898 - RNA, 19 nt, Artificial Sequence
  Description of Artificial Sequence: Synthetic oligonucleotide
cucagggcgaacccugggc

SEQ ID NO: 3266899 - RNA, 19 nt, Artificial Sequence
  Description of Artificial Sequence: Synthetic oligonucleotide
ggcgagaggcagcacaggg

SEQ ID NO: 3266900 - RNA, 19 nt, Artificial Sequence
  Description of Artificial Sequence: Synthetic oligonucleotide
uccucgaucgugguggauc

SEQ ID NO: 3266901 - RNA, 19 nt, Artificial Sequence
  Description of Artificial Sequence: Synthetic oligonucleotide
uggcucagggcgaacccug

SEQ ID NO: 3266902 - RNA, 19 nt, Artificial Sequence
  Description of Artificial Sequence: Synthetic oligonucleotide
gaucgugguggauccuggc

SEQ ID NO: 3266903 - RNA, 19 nt, Artificial Sequence
  Description of Artificial Sequence: Synthetic oligonucleotide
ugaugccacagcaccccug

SEQ ID NO: 3266904 - RNA, 19 nt, Artificial Sequence
  Description of Artificial Sequence: Synthetic oligonucleotide
cuggcucuacuuugccugg

SEQ ID NO: 3266905 - RNA, 19 nt, Artificial Sequence
  Description of Artificial Sequence: Synthetic oligonucleotide
uugaauguaauccaaauca

SEQ ID NO: 3266906 - RNA, 19 nt, Artificial Sequence
  Description of Artificial Sequence: Synthetic oligonucleotide
uagaaaguggcuuaaagcg

SEQ ID NO: 3266907 - RNA, 19 nt, Artificial Sequence
  Description of Artificial Sequence: Synthetic oligonucleotide
agucaguugaguuagcucc

SEQ ID NO: 3266908 - RNA, 19 nt, Artificial Sequence
  Description of Artificial Sequence: Synthetic oligonucleotide
auagaaaguggcuuaaagc

SEQ ID NO: 3266909 - RNA, 19 nt, Artificial Sequence
  Description of Artificial Sequence: Synthetic oligonucleotide
auuccuuuaaaauugcaac

SEQ ID NO: 3266910 - RNA, 19 nt, Artificial Sequence
  Description of Artificial Sequence: Synthetic oligonucleotide
aauagaaaguggcuuaaag

SEQ ID NO: 3266911 - RNA, 19 nt, Artificial Sequence
  Description of Artificial Sequence: Synthetic oligonucleotide
aucagaaucagcuuucugg

SEQ ID NO: 3266912 - RNA, 19 nt, Artificial Sequence
  Description of Artificial Sequence: Synthetic oligonucleotide
uguaauccaaaucagaauc

SEQ ID NO: 3266913 - RNA, 19 nt, Artificial Sequence
  Description of Artificial Sequence: Synthetic oligonucleotide
gauaauuccuuuaaaauug

SEQ ID NO: 3266914 - RNA, 19 nt, Artificial Sequence
  Description of Artificial Sequence: Synthetic oligonucleotide
auuuuaacugcucugucac

SEQ ID NO: 3266915 - RNA, 19 nt, Artificial Sequence
  Description of Artificial Sequence: Synthetic oligonucleotide
cuugauuucauauuccagc

SEQ ID NO: 3266916 - RNA, 19 nt, Artificial Sequence
  Description of Artificial Sequence: Synthetic oligonucleotide
aaagcgugcacacaaagcu

SEQ ID NO: 3266917 - RNA, 19 nt, Artificial Sequence
  Description of Artificial Sequence: Synthetic oligonucleotide
uuuuguaguucuuguaucg

SEQ ID NO: 3266918 - RNA, 19 nt, Artificial Sequence
  Description of Artificial Sequence: Synthetic oligonucleotide
uuuuguucaauagaaagug

SEQ ID NO: 3266919 - RNA, 19 nt, Artificial Sequence
  Description of Artificial Sequence: Synthetic oligonucleotide
gauaccgagacuuuauugc

SEQ ID NO: 3266920 - RNA, 19 nt, Artificial Sequence
  Description of Artificial Sequence: Synthetic oligonucleotide
uguaguucuuguaucgugg

SEQ ID NO: 3266921 - RNA, 19 nt, Artificial Sequence
  Description of Artificial Sequence: Synthetic oligonucleotide
uugaguuagcuccagaucu

SEQ ID NO: 3266922 - RNA, 19 nt, Artificial Sequence
  Description of Artificial Sequence: Synthetic oligonucleotide
auugaauguaauccaaauc

SEQ ID NO: 3266923 - RNA, 19 nt, Artificial Sequence
  Description of Artificial Sequence: Synthetic oligonucleotide
uuguucaauagaaaguggc

SEQ ID NO: 3266924 - RNA, 19 nt, Artificial Sequence
  Description of Artificial Sequence: Synthetic oligonucleotide
agaaucagcuuucuggaac

SEQ ID NO: 3266925 - RNA, 19 nt, Artificial Sequence
  Description of Artificial Sequence: Synthetic oligonucleotide
uuuauugcugauaauuccu

SEQ ID NO: 3266926 - RNA, 19 nt, Artificial Sequence
  Description of Artificial Sequence: Synthetic oligonucleotide
acaaaugcggcucuuguuc

SEQ ID NO: 3266927 - RNA, 19 nt, Artificial Sequence
  Description of Artificial Sequence: Synthetic oligonucleotide
cagaguagcacaaaugcgg

SEQ ID NO: 3266928 - RNA, 19 nt, Artificial Sequence
  Description of Artificial Sequence: Synthetic oligonucleotide
ucagcuuucuggaacauca

SEQ ID NO: 3266929 - RNA, 19 nt, Artificial Sequence
  Description of Artificial Sequence: Synthetic oligonucleotide
cauauuccagccuauauug

SEQ ID NO: 3266930 - RNA, 19 nt, Artificial Sequence
  Description of Artificial Sequence: Synthetic oligonucleotide
ugaauguaauccaaaucag

SEQ ID NO: 3266931 - RNA, 19 nt, Artificial Sequence
  Description of Artificial Sequence: Synthetic oligonucleotide
uuuaacugcucugucaccg

SEQ ID NO: 3266932 - RNA, 19 nt, Artificial Sequence
  Description of Artificial Sequence: Synthetic oligonucleotide
uuuguucaauagaaagugg

SEQ ID NO: 3266933 - RNA, 19 nt, Artificial Sequence
  Description of Artificial Sequence: Synthetic oligonucleotide
cucagaguagcacaaaugc

SEQ ID NO: 3266934 - RNA, 19 nt, Artificial Sequence
  Description of Artificial Sequence: Synthetic oligonucleotide
uauagguccggcaugugag

SEQ ID NO: 3266935 - RNA, 19 nt, Artificial Sequence
  Description of Artificial Sequence: Synthetic oligonucleotide
cuuuauugcugauaauucc

SEQ ID NO: 3266936 - RNA, 19 nt, Artificial Sequence
  Description of Artificial Sequence: Synthetic oligonucleotide
ucagaguagcacaaaugcg

SEQ ID NO: 3266937 - RNA, 19 nt, Artificial Sequence
  Description of Artificial Sequence: Synthetic oligonucleotide
ugauaauuccuuuaaaauu

SEQ ID NO: 3266938 - RNA, 19 nt, Artificial Sequence
  Description of Artificial Sequence: Synthetic oligonucleotide
uuuaaaauugcaacugcau

SEQ ID NO: 3266939 - RNA, 19 nt, Artificial Sequence
  Description of Artificial Sequence: Synthetic oligonucleotide
uugauuucauauuccagcc

SEQ ID NO: 3266940 - RNA, 19 nt, Artificial Sequence
  Description of Artificial Sequence: Synthetic oligonucleotide
uguaucguggucauugucu

SEQ ID NO: 3266941 - RNA, 19 nt, Artificial Sequence
  Description of Artificial Sequence: Synthetic oligonucleotide
uaaaauugcaacugcauuu

SEQ ID NO: 3266942 - RNA, 19 nt, Artificial Sequence
  Description of Artificial Sequence: Synthetic oligonucleotide
aauguaauccaaaucagaa

SEQ ID NO: 3266943 - RNA, 19 nt, Artificial Sequence
  Description of Artificial Sequence: Synthetic oligonucleotide
ugcacacaaagcuugauac

SEQ ID NO: 3266944 - RNA, 19 nt, Artificial Sequence
  Description of Artificial Sequence: Synthetic oligonucleotide
uuaaagcgugcacacaaag

SEQ ID NO: 3266945 - RNA, 19 nt, Artificial Sequence
  Description of Artificial Sequence: Synthetic oligonucleotide
uggaacaucagcuccagcu

SEQ ID NO: 3266946 - RNA, 19 nt, Artificial Sequence
  Description of Artificial Sequence: Synthetic oligonucleotide
uauauugaauguaauccaa

SEQ ID NO: 3266947 - RNA, 19 nt, Artificial Sequence
  Description of Artificial Sequence: Synthetic oligonucleotide
ucuuguaucguggucauug

SEQ ID NO: 3266948 - RNA, 19 nt, Artificial Sequence
  Description of Artificial Sequence: Synthetic oligonucleotide
aauccaaaucagaaucagc

SEQ ID NO: 3266949 - RNA, 19 nt, Artificial Sequence
  Description of Artificial Sequence: Synthetic oligonucleotide
uuaaaauugcaacugcauu

SEQ ID NO: 3266950 - RNA, 19 nt, Artificial Sequence
  Description of Artificial Sequence: Synthetic oligonucleotide
ucuugauuucauauuccag

SEQ ID NO: 3266951 - RNA, 19 nt, Artificial Sequence
  Description of Artificial Sequence: Synthetic oligonucleotide
caaagcuugauaccgagac

SEQ ID NO: 3266952 - RNA, 19 nt, Artificial Sequence
  Description of Artificial Sequence: Synthetic oligonucleotide
uuucuggaacaucagcucc

SEQ ID NO: 3266953 - RNA, 19 nt, Artificial Sequence
  Description of Artificial Sequence: Synthetic oligonucleotide
ucagaaucagcuuucugga

SEQ ID NO: 3266954 - RNA, 19 nt, Artificial Sequence
  Description of Artificial Sequence: Synthetic oligonucleotide
uguucaauagaaaguggcu

SEQ ID NO: 3266955 - RNA, 19 nt, Artificial Sequence
  Description of Artificial Sequence: Synthetic oligonucleotide
ugagauuuuaacugcucug

SEQ ID NO: 3266956 - RNA, 19 nt, Artificial Sequence
  Description of Artificial Sequence: Synthetic oligonucleotide
caugugagauuuuaacugc

SEQ ID NO: 3266957 - RNA, 19 nt, Artificial Sequence
  Description of Artificial Sequence: Synthetic oligonucleotide
cacacaaagcuugauaccg

SEQ ID NO: 3266958 - RNA, 19 nt, Artificial Sequence
  Description of Artificial Sequence: Synthetic oligonucleotide
ccuauauugaauguaaucc

SEQ ID NO: 3266959 - RNA, 19 nt, Artificial Sequence
  Description of Artificial Sequence: Synthetic oligonucleotide
uuccuuuaaaauugcaacu

SEQ ID NO: 3266960 - RNA, 19 nt, Artificial Sequence
  Description of Artificial Sequence: Synthetic oligonucleotide
uauugaauguaauccaaau

SEQ ID NO: 3266961 - RNA, 19 nt, Artificial Sequence
  Description of Artificial Sequence: Synthetic oligonucleotide
uaaagcgugcacacaaagc

SEQ ID NO: 3266962 - RNA, 19 nt, Artificial Sequence
  Description of Artificial Sequence: Synthetic oligonucleotide
agcuuucuggaacaucagc

SEQ ID NO: 3266963 - RNA, 19 nt, Artificial Sequence
  Description of Artificial Sequence: Synthetic oligonucleotide
uccuuuaaaauugcaacug

SEQ ID NO: 3266964 - RNA, 19 nt, Artificial Sequence
  Description of Artificial Sequence: Synthetic oligonucleotide
gauuuuaacugcucuguca

SEQ ID NO: 3266965 - RNA, 19 nt, Artificial Sequence
  Description of Artificial Sequence: Synthetic oligonucleotide
gagacuuuauugcugauaa

SEQ ID NO: 3266966 - RNA, 19 nt, Artificial Sequence
  Description of Artificial Sequence: Synthetic oligonucleotide
acuuuauugcugauaauuc

SEQ ID NO: 3266967 - RNA, 19 nt, Artificial Sequence
  Description of Artificial Sequence: Synthetic oligonucleotide
uggucuugauuucauauuc

SEQ ID NO: 3266968 - RNA, 19 nt, Artificial Sequence
  Description of Artificial Sequence: Synthetic oligonucleotide
auaauuccuuuaaaauugc

SEQ ID NO: 3266969 - RNA, 19 nt, Artificial Sequence
  Description of Artificial Sequence: Synthetic oligonucleotide
aucguggucauugucuugc

SEQ ID NO: 3266970 - RNA, 19 nt, Artificial Sequence
  Description of Artificial Sequence: Synthetic oligonucleotide
ucuucuucagucaguugag

SEQ ID NO: 3266971 - RNA, 19 nt, Artificial Sequence
  Description of Artificial Sequence: Synthetic oligonucleotide
ugauaccgagacuuuauug

SEQ ID NO: 3266972 - RNA, 19 nt, Artificial Sequence
  Description of Artificial Sequence: Synthetic oligonucleotide
uuagcuccagaucugucug

SEQ ID NO: 3266973 - RNA, 19 nt, Artificial Sequence
  Description of Artificial Sequence: Synthetic oligonucleotide
aauuccuuuaaaauugcaa

SEQ ID NO: 3266974 - RNA, 19 nt, Artificial Sequence
  Description of Artificial Sequence: Synthetic oligonucleotide
gucauugucuugcucagag

SEQ ID NO: 3266975 - RNA, 19 nt, Artificial Sequence
  Description of Artificial Sequence: Synthetic oligonucleotide
ucauauuccagccuauauu

SEQ ID NO: 3266976 - RNA, 19 nt, Artificial Sequence
  Description of Artificial Sequence: Synthetic oligonucleotide
auuggucuugauuucauau

SEQ ID NO: 3266977 - RNA, 19 nt, Artificial Sequence
  Description of Artificial Sequence: Synthetic oligonucleotide
auccaaaucagaaucagcu

SEQ ID NO: 3266978 - RNA, 19 nt, Artificial Sequence
  Description of Artificial Sequence: Synthetic oligonucleotide
uuuucucuccugcugaauc

SEQ ID NO: 3266979 - RNA, 19 nt, Artificial Sequence
  Description of Artificial Sequence: Synthetic oligonucleotide
uuauagguccggcauguga

SEQ ID NO: 3266980 - RNA, 19 nt, Artificial Sequence
  Description of Artificial Sequence: Synthetic oligonucleotide
aguagcacaaaugcggcuc

SEQ ID NO: 3266981 - RNA, 19 nt, Artificial Sequence
  Description of Artificial Sequence: Synthetic oligonucleotide
cuauauugaauguaaucca

SEQ ID NO: 3266982 - RNA, 19 nt, Artificial Sequence
  Description of Artificial Sequence: Synthetic oligonucleotide
uaauccaaaucagaaucag

SEQ ID NO: 3266983 - RNA, 19 nt, Artificial Sequence
  Description of Artificial Sequence: Synthetic oligonucleotide
agauuuuaacugcucuguc

SEQ ID NO: 3266984 - RNA, 19 nt, Artificial Sequence
  Description of Artificial Sequence: Synthetic oligonucleotide
uucaauagaaaguggcuua

SEQ ID NO: 3266985 - RNA, 19 nt, Artificial Sequence
  Description of Artificial Sequence: Synthetic oligonucleotide
ucuugcucagaguagcaca

SEQ ID NO: 3266986 - RNA, 19 nt, Artificial Sequence
  Description of Artificial Sequence: Synthetic oligonucleotide
gaaaguggcuuaaagcgug

SEQ ID NO: 3266987 - RNA, 19 nt, Artificial Sequence
  Description of Artificial Sequence: Synthetic oligonucleotide
gcaugugagauuuuaacug

SEQ ID NO: 3266988 - RNA, 19 nt, Artificial Sequence
  Description of Artificial Sequence: Synthetic oligonucleotide
gauuucauauuccagccua

SEQ ID NO: 3266989 - RNA, 19 nt, Artificial Sequence
  Description of Artificial Sequence: Synthetic oligonucleotide
uuccagccuauauugaaug

SEQ ID NO: 3266990 - RNA, 19 nt, Artificial Sequence
  Description of Artificial Sequence: Synthetic oligonucleotide
aaucagaaucagcuuucug

SEQ ID NO: 3266991 - RNA, 19 nt, Artificial Sequence
  Description of Artificial Sequence: Synthetic oligonucleotide
aguucuuguaucgugguca

SEQ ID NO: 3266992 - RNA, 19 nt, Artificial Sequence
  Description of Artificial Sequence: Synthetic oligonucleotide
agaguagcacaaaugcggc

SEQ ID NO: 3266993 - RNA, 19 nt, Artificial Sequence
  Description of Artificial Sequence: Synthetic oligonucleotide
aguggcuuaaagcgugcac

SEQ ID NO: 3266994 - RNA, 19 nt, Artificial Sequence
  Description of Artificial Sequence: Synthetic oligonucleotide
cuuuaaaauugcaacugca

SEQ ID NO: 3266995 - RNA, 19 nt, Artificial Sequence
  Description of Artificial Sequence: Synthetic oligonucleotide
uuguaguucuuguaucgug

SEQ ID NO: 3266996 - RNA, 19 nt, Artificial Sequence
  Description of Artificial Sequence: Synthetic oligonucleotide
aaaauugcaacugcauuuu

SEQ ID NO: 3266997 - RNA, 19 nt, Artificial Sequence
  Description of Artificial Sequence: Synthetic oligonucleotide
ugcugaaucugggugauug

SEQ ID NO: 3266998 - RNA, 19 nt, Artificial Sequence
  Description of Artificial Sequence: Synthetic oligonucleotide
uucauauuccagccuauau

SEQ ID NO: 3266999 - RNA, 19 nt, Artificial Sequence
  Description of Artificial Sequence: Synthetic oligonucleotide
aguugaguuagcuccagau

SEQ ID NO: 3267000 - RNA, 19 nt, Artificial Sequence
  Description of Artificial Sequence: Synthetic oligonucleotide
aaagcuugauaccgagacu

SEQ ID NO: 3267001 - RNA, 19 nt, Artificial Sequence
  Description of Artificial Sequence: Synthetic oligonucleotide
uauuccagccuauauugaa

SEQ ID NO: 3267002 - RNA, 19 nt, Artificial Sequence
  Description of Artificial Sequence: Synthetic oligonucleotide
ucuucagucaguugaguua

SEQ ID NO: 3267003 - RNA, 19 nt, Artificial Sequence
  Description of Artificial Sequence: Synthetic oligonucleotide
cucuucuucagucaguuga

SEQ ID NO: 3267004 - RNA, 19 nt, Artificial Sequence
  Description of Artificial Sequence: Synthetic oligonucleotide
cuuucucuucuucagucag

SEQ ID NO: 3267005 - RNA, 19 nt, Artificial Sequence
  Description of Artificial Sequence: Synthetic oligonucleotide
uguaugauuuggaagaggg

SEQ ID NO: 3267006 - RNA, 19 nt, Artificial Sequence
  Description of Artificial Sequence: Synthetic oligonucleotide
aacucaucaaagcagaucu

SEQ ID NO: 3267007 - RNA, 19 nt, Artificial Sequence
  Description of Artificial Sequence: Synthetic oligonucleotide
uaugauuuggaagagggcg

SEQ ID NO: 3267008 - RNA, 19 nt, Artificial Sequence
  Description of Artificial Sequence: Synthetic oligonucleotide
aucaaagcagaucugguug

SEQ ID NO: 3267009 - RNA, 19 nt, Artificial Sequence
  Description of Artificial Sequence: Synthetic oligonucleotide
uguacaggaacucaucaaa

SEQ ID NO: 3267010 - RNA, 19 nt, Artificial Sequence
  Description of Artificial Sequence: Synthetic oligonucleotide
guagugugcacacaguugc

SEQ ID NO: 3267011 - RNA, 19 nt, Artificial Sequence
  Description of Artificial Sequence: Synthetic oligonucleotide
ucuggcaugacuccugggc

SEQ ID NO: 3267012 - RNA, 19 nt, Artificial Sequence
  Description of Artificial Sequence: Synthetic oligonucleotide
ucugugauguaguaugucu

SEQ ID NO: 3267013 - RNA, 19 nt, Artificial Sequence
  Description of Artificial Sequence: Synthetic oligonucleotide
aggcacacuauccaggagg

SEQ ID NO: 3267014 - RNA, 19 nt, Artificial Sequence
  Description of Artificial Sequence: Synthetic oligonucleotide
agcucugugauguaguaug

SEQ ID NO: 3267015 - RNA, 19 nt, Artificial Sequence
  Description of Artificial Sequence: Synthetic oligonucleotide
aguaugucugccugcggcc

SEQ ID NO: 3267016 - RNA, 19 nt, Artificial Sequence
  Description of Artificial Sequence: Synthetic oligonucleotide
gaagcaguguaugauuugg

SEQ ID NO: 3267017 - RNA, 19 nt, Artificial Sequence
  Description of Artificial Sequence: Synthetic oligonucleotide
gauguaguaugucugccug

SEQ ID NO: 3267018 - RNA, 19 nt, Artificial Sequence
  Description of Artificial Sequence: Synthetic oligonucleotide
uguaguaugucugccugcg

SEQ ID NO: 3267019 - RNA, 19 nt, Artificial Sequence
  Description of Artificial Sequence: Synthetic oligonucleotide
ugugauguaguaugucugc

SEQ ID NO: 3267020 - RNA, 19 nt, Artificial Sequence
  Description of Artificial Sequence: Synthetic oligonucleotide
uccuucaccaguuugccca

SEQ ID NO: 3267021 - RNA, 19 nt, Artificial Sequence
  Description of Artificial Sequence: Synthetic oligonucleotide
uugcccaagauguacagga

SEQ ID NO: 3267022 - RNA, 19 nt, Artificial Sequence
  Description of Artificial Sequence: Synthetic oligonucleotide
ucagccacccgaaacagcu

SEQ ID NO: 3267023 - RNA, 19 nt, Artificial Sequence
  Description of Artificial Sequence: Synthetic oligonucleotide
acaggaacucaucaaagca

SEQ ID NO: 3267024 - RNA, 19 nt, Artificial Sequence
  Description of Artificial Sequence: Synthetic oligonucleotide
uaguaugucugccugcggc

SEQ ID NO: 3267025 - RNA, 19 nt, Artificial Sequence
  Description of Artificial Sequence: Synthetic oligonucleotide
uacaggaacucaucaaagc

SEQ ID NO: 3267026 - RNA, 19 nt, Artificial Sequence
  Description of Artificial Sequence: Synthetic oligonucleotide
uuugucagccacccgaaac

SEQ ID NO: 3267027 - RNA, 19 nt, Artificial Sequence
  Description of Artificial Sequence: Synthetic oligonucleotide
uccucucucuaguagaggc

SEQ ID NO: 3267028 - RNA, 19 nt, Artificial Sequence
  Description of Artificial Sequence: Synthetic oligonucleotide
uccuccagggacaaggucu

SEQ ID NO: 3267029 - RNA, 19 nt, Artificial Sequence
  Description of Artificial Sequence: Synthetic oligonucleotide
caguguaugauuuggaaga

SEQ ID NO: 3267030 - RNA, 19 nt, Artificial Sequence
  Description of Artificial Sequence: Synthetic oligonucleotide
cucaucaaagcagaucugg

SEQ ID NO: 3267031 - RNA, 19 nt, Artificial Sequence
  Description of Artificial Sequence: Synthetic oligonucleotide
aacugcaggugauaguccu

SEQ ID NO: 3267032 - RNA, 19 nt, Artificial Sequence
  Description of Artificial Sequence: Synthetic oligonucleotide
aagguguccaugaagcgag

SEQ ID NO: 3267033 - RNA, 19 nt, Artificial Sequence
  Description of Artificial Sequence: Synthetic oligonucleotide
ucaaagcagaucugguugc

SEQ ID NO: 3267034 - RNA, 19 nt, Artificial Sequence
  Description of Artificial Sequence: Synthetic oligonucleotide
gaagcauagugguggaagc

SEQ ID NO: 3267035 - RNA, 19 nt, Artificial Sequence
  Description of Artificial Sequence: Synthetic oligonucleotide
uaguccuucaccaguuugc

SEQ ID NO: 3267036 - RNA, 19 nt, Artificial Sequence
  Description of Artificial Sequence: Synthetic oligonucleotide
uucccgggaagcauagugg

SEQ ID NO: 3267037 - RNA, 19 nt, Artificial Sequence
  Description of Artificial Sequence: Synthetic oligonucleotide
accaguuugcccaagaugu

SEQ ID NO: 3267038 - RNA, 19 nt, Artificial Sequence
  Description of Artificial Sequence: Synthetic oligonucleotide
gauguacaggaacucauca

SEQ ID NO: 3267039 - RNA, 19 nt, Artificial Sequence
  Description of Artificial Sequence: Synthetic oligonucleotide
cuaguagaggcugugcugg

SEQ ID NO: 3267040 - RNA, 19 nt, Artificial Sequence
  Description of Artificial Sequence: Synthetic oligonucleotide
caggaacucaucaaagcag

SEQ ID NO: 3267041 - RNA, 19 nt, Artificial Sequence
  Description of Artificial Sequence: Synthetic oligonucleotide
cacacuauccaggaggagg

SEQ ID NO: 3267042 - RNA, 19 nt, Artificial Sequence
  Description of Artificial Sequence: Synthetic oligonucleotide
ucuaguagaggcugugcug

SEQ ID NO: 3267043 - RNA, 19 nt, Artificial Sequence
  Description of Artificial Sequence: Synthetic oligonucleotide
uugucagccacccgaaaca

SEQ ID NO: 3267044 - RNA, 19 nt, Artificial Sequence
  Description of Artificial Sequence: Synthetic oligonucleotide
gacuccugggcccagcagg

SEQ ID NO: 3267045 - RNA, 19 nt, Artificial Sequence
  Description of Artificial Sequence: Synthetic oligonucleotide
aggaggagggcuuucagcu

SEQ ID NO: 3267046 - RNA, 19 nt, Artificial Sequence
  Description of Artificial Sequence: Synthetic oligonucleotide
auguaguaugucugccugc

SEQ ID NO: 3267047 - RNA, 19 nt, Artificial Sequence
  Description of Artificial Sequence: Synthetic oligonucleotide
uugccgguggaacugcagg

SEQ ID NO: 3267048 - RNA, 19 nt, Artificial Sequence
  Description of Artificial Sequence: Synthetic oligonucleotide
uguccucucucuaguagag

SEQ ID NO: 3267049 - RNA, 19 nt, Artificial Sequence
  Description of Artificial Sequence: Synthetic oligonucleotide
ucaucaaagcagaucuggu

SEQ ID NO: 3267050 - RNA, 19 nt, Artificial Sequence
  Description of Artificial Sequence: Synthetic oligonucleotide
aggugauaguccuucacca

SEQ ID NO: 3267051 - RNA, 19 nt, Artificial Sequence
  Description of Artificial Sequence: Synthetic oligonucleotide
ugauguaguaugucugccu

SEQ ID NO: 3267052 - RNA, 19 nt, Artificial Sequence
  Description of Artificial Sequence: Synthetic oligonucleotide
uuucagcuccuccagggac

SEQ ID NO: 3267053 - RNA, 19 nt, Artificial Sequence
  Description of Artificial Sequence: Synthetic oligonucleotide
guagaggcugugcugggcg

SEQ ID NO: 3267054 - RNA, 19 nt, Artificial Sequence
  Description of Artificial Sequence: Synthetic oligonucleotide
caggugauaguccuucacc

SEQ ID NO: 3267055 - RNA, 19 nt, Artificial Sequence
  Description of Artificial Sequence: Synthetic oligonucleotide
aagagggcguccuccacug

SEQ ID NO: 3267056 - RNA, 19 nt, Artificial Sequence
  Description of Artificial Sequence: Synthetic oligonucleotide
aaacagcucugugauguag

SEQ ID NO: 3267057 - RNA, 19 nt, Artificial Sequence
  Description of Artificial Sequence: Synthetic oligonucleotide
ugucuggcaugacuccugg

SEQ ID NO: 3267058 - RNA, 19 nt, Artificial Sequence
  Description of Artificial Sequence: Synthetic oligonucleotide
uguccaugaagcgaggcac

SEQ ID NO: 3267059 - RNA, 19 nt, Artificial Sequence
  Description of Artificial Sequence: Synthetic oligonucleotide
ugaagcgaggcacacuauc

SEQ ID NO: 3267060 - RNA, 19 nt, Artificial Sequence
  Description of Artificial Sequence: Synthetic oligonucleotide
cugugauguaguaugucug

SEQ ID NO: 3267061 - RNA, 19 nt, Artificial Sequence
  Description of Artificial Sequence: Synthetic oligonucleotide
aguccuucaccaguuugcc

SEQ ID NO: 3267062 - RNA, 19 nt, Artificial Sequence
  Description of Artificial Sequence: Synthetic oligonucleotide
auaguccuucaccaguuug

SEQ ID NO: 3267063 - RNA, 19 nt, Artificial Sequence
  Description of Artificial Sequence: Synthetic oligonucleotide
gaggagggcuuucagcucc

SEQ ID NO: 3267064 - RNA, 19 nt, Artificial Sequence
  Description of Artificial Sequence: Synthetic oligonucleotide
gaagcgaggcacacuaucc

SEQ ID NO: 3267065 - RNA, 19 nt, Artificial Sequence
  Description of Artificial Sequence: Synthetic oligonucleotide
acacuauccaggaggaggg

SEQ ID NO: 3267066 - RNA, 19 nt, Artificial Sequence
  Description of Artificial Sequence: Synthetic oligonucleotide
agcuccuccagggacaagg

SEQ ID NO: 3267067 - RNA, 19 nt, Artificial Sequence
  Description of Artificial Sequence: Synthetic oligonucleotide
aagcgaggcacacuaucca

SEQ ID NO: 3267068 - RNA, 19 nt, Artificial Sequence
  Description of Artificial Sequence: Synthetic oligonucleotide
gcaguguaugauuuggaag

SEQ ID NO: 3267069 - RNA, 19 nt, Artificial Sequence
  Description of Artificial Sequence: Synthetic oligonucleotide
uuugcccaagauguacagg

SEQ ID NO: 3267070 - RNA, 19 nt, Artificial Sequence
  Description of Artificial Sequence: Synthetic oligonucleotide
cuucccgggaagcauagug

SEQ ID NO: 3267071 - RNA, 19 nt, Artificial Sequence
  Description of Artificial Sequence: Synthetic oligonucleotide
aagauguacaggaacucau

SEQ ID NO: 3267072 - RNA, 19 nt, Artificial Sequence
  Description of Artificial Sequence: Synthetic oligonucleotide
agugugcacacaguugccg

SEQ ID NO: 3267073 - RNA, 19 nt, Artificial Sequence
  Description of Artificial Sequence: Synthetic oligonucleotide
agggacaaggucuccacgu

SEQ ID NO: 3267074 - RNA, 19 nt, Artificial Sequence
  Description of Artificial Sequence: Synthetic oligonucleotide
ugugcugggcgcaguagug

SEQ ID NO: 3267075 - RNA, 19 nt, Artificial Sequence
  Description of Artificial Sequence: Synthetic oligonucleotide
uggaagcaguguaugauuu

SEQ ID NO: 3267076 - RNA, 19 nt, Artificial Sequence
  Description of Artificial Sequence: Synthetic oligonucleotide
agcaguguaugauuuggaa

SEQ ID NO: 3267077 - RNA, 19 nt, Artificial Sequence
  Description of Artificial Sequence: Synthetic oligonucleotide
uucagcuccuccagggaca

SEQ ID NO: 3267078 - RNA, 19 nt, Artificial Sequence
  Description of Artificial Sequence: Synthetic oligonucleotide
cauagugguggaagcagug

SEQ ID NO: 3267079 - RNA, 19 nt, Artificial Sequence
  Description of Artificial Sequence: Synthetic oligonucleotide
agggcuuucagcuccucca

SEQ ID NO: 3267080 - RNA, 19 nt, Artificial Sequence
  Description of Artificial Sequence: Synthetic oligonucleotide
guuugcccaagauguacag

SEQ ID NO: 3267081 - RNA, 19 nt, Artificial Sequence
  Description of Artificial Sequence: Synthetic oligonucleotide
guacaggaacucaucaaag

SEQ ID NO: 3267082 - RNA, 19 nt, Artificial Sequence
  Description of Artificial Sequence: Synthetic oligonucleotide
agcauagugguggaagcag

SEQ ID NO: 3267083 - RNA, 19 nt, Artificial Sequence
  Description of Artificial Sequence: Synthetic oligonucleotide
ugauaguccuucaccaguu

SEQ ID NO: 3267084 - RNA, 19 nt, Artificial Sequence
  Description of Artificial Sequence: Synthetic oligonucleotide
ugcacacaguugccggugg

SEQ ID NO: 3267085 - RNA, 19 nt, Artificial Sequence
  Description of Artificial Sequence: Synthetic oligonucleotide
gugugcacacaguugccgg

SEQ ID NO: 3267086 - RNA, 19 nt, Artificial Sequence
  Description of Artificial Sequence: Synthetic oligonucleotide
cccaagguguccaugaagc

SEQ ID NO: 3267087 - RNA, 19 nt, Artificial Sequence
  Description of Artificial Sequence: Synthetic oligonucleotide
aguguaugauuuggaagag

SEQ ID NO: 3267088 - RNA, 19 nt, Artificial Sequence
  Description of Artificial Sequence: Synthetic oligonucleotide
cuggcaugacuccugggcc

SEQ ID NO: 3267089 - RNA, 19 nt, Artificial Sequence
  Description of Artificial Sequence: Synthetic oligonucleotide
acaaggucuccacgucccc

SEQ ID NO: 3267090 - RNA, 19 nt, Artificial Sequence
  Description of Artificial Sequence: Synthetic oligonucleotide
uggugugucuggcaugacu

SEQ ID NO: 3267091 - RNA, 19 nt, Artificial Sequence
  Description of Artificial Sequence: Synthetic oligonucleotide
agauguacaggaacucauc

SEQ ID NO: 3267092 - RNA, 19 nt, Artificial Sequence
  Description of Artificial Sequence: Synthetic oligonucleotide
aagcagaucugguugccuu

SEQ ID NO: 3267093 - RNA, 19 nt, Artificial Sequence
  Description of Artificial Sequence: Synthetic oligonucleotide
agcgaggcacacuauccag

SEQ ID NO: 3267094 - RNA, 19 nt, Artificial Sequence
  Description of Artificial Sequence: Synthetic oligonucleotide
gcuuucagcuccuccaggg

SEQ ID NO: 3267095 - RNA, 19 nt, Artificial Sequence
  Description of Artificial Sequence: Synthetic oligonucleotide
gacaaggucuccacguccc

SEQ ID NO: 3267096 - RNA, 19 nt, Artificial Sequence
  Description of Artificial Sequence: Synthetic oligonucleotide
ucugccugcggcccaaggu

SEQ ID NO: 3267097 - RNA, 19 nt, Artificial Sequence
  Description of Artificial Sequence: Synthetic oligonucleotide
uccacguccccuucccggg

SEQ ID NO: 3267098 - RNA, 19 nt, Artificial Sequence
  Description of Artificial Sequence: Synthetic oligonucleotide
uucaccaguuugcccaaga

SEQ ID NO: 3267099 - RNA, 19 nt, Artificial Sequence
  Description of Artificial Sequence: Synthetic oligonucleotide
ggaagcauagugguggaag

SEQ ID NO: 3267100 - RNA, 19 nt, Artificial Sequence
  Description of Artificial Sequence: Synthetic oligonucleotide
gaacucaucaaagcagauc

SEQ ID NO: 3267101 - RNA, 19 nt, Artificial Sequence
  Description of Artificial Sequence: Synthetic oligonucleotide
acccgaaacagcucuguga

SEQ ID NO: 3267102 - RNA, 19 nt, Artificial Sequence
  Description of Artificial Sequence: Synthetic oligonucleotide
uuggaagagggcguccucc

SEQ ID NO: 3267103 - RNA, 19 nt, Artificial Sequence
  Description of Artificial Sequence: Synthetic oligonucleotide
aguagaggcugugcugggc

SEQ ID NO: 3267104 - RNA, 19 nt, Artificial Sequence
  Description of Artificial Sequence: Synthetic oligonucleotide
aguagugugcacacaguug

SEQ ID NO: 3267105 - RNA, 19 nt, Artificial Sequence
  Description of Artificial Sequence: Synthetic oligonucleotide
agaauauccgcguuggugc

SEQ ID NO: 3267106 - RNA, 19 nt, Artificial Sequence
  Description of Artificial Sequence: Synthetic oligonucleotide
aacgucaccugccuguucc

SEQ ID NO: 3267107 - RNA, 19 nt, Artificial Sequence
  Description of Artificial Sequence: Synthetic oligonucleotide
acacaauacgcucagcucg

SEQ ID NO: 3267108 - RNA, 19 nt, Artificial Sequence
  Description of Artificial Sequence: Synthetic oligonucleotide
gucgcaaucacacaauacg

SEQ ID NO: 3267109 - RNA, 19 nt, Artificial Sequence
  Description of Artificial Sequence: Synthetic oligonucleotide
aauacgcucagcucguaag

SEQ ID NO: 3267110 - RNA, 19 nt, Artificial Sequence
  Description of Artificial Sequence: Synthetic oligonucleotide
agcucugagaccgacaucg

SEQ ID NO: 3267111 - RNA, 19 nt, Artificial Sequence
  Description of Artificial Sequence: Synthetic oligonucleotide
aaucacacaauacgcucag

SEQ ID NO: 3267112 - RNA, 19 nt, Artificial Sequence
  Description of Artificial Sequence: Synthetic oligonucleotide
ucugagaccgacaucgcug

SEQ ID NO: 3267113 - RNA, 19 nt, Artificial Sequence
  Description of Artificial Sequence: Synthetic oligonucleotide
aagauggggugucccaggc

SEQ ID NO: 3267114 - RNA, 19 nt, Artificial Sequence
  Description of Artificial Sequence: Synthetic oligonucleotide
uugaagaugaucagcgcga

SEQ ID NO: 3267115 - RNA, 19 nt, Artificial Sequence
  Description of Artificial Sequence: Synthetic oligonucleotide
ucacacaauacgcucagcu

SEQ ID NO: 3267116 - RNA, 19 nt, Artificial Sequence
  Description of Artificial Sequence: Synthetic oligonucleotide
uagaucagaggcaggggcg

SEQ ID NO: 3267117 - RNA, 19 nt, Artificial Sequence
  Description of Artificial Sequence: Synthetic oligonucleotide
ucagugacuucucuccggg

SEQ ID NO: 3267118 - RNA, 19 nt, Artificial Sequence
  Description of Artificial Sequence: Synthetic oligonucleotide
ucgcaaucacacaauacgc

SEQ ID NO: 3267119 - RNA, 19 nt, Artificial Sequence
  Description of Artificial Sequence: Synthetic oligonucleotide
uggcucggagagaagaugg

SEQ ID NO: 3267120 - RNA, 19 nt, Artificial Sequence
  Description of Artificial Sequence: Synthetic oligonucleotide
cucgcauacuggaagaggc

SEQ ID NO: 3267121 - RNA, 19 nt, Artificial Sequence
  Description of Artificial Sequence: Synthetic oligonucleotide
auacgcucagcucguaagc

SEQ ID NO: 3267122 - RNA, 19 nt, Artificial Sequence
  Description of Artificial Sequence: Synthetic oligonucleotide
gauggggugucccaggccc

SEQ ID NO: 3267123 - RNA, 19 nt, Artificial Sequence
  Description of Artificial Sequence: Synthetic oligonucleotide
agaccgacaucgcuggggc

SEQ ID NO: 3267124 - RNA, 19 nt, Artificial Sequence
  Description of Artificial Sequence: Synthetic oligonucleotide
agucuugccggugaggugg

SEQ ID NO: 3267125 - RNA, 19 nt, Artificial Sequence
  Description of Artificial Sequence: Synthetic oligonucleotide
guagaucagaggcaggggc

SEQ ID NO: 3267126 - RNA, 19 nt, Artificial Sequence
  Description of Artificial Sequence: Synthetic oligonucleotide
ggcaaagcuccccagagcg

SEQ ID NO: 3267127 - RNA, 19 nt, Artificial Sequence
  Description of Artificial Sequence: Synthetic oligonucleotide
ggugugacagcucugagac

SEQ ID NO: 3267128 - RNA, 19 nt, Artificial Sequence
  Description of Artificial Sequence: Synthetic oligonucleotide
gaauauccgcguuggugcg

SEQ ID NO: 3267129 - RNA, 19 nt, Artificial Sequence
  Description of Artificial Sequence: Synthetic oligonucleotide
caccggguagaucagaggc

SEQ ID NO: 3267130 - RNA, 19 nt, Artificial Sequence
  Description of Artificial Sequence: Synthetic oligonucleotide
ugcaaucugcggaacccgg

SEQ ID NO: 3267131 - RNA, 19 nt, Artificial Sequence
  Description of Artificial Sequence: Synthetic oligonucleotide
acccgauccaugucgcugc

SEQ ID NO: 3267132 - RNA, 19 nt, Artificial Sequence
  Description of Artificial Sequence: Synthetic oligonucleotide
uguugaagaugaucagcgc

SEQ ID NO: 3267133 - RNA, 19 nt, Artificial Sequence
  Description of Artificial Sequence: Synthetic oligonucleotide
agcgcgaugucgcaaucac

SEQ ID NO: 3267134 - RNA, 19 nt, Artificial Sequence
  Description of Artificial Sequence: Synthetic oligonucleotide
ucgcauacuggaagaggcg

SEQ ID NO: 3267135 - RNA, 19 nt, Artificial Sequence
  Description of Artificial Sequence: Synthetic oligonucleotide
ucggagagaagauggggug

SEQ ID NO: 3267136 - RNA, 19 nt, Artificial Sequence
  Description of Artificial Sequence: Synthetic oligonucleotide
cugagaccgacaucgcugg

SEQ ID NO: 3267137 - RNA, 19 nt, Artificial Sequence
  Description of Artificial Sequence: Synthetic oligonucleotide
ugucgcaaucacacaauac

SEQ ID NO: 3267138 - RNA, 19 nt, Artificial Sequence
  Description of Artificial Sequence: Synthetic oligonucleotide
ugcgcgcuguugaagauga

SEQ ID NO: 3267139 - RNA, 19 nt, Artificial Sequence
  Description of Artificial Sequence: Synthetic oligonucleotide
uugagcagcacccgaucca

SEQ ID NO: 3267140 - RNA, 19 nt, Artificial Sequence
  Description of Artificial Sequence: Synthetic oligonucleotide
cuugagcagcacccgaucc

SEQ ID NO: 3267141 - RNA, 19 nt, Artificial Sequence
  Description of Artificial Sequence: Synthetic oligonucleotide
acagcucugagaccgacau

SEQ ID NO: 3267142 - RNA, 19 nt, Artificial Sequence
  Description of Artificial Sequence: Synthetic oligonucleotide
ggugagguggcucggagag

SEQ ID NO: 3267143 - RNA, 19 nt, Artificial Sequence
  Description of Artificial Sequence: Synthetic oligonucleotide
cagaauauccgcguuggug

SEQ ID NO: 3267144 - RNA, 19 nt, Artificial Sequence
  Description of Artificial Sequence: Synthetic oligonucleotide
uugccggugagguggcucg

SEQ ID NO: 3267145 - RNA, 19 nt, Artificial Sequence
  Description of Artificial Sequence: Synthetic oligonucleotide
caaucugcggaacccgggg

SEQ ID NO: 3267146 - RNA, 19 nt, Artificial Sequence
  Description of Artificial Sequence: Synthetic oligonucleotide
cucagugacuucucuccgg

SEQ ID NO: 3267147 - RNA, 19 nt, Artificial Sequence
  Description of Artificial Sequence: Synthetic oligonucleotide
agauggggugucccaggcc

SEQ ID NO: 3267148 - RNA, 19 nt, Artificial Sequence
  Description of Artificial Sequence: Synthetic oligonucleotide
aauauccgcguuggugcgg

SEQ ID NO: 3267149 - RNA, 19 nt, Artificial Sequence
  Description of Artificial Sequence: Synthetic oligonucleotide
uucagcgucugcagaauau

SEQ ID NO: 3267150 - RNA, 19 nt, Artificial Sequence
  Description of Artificial Sequence: Synthetic oligonucleotide
gagaccgacaucgcugggg

SEQ ID NO: 3267151 - RNA, 19 nt, Artificial Sequence
  Description of Artificial Sequence: Synthetic oligonucleotide
cacacaauacgcucagcuc

SEQ ID NO: 3267152 - RNA, 19 nt, Artificial Sequence
  Description of Artificial Sequence: Synthetic oligonucleotide
auauccgcguuggugcggc

SEQ ID NO: 3267153 - RNA, 19 nt, Artificial Sequence
  Description of Artificial Sequence: Synthetic oligonucleotide
agaugaucagcgcgauguc

SEQ ID NO: 3267154 - RNA, 19 nt, Artificial Sequence
  Description of Artificial Sequence: Synthetic oligonucleotide
agcagcacccgauccaugu

SEQ ID NO: 3267155 - RNA, 19 nt, Artificial Sequence
  Description of Artificial Sequence: Synthetic oligonucleotide
cagcgucugcagaauaucc

SEQ ID NO: 3267156 - RNA, 19 nt, Artificial Sequence
  Description of Artificial Sequence: Synthetic oligonucleotide
cagcacccgauccaugucg

SEQ ID NO: 3267157 - RNA, 19 nt, Artificial Sequence
  Description of Artificial Sequence: Synthetic oligonucleotide
agaagauggggugucccag

SEQ ID NO: 3267158 - RNA, 19 nt, Artificial Sequence
  Description of Artificial Sequence: Synthetic oligonucleotide
agcgucugcagaauauccg

SEQ ID NO: 3267159 - RNA, 19 nt, Artificial Sequence
  Description of Artificial Sequence: Synthetic oligonucleotide
gagggcgcgggcuguaggg

SEQ ID NO: 3267160 - RNA, 19 nt, Artificial Sequence
  Description of Artificial Sequence: Synthetic oligonucleotide
caggccggcgggcagaucc

SEQ ID NO: 3267161 - RNA, 19 nt, Artificial Sequence
  Description of Artificial Sequence: Synthetic oligonucleotide
ugcucuaccgcggccagcc

SEQ ID NO: 3267162 - RNA, 19 nt, Artificial Sequence
  Description of Artificial Sequence: Synthetic oligonucleotide
uccaccucuggcucaggcc

SEQ ID NO: 3267163 - RNA, 19 nt, Artificial Sequence
  Description of Artificial Sequence: Synthetic oligonucleotide
auacuggaagaggcgcugc

SEQ ID NO: 3267164 - RNA, 19 nt, Artificial Sequence
  Description of Artificial Sequence: Synthetic oligonucleotide
ucaagcggcgcagggaggc

SEQ ID NO: 3267165 - RNA, 19 nt, Artificial Sequence
  Description of Artificial Sequence: Synthetic oligonucleotide
ucugcagaauauccgcguu

SEQ ID NO: 3267166 - RNA, 19 nt, Artificial Sequence
  Description of Artificial Sequence: Synthetic oligonucleotide
cucaggcccguccaggccc

SEQ ID NO: 3267167 - RNA, 19 nt, Artificial Sequence
  Description of Artificial Sequence: Synthetic oligonucleotide
aagcuccccagagcggggc

SEQ ID NO: 3267168 - RNA, 19 nt, Artificial Sequence
  Description of Artificial Sequence: Synthetic oligonucleotide
ugugcucuaccgcggccag

SEQ ID NO: 3267169 - RNA, 19 nt, Artificial Sequence
  Description of Artificial Sequence: Synthetic oligonucleotide
gcugcucgcauacuggaag

SEQ ID NO: 3267170 - RNA, 19 nt, Artificial Sequence
  Description of Artificial Sequence: Synthetic oligonucleotide
gaagaugaucagcgcgaug

SEQ ID NO: 3267171 - RNA, 19 nt, Artificial Sequence
  Description of Artificial Sequence: Synthetic oligonucleotide
gagaagaugggguguccca

SEQ ID NO: 3267172 - RNA, 19 nt, Artificial Sequence
  Description of Artificial Sequence: Synthetic oligonucleotide
ucagaggcaggggcgaagc

SEQ ID NO: 3267173 - RNA, 19 nt, Artificial Sequence
  Description of Artificial Sequence: Synthetic oligonucleotide
uggugaacgucaccugccu

SEQ ID NO: 3267174 - RNA, 19 nt, Artificial Sequence
  Description of Artificial Sequence: Synthetic oligonucleotide
uacaggcuccucugcgagg

SEQ ID NO: 3267175 - RNA, 19 nt, Artificial Sequence
  Description of Artificial Sequence: Synthetic oligonucleotide
gcaggggcgaagcugagcc

SEQ ID NO: 3267176 - RNA, 19 nt, Artificial Sequence
  Description of Artificial Sequence: Synthetic oligonucleotide
gugacuucucuccgggccc

SEQ ID NO: 3267177 - RNA, 19 nt, Artificial Sequence
  Description of Artificial Sequence: Synthetic oligonucleotide
ucgcuagccgggaggggcg

SEQ ID NO: 3267178 - RNA, 19 nt, Artificial Sequence
  Description of Artificial Sequence: Synthetic oligonucleotide
caucgcuggggccaccggg

SEQ ID NO: 3267179 - RNA, 19 nt, Artificial Sequence
  Description of Artificial Sequence: Synthetic oligonucleotide
cugcagaauauccgcguug

SEQ ID NO: 3267180 - RNA, 19 nt, Artificial Sequence
  Description of Artificial Sequence: Synthetic oligonucleotide
ucguguggcucgcuguacu

SEQ ID NO: 3267181 - RNA, 19 nt, Artificial Sequence
  Description of Artificial Sequence: Synthetic oligonucleotide
aggcuccucugcgaggugc

SEQ ID NO: 3267182 - RNA, 19 nt, Artificial Sequence
  Description of Artificial Sequence: Synthetic oligonucleotide
uggaagaggcgcugcgcgc

SEQ ID NO: 3267183 - RNA, 19 nt, Artificial Sequence
  Description of Artificial Sequence: Synthetic oligonucleotide
aucacacaauacgcucagc

SEQ ID NO: 3267184 - RNA, 19 nt, Artificial Sequence
  Description of Artificial Sequence: Synthetic oligonucleotide
agucgccagguacaggggu

SEQ ID NO: 3267185 - RNA, 19 nt, Artificial Sequence
  Description of Artificial Sequence: Synthetic oligonucleotide
cauacuggaagaggcgcug

SEQ ID NO: 3267186 - RNA, 19 nt, Artificial Sequence
  Description of Artificial Sequence: Synthetic oligonucleotide
agcacccgauccaugucgc

SEQ ID NO: 3267187 - RNA, 19 nt, Artificial Sequence
  Description of Artificial Sequence: Synthetic oligonucleotide
agaggcaggggcgaagcug

SEQ ID NO: 3267188 - RNA, 19 nt, Artificial Sequence
  Description of Artificial Sequence: Synthetic oligonucleotide
ucuaccgcggccagccguc

SEQ ID NO: 3267189 - RNA, 19 nt, Artificial Sequence
  Description of Artificial Sequence: Synthetic oligonucleotide
cucgcuagccgggaggggc

SEQ ID NO: 3267190 - RNA, 19 nt, Artificial Sequence
  Description of Artificial Sequence: Synthetic oligonucleotide
ggugcaaucugcggaaccc

SEQ ID NO: 3267191 - RNA, 19 nt, Artificial Sequence
  Description of Artificial Sequence: Synthetic oligonucleotide
ucgcugcucgcauacugga

SEQ ID NO: 3267192 - RNA, 19 nt, Artificial Sequence
  Description of Artificial Sequence: Synthetic oligonucleotide
gucgcugcucgcauacugg

SEQ ID NO: 3267193 - RNA, 19 nt, Artificial Sequence
  Description of Artificial Sequence: Synthetic oligonucleotide
ucgccagguacaggggugg

SEQ ID NO: 3267194 - RNA, 19 nt, Artificial Sequence
  Description of Artificial Sequence: Synthetic oligonucleotide
ucucuccgggccccucugg

SEQ ID NO: 3267195 - RNA, 19 nt, Artificial Sequence
  Description of Artificial Sequence: Synthetic oligonucleotide
uccgcguuggugcggcucu

SEQ ID NO: 3267196 - RNA, 19 nt, Artificial Sequence
  Description of Artificial Sequence: Synthetic oligonucleotide
agcgcgucccgcgucaggg

SEQ ID NO: 3267197 - RNA, 19 nt, Artificial Sequence
  Description of Artificial Sequence: Synthetic oligonucleotide
aaagcuccccagagcgggg

SEQ ID NO: 3267198 - RNA, 19 nt, Artificial Sequence
  Description of Artificial Sequence: Synthetic oligonucleotide
ugcucgcauacuggaagag

SEQ ID NO: 3267199 - RNA, 19 nt, Artificial Sequence
  Description of Artificial Sequence: Synthetic oligonucleotide
aucagcgcgaugucgcaau

SEQ ID NO: 3267200 - RNA, 19 nt, Artificial Sequence
  Description of Artificial Sequence: Synthetic oligonucleotide
ucucguguggcucgcugua

SEQ ID NO: 3267201 - RNA, 19 nt, Artificial Sequence
  Description of Artificial Sequence: Synthetic oligonucleotide
gcgucugcagaauauccgc

SEQ ID NO: 3267202 - RNA, 19 nt, Artificial Sequence
  Description of Artificial Sequence: Synthetic oligonucleotide
aagcggcgcagggaggccg

SEQ ID NO: 3267203 - RNA, 19 nt, Artificial Sequence
  Description of Artificial Sequence: Synthetic oligonucleotide
gugcaaucugcggaacccg

SEQ ID NO: 3267204 - RNA, 19 nt, Artificial Sequence
  Description of Artificial Sequence: Synthetic oligonucleotide
ugaagaugaucagcgcgau

SEQ ID NO: 3267205 - RNA, 19 nt, Artificial Sequence
  Description of Artificial Sequence: Synthetic oligonucleotide
uuagacauguucuuuaugg

SEQ ID NO: 3267206 - RNA, 19 nt, Artificial Sequence
  Description of Artificial Sequence: Synthetic oligonucleotide
aaaggugucuagcagcagc

SEQ ID NO: 3267207 - RNA, 19 nt, Artificial Sequence
  Description of Artificial Sequence: Synthetic oligonucleotide
ugugguuaugcucucagcg

SEQ ID NO: 3267208 - RNA, 19 nt, Artificial Sequence
  Description of Artificial Sequence: Synthetic oligonucleotide
aaugaagugucuauucugc

SEQ ID NO: 3267209 - RNA, 19 nt, Artificial Sequence
  Description of Artificial Sequence: Synthetic oligonucleotide
aaaugcuacaguugcaguc

SEQ ID NO: 3267210 - RNA, 19 nt, Artificial Sequence
  Description of Artificial Sequence: Synthetic oligonucleotide
ucuagcagcagcuuggcgg

SEQ ID NO: 3267211 - RNA, 19 nt, Artificial Sequence
  Description of Artificial Sequence: Synthetic oligonucleotide
aacaccacaucucuuacag

SEQ ID NO: 3267212 - RNA, 19 nt, Artificial Sequence
  Description of Artificial Sequence: Synthetic oligonucleotide
aaaacgaacugcuccacag

SEQ ID NO: 3267213 - RNA, 19 nt, Artificial Sequence
  Description of Artificial Sequence: Synthetic oligonucleotide
ucaaagaugugcaagucug

SEQ ID NO: 3267214 - RNA, 19 nt, Artificial Sequence
  Description of Artificial Sequence: Synthetic oligonucleotide
gauuccaaagccuccaggg

SEQ ID NO: 3267215 - RNA, 19 nt, Artificial Sequence
  Description of Artificial Sequence: Synthetic oligonucleotide
aaacuucaaaacgaacugc

SEQ ID NO: 3267216 - RNA, 19 nt, Artificial Sequence
  Description of Artificial Sequence: Synthetic oligonucleotide
uucuuuauggucuugugcu

SEQ ID NO: 3267217 - RNA, 19 nt, Artificial Sequence
  Description of Artificial Sequence: Synthetic oligonucleotide
aguguagaagcucugaaca

SEQ ID NO: 3267218 - RNA, 19 nt, Artificial Sequence
  Description of Artificial Sequence: Synthetic oligonucleotide
guuugaaucgagaagcugg

SEQ ID NO: 3267219 - RNA, 19 nt, Artificial Sequence
  Description of Artificial Sequence: Synthetic oligonucleotide
uuugcaaaugcuacaguug

SEQ ID NO: 3267220 - RNA, 19 nt, Artificial Sequence
  Description of Artificial Sequence: Synthetic oligonucleotide
uguguauugaacguguaug

SEQ ID NO: 3267221 - RNA, 19 nt, Artificial Sequence
  Description of Artificial Sequence: Synthetic oligonucleotide
aacguguaugugguuaugc

SEQ ID NO: 3267222 - RNA, 19 nt, Artificial Sequence
  Description of Artificial Sequence: Synthetic oligonucleotide
uauugaacguguauguggu

SEQ ID NO: 3267223 - RNA, 19 nt, Artificial Sequence
  Description of Artificial Sequence: Synthetic oligonucleotide
agacauguucuuuaugguc

SEQ ID NO: 3267224 - RNA, 19 nt, Artificial Sequence
  Description of Artificial Sequence: Synthetic oligonucleotide
ugaaucgagaagcuggaac

SEQ ID NO: 3267225 - RNA, 19 nt, Artificial Sequence
  Description of Artificial Sequence: Synthetic oligonucleotide
ugugcaagucugcugaagc

SEQ ID NO: 3267226 - RNA, 19 nt, Artificial Sequence
  Description of Artificial Sequence: Synthetic oligonucleotide
aacgaacugcuccacagug

SEQ ID NO: 3267227 - RNA, 19 nt, Artificial Sequence
  Description of Artificial Sequence: Synthetic oligonucleotide
gaaucgagaagcuggaaca

SEQ ID NO: 3267228 - RNA, 19 nt, Artificial Sequence
  Description of Artificial Sequence: Synthetic oligonucleotide
uaugugguuaugcucucag

SEQ ID NO: 3267229 - RNA, 19 nt, Artificial Sequence
  Description of Artificial Sequence: Synthetic oligonucleotide
cuuacagaaggugugcugg

SEQ ID NO: 3267230 - RNA, 19 nt, Artificial Sequence
  Description of Artificial Sequence: Synthetic oligonucleotide
guugcagucaaagaugugc

SEQ ID NO: 3267231 - RNA, 19 nt, Artificial Sequence
  Description of Artificial Sequence: Synthetic oligonucleotide
uuuugcaaaugcuacaguu

SEQ ID NO: 3267232 - RNA, 19 nt, Artificial Sequence
  Description of Artificial Sequence: Synthetic oligonucleotide
agaugugcaagucugcuga

SEQ ID NO: 3267233 - RNA, 19 nt, Artificial Sequence
  Description of Artificial Sequence: Synthetic oligonucleotide
uucgcugccgcccaggccc

SEQ ID NO: 3267234 - RNA, 19 nt, Artificial Sequence
  Description of Artificial Sequence: Synthetic oligonucleotide
ucugcugaagcccaaacuu

SEQ ID NO: 3267235 - RNA, 19 nt, Artificial Sequence
  Description of Artificial Sequence: Synthetic oligonucleotide
uuugaaucgagaagcugga

SEQ ID NO: 3267236 - RNA, 19 nt, Artificial Sequence
  Description of Artificial Sequence: Synthetic oligonucleotide
aaugcuacaguugcaguca

SEQ ID NO: 3267237 - RNA, 19 nt, Artificial Sequence
  Description of Artificial Sequence: Synthetic oligonucleotide
cuuagcucggcgcacaggc

SEQ ID NO: 3267238 - RNA, 19 nt, Artificial Sequence
  Description of Artificial Sequence: Synthetic oligonucleotide
ucacucuuuagacauguuc

SEQ ID NO: 3267239 - RNA, 19 nt, Artificial Sequence
  Description of Artificial Sequence: Synthetic oligonucleotide
aagccuccaggguuggagc

SEQ ID NO: 3267240 - RNA, 19 nt, Artificial Sequence
  Description of Artificial Sequence: Synthetic oligonucleotide
ugguuaugcucucagcgcc

SEQ ID NO: 3267241 - RNA, 19 nt, Artificial Sequence
  Description of Artificial Sequence: Synthetic oligonucleotide
ucgagaagcuggaacaaug

SEQ ID NO: 3267242 - RNA, 19 nt, Artificial Sequence
  Description of Artificial Sequence: Synthetic oligonucleotide
ggaguuugaaucgagaagc

SEQ ID NO: 3267243 - RNA, 19 nt, Artificial Sequence
  Description of Artificial Sequence: Synthetic oligonucleotide
uuuagacauguucuuuaug

SEQ ID NO: 3267244 - RNA, 19 nt, Artificial Sequence
  Description of Artificial Sequence: Synthetic oligonucleotide
accgcugugaaccggucgc

SEQ ID NO: 3267245 - RNA, 19 nt, Artificial Sequence
  Description of Artificial Sequence: Synthetic oligonucleotide
uugaauuccucggugacca

SEQ ID NO: 3267246 - RNA, 19 nt, Artificial Sequence
  Description of Artificial Sequence: Synthetic oligonucleotide
aauuccucggugaccacac

SEQ ID NO: 3267247 - RNA, 19 nt, Artificial Sequence
  Description of Artificial Sequence: Synthetic oligonucleotide
auugaauuccucggugacc

SEQ ID NO: 3267248 - RNA, 19 nt, Artificial Sequence
  Description of Artificial Sequence: Synthetic oligonucleotide
acaaugaagugucuauucu

SEQ ID NO: 3267249 - RNA, 19 nt, Artificial Sequence
  Description of Artificial Sequence: Synthetic oligonucleotide
uacucaaaggugucuagca

SEQ ID NO: 3267250 - RNA, 19 nt, Artificial Sequence
  Description of Artificial Sequence: Synthetic oligonucleotide
gcuuuguguguauugaacg

SEQ ID NO: 3267251 - RNA, 19 nt, Artificial Sequence
  Description of Artificial Sequence: Synthetic oligonucleotide
guucuuuauggucuugugc

SEQ ID NO: 3267252 - RNA, 19 nt, Artificial Sequence
  Description of Artificial Sequence: Synthetic oligonucleotide
aagaugugcaagucugcug

SEQ ID NO: 3267253 - RNA, 19 nt, Artificial Sequence
  Description of Artificial Sequence: Synthetic oligonucleotide
caaugaagugucuauucug

SEQ ID NO: 3267254 - RNA, 19 nt, Artificial Sequence
  Description of Artificial Sequence: Synthetic oligonucleotide
agaagcuggaacaaugaag

SEQ ID NO: 3267255 - RNA, 19 nt, Artificial Sequence
  Description of Artificial Sequence: Synthetic oligonucleotide
ucuuuagacauguucuuua

SEQ ID NO: 3267256 - RNA, 19 nt, Artificial Sequence
  Description of Artificial Sequence: Synthetic oligonucleotide
auggcucucucccagucac

SEQ ID NO: 3267257 - RNA, 19 nt, Artificial Sequence
  Description of Artificial Sequence: Synthetic oligonucleotide
uuuguguguauugaacgug

SEQ ID NO: 3267258 - RNA, 19 nt, Artificial Sequence
  Description of Artificial Sequence: Synthetic oligonucleotide
gucacugccauugaauucc

SEQ ID NO: 3267259 - RNA, 19 nt, Artificial Sequence
  Description of Artificial Sequence: Synthetic oligonucleotide
uuguguguauugaacgugu

SEQ ID NO: 3267260 - RNA, 19 nt, Artificial Sequence
  Description of Artificial Sequence: Synthetic oligonucleotide
aaagccuccaggguuggag

SEQ ID NO: 3267261 - RNA, 19 nt, Artificial Sequence
  Description of Artificial Sequence: Synthetic oligonucleotide
aaagaugugcaagucugcu

SEQ ID NO: 3267262 - RNA, 19 nt, Artificial Sequence
  Description of Artificial Sequence: Synthetic oligonucleotide
gaagcugagccguugccgc

SEQ ID NO: 3267263 - RNA, 19 nt, Artificial Sequence
  Description of Artificial Sequence: Synthetic oligonucleotide
acucaaaggugucuagcag

SEQ ID NO: 3267264 - RNA, 19 nt, Artificial Sequence
  Description of Artificial Sequence: Synthetic oligonucleotide
agucacugccauugaauuc

SEQ ID NO: 3267265 - RNA, 19 nt, Artificial Sequence
  Description of Artificial Sequence: Synthetic oligonucleotide
gaagcuggaacaaugaagu

SEQ ID NO: 3267266 - RNA, 19 nt, Artificial Sequence
  Description of Artificial Sequence: Synthetic oligonucleotide
uucaggaguuugaaucgag

SEQ ID NO: 3267267 - RNA, 19 nt, Artificial Sequence
  Description of Artificial Sequence: Synthetic oligonucleotide
gaguguagaagcucugaac

SEQ ID NO: 3267268 - RNA, 19 nt, Artificial Sequence
  Description of Artificial Sequence: Synthetic oligonucleotide
uguauugaacguguaugug

SEQ ID NO: 3267269 - RNA, 19 nt, Artificial Sequence
  Description of Artificial Sequence: Synthetic oligonucleotide
cugccauugaauuccucgg

SEQ ID NO: 3267270 - RNA, 19 nt, Artificial Sequence
  Description of Artificial Sequence: Synthetic oligonucleotide
ucuuacagaaggugugcug

SEQ ID NO: 3267271 - RNA, 19 nt, Artificial Sequence
  Description of Artificial Sequence: Synthetic oligonucleotide
uguucuuuauggucuugug

SEQ ID NO: 3267272 - RNA, 19 nt, Artificial Sequence
  Description of Artificial Sequence: Synthetic oligonucleotide
aaacgaacugcuccacagu

SEQ ID NO: 3267273 - RNA, 19 nt, Artificial Sequence
  Description of Artificial Sequence: Synthetic oligonucleotide
ucaggaguuugaaucgaga

SEQ ID NO: 3267274 - RNA, 19 nt, Artificial Sequence
  Description of Artificial Sequence: Synthetic oligonucleotide
uccucggugaccacacucc

SEQ ID NO: 3267275 - RNA, 19 nt, Artificial Sequence
  Description of Artificial Sequence: Synthetic oligonucleotide
uagacauguucuuuauggu

SEQ ID NO: 3267276 - RNA, 19 nt, Artificial Sequence
  Description of Artificial Sequence: Synthetic oligonucleotide
uuggcggugcccucgaagc

SEQ ID NO: 3267277 - RNA, 19 nt, Artificial Sequence
  Description of Artificial Sequence: Synthetic oligonucleotide
cuuuauggucuugugcucc

SEQ ID NO: 3267278 - RNA, 19 nt, Artificial Sequence
  Description of Artificial Sequence: Synthetic oligonucleotide
ugcaagucugcugaagccc

SEQ ID NO: 3267279 - RNA, 19 nt, Artificial Sequence
  Description of Artificial Sequence: Synthetic oligonucleotide
agucugcugaagcccaaac

SEQ ID NO: 3267280 - RNA, 19 nt, Artificial Sequence
  Description of Artificial Sequence: Synthetic oligonucleotide
uggagcgucucccagcgcu

SEQ ID NO: 3267281 - RNA, 19 nt, Artificial Sequence
  Description of Artificial Sequence: Synthetic oligonucleotide
ccgaacagugccuucaucg

SEQ ID NO: 3267282 - RNA, 19 nt, Artificial Sequence
  Description of Artificial Sequence: Synthetic oligonucleotide
acaguugcagucaaagaug

SEQ ID NO: 3267283 - RNA, 19 nt, Artificial Sequence
  Description of Artificial Sequence: Synthetic oligonucleotide
ucggugaccacacuccgaa

SEQ ID NO: 3267284 - RNA, 19 nt, Artificial Sequence
  Description of Artificial Sequence: Synthetic oligonucleotide
gugguuaugcucucagcgc

SEQ ID NO: 3267285 - RNA, 19 nt, Artificial Sequence
  Description of Artificial Sequence: Synthetic oligonucleotide
cauugaauuccucggugac

SEQ ID NO: 3267286 - RNA, 19 nt, Artificial Sequence
  Description of Artificial Sequence: Synthetic oligonucleotide
ugucuauucugcuucuuuu

SEQ ID NO: 3267287 - RNA, 19 nt, Artificial Sequence
  Description of Artificial Sequence: Synthetic oligonucleotide
aguggcagccuccugugug

SEQ ID NO: 3267288 - RNA, 19 nt, Artificial Sequence
  Description of Artificial Sequence: Synthetic oligonucleotide
ugaagugucuauucugcuu

SEQ ID NO: 3267289 - RNA, 19 nt, Artificial Sequence
  Description of Artificial Sequence: Synthetic oligonucleotide
caccacaucucuuacagaa

SEQ ID NO: 3267290 - RNA, 19 nt, Artificial Sequence
  Description of Artificial Sequence: Synthetic oligonucleotide
ugcaaaugcuacaguugca

SEQ ID NO: 3267291 - RNA, 19 nt, Artificial Sequence
  Description of Artificial Sequence: Synthetic oligonucleotide
uugaacguguaugugguua

SEQ ID NO: 3267292 - RNA, 19 nt, Artificial Sequence
  Description of Artificial Sequence: Synthetic oligonucleotide
gugaccacggcgcuccgcg

SEQ ID NO: 3267293 - RNA, 19 nt, Artificial Sequence
  Description of Artificial Sequence: Synthetic oligonucleotide
accggagcgccgcugcucc

SEQ ID NO: 3267294 - RNA, 19 nt, Artificial Sequence
  Description of Artificial Sequence: Synthetic oligonucleotide
uuuauggucuugugcuccu

SEQ ID NO: 3267295 - RNA, 19 nt, Artificial Sequence
  Description of Artificial Sequence: Synthetic oligonucleotide
ugccauugaauuccucggu

SEQ ID NO: 3267296 - RNA, 19 nt, Artificial Sequence
  Description of Artificial Sequence: Synthetic oligonucleotide
ccacaucucuuacagaagg

SEQ ID NO: 3267297 - RNA, 19 nt, Artificial Sequence
  Description of Artificial Sequence: Synthetic oligonucleotide
gcuacaguugcagucaaag

SEQ ID NO: 3267298 - RNA, 19 nt, Artificial Sequence
  Description of Artificial Sequence: Synthetic oligonucleotide
ugaacguguaugugguuau

SEQ ID NO: 3267299 - RNA, 19 nt, Artificial Sequence
  Description of Artificial Sequence: Synthetic oligonucleotide
acguguaugugguuaugcu

SEQ ID NO: 3267300 - RNA, 19 nt, Artificial Sequence
  Description of Artificial Sequence: Synthetic oligonucleotide
aagugucuauucugcuucu

SEQ ID NO: 3267301 - RNA, 19 nt, Artificial Sequence
  Description of Artificial Sequence: Synthetic oligonucleotide
gugaccacacuccgaacag

SEQ ID NO: 3267302 - RNA, 19 nt, Artificial Sequence
  Description of Artificial Sequence: Synthetic oligonucleotide
acuucaaaacgaacugcuc

SEQ ID NO: 3267303 - RNA, 19 nt, Artificial Sequence
  Description of Artificial Sequence: Synthetic oligonucleotide
aggguuggagcguggagug

SEQ ID NO: 3267304 - RNA, 19 nt, Artificial Sequence
  Description of Artificial Sequence: Synthetic oligonucleotide
aguuugaaucgagaagcug

SEQ ID NO: 3267305 - RNA, 19 nt, Artificial Sequence
  Description of Artificial Sequence: Synthetic oligonucleotide
uuucagguaagccagauug

SEQ ID NO: 3267306 - RNA, 19 nt, Artificial Sequence
  Description of Artificial Sequence: Synthetic oligonucleotide
auuuugaauaaccagacca

SEQ ID NO: 3267307 - RNA, 19 nt, Artificial Sequence
  Description of Artificial Sequence: Synthetic oligonucleotide
gagaaaaguguccaaaggg

SEQ ID NO: 3267308 - RNA, 19 nt, Artificial Sequence
  Description of Artificial Sequence: Synthetic oligonucleotide
uugaauaaccagaccaucg

SEQ ID NO: 3267309 - RNA, 19 nt, Artificial Sequence
  Description of Artificial Sequence: Synthetic oligonucleotide
uuagcacucaucaucuugg

SEQ ID NO: 3267310 - RNA, 19 nt, Artificial Sequence
  Description of Artificial Sequence: Synthetic oligonucleotide
uuucuuucagguaagccag

SEQ ID NO: 3267311 - RNA, 19 nt, Artificial Sequence
  Description of Artificial Sequence: Synthetic oligonucleotide
ucaggauuagcacucauca

SEQ ID NO: 3267312 - RNA, 19 nt, Artificial Sequence
  Description of Artificial Sequence: Synthetic oligonucleotide
gaguguaucauggaaaggg

SEQ ID NO: 3267313 - RNA, 19 nt, Artificial Sequence
  Description of Artificial Sequence: Synthetic oligonucleotide
aggauuagcacucaucauc

SEQ ID NO: 3267314 - RNA, 19 nt, Artificial Sequence
  Description of Artificial Sequence: Synthetic oligonucleotide
auugguuucauuucucaag

SEQ ID NO: 3267315 - RNA, 19 nt, Artificial Sequence
  Description of Artificial Sequence: Synthetic oligonucleotide
cauauccucaauauacugg

SEQ ID NO: 3267316 - RNA, 19 nt, Artificial Sequence
  Description of Artificial Sequence: Synthetic oligonucleotide
uguaucauggaaagggaug

SEQ ID NO: 3267317 - RNA, 19 nt, Artificial Sequence
  Description of Artificial Sequence: Synthetic oligonucleotide
aauauacuggagaaaagug

SEQ ID NO: 3267318 - RNA, 19 nt, Artificial Sequence
  Description of Artificial Sequence: Synthetic oligonucleotide
uauacuggagaaaaguguc

SEQ ID NO: 3267319 - RNA, 19 nt, Artificial Sequence
  Description of Artificial Sequence: Synthetic oligonucleotide
uugguuucauuucucaagc

SEQ ID NO: 3267320 - RNA, 19 nt, Artificial Sequence
  Description of Artificial Sequence: Synthetic oligonucleotide
caagcggucauucucacgg

SEQ ID NO: 3267321 - RNA, 19 nt, Artificial Sequence
  Description of Artificial Sequence: Synthetic oligonucleotide
aaccagaccaucguaugcc

SEQ ID NO: 3267322 - RNA, 19 nt, Artificial Sequence
  Description of Artificial Sequence: Synthetic oligonucleotide
uaugccuucauccccauau

SEQ ID NO: 3267323 - RNA, 19 nt, Artificial Sequence
  Description of Artificial Sequence: Synthetic oligonucleotide
uucucauucuuucuuucag

SEQ ID NO: 3267324 - RNA, 19 nt, Artificial Sequence
  Description of Artificial Sequence: Synthetic oligonucleotide
auauccucaauauacugga

SEQ ID NO: 3267325 - RNA, 19 nt, Artificial Sequence
  Description of Artificial Sequence: Synthetic oligonucleotide
uuugauaguuucuuccugu

SEQ ID NO: 3267326 - RNA, 19 nt, Artificial Sequence
  Description of Artificial Sequence: Synthetic oligonucleotide
uggaguguaucauggaaag

SEQ ID NO: 3267327 - RNA, 19 nt, Artificial Sequence
  Description of Artificial Sequence: Synthetic oligonucleotide
ucaauauacuggagaaaag

SEQ ID NO: 3267328 - RNA, 19 nt, Artificial Sequence
  Description of Artificial Sequence: Synthetic oligonucleotide
uuuugaauaaccagaccau

SEQ ID NO: 3267329 - RNA, 19 nt, Artificial Sequence
  Description of Artificial Sequence: Synthetic oligonucleotide
ucucauucuuucuuucagg

SEQ ID NO: 3267330 - RNA, 19 nt, Artificial Sequence
  Description of Artificial Sequence: Synthetic oligonucleotide
ugaauaaccagaccaucgu

SEQ ID NO: 3267331 - RNA, 19 nt, Artificial Sequence
  Description of Artificial Sequence: Synthetic oligonucleotide
cuuucuuucagguaagcca

SEQ ID NO: 3267332 - RNA, 19 nt, Artificial Sequence
  Description of Artificial Sequence: Synthetic oligonucleotide
aucguaugccuucaucccc

SEQ ID NO: 3267333 - RNA, 19 nt, Artificial Sequence
  Description of Artificial Sequence: Synthetic oligonucleotide
auuagcacucaucaucuug

SEQ ID NO: 3267334 - RNA, 19 nt, Artificial Sequence
  Description of Artificial Sequence: Synthetic oligonucleotide
uggagaaaaguguccaaag

SEQ ID NO: 3267335 - RNA, 19 nt, Artificial Sequence
  Description of Artificial Sequence: Synthetic oligonucleotide
ucuucuucaggauuagcac

SEQ ID NO: 3267336 - RNA, 19 nt, Artificial Sequence
  Description of Artificial Sequence: Synthetic oligonucleotide
uucagguaagccagauugg

SEQ ID NO: 3267337 - RNA, 19 nt, Artificial Sequence
  Description of Artificial Sequence: Synthetic oligonucleotide
gguuucauuucucaagcgg

SEQ ID NO: 3267338 - RNA, 19 nt, Artificial Sequence
  Description of Artificial Sequence: Synthetic oligonucleotide
cucacgggcaauaucagac

SEQ ID NO: 3267339 - RNA, 19 nt, Artificial Sequence
  Description of Artificial Sequence: Synthetic oligonucleotide
agacgcauuuugaauaacc

SEQ ID NO: 3267340 - RNA, 19 nt, Artificial Sequence
  Description of Artificial Sequence: Synthetic oligonucleotide
uuucuuccugucuucgccg

SEQ ID NO: 3267341 - RNA, 19 nt, Artificial Sequence
  Description of Artificial Sequence: Synthetic oligonucleotide
uccucaauauacuggagaa

SEQ ID NO: 3267342 - RNA, 19 nt, Artificial Sequence
  Description of Artificial Sequence: Synthetic oligonucleotide
aaaaguguccaaagggucu

SEQ ID NO: 3267343 - RNA, 19 nt, Artificial Sequence
  Description of Artificial Sequence: Synthetic oligonucleotide
aauaucagacgcauuuuga

SEQ ID NO: 3267344 - RNA, 19 nt, Artificial Sequence
  Description of Artificial Sequence: Synthetic oligonucleotide
aguuucuuccugucuucgc

SEQ ID NO: 3267345 - RNA, 19 nt, Artificial Sequence
  Description of Artificial Sequence: Synthetic oligonucleotide
aauaaccagaccaucguau

SEQ ID NO: 3267346 - RNA, 19 nt, Artificial Sequence
  Description of Artificial Sequence: Synthetic oligonucleotide
ucucaagcggucauucuca

SEQ ID NO: 3267347 - RNA, 19 nt, Artificial Sequence
  Description of Artificial Sequence: Synthetic oligonucleotide
acgcauuuugaauaaccag

SEQ ID NO: 3267348 - RNA, 19 nt, Artificial Sequence
  Description of Artificial Sequence: Synthetic oligonucleotide
cauucuuucuuucagguaa

SEQ ID NO: 3267349 - RNA, 19 nt, Artificial Sequence
  Description of Artificial Sequence: Synthetic oligonucleotide
auaguuucuuccugucuuc

SEQ ID NO: 3267350 - RNA, 19 nt, Artificial Sequence
  Description of Artificial Sequence: Synthetic oligonucleotide
uuggaguguaucauggaaa

SEQ ID NO: 3267351 - RNA, 19 nt, Artificial Sequence
  Description of Artificial Sequence: Synthetic oligonucleotide
ggagaaaaguguccaaagg

SEQ ID NO: 3267352 - RNA, 19 nt, Artificial Sequence
  Description of Artificial Sequence: Synthetic oligonucleotide
uucuucaggauuagcacuc

SEQ ID NO: 3267353 - RNA, 19 nt, Artificial Sequence
  Description of Artificial Sequence: Synthetic oligonucleotide
uaaccagaccaucguaugc

SEQ ID NO: 3267354 - RNA, 19 nt, Artificial Sequence
  Description of Artificial Sequence: Synthetic oligonucleotide
auaaccagaccaucguaug

SEQ ID NO: 3267355 - RNA, 19 nt, Artificial Sequence
  Description of Artificial Sequence: Synthetic oligonucleotide
uguccaaagggucuucuuc

SEQ ID NO: 3267356 - RNA, 19 nt, Artificial Sequence
  Description of Artificial Sequence: Synthetic oligonucleotide
guaucauggaaagggaugc

SEQ ID NO: 3267357 - RNA, 19 nt, Artificial Sequence
  Description of Artificial Sequence: Synthetic oligonucleotide
aucaucuuggaguguauca

SEQ ID NO: 3267358 - RNA, 19 nt, Artificial Sequence
  Description of Artificial Sequence: Synthetic oligonucleotide
auucucacgggcaauauca

SEQ ID NO: 3267359 - RNA, 19 nt, Artificial Sequence
  Description of Artificial Sequence: Synthetic oligonucleotide
guuucuuccugucuucgcc

SEQ ID NO: 3267360 - RNA, 19 nt, Artificial Sequence
  Description of Artificial Sequence: Synthetic oligonucleotide
auccucaauauacuggaga

SEQ ID NO: 3267361 - RNA, 19 nt, Artificial Sequence
  Description of Artificial Sequence: Synthetic oligonucleotide
agaaaaguguccaaagggu

SEQ ID NO: 3267362 - RNA, 19 nt, Artificial Sequence
  Description of Artificial Sequence: Synthetic oligonucleotide
caauaucagacgcauuuug

SEQ ID NO: 3267363 - RNA, 19 nt, Artificial Sequence
  Description of Artificial Sequence: Synthetic oligonucleotide
uuucucauucuuucuuuca

SEQ ID NO: 3267364 - RNA, 19 nt, Artificial Sequence
  Description of Artificial Sequence: Synthetic oligonucleotide
auuucucaagcggucauuc

SEQ ID NO: 3267365 - RNA, 19 nt, Artificial Sequence
  Description of Artificial Sequence: Synthetic oligonucleotide
uucucaagcggucauucuc

SEQ ID NO: 3267366 - RNA, 19 nt, Artificial Sequence
  Description of Artificial Sequence: Synthetic oligonucleotide
auauacuggagaaaagugu

SEQ ID NO: 3267367 - RNA, 19 nt, Artificial Sequence
  Description of Artificial Sequence: Synthetic oligonucleotide
aucagacgcauuuugaaua

SEQ ID NO: 3267368 - RNA, 19 nt, Artificial Sequence
  Description of Artificial Sequence: Synthetic oligonucleotide
auaucagacgcauuuugaa

SEQ ID NO: 3267369 - RNA, 19 nt, Artificial Sequence
  Description of Artificial Sequence: Synthetic oligonucleotide
ucacgggcaauaucagacg

SEQ ID NO: 3267370 - RNA, 19 nt, Artificial Sequence
  Description of Artificial Sequence: Synthetic oligonucleotide
uuucauuucucaagcgguc

SEQ ID NO: 3267371 - RNA, 19 nt, Artificial Sequence
  Description of Artificial Sequence: Synthetic oligonucleotide
ugauaguuucuuccugucu

SEQ ID NO: 3267372 - RNA, 19 nt, Artificial Sequence
  Description of Artificial Sequence: Synthetic oligonucleotide
ucuuucuuucagguaagcc

SEQ ID NO: 3267373 - RNA, 19 nt, Artificial Sequence
  Description of Artificial Sequence: Synthetic oligonucleotide
caucguaugccuucauccc

SEQ ID NO: 3267374 - RNA, 19 nt, Artificial Sequence
  Description of Artificial Sequence: Synthetic oligonucleotide
auacuggagaaaagugucc

SEQ ID NO: 3267375 - RNA, 19 nt, Artificial Sequence
  Description of Artificial Sequence: Synthetic oligonucleotide
ugguuucauuucucaagcg

SEQ ID NO: 3267376 - RNA, 19 nt, Artificial Sequence
  Description of Artificial Sequence: Synthetic oligonucleotide
agguaagccagauugguuu

SEQ ID NO: 3267377 - RNA, 19 nt, Artificial Sequence
  Description of Artificial Sequence: Synthetic oligonucleotide
agauugguuucauuucuca

SEQ ID NO: 3267378 - RNA, 19 nt, Artificial Sequence
  Description of Artificial Sequence: Synthetic oligonucleotide
uucaggauuagcacucauc

SEQ ID NO: 3267379 - RNA, 19 nt, Artificial Sequence
  Description of Artificial Sequence: Synthetic oligonucleotide
cauuuugaauaaccagacc

SEQ ID NO: 3267380 - RNA, 19 nt, Artificial Sequence
  Description of Artificial Sequence: Synthetic oligonucleotide
gaaaaguguccaaaggguc

SEQ ID NO: 3267381 - RNA, 19 nt, Artificial Sequence
  Description of Artificial Sequence: Synthetic oligonucleotide
uaucagacgcauuuugaau

SEQ ID NO: 3267382 - RNA, 19 nt, Artificial Sequence
  Description of Artificial Sequence: Synthetic oligonucleotide
guuugauaguuucuuccug

SEQ ID NO: 3267383 - RNA, 19 nt, Artificial Sequence
  Description of Artificial Sequence: Synthetic oligonucleotide
ugccuucauccccauaucc

SEQ ID NO: 3267384 - RNA, 19 nt, Artificial Sequence
  Description of Artificial Sequence: Synthetic oligonucleotide
aucuuggaguguaucaugg

SEQ ID NO: 3267385 - RNA, 19 nt, Artificial Sequence
  Description of Artificial Sequence: Synthetic oligonucleotide
cacucaucaucuuggagug

SEQ ID NO: 3267386 - RNA, 19 nt, Artificial Sequence
  Description of Artificial Sequence: Synthetic oligonucleotide
uuugaauaaccagaccauc

SEQ ID NO: 3267387 - RNA, 19 nt, Artificial Sequence
  Description of Artificial Sequence: Synthetic oligonucleotide
caaagggucuucuucagga

SEQ ID NO: 3267388 - RNA, 19 nt, Artificial Sequence
  Description of Artificial Sequence: Synthetic oligonucleotide
cucaauauacuggagaaaa

SEQ ID NO: 3267389 - RNA, 19 nt, Artificial Sequence
  Description of Artificial Sequence: Synthetic oligonucleotide
agcggucauucucacgggc

SEQ ID NO: 3267390 - RNA, 19 nt, Artificial Sequence
  Description of Artificial Sequence: Synthetic oligonucleotide
uauccucaauauacuggag

SEQ ID NO: 3267391 - RNA, 19 nt, Artificial Sequence
  Description of Artificial Sequence: Synthetic oligonucleotide
uacuggagaaaagugucca

SEQ ID NO: 3267392 - RNA, 19 nt, Artificial Sequence
  Description of Artificial Sequence: Synthetic oligonucleotide
accaucguaugccuucauc

SEQ ID NO: 3267393 - RNA, 19 nt, Artificial Sequence
  Description of Artificial Sequence: Synthetic oligonucleotide
agccagauugguuucauuu

SEQ ID NO: 3267394 - RNA, 19 nt, Artificial Sequence
  Description of Artificial Sequence: Synthetic oligonucleotide
ucagacgcauuuugaauaa

SEQ ID NO: 3267395 - RNA, 19 nt, Artificial Sequence
  Description of Artificial Sequence: Synthetic oligonucleotide
ucguaugccuucaucccca

SEQ ID NO: 3267396 - RNA, 19 nt, Artificial Sequence
  Description of Artificial Sequence: Synthetic oligonucleotide
ucagguaagccagauuggu

SEQ ID NO: 3267397 - RNA, 19 nt, Artificial Sequence
  Description of Artificial Sequence: Synthetic oligonucleotide
ccaucguaugccuucaucc

SEQ ID NO: 3267398 - RNA, 19 nt, Artificial Sequence
  Description of Artificial Sequence: Synthetic oligonucleotide
uccaaagggucuucuucag

SEQ ID NO: 3267399 - RNA, 19 nt, Artificial Sequence
  Description of Artificial Sequence: Synthetic oligonucleotide
uaguuucuuccugucuucg

SEQ ID NO: 3267400 - RNA, 19 nt, Artificial Sequence
  Description of Artificial Sequence: Synthetic oligonucleotide
uucucacgggcaauaucag

SEQ ID NO: 3267401 - RNA, 19 nt, Artificial Sequence
  Description of Artificial Sequence: Synthetic oligonucleotide
ccccauauccucaauauac

SEQ ID NO: 3267402 - RNA, 19 nt, Artificial Sequence
  Description of Artificial Sequence: Synthetic oligonucleotide
aaagggucuucuucaggau

SEQ ID NO: 3267403 - RNA, 19 nt, Artificial Sequence
  Description of Artificial Sequence: Synthetic oligonucleotide
ucuucgccguuucucauuc

SEQ ID NO: 3267404 - RNA, 19 nt, Artificial Sequence
  Description of Artificial Sequence: Synthetic oligonucleotide
uucauuucucaagcgguca

SEQ ID NO: 3267405 - RNA, 19 nt, Artificial Sequence
  Description of Artificial Sequence: Synthetic oligonucleotide
aaaacaauuauuuuggugc

SEQ ID NO: 3267406 - RNA, 19 nt, Artificial Sequence
  Description of Artificial Sequence: Synthetic oligonucleotide
aaacaauuauuuuggugcc

SEQ ID NO: 3267407 - RNA, 19 nt, Artificial Sequence
  Description of Artificial Sequence: Synthetic oligonucleotide
gaaauaguggcucucacag

SEQ ID NO: 3267408 - RNA, 19 nt, Artificial Sequence
  Description of Artificial Sequence: Synthetic oligonucleotide
uucacaaaaggaacaaugg

SEQ ID NO: 3267409 - RNA, 19 nt, Artificial Sequence
  Description of Artificial Sequence: Synthetic oligonucleotide
uuucacaaaaggaacaaug

SEQ ID NO: 3267410 - RNA, 19 nt, Artificial Sequence
  Description of Artificial Sequence: Synthetic oligonucleotide
aauaguggcucucacagcu

SEQ ID NO: 3267411 - RNA, 19 nt, Artificial Sequence
  Description of Artificial Sequence: Synthetic oligonucleotide
aaaggaacaauggauuugg

SEQ ID NO: 3267412 - RNA, 19 nt, Artificial Sequence
  Description of Artificial Sequence: Synthetic oligonucleotide
ugcuugauuucacaaaagg

SEQ ID NO: 3267413 - RNA, 19 nt, Artificial Sequence
  Description of Artificial Sequence: Synthetic oligonucleotide
aaacuggacagauguaagg

SEQ ID NO: 3267414 - RNA, 19 nt, Artificial Sequence
  Description of Artificial Sequence: Synthetic oligonucleotide
agagguuguacuuaggaug

SEQ ID NO: 3267415 - RNA, 19 nt, Artificial Sequence
  Description of Artificial Sequence: Synthetic oligonucleotide
gauguaaggagugaugucc

SEQ ID NO: 3267416 - RNA, 19 nt, Artificial Sequence
  Description of Artificial Sequence: Synthetic oligonucleotide
uugauuucacaaaaggaac

SEQ ID NO: 3267417 - RNA, 19 nt, Artificial Sequence
  Description of Artificial Sequence: Synthetic oligonucleotide
aauuauuuuggugccuugg

SEQ ID NO: 3267418 - RNA, 19 nt, Artificial Sequence
  Description of Artificial Sequence: Synthetic oligonucleotide
aaauaguggcucucacagc

SEQ ID NO: 3267419 - RNA, 19 nt, Artificial Sequence
  Description of Artificial Sequence: Synthetic oligonucleotide
gaugcuuccggaaaacugg

SEQ ID NO: 3267420 - RNA, 19 nt, Artificial Sequence
  Description of Artificial Sequence: Synthetic oligonucleotide
cuugauuucacaaaaggaa

SEQ ID NO: 3267421 - RNA, 19 nt, Artificial Sequence
  Description of Artificial Sequence: Synthetic oligonucleotide
ugauuucacaaaaggaaca

SEQ ID NO: 3267422 - RNA, 19 nt, Artificial Sequence
  Description of Artificial Sequence: Synthetic oligonucleotide
ucacaaaaggaacaaugga

SEQ ID NO: 3267423 - RNA, 19 nt, Artificial Sequence
  Description of Artificial Sequence: Synthetic oligonucleotide
auggauuugguguuccagg

SEQ ID NO: 3267424 - RNA, 19 nt, Artificial Sequence
  Description of Artificial Sequence: Synthetic oligonucleotide
aaaaggaacaauggauuug

SEQ ID NO: 3267425 - RNA, 19 nt, Artificial Sequence
  Description of Artificial Sequence: Synthetic oligonucleotide
cucagcuuccucuucacgg

SEQ ID NO: 3267426 - RNA, 19 nt, Artificial Sequence
  Description of Artificial Sequence: Synthetic oligonucleotide
gauuugguguuccagguca

SEQ ID NO: 3267427 - RNA, 19 nt, Artificial Sequence
  Description of Artificial Sequence: Synthetic oligonucleotide
uauuuuggugccuuggaaa

SEQ ID NO: 3267428 - RNA, 19 nt, Artificial Sequence
  Description of Artificial Sequence: Synthetic oligonucleotide
aauggauuugguguuccag

SEQ ID NO: 3267429 - RNA, 19 nt, Artificial Sequence
  Description of Artificial Sequence: Synthetic oligonucleotide
agcccuggaugucaaaacc

SEQ ID NO: 3267430 - RNA, 19 nt, Artificial Sequence
  Description of Artificial Sequence: Synthetic oligonucleotide
uguacuuaggaugcuuccg

SEQ ID NO: 3267431 - RNA, 19 nt, Artificial Sequence
  Description of Artificial Sequence: Synthetic oligonucleotide
uuuggugccuuggaaauag

SEQ ID NO: 3267432 - RNA, 19 nt, Artificial Sequence
  Description of Artificial Sequence: Synthetic oligonucleotide
uaaggagugauguccaggu

SEQ ID NO: 3267433 - RNA, 19 nt, Artificial Sequence
  Description of Artificial Sequence: Synthetic oligonucleotide
aaaacuggacagauguaag

SEQ ID NO: 3267434 - RNA, 19 nt, Artificial Sequence
  Description of Artificial Sequence: Synthetic oligonucleotide
aggagugauguccagguug

SEQ ID NO: 3267435 - RNA, 19 nt, Artificial Sequence
  Description of Artificial Sequence: Synthetic oligonucleotide
aaugugucuuguuggaaaa

SEQ ID NO: 3267436 - RNA, 19 nt, Artificial Sequence
  Description of Artificial Sequence: Synthetic oligonucleotide
guacuuaggaugcuuccgg

SEQ ID NO: 3267437 - RNA, 19 nt, Artificial Sequence
  Description of Artificial Sequence: Synthetic oligonucleotide
cuuccggaaaacuggacag

SEQ ID NO: 3267438 - RNA, 19 nt, Artificial Sequence
  Description of Artificial Sequence: Synthetic oligonucleotide
uggacagauguaaggagug

SEQ ID NO: 3267439 - RNA, 19 nt, Artificial Sequence
  Description of Artificial Sequence: Synthetic oligonucleotide
aggaacaauggauuuggug

SEQ ID NO: 3267440 - RNA, 19 nt, Artificial Sequence
  Description of Artificial Sequence: Synthetic oligonucleotide
aggucaaugugucuuguug

SEQ ID NO: 3267441 - RNA, 19 nt, Artificial Sequence
  Description of Artificial Sequence: Synthetic oligonucleotide
aacuggacagauguaagga

SEQ ID NO: 3267442 - RNA, 19 nt, Artificial Sequence
  Description of Artificial Sequence: Synthetic oligonucleotide
auuauuuuggugccuugga

SEQ ID NO: 3267443 - RNA, 19 nt, Artificial Sequence
  Description of Artificial Sequence: Synthetic oligonucleotide
gugccuuggaaauaguggc

SEQ ID NO: 3267444 - RNA, 19 nt, Artificial Sequence
  Description of Artificial Sequence: Synthetic oligonucleotide
acagagguuguacuuagga

SEQ ID NO: 3267445 - RNA, 19 nt, Artificial Sequence
  Description of Artificial Sequence: Synthetic oligonucleotide
uuauuuuggugccuuggaa

SEQ ID NO: 3267446 - RNA, 19 nt, Artificial Sequence
  Description of Artificial Sequence: Synthetic oligonucleotide
acuggacagauguaaggag

SEQ ID NO: 3267447 - RNA, 19 nt, Artificial Sequence
  Description of Artificial Sequence: Synthetic oligonucleotide
gagguuguacuuaggaugc

SEQ ID NO: 3267448 - RNA, 19 nt, Artificial Sequence
  Description of Artificial Sequence: Synthetic oligonucleotide
agauguaaggagugauguc

SEQ ID NO: 3267449 - RNA, 19 nt, Artificial Sequence
  Description of Artificial Sequence: Synthetic oligonucleotide
ucucacagcuguuucuugc

SEQ ID NO: 3267450 - RNA, 19 nt, Artificial Sequence
  Description of Artificial Sequence: Synthetic oligonucleotide
uguuucuugcuugauuuca

SEQ ID NO: 3267451 - RNA, 19 nt, Artificial Sequence
  Description of Artificial Sequence: Synthetic oligonucleotide
ggucaaugugucuuguugg

SEQ ID NO: 3267452 - RNA, 19 nt, Artificial Sequence
  Description of Artificial Sequence: Synthetic oligonucleotide
gaaaacuggacagauguaa

SEQ ID NO: 3267453 - RNA, 19 nt, Artificial Sequence
  Description of Artificial Sequence: Synthetic oligonucleotide
uguuccaggucaauguguc

SEQ ID NO: 3267454 - RNA, 19 nt, Artificial Sequence
  Description of Artificial Sequence: Synthetic oligonucleotide
auuuuggugccuuggaaau

SEQ ID NO: 3267455 - RNA, 19 nt, Artificial Sequence
  Description of Artificial Sequence: Synthetic oligonucleotide
ggaacaauggauuuggugu

SEQ ID NO: 3267456 - RNA, 19 nt, Artificial Sequence
  Description of Artificial Sequence: Synthetic oligonucleotide
uuguacuuaggaugcuucc

SEQ ID NO: 3267457 - RNA, 19 nt, Artificial Sequence
  Description of Artificial Sequence: Synthetic oligonucleotide
aacaauggauuugguguuc

SEQ ID NO: 3267458 - RNA, 19 nt, Artificial Sequence
  Description of Artificial Sequence: Synthetic oligonucleotide
ucuguccucagcuuccucu

SEQ ID NO: 3267459 - RNA, 19 nt, Artificial Sequence
  Description of Artificial Sequence: Synthetic oligonucleotide
ucuugcuugauuucacaaa

SEQ ID NO: 3267460 - RNA, 19 nt, Artificial Sequence
  Description of Artificial Sequence: Synthetic oligonucleotide
acaauggauuugguguucc

SEQ ID NO: 3267461 - RNA, 19 nt, Artificial Sequence
  Description of Artificial Sequence: Synthetic oligonucleotide
uugcuugauuucacaaaag

SEQ ID NO: 3267462 - RNA, 19 nt, Artificial Sequence
  Description of Artificial Sequence: Synthetic oligonucleotide
uuaggaugcuuccggaaaa

SEQ ID NO: 3267463 - RNA, 19 nt, Artificial Sequence
  Description of Artificial Sequence: Synthetic oligonucleotide
ugguguuccaggucaaugu

SEQ ID NO: 3267464 - RNA, 19 nt, Artificial Sequence
  Description of Artificial Sequence: Synthetic oligonucleotide
gaugucuguccucagcuuc

SEQ ID NO: 3267465 - RNA, 19 nt, Artificial Sequence
  Description of Artificial Sequence: Synthetic oligonucleotide
uuucuugcuugauuucaca

SEQ ID NO: 3267466 - RNA, 19 nt, Artificial Sequence
  Description of Artificial Sequence: Synthetic oligonucleotide
uucacggagcccuggaugu

SEQ ID NO: 3267467 - RNA, 19 nt, Artificial Sequence
  Description of Artificial Sequence: Synthetic oligonucleotide
gugauguccagguugguga

SEQ ID NO: 3267468 - RNA, 19 nt, Artificial Sequence
  Description of Artificial Sequence: Synthetic oligonucleotide
uggauuugguguuccaggu

SEQ ID NO: 3267469 - RNA, 19 nt, Artificial Sequence
  Description of Artificial Sequence: Synthetic oligonucleotide
cuugcuugauuucacaaaa

SEQ ID NO: 3267470 - RNA, 19 nt, Artificial Sequence
  Description of Artificial Sequence: Synthetic oligonucleotide
uucuugcuugauuucacaa

SEQ ID NO: 3267471 - RNA, 19 nt, Artificial Sequence
  Description of Artificial Sequence: Synthetic oligonucleotide
acaaaaggaacaauggauu

SEQ ID NO: 3267472 - RNA, 19 nt, Artificial Sequence
  Description of Artificial Sequence: Synthetic oligonucleotide
uggugccuuggaaauagug

SEQ ID NO: 3267473 - RNA, 19 nt, Artificial Sequence
  Description of Artificial Sequence: Synthetic oligonucleotide
uguaaggagugauguccag

SEQ ID NO: 3267474 - RNA, 19 nt, Artificial Sequence
  Description of Artificial Sequence: Synthetic oligonucleotide
ggugccuuggaaauagugg

SEQ ID NO: 3267475 - RNA, 19 nt, Artificial Sequence
  Description of Artificial Sequence: Synthetic oligonucleotide
ucagcuuccucuucacgga

SEQ ID NO: 3267476 - RNA, 19 nt, Artificial Sequence
  Description of Artificial Sequence: Synthetic oligonucleotide
acugcacagagguuguacu

SEQ ID NO: 3267477 - RNA, 19 nt, Artificial Sequence
  Description of Artificial Sequence: Synthetic oligonucleotide
guaaggagugauguccagg

SEQ ID NO: 3267478 - RNA, 19 nt, Artificial Sequence
  Description of Artificial Sequence: Synthetic oligonucleotide
gauuucacaaaaggaacaa

SEQ ID NO: 3267479 - RNA, 19 nt, Artificial Sequence
  Description of Artificial Sequence: Synthetic oligonucleotide
ugauguccagguuggugag

SEQ ID NO: 3267480 - RNA, 19 nt, Artificial Sequence
  Description of Artificial Sequence: Synthetic oligonucleotide
aacaauuauuuuggugccu

SEQ ID NO: 3267481 - RNA, 19 nt, Artificial Sequence
  Description of Artificial Sequence: Synthetic oligonucleotide
agguuggugaguggguacc

SEQ ID NO: 3267482 - RNA, 19 nt, Artificial Sequence
  Description of Artificial Sequence: Synthetic oligonucleotide
uggaaauaguggcucucac

SEQ ID NO: 3267483 - RNA, 19 nt, Artificial Sequence
  Description of Artificial Sequence: Synthetic oligonucleotide
uuccucuucacggagcccu

SEQ ID NO: 3267484 - RNA, 19 nt, Artificial Sequence
  Description of Artificial Sequence: Synthetic oligonucleotide
uuggaaauaguggcucuca

SEQ ID NO: 3267485 - RNA, 19 nt, Artificial Sequence
  Description of Artificial Sequence: Synthetic oligonucleotide
cacaaaaggaacaauggau

SEQ ID NO: 3267486 - RNA, 19 nt, Artificial Sequence
  Description of Artificial Sequence: Synthetic oligonucleotide
cuucacggagcccuggaug

SEQ ID NO: 3267487 - RNA, 19 nt, Artificial Sequence
  Description of Artificial Sequence: Synthetic oligonucleotide
augucuguccucagcuucc

SEQ ID NO: 3267488 - RNA, 19 nt, Artificial Sequence
  Description of Artificial Sequence: Synthetic oligonucleotide
uccaggucaaugugucuug

SEQ ID NO: 3267489 - RNA, 19 nt, Artificial Sequence
  Description of Artificial Sequence: Synthetic oligonucleotide
uacuuaggaugcuuccgga

SEQ ID NO: 3267490 - RNA, 19 nt, Artificial Sequence
  Description of Artificial Sequence: Synthetic oligonucleotide
uugguguuccaggucaaug

SEQ ID NO: 3267491 - RNA, 19 nt, Artificial Sequence
  Description of Artificial Sequence: Synthetic oligonucleotide
uaguggcucucacagcugu

SEQ ID NO: 3267492 - RNA, 19 nt, Artificial Sequence
  Description of Artificial Sequence: Synthetic oligonucleotide
ugccuuggaaauaguggcu

SEQ ID NO: 3267493 - RNA, 19 nt, Artificial Sequence
  Description of Artificial Sequence: Synthetic oligonucleotide
acagcuguuucuugcuuga

SEQ ID NO: 3267494 - RNA, 19 nt, Artificial Sequence
  Description of Artificial Sequence: Synthetic oligonucleotide
cacagcuguuucuugcuug

SEQ ID NO: 3267495 - RNA, 19 nt, Artificial Sequence
  Description of Artificial Sequence: Synthetic oligonucleotide
agugauguccagguuggug

SEQ ID NO: 3267496 - RNA, 19 nt, Artificial Sequence
  Description of Artificial Sequence: Synthetic oligonucleotide
uuggugaguggguaccgga

SEQ ID NO: 3267497 - RNA, 19 nt, Artificial Sequence
  Description of Artificial Sequence: Synthetic oligonucleotide
caaugugucuuguuggaaa

SEQ ID NO: 3267498 - RNA, 19 nt, Artificial Sequence
  Description of Artificial Sequence: Synthetic oligonucleotide
caccacugcacagagguug

SEQ ID NO: 3267499 - RNA, 19 nt, Artificial Sequence
  Description of Artificial Sequence: Synthetic oligonucleotide
acagauguaaggagugaug

SEQ ID NO: 3267500 - RNA, 19 nt, Artificial Sequence
  Description of Artificial Sequence: Synthetic oligonucleotide
gucaaugugucuuguugga

SEQ ID NO: 3267501 - RNA, 19 nt, Artificial Sequence
  Description of Artificial Sequence: Synthetic oligonucleotide
ggagugauguccagguugg

SEQ ID NO: 3267502 - RNA, 19 nt, Artificial Sequence
  Description of Artificial Sequence: Synthetic oligonucleotide
caauuauuuuggugccuug

SEQ ID NO: 3267503 - RNA, 19 nt, Artificial Sequence
  Description of Artificial Sequence: Synthetic oligonucleotide
acaauuauuuuggugccuu

SEQ ID NO: 3267504 - RNA, 19 nt, Artificial Sequence
  Description of Artificial Sequence: Synthetic oligonucleotide
guuguacuuaggaugcuuc

SEQ ID NO: 3267505 - RNA, 19 nt, Artificial Sequence
  Description of Artificial Sequence: Synthetic oligonucleotide
auaaguacagcauauaucc

SEQ ID NO: 3267506 - RNA, 19 nt, Artificial Sequence
  Description of Artificial Sequence: Synthetic oligonucleotide
uuauauaagacauuuaaag

SEQ ID NO: 3267507 - RNA, 19 nt, Artificial Sequence
  Description of Artificial Sequence: Synthetic oligonucleotide
uuuaauaaccauaaaagca

SEQ ID NO: 3267508 - RNA, 19 nt, Artificial Sequence
  Description of Artificial Sequence: Synthetic oligonucleotide
caaaacauuagaaagaagc

SEQ ID NO: 3267509 - RNA, 19 nt, Artificial Sequence
  Description of Artificial Sequence: Synthetic oligonucleotide
aaugaaucugauuccagcc

SEQ ID NO: 3267510 - RNA, 19 nt, Artificial Sequence
  Description of Artificial Sequence: Synthetic oligonucleotide
aauuuuaauaaccauaaaa

SEQ ID NO: 3267511 - RNA, 19 nt, Artificial Sequence
  Description of Artificial Sequence: Synthetic oligonucleotide
aauuuggacucauaaauuc

SEQ ID NO: 3267512 - RNA, 19 nt, Artificial Sequence
  Description of Artificial Sequence: Synthetic oligonucleotide
uucacaaaacauuagaaag

SEQ ID NO: 3267513 - RNA, 19 nt, Artificial Sequence
  Description of Artificial Sequence: Synthetic oligonucleotide
aaaugaaucugauuccagc

SEQ ID NO: 3267514 - RNA, 19 nt, Artificial Sequence
  Description of Artificial Sequence: Synthetic oligonucleotide
aaaguaauaguucacaaaa

SEQ ID NO: 3267515 - RNA, 19 nt, Artificial Sequence
  Description of Artificial Sequence: Synthetic oligonucleotide
uuaauaaccauaaaagcac

SEQ ID NO: 3267516 - RNA, 19 nt, Artificial Sequence
  Description of Artificial Sequence: Synthetic oligonucleotide
auuagaaagaagcuguugg

SEQ ID NO: 3267517 - RNA, 19 nt, Artificial Sequence
  Description of Artificial Sequence: Synthetic oligonucleotide
uuuuaauaaccauaaaagc

SEQ ID NO: 3267518 - RNA, 19 nt, Artificial Sequence
  Description of Artificial Sequence: Synthetic oligonucleotide
ucugauuccagccugcugg

SEQ ID NO: 3267519 - RNA, 19 nt, Artificial Sequence
  Description of Artificial Sequence: Synthetic oligonucleotide
uuaauuuggacucauaaau

SEQ ID NO: 3267520 - RNA, 19 nt, Artificial Sequence
  Description of Artificial Sequence: Synthetic oligonucleotide
auuuuaauaaccauaaaag

SEQ ID NO: 3267521 - RNA, 19 nt, Artificial Sequence
  Description of Artificial Sequence: Synthetic oligonucleotide
aaaugaaauagccugguca

SEQ ID NO: 3267522 - RNA, 19 nt, Artificial Sequence
  Description of Artificial Sequence: Synthetic oligonucleotide
uauacaauuuuaauaacca

SEQ ID NO: 3267523 - RNA, 19 nt, Artificial Sequence
  Description of Artificial Sequence: Synthetic oligonucleotide
auaaauucauaacugaucu

SEQ ID NO: 3267524 - RNA, 19 nt, Artificial Sequence
  Description of Artificial Sequence: Synthetic oligonucleotide
aacaccaaaugaaauagcc

SEQ ID NO: 3267525 - RNA, 19 nt, Artificial Sequence
  Description of Artificial Sequence: Synthetic oligonucleotide
uaccaaaugaaucugauuc

SEQ ID NO: 3267526 - RNA, 19 nt, Artificial Sequence
  Description of Artificial Sequence: Synthetic oligonucleotide
aagacauuuaaaguaauag

SEQ ID NO: 3267527 - RNA, 19 nt, Artificial Sequence
  Description of Artificial Sequence: Synthetic oligonucleotide
auauacaauuuuaauaacc

SEQ ID NO: 3267528 - RNA, 19 nt, Artificial Sequence
  Description of Artificial Sequence: Synthetic oligonucleotide
uauauaagacauuuaaagu

SEQ ID NO: 3267529 - RNA, 19 nt, Artificial Sequence
  Description of Artificial Sequence: Synthetic oligonucleotide
uucauaacugaucugaggu

SEQ ID NO: 3267530 - RNA, 19 nt, Artificial Sequence
  Description of Artificial Sequence: Synthetic oligonucleotide
cauauaucccacauggucg

SEQ ID NO: 3267531 - RNA, 19 nt, Artificial Sequence
  Description of Artificial Sequence: Synthetic oligonucleotide
aaauucauaacugaucuga

SEQ ID NO: 3267532 - RNA, 19 nt, Artificial Sequence
  Description of Artificial Sequence: Synthetic oligonucleotide
aauaaguacagcauauauc

SEQ ID NO: 3267533 - RNA, 19 nt, Artificial Sequence
  Description of Artificial Sequence: Synthetic oligonucleotide
uauaagacauuuaaaguaa

SEQ ID NO: 3267534 - RNA, 19 nt, Artificial Sequence
  Description of Artificial Sequence: Synthetic oligonucleotide
auauaagacauuuaaagua

SEQ ID NO: 3267535 - RNA, 19 nt, Artificial Sequence
  Description of Artificial Sequence: Synthetic oligonucleotide
aaauaaguacagcauauau

SEQ ID NO: 3267536 - RNA, 19 nt, Artificial Sequence
  Description of Artificial Sequence: Synthetic oligonucleotide
aguaauaguucacaaaaca

SEQ ID NO: 3267537 - RNA, 19 nt, Artificial Sequence
  Description of Artificial Sequence: Synthetic oligonucleotide
aaaagcaccauuauauaag

SEQ ID NO: 3267538 - RNA, 19 nt, Artificial Sequence
  Description of Artificial Sequence: Synthetic oligonucleotide
aaugaaauagccuggucau

SEQ ID NO: 3267539 - RNA, 19 nt, Artificial Sequence
  Description of Artificial Sequence: Synthetic oligonucleotide
uacaauuuuaauaaccaua

SEQ ID NO: 3267540 - RNA, 19 nt, Artificial Sequence
  Description of Artificial Sequence: Synthetic oligonucleotide
ucaacaccaaaugaaauag

SEQ ID NO: 3267541 - RNA, 19 nt, Artificial Sequence
  Description of Artificial Sequence: Synthetic oligonucleotide
ucacaaaacauuagaaaga

SEQ ID NO: 3267542 - RNA, 19 nt, Artificial Sequence
  Description of Artificial Sequence: Synthetic oligonucleotide
aacauuagaaagaagcugu

SEQ ID NO: 3267543 - RNA, 19 nt, Artificial Sequence
  Description of Artificial Sequence: Synthetic oligonucleotide
aaguacagcauauauccca

SEQ ID NO: 3267544 - RNA, 19 nt, Artificial Sequence
  Description of Artificial Sequence: Synthetic oligonucleotide
cagcauauaucccacaugg

SEQ ID NO: 3267545 - RNA, 19 nt, Artificial Sequence
  Description of Artificial Sequence: Synthetic oligonucleotide
uuuaaaguaauaguucaca

SEQ ID NO: 3267546 - RNA, 19 nt, Artificial Sequence
  Description of Artificial Sequence: Synthetic oligonucleotide
aaacauuagaaagaagcug

SEQ ID NO: 3267547 - RNA, 19 nt, Artificial Sequence
  Description of Artificial Sequence: Synthetic oligonucleotide
accaaaugaaucugauucc

SEQ ID NO: 3267548 - RNA, 19 nt, Artificial Sequence
  Description of Artificial Sequence: Synthetic oligonucleotide
ccuuguaugaccuacaccc

SEQ ID NO: 3267549 - RNA, 19 nt, Artificial Sequence
  Description of Artificial Sequence: Synthetic oligonucleotide
acugaucugagguacauug

SEQ ID NO: 3267550 - RNA, 19 nt, Artificial Sequence
  Description of Artificial Sequence: Synthetic oligonucleotide
agcaugacuucacauuucc

SEQ ID NO: 3267551 - RNA, 19 nt, Artificial Sequence
  Description of Artificial Sequence: Synthetic oligonucleotide
auuuaauuuggacucauaa

SEQ ID NO: 3267552 - RNA, 19 nt, Artificial Sequence
  Description of Artificial Sequence: Synthetic oligonucleotide
aaaacauuagaaagaagcu

SEQ ID NO: 3267553 - RNA, 19 nt, Artificial Sequence
  Description of Artificial Sequence: Synthetic oligonucleotide
agcaccauuauauaagaca

SEQ ID NO: 3267554 - RNA, 19 nt, Artificial Sequence
  Description of Artificial Sequence: Synthetic oligonucleotide
aaagcaccauuauauaaga

SEQ ID NO: 3267555 - RNA, 19 nt, Artificial Sequence
  Description of Artificial Sequence: Synthetic oligonucleotide
uaauaguucacaaaacauu

SEQ ID NO: 3267556 - RNA, 19 nt, Artificial Sequence
  Description of Artificial Sequence: Synthetic oligonucleotide
cauaaauucauaacugauc

SEQ ID NO: 3267557 - RNA, 19 nt, Artificial Sequence
  Description of Artificial Sequence: Synthetic oligonucleotide
ugggauuuaauuuggacuc

SEQ ID NO: 3267558 - RNA, 19 nt, Artificial Sequence
  Description of Artificial Sequence: Synthetic oligonucleotide
uuuaauuuggacucauaaa

SEQ ID NO: 3267559 - RNA, 19 nt, Artificial Sequence
  Description of Artificial Sequence: Synthetic oligonucleotide
ugaccuacacccuagcugc

SEQ ID NO: 3267560 - RNA, 19 nt, Artificial Sequence
  Description of Artificial Sequence: Synthetic oligonucleotide
caccaaaugaaauagccug

SEQ ID NO: 3267561 - RNA, 19 nt, Artificial Sequence
  Description of Artificial Sequence: Synthetic oligonucleotide
agacauuuaaaguaauagu

SEQ ID NO: 3267562 - RNA, 19 nt, Artificial Sequence
  Description of Artificial Sequence: Synthetic oligonucleotide
uaauaaccauaaaagcacc

SEQ ID NO: 3267563 - RNA, 19 nt, Artificial Sequence
  Description of Artificial Sequence: Synthetic oligonucleotide
acauuuaaaguaauaguuc

SEQ ID NO: 3267564 - RNA, 19 nt, Artificial Sequence
  Description of Artificial Sequence: Synthetic oligonucleotide
uuagaaagaagcuguuggc

SEQ ID NO: 3267565 - RNA, 19 nt, Artificial Sequence
  Description of Artificial Sequence: Synthetic oligonucleotide
uacauuguacaguucacug

SEQ ID NO: 3267566 - RNA, 19 nt, Artificial Sequence
  Description of Artificial Sequence: Synthetic oligonucleotide
uaguucacaaaacauuaga

SEQ ID NO: 3267567 - RNA, 19 nt, Artificial Sequence
  Description of Artificial Sequence: Synthetic oligonucleotide
uucacugucaacaccaaau

SEQ ID NO: 3267568 - RNA, 19 nt, Artificial Sequence
  Description of Artificial Sequence: Synthetic oligonucleotide
ucucguaccaaaugaaucu

SEQ ID NO: 3267569 - RNA, 19 nt, Artificial Sequence
  Description of Artificial Sequence: Synthetic oligonucleotide
accauauacaauuuuaaua

SEQ ID NO: 3267570 - RNA, 19 nt, Artificial Sequence
  Description of Artificial Sequence: Synthetic oligonucleotide
aauaguucacaaaacauua

SEQ ID NO: 3267571 - RNA, 19 nt, Artificial Sequence
  Description of Artificial Sequence: Synthetic oligonucleotide
auucauaacugaucugagg

SEQ ID NO: 3267572 - RNA, 19 nt, Artificial Sequence
  Description of Artificial Sequence: Synthetic oligonucleotide
ucauaaauucauaacugau

SEQ ID NO: 3267573 - RNA, 19 nt, Artificial Sequence
  Description of Artificial Sequence: Synthetic oligonucleotide
cauuauauaagacauuuaa

SEQ ID NO: 3267574 - RNA, 19 nt, Artificial Sequence
  Description of Artificial Sequence: Synthetic oligonucleotide
uuaaaguaauaguucacaa

SEQ ID NO: 3267575 - RNA, 19 nt, Artificial Sequence
  Description of Artificial Sequence: Synthetic oligonucleotide
uuggccagaaaauaaguac

SEQ ID NO: 3267576 - RNA, 19 nt, Artificial Sequence
  Description of Artificial Sequence: Synthetic oligonucleotide
cauuuaaaguaauaguuca

SEQ ID NO: 3267577 - RNA, 19 nt, Artificial Sequence
  Description of Artificial Sequence: Synthetic oligonucleotide
uaaaagcaccauuauauaa

SEQ ID NO: 3267578 - RNA, 19 nt, Artificial Sequence
  Description of Artificial Sequence: Synthetic oligonucleotide
aaguaauaguucacaaaac

SEQ ID NO: 3267579 - RNA, 19 nt, Artificial Sequence
  Description of Artificial Sequence: Synthetic oligonucleotide
uaaaguaauaguucacaaa

SEQ ID NO: 3267580 - RNA, 19 nt, Artificial Sequence
  Description of Artificial Sequence: Synthetic oligonucleotide
ugaaucugauuccagccug

SEQ ID NO: 3267581 - RNA, 19 nt, Artificial Sequence
  Description of Artificial Sequence: Synthetic oligonucleotide
gaagcuguuggccagaaaa

SEQ ID NO: 3267582 - RNA, 19 nt, Artificial Sequence
  Description of Artificial Sequence: Synthetic oligonucleotide
agaaaauaaguacagcaua

SEQ ID NO: 3267583 - RNA, 19 nt, Artificial Sequence
  Description of Artificial Sequence: Synthetic oligonucleotide
uucacauuuccuuguauga

SEQ ID NO: 3267584 - RNA, 19 nt, Artificial Sequence
  Description of Artificial Sequence: Synthetic oligonucleotide
uguaugaccuacacccuag

SEQ ID NO: 3267585 - RNA, 19 nt, Artificial Sequence
  Description of Artificial Sequence: Synthetic oligonucleotide
uggccagaaaauaaguaca

SEQ ID NO: 3267586 - RNA, 19 nt, Artificial Sequence
  Description of Artificial Sequence: Synthetic oligonucleotide
aauaccauauacaauuuua

SEQ ID NO: 3267587 - RNA, 19 nt, Artificial Sequence
  Description of Artificial Sequence: Synthetic oligonucleotide
gacucauaaauucauaacu

SEQ ID NO: 3267588 - RNA, 19 nt, Artificial Sequence
  Description of Artificial Sequence: Synthetic oligonucleotide
cauaaaagcaccauuauau

SEQ ID NO: 3267589 - RNA, 19 nt, Artificial Sequence
  Description of Artificial Sequence: Synthetic oligonucleotide
auuuccuuguaugaccuac

SEQ ID NO: 3267590 - RNA, 19 nt, Artificial Sequence
  Description of Artificial Sequence: Synthetic oligonucleotide
agguacauuguacaguuca

SEQ ID NO: 3267591 - RNA, 19 nt, Artificial Sequence
  Description of Artificial Sequence: Synthetic oligonucleotide
acaauuuuaauaaccauaa

SEQ ID NO: 3267592 - RNA, 19 nt, Artificial Sequence
  Description of Artificial Sequence: Synthetic oligonucleotide
acaguucacugucaacacc

SEQ ID NO: 3267593 - RNA, 19 nt, Artificial Sequence
  Description of Artificial Sequence: Synthetic oligonucleotide
ucugagguacauuguacag

SEQ ID NO: 3267594 - RNA, 19 nt, Artificial Sequence
  Description of Artificial Sequence: Synthetic oligonucleotide
ugcuucauugcuuugcacu

SEQ ID NO: 3267595 - RNA, 19 nt, Artificial Sequence
  Description of Artificial Sequence: Synthetic oligonucleotide
agaaagaagcuguuggcca

SEQ ID NO: 3267596 - RNA, 19 nt, Artificial Sequence
  Description of Artificial Sequence: Synthetic oligonucleotide
auuuaaaguaauaguucac

SEQ ID NO: 3267597 - RNA, 19 nt, Artificial Sequence
  Description of Artificial Sequence: Synthetic oligonucleotide
cacauuuccuuguaugacc

SEQ ID NO: 3267598 - RNA, 19 nt, Artificial Sequence
  Description of Artificial Sequence: Synthetic oligonucleotide
ucacugucaacaccaaaug

SEQ ID NO: 3267599 - RNA, 19 nt, Artificial Sequence
  Description of Artificial Sequence: Synthetic oligonucleotide
uuuggacucauaaauucau

SEQ ID NO: 3267600 - RNA, 19 nt, Artificial Sequence
  Description of Artificial Sequence: Synthetic oligonucleotide
gaaagaagcuguuggccag

SEQ ID NO: 3267601 - RNA, 19 nt, Artificial Sequence
  Description of Artificial Sequence: Synthetic oligonucleotide
ugaaauagccuggucaucu

SEQ ID NO: 3267602 - RNA, 19 nt, Artificial Sequence
  Description of Artificial Sequence: Synthetic oligonucleotide
augacuucacauuuccuug

SEQ ID NO: 3267603 - RNA, 19 nt, Artificial Sequence
  Description of Artificial Sequence: Synthetic oligonucleotide
cuucacauuuccuuguaug

SEQ ID NO: 3267604 - RNA, 19 nt, Artificial Sequence
  Description of Artificial Sequence: Synthetic oligonucleotide
uggacucauaaauucauaa

SEQ ID NO: 3267605 - RNA, 19 nt, Artificial Sequence
  Description of Artificial Sequence: Synthetic oligonucleotide
aauaauaauacuucuuuuc

SEQ ID NO: 3267606 - RNA, 19 nt, Artificial Sequence
  Description of Artificial Sequence: Synthetic oligonucleotide
uucaauauuuacaaggacg

SEQ ID NO: 3267607 - RNA, 19 nt, Artificial Sequence
  Description of Artificial Sequence: Synthetic oligonucleotide
uguuauaagaaauauuuag

SEQ ID NO: 3267608 - RNA, 19 nt, Artificial Sequence
  Description of Artificial Sequence: Synthetic oligonucleotide
uucugaauuacuaauaaag

SEQ ID NO: 3267609 - RNA, 19 nt, Artificial Sequence
  Description of Artificial Sequence: Synthetic oligonucleotide
aaaucuacggaaaaugucc

SEQ ID NO: 3267610 - RNA, 19 nt, Artificial Sequence
  Description of Artificial Sequence: Synthetic oligonucleotide
acucacaaaauccaaaagc

SEQ ID NO: 3267611 - RNA, 19 nt, Artificial Sequence
  Description of Artificial Sequence: Synthetic oligonucleotide
aacuuuuauacauacacug

SEQ ID NO: 3267612 - RNA, 19 nt, Artificial Sequence
  Description of Artificial Sequence: Synthetic oligonucleotide
ugaauuacuaauaaagucu

SEQ ID NO: 3267613 - RNA, 19 nt, Artificial Sequence
  Description of Artificial Sequence: Synthetic oligonucleotide
aauagaccaauccagagga

SEQ ID NO: 3267614 - RNA, 19 nt, Artificial Sequence
  Description of Artificial Sequence: Synthetic oligonucleotide
aagaacauuguuuuggaug

SEQ ID NO: 3267615 - RNA, 19 nt, Artificial Sequence
  Description of Artificial Sequence: Synthetic oligonucleotide
uuuacagugccuuugguag

SEQ ID NO: 3267616 - RNA, 19 nt, Artificial Sequence
  Description of Artificial Sequence: Synthetic oligonucleotide
uuuguuaaagacacuaucu

SEQ ID NO: 3267617 - RNA, 19 nt, Artificial Sequence
  Description of Artificial Sequence: Synthetic oligonucleotide
ucgaauuuguuaaagacac

SEQ ID NO: 3267618 - RNA, 19 nt, Artificial Sequence
  Description of Artificial Sequence: Synthetic oligonucleotide
aagguugaacauuaagaac

SEQ ID NO: 3267619 - RNA, 19 nt, Artificial Sequence
  Description of Artificial Sequence: Synthetic oligonucleotide
aguauucacguauuaaaac

SEQ ID NO: 3267620 - RNA, 19 nt, Artificial Sequence
  Description of Artificial Sequence: Synthetic oligonucleotide
aauucuuuuagucguuuag

SEQ ID NO: 3267621 - RNA, 19 nt, Artificial Sequence
  Description of Artificial Sequence: Synthetic oligonucleotide
aacaaguuuccuuuugcgg

SEQ ID NO: 3267622 - RNA, 19 nt, Artificial Sequence
  Description of Artificial Sequence: Synthetic oligonucleotide
aaacaaacauggcaacagc

SEQ ID NO: 3267623 - RNA, 19 nt, Artificial Sequence
  Description of Artificial Sequence: Synthetic oligonucleotide
aacaaauuagaggacaaag

SEQ ID NO: 3267624 - RNA, 19 nt, Artificial Sequence
  Description of Artificial Sequence: Synthetic oligonucleotide
uuaaaacuuacgauggccc

SEQ ID NO: 3267625 - RNA, 19 nt, Artificial Sequence
  Description of Artificial Sequence: Synthetic oligonucleotide
ucaucaauauauuuaaagu

SEQ ID NO: 3267626 - RNA, 19 nt, Artificial Sequence
  Description of Artificial Sequence: Synthetic oligonucleotide
auuaagaaugacugucugc

SEQ ID NO: 3267627 - RNA, 19 nt, Artificial Sequence
  Description of Artificial Sequence: Synthetic oligonucleotide
auaacugaaauauuuacau

SEQ ID NO: 3267628 - RNA, 19 nt, Artificial Sequence
  Description of Artificial Sequence: Synthetic oligonucleotide
auauuuaaaguuugaugac

SEQ ID NO: 3267629 - RNA, 19 nt, Artificial Sequence
  Description of Artificial Sequence: Synthetic oligonucleotide
aauuagguuggccaggacu

SEQ ID NO: 3267630 - RNA, 19 nt, Artificial Sequence
  Description of Artificial Sequence: Synthetic oligonucleotide
ucugaauuacuaauaaagu

SEQ ID NO: 3267631 - RNA, 19 nt, Artificial Sequence
  Description of Artificial Sequence: Synthetic oligonucleotide
uaauaagccagucuuuacc

SEQ ID NO: 3267632 - RNA, 19 nt, Artificial Sequence
  Description of Artificial Sequence: Synthetic oligonucleotide
acaagauuacaugagauag

SEQ ID NO: 3267633 - RNA, 19 nt, Artificial Sequence
  Description of Artificial Sequence: Synthetic oligonucleotide
auaauacuucuuuucuugc

SEQ ID NO: 3267634 - RNA, 19 nt, Artificial Sequence
  Description of Artificial Sequence: Synthetic oligonucleotide
cuuuaagccgggaugaucc

SEQ ID NO: 3267635 - RNA, 19 nt, Artificial Sequence
  Description of Artificial Sequence: Synthetic oligonucleotide
uuucccaauucuuaaggcg

SEQ ID NO: 3267636 - RNA, 19 nt, Artificial Sequence
  Description of Artificial Sequence: Synthetic oligonucleotide
uuuaccuuuuaauaaacaa

SEQ ID NO: 3267637 - RNA, 19 nt, Artificial Sequence
  Description of Artificial Sequence: Synthetic oligonucleotide
ucacguauuaaaacuuacg

SEQ ID NO: 3267638 - RNA, 19 nt, Artificial Sequence
  Description of Artificial Sequence: Synthetic oligonucleotide
agaguuuuacuucacaaga

SEQ ID NO: 3267639 - RNA, 19 nt, Artificial Sequence
  Description of Artificial Sequence: Synthetic oligonucleotide
accuuaguaacucaagcuc

SEQ ID NO: 3267640 - RNA, 19 nt, Artificial Sequence
  Description of Artificial Sequence: Synthetic oligonucleotide
auuucccaauucuuaaggc

SEQ ID NO: 3267641 - RNA, 19 nt, Artificial Sequence
  Description of Artificial Sequence: Synthetic oligonucleotide
uuaccuuuuaauaaacaaa

SEQ ID NO: 3267642 - RNA, 19 nt, Artificial Sequence
  Description of Artificial Sequence: Synthetic oligonucleotide
aauuugcugaucucucggg

SEQ ID NO: 3267643 - RNA, 19 nt, Artificial Sequence
  Description of Artificial Sequence: Synthetic oligonucleotide
agaacauuguuuuggaugu

SEQ ID NO: 3267644 - RNA, 19 nt, Artificial Sequence
  Description of Artificial Sequence: Synthetic oligonucleotide
ucuucuuccaguuucuugu

SEQ ID NO: 3267645 - RNA, 19 nt, Artificial Sequence
  Description of Artificial Sequence: Synthetic oligonucleotide
cauaaugaaaaccauguca

SEQ ID NO: 3267646 - RNA, 19 nt, Artificial Sequence
  Description of Artificial Sequence: Synthetic oligonucleotide
cugaauuacuaauaaaguc

SEQ ID NO: 3267647 - RNA, 19 nt, Artificial Sequence
  Description of Artificial Sequence: Synthetic oligonucleotide
uauuuaaaguuugaugacc

SEQ ID NO: 3267648 - RNA, 19 nt, Artificial Sequence
  Description of Artificial Sequence: Synthetic oligonucleotide
caaccauagacacaguagg

SEQ ID NO: 3267649 - RNA, 19 nt, Artificial Sequence
  Description of Artificial Sequence: Synthetic oligonucleotide
uguacucucuuccagcuca

SEQ ID NO: 3267650 - RNA, 19 nt, Artificial Sequence
  Description of Artificial Sequence: Synthetic oligonucleotide
uagguacuaggacaguugg

SEQ ID NO: 3267651 - RNA, 19 nt, Artificial Sequence
  Description of Artificial Sequence: Synthetic oligonucleotide
ucagaaaacggaacggucu

SEQ ID NO: 3267652 - RNA, 19 nt, Artificial Sequence
  Description of Artificial Sequence: Synthetic oligonucleotide
auucuuuuagucguuuagc

SEQ ID NO: 3267653 - RNA, 19 nt, Artificial Sequence
  Description of Artificial Sequence: Synthetic oligonucleotide
ugccauuuauuuauaagac

SEQ ID NO: 3267654 - RNA, 19 nt, Artificial Sequence
  Description of Artificial Sequence: Synthetic oligonucleotide
auuagugacagucucuggu

SEQ ID NO: 3267655 - RNA, 19 nt, Artificial Sequence
  Description of Artificial Sequence: Synthetic oligonucleotide
aaccaugucaagguugaac

SEQ ID NO: 3267656 - RNA, 19 nt, Artificial Sequence
  Description of Artificial Sequence: Synthetic oligonucleotide
gaaucauuggugucccugg

SEQ ID NO: 3267657 - RNA, 19 nt, Artificial Sequence
  Description of Artificial Sequence: Synthetic oligonucleotide
caauagaccaauccagagg

SEQ ID NO: 3267658 - RNA, 19 nt, Artificial Sequence
  Description of Artificial Sequence: Synthetic oligonucleotide
aucaauaaucuccacauuu

SEQ ID NO: 3267659 - RNA, 19 nt, Artificial Sequence
  Description of Artificial Sequence: Synthetic oligonucleotide
uuugaagacacagaaaauu

SEQ ID NO: 3267660 - RNA, 19 nt, Artificial Sequence
  Description of Artificial Sequence: Synthetic oligonucleotide
uucgucaucauuagugaca

SEQ ID NO: 3267661 - RNA, 19 nt, Artificial Sequence
  Description of Artificial Sequence: Synthetic oligonucleotide
accaugucaagguugaaca

SEQ ID NO: 3267662 - RNA, 19 nt, Artificial Sequence
  Description of Artificial Sequence: Synthetic oligonucleotide
uugaugaccagugauaaaa

SEQ ID NO: 3267663 - RNA, 19 nt, Artificial Sequence
  Description of Artificial Sequence: Synthetic oligonucleotide
acggaggguagauucaggc

SEQ ID NO: 3267664 - RNA, 19 nt, Artificial Sequence
  Description of Artificial Sequence: Synthetic oligonucleotide
uuucaauauuuacaaggac

SEQ ID NO: 3267665 - RNA, 19 nt, Artificial Sequence
  Description of Artificial Sequence: Synthetic oligonucleotide
uacucauugguacaggaau

SEQ ID NO: 3267666 - RNA, 19 nt, Artificial Sequence
  Description of Artificial Sequence: Synthetic oligonucleotide
aacuugguacuuuucaaau

SEQ ID NO: 3267667 - RNA, 19 nt, Artificial Sequence
  Description of Artificial Sequence: Synthetic oligonucleotide
aacaagauuacaugagaua

SEQ ID NO: 3267668 - RNA, 19 nt, Artificial Sequence
  Description of Artificial Sequence: Synthetic oligonucleotide
caaaugucuuugaagacac

SEQ ID NO: 3267669 - RNA, 19 nt, Artificial Sequence
  Description of Artificial Sequence: Synthetic oligonucleotide
uuucucuucuuccaguuuc

SEQ ID NO: 3267670 - RNA, 19 nt, Artificial Sequence
  Description of Artificial Sequence: Synthetic oligonucleotide
aauccaagggaacaaguuu

SEQ ID NO: 3267671 - RNA, 19 nt, Artificial Sequence
  Description of Artificial Sequence: Synthetic oligonucleotide
aaaauguccuccuucuuuu

SEQ ID NO: 3267672 - RNA, 19 nt, Artificial Sequence
  Description of Artificial Sequence: Synthetic oligonucleotide
agaacaagauuacaugaga

SEQ ID NO: 3267673 - RNA, 19 nt, Artificial Sequence
  Description of Artificial Sequence: Synthetic oligonucleotide
accgguucgagguuucugc

SEQ ID NO: 3267674 - RNA, 19 nt, Artificial Sequence
  Description of Artificial Sequence: Synthetic oligonucleotide
gaaaucugaaauguaacuc

SEQ ID NO: 3267675 - RNA, 19 nt, Artificial Sequence
  Description of Artificial Sequence: Synthetic oligonucleotide
guauaguacaauuuuaaua

SEQ ID NO: 3267676 - RNA, 19 nt, Artificial Sequence
  Description of Artificial Sequence: Synthetic oligonucleotide
uaaaacuuacgauggcccc

SEQ ID NO: 3267677 - RNA, 19 nt, Artificial Sequence
  Description of Artificial Sequence: Synthetic oligonucleotide
aaguuugaugaccagugau

SEQ ID NO: 3267678 - RNA, 19 nt, Artificial Sequence
  Description of Artificial Sequence: Synthetic oligonucleotide
uucaaugaggaauaauaau

SEQ ID NO: 3267679 - RNA, 19 nt, Artificial Sequence
  Description of Artificial Sequence: Synthetic oligonucleotide
uucccuaucacgcaaccgu

SEQ ID NO: 3267680 - RNA, 19 nt, Artificial Sequence
  Description of Artificial Sequence: Synthetic oligonucleotide
aaaaccuuaguaacucaag

SEQ ID NO: 3267681 - RNA, 19 nt, Artificial Sequence
  Description of Artificial Sequence: Synthetic oligonucleotide
uuguuaaagacacuaucua

SEQ ID NO: 3267682 - RNA, 19 nt, Artificial Sequence
  Description of Artificial Sequence: Synthetic oligonucleotide
auaaugaaaaccaugucaa

SEQ ID NO: 3267683 - RNA, 19 nt, Artificial Sequence
  Description of Artificial Sequence: Synthetic oligonucleotide
uggcacucccauuagaagc

SEQ ID NO: 3267684 - RNA, 19 nt, Artificial Sequence
  Description of Artificial Sequence: Synthetic oligonucleotide
aggagggcgauucaaauga

SEQ ID NO: 3267685 - RNA, 19 nt, Artificial Sequence
  Description of Artificial Sequence: Synthetic oligonucleotide
acuaauaaagucugaggau

SEQ ID NO: 3267686 - RNA, 19 nt, Artificial Sequence
  Description of Artificial Sequence: Synthetic oligonucleotide
aucaguauggaauccacaa

SEQ ID NO: 3267687 - RNA, 19 nt, Artificial Sequence
  Description of Artificial Sequence: Synthetic oligonucleotide
caaauuauccauguuggug

SEQ ID NO: 3267688 - RNA, 19 nt, Artificial Sequence
  Description of Artificial Sequence: Synthetic oligonucleotide
uugaaguuuuccagaagca

SEQ ID NO: 3267689 - RNA, 19 nt, Artificial Sequence
  Description of Artificial Sequence: Synthetic oligonucleotide
auuugcugaucucucgggg

SEQ ID NO: 3267690 - RNA, 19 nt, Artificial Sequence
  Description of Artificial Sequence: Synthetic oligonucleotide
cuugcuuuauuugaggcug

SEQ ID NO: 3267691 - RNA, 19 nt, Artificial Sequence
  Description of Artificial Sequence: Synthetic oligonucleotide
uauucacguauuaaaacuu

SEQ ID NO: 3267692 - RNA, 19 nt, Artificial Sequence
  Description of Artificial Sequence: Synthetic oligonucleotide
cucaagauguuuaaaagaa

SEQ ID NO: 3267693 - RNA, 19 nt, Artificial Sequence
  Description of Artificial Sequence: Synthetic oligonucleotide
auaauacucauugguacag

SEQ ID NO: 3267694 - RNA, 19 nt, Artificial Sequence
  Description of Artificial Sequence: Synthetic oligonucleotide
agucguuuagccucuuuag

SEQ ID NO: 3267695 - RNA, 19 nt, Artificial Sequence
  Description of Artificial Sequence: Synthetic oligonucleotide
cuuucucgcucccaaaugc

SEQ ID NO: 3267696 - RNA, 19 nt, Artificial Sequence
  Description of Artificial Sequence: Synthetic oligonucleotide
ucuucuaggaauucuuuua

SEQ ID NO: 3267697 - RNA, 19 nt, Artificial Sequence
  Description of Artificial Sequence: Synthetic oligonucleotide
ucuucuucuuucuucuucu

SEQ ID NO: 3267698 - RNA, 19 nt, Artificial Sequence
  Description of Artificial Sequence: Synthetic oligonucleotide
ugagauaggcuguguacag

SEQ ID NO: 3267699 - RNA, 19 nt, Artificial Sequence
  Description of Artificial Sequence: Synthetic oligonucleotide
aaaaccaugucaagguuga

SEQ ID NO: 3267700 - RNA, 19 nt, Artificial Sequence
  Description of Artificial Sequence: Synthetic oligonucleotide
ucuuccaguuucuugugug

SEQ ID NO: 3267701 - RNA, 19 nt, Artificial Sequence
  Description of Artificial Sequence: Synthetic oligonucleotide
ucgucguucauaugcaucu

SEQ ID NO: 3267702 - RNA, 19 nt, Artificial Sequence
  Description of Artificial Sequence: Synthetic oligonucleotide
acaaaugucuuugaagaca

SEQ ID NO: 3267703 - RNA, 19 nt, Artificial Sequence
  Description of Artificial Sequence: Synthetic oligonucleotide
acguauuaaaacuuacgau

SEQ ID NO: 3267704 - RNA, 19 nt, Artificial Sequence
  Description of Artificial Sequence: Synthetic oligonucleotide
ucuuuagccauuucucuuc

SEQ ID NO: 3267705 - RNA, 19 nt, Artificial Sequence
  Description of Artificial Sequence: Synthetic oligonucleotide
aauaauuuuaaaacaaucc

SEQ ID NO: 3267706 - RNA, 19 nt, Artificial Sequence
  Description of Artificial Sequence: Synthetic oligonucleotide
uuuaaauauggcuaggugg

SEQ ID NO: 3267707 - RNA, 19 nt, Artificial Sequence
  Description of Artificial Sequence: Synthetic oligonucleotide
aagugaaauccccagaucc

SEQ ID NO: 3267708 - RNA, 19 nt, Artificial Sequence
  Description of Artificial Sequence: Synthetic oligonucleotide
uuaaauauggcuagguggg

SEQ ID NO: 3267709 - RNA, 19 nt, Artificial Sequence
  Description of Artificial Sequence: Synthetic oligonucleotide
uuuaaaacaauccuuaaaa

SEQ ID NO: 3267710 - RNA, 19 nt, Artificial Sequence
  Description of Artificial Sequence: Synthetic oligonucleotide
aaaagaaagggucauugag

SEQ ID NO: 3267711 - RNA, 19 nt, Artificial Sequence
  Description of Artificial Sequence: Synthetic oligonucleotide
uuaaaauguggcuagagug

SEQ ID NO: 3267712 - RNA, 19 nt, Artificial Sequence
  Description of Artificial Sequence: Synthetic oligonucleotide
aaaacaauccuuaaaaugu

SEQ ID NO: 3267713 - RNA, 19 nt, Artificial Sequence
  Description of Artificial Sequence: Synthetic oligonucleotide
uauuaggugacucacaacu

SEQ ID NO: 3267714 - RNA, 19 nt, Artificial Sequence
  Description of Artificial Sequence: Synthetic oligonucleotide
ucaauuaacacacacugcu

SEQ ID NO: 3267715 - RNA, 19 nt, Artificial Sequence
  Description of Artificial Sequence: Synthetic oligonucleotide
uaaaacaauccuuaaaaug

SEQ ID NO: 3267716 - RNA, 19 nt, Artificial Sequence
  Description of Artificial Sequence: Synthetic oligonucleotide
aaauaauuuuaaaacaauc

SEQ ID NO: 3267717 - RNA, 19 nt, Artificial Sequence
  Description of Artificial Sequence: Synthetic oligonucleotide
auaauuuuaaaacaauccu

SEQ ID NO: 3267718 - RNA, 19 nt, Artificial Sequence
  Description of Artificial Sequence: Synthetic oligonucleotide
uuugaaggaaaagaaaggg

SEQ ID NO: 3267719 - RNA, 19 nt, Artificial Sequence
  Description of Artificial Sequence: Synthetic oligonucleotide
aauguggcuagagugaugg

SEQ ID NO: 3267720 - RNA, 19 nt, Artificial Sequence
  Description of Artificial Sequence: Synthetic oligonucleotide
aauuaacacacacugcucu

SEQ ID NO: 3267721 - RNA, 19 nt, Artificial Sequence
  Description of Artificial Sequence: Synthetic oligonucleotide
aaaagguccucaucugagc

SEQ ID NO: 3267722 - RNA, 19 nt, Artificial Sequence
  Description of Artificial Sequence: Synthetic oligonucleotide
ugaaggaaaagaaaggguc

SEQ ID NO: 3267723 - RNA, 19 nt, Artificial Sequence
  Description of Artificial Sequence: Synthetic oligonucleotide
caucaauuaacacacacug

SEQ ID NO: 3267724 - RNA, 19 nt, Artificial Sequence
  Description of Artificial Sequence: Synthetic oligonucleotide
aaagaaagggucauugagg

SEQ ID NO: 3267725 - RNA, 19 nt, Artificial Sequence
  Description of Artificial Sequence: Synthetic oligonucleotide
aagaaagggucauugaggu

SEQ ID NO: 3267726 - RNA, 19 nt, Artificial Sequence
  Description of Artificial Sequence: Synthetic oligonucleotide
cuuugaaggaaaagaaagg

SEQ ID NO: 3267727 - RNA, 19 nt, Artificial Sequence
  Description of Artificial Sequence: Synthetic oligonucleotide
cucauuagggaauugcucc

SEQ ID NO: 3267728 - RNA, 19 nt, Artificial Sequence
  Description of Artificial Sequence: Synthetic oligonucleotide
uaaaauguggcuagaguga

SEQ ID NO: 3267729 - RNA, 19 nt, Artificial Sequence
  Description of Artificial Sequence: Synthetic oligonucleotide
uauacacuuggguacaugc

SEQ ID NO: 3267730 - RNA, 19 nt, Artificial Sequence
  Description of Artificial Sequence: Synthetic oligonucleotide
uuuuaaaacaauccuuaaa

SEQ ID NO: 3267731 - RNA, 19 nt, Artificial Sequence
  Description of Artificial Sequence: Synthetic oligonucleotide
uaauuuuaaaacaauccuu

SEQ ID NO: 3267732 - RNA, 19 nt, Artificial Sequence
  Description of Artificial Sequence: Synthetic oligonucleotide
acuuugaaggaaaagaaag

SEQ ID NO: 3267733 - RNA, 19 nt, Artificial Sequence
  Description of Artificial Sequence: Synthetic oligonucleotide
uguugguuuaaauauggcu

SEQ ID NO: 3267734 - RNA, 19 nt, Artificial Sequence
  Description of Artificial Sequence: Synthetic oligonucleotide
aauuuuaaaacaauccuua

SEQ ID NO: 3267735 - RNA, 19 nt, Artificial Sequence
  Description of Artificial Sequence: Synthetic oligonucleotide
uugguuuaaauauggcuag

SEQ ID NO: 3267736 - RNA, 19 nt, Artificial Sequence
  Description of Artificial Sequence: Synthetic oligonucleotide
uggaacucuaguuccaggg

SEQ ID NO: 3267737 - RNA, 19 nt, Artificial Sequence
  Description of Artificial Sequence: Synthetic oligonucleotide
agaaguggggcucauuagg

SEQ ID NO: 3267738 - RNA, 19 nt, Artificial Sequence
  Description of Artificial Sequence: Synthetic oligonucleotide
uaggacuuccuccagaagu

SEQ ID NO: 3267739 - RNA, 19 nt, Artificial Sequence
  Description of Artificial Sequence: Synthetic oligonucleotide
acucacaacuaccuggaac

SEQ ID NO: 3267740 - RNA, 19 nt, Artificial Sequence
  Description of Artificial Sequence: Synthetic oligonucleotide
uccacuuugaaggaaaaga

SEQ ID NO: 3267741 - RNA, 19 nt, Artificial Sequence
  Description of Artificial Sequence: Synthetic oligonucleotide
aaaauaauuuuaaaacaau

SEQ ID NO: 3267742 - RNA, 19 nt, Artificial Sequence
  Description of Artificial Sequence: Synthetic oligonucleotide
gugacucacaacuaccugg

SEQ ID NO: 3267743 - RNA, 19 nt, Artificial Sequence
  Description of Artificial Sequence: Synthetic oligonucleotide
uugaaggaaaagaaagggu

SEQ ID NO: 3267744 - RNA, 19 nt, Artificial Sequence
  Description of Artificial Sequence: Synthetic oligonucleotide
uuaaaacaauccuuaaaau

SEQ ID NO: 3267745 - RNA, 19 nt, Artificial Sequence
  Description of Artificial Sequence: Synthetic oligonucleotide
ucuguaggcaccaguauac

SEQ ID NO: 3267746 - RNA, 19 nt, Artificial Sequence
  Description of Artificial Sequence: Synthetic oligonucleotide
uucccagcaaccauauuag

SEQ ID NO: 3267747 - RNA, 19 nt, Artificial Sequence
  Description of Artificial Sequence: Synthetic oligonucleotide
uccuccagaagugaaaucc

SEQ ID NO: 3267748 - RNA, 19 nt, Artificial Sequence
  Description of Artificial Sequence: Synthetic oligonucleotide
aaagguccucaucugagca

SEQ ID NO: 3267749 - RNA, 19 nt, Artificial Sequence
  Description of Artificial Sequence: Synthetic oligonucleotide
uacaugcacacacacacac

SEQ ID NO: 3267750 - RNA, 19 nt, Artificial Sequence
  Description of Artificial Sequence: Synthetic oligonucleotide
ucaucugagcaucgggugg

SEQ ID NO: 3267751 - RNA, 19 nt, Artificial Sequence
  Description of Artificial Sequence: Synthetic oligonucleotide
aauauggcuaggugggcug

SEQ ID NO: 3267752 - RNA, 19 nt, Artificial Sequence
  Description of Artificial Sequence: Synthetic oligonucleotide
acaauccuuaaaauguggc

SEQ ID NO: 3267753 - RNA, 19 nt, Artificial Sequence
  Description of Artificial Sequence: Synthetic oligonucleotide
aacaauccuuaaaaugugg

SEQ ID NO: 3267754 - RNA, 19 nt, Artificial Sequence
  Description of Artificial Sequence: Synthetic oligonucleotide
cccagauccacuuugaagg

SEQ ID NO: 3267755 - RNA, 19 nt, Artificial Sequence
  Description of Artificial Sequence: Synthetic oligonucleotide
gcaucuaacaccuuuggcc

SEQ ID NO: 3267756 - RNA, 19 nt, Artificial Sequence
  Description of Artificial Sequence: Synthetic oligonucleotide
uuaggugacucacaacuac

SEQ ID NO: 3267757 - RNA, 19 nt, Artificial Sequence
  Description of Artificial Sequence: Synthetic oligonucleotide
uggcccaucaauuaacaca

SEQ ID NO: 3267758 - RNA, 19 nt, Artificial Sequence
  Description of Artificial Sequence: Synthetic oligonucleotide
guuuaaauauggcuaggug

SEQ ID NO: 3267759 - RNA, 19 nt, Artificial Sequence
  Description of Artificial Sequence: Synthetic oligonucleotide
auucccagcaaccauauua

SEQ ID NO: 3267760 - RNA, 19 nt, Artificial Sequence
  Description of Artificial Sequence: Synthetic oligonucleotide
gguacaugcacacacacac

SEQ ID NO: 3267761 - RNA, 19 nt, Artificial Sequence
  Description of Artificial Sequence: Synthetic oligonucleotide
uacacuuggguacaugcac

SEQ ID NO: 3267762 - RNA, 19 nt, Artificial Sequence
  Description of Artificial Sequence: Synthetic oligonucleotide
aauccuuaaaauguggcua

SEQ ID NO: 3267763 - RNA, 19 nt, Artificial Sequence
  Description of Artificial Sequence: Synthetic oligonucleotide
aauccccagauccacuuug

SEQ ID NO: 3267764 - RNA, 19 nt, Artificial Sequence
  Description of Artificial Sequence: Synthetic oligonucleotide
aaccauauuaggugacuca

SEQ ID NO: 3267765 - RNA, 19 nt, Artificial Sequence
  Description of Artificial Sequence: Synthetic oligonucleotide
ugcacacacacacacacaa

SEQ ID NO: 3267766 - RNA, 19 nt, Artificial Sequence
  Description of Artificial Sequence: Synthetic oligonucleotide
auccuuaaaauguggcuag

SEQ ID NO: 3267767 - RNA, 19 nt, Artificial Sequence
  Description of Artificial Sequence: Synthetic oligonucleotide
cuuggguacaugcacacac

SEQ ID NO: 3267768 - RNA, 19 nt, Artificial Sequence
  Description of Artificial Sequence: Synthetic oligonucleotide
uggaguagguguccguugg

SEQ ID NO: 3267769 - RNA, 19 nt, Artificial Sequence
  Description of Artificial Sequence: Synthetic oligonucleotide
gaacucuaguuccaggggc

SEQ ID NO: 3267770 - RNA, 19 nt, Artificial Sequence
  Description of Artificial Sequence: Synthetic oligonucleotide
agagugauggcaugugcuc

SEQ ID NO: 3267771 - RNA, 19 nt, Artificial Sequence
  Description of Artificial Sequence: Synthetic oligonucleotide
aaagauggcccaucaauua

SEQ ID NO: 3267772 - RNA, 19 nt, Artificial Sequence
  Description of Artificial Sequence: Synthetic oligonucleotide
caugcacacacacacacac

SEQ ID NO: 3267773 - RNA, 19 nt, Artificial Sequence
  Description of Artificial Sequence: Synthetic oligonucleotide
accauauuaggugacucac

SEQ ID NO: 3267774 - RNA, 19 nt, Artificial Sequence
  Description of Artificial Sequence: Synthetic oligonucleotide
agaagugaaauccccagau

SEQ ID NO: 3267775 - RNA, 19 nt, Artificial Sequence
  Description of Artificial Sequence: Synthetic oligonucleotide
uagggaauugcucccuuag

SEQ ID NO: 3267776 - RNA, 19 nt, Artificial Sequence
  Description of Artificial Sequence: Synthetic oligonucleotide
aaacaauccuuaaaaugug

SEQ ID NO: 3267777 - RNA, 19 nt, Artificial Sequence
  Description of Artificial Sequence: Synthetic oligonucleotide
aucaauuaacacacacugc

SEQ ID NO: 3267778 - RNA, 19 nt, Artificial Sequence
  Description of Artificial Sequence: Synthetic oligonucleotide
cugagcaucggguggaggg

SEQ ID NO: 3267779 - RNA, 19 nt, Artificial Sequence
  Description of Artificial Sequence: Synthetic oligonucleotide
caaaagguccucaucugag

SEQ ID NO: 3267780 - RNA, 19 nt, Artificial Sequence
  Description of Artificial Sequence: Synthetic oligonucleotide
acaccuuuggccucuguag

SEQ ID NO: 3267781 - RNA, 19 nt, Artificial Sequence
  Description of Artificial Sequence: Synthetic oligonucleotide
ugggcuggaaagauggccc

SEQ ID NO: 3267782 - RNA, 19 nt, Artificial Sequence
  Description of Artificial Sequence: Synthetic oligonucleotide
ucagaaguggggcucauua

SEQ ID NO: 3267783 - RNA, 19 nt, Artificial Sequence
  Description of Artificial Sequence: Synthetic oligonucleotide
auauuaggugacucacaac

SEQ ID NO: 3267784 - RNA, 19 nt, Artificial Sequence
  Description of Artificial Sequence: Synthetic oligonucleotide
uggcuguugguuuaaauau

SEQ ID NO: 3267785 - RNA, 19 nt, Artificial Sequence
  Description of Artificial Sequence: Synthetic oligonucleotide
uagagugauggcaugugcu

SEQ ID NO: 3267786 - RNA, 19 nt, Artificial Sequence
  Description of Artificial Sequence: Synthetic oligonucleotide
ugaggucuggaguaggugu

SEQ ID NO: 3267787 - RNA, 19 nt, Artificial Sequence
  Description of Artificial Sequence: Synthetic oligonucleotide
uccucaucugagcaucggg

SEQ ID NO: 3267788 - RNA, 19 nt, Artificial Sequence
  Description of Artificial Sequence: Synthetic oligonucleotide
ucccuuagcaucuguagga

SEQ ID NO: 3267789 - RNA, 19 nt, Artificial Sequence
  Description of Artificial Sequence: Synthetic oligonucleotide
uccaggggcaucuaacacc

SEQ ID NO: 3267790 - RNA, 19 nt, Artificial Sequence
  Description of Artificial Sequence: Synthetic oligonucleotide
ucaauucccagcaaccaua

SEQ ID NO: 3267791 - RNA, 19 nt, Artificial Sequence
  Description of Artificial Sequence: Synthetic oligonucleotide
ucauuagggaauugcuccc

SEQ ID NO: 3267792 - RNA, 19 nt, Artificial Sequence
  Description of Artificial Sequence: Synthetic oligonucleotide
ugacucacaacuaccugga

SEQ ID NO: 3267793 - RNA, 19 nt, Artificial Sequence
  Description of Artificial Sequence: Synthetic oligonucleotide
caucuguaggacuuccucc

SEQ ID NO: 3267794 - RNA, 19 nt, Artificial Sequence
  Description of Artificial Sequence: Synthetic oligonucleotide
accaguauacacuugggua

SEQ ID NO: 3267795 - RNA, 19 nt, Artificial Sequence
  Description of Artificial Sequence: Synthetic oligonucleotide
gaaguggggcucauuaggg

SEQ ID NO: 3267796 - RNA, 19 nt, Artificial Sequence
  Description of Artificial Sequence: Synthetic oligonucleotide
uaacacacacugcucuucc

SEQ ID NO: 3267797 - RNA, 19 nt, Artificial Sequence
  Description of Artificial Sequence: Synthetic oligonucleotide
uaggugacucacaacuacc

SEQ ID NO: 3267798 - RNA, 19 nt, Artificial Sequence
  Description of Artificial Sequence: Synthetic oligonucleotide
accuuuggccucuguaggc

SEQ ID NO: 3267799 - RNA, 19 nt, Artificial Sequence
  Description of Artificial Sequence: Synthetic oligonucleotide
gaaaagaaagggucauuga

SEQ ID NO: 3267800 - RNA, 19 nt, Artificial Sequence
  Description of Artificial Sequence: Synthetic oligonucleotide
gaaagggucauugaggucu

SEQ ID NO: 3267801 - RNA, 19 nt, Artificial Sequence
  Description of Artificial Sequence: Synthetic oligonucleotide
agggaauugcucccuuagc

SEQ ID NO: 3267802 - RNA, 19 nt, Artificial Sequence
  Description of Artificial Sequence: Synthetic oligonucleotide
auuuuaaaacaauccuuaa

SEQ ID NO: 3267803 - RNA, 19 nt, Artificial Sequence
  Description of Artificial Sequence: Synthetic oligonucleotide
aagauggcccaucaauuaa

SEQ ID NO: 3267804 - RNA, 19 nt, Artificial Sequence
  Description of Artificial Sequence: Synthetic oligonucleotide
uguggcuagagugauggca

SEQ ID NO: 3267805 - RNA, 19 nt, Artificial Sequence
  Description of Artificial Sequence: Synthetic oligonucleotide
uuuaagaacaaauugcucc

SEQ ID NO: 3267806 - RNA, 19 nt, Artificial Sequence
  Description of Artificial Sequence: Synthetic oligonucleotide
agagauaugaggcagagcu

SEQ ID NO: 3267807 - RNA, 19 nt, Artificial Sequence
  Description of Artificial Sequence: Synthetic oligonucleotide
aaacguuuaagcucuuuac

SEQ ID NO: 3267808 - RNA, 19 nt, Artificial Sequence
  Description of Artificial Sequence: Synthetic oligonucleotide
aacgucauaucuuccaugg

SEQ ID NO: 3267809 - RNA, 19 nt, Artificial Sequence
  Description of Artificial Sequence: Synthetic oligonucleotide
uuggaagaaacccauauug

SEQ ID NO: 3267810 - RNA, 19 nt, Artificial Sequence
  Description of Artificial Sequence: Synthetic oligonucleotide
uuugaugaucuccagggcg

SEQ ID NO: 3267811 - RNA, 19 nt, Artificial Sequence
  Description of Artificial Sequence: Synthetic oligonucleotide
ugcuuuaagaacaaauugc

SEQ ID NO: 3267812 - RNA, 19 nt, Artificial Sequence
  Description of Artificial Sequence: Synthetic oligonucleotide
augaaguugaccuccaugg

SEQ ID NO: 3267813 - RNA, 19 nt, Artificial Sequence
  Description of Artificial Sequence: Synthetic oligonucleotide
aacaaauugcuccgcaaac

SEQ ID NO: 3267814 - RNA, 19 nt, Artificial Sequence
  Description of Artificial Sequence: Synthetic oligonucleotide
uucagcauggguaaggcag

SEQ ID NO: 3267815 - RNA, 19 nt, Artificial Sequence
  Description of Artificial Sequence: Synthetic oligonucleotide
uaugaggccaagaacacag

SEQ ID NO: 3267816 - RNA, 19 nt, Artificial Sequence
  Description of Artificial Sequence: Synthetic oligonucleotide
acuugucaaacguuuaagc

SEQ ID NO: 3267817 - RNA, 19 nt, Artificial Sequence
  Description of Artificial Sequence: Synthetic oligonucleotide
cuaauggaagagaagaacc

SEQ ID NO: 3267818 - RNA, 19 nt, Artificial Sequence
  Description of Artificial Sequence: Synthetic oligonucleotide
uuucuaauggaagagaaga

SEQ ID NO: 3267819 - RNA, 19 nt, Artificial Sequence
  Description of Artificial Sequence: Synthetic oligonucleotide
aagaaauuuccuaugaucu

SEQ ID NO: 3267820 - RNA, 19 nt, Artificial Sequence
  Description of Artificial Sequence: Synthetic oligonucleotide
aacacagagagugauggac

SEQ ID NO: 3267821 - RNA, 19 nt, Artificial Sequence
  Description of Artificial Sequence: Synthetic oligonucleotide
aagaaacccauauuggugu

SEQ ID NO: 3267822 - RNA, 19 nt, Artificial Sequence
  Description of Artificial Sequence: Synthetic oligonucleotide
aaggcagcgggauaccacc

SEQ ID NO: 3267823 - RNA, 19 nt, Artificial Sequence
  Description of Artificial Sequence: Synthetic oligonucleotide
aagugaguaccccagaggu

SEQ ID NO: 3267824 - RNA, 19 nt, Artificial Sequence
  Description of Artificial Sequence: Synthetic oligonucleotide
uguuucuguguuuaugagg

SEQ ID NO: 3267825 - RNA, 19 nt, Artificial Sequence
  Description of Artificial Sequence: Synthetic oligonucleotide
uggaagaaacccauauugg

SEQ ID NO: 3267826 - RNA, 19 nt, Artificial Sequence
  Description of Artificial Sequence: Synthetic oligonucleotide
aauggaagagaagaacccg

SEQ ID NO: 3267827 - RNA, 19 nt, Artificial Sequence
  Description of Artificial Sequence: Synthetic oligonucleotide
ugucaaacguuuaagcucu

SEQ ID NO: 3267828 - RNA, 19 nt, Artificial Sequence
  Description of Artificial Sequence: Synthetic oligonucleotide
agugaugugguugagaaug

SEQ ID NO: 3267829 - RNA, 19 nt, Artificial Sequence
  Description of Artificial Sequence: Synthetic oligonucleotide
aggauagggguccagcucc

SEQ ID NO: 3267830 - RNA, 19 nt, Artificial Sequence
  Description of Artificial Sequence: Synthetic oligonucleotide
ugcagucaauaccacaugg

SEQ ID NO: 3267831 - RNA, 19 nt, Artificial Sequence
  Description of Artificial Sequence: Synthetic oligonucleotide
agaaugagcauguccaguc

SEQ ID NO: 3267832 - RNA, 19 nt, Artificial Sequence
  Description of Artificial Sequence: Synthetic oligonucleotide
aaauuuccuaugaucuucc

SEQ ID NO: 3267833 - RNA, 19 nt, Artificial Sequence
  Description of Artificial Sequence: Synthetic oligonucleotide
aacguuuaagcucuuuacu

SEQ ID NO: 3267834 - RNA, 19 nt, Artificial Sequence
  Description of Artificial Sequence: Synthetic oligonucleotide
gagaugacaacaaugcugc

SEQ ID NO: 3267835 - RNA, 19 nt, Artificial Sequence
  Description of Artificial Sequence: Synthetic oligonucleotide
uuuucuaauggaagagaag

SEQ ID NO: 3267836 - RNA, 19 nt, Artificial Sequence
  Description of Artificial Sequence: Synthetic oligonucleotide
guggauagggcucacagag

SEQ ID NO: 3267837 - RNA, 19 nt, Artificial Sequence
  Description of Artificial Sequence: Synthetic oligonucleotide
uccagagcaaacuugcuug

SEQ ID NO: 3267838 - RNA, 19 nt, Artificial Sequence
  Description of Artificial Sequence: Synthetic oligonucleotide
uagcugaugaaguugaccu

SEQ ID NO: 3267839 - RNA, 19 nt, Artificial Sequence
  Description of Artificial Sequence: Synthetic oligonucleotide
aaugcugccguuacucugc

SEQ ID NO: 3267840 - RNA, 19 nt, Artificial Sequence
  Description of Artificial Sequence: Synthetic oligonucleotide
ugugaagugaguaccccag

SEQ ID NO: 3267841 - RNA, 19 nt, Artificial Sequence
  Description of Artificial Sequence: Synthetic oligonucleotide
uguucuaagaccucucacu

SEQ ID NO: 3267842 - RNA, 19 nt, Artificial Sequence
  Description of Artificial Sequence: Synthetic oligonucleotide
uaagugaugugguugagaa

SEQ ID NO: 3267843 - RNA, 19 nt, Artificial Sequence
  Description of Artificial Sequence: Synthetic oligonucleotide
caagaaauuuccuaugauc

SEQ ID NO: 3267844 - RNA, 19 nt, Artificial Sequence
  Description of Artificial Sequence: Synthetic oligonucleotide
acaacaaugcugccguuac

SEQ ID NO: 3267845 - RNA, 19 nt, Artificial Sequence
  Description of Artificial Sequence: Synthetic oligonucleotide
agagcagcaccuuugauga

SEQ ID NO: 3267846 - RNA, 19 nt, Artificial Sequence
  Description of Artificial Sequence: Synthetic oligonucleotide
guuuaugaggccaagaaca

SEQ ID NO: 3267847 - RNA, 19 nt, Artificial Sequence
  Description of Artificial Sequence: Synthetic oligonucleotide
uuaagcucuuuacugcaag

SEQ ID NO: 3267848 - RNA, 19 nt, Artificial Sequence
  Description of Artificial Sequence: Synthetic oligonucleotide
aagagaagaacccguccag

SEQ ID NO: 3267849 - RNA, 19 nt, Artificial Sequence
  Description of Artificial Sequence: Synthetic oligonucleotide
agaagaacccguccagagc

SEQ ID NO: 3267850 - RNA, 19 nt, Artificial Sequence
  Description of Artificial Sequence: Synthetic oligonucleotide
ugcaagaaauuuccuauga

SEQ ID NO: 3267851 - RNA, 19 nt, Artificial Sequence
  Description of Artificial Sequence: Synthetic oligonucleotide
ugaagugaguaccccagag

SEQ ID NO: 3267852 - RNA, 19 nt, Artificial Sequence
  Description of Artificial Sequence: Synthetic oligonucleotide
auaucaucuuggaagaaac

SEQ ID NO: 3267853 - RNA, 19 nt, Artificial Sequence
  Description of Artificial Sequence: Synthetic oligonucleotide
uguuuaugaggccaagaac

SEQ ID NO: 3267854 - RNA, 19 nt, Artificial Sequence
  Description of Artificial Sequence: Synthetic oligonucleotide
uugucaaacguuuaagcuc

SEQ ID NO: 3267855 - RNA, 19 nt, Artificial Sequence
  Description of Artificial Sequence: Synthetic oligonucleotide
uuguggauagggcucacag

SEQ ID NO: 3267856 - RNA, 19 nt, Artificial Sequence
  Description of Artificial Sequence: Synthetic oligonucleotide
uaggcuuuuguggauaggg

SEQ ID NO: 3267857 - RNA, 19 nt, Artificial Sequence
  Description of Artificial Sequence: Synthetic oligonucleotide
gaagugaguaccccagagg

SEQ ID NO: 3267858 - RNA, 19 nt, Artificial Sequence
  Description of Artificial Sequence: Synthetic oligonucleotide
aauuccuagcugcugacaa

SEQ ID NO: 3267859 - RNA, 19 nt, Artificial Sequence
  Description of Artificial Sequence: Synthetic oligonucleotide
ucuuggaagaaacccauau

SEQ ID NO: 3267860 - RNA, 19 nt, Artificial Sequence
  Description of Artificial Sequence: Synthetic oligonucleotide
gaagaacccguccagagca

SEQ ID NO: 3267861 - RNA, 19 nt, Artificial Sequence
  Description of Artificial Sequence: Synthetic oligonucleotide
auagcugaugaaguugacc

SEQ ID NO: 3267862 - RNA, 19 nt, Artificial Sequence
  Description of Artificial Sequence: Synthetic oligonucleotide
gaagaaacccauauuggug

SEQ ID NO: 3267863 - RNA, 19 nt, Artificial Sequence
  Description of Artificial Sequence: Synthetic oligonucleotide
guugaccuuguuuacugcg

SEQ ID NO: 3267864 - RNA, 19 nt, Artificial Sequence
  Description of Artificial Sequence: Synthetic oligonucleotide
augacaacaaugcugccgu

SEQ ID NO: 3267865 - RNA, 19 nt, Artificial Sequence
  Description of Artificial Sequence: Synthetic oligonucleotide
cugcuuuaagaacaaauug

SEQ ID NO: 3267866 - RNA, 19 nt, Artificial Sequence
  Description of Artificial Sequence: Synthetic oligonucleotide
aaacgucauaucuuccaug

SEQ ID NO: 3267867 - RNA, 19 nt, Artificial Sequence
  Description of Artificial Sequence: Synthetic oligonucleotide
uuacucugcuucagcaugg

SEQ ID NO: 3267868 - RNA, 19 nt, Artificial Sequence
  Description of Artificial Sequence: Synthetic oligonucleotide
augaccacauagcugauga

SEQ ID NO: 3267869 - RNA, 19 nt, Artificial Sequence
  Description of Artificial Sequence: Synthetic oligonucleotide
uugcuugcagaguagggag

SEQ ID NO: 3267870 - RNA, 19 nt, Artificial Sequence
  Description of Artificial Sequence: Synthetic oligonucleotide
gacacguugaccuuguuua

SEQ ID NO: 3267871 - RNA, 19 nt, Artificial Sequence
  Description of Artificial Sequence: Synthetic oligonucleotide
aagaacaaauugcuccgca

SEQ ID NO: 3267872 - RNA, 19 nt, Artificial Sequence
  Description of Artificial Sequence: Synthetic oligonucleotide
gucaauaccacaugggcuc

SEQ ID NO: 3267873 - RNA, 19 nt, Artificial Sequence
  Description of Artificial Sequence: Synthetic oligonucleotide
gaagagaagaacccgucca

SEQ ID NO: 3267874 - RNA, 19 nt, Artificial Sequence
  Description of Artificial Sequence: Synthetic oligonucleotide
auuucugacagaugauaug

SEQ ID NO: 3267875 - RNA, 19 nt, Artificial Sequence
  Description of Artificial Sequence: Synthetic oligonucleotide
uaugaggcagagcuguucu

SEQ ID NO: 3267876 - RNA, 19 nt, Artificial Sequence
  Description of Artificial Sequence: Synthetic oligonucleotide
acaaauugcuccgcaaacg

SEQ ID NO: 3267877 - RNA, 19 nt, Artificial Sequence
  Description of Artificial Sequence: Synthetic oligonucleotide
cagucaauaccacaugggc

SEQ ID NO: 3267878 - RNA, 19 nt, Artificial Sequence
  Description of Artificial Sequence: Synthetic oligonucleotide
gagaagaacccguccagag

SEQ ID NO: 3267879 - RNA, 19 nt, Artificial Sequence
  Description of Artificial Sequence: Synthetic oligonucleotide
ccuuugaugaucuccaggg

SEQ ID NO: 3267880 - RNA, 19 nt, Artificial Sequence
  Description of Artificial Sequence: Synthetic oligonucleotide
uacaccucaucuuuucuca

SEQ ID NO: 3267881 - RNA, 19 nt, Artificial Sequence
  Description of Artificial Sequence: Synthetic oligonucleotide
agagcaaacuugcuugcag

SEQ ID NO: 3267882 - RNA, 19 nt, Artificial Sequence
  Description of Artificial Sequence: Synthetic oligonucleotide
gaucuugcagucaauacca

SEQ ID NO: 3267883 - RNA, 19 nt, Artificial Sequence
  Description of Artificial Sequence: Synthetic oligonucleotide
uaucaucuuggaagaaacc

SEQ ID NO: 3267884 - RNA, 19 nt, Artificial Sequence
  Description of Artificial Sequence: Synthetic oligonucleotide
uccugcuuuaagaacaaau

SEQ ID NO: 3267885 - RNA, 19 nt, Artificial Sequence
  Description of Artificial Sequence: Synthetic oligonucleotide
gagagugauggacacguug

SEQ ID NO: 3267886 - RNA, 19 nt, Artificial Sequence
  Description of Artificial Sequence: Synthetic oligonucleotide
aauguagugagcagaggcu

SEQ ID NO: 3267887 - RNA, 19 nt, Artificial Sequence
  Description of Artificial Sequence: Synthetic oligonucleotide
acagaugauaugccauuuc

SEQ ID NO: 3267888 - RNA, 19 nt, Artificial Sequence
  Description of Artificial Sequence: Synthetic oligonucleotide
accuccauggcuuugcgca

SEQ ID NO: 3267889 - RNA, 19 nt, Artificial Sequence
  Description of Artificial Sequence: Synthetic oligonucleotide
uuccccaggaggauagggg

SEQ ID NO: 3267890 - RNA, 19 nt, Artificial Sequence
  Description of Artificial Sequence: Synthetic oligonucleotide
accucaucuuuucucagag

SEQ ID NO: 3267891 - RNA, 19 nt, Artificial Sequence
  Description of Artificial Sequence: Synthetic oligonucleotide
cuuuaagaacaaauugcuc

SEQ ID NO: 3267892 - RNA, 19 nt, Artificial Sequence
  Description of Artificial Sequence: Synthetic oligonucleotide
cagagcagcaccuuugaug

SEQ ID NO: 3267893 - RNA, 19 nt, Artificial Sequence
  Description of Artificial Sequence: Synthetic oligonucleotide
accuuugaugaucuccagg

SEQ ID NO: 3267894 - RNA, 19 nt, Artificial Sequence
  Description of Artificial Sequence: Synthetic oligonucleotide
uucuaauggaagagaagaa

SEQ ID NO: 3267895 - RNA, 19 nt, Artificial Sequence
  Description of Artificial Sequence: Synthetic oligonucleotide
ucacagagauaugaggcag

SEQ ID NO: 3267896 - RNA, 19 nt, Artificial Sequence
  Description of Artificial Sequence: Synthetic oligonucleotide
augugguugagaaugagca

SEQ ID NO: 3267897 - RNA, 19 nt, Artificial Sequence
  Description of Artificial Sequence: Synthetic oligonucleotide
cugggaauaggcuuuugug

SEQ ID NO: 3267898 - RNA, 19 nt, Artificial Sequence
  Description of Artificial Sequence: Synthetic oligonucleotide
agauaugaggcagagcugu

SEQ ID NO: 3267899 - RNA, 19 nt, Artificial Sequence
  Description of Artificial Sequence: Synthetic oligonucleotide
uucuaagaccucucacuag

SEQ ID NO: 3267900 - RNA, 19 nt, Artificial Sequence
  Description of Artificial Sequence: Synthetic oligonucleotide
gucauaucuuccauggugc

SEQ ID NO: 3267901 - RNA, 19 nt, Artificial Sequence
  Description of Artificial Sequence: Synthetic oligonucleotide
uguagugagcagaggcugc

SEQ ID NO: 3267902 - RNA, 19 nt, Artificial Sequence
  Description of Artificial Sequence: Synthetic oligonucleotide
uucuguguuuaugaggcca

SEQ ID NO: 3267903 - RNA, 19 nt, Artificial Sequence
  Description of Artificial Sequence: Synthetic oligonucleotide
agcauggauaucaucuugg

SEQ ID NO: 3267904 - RNA, 19 nt, Artificial Sequence
  Description of Artificial Sequence: Synthetic oligonucleotide
aaauugcuccgcaaacguc

SEQ ID NO: 3267905 - RNA, 19 nt, Artificial Sequence
  Description of Artificial Sequence: Synthetic oligonucleotide
aaauauaucauacauuucu

SEQ ID NO: 3267906 - RNA, 19 nt, Artificial Sequence
  Description of Artificial Sequence: Synthetic oligonucleotide
aguaucaacagccagguag

SEQ ID NO: 3267907 - RNA, 19 nt, Artificial Sequence
  Description of Artificial Sequence: Synthetic oligonucleotide
ucugauuugacgaauaggu

SEQ ID NO: 3267908 - RNA, 19 nt, Artificial Sequence
  Description of Artificial Sequence: Synthetic oligonucleotide
guugaauccugauagaugg

SEQ ID NO: 3267909 - RNA, 19 nt, Artificial Sequence
  Description of Artificial Sequence: Synthetic oligonucleotide
uuccuuauauacaaaaucc

SEQ ID NO: 3267910 - RNA, 19 nt, Artificial Sequence
  Description of Artificial Sequence: Synthetic oligonucleotide
uccgauuuacuucaggugg

SEQ ID NO: 3267911 - RNA, 19 nt, Artificial Sequence
  Description of Artificial Sequence: Synthetic oligonucleotide
auuccuuauauacaaaauc

SEQ ID NO: 3267912 - RNA, 19 nt, Artificial Sequence
  Description of Artificial Sequence: Synthetic oligonucleotide
ucaacagccagguagagcc

SEQ ID NO: 3267913 - RNA, 19 nt, Artificial Sequence
  Description of Artificial Sequence: Synthetic oligonucleotide
ucauagaccacauaggcug

SEQ ID NO: 3267914 - RNA, 19 nt, Artificial Sequence
  Description of Artificial Sequence: Synthetic oligonucleotide
aaagaugucuucauagacc

SEQ ID NO: 3267915 - RNA, 19 nt, Artificial Sequence
  Description of Artificial Sequence: Synthetic oligonucleotide
ugauuugacgaauaggucc

SEQ ID NO: 3267916 - RNA, 19 nt, Artificial Sequence
  Description of Artificial Sequence: Synthetic oligonucleotide
aauauucgcccucuuggcc

SEQ ID NO: 3267917 - RNA, 19 nt, Artificial Sequence
  Description of Artificial Sequence: Synthetic oligonucleotide
uuuuguauggcaaauuccu

SEQ ID NO: 3267918 - RNA, 19 nt, Artificial Sequence
  Description of Artificial Sequence: Synthetic oligonucleotide
ucugcugugauuuuguaug

SEQ ID NO: 3267919 - RNA, 19 nt, Artificial Sequence
  Description of Artificial Sequence: Synthetic oligonucleotide
uccuuauauacaaaauccg

SEQ ID NO: 3267920 - RNA, 19 nt, Artificial Sequence
  Description of Artificial Sequence: Synthetic oligonucleotide
acaaaauccgauuuacuuc

SEQ ID NO: 3267921 - RNA, 19 nt, Artificial Sequence
  Description of Artificial Sequence: Synthetic oligonucleotide
auauuucccaaauauauca

SEQ ID NO: 3267922 - RNA, 19 nt, Artificial Sequence
  Description of Artificial Sequence: Synthetic oligonucleotide
aauagguccauauuuccca

SEQ ID NO: 3267923 - RNA, 19 nt, Artificial Sequence
  Description of Artificial Sequence: Synthetic oligonucleotide
aagaugucuucauagacca

SEQ ID NO: 3267924 - RNA, 19 nt, Artificial Sequence
  Description of Artificial Sequence: Synthetic oligonucleotide
uauaucauacauuucuucu

SEQ ID NO: 3267925 - RNA, 19 nt, Artificial Sequence
  Description of Artificial Sequence: Synthetic oligonucleotide
auacagaguaucaacagcc

SEQ ID NO: 3267926 - RNA, 19 nt, Artificial Sequence
  Description of Artificial Sequence: Synthetic oligonucleotide
ucuucauagaccacauagg

SEQ ID NO: 3267927 - RNA, 19 nt, Artificial Sequence
  Description of Artificial Sequence: Synthetic oligonucleotide
aaauuccuuauauacaaaa

SEQ ID NO: 3267928 - RNA, 19 nt, Artificial Sequence
  Description of Artificial Sequence: Synthetic oligonucleotide
aacuaagacguguugacgu

SEQ ID NO: 3267929 - RNA, 19 nt, Artificial Sequence
  Description of Artificial Sequence: Synthetic oligonucleotide
ugcauucuuagcaucaaag

SEQ ID NO: 3267930 - RNA, 19 nt, Artificial Sequence
  Description of Artificial Sequence: Synthetic oligonucleotide
uucuuagcaucaaagaugu

SEQ ID NO: 3267931 - RNA, 19 nt, Artificial Sequence
  Description of Artificial Sequence: Synthetic oligonucleotide
gucuucauagaccacauag

SEQ ID NO: 3267932 - RNA, 19 nt, Artificial Sequence
  Description of Artificial Sequence: Synthetic oligonucleotide
aauccgauuuacuucaggu

SEQ ID NO: 3267933 - RNA, 19 nt, Artificial Sequence
  Description of Artificial Sequence: Synthetic oligonucleotide
aauccugauagauggucac

SEQ ID NO: 3267934 - RNA, 19 nt, Artificial Sequence
  Description of Artificial Sequence: Synthetic oligonucleotide
auauaucauacauuucuuc

SEQ ID NO: 3267935 - RNA, 19 nt, Artificial Sequence
  Description of Artificial Sequence: Synthetic oligonucleotide
uuucccaaauauaucauac

SEQ ID NO: 3267936 - RNA, 19 nt, Artificial Sequence
  Description of Artificial Sequence: Synthetic oligonucleotide
ugcaucgccaucuuggcgg

SEQ ID NO: 3267937 - RNA, 19 nt, Artificial Sequence
  Description of Artificial Sequence: Synthetic oligonucleotide
agcgucucaaacuaagacg

SEQ ID NO: 3267938 - RNA, 19 nt, Artificial Sequence
  Description of Artificial Sequence: Synthetic oligonucleotide
uaucucuaaaggucggucg

SEQ ID NO: 3267939 - RNA, 19 nt, Artificial Sequence
  Description of Artificial Sequence: Synthetic oligonucleotide
uggcaaauuccuuauauac

SEQ ID NO: 3267940 - RNA, 19 nt, Artificial Sequence
  Description of Artificial Sequence: Synthetic oligonucleotide
gauacagaguaucaacagc

SEQ ID NO: 3267941 - RNA, 19 nt, Artificial Sequence
  Description of Artificial Sequence: Synthetic oligonucleotide
gauuuuguauggcaaauuc

SEQ ID NO: 3267942 - RNA, 19 nt, Artificial Sequence
  Description of Artificial Sequence: Synthetic oligonucleotide
cacagcgucagauacagag

SEQ ID NO: 3267943 - RNA, 19 nt, Artificial Sequence
  Description of Artificial Sequence: Synthetic oligonucleotide
auuuuguauggcaaauucc

SEQ ID NO: 3267944 - RNA, 19 nt, Artificial Sequence
  Description of Artificial Sequence: Synthetic oligonucleotide
uauacaaaauccgauuuac

SEQ ID NO: 3267945 - RNA, 19 nt, Artificial Sequence
  Description of Artificial Sequence: Synthetic oligonucleotide
aucucuaaaggucggucgc

SEQ ID NO: 3267946 - RNA, 19 nt, Artificial Sequence
  Description of Artificial Sequence: Synthetic oligonucleotide
ucagauacagaguaucaac

SEQ ID NO: 3267947 - RNA, 19 nt, Artificial Sequence
  Description of Artificial Sequence: Synthetic oligonucleotide
cugauagauggucacaugc

SEQ ID NO: 3267948 - RNA, 19 nt, Artificial Sequence
  Description of Artificial Sequence: Synthetic oligonucleotide
aaauccgauuuacuucagg

SEQ ID NO: 3267949 - RNA, 19 nt, Artificial Sequence
  Description of Artificial Sequence: Synthetic oligonucleotide
aaaggcagcgucucaaacu

SEQ ID NO: 3267950 - RNA, 19 nt, Artificial Sequence
  Description of Artificial Sequence: Synthetic oligonucleotide
auaucauacauuucuucug

SEQ ID NO: 3267951 - RNA, 19 nt, Artificial Sequence
  Description of Artificial Sequence: Synthetic oligonucleotide
agauacagaguaucaacag

SEQ ID NO: 3267952 - RNA, 19 nt, Artificial Sequence
  Description of Artificial Sequence: Synthetic oligonucleotide
uacaaaauccgauuuacuu

SEQ ID NO: 3267953 - RNA, 19 nt, Artificial Sequence
  Description of Artificial Sequence: Synthetic oligonucleotide
auauucgcccucuuggccg

SEQ ID NO: 3267954 - RNA, 19 nt, Artificial Sequence
  Description of Artificial Sequence: Synthetic oligonucleotide
uuauauacaaaauccgauu

SEQ ID NO: 3267955 - RNA, 19 nt, Artificial Sequence
  Description of Artificial Sequence: Synthetic oligonucleotide
ucccaaauauaucauacau

SEQ ID NO: 3267956 - RNA, 19 nt, Artificial Sequence
  Description of Artificial Sequence: Synthetic oligonucleotide
cagaguaucaacagccagg

SEQ ID NO: 3267957 - RNA, 19 nt, Artificial Sequence
  Description of Artificial Sequence: Synthetic oligonucleotide
uccuacucugauuugacga

SEQ ID NO: 3267958 - RNA, 19 nt, Artificial Sequence
  Description of Artificial Sequence: Synthetic oligonucleotide
aaacuaagacguguugacg

SEQ ID NO: 3267959 - RNA, 19 nt, Artificial Sequence
  Description of Artificial Sequence: Synthetic oligonucleotide
ucaaagaugucuucauaga

SEQ ID NO: 3267960 - RNA, 19 nt, Artificial Sequence
  Description of Artificial Sequence: Synthetic oligonucleotide
auucuuagcaucaaagaug

SEQ ID NO: 3267961 - RNA, 19 nt, Artificial Sequence
  Description of Artificial Sequence: Synthetic oligonucleotide
ugauagauggucacaugca

SEQ ID NO: 3267962 - RNA, 19 nt, Artificial Sequence
  Description of Artificial Sequence: Synthetic oligonucleotide
ugggagucgaauauucgcc

SEQ ID NO: 3267963 - RNA, 19 nt, Artificial Sequence
  Description of Artificial Sequence: Synthetic oligonucleotide
ucaaacuaagacguguuga

SEQ ID NO: 3267964 - RNA, 19 nt, Artificial Sequence
  Description of Artificial Sequence: Synthetic oligonucleotide
gucacaugcauucuuagca

SEQ ID NO: 3267965 - RNA, 19 nt, Artificial Sequence
  Description of Artificial Sequence: Synthetic oligonucleotide
uuagcaucaaagaugucuu

SEQ ID NO: 3267966 - RNA, 19 nt, Artificial Sequence
  Description of Artificial Sequence: Synthetic oligonucleotide
caaaauccgauuuacuuca

SEQ ID NO: 3267967 - RNA, 19 nt, Artificial Sequence
  Description of Artificial Sequence: Synthetic oligonucleotide
caaacuaagacguguugac

SEQ ID NO: 3267968 - RNA, 19 nt, Artificial Sequence
  Description of Artificial Sequence: Synthetic oligonucleotide
uagauggucacaugcauuc

SEQ ID NO: 3267969 - RNA, 19 nt, Artificial Sequence
  Description of Artificial Sequence: Synthetic oligonucleotide
auuuacuucaggugggagu

SEQ ID NO: 3267970 - RNA, 19 nt, Artificial Sequence
  Description of Artificial Sequence: Synthetic oligonucleotide
caaagaugucuucauagac

SEQ ID NO: 3267971 - RNA, 19 nt, Artificial Sequence
  Description of Artificial Sequence: Synthetic oligonucleotide
ucauacauuucuucugcug

SEQ ID NO: 3267972 - RNA, 19 nt, Artificial Sequence
  Description of Artificial Sequence: Synthetic oligonucleotide
uucauagaccacauaggcu

SEQ ID NO: 3267973 - RNA, 19 nt, Artificial Sequence
  Description of Artificial Sequence: Synthetic oligonucleotide
uguuccucuggucucaggu

SEQ ID NO: 3267974 - RNA, 19 nt, Artificial Sequence
  Description of Artificial Sequence: Synthetic oligonucleotide
gaauauucgcccucuuggc

SEQ ID NO: 3267975 - RNA, 19 nt, Artificial Sequence
  Description of Artificial Sequence: Synthetic oligonucleotide
uuuacuucaggugggaguc

SEQ ID NO: 3267976 - RNA, 19 nt, Artificial Sequence
  Description of Artificial Sequence: Synthetic oligonucleotide
agaccacauaggcuguucc

SEQ ID NO: 3267977 - RNA, 19 nt, Artificial Sequence
  Description of Artificial Sequence: Synthetic oligonucleotide
cauauuucccaaauauauc

SEQ ID NO: 3267978 - RNA, 19 nt, Artificial Sequence
  Description of Artificial Sequence: Synthetic oligonucleotide
uaggcuguuccucuggucu

SEQ ID NO: 3267979 - RNA, 19 nt, Artificial Sequence
  Description of Artificial Sequence: Synthetic oligonucleotide
agguguauuuccuacucug

SEQ ID NO: 3267980 - RNA, 19 nt, Artificial Sequence
  Description of Artificial Sequence: Synthetic oligonucleotide
ugugauuuuguauggcaaa

SEQ ID NO: 3267981 - RNA, 19 nt, Artificial Sequence
  Description of Artificial Sequence: Synthetic oligonucleotide
acagaguaucaacagccag

SEQ ID NO: 3267982 - RNA, 19 nt, Artificial Sequence
  Description of Artificial Sequence: Synthetic oligonucleotide
aacagccagguagagccgc

SEQ ID NO: 3267983 - RNA, 19 nt, Artificial Sequence
  Description of Artificial Sequence: Synthetic oligonucleotide
auuucuucugcugugauuu

SEQ ID NO: 3267984 - RNA, 19 nt, Artificial Sequence
  Description of Artificial Sequence: Synthetic oligonucleotide
guuaccgcaggauuccucc

SEQ ID NO: 3267985 - RNA, 19 nt, Artificial Sequence
  Description of Artificial Sequence: Synthetic oligonucleotide
acuaagacguguugacguc

SEQ ID NO: 3267986 - RNA, 19 nt, Artificial Sequence
  Description of Artificial Sequence: Synthetic oligonucleotide
ucgaauauucgcccucuug

SEQ ID NO: 3267987 - RNA, 19 nt, Artificial Sequence
  Description of Artificial Sequence: Synthetic oligonucleotide
gaugucuucauagaccaca

SEQ ID NO: 3267988 - RNA, 19 nt, Artificial Sequence
  Description of Artificial Sequence: Synthetic oligonucleotide
gacacagcgucagauacag

SEQ ID NO: 3267989 - RNA, 19 nt, Artificial Sequence
  Description of Artificial Sequence: Synthetic oligonucleotide
cuccgaguaucucuaaagg

SEQ ID NO: 3267990 - RNA, 19 nt, Artificial Sequence
  Description of Artificial Sequence: Synthetic oligonucleotide
uguauggcaaauuccuuau

SEQ ID NO: 3267991 - RNA, 19 nt, Artificial Sequence
  Description of Artificial Sequence: Synthetic oligonucleotide
gaauagguccauauuuccc

SEQ ID NO: 3267992 - RNA, 19 nt, Artificial Sequence
  Description of Artificial Sequence: Synthetic oligonucleotide
aauuccuuauauacaaaau

SEQ ID NO: 3267993 - RNA, 19 nt, Artificial Sequence
  Description of Artificial Sequence: Synthetic oligonucleotide
uccgaguaucucuaaaggu

SEQ ID NO: 3267994 - RNA, 19 nt, Artificial Sequence
  Description of Artificial Sequence: Synthetic oligonucleotide
uuguauggcaaauuccuua

SEQ ID NO: 3267995 - RNA, 19 nt, Artificial Sequence
  Description of Artificial Sequence: Synthetic oligonucleotide
aaggcagcgucucaaacua

SEQ ID NO: 3267996 - RNA, 19 nt, Artificial Sequence
  Description of Artificial Sequence: Synthetic oligonucleotide
uugacguccucgaaaagau

SEQ ID NO: 3267997 - RNA, 19 nt, Artificial Sequence
  Description of Artificial Sequence: Synthetic oligonucleotide
ucagguguauuuccuacuc

SEQ ID NO: 3267998 - RNA, 19 nt, Artificial Sequence
  Description of Artificial Sequence: Synthetic oligonucleotide
uugacgaauagguccauau

SEQ ID NO: 3267999 - RNA, 19 nt, Artificial Sequence
  Description of Artificial Sequence: Synthetic oligonucleotide
uccauauuucccaaauaua

SEQ ID NO: 3268000 - RNA, 19 nt, Artificial Sequence
  Description of Artificial Sequence: Synthetic oligonucleotide
aauauaucauacauuucuu

SEQ ID NO: 3268001 - RNA, 19 nt, Artificial Sequence
  Description of Artificial Sequence: Synthetic oligonucleotide
cucuuggccgcuugcaucg

SEQ ID NO: 3268002 - RNA, 19 nt, Artificial Sequence
  Description of Artificial Sequence: Synthetic oligonucleotide
uuccuacucugauuugacg

SEQ ID NO: 3268003 - RNA, 19 nt, Artificial Sequence
  Description of Artificial Sequence: Synthetic oligonucleotide
ucuucugcugugauuuugu

SEQ ID NO: 3268004 - RNA, 19 nt, Artificial Sequence
  Description of Artificial Sequence: Synthetic oligonucleotide
uauuucccaaauauaucau

SEQ ID NO: 3268005 - RNA, 19 nt, Artificial Sequence
  Description of Artificial Sequence: Synthetic oligonucleotide
uguuacaucagcuacauag

SEQ ID NO: 3268006 - RNA, 19 nt, Artificial Sequence
  Description of Artificial Sequence: Synthetic oligonucleotide
aaauuauccacuaagguac

SEQ ID NO: 3268007 - RNA, 19 nt, Artificial Sequence
  Description of Artificial Sequence: Synthetic oligonucleotide
cuucacuugaguuaaaucc

SEQ ID NO: 3268008 - RNA, 19 nt, Artificial Sequence
  Description of Artificial Sequence: Synthetic oligonucleotide
aaacacagugccuaugagc

SEQ ID NO: 3268009 - RNA, 19 nt, Artificial Sequence
  Description of Artificial Sequence: Synthetic oligonucleotide
uuuaucugacaaaacaucc

SEQ ID NO: 3268010 - RNA, 19 nt, Artificial Sequence
  Description of Artificial Sequence: Synthetic oligonucleotide
uaguucaauagcuucaugg

SEQ ID NO: 3268011 - RNA, 19 nt, Artificial Sequence
  Description of Artificial Sequence: Synthetic oligonucleotide
uauaugaauguucuuagcu

SEQ ID NO: 3268012 - RNA, 19 nt, Artificial Sequence
  Description of Artificial Sequence: Synthetic oligonucleotide
uacauagacauacuucugg

SEQ ID NO: 3268013 - RNA, 19 nt, Artificial Sequence
  Description of Artificial Sequence: Synthetic oligonucleotide
uaaaucccaauuaucaugc

SEQ ID NO: 3268014 - RNA, 19 nt, Artificial Sequence
  Description of Artificial Sequence: Synthetic oligonucleotide
uugagaaagaccuagaguu

SEQ ID NO: 3268015 - RNA, 19 nt, Artificial Sequence
  Description of Artificial Sequence: Synthetic oligonucleotide
uuaaaucccaauuaucaug

SEQ ID NO: 3268016 - RNA, 19 nt, Artificial Sequence
  Description of Artificial Sequence: Synthetic oligonucleotide
auuauaugaauguucuuag

SEQ ID NO: 3268017 - RNA, 19 nt, Artificial Sequence
  Description of Artificial Sequence: Synthetic oligonucleotide
gacaaaacauccuggaucc

SEQ ID NO: 3268018 - RNA, 19 nt, Artificial Sequence
  Description of Artificial Sequence: Synthetic oligonucleotide
cuuugugaaacacagugcc

SEQ ID NO: 3268019 - RNA, 19 nt, Artificial Sequence
  Description of Artificial Sequence: Synthetic oligonucleotide
uuuugagaaagaccuagag

SEQ ID NO: 3268020 - RNA, 19 nt, Artificial Sequence
  Description of Artificial Sequence: Synthetic oligonucleotide
aguucaauagcuucauggg

SEQ ID NO: 3268021 - RNA, 19 nt, Artificial Sequence
  Description of Artificial Sequence: Synthetic oligonucleotide
uuuuccauuauaugaaugu

SEQ ID NO: 3268022 - RNA, 19 nt, Artificial Sequence
  Description of Artificial Sequence: Synthetic oligonucleotide
uagaguucacaauacagag

SEQ ID NO: 3268023 - RNA, 19 nt, Artificial Sequence
  Description of Artificial Sequence: Synthetic oligonucleotide
uccauuauaugaauguucu

SEQ ID NO: 3268024 - RNA, 19 nt, Artificial Sequence
  Description of Artificial Sequence: Synthetic oligonucleotide
agcuuugugaaacacagug

SEQ ID NO: 3268025 - RNA, 19 nt, Artificial Sequence
  Description of Artificial Sequence: Synthetic oligonucleotide
ucaaauuauccacuaaggu

SEQ ID NO: 3268026 - RNA, 19 nt, Artificial Sequence
  Description of Artificial Sequence: Synthetic oligonucleotide
uucacuugaguuaaauccc

SEQ ID NO: 3268027 - RNA, 19 nt, Artificial Sequence
  Description of Artificial Sequence: Synthetic oligonucleotide
ugacaaaacauccuggauc

SEQ ID NO: 3268028 - RNA, 19 nt, Artificial Sequence
  Description of Artificial Sequence: Synthetic oligonucleotide
aucagcuacauagacauac

SEQ ID NO: 3268029 - RNA, 19 nt, Artificial Sequence
  Description of Artificial Sequence: Synthetic oligonucleotide
uucaauagcuucauggggu

SEQ ID NO: 3268030 - RNA, 19 nt, Artificial Sequence
  Description of Artificial Sequence: Synthetic oligonucleotide
ucaauggucaaauuaucca

SEQ ID NO: 3268031 - RNA, 19 nt, Artificial Sequence
  Description of Artificial Sequence: Synthetic oligonucleotide
uaucugacaaaacauccug

SEQ ID NO: 3268032 - RNA, 19 nt, Artificial Sequence
  Description of Artificial Sequence: Synthetic oligonucleotide
uuugagaaagaccuagagu

SEQ ID NO: 3268033 - RNA, 19 nt, Artificial Sequence
  Description of Artificial Sequence: Synthetic oligonucleotide
uaugaauguucuuagcugu

SEQ ID NO: 3268034 - RNA, 19 nt, Artificial Sequence
  Description of Artificial Sequence: Synthetic oligonucleotide
auaugaauguucuuagcug

SEQ ID NO: 3268035 - RNA, 19 nt, Artificial Sequence
  Description of Artificial Sequence: Synthetic oligonucleotide
ucccaugguacacagaagc

SEQ ID NO: 3268036 - RNA, 19 nt, Artificial Sequence
  Description of Artificial Sequence: Synthetic oligonucleotide
uccguaguacuucugaccc

SEQ ID NO: 3268037 - RNA, 19 nt, Artificial Sequence
  Description of Artificial Sequence: Synthetic oligonucleotide
acaucagcuacauagacau

SEQ ID NO: 3268038 - RNA, 19 nt, Artificial Sequence
  Description of Artificial Sequence: Synthetic oligonucleotide
uaucccaugguacacagaa

SEQ ID NO: 3268039 - RNA, 19 nt, Artificial Sequence
  Description of Artificial Sequence: Synthetic oligonucleotide
aaaauaucucccguggcag

SEQ ID NO: 3268040 - RNA, 19 nt, Artificial Sequence
  Description of Artificial Sequence: Synthetic oligonucleotide
aguuaaaucccaauuauca

SEQ ID NO: 3268041 - RNA, 19 nt, Artificial Sequence
  Description of Artificial Sequence: Synthetic oligonucleotide
aacacagugccuaugagca

SEQ ID NO: 3268042 - RNA, 19 nt, Artificial Sequence
  Description of Artificial Sequence: Synthetic oligonucleotide
augcuuuuccauuauauga

SEQ ID NO: 3268043 - RNA, 19 nt, Artificial Sequence
  Description of Artificial Sequence: Synthetic oligonucleotide
ugaguuaaaucccaauuau

SEQ ID NO: 3268044 - RNA, 19 nt, Artificial Sequence
  Description of Artificial Sequence: Synthetic oligonucleotide
ugaaacacagugccuauga

SEQ ID NO: 3268045 - RNA, 19 nt, Artificial Sequence
  Description of Artificial Sequence: Synthetic oligonucleotide
agcacagaaccauuguugg

SEQ ID NO: 3268046 - RNA, 19 nt, Artificial Sequence
  Description of Artificial Sequence: Synthetic oligonucleotide
uggccugaagcacagaacc

SEQ ID NO: 3268047 - RNA, 19 nt, Artificial Sequence
  Description of Artificial Sequence: Synthetic oligonucleotide
cuucaugggguuaggaugg

SEQ ID NO: 3268048 - RNA, 19 nt, Artificial Sequence
  Description of Artificial Sequence: Synthetic oligonucleotide
uugaguuaaaucccaauua

SEQ ID NO: 3268049 - RNA, 19 nt, Artificial Sequence
  Description of Artificial Sequence: Synthetic oligonucleotide
auccguaguacuucugacc

SEQ ID NO: 3268050 - RNA, 19 nt, Artificial Sequence
  Description of Artificial Sequence: Synthetic oligonucleotide
guacuucugacccuggagg

SEQ ID NO: 3268051 - RNA, 19 nt, Artificial Sequence
  Description of Artificial Sequence: Synthetic oligonucleotide
aauagcuucaugggguuag

SEQ ID NO: 3268052 - RNA, 19 nt, Artificial Sequence
  Description of Artificial Sequence: Synthetic oligonucleotide
guucaauagcuucaugggg

SEQ ID NO: 3268053 - RNA, 19 nt, Artificial Sequence
  Description of Artificial Sequence: Synthetic oligonucleotide
guacacagaagccacagug

SEQ ID NO: 3268054 - RNA, 19 nt, Artificial Sequence
  Description of Artificial Sequence: Synthetic oligonucleotide
aaauaucucccguggcagg

SEQ ID NO: 3268055 - RNA, 19 nt, Artificial Sequence
  Description of Artificial Sequence: Synthetic oligonucleotide
gugccuaugagcauuaucc

SEQ ID NO: 3268056 - RNA, 19 nt, Artificial Sequence
  Description of Artificial Sequence: Synthetic oligonucleotide
guucuuagcuguuacauca

SEQ ID NO: 3268057 - RNA, 19 nt, Artificial Sequence
  Description of Artificial Sequence: Synthetic oligonucleotide
ucugacaaaacauccugga

SEQ ID NO: 3268058 - RNA, 19 nt, Artificial Sequence
  Description of Artificial Sequence: Synthetic oligonucleotide
uuaucugacaaaacauccu

SEQ ID NO: 3268059 - RNA, 19 nt, Artificial Sequence
  Description of Artificial Sequence: Synthetic oligonucleotide
auacagagcuuugugaaac

SEQ ID NO: 3268060 - RNA, 19 nt, Artificial Sequence
  Description of Artificial Sequence: Synthetic oligonucleotide
gucaaauuauccacuaagg

SEQ ID NO: 3268061 - RNA, 19 nt, Artificial Sequence
  Description of Artificial Sequence: Synthetic oligonucleotide
aaccauuguuggcauagag

SEQ ID NO: 3268062 - RNA, 19 nt, Artificial Sequence
  Description of Artificial Sequence: Synthetic oligonucleotide
acagaagccacagugcugg

SEQ ID NO: 3268063 - RNA, 19 nt, Artificial Sequence
  Description of Artificial Sequence: Synthetic oligonucleotide
ugcuuuuccauuauaugaa

SEQ ID NO: 3268064 - RNA, 19 nt, Artificial Sequence
  Description of Artificial Sequence: Synthetic oligonucleotide
gaguucacaauacagagcu

SEQ ID NO: 3268065 - RNA, 19 nt, Artificial Sequence
  Description of Artificial Sequence: Synthetic oligonucleotide
uuguaguucaauagcuuca

SEQ ID NO: 3268066 - RNA, 19 nt, Artificial Sequence
  Description of Artificial Sequence: Synthetic oligonucleotide
caauggucaaauuauccac

SEQ ID NO: 3268067 - RNA, 19 nt, Artificial Sequence
  Description of Artificial Sequence: Synthetic oligonucleotide
aauuaucaugcuuuuccau

SEQ ID NO: 3268068 - RNA, 19 nt, Artificial Sequence
  Description of Artificial Sequence: Synthetic oligonucleotide
uuccauuauaugaauguuc

SEQ ID NO: 3268069 - RNA, 19 nt, Artificial Sequence
  Description of Artificial Sequence: Synthetic oligonucleotide
ggucaaauuauccacuaag

SEQ ID NO: 3268070 - RNA, 19 nt, Artificial Sequence
  Description of Artificial Sequence: Synthetic oligonucleotide
aggugaaugaccuucacuu

SEQ ID NO: 3268071 - RNA, 19 nt, Artificial Sequence
  Description of Artificial Sequence: Synthetic oligonucleotide
aauaucucccguggcaggg

SEQ ID NO: 3268072 - RNA, 19 nt, Artificial Sequence
  Description of Artificial Sequence: Synthetic oligonucleotide
aaugaccuucacuugaguu

SEQ ID NO: 3268073 - RNA, 19 nt, Artificial Sequence
  Description of Artificial Sequence: Synthetic oligonucleotide
agagcuuugugaaacacag

SEQ ID NO: 3268074 - RNA, 19 nt, Artificial Sequence
  Description of Artificial Sequence: Synthetic oligonucleotide
uuauaugaauguucuuagc

SEQ ID NO: 3268075 - RNA, 19 nt, Artificial Sequence
  Description of Artificial Sequence: Synthetic oligonucleotide
ugaaugaccuucacuugag

SEQ ID NO: 3268076 - RNA, 19 nt, Artificial Sequence
  Description of Artificial Sequence: Synthetic oligonucleotide
uccacuaagguacccaggu

SEQ ID NO: 3268077 - RNA, 19 nt, Artificial Sequence
  Description of Artificial Sequence: Synthetic oligonucleotide
acaauacagagcuuuguga

SEQ ID NO: 3268078 - RNA, 19 nt, Artificial Sequence
  Description of Artificial Sequence: Synthetic oligonucleotide
aauuauccacuaagguacc

SEQ ID NO: 3268079 - RNA, 19 nt, Artificial Sequence
  Description of Artificial Sequence: Synthetic oligonucleotide
uaugagcauuaucccaugg

SEQ ID NO: 3268080 - RNA, 19 nt, Artificial Sequence
  Description of Artificial Sequence: Synthetic oligonucleotide
aauguucuuagcuguuaca

SEQ ID NO: 3268081 - RNA, 19 nt, Artificial Sequence
  Description of Artificial Sequence: Synthetic oligonucleotide
aaagaccuagaguucacaa

SEQ ID NO: 3268082 - RNA, 19 nt, Artificial Sequence
  Description of Artificial Sequence: Synthetic oligonucleotide
ucaugcuuuuccauuauau

SEQ ID NO: 3268083 - RNA, 19 nt, Artificial Sequence
  Description of Artificial Sequence: Synthetic oligonucleotide
uacacagaagccacagugc

SEQ ID NO: 3268084 - RNA, 19 nt, Artificial Sequence
  Description of Artificial Sequence: Synthetic oligonucleotide
uacaucagcuacauagaca

SEQ ID NO: 3268085 - RNA, 19 nt, Artificial Sequence
  Description of Artificial Sequence: Synthetic oligonucleotide
uagaguguguucacccugg

SEQ ID NO: 3268086 - RNA, 19 nt, Artificial Sequence
  Description of Artificial Sequence: Synthetic oligonucleotide
auuguuggcauagagugug

SEQ ID NO: 3268087 - RNA, 19 nt, Artificial Sequence
  Description of Artificial Sequence: Synthetic oligonucleotide
ccaauuaucaugcuuuucc

SEQ ID NO: 3268088 - RNA, 19 nt, Artificial Sequence
  Description of Artificial Sequence: Synthetic oligonucleotide
uaagguacccaggugaaug

SEQ ID NO: 3268089 - RNA, 19 nt, Artificial Sequence
  Description of Artificial Sequence: Synthetic oligonucleotide
uuacaucagcuacauagac

SEQ ID NO: 3268090 - RNA, 19 nt, Artificial Sequence
  Description of Artificial Sequence: Synthetic oligonucleotide
aguguguucacccuggguu

SEQ ID NO: 3268091 - RNA, 19 nt, Artificial Sequence
  Description of Artificial Sequence: Synthetic oligonucleotide
ugagcauuaucccauggua

SEQ ID NO: 3268092 - RNA, 19 nt, Artificial Sequence
  Description of Artificial Sequence: Synthetic oligonucleotide
auuaucccaugguacacag

SEQ ID NO: 3268093 - RNA, 19 nt, Artificial Sequence
  Description of Artificial Sequence: Synthetic oligonucleotide
aguacuucugacccuggag

SEQ ID NO: 3268094 - RNA, 19 nt, Artificial Sequence
  Description of Artificial Sequence: Synthetic oligonucleotide
caaauuauccacuaaggua

SEQ ID NO: 3268095 - RNA, 19 nt, Artificial Sequence
  Description of Artificial Sequence: Synthetic oligonucleotide
uauccacuaagguacccag

SEQ ID NO: 3268096 - RNA, 19 nt, Artificial Sequence
  Description of Artificial Sequence: Synthetic oligonucleotide
auuaucaugcuuuuccauu

SEQ ID NO: 3268097 - RNA, 19 nt, Artificial Sequence
  Description of Artificial Sequence: Synthetic oligonucleotide
guuguaguucaauagcuuc

SEQ ID NO: 3268098 - RNA, 19 nt, Artificial Sequence
  Description of Artificial Sequence: Synthetic oligonucleotide
aauacagagcuuugugaaa

SEQ ID NO: 3268099 - RNA, 19 nt, Artificial Sequence
  Description of Artificial Sequence: Synthetic oligonucleotide
aagcacagaaccauuguug

SEQ ID NO: 3268100 - RNA, 19 nt, Artificial Sequence
  Description of Artificial Sequence: Synthetic oligonucleotide
uuggcauagaguguguuca

SEQ ID NO: 3268101 - RNA, 19 nt, Artificial Sequence
  Description of Artificial Sequence: Synthetic oligonucleotide
cuagaguucacaauacaga

SEQ ID NO: 3268102 - RNA, 19 nt, Artificial Sequence
  Description of Artificial Sequence: Synthetic oligonucleotide
caugcuuuuccauuauaug

SEQ ID NO: 3268103 - RNA, 19 nt, Artificial Sequence
  Description of Artificial Sequence: Synthetic oligonucleotide
agaaccauuguuggcauag

SEQ ID NO: 3268104 - RNA, 19 nt, Artificial Sequence
  Description of Artificial Sequence: Synthetic oligonucleotide
agcauuaucccaugguaca

SEQ ID NO: 3268105 - RNA, 19 nt, Artificial Sequence
  Description of Artificial Sequence: Synthetic oligonucleotide
aagcaaucaucagugagcc

SEQ ID NO: 3268106 - RNA, 19 nt, Artificial Sequence
  Description of Artificial Sequence: Synthetic oligonucleotide
uguggugguaucauaaacc

SEQ ID NO: 3268107 - RNA, 19 nt, Artificial Sequence
  Description of Artificial Sequence: Synthetic oligonucleotide
ucaucagugagcccaaaag

SEQ ID NO: 3268108 - RNA, 19 nt, Artificial Sequence
  Description of Artificial Sequence: Synthetic oligonucleotide
aagcacacuuuccuggggc

SEQ ID NO: 3268109 - RNA, 19 nt, Artificial Sequence
  Description of Artificial Sequence: Synthetic oligonucleotide
cuaagaagguccacgaugc

SEQ ID NO: 3268110 - RNA, 19 nt, Artificial Sequence
  Description of Artificial Sequence: Synthetic oligonucleotide
ucgcucucggcuaagaagg

SEQ ID NO: 3268111 - RNA, 19 nt, Artificial Sequence
  Description of Artificial Sequence: Synthetic oligonucleotide
aagaagguccacgaugccc

SEQ ID NO: 3268112 - RNA, 19 nt, Artificial Sequence
  Description of Artificial Sequence: Synthetic oligonucleotide
cuuggggucaaugagaccc

SEQ ID NO: 3268113 - RNA, 19 nt, Artificial Sequence
  Description of Artificial Sequence: Synthetic oligonucleotide
uaucauaaaccccagcaau

SEQ ID NO: 3268114 - RNA, 19 nt, Artificial Sequence
  Description of Artificial Sequence: Synthetic oligonucleotide
ucauaaaccccagcaaugg

SEQ ID NO: 3268115 - RNA, 19 nt, Artificial Sequence
  Description of Artificial Sequence: Synthetic oligonucleotide
  modified_base (16)..(16): a, c, u, g, unknown or other
cucaaugaguccccgnucc

SEQ ID NO: 3268116 - RNA, 19 nt, Artificial Sequence
  Description of Artificial Sequence: Synthetic oligonucleotide
gaagcaaucaucagugagc

SEQ ID NO: 3268117 - RNA, 19 nt, Artificial Sequence
  Description of Artificial Sequence: Synthetic oligonucleotide
  modified_base (13)..(13): a, c, u, g, unknown or other
aaugaguccccgnuccacc

SEQ ID NO: 3268118 - RNA, 19 nt, Artificial Sequence
  Description of Artificial Sequence: Synthetic oligonucleotide
uguucuuggccacagccgc

SEQ ID NO: 3268119 - RNA, 19 nt, Artificial Sequence
  Description of Artificial Sequence: Synthetic oligonucleotide
acugacagccucuucuugg

SEQ ID NO: 3268120 - RNA, 19 nt, Artificial Sequence
  Description of Artificial Sequence: Synthetic oligonucleotide
agaagguccacgaugcccc

SEQ ID NO: 3268121 - RNA, 19 nt, Artificial Sequence
  Description of Artificial Sequence: Synthetic oligonucleotide
aauggggaagcaaucauca

SEQ ID NO: 3268122 - RNA, 19 nt, Artificial Sequence
  Description of Artificial Sequence: Synthetic oligonucleotide
cauguucuuggccacagcc

SEQ ID NO: 3268123 - RNA, 19 nt, Artificial Sequence
  Description of Artificial Sequence: Synthetic oligonucleotide
uccagcauguucuuggcca

SEQ ID NO: 3268124 - RNA, 19 nt, Artificial Sequence
  Description of Artificial Sequence: Synthetic oligonucleotide
agugaugggguccagcaug

SEQ ID NO: 3268125 - RNA, 19 nt, Artificial Sequence
  Description of Artificial Sequence: Synthetic oligonucleotide
uacacuugcuuucuguggu

SEQ ID NO: 3268126 - RNA, 19 nt, Artificial Sequence
  Description of Artificial Sequence: Synthetic oligonucleotide
auaaaccccagcaaugggg

SEQ ID NO: 3268127 - RNA, 19 nt, Artificial Sequence
  Description of Artificial Sequence: Synthetic oligonucleotide
uaaaccccagcaaugggga

SEQ ID NO: 3268128 - RNA, 19 nt, Artificial Sequence
  Description of Artificial Sequence: Synthetic oligonucleotide
guggugguaucauaaaccc

SEQ ID NO: 3268129 - RNA, 19 nt, Artificial Sequence
  Description of Artificial Sequence: Synthetic oligonucleotide
ucagugagcccaaaagaga

SEQ ID NO: 3268130 - RNA, 19 nt, Artificial Sequence
  Description of Artificial Sequence: Synthetic oligonucleotide
uggggaagcaaucaucagu

SEQ ID NO: 3268131 - RNA, 19 nt, Artificial Sequence
  Description of Artificial Sequence: Synthetic oligonucleotide
uccucuuggggucaaugag

SEQ ID NO: 3268132 - RNA, 19 nt, Artificial Sequence
  Description of Artificial Sequence: Synthetic oligonucleotide
aagagaccgccacucgugg

SEQ ID NO: 3268133 - RNA, 19 nt, Artificial Sequence
  Description of Artificial Sequence: Synthetic oligonucleotide
cagugagcccaaaagagag

SEQ ID NO: 3268134 - RNA, 19 nt, Artificial Sequence
  Description of Artificial Sequence: Synthetic oligonucleotide
cucucggcuaagaaggucc

SEQ ID NO: 3268135 - RNA, 19 nt, Artificial Sequence
  Description of Artificial Sequence: Synthetic oligonucleotide
gauggccucaccuacugac

SEQ ID NO: 3268136 - RNA, 19 nt, Artificial Sequence
  Description of Artificial Sequence: Synthetic oligonucleotide
gguaucauaaaccccagca

SEQ ID NO: 3268137 - RNA, 19 nt, Artificial Sequence
  Description of Artificial Sequence: Synthetic oligonucleotide
uuuccuggggcauccagcc

SEQ ID NO: 3268138 - RNA, 19 nt, Artificial Sequence
  Description of Artificial Sequence: Synthetic oligonucleotide
aucagugagcccaaaagag

SEQ ID NO: 3268139 - RNA, 19 nt, Artificial Sequence
  Description of Artificial Sequence: Synthetic oligonucleotide
ugcugugccagcagguggg

SEQ ID NO: 3268140 - RNA, 19 nt, Artificial Sequence
  Description of Artificial Sequence: Synthetic oligonucleotide
cuacacuugcuuucugugg

SEQ ID NO: 3268141 - RNA, 19 nt, Artificial Sequence
  Description of Artificial Sequence: Synthetic oligonucleotide
aacaggagaggggacuugg

SEQ ID NO: 3268142 - RNA, 19 nt, Artificial Sequence
  Description of Artificial Sequence: Synthetic oligonucleotide
aucgcucucggcuaagaag

SEQ ID NO: 3268143 - RNA, 19 nt, Artificial Sequence
  Description of Artificial Sequence: Synthetic oligonucleotide
  modified_base (18)..(18): a, c, u, g, unknown or other
uucucaaugaguccccgnu

SEQ ID NO: 3268144 - RNA, 19 nt, Artificial Sequence
  Description of Artificial Sequence: Synthetic oligonucleotide
uucuguggugguaucauaa

SEQ ID NO: 3268145 - RNA, 19 nt, Artificial Sequence
  Description of Artificial Sequence: Synthetic oligonucleotide
ucggcuaagaagguccacg

SEQ ID NO: 3268146 - RNA, 19 nt, Artificial Sequence
  Description of Artificial Sequence: Synthetic oligonucleotide
uggggaagcacacuuuccu

SEQ ID NO: 3268147 - RNA, 19 nt, Artificial Sequence
  Description of Artificial Sequence: Synthetic oligonucleotide
ucuggauggccucaccuac

SEQ ID NO: 3268148 - RNA, 19 nt, Artificial Sequence
  Description of Artificial Sequence: Synthetic oligonucleotide
agguguucucaaugagucc

SEQ ID NO: 3268149 - RNA, 19 nt, Artificial Sequence
  Description of Artificial Sequence: Synthetic oligonucleotide
gagaccgccacucgugggg

SEQ ID NO: 3268150 - RNA, 19 nt, Artificial Sequence
  Description of Artificial Sequence: Synthetic oligonucleotide
ggaagcaaucaucagugag

SEQ ID NO: 3268151 - RNA, 19 nt, Artificial Sequence
  Description of Artificial Sequence: Synthetic oligonucleotide
acagcuucugcccagugau

SEQ ID NO: 3268152 - RNA, 19 nt, Artificial Sequence
  Description of Artificial Sequence: Synthetic oligonucleotide
aacagcuucugcccaguga

SEQ ID NO: 3268153 - RNA, 19 nt, Artificial Sequence
  Description of Artificial Sequence: Synthetic oligonucleotide
ugugcacagaguaucgcuc

SEQ ID NO: 3268154 - RNA, 19 nt, Artificial Sequence
  Description of Artificial Sequence: Synthetic oligonucleotide
gagguguucucaaugaguc

SEQ ID NO: 3268155 - RNA, 19 nt, Artificial Sequence
  Description of Artificial Sequence: Synthetic oligonucleotide
gcuaagaagguccacgaug

SEQ ID NO: 3268156 - RNA, 19 nt, Artificial Sequence
  Description of Artificial Sequence: Synthetic oligonucleotide
acagaguaucgcucucggc

SEQ ID NO: 3268157 - RNA, 19 nt, Artificial Sequence
  Description of Artificial Sequence: Synthetic oligonucleotide
gccacagccgccuugaugc

SEQ ID NO: 3268158 - RNA, 19 nt, Artificial Sequence
  Description of Artificial Sequence: Synthetic oligonucleotide
uggagguguucucaaugag

SEQ ID NO: 3268159 - RNA, 19 nt, Artificial Sequence
  Description of Artificial Sequence: Synthetic oligonucleotide
ugaugcuacacuugcuuuc

SEQ ID NO: 3268160 - RNA, 19 nt, Artificial Sequence
  Description of Artificial Sequence: Synthetic oligonucleotide
cauaaaccccagcaauggg

SEQ ID NO: 3268161 - RNA, 19 nt, Artificial Sequence
  Description of Artificial Sequence: Synthetic oligonucleotide
agcuucugcccagugaugg

SEQ ID NO: 3268162 - RNA, 19 nt, Artificial Sequence
  Description of Artificial Sequence: Synthetic oligonucleotide
uugugcacagaguaucgcu

SEQ ID NO: 3268163 - RNA, 19 nt, Artificial Sequence
  Description of Artificial Sequence: Synthetic oligonucleotide
acagccucuucuuggugac

SEQ ID NO: 3268164 - RNA, 19 nt, Artificial Sequence
  Description of Artificial Sequence: Synthetic oligonucleotide
cucuuggggucaaugagac

SEQ ID NO: 3268165 - RNA, 19 nt, Artificial Sequence
  Description of Artificial Sequence: Synthetic oligonucleotide
cuuuccuggggcauccagc

SEQ ID NO: 3268166 - RNA, 19 nt, Artificial Sequence
  Description of Artificial Sequence: Synthetic oligonucleotide
gaagcacacuuuccugggg

SEQ ID NO: 3268167 - RNA, 19 nt, Artificial Sequence
  Description of Artificial Sequence: Synthetic oligonucleotide
uggugguaucauaaacccc

SEQ ID NO: 3268168 - RNA, 19 nt, Artificial Sequence
  Description of Artificial Sequence: Synthetic oligonucleotide
gagaagagaccgccacucg

SEQ ID NO: 3268169 - RNA, 19 nt, Artificial Sequence
  Description of Artificial Sequence: Synthetic oligonucleotide
  modified_base (12)..(12): a, c, u, g, unknown or other
augaguccccgnuccaccg

SEQ ID NO: 3268170 - RNA, 19 nt, Artificial Sequence
  Description of Artificial Sequence: Synthetic oligonucleotide
uggccucaccuacugacag

SEQ ID NO: 3268171 - RNA, 19 nt, Artificial Sequence
  Description of Artificial Sequence: Synthetic oligonucleotide
aggagaggggacuuggaga

SEQ ID NO: 3268172 - RNA, 19 nt, Artificial Sequence
  Description of Artificial Sequence: Synthetic oligonucleotide
gguguucucaaugaguccc

SEQ ID NO: 3268173 - RNA, 19 nt, Artificial Sequence
  Description of Artificial Sequence: Synthetic oligonucleotide
ggugguaucauaaacccca

SEQ ID NO: 3268174 - RNA, 19 nt, Artificial Sequence
  Description of Artificial Sequence: Synthetic oligonucleotide
aucauaaaccccagcaaug

SEQ ID NO: 3268175 - RNA, 19 nt, Artificial Sequence
  Description of Artificial Sequence: Synthetic oligonucleotide
uugagcagccgcugcgugg

SEQ ID NO: 3268176 - RNA, 19 nt, Artificial Sequence
  Description of Artificial Sequence: Synthetic oligonucleotide
gggaagcacacuuuccugg

SEQ ID NO: 3268177 - RNA, 19 nt, Artificial Sequence
  Description of Artificial Sequence: Synthetic oligonucleotide
cuucugggcauugagcagc

SEQ ID NO: 3268178 - RNA, 19 nt, Artificial Sequence
  Description of Artificial Sequence: Synthetic oligonucleotide
agaagagaccgccacucgu

SEQ ID NO: 3268179 - RNA, 19 nt, Artificial Sequence
  Description of Artificial Sequence: Synthetic oligonucleotide
gugagcccaaaagagaggc

SEQ ID NO: 3268180 - RNA, 19 nt, Artificial Sequence
  Description of Artificial Sequence: Synthetic oligonucleotide
aaccccagcaauggggaag

SEQ ID NO: 3268181 - RNA, 19 nt, Artificial Sequence
  Description of Artificial Sequence: Synthetic oligonucleotide
uccuggggcauccagcccu

SEQ ID NO: 3268182 - RNA, 19 nt, Artificial Sequence
  Description of Artificial Sequence: Synthetic oligonucleotide
ugcuacacuugcuuucugu

SEQ ID NO: 3268183 - RNA, 19 nt, Artificial Sequence
  Description of Artificial Sequence: Synthetic oligonucleotide
caauggggaagcaaucauc

SEQ ID NO: 3268184 - RNA, 19 nt, Artificial Sequence
  Description of Artificial Sequence: Synthetic oligonucleotide
ucaccuacugacagccucu

SEQ ID NO: 3268185 - RNA, 19 nt, Artificial Sequence
  Description of Artificial Sequence: Synthetic oligonucleotide
cucaaugcccggugaaggc

SEQ ID NO: 3268186 - RNA, 19 nt, Artificial Sequence
  Description of Artificial Sequence: Synthetic oligonucleotide
uggauggccucaccuacug

SEQ ID NO: 3268187 - RNA, 19 nt, Artificial Sequence
  Description of Artificial Sequence: Synthetic oligonucleotide
caucagugagcccaaaaga

SEQ ID NO: 3268188 - RNA, 19 nt, Artificial Sequence
  Description of Artificial Sequence: Synthetic oligonucleotide
cugggcauugagcagccgc

SEQ ID NO: 3268189 - RNA, 19 nt, Artificial Sequence
  Description of Artificial Sequence: Synthetic oligonucleotide
gaagagaccgccacucgug

SEQ ID NO: 3268190 - RNA, 19 nt, Artificial Sequence
  Description of Artificial Sequence: Synthetic oligonucleotide
cuguggugguaucauaaac

SEQ ID NO: 3268191 - RNA, 19 nt, Artificial Sequence
  Description of Artificial Sequence: Synthetic oligonucleotide
gacagccucuucuugguga

SEQ ID NO: 3268192 - RNA, 19 nt, Artificial Sequence
  Description of Artificial Sequence: Synthetic oligonucleotide
cacagaguaucgcucucgg

SEQ ID NO: 3268193 - RNA, 19 nt, Artificial Sequence
  Description of Artificial Sequence: Synthetic oligonucleotide
gaugggguccagcauguuc

SEQ ID NO: 3268194 - RNA, 19 nt, Artificial Sequence
  Description of Artificial Sequence: Synthetic oligonucleotide
guaucauaaaccccagcaa

SEQ ID NO: 3268195 - RNA, 19 nt, Artificial Sequence
  Description of Artificial Sequence: Synthetic oligonucleotide
ucuucuuggugaccggguc

SEQ ID NO: 3268196 - RNA, 19 nt, Artificial Sequence
  Description of Artificial Sequence: Synthetic oligonucleotide
ugggcauugagcagccgcu

SEQ ID NO: 3268197 - RNA, 19 nt, Artificial Sequence
  Description of Artificial Sequence: Synthetic oligonucleotide
uguucucaaugaguccccg

SEQ ID NO: 3268198 - RNA, 19 nt, Artificial Sequence
  Description of Artificial Sequence: Synthetic oligonucleotide
  modified_base (15)..(15): a, c, u, g, unknown or other
ucaaugaguccccgnucca

SEQ ID NO: 3268199 - RNA, 19 nt, Artificial Sequence
  Description of Artificial Sequence: Synthetic oligonucleotide
ucaaugcccggugaaggcc

SEQ ID NO: 3268200 - RNA, 19 nt, Artificial Sequence
  Description of Artificial Sequence: Synthetic oligonucleotide
agcaaucaucagugagccc

SEQ ID NO: 3268201 - RNA, 19 nt, Artificial Sequence
  Description of Artificial Sequence: Synthetic oligonucleotide
agccucuucuuggugaccg

SEQ ID NO: 3268202 - RNA, 19 nt, Artificial Sequence
  Description of Artificial Sequence: Synthetic oligonucleotide
cuucuuggugaccgggucc

SEQ ID NO: 3268203 - RNA, 19 nt, Artificial Sequence
  Description of Artificial Sequence: Synthetic oligonucleotide
gcaaucaucagugagccca

SEQ ID NO: 3268204 - RNA, 19 nt, Artificial Sequence
  Description of Artificial Sequence: Synthetic oligonucleotide
uaagaagguccacgaugcc

SEQ ID NO: 3268205 - RNA, 19 nt, Artificial Sequence
  Description of Artificial Sequence: Synthetic oligonucleotide
aauaacuaaaauucuaugg

SEQ ID NO: 3268206 - RNA, 19 nt, Artificial Sequence
  Description of Artificial Sequence: Synthetic oligonucleotide
uuuaguaucaagcaagagg

SEQ ID NO: 3268207 - RNA, 19 nt, Artificial Sequence
  Description of Artificial Sequence: Synthetic oligonucleotide
aaaccuucaaaguaaaagg

SEQ ID NO: 3268208 - RNA, 19 nt, Artificial Sequence
  Description of Artificial Sequence: Synthetic oligonucleotide
aacucuguucaucauaugc

SEQ ID NO: 3268209 - RNA, 19 nt, Artificial Sequence
  Description of Artificial Sequence: Synthetic oligonucleotide
cuaguuuucauauacagac

SEQ ID NO: 3268210 - RNA, 19 nt, Artificial Sequence
  Description of Artificial Sequence: Synthetic oligonucleotide
aauauguuaauuccuggag

SEQ ID NO: 3268211 - RNA, 19 nt, Artificial Sequence
  Description of Artificial Sequence: Synthetic oligonucleotide
aaaagaauggauuaacuau

SEQ ID NO: 3268212 - RNA, 19 nt, Artificial Sequence
  Description of Artificial Sequence: Synthetic oligonucleotide
acuaaaauucuauggaaac

SEQ ID NO: 3268213 - RNA, 19 nt, Artificial Sequence
  Description of Artificial Sequence: Synthetic oligonucleotide
aauuggcuaccuuuuacgc

SEQ ID NO: 3268214 - RNA, 19 nt, Artificial Sequence
  Description of Artificial Sequence: Synthetic oligonucleotide
aguacaaucaguaucugcc

SEQ ID NO: 3268215 - RNA, 19 nt, Artificial Sequence
  Description of Artificial Sequence: Synthetic oligonucleotide
aauaccacauuguuugcac

SEQ ID NO: 3268216 - RNA, 19 nt, Artificial Sequence
  Description of Artificial Sequence: Synthetic oligonucleotide
auaguaaucagcuuuguca

SEQ ID NO: 3268217 - RNA, 19 nt, Artificial Sequence
  Description of Artificial Sequence: Synthetic oligonucleotide
auauguuaauuccuggagc

SEQ ID NO: 3268218 - RNA, 19 nt, Artificial Sequence
  Description of Artificial Sequence: Synthetic oligonucleotide
uuucuaacaguuuauuuag

SEQ ID NO: 3268219 - RNA, 19 nt, Artificial Sequence
  Description of Artificial Sequence: Synthetic oligonucleotide
guucuuauuaaucaccacg

SEQ ID NO: 3268220 - RNA, 19 nt, Artificial Sequence
  Description of Artificial Sequence: Synthetic oligonucleotide
aaauaacuaaaauucuaug

SEQ ID NO: 3268221 - RNA, 19 nt, Artificial Sequence
  Description of Artificial Sequence: Synthetic oligonucleotide
uaugucuugaguuagucca

SEQ ID NO: 3268222 - RNA, 19 nt, Artificial Sequence
  Description of Artificial Sequence: Synthetic oligonucleotide
aacacuacagaacauuuca

SEQ ID NO: 3268223 - RNA, 19 nt, Artificial Sequence
  Description of Artificial Sequence: Synthetic oligonucleotide
aaaauuuuacauguccuuc

SEQ ID NO: 3268224 - RNA, 19 nt, Artificial Sequence
  Description of Artificial Sequence: Synthetic oligonucleotide
ugaaccuccauucaaauau

SEQ ID NO: 3268225 - RNA, 19 nt, Artificial Sequence
  Description of Artificial Sequence: Synthetic oligonucleotide
uaaaaggugaggcuuaugu

SEQ ID NO: 3268226 - RNA, 19 nt, Artificial Sequence
  Description of Artificial Sequence: Synthetic oligonucleotide
aaaacuaagcauauggcug

SEQ ID NO: 3268227 - RNA, 19 nt, Artificial Sequence
  Description of Artificial Sequence: Synthetic oligonucleotide
aaauauguuaauuccugga

SEQ ID NO: 3268228 - RNA, 19 nt, Artificial Sequence
  Description of Artificial Sequence: Synthetic oligonucleotide
uuauuaaucaccacgucaa

SEQ ID NO: 3268229 - RNA, 19 nt, Artificial Sequence
  Description of Artificial Sequence: Synthetic oligonucleotide
uuauguuuaacacuaguua

SEQ ID NO: 3268230 - RNA, 19 nt, Artificial Sequence
  Description of Artificial Sequence: Synthetic oligonucleotide
uaccuuuuacgcaaguugg

SEQ ID NO: 3268231 - RNA, 19 nt, Artificial Sequence
  Description of Artificial Sequence: Synthetic oligonucleotide
cucccugccaaauagaugc

SEQ ID NO: 3268232 - RNA, 19 nt, Artificial Sequence
  Description of Artificial Sequence: Synthetic oligonucleotide
uaauuggcuaccuuuuacg

SEQ ID NO: 3268233 - RNA, 19 nt, Artificial Sequence
  Description of Artificial Sequence: Synthetic oligonucleotide
uguuucacaggaaucaaca

SEQ ID NO: 3268234 - RNA, 19 nt, Artificial Sequence
  Description of Artificial Sequence: Synthetic oligonucleotide
uauguuuaacacuaguuaa

SEQ ID NO: 3268235 - RNA, 19 nt, Artificial Sequence
  Description of Artificial Sequence: Synthetic oligonucleotide
ucagagaauugccacgugg

SEQ ID NO: 3268236 - RNA, 19 nt, Artificial Sequence
  Description of Artificial Sequence: Synthetic oligonucleotide
uucuuauuaaucaccacgu

SEQ ID NO: 3268237 - RNA, 19 nt, Artificial Sequence
  Description of Artificial Sequence: Synthetic oligonucleotide
uaacaguuuauuuaguauc

SEQ ID NO: 3268238 - RNA, 19 nt, Artificial Sequence
  Description of Artificial Sequence: Synthetic oligonucleotide
uuuaguaaaccuaucuuua

SEQ ID NO: 3268239 - RNA, 19 nt, Artificial Sequence
  Description of Artificial Sequence: Synthetic oligonucleotide
uuuauguuuaacacuaguu

SEQ ID NO: 3268240 - RNA, 19 nt, Artificial Sequence
  Description of Artificial Sequence: Synthetic oligonucleotide
uuaaucaccacgucaauau

SEQ ID NO: 3268241 - RNA, 19 nt, Artificial Sequence
  Description of Artificial Sequence: Synthetic oligonucleotide
uaacacuaguuaaucaaag

SEQ ID NO: 3268242 - RNA, 19 nt, Artificial Sequence
  Description of Artificial Sequence: Synthetic oligonucleotide
aaaggugaggcuuauguua

SEQ ID NO: 3268243 - RNA, 19 nt, Artificial Sequence
  Description of Artificial Sequence: Synthetic oligonucleotide
agaugcuucaacaaagugg

SEQ ID NO: 3268244 - RNA, 19 nt, Artificial Sequence
  Description of Artificial Sequence: Synthetic oligonucleotide
uugggaaacuguuucacag

SEQ ID NO: 3268245 - RNA, 19 nt, Artificial Sequence
  Description of Artificial Sequence: Synthetic oligonucleotide
uaaaagaauggauuaacua

SEQ ID NO: 3268246 - RNA, 19 nt, Artificial Sequence
  Description of Artificial Sequence: Synthetic oligonucleotide
ugaggcuuauguuaaaaga

SEQ ID NO: 3268247 - RNA, 19 nt, Artificial Sequence
  Description of Artificial Sequence: Synthetic oligonucleotide
cuaagcauauggcugaaag

SEQ ID NO: 3268248 - RNA, 19 nt, Artificial Sequence
  Description of Artificial Sequence: Synthetic oligonucleotide
guuacaaaagaauaccaca

SEQ ID NO: 3268249 - RNA, 19 nt, Artificial Sequence
  Description of Artificial Sequence: Synthetic oligonucleotide
guuuauuuaguaucaagca

SEQ ID NO: 3268250 - RNA, 19 nt, Artificial Sequence
  Description of Artificial Sequence: Synthetic oligonucleotide
auuucaagacucgaguuac

SEQ ID NO: 3268251 - RNA, 19 nt, Artificial Sequence
  Description of Artificial Sequence: Synthetic oligonucleotide
auuuaguaaaccuaucuuu

SEQ ID NO: 3268252 - RNA, 19 nt, Artificial Sequence
  Description of Artificial Sequence: Synthetic oligonucleotide
uccacuuuuccucagcucu

SEQ ID NO: 3268253 - RNA, 19 nt, Artificial Sequence
  Description of Artificial Sequence: Synthetic oligonucleotide
gaaucaacacuuucugucc

SEQ ID NO: 3268254 - RNA, 19 nt, Artificial Sequence
  Description of Artificial Sequence: Synthetic oligonucleotide
uauacagacugcaaauaac

SEQ ID NO: 3268255 - RNA, 19 nt, Artificial Sequence
  Description of Artificial Sequence: Synthetic oligonucleotide
uacauaguaaucagcuuug

SEQ ID NO: 3268256 - RNA, 19 nt, Artificial Sequence
  Description of Artificial Sequence: Synthetic oligonucleotide
guaucugccauauggcugg

SEQ ID NO: 3268257 - RNA, 19 nt, Artificial Sequence
  Description of Artificial Sequence: Synthetic oligonucleotide
agugagaaguccucuuccc

SEQ ID NO: 3268258 - RNA, 19 nt, Artificial Sequence
  Description of Artificial Sequence: Synthetic oligonucleotide
aagcauauggcugaaagau

SEQ ID NO: 3268259 - RNA, 19 nt, Artificial Sequence
  Description of Artificial Sequence: Synthetic oligonucleotide
uaucuuuauguuuaacacu

SEQ ID NO: 3268260 - RNA, 19 nt, Artificial Sequence
  Description of Artificial Sequence: Synthetic oligonucleotide
aauggauuaacuauauuua

SEQ ID NO: 3268261 - RNA, 19 nt, Artificial Sequence
  Description of Artificial Sequence: Synthetic oligonucleotide
ugucauaggagucguaacu

SEQ ID NO: 3268262 - RNA, 19 nt, Artificial Sequence
  Description of Artificial Sequence: Synthetic oligonucleotide
aauuuuacauguccuucgu

SEQ ID NO: 3268263 - RNA, 19 nt, Artificial Sequence
  Description of Artificial Sequence: Synthetic oligonucleotide
uggauuaacuauauuuagu

SEQ ID NO: 3268264 - RNA, 19 nt, Artificial Sequence
  Description of Artificial Sequence: Synthetic oligonucleotide
uuguaagcgcuucagagaa

SEQ ID NO: 3268265 - RNA, 19 nt, Artificial Sequence
  Description of Artificial Sequence: Synthetic oligonucleotide
aaaguaaaaggugaggcuu

SEQ ID NO: 3268266 - RNA, 19 nt, Artificial Sequence
  Description of Artificial Sequence: Synthetic oligonucleotide
ucuugaguuaguccauucc

SEQ ID NO: 3268267 - RNA, 19 nt, Artificial Sequence
  Description of Artificial Sequence: Synthetic oligonucleotide
aaauuuuacuuugaacagu

SEQ ID NO: 3268268 - RNA, 19 nt, Artificial Sequence
  Description of Artificial Sequence: Synthetic oligonucleotide
uaguuaaucaaaguuauuu

SEQ ID NO: 3268269 - RNA, 19 nt, Artificial Sequence
  Description of Artificial Sequence: Synthetic oligonucleotide
uggcugaaagauaaaauaa

SEQ ID NO: 3268270 - RNA, 19 nt, Artificial Sequence
  Description of Artificial Sequence: Synthetic oligonucleotide
agucauacucuccauaggu

SEQ ID NO: 3268271 - RNA, 19 nt, Artificial Sequence
  Description of Artificial Sequence: Synthetic oligonucleotide
uggcuauuucacaacauca

SEQ ID NO: 3268272 - RNA, 19 nt, Artificial Sequence
  Description of Artificial Sequence: Synthetic oligonucleotide
augacccguaaauacauag

SEQ ID NO: 3268273 - RNA, 19 nt, Artificial Sequence
  Description of Artificial Sequence: Synthetic oligonucleotide
ucauaugcaguaccguacc

SEQ ID NO: 3268274 - RNA, 19 nt, Artificial Sequence
  Description of Artificial Sequence: Synthetic oligonucleotide
aggauacuuugcuuaacac

SEQ ID NO: 3268275 - RNA, 19 nt, Artificial Sequence
  Description of Artificial Sequence: Synthetic oligonucleotide
aacaguuuauuuaguauca

SEQ ID NO: 3268276 - RNA, 19 nt, Artificial Sequence
  Description of Artificial Sequence: Synthetic oligonucleotide
uaagcauuuugauuuauuu

SEQ ID NO: 3268277 - RNA, 19 nt, Artificial Sequence
  Description of Artificial Sequence: Synthetic oligonucleotide
cuuauuaaucaccacguca

SEQ ID NO: 3268278 - RNA, 19 nt, Artificial Sequence
  Description of Artificial Sequence: Synthetic oligonucleotide
cuaccuuuuacgcaaguug

SEQ ID NO: 3268279 - RNA, 19 nt, Artificial Sequence
  Description of Artificial Sequence: Synthetic oligonucleotide
auaggaaucguaagccucc

SEQ ID NO: 3268280 - RNA, 19 nt, Artificial Sequence
  Description of Artificial Sequence: Synthetic oligonucleotide
gaguuggugucccacgugg

SEQ ID NO: 3268281 - RNA, 19 nt, Artificial Sequence
  Description of Artificial Sequence: Synthetic oligonucleotide
caacguuucuucuuguaag

SEQ ID NO: 3268282 - RNA, 19 nt, Artificial Sequence
  Description of Artificial Sequence: Synthetic oligonucleotide
cagauuuuaagcauuuuga

SEQ ID NO: 3268283 - RNA, 19 nt, Artificial Sequence
  Description of Artificial Sequence: Synthetic oligonucleotide
aagcauuuugauuuauuua

SEQ ID NO: 3268284 - RNA, 19 nt, Artificial Sequence
  Description of Artificial Sequence: Synthetic oligonucleotide
uacaggacgguggagauug

SEQ ID NO: 3268285 - RNA, 19 nt, Artificial Sequence
  Description of Artificial Sequence: Synthetic oligonucleotide
aauuuuacuuugaacagua

SEQ ID NO: 3268286 - RNA, 19 nt, Artificial Sequence
  Description of Artificial Sequence: Synthetic oligonucleotide
uuucuuuucaugaccuagu

SEQ ID NO: 3268287 - RNA, 19 nt, Artificial Sequence
  Description of Artificial Sequence: Synthetic oligonucleotide
agagaauugccacguggac

SEQ ID NO: 3268288 - RNA, 19 nt, Artificial Sequence
  Description of Artificial Sequence: Synthetic oligonucleotide
agaauaccacauuguuugc

SEQ ID NO: 3268289 - RNA, 19 nt, Artificial Sequence
  Description of Artificial Sequence: Synthetic oligonucleotide
aguuaaucaaaguuauuuu

SEQ ID NO: 3268290 - RNA, 19 nt, Artificial Sequence
  Description of Artificial Sequence: Synthetic oligonucleotide
aaaccuaucuuuauguuua

SEQ ID NO: 3268291 - RNA, 19 nt, Artificial Sequence
  Description of Artificial Sequence: Synthetic oligonucleotide
uaguaaucagcuuugucau

SEQ ID NO: 3268292 - RNA, 19 nt, Artificial Sequence
  Description of Artificial Sequence: Synthetic oligonucleotide
uuuucugaaccuccauuca

SEQ ID NO: 3268293 - RNA, 19 nt, Artificial Sequence
  Description of Artificial Sequence: Synthetic oligonucleotide
ucgguagacacccuucgcc

SEQ ID NO: 3268294 - RNA, 19 nt, Artificial Sequence
  Description of Artificial Sequence: Synthetic oligonucleotide
ucaacguuucuucuuguaa

SEQ ID NO: 3268295 - RNA, 19 nt, Artificial Sequence
  Description of Artificial Sequence: Synthetic oligonucleotide
uaagcauauggcugaaaga

SEQ ID NO: 3268296 - RNA, 19 nt, Artificial Sequence
  Description of Artificial Sequence: Synthetic oligonucleotide
gaacuugggaaacuguuuc

SEQ ID NO: 3268297 - RNA, 19 nt, Artificial Sequence
  Description of Artificial Sequence: Synthetic oligonucleotide
gaacacuucaaugagcaca

SEQ ID NO: 3268298 - RNA, 19 nt, Artificial Sequence
  Description of Artificial Sequence: Synthetic oligonucleotide
cagacugcaaauaacaaaa

SEQ ID NO: 3268299 - RNA, 19 nt, Artificial Sequence
  Description of Artificial Sequence: Synthetic oligonucleotide
uuucacaacaucagacagu

SEQ ID NO: 3268300 - RNA, 19 nt, Artificial Sequence
  Description of Artificial Sequence: Synthetic oligonucleotide
guugauuucccucggacca

SEQ ID NO: 3268301 - RNA, 19 nt, Artificial Sequence
  Description of Artificial Sequence: Synthetic oligonucleotide
uuggcuauuucacaacauc

SEQ ID NO: 3268302 - RNA, 19 nt, Artificial Sequence
  Description of Artificial Sequence: Synthetic oligonucleotide
cucuguucaucauaugcag

SEQ ID NO: 3268303 - RNA, 19 nt, Artificial Sequence
  Description of Artificial Sequence: Synthetic oligonucleotide
aucauaugcaguaccguac

SEQ ID NO: 3268304 - RNA, 19 nt, Artificial Sequence
  Description of Artificial Sequence: Synthetic oligonucleotide
gauuaacuauauuuaguaa

SEQ ID NO: 3268305 - RNA, 19 nt, Artificial Sequence
  Description of Artificial Sequence: Synthetic oligonucleotide
agcaaauucucuuucuucc

SEQ ID NO: 3268306 - RNA, 19 nt, Artificial Sequence
  Description of Artificial Sequence: Synthetic oligonucleotide
ugucuauucagcaaauucu

SEQ ID NO: 3268307 - RNA, 19 nt, Artificial Sequence
  Description of Artificial Sequence: Synthetic oligonucleotide
augucuauucagcaaauuc

SEQ ID NO: 3268308 - RNA, 19 nt, Artificial Sequence
  Description of Artificial Sequence: Synthetic oligonucleotide
acaaccacuccucaggagg

SEQ ID NO: 3268309 - RNA, 19 nt, Artificial Sequence
  Description of Artificial Sequence: Synthetic oligonucleotide
uucucuuucuuccccaucc

SEQ ID NO: 3268310 - RNA, 19 nt, Artificial Sequence
  Description of Artificial Sequence: Synthetic oligonucleotide
uucuugaugucuauucagc

SEQ ID NO: 3268311 - RNA, 19 nt, Artificial Sequence
  Description of Artificial Sequence: Synthetic oligonucleotide
uugaugucuauucagcaaa

SEQ ID NO: 3268312 - RNA, 19 nt, Artificial Sequence
  Description of Artificial Sequence: Synthetic oligonucleotide
ucuucuugaugucuauuca

SEQ ID NO: 3268313 - RNA, 19 nt, Artificial Sequence
  Description of Artificial Sequence: Synthetic oligonucleotide
aaauucucuuucuucccca

SEQ ID NO: 3268314 - RNA, 19 nt, Artificial Sequence
  Description of Artificial Sequence: Synthetic oligonucleotide
ucuuucuuccccauccuac

SEQ ID NO: 3268315 - RNA, 19 nt, Artificial Sequence
  Description of Artificial Sequence: Synthetic oligonucleotide
ucuugaugucuauucagca

SEQ ID NO: 3268316 - RNA, 19 nt, Artificial Sequence
  Description of Artificial Sequence: Synthetic oligonucleotide
auucagcaaauucucuuuc

SEQ ID NO: 3268317 - RNA, 19 nt, Artificial Sequence
  Description of Artificial Sequence: Synthetic oligonucleotide
gaaggagucuucuugaugu

SEQ ID NO: 3268318 - RNA, 19 nt, Artificial Sequence
  Description of Artificial Sequence: Synthetic oligonucleotide
cuucuugaugucuauucag

SEQ ID NO: 3268319 - RNA, 19 nt, Artificial Sequence
  Description of Artificial Sequence: Synthetic oligonucleotide
ucuuccccauccuacaacc

SEQ ID NO: 3268320 - RNA, 19 nt, Artificial Sequence
  Description of Artificial Sequence: Synthetic oligonucleotide
ucuauucagcaaauucucu

SEQ ID NO: 3268321 - RNA, 19 nt, Artificial Sequence
  Description of Artificial Sequence: Synthetic oligonucleotide
caaauucucuuucuucccc

SEQ ID NO: 3268322 - RNA, 19 nt, Artificial Sequence
  Description of Artificial Sequence: Synthetic oligonucleotide
ugcuugagggacuuugccc

SEQ ID NO: 3268323 - RNA, 19 nt, Artificial Sequence
  Description of Artificial Sequence: Synthetic oligonucleotide
uauucagcaaauucucuuu

SEQ ID NO: 3268324 - RNA, 19 nt, Artificial Sequence
  Description of Artificial Sequence: Synthetic oligonucleotide
aaggagucuucuugauguc

SEQ ID NO: 3268325 - RNA, 19 nt, Artificial Sequence
  Description of Artificial Sequence: Synthetic oligonucleotide
ugagggacuuugcccaggg

SEQ ID NO: 3268326 - RNA, 19 nt, Artificial Sequence
  Description of Artificial Sequence: Synthetic oligonucleotide
gucccugggugcuugaggg

SEQ ID NO: 3268327 - RNA, 19 nt, Artificial Sequence
  Description of Artificial Sequence: Synthetic oligonucleotide
uucagcaaauucucuuucu

SEQ ID NO: 3268328 - RNA, 19 nt, Artificial Sequence
  Description of Artificial Sequence: Synthetic oligonucleotide
gucuucuugaugucuauuc

SEQ ID NO: 3268329 - RNA, 19 nt, Artificial Sequence
  Description of Artificial Sequence: Synthetic oligonucleotide
ugucccugggugcuugagg

SEQ ID NO: 3268330 - RNA, 19 nt, Artificial Sequence
  Description of Artificial Sequence: Synthetic oligonucleotide
cauccuacaaccacuccuc

SEQ ID NO: 3268331 - RNA, 19 nt, Artificial Sequence
  Description of Artificial Sequence: Synthetic oligonucleotide
ucagcaaauucucuuucuu

SEQ ID NO: 3268332 - RNA, 19 nt, Artificial Sequence
  Description of Artificial Sequence: Synthetic oligonucleotide
agggacuuugcccagggaa

SEQ ID NO: 3268333 - RNA, 19 nt, Artificial Sequence
  Description of Artificial Sequence: Synthetic oligonucleotide
aauucucuuucuuccccau

SEQ ID NO: 3268334 - RNA, 19 nt, Artificial Sequence
  Description of Artificial Sequence: Synthetic oligonucleotide
uuccccauccuacaaccac

SEQ ID NO: 3268335 - RNA, 19 nt, Artificial Sequence
  Description of Artificial Sequence: Synthetic oligonucleotide
ccuacaaccacuccucagg

SEQ ID NO: 3268336 - RNA, 19 nt, Artificial Sequence
  Description of Artificial Sequence: Synthetic oligonucleotide
cagggaaggagucuucuug

SEQ ID NO: 3268337 - RNA, 19 nt, Artificial Sequence
  Description of Artificial Sequence: Synthetic oligonucleotide
uccuacaaccacuccucag

SEQ ID NO: 3268338 - RNA, 19 nt, Artificial Sequence
  Description of Artificial Sequence: Synthetic oligonucleotide
auucucuuucuuccccauc

SEQ ID NO: 3268339 - RNA, 19 nt, Artificial Sequence
  Description of Artificial Sequence: Synthetic oligonucleotide
agggaaggagucuucuuga

SEQ ID NO: 3268340 - RNA, 19 nt, Artificial Sequence
  Description of Artificial Sequence: Synthetic oligonucleotide
cagcaaauucucuuucuuc

SEQ ID NO: 3268341 - RNA, 19 nt, Artificial Sequence
  Description of Artificial Sequence: Synthetic oligonucleotide
uucuuccccauccuacaac

SEQ ID NO: 3268342 - RNA, 19 nt, Artificial Sequence
  Description of Artificial Sequence: Synthetic oligonucleotide
uacaaccacuccucaggag

SEQ ID NO: 3268343 - RNA, 19 nt, Artificial Sequence
  Description of Artificial Sequence: Synthetic oligonucleotide
gucuauucagcaaauucuc

SEQ ID NO: 3268344 - RNA, 19 nt, Artificial Sequence
  Description of Artificial Sequence: Synthetic oligonucleotide
ugaugucuauucagcaaau

SEQ ID NO: 3268345 - RNA, 19 nt, Artificial Sequence
  Description of Artificial Sequence: Synthetic oligonucleotide
aaccacuccucaggaggcc

SEQ ID NO: 3268346 - RNA, 19 nt, Artificial Sequence
  Description of Artificial Sequence: Synthetic oligonucleotide
uuugcccagggaaggaguc

SEQ ID NO: 3268347 - RNA, 19 nt, Artificial Sequence
  Description of Artificial Sequence: Synthetic oligonucleotide
caaccacuccucaggaggc

SEQ ID NO: 3268348 - RNA, 19 nt, Artificial Sequence
  Description of Artificial Sequence: Synthetic oligonucleotide
uccccauccuacaaccacu

SEQ ID NO: 3268349 - RNA, 19 nt, Artificial Sequence
  Description of Artificial Sequence: Synthetic oligonucleotide
cuugaugucuauucagcaa

SEQ ID NO: 3268350 - RNA, 19 nt, Artificial Sequence
  Description of Artificial Sequence: Synthetic oligonucleotide
uguaggcuccagcacccug

SEQ ID NO: 3268351 - RNA, 19 nt, Artificial Sequence
  Description of Artificial Sequence: Synthetic oligonucleotide
uuucuuccccauccuacaa

SEQ ID NO: 3268352 - RNA, 19 nt, Artificial Sequence
  Description of Artificial Sequence: Synthetic oligonucleotide
ucaggaggccccucccagg

SEQ ID NO: 3268353 - RNA, 19 nt, Artificial Sequence
  Description of Artificial Sequence: Synthetic oligonucleotide
ucucuuucuuccccauccu

SEQ ID NO: 3268354 - RNA, 19 nt, Artificial Sequence
  Description of Artificial Sequence: Synthetic oligonucleotide
ucacugcccagcucugucc

SEQ ID NO: 3268355 - RNA, 19 nt, Artificial Sequence
  Description of Artificial Sequence: Synthetic oligonucleotide
gcaaauucucuuucuuccc

SEQ ID NO: 3268356 - RNA, 19 nt, Artificial Sequence
  Description of Artificial Sequence: Synthetic oligonucleotide
cuuucuuccccauccuaca

SEQ ID NO: 3268357 - RNA, 19 nt, Artificial Sequence
  Description of Artificial Sequence: Synthetic oligonucleotide
gugcuugagggacuuugcc

SEQ ID NO: 3268358 - RNA, 19 nt, Artificial Sequence
  Description of Artificial Sequence: Synthetic oligonucleotide
accacuccucaggaggccc

SEQ ID NO: 3268359 - RNA, 19 nt, Artificial Sequence
  Description of Artificial Sequence: Synthetic oligonucleotide
uccagcacccugcucugcu

SEQ ID NO: 3268360 - RNA, 19 nt, Artificial Sequence
  Description of Artificial Sequence: Synthetic oligonucleotide
gcuugagggacuuugccca

SEQ ID NO: 3268361 - RNA, 19 nt, Artificial Sequence
  Description of Artificial Sequence: Synthetic oligonucleotide
ggaaggagucuucuugaug

SEQ ID NO: 3268362 - RNA, 19 nt, Artificial Sequence
  Description of Artificial Sequence: Synthetic oligonucleotide
acuuugcccagggaaggag

SEQ ID NO: 3268363 - RNA, 19 nt, Artificial Sequence
  Description of Artificial Sequence: Synthetic oligonucleotide
cuugagggacuuugcccag

SEQ ID NO: 3268364 - RNA, 19 nt, Artificial Sequence
  Description of Artificial Sequence: Synthetic oligonucleotide
caggaggccccucccaggg

SEQ ID NO: 3268365 - RNA, 19 nt, Artificial Sequence
  Description of Artificial Sequence: Synthetic oligonucleotide
guaggcuccagcacccugc

SEQ ID NO: 3268366 - RNA, 19 nt, Artificial Sequence
  Description of Artificial Sequence: Synthetic oligonucleotide
cucaggaggccccucccag

SEQ ID NO: 3268367 - RNA, 19 nt, Artificial Sequence
  Description of Artificial Sequence: Synthetic oligonucleotide
uugagggacuuugcccagg

SEQ ID NO: 3268368 - RNA, 19 nt, Artificial Sequence
  Description of Artificial Sequence: Synthetic oligonucleotide
uccucaggaggccccuccc

SEQ ID NO: 3268369 - RNA, 19 nt, Artificial Sequence
  Description of Artificial Sequence: Synthetic oligonucleotide
ucccaggggcuccugaaua

SEQ ID NO: 3268370 - RNA, 19 nt, Artificial Sequence
  Description of Artificial Sequence: Synthetic oligonucleotide
cacugcccagcucuguccc

SEQ ID NO: 3268371 - RNA, 19 nt, Artificial Sequence
  Description of Artificial Sequence: Synthetic oligonucleotide
aggagucuucuugaugucu

SEQ ID NO: 3268372 - RNA, 19 nt, Artificial Sequence
  Description of Artificial Sequence: Synthetic oligonucleotide
ugcucugcucacugcccag

SEQ ID NO: 3268373 - RNA, 19 nt, Artificial Sequence
  Description of Artificial Sequence: Synthetic oligonucleotide
agcacccugcucugcucac

SEQ ID NO: 3268374 - RNA, 19 nt, Artificial Sequence
  Description of Artificial Sequence: Synthetic oligonucleotide
acccugcucugcucacugc

SEQ ID NO: 3268375 - RNA, 19 nt, Artificial Sequence
  Description of Artificial Sequence: Synthetic oligonucleotide
cuauucagcaaauucucuu

SEQ ID NO: 3268376 - RNA, 19 nt, Artificial Sequence
  Description of Artificial Sequence: Synthetic oligonucleotide
cuacaaccacuccucagga

SEQ ID NO: 3268377 - RNA, 19 nt, Artificial Sequence
  Description of Artificial Sequence: Synthetic oligonucleotide
gggacuuugcccagggaag

SEQ ID NO: 3268378 - RNA, 19 nt, Artificial Sequence
  Description of Artificial Sequence: Synthetic oligonucleotide
ggacuuugcccagggaagg

SEQ ID NO: 3268379 - RNA, 19 nt, Artificial Sequence
  Description of Artificial Sequence: Synthetic oligonucleotide
auccuacaaccacuccuca

SEQ ID NO: 3268380 - RNA, 19 nt, Artificial Sequence
  Description of Artificial Sequence: Synthetic oligonucleotide
ucugcucacugcccagcuc

SEQ ID NO: 3268381 - RNA, 19 nt, Artificial Sequence
  Description of Artificial Sequence: Synthetic oligonucleotide
cucacugcccagcucuguc

SEQ ID NO: 3268382 - RNA, 19 nt, Artificial Sequence
  Description of Artificial Sequence: Synthetic oligonucleotide
uaggcuccagcacccugcu

SEQ ID NO: 3268383 - RNA, 19 nt, Artificial Sequence
  Description of Artificial Sequence: Synthetic oligonucleotide
cuccucaggaggccccucc

SEQ ID NO: 3268384 - RNA, 19 nt, Artificial Sequence
  Description of Artificial Sequence: Synthetic oligonucleotide
ugcucacugcccagcucug

SEQ ID NO: 3268385 - RNA, 19 nt, Artificial Sequence
  Description of Artificial Sequence: Synthetic oligonucleotide
cccuguaggcuccagcacc

SEQ ID NO: 3268386 - RNA, 19 nt, Artificial Sequence
  Description of Artificial Sequence: Synthetic oligonucleotide
ugcccagcucugucccugg

SEQ ID NO: 3268387 - RNA, 19 nt, Artificial Sequence
  Description of Artificial Sequence: Synthetic oligonucleotide
ccuguaggcuccagcaccc

SEQ ID NO: 3268388 - RNA, 19 nt, Artificial Sequence
  Description of Artificial Sequence: Synthetic oligonucleotide
cagcucugucccugggugc

SEQ ID NO: 3268389 - RNA, 19 nt, Artificial Sequence
  Description of Artificial Sequence: Synthetic oligonucleotide
cacccugcucugcucacug

SEQ ID NO: 3268390 - RNA, 19 nt, Artificial Sequence
  Description of Artificial Sequence: Synthetic oligonucleotide
agcucugucccugggugcu

SEQ ID NO: 3268391 - RNA, 19 nt, Artificial Sequence
  Description of Artificial Sequence: Synthetic oligonucleotide
ggaggccccucccaggggc

SEQ ID NO: 3268392 - RNA, 19 nt, Artificial Sequence
  Description of Artificial Sequence: Synthetic oligonucleotide
ggcuccagcacccugcucu

SEQ ID NO: 3268393 - RNA, 19 nt, Artificial Sequence
  Description of Artificial Sequence: Synthetic oligonucleotide
aggaggccccucccagggg

SEQ ID NO: 3268394 - RNA, 19 nt, Artificial Sequence
  Description of Artificial Sequence: Synthetic oligonucleotide
ccagcucugucccugggug

SEQ ID NO: 3268395 - RNA, 19 nt, Artificial Sequence
  Description of Artificial Sequence: Synthetic oligonucleotide
gggugcuugagggacuuug

SEQ ID NO: 3268396 - RNA, 19 nt, Artificial Sequence
  Description of Artificial Sequence: Synthetic oligonucleotide
ggugcuugagggacuuugc

SEQ ID NO: 3268397 - RNA, 19 nt, Artificial Sequence
  Description of Artificial Sequence: Synthetic oligonucleotide
cugcucacugcccagcucu

SEQ ID NO: 3268398 - RNA, 19 nt, Artificial Sequence
  Description of Artificial Sequence: Synthetic oligonucleotide
gacuuugcccagggaagga

SEQ ID NO: 3268399 - RNA, 19 nt, Artificial Sequence
  Description of Artificial Sequence: Synthetic oligonucleotide
ucccugggugcuugaggga

SEQ ID NO: 3268400 - RNA, 19 nt, Artificial Sequence
  Description of Artificial Sequence: Synthetic oligonucleotide
ucugucccugggugcuuga

SEQ ID NO: 3268401 - RNA, 19 nt, Artificial Sequence
  Description of Artificial Sequence: Synthetic oligonucleotide
agucuucuugaugucuauu

SEQ ID NO: 3268402 - RNA, 19 nt, Artificial Sequence
  Description of Artificial Sequence: Synthetic oligonucleotide
uugcccagggaaggagucu

SEQ ID NO: 3268403 - RNA, 19 nt, Artificial Sequence
  Description of Artificial Sequence: Synthetic oligonucleotide
ugcccagggaaggagucuu

SEQ ID NO: 3268404 - RNA, 19 nt, Artificial Sequence
  Description of Artificial Sequence: Synthetic oligonucleotide
cuuccccauccuacaacca

SEQ ID NO: 3268405 - RNA, 19 nt, Artificial Sequence
  Description of Artificial Sequence: Synthetic oligonucleotide
aaccucaugcuguagauuc

SEQ ID NO: 3268406 - RNA, 19 nt, Artificial Sequence
  Description of Artificial Sequence: Synthetic oligonucleotide
auagagucuacgcaguacc

SEQ ID NO: 3268407 - RNA, 19 nt, Artificial Sequence
  Description of Artificial Sequence: Synthetic oligonucleotide
ucggaugacacccucaggg

SEQ ID NO: 3268408 - RNA, 19 nt, Artificial Sequence
  Description of Artificial Sequence: Synthetic oligonucleotide
aaaagcucacagucgccgc

SEQ ID NO: 3268409 - RNA, 19 nt, Artificial Sequence
  Description of Artificial Sequence: Synthetic oligonucleotide
aaagcucacagucgccgcc

SEQ ID NO: 3268410 - RNA, 19 nt, Artificial Sequence
  Description of Artificial Sequence: Synthetic oligonucleotide
acagucgccgccuuguggc

SEQ ID NO: 3268411 - RNA, 19 nt, Artificial Sequence
  Description of Artificial Sequence: Synthetic oligonucleotide
uacgcaguacccaaaagcu

SEQ ID NO: 3268412 - RNA, 19 nt, Artificial Sequence
  Description of Artificial Sequence: Synthetic oligonucleotide
gaugccuuuggccuugagg

SEQ ID NO: 3268413 - RNA, 19 nt, Artificial Sequence
  Description of Artificial Sequence: Synthetic oligonucleotide
gacaucagucuccauagag

SEQ ID NO: 3268414 - RNA, 19 nt, Artificial Sequence
  Description of Artificial Sequence: Synthetic oligonucleotide
uacccaaaagcucacaguc

SEQ ID NO: 3268415 - RNA, 19 nt, Artificial Sequence
  Description of Artificial Sequence: Synthetic oligonucleotide
augccuuuggccuugagga

SEQ ID NO: 3268416 - RNA, 19 nt, Artificial Sequence
  Description of Artificial Sequence: Synthetic oligonucleotide
guagauucggaugacaccc

SEQ ID NO: 3268417 - RNA, 19 nt, Artificial Sequence
  Description of Artificial Sequence: Synthetic oligonucleotide
ugcgaguaggggcagaacc

SEQ ID NO: 3268418 - RNA, 19 nt, Artificial Sequence
  Description of Artificial Sequence: Synthetic oligonucleotide
cuacgcaguacccaaaagc

SEQ ID NO: 3268419 - RNA, 19 nt, Artificial Sequence
  Description of Artificial Sequence: Synthetic oligonucleotide
ucuccauagagucuacgca

SEQ ID NO: 3268420 - RNA, 19 nt, Artificial Sequence
  Description of Artificial Sequence: Synthetic oligonucleotide
augccugaugccuuuggcc

SEQ ID NO: 3268421 - RNA, 19 nt, Artificial Sequence
  Description of Artificial Sequence: Synthetic oligonucleotide
aguacccaaaagcucacag

SEQ ID NO: 3268422 - RNA, 19 nt, Artificial Sequence
  Description of Artificial Sequence: Synthetic oligonucleotide
uguagauucggaugacacc

SEQ ID NO: 3268423 - RNA, 19 nt, Artificial Sequence
  Description of Artificial Sequence: Synthetic oligonucleotide
caugcuguagauucggaug

SEQ ID NO: 3268424 - RNA, 19 nt, Artificial Sequence
  Description of Artificial Sequence: Synthetic oligonucleotide
cagacaucagucuccauag

SEQ ID NO: 3268425 - RNA, 19 nt, Artificial Sequence
  Description of Artificial Sequence: Synthetic oligonucleotide
cuccauagagucuacgcag

SEQ ID NO: 3268426 - RNA, 19 nt, Artificial Sequence
  Description of Artificial Sequence: Synthetic oligonucleotide
caucagucuccauagaguc

SEQ ID NO: 3268427 - RNA, 19 nt, Artificial Sequence
  Description of Artificial Sequence: Synthetic oligonucleotide
uuggccuugaggaccaggc

SEQ ID NO: 3268428 - RNA, 19 nt, Artificial Sequence
  Description of Artificial Sequence: Synthetic oligonucleotide
uaggggcagaaccucaugc

SEQ ID NO: 3268429 - RNA, 19 nt, Artificial Sequence
  Description of Artificial Sequence: Synthetic oligonucleotide
auucggaugacacccucag

SEQ ID NO: 3268430 - RNA, 19 nt, Artificial Sequence
  Description of Artificial Sequence: Synthetic oligonucleotide
cuguagauucggaugacac

SEQ ID NO: 3268431 - RNA, 19 nt, Artificial Sequence
  Description of Artificial Sequence: Synthetic oligonucleotide
caaaagcucacagucgccg

SEQ ID NO: 3268432 - RNA, 19 nt, Artificial Sequence
  Description of Artificial Sequence: Synthetic oligonucleotide
caagcuucuggucgcaucc

SEQ ID NO: 3268433 - RNA, 19 nt, Artificial Sequence
  Description of Artificial Sequence: Synthetic oligonucleotide
ucuacgcaguacccaaaag

SEQ ID NO: 3268434 - RNA, 19 nt, Artificial Sequence
  Description of Artificial Sequence: Synthetic oligonucleotide
augcuguagauucggauga

SEQ ID NO: 3268435 - RNA, 19 nt, Artificial Sequence
  Description of Artificial Sequence: Synthetic oligonucleotide
gucuccauagagucuacgc

SEQ ID NO: 3268436 - RNA, 19 nt, Artificial Sequence
  Description of Artificial Sequence: Synthetic oligonucleotide
cuccccaagcuucuggucg

SEQ ID NO: 3268437 - RNA, 19 nt, Artificial Sequence
  Description of Artificial Sequence: Synthetic oligonucleotide
ugccugaugccuuuggccu

SEQ ID NO: 3268438 - RNA, 19 nt, Artificial Sequence
  Description of Artificial Sequence: Synthetic oligonucleotide
auccccagacaucagucuc

SEQ ID NO: 3268439 - RNA, 19 nt, Artificial Sequence
  Description of Artificial Sequence: Synthetic oligonucleotide
ucagggacuggcccugggg

SEQ ID NO: 3268440 - RNA, 19 nt, Artificial Sequence
  Description of Artificial Sequence: Synthetic oligonucleotide
ucaugccugaugccuuugg

SEQ ID NO: 3268441 - RNA, 19 nt, Artificial Sequence
  Description of Artificial Sequence: Synthetic oligonucleotide
uagagucuacgcaguaccc

SEQ ID NO: 3268442 - RNA, 19 nt, Artificial Sequence
  Description of Artificial Sequence: Synthetic oligonucleotide
agcuucuggucgcaucccc

SEQ ID NO: 3268443 - RNA, 19 nt, Artificial Sequence
  Description of Artificial Sequence: Synthetic oligonucleotide
uccauagagucuacgcagu

SEQ ID NO: 3268444 - RNA, 19 nt, Artificial Sequence
  Description of Artificial Sequence: Synthetic oligonucleotide
ucuggucgcauccccagac

SEQ ID NO: 3268445 - RNA, 19 nt, Artificial Sequence
  Description of Artificial Sequence: Synthetic oligonucleotide
uuguggcucucucugcugc

SEQ ID NO: 3268446 - RNA, 19 nt, Artificial Sequence
  Description of Artificial Sequence: Synthetic oligonucleotide
uugaggaccaggcgugccc

SEQ ID NO: 3268447 - RNA, 19 nt, Artificial Sequence
  Description of Artificial Sequence: Synthetic oligonucleotide
ucagucuccauagagucua

SEQ ID NO: 3268448 - RNA, 19 nt, Artificial Sequence
  Description of Artificial Sequence: Synthetic oligonucleotide
agauucggaugacacccuc

SEQ ID NO: 3268449 - RNA, 19 nt, Artificial Sequence
  Description of Artificial Sequence: Synthetic oligonucleotide
ucaugcuguagauucggau

SEQ ID NO: 3268450 - RNA, 19 nt, Artificial Sequence
  Description of Artificial Sequence: Synthetic oligonucleotide
uucggaugacacccucagg

SEQ ID NO: 3268451 - RNA, 19 nt, Artificial Sequence
  Description of Artificial Sequence: Synthetic oligonucleotide
uccccagacaucagucucc

SEQ ID NO: 3268452 - RNA, 19 nt, Artificial Sequence
  Description of Artificial Sequence: Synthetic oligonucleotide
agaaccucaugcuguagau

SEQ ID NO: 3268453 - RNA, 19 nt, Artificial Sequence
  Description of Artificial Sequence: Synthetic oligonucleotide
uggccuugaggaccaggcg

SEQ ID NO: 3268454 - RNA, 19 nt, Artificial Sequence
  Description of Artificial Sequence: Synthetic oligonucleotide
aagcuucuggucgcauccc

SEQ ID NO: 3268455 - RNA, 19 nt, Artificial Sequence
  Description of Artificial Sequence: Synthetic oligonucleotide
ugcccuuugcgaguagggg

SEQ ID NO: 3268456 - RNA, 19 nt, Artificial Sequence
  Description of Artificial Sequence: Synthetic oligonucleotide
acugcugccucuccccaag

SEQ ID NO: 3268457 - RNA, 19 nt, Artificial Sequence
  Description of Artificial Sequence: Synthetic oligonucleotide
acaucagucuccauagagu

SEQ ID NO: 3268458 - RNA, 19 nt, Artificial Sequence
  Description of Artificial Sequence: Synthetic oligonucleotide
caugccugaugccuuuggc

SEQ ID NO: 3268459 - RNA, 19 nt, Artificial Sequence
  Description of Artificial Sequence: Synthetic oligonucleotide
cuucuggucgcauccccag

SEQ ID NO: 3268460 - RNA, 19 nt, Artificial Sequence
  Description of Artificial Sequence: Synthetic oligonucleotide
uuuggccuugaggaccagg

SEQ ID NO: 3268461 - RNA, 19 nt, Artificial Sequence
  Description of Artificial Sequence: Synthetic oligonucleotide
cauagagucuacgcaguac

SEQ ID NO: 3268462 - RNA, 19 nt, Artificial Sequence
  Description of Artificial Sequence: Synthetic oligonucleotide
cccaaaagcucacagucgc

SEQ ID NO: 3268463 - RNA, 19 nt, Artificial Sequence
  Description of Artificial Sequence: Synthetic oligonucleotide
caggcgugcccuuugcgag

SEQ ID NO: 3268464 - RNA, 19 nt, Artificial Sequence
  Description of Artificial Sequence: Synthetic oligonucleotide
gagucuacgcaguacccaa

SEQ ID NO: 3268465 - RNA, 19 nt, Artificial Sequence
  Description of Artificial Sequence: Synthetic oligonucleotide
aggggcagaaccucaugcu

SEQ ID NO: 3268466 - RNA, 19 nt, Artificial Sequence
  Description of Artificial Sequence: Synthetic oligonucleotide
acccaaaagcucacagucg

SEQ ID NO: 3268467 - RNA, 19 nt, Artificial Sequence
  Description of Artificial Sequence: Synthetic oligonucleotide
uagauucggaugacacccu

SEQ ID NO: 3268468 - RNA, 19 nt, Artificial Sequence
  Description of Artificial Sequence: Synthetic oligonucleotide
gucgcauccccagacauca

SEQ ID NO: 3268469 - RNA, 19 nt, Artificial Sequence
  Description of Artificial Sequence: Synthetic oligonucleotide
agagucuacgcaguaccca

SEQ ID NO: 3268470 - RNA, 19 nt, Artificial Sequence
  Description of Artificial Sequence: Synthetic oligonucleotide
uccccaagcuucuggucgc

SEQ ID NO: 3268471 - RNA, 19 nt, Artificial Sequence
  Description of Artificial Sequence: Synthetic oligonucleotide
uggucgcauccccagacau

SEQ ID NO: 3268472 - RNA, 19 nt, Artificial Sequence
  Description of Artificial Sequence: Synthetic oligonucleotide
gacacccucagggacuggc

SEQ ID NO: 3268473 - RNA, 19 nt, Artificial Sequence
  Description of Artificial Sequence: Synthetic oligonucleotide
cugccucuccccaagcuuc

SEQ ID NO: 3268474 - RNA, 19 nt, Artificial Sequence
  Description of Artificial Sequence: Synthetic oligonucleotide
uuugcgaguaggggcagaa

SEQ ID NO: 3268475 - RNA, 19 nt, Artificial Sequence
  Description of Artificial Sequence: Synthetic oligonucleotide
cacagucgccgccuugugg

SEQ ID NO: 3268476 - RNA, 19 nt, Artificial Sequence
  Description of Artificial Sequence: Synthetic oligonucleotide
agucuccauagagucuacg

SEQ ID NO: 3268477 - RNA, 19 nt, Artificial Sequence
  Description of Artificial Sequence: Synthetic oligonucleotide
cagaaccucaugcuguaga

SEQ ID NO: 3268478 - RNA, 19 nt, Artificial Sequence
  Description of Artificial Sequence: Synthetic oligonucleotide
cuuguggcucucucugcug

SEQ ID NO: 3268479 - RNA, 19 nt, Artificial Sequence
  Description of Artificial Sequence: Synthetic oligonucleotide
acgcaguacccaaaagcuc

SEQ ID NO: 3268480 - RNA, 19 nt, Artificial Sequence
  Description of Artificial Sequence: Synthetic oligonucleotide
accaggcgugcccuuugcg

SEQ ID NO: 3268481 - RNA, 19 nt, Artificial Sequence
  Description of Artificial Sequence: Synthetic oligonucleotide
ggaugacacccucagggac

SEQ ID NO: 3268482 - RNA, 19 nt, Artificial Sequence
  Description of Artificial Sequence: Synthetic oligonucleotide
ugcugccucuccccaagcu

SEQ ID NO: 3268483 - RNA, 19 nt, Artificial Sequence
  Description of Artificial Sequence: Synthetic oligonucleotide
uucuggucgcauccccaga

SEQ ID NO: 3268484 - RNA, 19 nt, Artificial Sequence
  Description of Artificial Sequence: Synthetic oligonucleotide
cacccucagggacuggccc

SEQ ID NO: 3268485 - RNA, 19 nt, Artificial Sequence
  Description of Artificial Sequence: Synthetic oligonucleotide
gauucggaugacacccuca

SEQ ID NO: 3268486 - RNA, 19 nt, Artificial Sequence
  Description of Artificial Sequence: Synthetic oligonucleotide
gcccuuugcgaguaggggc

SEQ ID NO: 3268487 - RNA, 19 nt, Artificial Sequence
  Description of Artificial Sequence: Synthetic oligonucleotide
ugccuuuggccuugaggac

SEQ ID NO: 3268488 - RNA, 19 nt, Artificial Sequence
  Description of Artificial Sequence: Synthetic oligonucleotide
aagcucacagucgccgccu

SEQ ID NO: 3268489 - RNA, 19 nt, Artificial Sequence
  Description of Artificial Sequence: Synthetic oligonucleotide
acacccucagggacuggcc

SEQ ID NO: 3268490 - RNA, 19 nt, Artificial Sequence
  Description of Artificial Sequence: Synthetic oligonucleotide
ucacagucgccgccuugug

SEQ ID NO: 3268491 - RNA, 19 nt, Artificial Sequence
  Description of Artificial Sequence: Synthetic oligonucleotide
accucaugcuguagauucg

SEQ ID NO: 3268492 - RNA, 19 nt, Artificial Sequence
  Description of Artificial Sequence: Synthetic oligonucleotide
guaggggcagaaccucaug

SEQ ID NO: 3268493 - RNA, 19 nt, Artificial Sequence
  Description of Artificial Sequence: Synthetic oligonucleotide
ggggcagaaccucaugcug

SEQ ID NO: 3268494 - RNA, 19 nt, Artificial Sequence
  Description of Artificial Sequence: Synthetic oligonucleotide
uguggcucucucugcugcu

SEQ ID NO: 3268495 - RNA, 19 nt, Artificial Sequence
  Description of Artificial Sequence: Synthetic oligonucleotide
agacaucagucuccauaga

SEQ ID NO: 3268496 - RNA, 19 nt, Artificial Sequence
  Description of Artificial Sequence: Synthetic oligonucleotide
gaugacacccucagggacu

SEQ ID NO: 3268497 - RNA, 19 nt, Artificial Sequence
  Description of Artificial Sequence: Synthetic oligonucleotide
gugcccuuugcgaguaggg

SEQ ID NO: 3268498 - RNA, 19 nt, Artificial Sequence
  Description of Artificial Sequence: Synthetic oligonucleotide
ugaggaccaggcgugcccu

SEQ ID NO: 3268499 - RNA, 19 nt, Artificial Sequence
  Description of Artificial Sequence: Synthetic oligonucleotide
guacccaaaagcucacagu

SEQ ID NO: 3268500 - RNA, 19 nt, Artificial Sequence
  Description of Artificial Sequence: Synthetic oligonucleotide
cuugaggaccaggcgugcc

SEQ ID NO: 3268501 - RNA, 19 nt, Artificial Sequence
  Description of Artificial Sequence: Synthetic oligonucleotide
augacacccucagggacug

SEQ ID NO: 3268502 - RNA, 19 nt, Artificial Sequence
  Description of Artificial Sequence: Synthetic oligonucleotide
gucuacgcaguacccaaaa

SEQ ID NO: 3268503 - RNA, 19 nt, Artificial Sequence
  Description of Artificial Sequence: Synthetic oligonucleotide
ucuccccaagcuucugguc

SEQ ID NO: 3268504 - RNA, 19 nt, Artificial Sequence
  Description of Artificial Sequence: Synthetic oligonucleotide
ugaugccuuuggccuugag

SEQ ID NO: 3268505 - RNA, 19 nt, Artificial Sequence
  Description of Artificial Sequence: Synthetic oligonucleotide
uuauuauauacucuaaugg

SEQ ID NO: 3268506 - RNA, 19 nt, Artificial Sequence
  Description of Artificial Sequence: Synthetic oligonucleotide
aaagaacccacacuguucc

SEQ ID NO: 3268507 - RNA, 19 nt, Artificial Sequence
  Description of Artificial Sequence: Synthetic oligonucleotide
ucuugaaugagagugaucg

SEQ ID NO: 3268508 - RNA, 19 nt, Artificial Sequence
  Description of Artificial Sequence: Synthetic oligonucleotide
aauguugucaucaaagaac

SEQ ID NO: 3268509 - RNA, 19 nt, Artificial Sequence
  Description of Artificial Sequence: Synthetic oligonucleotide
cuagaaaauacucagaauc

SEQ ID NO: 3268510 - RNA, 19 nt, Artificial Sequence
  Description of Artificial Sequence: Synthetic oligonucleotide
aauggcaucaaauccaacu

SEQ ID NO: 3268511 - RNA, 19 nt, Artificial Sequence
  Description of Artificial Sequence: Synthetic oligonucleotide
ugaaccgucagaaagaauc

SEQ ID NO: 3268512 - RNA, 19 nt, Artificial Sequence
  Description of Artificial Sequence: Synthetic oligonucleotide
aagcaaaguacacauucac

SEQ ID NO: 3268513 - RNA, 19 nt, Artificial Sequence
  Description of Artificial Sequence: Synthetic oligonucleotide
ucuaauggcaucaaaucca

SEQ ID NO: 3268514 - RNA, 19 nt, Artificial Sequence
  Description of Artificial Sequence: Synthetic oligonucleotide
ugaaucucaauuucuuugg

SEQ ID NO: 3268515 - RNA, 19 nt, Artificial Sequence
  Description of Artificial Sequence: Synthetic oligonucleotide
auacucagaaucuucacuc

SEQ ID NO: 3268516 - RNA, 19 nt, Artificial Sequence
  Description of Artificial Sequence: Synthetic oligonucleotide
aagcauuauuugaagagcc

SEQ ID NO: 3268517 - RNA, 19 nt, Artificial Sequence
  Description of Artificial Sequence: Synthetic oligonucleotide
uuuaacuugguucuucaga

SEQ ID NO: 3268518 - RNA, 19 nt, Artificial Sequence
  Description of Artificial Sequence: Synthetic oligonucleotide
aauacucagaaucuucacu

SEQ ID NO: 3268519 - RNA, 19 nt, Artificial Sequence
  Description of Artificial Sequence: Synthetic oligonucleotide
accaagaggaucuuuacag

SEQ ID NO: 3268520 - RNA, 19 nt, Artificial Sequence
  Description of Artificial Sequence: Synthetic oligonucleotide
aguucaguaguuccagucc

SEQ ID NO: 3268521 - RNA, 19 nt, Artificial Sequence
  Description of Artificial Sequence: Synthetic oligonucleotide
uguggauuggcacuuuggg

SEQ ID NO: 3268522 - RNA, 19 nt, Artificial Sequence
  Description of Artificial Sequence: Synthetic oligonucleotide
uugaaucucaauuucuuug

SEQ ID NO: 3268523 - RNA, 19 nt, Artificial Sequence
  Description of Artificial Sequence: Synthetic oligonucleotide
cugaacaucaaguucuucc

SEQ ID NO: 3268524 - RNA, 19 nt, Artificial Sequence
  Description of Artificial Sequence: Synthetic oligonucleotide
uucaaaagcauuauuugaa

SEQ ID NO: 3268525 - RNA, 19 nt, Artificial Sequence
  Description of Artificial Sequence: Synthetic oligonucleotide
aucaaauccaacuguggac

SEQ ID NO: 3268526 - RNA, 19 nt, Artificial Sequence
  Description of Artificial Sequence: Synthetic oligonucleotide
acgggauuuaacuugguuc

SEQ ID NO: 3268527 - RNA, 19 nt, Artificial Sequence
  Description of Artificial Sequence: Synthetic oligonucleotide
caucuuuucuagcacaucg

SEQ ID NO: 3268528 - RNA, 19 nt, Artificial Sequence
  Description of Artificial Sequence: Synthetic oligonucleotide
ucaguuaugaucccauucu

SEQ ID NO: 3268529 - RNA, 19 nt, Artificial Sequence
  Description of Artificial Sequence: Synthetic oligonucleotide
uagaaaauacucagaaucu

SEQ ID NO: 3268530 - RNA, 19 nt, Artificial Sequence
  Description of Artificial Sequence: Synthetic oligonucleotide
ucaaaagcauuauuugaag

SEQ ID NO: 3268531 - RNA, 19 nt, Artificial Sequence
  Description of Artificial Sequence: Synthetic oligonucleotide
uuccaucagaccaagagga

SEQ ID NO: 3268532 - RNA, 19 nt, Artificial Sequence
  Description of Artificial Sequence: Synthetic oligonucleotide
uuuacagucuugaaugaga

SEQ ID NO: 3268533 - RNA, 19 nt, Artificial Sequence
  Description of Artificial Sequence: Synthetic oligonucleotide
acagucuugaaugagagug

SEQ ID NO: 3268534 - RNA, 19 nt, Artificial Sequence
  Description of Artificial Sequence: Synthetic oligonucleotide
aguauagcaucaugaaccg

SEQ ID NO: 3268535 - RNA, 19 nt, Artificial Sequence
  Description of Artificial Sequence: Synthetic oligonucleotide
aaaugggacuagaaaauac

SEQ ID NO: 3268536 - RNA, 19 nt, Artificial Sequence
  Description of Artificial Sequence: Synthetic oligonucleotide
uuacagucuugaaugagag

SEQ ID NO: 3268537 - RNA, 19 nt, Artificial Sequence
  Description of Artificial Sequence: Synthetic oligonucleotide
ucagauagaguauagcauc

SEQ ID NO: 3268538 - RNA, 19 nt, Artificial Sequence
  Description of Artificial Sequence: Synthetic oligonucleotide
agugaucgucucuagaagg

SEQ ID NO: 3268539 - RNA, 19 nt, Artificial Sequence
  Description of Artificial Sequence: Synthetic oligonucleotide
uauuugaagagccaacauc

SEQ ID NO: 3268540 - RNA, 19 nt, Artificial Sequence
  Description of Artificial Sequence: Synthetic oligonucleotide
auguugucaucaaagaacc

SEQ ID NO: 3268541 - RNA, 19 nt, Artificial Sequence
  Description of Artificial Sequence: Synthetic oligonucleotide
aaucauucgaagugaccuc

SEQ ID NO: 3268542 - RNA, 19 nt, Artificial Sequence
  Description of Artificial Sequence: Synthetic oligonucleotide
ugguucuucagauagagua

SEQ ID NO: 3268543 - RNA, 19 nt, Artificial Sequence
  Description of Artificial Sequence: Synthetic oligonucleotide
caaagcaaaguacacauuc

SEQ ID NO: 3268544 - RNA, 19 nt, Artificial Sequence
  Description of Artificial Sequence: Synthetic oligonucleotide
ugggauaucaaguuccucu

SEQ ID NO: 3268545 - RNA, 19 nt, Artificial Sequence
  Description of Artificial Sequence: Synthetic oligonucleotide
uagaagggaauccuggccc

SEQ ID NO: 3268546 - RNA, 19 nt, Artificial Sequence
  Description of Artificial Sequence: Synthetic oligonucleotide
gauaucaaguuccucuggc

SEQ ID NO: 3268547 - RNA, 19 nt, Artificial Sequence
  Description of Artificial Sequence: Synthetic oligonucleotide
gaaucuucacuccuucagg

SEQ ID NO: 3268548 - RNA, 19 nt, Artificial Sequence
  Description of Artificial Sequence: Synthetic oligonucleotide
ccaacaucaguuaugaucc

SEQ ID NO: 3268549 - RNA, 19 nt, Artificial Sequence
  Description of Artificial Sequence: Synthetic oligonucleotide
ucuuugacaaucauucgaa

SEQ ID NO: 3268550 - RNA, 19 nt, Artificial Sequence
  Description of Artificial Sequence: Synthetic oligonucleotide
ucuuauuauauacucuaau

SEQ ID NO: 3268551 - RNA, 19 nt, Artificial Sequence
  Description of Artificial Sequence: Synthetic oligonucleotide
cucuaauggcaucaaaucc

SEQ ID NO: 3268552 - RNA, 19 nt, Artificial Sequence
  Description of Artificial Sequence: Synthetic oligonucleotide
auuugaagagccaacauca

SEQ ID NO: 3268553 - RNA, 19 nt, Artificial Sequence
  Description of Artificial Sequence: Synthetic oligonucleotide
cuauagaugucugugcugg

SEQ ID NO: 3268554 - RNA, 19 nt, Artificial Sequence
  Description of Artificial Sequence: Synthetic oligonucleotide
uucucugaaauucuuugac

SEQ ID NO: 3268555 - RNA, 19 nt, Artificial Sequence
  Description of Artificial Sequence: Synthetic oligonucleotide
uagcacaucgucuuggagc

SEQ ID NO: 3268556 - RNA, 19 nt, Artificial Sequence
  Description of Artificial Sequence: Synthetic oligonucleotide
auucgaagugaccucacuc

SEQ ID NO: 3268557 - RNA, 19 nt, Artificial Sequence
  Description of Artificial Sequence: Synthetic oligonucleotide
ucagccucuuauuauauac

SEQ ID NO: 3268558 - RNA, 19 nt, Artificial Sequence
  Description of Artificial Sequence: Synthetic oligonucleotide
augaguuucuguauucucc

SEQ ID NO: 3268559 - RNA, 19 nt, Artificial Sequence
  Description of Artificial Sequence: Synthetic oligonucleotide
uuaaccgggaguucaguag

SEQ ID NO: 3268560 - RNA, 19 nt, Artificial Sequence
  Description of Artificial Sequence: Synthetic oligonucleotide
uucgaagugaccucacucc

SEQ ID NO: 3268561 - RNA, 19 nt, Artificial Sequence
  Description of Artificial Sequence: Synthetic oligonucleotide
uucuauagaugucugugcu

SEQ ID NO: 3268562 - RNA, 19 nt, Artificial Sequence
  Description of Artificial Sequence: Synthetic oligonucleotide
aagacacggcuccacaauc

SEQ ID NO: 3268563 - RNA, 19 nt, Artificial Sequence
  Description of Artificial Sequence: Synthetic oligonucleotide
uucagauagaguauagcau

SEQ ID NO: 3268564 - RNA, 19 nt, Artificial Sequence
  Description of Artificial Sequence: Synthetic oligonucleotide
agccucuuauuauauacuc

SEQ ID NO: 3268565 - RNA, 19 nt, Artificial Sequence
  Description of Artificial Sequence: Synthetic oligonucleotide
gacuagaaaauacucagaa

SEQ ID NO: 3268566 - RNA, 19 nt, Artificial Sequence
  Description of Artificial Sequence: Synthetic oligonucleotide
ugaaugagagugaucgucu

SEQ ID NO: 3268567 - RNA, 19 nt, Artificial Sequence
  Description of Artificial Sequence: Synthetic oligonucleotide
ugcgauacuucuauagaug

SEQ ID NO: 3268568 - RNA, 19 nt, Artificial Sequence
  Description of Artificial Sequence: Synthetic oligonucleotide
ucaugaaccgucagaaaga

SEQ ID NO: 3268569 - RNA, 19 nt, Artificial Sequence
  Description of Artificial Sequence: Synthetic oligonucleotide
ugaacaucaaguucuuccu

SEQ ID NO: 3268570 - RNA, 19 nt, Artificial Sequence
  Description of Artificial Sequence: Synthetic oligonucleotide
cuucagauagaguauagca

SEQ ID NO: 3268571 - RNA, 19 nt, Artificial Sequence
  Description of Artificial Sequence: Synthetic oligonucleotide
aguaguuccaguccacuug

SEQ ID NO: 3268572 - RNA, 19 nt, Artificial Sequence
  Description of Artificial Sequence: Synthetic oligonucleotide
cuuugguugggauaucaag

SEQ ID NO: 3268573 - RNA, 19 nt, Artificial Sequence
  Description of Artificial Sequence: Synthetic oligonucleotide
ugggacuagaaaauacuca

SEQ ID NO: 3268574 - RNA, 19 nt, Artificial Sequence
  Description of Artificial Sequence: Synthetic oligonucleotide
ucaaauccaacuguggacu

SEQ ID NO: 3268575 - RNA, 19 nt, Artificial Sequence
  Description of Artificial Sequence: Synthetic oligonucleotide
ugugcgauacuucuauaga

SEQ ID NO: 3268576 - RNA, 19 nt, Artificial Sequence
  Description of Artificial Sequence: Synthetic oligonucleotide
ucgaagugaccucacuccg

SEQ ID NO: 3268577 - RNA, 19 nt, Artificial Sequence
  Description of Artificial Sequence: Synthetic oligonucleotide
uuuucuagcacaucgucuu

SEQ ID NO: 3268578 - RNA, 19 nt, Artificial Sequence
  Description of Artificial Sequence: Synthetic oligonucleotide
aaugggacuagaaaauacu

SEQ ID NO: 3268579 - RNA, 19 nt, Artificial Sequence
  Description of Artificial Sequence: Synthetic oligonucleotide
uaaugugcgauacuucuau

SEQ ID NO: 3268580 - RNA, 19 nt, Artificial Sequence
  Description of Artificial Sequence: Synthetic oligonucleotide
ucuacgcauggccucaucc

SEQ ID NO: 3268581 - RNA, 19 nt, Artificial Sequence
  Description of Artificial Sequence: Synthetic oligonucleotide
uuuggggacauucacuuua

SEQ ID NO: 3268582 - RNA, 19 nt, Artificial Sequence
  Description of Artificial Sequence: Synthetic oligonucleotide
augugcgauacuucuauag

SEQ ID NO: 3268583 - RNA, 19 nt, Artificial Sequence
  Description of Artificial Sequence: Synthetic oligonucleotide
aagaaucuguccuuucuaa

SEQ ID NO: 3268584 - RNA, 19 nt, Artificial Sequence
  Description of Artificial Sequence: Synthetic oligonucleotide
gguucaaaagcauuauuug

SEQ ID NO: 3268585 - RNA, 19 nt, Artificial Sequence
  Description of Artificial Sequence: Synthetic oligonucleotide
ucuagaagggaauccuggc

SEQ ID NO: 3268586 - RNA, 19 nt, Artificial Sequence
  Description of Artificial Sequence: Synthetic oligonucleotide
uuugaagagccaacaucag

SEQ ID NO: 3268587 - RNA, 19 nt, Artificial Sequence
  Description of Artificial Sequence: Synthetic oligonucleotide
acuucuauagaugucugug

SEQ ID NO: 3268588 - RNA, 19 nt, Artificial Sequence
  Description of Artificial Sequence: Synthetic oligonucleotide
aaugagagugaucgucucu

SEQ ID NO: 3268589 - RNA, 19 nt, Artificial Sequence
  Description of Artificial Sequence: Synthetic oligonucleotide
guucaaaagcauuauuuga

SEQ ID NO: 3268590 - RNA, 19 nt, Artificial Sequence
  Description of Artificial Sequence: Synthetic oligonucleotide
ucucugaaauucuuugaca

SEQ ID NO: 3268591 - RNA, 19 nt, Artificial Sequence
  Description of Artificial Sequence: Synthetic oligonucleotide
auacuuccaaggccguucc

SEQ ID NO: 3268592 - RNA, 19 nt, Artificial Sequence
  Description of Artificial Sequence: Synthetic oligonucleotide
agagugaucgucucuagaa

SEQ ID NO: 3268593 - RNA, 19 nt, Artificial Sequence
  Description of Artificial Sequence: Synthetic oligonucleotide
uuccaguccacuugaaucu

SEQ ID NO: 3268594 - RNA, 19 nt, Artificial Sequence
  Description of Artificial Sequence: Synthetic oligonucleotide
uaaaaccaucaacauugcc

SEQ ID NO: 3268595 - RNA, 19 nt, Artificial Sequence
  Description of Artificial Sequence: Synthetic oligonucleotide
aucgucuuggagcaaagca

SEQ ID NO: 3268596 - RNA, 19 nt, Artificial Sequence
  Description of Artificial Sequence: Synthetic oligonucleotide
uccacuugaaucucaauuu

SEQ ID NO: 3268597 - RNA, 19 nt, Artificial Sequence
  Description of Artificial Sequence: Synthetic oligonucleotide
gaaaauacucagaaucuuc

SEQ ID NO: 3268598 - RNA, 19 nt, Artificial Sequence
  Description of Artificial Sequence: Synthetic oligonucleotide
aaguucuuccucauucuuc

SEQ ID NO: 3268599 - RNA, 19 nt, Artificial Sequence
  Description of Artificial Sequence: Synthetic oligonucleotide
uucacuuuaaccgggaguu

SEQ ID NO: 3268600 - RNA, 19 nt, Artificial Sequence
  Description of Artificial Sequence: Synthetic oligonucleotide
agaccaagaggaucuuuac

SEQ ID NO: 3268601 - RNA, 19 nt, Artificial Sequence
  Description of Artificial Sequence: Synthetic oligonucleotide
aguuucuguauucuccuca

SEQ ID NO: 3268602 - RNA, 19 nt, Artificial Sequence
  Description of Artificial Sequence: Synthetic oligonucleotide
cuuucuaauguugucauca

SEQ ID NO: 3268603 - RNA, 19 nt, Artificial Sequence
  Description of Artificial Sequence: Synthetic oligonucleotide
uuggagcaaagcaaaguac

SEQ ID NO: 3268604 - RNA, 19 nt, Artificial Sequence
  Description of Artificial Sequence: Synthetic oligonucleotide
uucuucagauagaguauag

SEQ ID NO: 3268605 - RNA, 19 nt, Artificial Sequence
  Description of Artificial Sequence: Synthetic oligonucleotide
aauuaauacaucaacuugc

SEQ ID NO: 3268606 - RNA, 19 nt, Artificial Sequence
  Description of Artificial Sequence: Synthetic oligonucleotide
uaaacuugagguaaggugg

SEQ ID NO: 3268607 - RNA, 19 nt, Artificial Sequence
  Description of Artificial Sequence: Synthetic oligonucleotide
ucaacuugcaguuuuacag

SEQ ID NO: 3268608 - RNA, 19 nt, Artificial Sequence
  Description of Artificial Sequence: Synthetic oligonucleotide
uauuucauaauaagaaaag

SEQ ID NO: 3268609 - RNA, 19 nt, Artificial Sequence
  Description of Artificial Sequence: Synthetic oligonucleotide
aauggaaggaaucccacuc

SEQ ID NO: 3268610 - RNA, 19 nt, Artificial Sequence
  Description of Artificial Sequence: Synthetic oligonucleotide
uaauacaucaacuugcagu

SEQ ID NO: 3268611 - RNA, 19 nt, Artificial Sequence
  Description of Artificial Sequence: Synthetic oligonucleotide
uuaaacuugagguaaggug

SEQ ID NO: 3268612 - RNA, 19 nt, Artificial Sequence
  Description of Artificial Sequence: Synthetic oligonucleotide
uuauuucauaauaagaaaa

SEQ ID NO: 3268613 - RNA, 19 nt, Artificial Sequence
  Description of Artificial Sequence: Synthetic oligonucleotide
uuauaacuauuaaauggcg

SEQ ID NO: 3268614 - RNA, 19 nt, Artificial Sequence
  Description of Artificial Sequence: Synthetic oligonucleotide
uuuuacagggaccaaaaga

SEQ ID NO: 3268615 - RNA, 19 nt, Artificial Sequence
  Description of Artificial Sequence: Synthetic oligonucleotide
aaagcuucugaggagaggg

SEQ ID NO: 3268616 - RNA, 19 nt, Artificial Sequence
  Description of Artificial Sequence: Synthetic oligonucleotide
ugagcaaguuccuucaugg

SEQ ID NO: 3268617 - RNA, 19 nt, Artificial Sequence
  Description of Artificial Sequence: Synthetic oligonucleotide
gacuuguagacucugaagc

SEQ ID NO: 3268618 - RNA, 19 nt, Artificial Sequence
  Description of Artificial Sequence: Synthetic oligonucleotide
agucuaacacaucuugugc

SEQ ID NO: 3268619 - RNA, 19 nt, Artificial Sequence
  Description of Artificial Sequence: Synthetic oligonucleotide
uuuauuaaacuugagguaa

SEQ ID NO: 3268620 - RNA, 19 nt, Artificial Sequence
  Description of Artificial Sequence: Synthetic oligonucleotide
uguucuuuauuuauaauua

SEQ ID NO: 3268621 - RNA, 19 nt, Artificial Sequence
  Description of Artificial Sequence: Synthetic oligonucleotide
uuagcucuaaggcaggaag

SEQ ID NO: 3268622 - RNA, 19 nt, Artificial Sequence
  Description of Artificial Sequence: Synthetic oligonucleotide
gauagaggacccuagagac

SEQ ID NO: 3268623 - RNA, 19 nt, Artificial Sequence
  Description of Artificial Sequence: Synthetic oligonucleotide
ucuuucuccccuuucacgg

SEQ ID NO: 3268624 - RNA, 19 nt, Artificial Sequence
  Description of Artificial Sequence: Synthetic oligonucleotide
aagacugacuccgacagac

SEQ ID NO: 3268625 - RNA, 19 nt, Artificial Sequence
  Description of Artificial Sequence: Synthetic oligonucleotide
guuauaacuauuaaauggc

SEQ ID NO: 3268626 - RNA, 19 nt, Artificial Sequence
  Description of Artificial Sequence: Synthetic oligonucleotide
aacauaggucaucagccac

SEQ ID NO: 3268627 - RNA, 19 nt, Artificial Sequence
  Description of Artificial Sequence: Synthetic oligonucleotide
cuugaaacuggauagagga

SEQ ID NO: 3268628 - RNA, 19 nt, Artificial Sequence
  Description of Artificial Sequence: Synthetic oligonucleotide
uauaacuauuaaauggcgu

SEQ ID NO: 3268629 - RNA, 19 nt, Artificial Sequence
  Description of Artificial Sequence: Synthetic oligonucleotide
auugacuuggucugauccc

SEQ ID NO: 3268630 - RNA, 19 nt, Artificial Sequence
  Description of Artificial Sequence: Synthetic oligonucleotide
uuguacuucucauagacaa

SEQ ID NO: 3268631 - RNA, 19 nt, Artificial Sequence
  Description of Artificial Sequence: Synthetic oligonucleotide
ucuaucaccuguaaguuau

SEQ ID NO: 3268632 - RNA, 19 nt, Artificial Sequence
  Description of Artificial Sequence: Synthetic oligonucleotide
cgaaugaugaguuugaggg

SEQ ID NO: 3268633 - RNA, 19 nt, Artificial Sequence
  Description of Artificial Sequence: Synthetic oligonucleotide
uguaaguuauuuagaguug

SEQ ID NO: 3268634 - RNA, 19 nt, Artificial Sequence
  Description of Artificial Sequence: Synthetic oligonucleotide
ucucuagaagagcagcagg

SEQ ID NO: 3268635 - RNA, 19 nt, Artificial Sequence
  Description of Artificial Sequence: Synthetic oligonucleotide
ugauuaauucuauuaauuu

SEQ ID NO: 3268636 - RNA, 19 nt, Artificial Sequence
  Description of Artificial Sequence: Synthetic oligonucleotide
uuaaguuuauagcagugua

SEQ ID NO: 3268637 - RNA, 19 nt, Artificial Sequence
  Description of Artificial Sequence: Synthetic oligonucleotide
aucauuauuuccuagcuua

SEQ ID NO: 3268638 - RNA, 19 nt, Artificial Sequence
  Description of Artificial Sequence: Synthetic oligonucleotide
auaaaugggaacugcauaa

SEQ ID NO: 3268639 - RNA, 19 nt, Artificial Sequence
  Description of Artificial Sequence: Synthetic oligonucleotide
uaaauggcguuuuaguaac

SEQ ID NO: 3268640 - RNA, 19 nt, Artificial Sequence
  Description of Artificial Sequence: Synthetic oligonucleotide
uuuggguucuaagagacca

SEQ ID NO: 3268641 - RNA, 19 nt, Artificial Sequence
  Description of Artificial Sequence: Synthetic oligonucleotide
ugguaucccagaccaaugg

SEQ ID NO: 3268642 - RNA, 19 nt, Artificial Sequence
  Description of Artificial Sequence: Synthetic oligonucleotide
gacuccgacagacugacug

SEQ ID NO: 3268643 - RNA, 19 nt, Artificial Sequence
  Description of Artificial Sequence: Synthetic oligonucleotide
uuucauuagggagaguggc

SEQ ID NO: 3268644 - RNA, 19 nt, Artificial Sequence
  Description of Artificial Sequence: Synthetic oligonucleotide
agaagcacauucuggaaug

SEQ ID NO: 3268645 - RNA, 19 nt, Artificial Sequence
  Description of Artificial Sequence: Synthetic oligonucleotide
cugaaaacaagcagcucgg

SEQ ID NO: 3268646 - RNA, 19 nt, Artificial Sequence
  Description of Artificial Sequence: Synthetic oligonucleotide
uaaugaucaaucugcgucu

SEQ ID NO: 3268647 - RNA, 19 nt, Artificial Sequence
  Description of Artificial Sequence: Synthetic oligonucleotide
aagaacaaacaacuuggaa

SEQ ID NO: 3268648 - RNA, 19 nt, Artificial Sequence
  Description of Artificial Sequence: Synthetic oligonucleotide
auuuagaguugacaguucu

SEQ ID NO: 3268649 - RNA, 19 nt, Artificial Sequence
  Description of Artificial Sequence: Synthetic oligonucleotide
acgaaugaugaguuugagg

SEQ ID NO: 3268650 - RNA, 19 nt, Artificial Sequence
  Description of Artificial Sequence: Synthetic oligonucleotide
uuaauacaucaacuugcag

SEQ ID NO: 3268651 - RNA, 19 nt, Artificial Sequence
  Description of Artificial Sequence: Synthetic oligonucleotide
aaacaacuuggaaccaggc

SEQ ID NO: 3268652 - RNA, 19 nt, Artificial Sequence
  Description of Artificial Sequence: Synthetic oligonucleotide
ucucagauggcauucugga

SEQ ID NO: 3268653 - RNA, 19 nt, Artificial Sequence
  Description of Artificial Sequence: Synthetic oligonucleotide
uucuuucuccccuuucacg

SEQ ID NO: 3268654 - RNA, 19 nt, Artificial Sequence
  Description of Artificial Sequence: Synthetic oligonucleotide
cuuucauuagggagagugg

SEQ ID NO: 3268655 - RNA, 19 nt, Artificial Sequence
  Description of Artificial Sequence: Synthetic oligonucleotide
uucauguaguuguggaaag

SEQ ID NO: 3268656 - RNA, 19 nt, Artificial Sequence
  Description of Artificial Sequence: Synthetic oligonucleotide
auuucauaauaagaaaagu

SEQ ID NO: 3268657 - RNA, 19 nt, Artificial Sequence
  Description of Artificial Sequence: Synthetic oligonucleotide
ugggacgcugaaaacaagc

SEQ ID NO: 3268658 - RNA, 19 nt, Artificial Sequence
  Description of Artificial Sequence: Synthetic oligonucleotide
ugcauaagaguccuugaaa

SEQ ID NO: 3268659 - RNA, 19 nt, Artificial Sequence
  Description of Artificial Sequence: Synthetic oligonucleotide
ggagagaagagccaggaug

SEQ ID NO: 3268660 - RNA, 19 nt, Artificial Sequence
  Description of Artificial Sequence: Synthetic oligonucleotide
gaaugacagacuuguagac

SEQ ID NO: 3268661 - RNA, 19 nt, Artificial Sequence
  Description of Artificial Sequence: Synthetic oligonucleotide
aaaacagcaccaacauagg

SEQ ID NO: 3268662 - RNA, 19 nt, Artificial Sequence
  Description of Artificial Sequence: Synthetic oligonucleotide
uguucuugugccucauucc

SEQ ID NO: 3268663 - RNA, 19 nt, Artificial Sequence
  Description of Artificial Sequence: Synthetic oligonucleotide
aaacagcaccaacauaggu

SEQ ID NO: 3268664 - RNA, 19 nt, Artificial Sequence
  Description of Artificial Sequence: Synthetic oligonucleotide
uagacaauugggacgcuga

SEQ ID NO: 3268665 - RNA, 19 nt, Artificial Sequence
  Description of Artificial Sequence: Synthetic oligonucleotide
aacccagucuucuucacau

SEQ ID NO: 3268666 - RNA, 19 nt, Artificial Sequence
  Description of Artificial Sequence: Synthetic oligonucleotide
aaacuugagguaagguggg

SEQ ID NO: 3268667 - RNA, 19 nt, Artificial Sequence
  Description of Artificial Sequence: Synthetic oligonucleotide
gaaugaugaguuugagggc

SEQ ID NO: 3268668 - RNA, 19 nt, Artificial Sequence
  Description of Artificial Sequence: Synthetic oligonucleotide
aauggcguuuuaguaacug

SEQ ID NO: 3268669 - RNA, 19 nt, Artificial Sequence
  Description of Artificial Sequence: Synthetic oligonucleotide
uucaugguacaagugacga

SEQ ID NO: 3268670 - RNA, 19 nt, Artificial Sequence
  Description of Artificial Sequence: Synthetic oligonucleotide
gauugacggggacugagug

SEQ ID NO: 3268671 - RNA, 19 nt, Artificial Sequence
  Description of Artificial Sequence: Synthetic oligonucleotide
aagacaaacccagucuucu

SEQ ID NO: 3268672 - RNA, 19 nt, Artificial Sequence
  Description of Artificial Sequence: Synthetic oligonucleotide
aaucagaagggugauccca

SEQ ID NO: 3268673 - RNA, 19 nt, Artificial Sequence
  Description of Artificial Sequence: Synthetic oligonucleotide
cagacugacugacucaacc

SEQ ID NO: 3268674 - RNA, 19 nt, Artificial Sequence
  Description of Artificial Sequence: Synthetic oligonucleotide
auugacggggacugagugg

SEQ ID NO: 3268675 - RNA, 19 nt, Artificial Sequence
  Description of Artificial Sequence: Synthetic oligonucleotide
gaaaagagggagaagcaca

SEQ ID NO: 3268676 - RNA, 19 nt, Artificial Sequence
  Description of Artificial Sequence: Synthetic oligonucleotide
gacaauucauaaguuaauc

SEQ ID NO: 3268677 - RNA, 19 nt, Artificial Sequence
  Description of Artificial Sequence: Synthetic oligonucleotide
accaaaagagcuccuugag

SEQ ID NO: 3268678 - RNA, 19 nt, Artificial Sequence
  Description of Artificial Sequence: Synthetic oligonucleotide
guaauauccacauccaggu

SEQ ID NO: 3268679 - RNA, 19 nt, Artificial Sequence
  Description of Artificial Sequence: Synthetic oligonucleotide
ucagucuaacacaucuugu

SEQ ID NO: 3268680 - RNA, 19 nt, Artificial Sequence
  Description of Artificial Sequence: Synthetic oligonucleotide
ucuuuucaacaauugacuu

SEQ ID NO: 3268681 - RNA, 19 nt, Artificial Sequence
  Description of Artificial Sequence: Synthetic oligonucleotide
acaggguuacaauaacuca

SEQ ID NO: 3268682 - RNA, 19 nt, Artificial Sequence
  Description of Artificial Sequence: Synthetic oligonucleotide
uucaacaauugacuugguc

SEQ ID NO: 3268683 - RNA, 19 nt, Artificial Sequence
  Description of Artificial Sequence: Synthetic oligonucleotide
gaaaacaagcagcucggca

SEQ ID NO: 3268684 - RNA, 19 nt, Artificial Sequence
  Description of Artificial Sequence: Synthetic oligonucleotide
ucuguugacaugcaccauu

SEQ ID NO: 3268685 - RNA, 19 nt, Artificial Sequence
  Description of Artificial Sequence: Synthetic oligonucleotide
auggcuuggacacugcccu

SEQ ID NO: 3268686 - RNA, 19 nt, Artificial Sequence
  Description of Artificial Sequence: Synthetic oligonucleotide
acuuguagacucugaagcu

SEQ ID NO: 3268687 - RNA, 19 nt, Artificial Sequence
  Description of Artificial Sequence: Synthetic oligonucleotide
gacauuucucucuucuuuc

SEQ ID NO: 3268688 - RNA, 19 nt, Artificial Sequence
  Description of Artificial Sequence: Synthetic oligonucleotide
gacugacuccgacagacug

SEQ ID NO: 3268689 - RNA, 19 nt, Artificial Sequence
  Description of Artificial Sequence: Synthetic oligonucleotide
uaaaugggaacugcauaag

SEQ ID NO: 3268690 - RNA, 19 nt, Artificial Sequence
  Description of Artificial Sequence: Synthetic oligonucleotide
agaaaaucagaucgccgca

SEQ ID NO: 3268691 - RNA, 19 nt, Artificial Sequence
  Description of Artificial Sequence: Synthetic oligonucleotide
gguaaagggaaaagcaggg

SEQ ID NO: 3268692 - RNA, 19 nt, Artificial Sequence
  Description of Artificial Sequence: Synthetic oligonucleotide
gacucugaagcugauggug

SEQ ID NO: 3268693 - RNA, 19 nt, Artificial Sequence
  Description of Artificial Sequence: Synthetic oligonucleotide
aggggacgcagaauaaucc

SEQ ID NO: 3268694 - RNA, 19 nt, Artificial Sequence
  Description of Artificial Sequence: Synthetic oligonucleotide
uggcugggagcccacaugc

SEQ ID NO: 3268695 - RNA, 19 nt, Artificial Sequence
  Description of Artificial Sequence: Synthetic oligonucleotide
gggaauuaccucuaucacc

SEQ ID NO: 3268696 - RNA, 19 nt, Artificial Sequence
  Description of Artificial Sequence: Synthetic oligonucleotide
auaauccagcagcuggcuc

SEQ ID NO: 3268697 - RNA, 19 nt, Artificial Sequence
  Description of Artificial Sequence: Synthetic oligonucleotide
aaacccagucuucuucaca

SEQ ID NO: 3268698 - RNA, 19 nt, Artificial Sequence
  Description of Artificial Sequence: Synthetic oligonucleotide
ucugaucccgggcaauccc

SEQ ID NO: 3268699 - RNA, 19 nt, Artificial Sequence
  Description of Artificial Sequence: Synthetic oligonucleotide
agcagcaggaagaugacug

SEQ ID NO: 3268700 - RNA, 19 nt, Artificial Sequence
  Description of Artificial Sequence: Synthetic oligonucleotide
cuguaaguuauuuagaguu

SEQ ID NO: 3268701 - RNA, 19 nt, Artificial Sequence
  Description of Artificial Sequence: Synthetic oligonucleotide
uaugcugcacgcacagaca

SEQ ID NO: 3268702 - RNA, 19 nt, Artificial Sequence
  Description of Artificial Sequence: Synthetic oligonucleotide
guaaagggaaaagcagggg

SEQ ID NO: 3268703 - RNA, 19 nt, Artificial Sequence
  Description of Artificial Sequence: Synthetic oligonucleotide
gaccaaaagagcuccuuga

SEQ ID NO: 3268704 - RNA, 19 nt, Artificial Sequence
  Description of Artificial Sequence: Synthetic oligonucleotide
guuuuacagggaccaaaag

SEQ ID NO: 3268705 - RNA, 19 nt, Artificial Sequence
  Description of Artificial Sequence: Synthetic oligonucleotide
aaucuguuuuccuuaaugg

SEQ ID NO: 3268706 - RNA, 19 nt, Artificial Sequence
  Description of Artificial Sequence: Synthetic oligonucleotide
uuuagugacauuauuccag

SEQ ID NO: 3268707 - RNA, 19 nt, Artificial Sequence
  Description of Artificial Sequence: Synthetic oligonucleotide
ucugacaacagccccaucg

SEQ ID NO: 3268708 - RNA, 19 nt, Artificial Sequence
  Description of Artificial Sequence: Synthetic oligonucleotide
uaaaauuucugccaccugc

SEQ ID NO: 3268709 - RNA, 19 nt, Artificial Sequence
  Description of Artificial Sequence: Synthetic oligonucleotide
aauggauucuuugucacac

SEQ ID NO: 3268710 - RNA, 19 nt, Artificial Sequence
  Description of Artificial Sequence: Synthetic oligonucleotide
guaguuuuaaaauuucugc

SEQ ID NO: 3268711 - RNA, 19 nt, Artificial Sequence
  Description of Artificial Sequence: Synthetic oligonucleotide
uuuauccaaacgaagguca

SEQ ID NO: 3268712 - RNA, 19 nt, Artificial Sequence
  Description of Artificial Sequence: Synthetic oligonucleotide
uaguuuuaaaauuucugcc

SEQ ID NO: 3268713 - RNA, 19 nt, Artificial Sequence
  Description of Artificial Sequence: Synthetic oligonucleotide
uucuuugucacacuguucu

SEQ ID NO: 3268714 - RNA, 19 nt, Artificial Sequence
  Description of Artificial Sequence: Synthetic oligonucleotide
uuuguaaucccacugucac

SEQ ID NO: 3268715 - RNA, 19 nt, Artificial Sequence
  Description of Artificial Sequence: Synthetic oligonucleotide
agggcagucauucugcagc

SEQ ID NO: 3268716 - RNA, 19 nt, Artificial Sequence
  Description of Artificial Sequence: Synthetic oligonucleotide
uuuacuuccugcagugugg

SEQ ID NO: 3268717 - RNA, 19 nt, Artificial Sequence
  Description of Artificial Sequence: Synthetic oligonucleotide
aguuuuaaaauuucugcca

SEQ ID NO: 3268718 - RNA, 19 nt, Artificial Sequence
  Description of Artificial Sequence: Synthetic oligonucleotide
guagacuuuucucugagag

SEQ ID NO: 3268719 - RNA, 19 nt, Artificial Sequence
  Description of Artificial Sequence: Synthetic oligonucleotide
ugagucacugccuuugggg

SEQ ID NO: 3268720 - RNA, 19 nt, Artificial Sequence
  Description of Artificial Sequence: Synthetic oligonucleotide
uuuuacuuccugcagugug

SEQ ID NO: 3268721 - RNA, 19 nt, Artificial Sequence
  Description of Artificial Sequence: Synthetic oligonucleotide
uguucucugagucacugcc

SEQ ID NO: 3268722 - RNA, 19 nt, Artificial Sequence
  Description of Artificial Sequence: Synthetic oligonucleotide
uauuuggggagguacuugg

SEQ ID NO: 3268723 - RNA, 19 nt, Artificial Sequence
  Description of Artificial Sequence: Synthetic oligonucleotide
ucugagaguaguuuuaaaa

SEQ ID NO: 3268724 - RNA, 19 nt, Artificial Sequence
  Description of Artificial Sequence: Synthetic oligonucleotide
gaaucuguuuuccuuaaug

SEQ ID NO: 3268725 - RNA, 19 nt, Artificial Sequence
  Description of Artificial Sequence: Synthetic oligonucleotide
ugcagugugguuuguaagg

SEQ ID NO: 3268726 - RNA, 19 nt, Artificial Sequence
  Description of Artificial Sequence: Synthetic oligonucleotide
aaaggugcuuggcaucagc

SEQ ID NO: 3268727 - RNA, 19 nt, Artificial Sequence
  Description of Artificial Sequence: Synthetic oligonucleotide
ucuuuauccaaacgaaggu

SEQ ID NO: 3268728 - RNA, 19 nt, Artificial Sequence
  Description of Artificial Sequence: Synthetic oligonucleotide
cuuggaguggcauuugggg

SEQ ID NO: 3268729 - RNA, 19 nt, Artificial Sequence
  Description of Artificial Sequence: Synthetic oligonucleotide
ucuguuuuccuuaauggau

SEQ ID NO: 3268730 - RNA, 19 nt, Artificial Sequence
  Description of Artificial Sequence: Synthetic oligonucleotide
uuuaaaauuucugccaccu

SEQ ID NO: 3268731 - RNA, 19 nt, Artificial Sequence
  Description of Artificial Sequence: Synthetic oligonucleotide
uuggcaucagccuggauag

SEQ ID NO: 3268732 - RNA, 19 nt, Artificial Sequence
  Description of Artificial Sequence: Synthetic oligonucleotide
aaaauauccugacauggua

SEQ ID NO: 3268733 - RNA, 19 nt, Artificial Sequence
  Description of Artificial Sequence: Synthetic oligonucleotide
uguauguccucuuugaguu

SEQ ID NO: 3268734 - RNA, 19 nt, Artificial Sequence
  Description of Artificial Sequence: Synthetic oligonucleotide
uucuagaggacuccgggcc

SEQ ID NO: 3268735 - RNA, 19 nt, Artificial Sequence
  Description of Artificial Sequence: Synthetic oligonucleotide
ucauucugcagcucaacag

SEQ ID NO: 3268736 - RNA, 19 nt, Artificial Sequence
  Description of Artificial Sequence: Synthetic oligonucleotide
uguuuuacuuccugcagug

SEQ ID NO: 3268737 - RNA, 19 nt, Artificial Sequence
  Description of Artificial Sequence: Synthetic oligonucleotide
agugacauuauuccagucu

SEQ ID NO: 3268738 - RNA, 19 nt, Artificial Sequence
  Description of Artificial Sequence: Synthetic oligonucleotide
uuuuguaaucccacuguca

SEQ ID NO: 3268739 - RNA, 19 nt, Artificial Sequence
  Description of Artificial Sequence: Synthetic oligonucleotide
gucuuuauccaaacgaagg

SEQ ID NO: 3268740 - RNA, 19 nt, Artificial Sequence
  Description of Artificial Sequence: Synthetic oligonucleotide
ugucacaagaaucuguuuu

SEQ ID NO: 3268741 - RNA, 19 nt, Artificial Sequence
  Description of Artificial Sequence: Synthetic oligonucleotide
acaacagccccaucgacuc

SEQ ID NO: 3268742 - RNA, 19 nt, Artificial Sequence
  Description of Artificial Sequence: Synthetic oligonucleotide
guuuuaaaauuucugccac

SEQ ID NO: 3268743 - RNA, 19 nt, Artificial Sequence
  Description of Artificial Sequence: Synthetic oligonucleotide
uuaauggauucuuugucac

SEQ ID NO: 3268744 - RNA, 19 nt, Artificial Sequence
  Description of Artificial Sequence: Synthetic oligonucleotide
uuuuaaaauuucugccacc

SEQ ID NO: 3268745 - RNA, 19 nt, Artificial Sequence
  Description of Artificial Sequence: Synthetic oligonucleotide
uuugaguucguguuuuacu

SEQ ID NO: 3268746 - RNA, 19 nt, Artificial Sequence
  Description of Artificial Sequence: Synthetic oligonucleotide
uuugggguuuuggagaggg

SEQ ID NO: 3268747 - RNA, 19 nt, Artificial Sequence
  Description of Artificial Sequence: Synthetic oligonucleotide
agggcuguguucuagagga

SEQ ID NO: 3268748 - RNA, 19 nt, Artificial Sequence
  Description of Artificial Sequence: Synthetic oligonucleotide
aguaguuuuaaaauuucug

SEQ ID NO: 3268749 - RNA, 19 nt, Artificial Sequence
  Description of Artificial Sequence: Synthetic oligonucleotide
uauguccucuuugaguucg

SEQ ID NO: 3268750 - RNA, 19 nt, Artificial Sequence
  Description of Artificial Sequence: Synthetic oligonucleotide
uuuggggagguacuuggag

SEQ ID NO: 3268751 - RNA, 19 nt, Artificial Sequence
  Description of Artificial Sequence: Synthetic oligonucleotide
cauucugcagcucaacagc

SEQ ID NO: 3268752 - RNA, 19 nt, Artificial Sequence
  Description of Artificial Sequence: Synthetic oligonucleotide
ugucacacuguucucugag

SEQ ID NO: 3268753 - RNA, 19 nt, Artificial Sequence
  Description of Artificial Sequence: Synthetic oligonucleotide
gaguucguguuuuacuucc

SEQ ID NO: 3268754 - RNA, 19 nt, Artificial Sequence
  Description of Artificial Sequence: Synthetic oligonucleotide
agcuuuagugacauuauuc

SEQ ID NO: 3268755 - RNA, 19 nt, Artificial Sequence
  Description of Artificial Sequence: Synthetic oligonucleotide
uuguaaggccugcucaggg

SEQ ID NO: 3268756 - RNA, 19 nt, Artificial Sequence
  Description of Artificial Sequence: Synthetic oligonucleotide
ugagaguaguuuuaaaauu

SEQ ID NO: 3268757 - RNA, 19 nt, Artificial Sequence
  Description of Artificial Sequence: Synthetic oligonucleotide
uggauucuuugucacacug

SEQ ID NO: 3268758 - RNA, 19 nt, Artificial Sequence
  Description of Artificial Sequence: Synthetic oligonucleotide
ugacaugguauuuggggag

SEQ ID NO: 3268759 - RNA, 19 nt, Artificial Sequence
  Description of Artificial Sequence: Synthetic oligonucleotide
uguaaucccacugucacaa

SEQ ID NO: 3268760 - RNA, 19 nt, Artificial Sequence
  Description of Artificial Sequence: Synthetic oligonucleotide
gcuuuagugacauuauucc

SEQ ID NO: 3268761 - RNA, 19 nt, Artificial Sequence
  Description of Artificial Sequence: Synthetic oligonucleotide
gacauuauuccagucuucc

SEQ ID NO: 3268762 - RNA, 19 nt, Artificial Sequence
  Description of Artificial Sequence: Synthetic oligonucleotide
uuccuuaauggauucuuug

SEQ ID NO: 3268763 - RNA, 19 nt, Artificial Sequence
  Description of Artificial Sequence: Synthetic oligonucleotide
aauauccugacaugguauu

SEQ ID NO: 3268764 - RNA, 19 nt, Artificial Sequence
  Description of Artificial Sequence: Synthetic oligonucleotide
cuuaauggauucuuuguca

SEQ ID NO: 3268765 - RNA, 19 nt, Artificial Sequence
  Description of Artificial Sequence: Synthetic oligonucleotide
uccuuaauggauucuuugu

SEQ ID NO: 3268766 - RNA, 19 nt, Artificial Sequence
  Description of Artificial Sequence: Synthetic oligonucleotide
uuagugacauuauuccagu

SEQ ID NO: 3268767 - RNA, 19 nt, Artificial Sequence
  Description of Artificial Sequence: Synthetic oligonucleotide
uuccuuuucuccucgugag

SEQ ID NO: 3268768 - RNA, 19 nt, Artificial Sequence
  Description of Artificial Sequence: Synthetic oligonucleotide
uuaaaauuucugccaccug

SEQ ID NO: 3268769 - RNA, 19 nt, Artificial Sequence
  Description of Artificial Sequence: Synthetic oligonucleotide
augguauuuggggagguac

SEQ ID NO: 3268770 - RNA, 19 nt, Artificial Sequence
  Description of Artificial Sequence: Synthetic oligonucleotide
aucgacucagcuuuaguga

SEQ ID NO: 3268771 - RNA, 19 nt, Artificial Sequence
  Description of Artificial Sequence: Synthetic oligonucleotide
aucuguuuuccuuaaugga

SEQ ID NO: 3268772 - RNA, 19 nt, Artificial Sequence
  Description of Artificial Sequence: Synthetic oligonucleotide
uaaucccacugucacaaga

SEQ ID NO: 3268773 - RNA, 19 nt, Artificial Sequence
  Description of Artificial Sequence: Synthetic oligonucleotide
uucguguuuuacuuccugc

SEQ ID NO: 3268774 - RNA, 19 nt, Artificial Sequence
  Description of Artificial Sequence: Synthetic oligonucleotide
uuugucacacuguucucug

SEQ ID NO: 3268775 - RNA, 19 nt, Artificial Sequence
  Description of Artificial Sequence: Synthetic oligonucleotide
aauuucugccaccugcuuu

SEQ ID NO: 3268776 - RNA, 19 nt, Artificial Sequence
  Description of Artificial Sequence: Synthetic oligonucleotide
guuuguaaggccugcucag

SEQ ID NO: 3268777 - RNA, 19 nt, Artificial Sequence
  Description of Artificial Sequence: Synthetic oligonucleotide
aaaauuucugccaccugcu

SEQ ID NO: 3268778 - RNA, 19 nt, Artificial Sequence
  Description of Artificial Sequence: Synthetic oligonucleotide
uuuuccagggcagucauuc

SEQ ID NO: 3268779 - RNA, 19 nt, Artificial Sequence
  Description of Artificial Sequence: Synthetic oligonucleotide
ucguguuuuacuuccugca

SEQ ID NO: 3268780 - RNA, 19 nt, Artificial Sequence
  Description of Artificial Sequence: Synthetic oligonucleotide
ucugcagcucaacagcugu

SEQ ID NO: 3268781 - RNA, 19 nt, Artificial Sequence
  Description of Artificial Sequence: Synthetic oligonucleotide
agaguaguuuuaaaauuuc

SEQ ID NO: 3268782 - RNA, 19 nt, Artificial Sequence
  Description of Artificial Sequence: Synthetic oligonucleotide
uacuuggaguggcauuugg

SEQ ID NO: 3268783 - RNA, 19 nt, Artificial Sequence
  Description of Artificial Sequence: Synthetic oligonucleotide
uugaguucguguuuuacuu

SEQ ID NO: 3268784 - RNA, 19 nt, Artificial Sequence
  Description of Artificial Sequence: Synthetic oligonucleotide
uguguucuagaggacuccg

SEQ ID NO: 3268785 - RNA, 19 nt, Artificial Sequence
  Description of Artificial Sequence: Synthetic oligonucleotide
acaagaaucuguuuuccuu

SEQ ID NO: 3268786 - RNA, 19 nt, Artificial Sequence
  Description of Artificial Sequence: Synthetic oligonucleotide
auccugacaugguauuugg

SEQ ID NO: 3268787 - RNA, 19 nt, Artificial Sequence
  Description of Artificial Sequence: Synthetic oligonucleotide
aaauauccugacaugguau

SEQ ID NO: 3268788 - RNA, 19 nt, Artificial Sequence
  Description of Artificial Sequence: Synthetic oligonucleotide
uagggcuguguucuagagg

SEQ ID NO: 3268789 - RNA, 19 nt, Artificial Sequence
  Description of Artificial Sequence: Synthetic oligonucleotide
ucacacuguucucugaguc

SEQ ID NO: 3268790 - RNA, 19 nt, Artificial Sequence
  Description of Artificial Sequence: Synthetic oligonucleotide
ccugacaugguauuugggg

SEQ ID NO: 3268791 - RNA, 19 nt, Artificial Sequence
  Description of Artificial Sequence: Synthetic oligonucleotide
acacuguucucugagucac

SEQ ID NO: 3268792 - RNA, 19 nt, Artificial Sequence
  Description of Artificial Sequence: Synthetic oligonucleotide
auucaggugacucgggccu

SEQ ID NO: 3268793 - RNA, 19 nt, Artificial Sequence
  Description of Artificial Sequence: Synthetic oligonucleotide
auuccagucuuccuuuucu

SEQ ID NO: 3268794 - RNA, 19 nt, Artificial Sequence
  Description of Artificial Sequence: Synthetic oligonucleotide
ucugccaccugcuuuucca

SEQ ID NO: 3268795 - RNA, 19 nt, Artificial Sequence
  Description of Artificial Sequence: Synthetic oligonucleotide
uuuguaaggccugcucagg

SEQ ID NO: 3268796 - RNA, 19 nt, Artificial Sequence
  Description of Artificial Sequence: Synthetic oligonucleotide
uggggagguacuuggagug

SEQ ID NO: 3268797 - RNA, 19 nt, Artificial Sequence
  Description of Artificial Sequence: Synthetic oligonucleotide
accagucuuuauccaaacg

SEQ ID NO: 3268798 - RNA, 19 nt, Artificial Sequence
  Description of Artificial Sequence: Synthetic oligonucleotide
agacuuuucucugagagua

SEQ ID NO: 3268799 - RNA, 19 nt, Artificial Sequence
  Description of Artificial Sequence: Synthetic oligonucleotide
uuauccaaacgaaggucac

SEQ ID NO: 3268800 - RNA, 19 nt, Artificial Sequence
  Description of Artificial Sequence: Synthetic oligonucleotide
uccagggcagucauucugc

SEQ ID NO: 3268801 - RNA, 19 nt, Artificial Sequence
  Description of Artificial Sequence: Synthetic oligonucleotide
uauccugacaugguauuug

SEQ ID NO: 3268802 - RNA, 19 nt, Artificial Sequence
  Description of Artificial Sequence: Synthetic oligonucleotide
uccagucuuccuuuucucc

SEQ ID NO: 3268803 - RNA, 19 nt, Artificial Sequence
  Description of Artificial Sequence: Synthetic oligonucleotide
auuauuccagucuuccuuu

SEQ ID NO: 3268804 - RNA, 19 nt, Artificial Sequence
  Description of Artificial Sequence: Synthetic oligonucleotide
uccucuuugaguucguguu

SEQ ID NO: 3268805 - RNA, 19 nt, Artificial Sequence
  Description of Artificial Sequence: Synthetic oligonucleotide
uagagugugauauagauca

SEQ ID NO: 3268806 - RNA, 19 nt, Artificial Sequence
  Description of Artificial Sequence: Synthetic oligonucleotide
uuuauuacauauuaaguac

SEQ ID NO: 3268807 - RNA, 19 nt, Artificial Sequence
  Description of Artificial Sequence: Synthetic oligonucleotide
uuaaguaccagccugaaau

SEQ ID NO: 3268808 - RNA, 19 nt, Artificial Sequence
  Description of Artificial Sequence: Synthetic oligonucleotide
guuaugaacagacacaaag

SEQ ID NO: 3268809 - RNA, 19 nt, Artificial Sequence
  Description of Artificial Sequence: Synthetic oligonucleotide
uuaugaacagacacaaagg

SEQ ID NO: 3268810 - RNA, 19 nt, Artificial Sequence
  Description of Artificial Sequence: Synthetic oligonucleotide
aauucaaugucuaagucag

SEQ ID NO: 3268811 - RNA, 19 nt, Artificial Sequence
  Description of Artificial Sequence: Synthetic oligonucleotide
aaacuucuugaucaagagc

SEQ ID NO: 3268812 - RNA, 19 nt, Artificial Sequence
  Description of Artificial Sequence: Synthetic oligonucleotide
uugaacugacuucugaugg

SEQ ID NO: 3268813 - RNA, 19 nt, Artificial Sequence
  Description of Artificial Sequence: Synthetic oligonucleotide
auacguuaugaacagacac

SEQ ID NO: 3268814 - RNA, 19 nt, Artificial Sequence
  Description of Artificial Sequence: Synthetic oligonucleotide
ugugauauagaucaagguc

SEQ ID NO: 3268815 - RNA, 19 nt, Artificial Sequence
  Description of Artificial Sequence: Synthetic oligonucleotide
ggguuuaucauucugaggg

SEQ ID NO: 3268816 - RNA, 19 nt, Artificial Sequence
  Description of Artificial Sequence: Synthetic oligonucleotide
gcauaaauggcauugaggg

SEQ ID NO: 3268817 - RNA, 19 nt, Artificial Sequence
  Description of Artificial Sequence: Synthetic oligonucleotide
uuauuacauauuaaguacc

SEQ ID NO: 3268818 - RNA, 19 nt, Artificial Sequence
  Description of Artificial Sequence: Synthetic oligonucleotide
aacuucuugaucaagagcu

SEQ ID NO: 3268819 - RNA, 19 nt, Artificial Sequence
  Description of Artificial Sequence: Synthetic oligonucleotide
uaugaacagacacaaagga

SEQ ID NO: 3268820 - RNA, 19 nt, Artificial Sequence
  Description of Artificial Sequence: Synthetic oligonucleotide
uggaauugcacuuuuggag

SEQ ID NO: 3268821 - RNA, 19 nt, Artificial Sequence
  Description of Artificial Sequence: Synthetic oligonucleotide
uugccgaaaauucauauca

SEQ ID NO: 3268822 - RNA, 19 nt, Artificial Sequence
  Description of Artificial Sequence: Synthetic oligonucleotide
uuucuuuagacacucagaa

SEQ ID NO: 3268823 - RNA, 19 nt, Artificial Sequence
  Description of Artificial Sequence: Synthetic oligonucleotide
uuuaucauucugagggucg

SEQ ID NO: 3268824 - RNA, 19 nt, Artificial Sequence
  Description of Artificial Sequence: Synthetic oligonucleotide
aagcaaguccaccacuugc

SEQ ID NO: 3268825 - RNA, 19 nt, Artificial Sequence
  Description of Artificial Sequence: Synthetic oligonucleotide
uaauucaaugucuaaguca

SEQ ID NO: 3268826 - RNA, 19 nt, Artificial Sequence
  Description of Artificial Sequence: Synthetic oligonucleotide
uucuuaauuucauaguucu

SEQ ID NO: 3268827 - RNA, 19 nt, Artificial Sequence
  Description of Artificial Sequence: Synthetic oligonucleotide
ugucuuuugucucucgagg

SEQ ID NO: 3268828 - RNA, 19 nt, Artificial Sequence
  Description of Artificial Sequence: Synthetic oligonucleotide
ugauacguuaugaacagac

SEQ ID NO: 3268829 - RNA, 19 nt, Artificial Sequence
  Description of Artificial Sequence: Synthetic oligonucleotide
agucucuugccucagcugc

SEQ ID NO: 3268830 - RNA, 19 nt, Artificial Sequence
  Description of Artificial Sequence: Synthetic oligonucleotide
uauuacauauuaaguacca

SEQ ID NO: 3268831 - RNA, 19 nt, Artificial Sequence
  Description of Artificial Sequence: Synthetic oligonucleotide
gugauauagaucaaggucc

SEQ ID NO: 3268832 - RNA, 19 nt, Artificial Sequence
  Description of Artificial Sequence: Synthetic oligonucleotide
cuuaauuucauaguucuug

SEQ ID NO: 3268833 - RNA, 19 nt, Artificial Sequence
  Description of Artificial Sequence: Synthetic oligonucleotide
gcagguuuggcauaaaugg

SEQ ID NO: 3268834 - RNA, 19 nt, Artificial Sequence
  Description of Artificial Sequence: Synthetic oligonucleotide
cuuggaauugcacuuuugg

SEQ ID NO: 3268835 - RNA, 19 nt, Artificial Sequence
  Description of Artificial Sequence: Synthetic oligonucleotide
cauauuaaguaccagccug

SEQ ID NO: 3268836 - RNA, 19 nt, Artificial Sequence
  Description of Artificial Sequence: Synthetic oligonucleotide
uaguucuugaagaagacau

SEQ ID NO: 3268837 - RNA, 19 nt, Artificial Sequence
  Description of Artificial Sequence: Synthetic oligonucleotide
aaguucgugauuccuagug

SEQ ID NO: 3268838 - RNA, 19 nt, Artificial Sequence
  Description of Artificial Sequence: Synthetic oligonucleotide
cuugaagaagacauuggcc

SEQ ID NO: 3268839 - RNA, 19 nt, Artificial Sequence
  Description of Artificial Sequence: Synthetic oligonucleotide
aaguccaccacuugcuggg

SEQ ID NO: 3268840 - RNA, 19 nt, Artificial Sequence
  Description of Artificial Sequence: Synthetic oligonucleotide
acuguguacaccuucacgu

SEQ ID NO: 3268841 - RNA, 19 nt, Artificial Sequence
  Description of Artificial Sequence: Synthetic oligonucleotide
gaaaguucgugauuccuag

SEQ ID NO: 3268842 - RNA, 19 nt, Artificial Sequence
  Description of Artificial Sequence: Synthetic oligonucleotide
uuggaguuucuuuagacac

SEQ ID NO: 3268843 - RNA, 19 nt, Artificial Sequence
  Description of Artificial Sequence: Synthetic oligonucleotide
uuaauuucauaguucuuga

SEQ ID NO: 3268844 - RNA, 19 nt, Artificial Sequence
  Description of Artificial Sequence: Synthetic oligonucleotide
cacucagaaauguagagug

SEQ ID NO: 3268845 - RNA, 19 nt, Artificial Sequence
  Description of Artificial Sequence: Synthetic oligonucleotide
auaaauggcauugagggga

SEQ ID NO: 3268846 - RNA, 19 nt, Artificial Sequence
  Description of Artificial Sequence: Synthetic oligonucleotide
ucuucacaaagcaagucca

SEQ ID NO: 3268847 - RNA, 19 nt, Artificial Sequence
  Description of Artificial Sequence: Synthetic oligonucleotide
aauugccgaaaauucauau

SEQ ID NO: 3268848 - RNA, 19 nt, Artificial Sequence
  Description of Artificial Sequence: Synthetic oligonucleotide
ugaccuuuauuacauauua

SEQ ID NO: 3268849 - RNA, 19 nt, Artificial Sequence
  Description of Artificial Sequence: Synthetic oligonucleotide
uguagauaugcccgcauca

SEQ ID NO: 3268850 - RNA, 19 nt, Artificial Sequence
  Description of Artificial Sequence: Synthetic oligonucleotide
ucauccacaauaucggugu

SEQ ID NO: 3268851 - RNA, 19 nt, Artificial Sequence
  Description of Artificial Sequence: Synthetic oligonucleotide
uacguuaugaacagacaca

SEQ ID NO: 3268852 - RNA, 19 nt, Artificial Sequence
  Description of Artificial Sequence: Synthetic oligonucleotide
caugauacguuaugaacag

SEQ ID NO: 3268853 - RNA, 19 nt, Artificial Sequence
  Description of Artificial Sequence: Synthetic oligonucleotide
uuuggaguuucuuuagaca

SEQ ID NO: 3268854 - RNA, 19 nt, Artificial Sequence
  Description of Artificial Sequence: Synthetic oligonucleotide
agcugcuguagauaugccc

SEQ ID NO: 3268855 - RNA, 19 nt, Artificial Sequence
  Description of Artificial Sequence: Synthetic oligonucleotide
ugcagguuuggcauaaaug

SEQ ID NO: 3268856 - RNA, 19 nt, Artificial Sequence
  Description of Artificial Sequence: Synthetic oligonucleotide
uuuuggaguuucuuuagac

SEQ ID NO: 3268857 - RNA, 19 nt, Artificial Sequence
  Description of Artificial Sequence: Synthetic oligonucleotide
uccaugauacguuaugaac

SEQ ID NO: 3268858 - RNA, 19 nt, Artificial Sequence
  Description of Artificial Sequence: Synthetic oligonucleotide
uguuuuaauucaaugucua

SEQ ID NO: 3268859 - RNA, 19 nt, Artificial Sequence
  Description of Artificial Sequence: Synthetic oligonucleotide
auugccgaaaauucauauc

SEQ ID NO: 3268860 - RNA, 19 nt, Artificial Sequence
  Description of Artificial Sequence: Synthetic oligonucleotide
agguguccggauucgaucc

SEQ ID NO: 3268861 - RNA, 19 nt, Artificial Sequence
  Description of Artificial Sequence: Synthetic oligonucleotide
uucaugaacugucucuuca

SEQ ID NO: 3268862 - RNA, 19 nt, Artificial Sequence
  Description of Artificial Sequence: Synthetic oligonucleotide
acuucugaugggcaacagc

SEQ ID NO: 3268863 - RNA, 19 nt, Artificial Sequence
  Description of Artificial Sequence: Synthetic oligonucleotide
ugcuucauucuuaauuuca

SEQ ID NO: 3268864 - RNA, 19 nt, Artificial Sequence
  Description of Artificial Sequence: Synthetic oligonucleotide
uucauccacaauaucggug

SEQ ID NO: 3268865 - RNA, 19 nt, Artificial Sequence
  Description of Artificial Sequence: Synthetic oligonucleotide
ugaacugacuucugauggg

SEQ ID NO: 3268866 - RNA, 19 nt, Artificial Sequence
  Description of Artificial Sequence: Synthetic oligonucleotide
gaacugucucuucacaaag

SEQ ID NO: 3268867 - RNA, 19 nt, Artificial Sequence
  Description of Artificial Sequence: Synthetic oligonucleotide
ucagcugcuguagauaugc

SEQ ID NO: 3268868 - RNA, 19 nt, Artificial Sequence
  Description of Artificial Sequence: Synthetic oligonucleotide
augggaaaguucgugauuc

SEQ ID NO: 3268869 - RNA, 19 nt, Artificial Sequence
  Description of Artificial Sequence: Synthetic oligonucleotide
caaacuucuugaucaagag

SEQ ID NO: 3268870 - RNA, 19 nt, Artificial Sequence
  Description of Artificial Sequence: Synthetic oligonucleotide
aauggcauugaggggaaag

SEQ ID NO: 3268871 - RNA, 19 nt, Artificial Sequence
  Description of Artificial Sequence: Synthetic oligonucleotide
cauaaauggcauugagggg

SEQ ID NO: 3268872 - RNA, 19 nt, Artificial Sequence
  Description of Artificial Sequence: Synthetic oligonucleotide
gacuguguacaccuucacg

SEQ ID NO: 3268873 - RNA, 19 nt, Artificial Sequence
  Description of Artificial Sequence: Synthetic oligonucleotide
uggccuugaaguaauagau

SEQ ID NO: 3268874 - RNA, 19 nt, Artificial Sequence
  Description of Artificial Sequence: Synthetic oligonucleotide
ugauauagaucaagguccu

SEQ ID NO: 3268875 - RNA, 19 nt, Artificial Sequence
  Description of Artificial Sequence: Synthetic oligonucleotide
aacugucucuucacaaagc

SEQ ID NO: 3268876 - RNA, 19 nt, Artificial Sequence
  Description of Artificial Sequence: Synthetic oligonucleotide
uuggaauugcacuuuugga

SEQ ID NO: 3268877 - RNA, 19 nt, Artificial Sequence
  Description of Artificial Sequence: Synthetic oligonucleotide
cucuucugcuccaugauac

SEQ ID NO: 3268878 - RNA, 19 nt, Artificial Sequence
  Description of Artificial Sequence: Synthetic oligonucleotide
gaucaagagcuuuuccggc

SEQ ID NO: 3268879 - RNA, 19 nt, Artificial Sequence
  Description of Artificial Sequence: Synthetic oligonucleotide
ugaggggaaagccaggcuc

SEQ ID NO: 3268880 - RNA, 19 nt, Artificial Sequence
  Description of Artificial Sequence: Synthetic oligonucleotide
acugucucuucacaaagca

SEQ ID NO: 3268881 - RNA, 19 nt, Artificial Sequence
  Description of Artificial Sequence: Synthetic oligonucleotide
augaacagacacaaaggac

SEQ ID NO: 3268882 - RNA, 19 nt, Artificial Sequence
  Description of Artificial Sequence: Synthetic oligonucleotide
uuucauaguucuugaagaa

SEQ ID NO: 3268883 - RNA, 19 nt, Artificial Sequence
  Description of Artificial Sequence: Synthetic oligonucleotide
auuccuaguguguacauuu

SEQ ID NO: 3268884 - RNA, 19 nt, Artificial Sequence
  Description of Artificial Sequence: Synthetic oligonucleotide
ugagggaagaaugguaagc

SEQ ID NO: 3268885 - RNA, 19 nt, Artificial Sequence
  Description of Artificial Sequence: Synthetic oligonucleotide
auauagaucaagguccugu

SEQ ID NO: 3268886 - RNA, 19 nt, Artificial Sequence
  Description of Artificial Sequence: Synthetic oligonucleotide
gagggaagaaugguaagcc

SEQ ID NO: 3268887 - RNA, 19 nt, Artificial Sequence
  Description of Artificial Sequence: Synthetic oligonucleotide
gaaauguagagugugauau

SEQ ID NO: 3268888 - RNA, 19 nt, Artificial Sequence
  Description of Artificial Sequence: Synthetic oligonucleotide
uggguuuaucauucugagg

SEQ ID NO: 3268889 - RNA, 19 nt, Artificial Sequence
  Description of Artificial Sequence: Synthetic oligonucleotide
acaaaggacuguguacacc

SEQ ID NO: 3268890 - RNA, 19 nt, Artificial Sequence
  Description of Artificial Sequence: Synthetic oligonucleotide
gagacucuuguucaugaac

SEQ ID NO: 3268891 - RNA, 19 nt, Artificial Sequence
  Description of Artificial Sequence: Synthetic oligonucleotide
ucaggguccaugagggaag

SEQ ID NO: 3268892 - RNA, 19 nt, Artificial Sequence
  Description of Artificial Sequence: Synthetic oligonucleotide
auggcauugaggggaaagc

SEQ ID NO: 3268893 - RNA, 19 nt, Artificial Sequence
  Description of Artificial Sequence: Synthetic oligonucleotide
ucuuguucaugaacugucu

SEQ ID NO: 3268894 - RNA, 19 nt, Artificial Sequence
  Description of Artificial Sequence: Synthetic oligonucleotide
uauagaucaagguccuguc

SEQ ID NO: 3268895 - RNA, 19 nt, Artificial Sequence
  Description of Artificial Sequence: Synthetic oligonucleotide
ucaagguccugucugcuuc

SEQ ID NO: 3268896 - RNA, 19 nt, Artificial Sequence
  Description of Artificial Sequence: Synthetic oligonucleotide
ugcuccaugauacguuaug

SEQ ID NO: 3268897 - RNA, 19 nt, Artificial Sequence
  Description of Artificial Sequence: Synthetic oligonucleotide
aagaaugguaagccggcau

SEQ ID NO: 3268898 - RNA, 19 nt, Artificial Sequence
  Description of Artificial Sequence: Synthetic oligonucleotide
cauaguucuugaagaagac

SEQ ID NO: 3268899 - RNA, 19 nt, Artificial Sequence
  Description of Artificial Sequence: Synthetic oligonucleotide
agcagugaccuuuauuaca

SEQ ID NO: 3268900 - RNA, 19 nt, Artificial Sequence
  Description of Artificial Sequence: Synthetic oligonucleotide
cucuuguucaugaacuguc

SEQ ID NO: 3268901 - RNA, 19 nt, Artificial Sequence
  Description of Artificial Sequence: Synthetic oligonucleotide
ucuucugcuccaugauacg

SEQ ID NO: 3268902 - RNA, 19 nt, Artificial Sequence
  Description of Artificial Sequence: Synthetic oligonucleotide
guucgugauuccuagugug

SEQ ID NO: 3268903 - RNA, 19 nt, Artificial Sequence
  Description of Artificial Sequence: Synthetic oligonucleotide
ugagggucgaacacuuucu

SEQ ID NO: 3268904 - RNA, 19 nt, Artificial Sequence
  Description of Artificial Sequence: Synthetic oligonucleotide
gagcuuuuccggcaaagac

SEQ ID NO: 3268905 - RNA, 19 nt, Artificial Sequence
  Description of Artificial Sequence: Synthetic oligonucleotide
aacacagagauucuggguc

SEQ ID NO: 3268906 - RNA, 19 nt, Artificial Sequence
  Description of Artificial Sequence: Synthetic oligonucleotide
acauuugugucccacaacc

SEQ ID NO: 3268907 - RNA, 19 nt, Artificial Sequence
  Description of Artificial Sequence: Synthetic oligonucleotide
aaggaagugauugauuucc

SEQ ID NO: 3268908 - RNA, 19 nt, Artificial Sequence
  Description of Artificial Sequence: Synthetic oligonucleotide
augaaaacauaggagaugc

SEQ ID NO: 3268909 - RNA, 19 nt, Artificial Sequence
  Description of Artificial Sequence: Synthetic oligonucleotide
agagaaaacagucagugca

SEQ ID NO: 3268910 - RNA, 19 nt, Artificial Sequence
  Description of Artificial Sequence: Synthetic oligonucleotide
aaaucaguaggaaugggac

SEQ ID NO: 3268911 - RNA, 19 nt, Artificial Sequence
  Description of Artificial Sequence: Synthetic oligonucleotide
aaggcaguaagcugcaagg

SEQ ID NO: 3268912 - RNA, 19 nt, Artificial Sequence
  Description of Artificial Sequence: Synthetic oligonucleotide
gaagugauugauuuccagg

SEQ ID NO: 3268913 - RNA, 19 nt, Artificial Sequence
  Description of Artificial Sequence: Synthetic oligonucleotide
aagagaaaacagucagugc

SEQ ID NO: 3268914 - RNA, 19 nt, Artificial Sequence
  Description of Artificial Sequence: Synthetic oligonucleotide
aacauaucugucauaggcc

SEQ ID NO: 3268915 - RNA, 19 nt, Artificial Sequence
  Description of Artificial Sequence: Synthetic oligonucleotide
aagcaaugaaaacauagga

SEQ ID NO: 3268916 - RNA, 19 nt, Artificial Sequence
  Description of Artificial Sequence: Synthetic oligonucleotide
aagugauugauuuccaggu

SEQ ID NO: 3268917 - RNA, 19 nt, Artificial Sequence
  Description of Artificial Sequence: Synthetic oligonucleotide
caacauaucugucauaggc

SEQ ID NO: 3268918 - RNA, 19 nt, Artificial Sequence
  Description of Artificial Sequence: Synthetic oligonucleotide
uuaacacagagauucuggg

SEQ ID NO: 3268919 - RNA, 19 nt, Artificial Sequence
  Description of Artificial Sequence: Synthetic oligonucleotide
cuuaacacagagauucugg

SEQ ID NO: 3268920 - RNA, 19 nt, Artificial Sequence
  Description of Artificial Sequence: Synthetic oligonucleotide
agucagugcagccaaacac

SEQ ID NO: 3268921 - RNA, 19 nt, Artificial Sequence
  Description of Artificial Sequence: Synthetic oligonucleotide
accaucuuaacacagagau

SEQ ID NO: 3268922 - RNA, 19 nt, Artificial Sequence
  Description of Artificial Sequence: Synthetic oligonucleotide
caucuuaacacagagauuc

SEQ ID NO: 3268923 - RNA, 19 nt, Artificial Sequence
  Description of Artificial Sequence: Synthetic oligonucleotide
uucugggucaugaugaggc

SEQ ID NO: 3268924 - RNA, 19 nt, Artificial Sequence
  Description of Artificial Sequence: Synthetic oligonucleotide
caagcaaugaaaacauagg

SEQ ID NO: 3268925 - RNA, 19 nt, Artificial Sequence
  Description of Artificial Sequence: Synthetic oligonucleotide
caugaugaggcuauagugc

SEQ ID NO: 3268926 - RNA, 19 nt, Artificial Sequence
  Description of Artificial Sequence: Synthetic oligonucleotide
ucaugaugaggcuauagug

SEQ ID NO: 3268927 - RNA, 19 nt, Artificial Sequence
  Description of Artificial Sequence: Synthetic oligonucleotide
aaaggaagugauugauuuc

SEQ ID NO: 3268928 - RNA, 19 nt, Artificial Sequence
  Description of Artificial Sequence: Synthetic oligonucleotide
ggagaugcaaaucaguagg

SEQ ID NO: 3268929 - RNA, 19 nt, Artificial Sequence
  Description of Artificial Sequence: Synthetic oligonucleotide
acugucagcaccaggaugc

SEQ ID NO: 3268930 - RNA, 19 nt, Artificial Sequence
  Description of Artificial Sequence: Synthetic oligonucleotide
ucugucauaggccaugacu

SEQ ID NO: 3268931 - RNA, 19 nt, Artificial Sequence
  Description of Artificial Sequence: Synthetic oligonucleotide
aaacauaggagaugcaaau

SEQ ID NO: 3268932 - RNA, 19 nt, Artificial Sequence
  Description of Artificial Sequence: Synthetic oligonucleotide
ugaaggugaaggcaguaag

SEQ ID NO: 3268933 - RNA, 19 nt, Artificial Sequence
  Description of Artificial Sequence: Synthetic oligonucleotide
gacugccuggcucagaugg

SEQ ID NO: 3268934 - RNA, 19 nt, Artificial Sequence
  Description of Artificial Sequence: Synthetic oligonucleotide
aucacaaaggaagugauug

SEQ ID NO: 3268935 - RNA, 19 nt, Artificial Sequence
  Description of Artificial Sequence: Synthetic oligonucleotide
aaugaaaacauaggagaug

SEQ ID NO: 3268936 - RNA, 19 nt, Artificial Sequence
  Description of Artificial Sequence: Synthetic oligonucleotide
augcucacuacauagagga

SEQ ID NO: 3268937 - RNA, 19 nt, Artificial Sequence
  Description of Artificial Sequence: Synthetic oligonucleotide
aacauuugugucccacaac

SEQ ID NO: 3268938 - RNA, 19 nt, Artificial Sequence
  Description of Artificial Sequence: Synthetic oligonucleotide
cagaauggcaacgugaagg

SEQ ID NO: 3268939 - RNA, 19 nt, Artificial Sequence
  Description of Artificial Sequence: Synthetic oligonucleotide
ugcaaggagaaaaggagug

SEQ ID NO: 3268940 - RNA, 19 nt, Artificial Sequence
  Description of Artificial Sequence: Synthetic oligonucleotide
acauaggagaugcaaauca

SEQ ID NO: 3268941 - RNA, 19 nt, Artificial Sequence
  Description of Artificial Sequence: Synthetic oligonucleotide
gaaaaggagugccaggccc

SEQ ID NO: 3268942 - RNA, 19 nt, Artificial Sequence
  Description of Artificial Sequence: Synthetic oligonucleotide
uaagcugcaaggagaaaag

SEQ ID NO: 3268943 - RNA, 19 nt, Artificial Sequence
  Description of Artificial Sequence: Synthetic oligonucleotide
ugcaguggauggcugaugg

SEQ ID NO: 3268944 - RNA, 19 nt, Artificial Sequence
  Description of Artificial Sequence: Synthetic oligonucleotide
aaaacauuugugucccaca

SEQ ID NO: 3268945 - RNA, 19 nt, Artificial Sequence
  Description of Artificial Sequence: Synthetic oligonucleotide
guaggaaugggacugucag

SEQ ID NO: 3268946 - RNA, 19 nt, Artificial Sequence
  Description of Artificial Sequence: Synthetic oligonucleotide
augucuacagaauggcaac

SEQ ID NO: 3268947 - RNA, 19 nt, Artificial Sequence
  Description of Artificial Sequence: Synthetic oligonucleotide
auuugugucccacaaccag

SEQ ID NO: 3268948 - RNA, 19 nt, Artificial Sequence
  Description of Artificial Sequence: Synthetic oligonucleotide
agugcagccaaacacagaa

SEQ ID NO: 3268949 - RNA, 19 nt, Artificial Sequence
  Description of Artificial Sequence: Synthetic oligonucleotide
cugucauaggccaugacug

SEQ ID NO: 3268950 - RNA, 19 nt, Artificial Sequence
  Description of Artificial Sequence: Synthetic oligonucleotide
aauggcaacgugaagguga

SEQ ID NO: 3268951 - RNA, 19 nt, Artificial Sequence
  Description of Artificial Sequence: Synthetic oligonucleotide
caagagaaaacagucagug

SEQ ID NO: 3268952 - RNA, 19 nt, Artificial Sequence
  Description of Artificial Sequence: Synthetic oligonucleotide
auugauuuccaggugaugu

SEQ ID NO: 3268953 - RNA, 19 nt, Artificial Sequence
  Description of Artificial Sequence: Synthetic oligonucleotide
uggaugucagcacaggcca

SEQ ID NO: 3268954 - RNA, 19 nt, Artificial Sequence
  Description of Artificial Sequence: Synthetic oligonucleotide
uuugugucccacaaccagc

SEQ ID NO: 3268955 - RNA, 19 nt, Artificial Sequence
  Description of Artificial Sequence: Synthetic oligonucleotide
ucagauggaugucagcaca

SEQ ID NO: 3268956 - RNA, 19 nt, Artificial Sequence
  Description of Artificial Sequence: Synthetic oligonucleotide
aaacauuugugucccacaa

SEQ ID NO: 3268957 - RNA, 19 nt, Artificial Sequence
  Description of Artificial Sequence: Synthetic oligonucleotide
aaucaguaggaaugggacu

SEQ ID NO: 3268958 - RNA, 19 nt, Artificial Sequence
  Description of Artificial Sequence: Synthetic oligonucleotide
aaaacagucagugcagcca

SEQ ID NO: 3268959 - RNA, 19 nt, Artificial Sequence
  Description of Artificial Sequence: Synthetic oligonucleotide
agaaaaggagugccaggcc

SEQ ID NO: 3268960 - RNA, 19 nt, Artificial Sequence
  Description of Artificial Sequence: Synthetic oligonucleotide
ugcaaaucaguaggaaugg

SEQ ID NO: 3268961 - RNA, 19 nt, Artificial Sequence
  Description of Artificial Sequence: Synthetic oligonucleotide
aacauaggagaugcaaauc

SEQ ID NO: 3268962 - RNA, 19 nt, Artificial Sequence
  Description of Artificial Sequence: Synthetic oligonucleotide
agcaaugaaaacauaggag

SEQ ID NO: 3268963 - RNA, 19 nt, Artificial Sequence
  Description of Artificial Sequence: Synthetic oligonucleotide
acauaucugucauaggcca

SEQ ID NO: 3268964 - RNA, 19 nt, Artificial Sequence
  Description of Artificial Sequence: Synthetic oligonucleotide
gauggcaacauaucuguca

SEQ ID NO: 3268965 - RNA, 19 nt, Artificial Sequence
  Description of Artificial Sequence: Synthetic oligonucleotide
gcaaugaaaacauaggaga

SEQ ID NO: 3268966 - RNA, 19 nt, Artificial Sequence
  Description of Artificial Sequence: Synthetic oligonucleotide
ugcagccaaacacagaaaa

SEQ ID NO: 3268967 - RNA, 19 nt, Artificial Sequence
  Description of Artificial Sequence: Synthetic oligonucleotide
agccacaucacaaaggaag

SEQ ID NO: 3268968 - RNA, 19 nt, Artificial Sequence
  Description of Artificial Sequence: Synthetic oligonucleotide
aacgugaaggugaaggcag

SEQ ID NO: 3268969 - RNA, 19 nt, Artificial Sequence
  Description of Artificial Sequence: Synthetic oligonucleotide
uacagaauggcaacgugaa

SEQ ID NO: 3268970 - RNA, 19 nt, Artificial Sequence
  Description of Artificial Sequence: Synthetic oligonucleotide
caugaugggagccacauca

SEQ ID NO: 3268971 - RNA, 19 nt, Artificial Sequence
  Description of Artificial Sequence: Synthetic oligonucleotide
uacauagaggacugccugg

SEQ ID NO: 3268972 - RNA, 19 nt, Artificial Sequence
  Description of Artificial Sequence: Synthetic oligonucleotide
gaaggcaguaagcugcaag

SEQ ID NO: 3268973 - RNA, 19 nt, Artificial Sequence
  Description of Artificial Sequence: Synthetic oligonucleotide
caggaugcucacuacauag

SEQ ID NO: 3268974 - RNA, 19 nt, Artificial Sequence
  Description of Artificial Sequence: Synthetic oligonucleotide
auagaggacugccuggcuc

SEQ ID NO: 3268975 - RNA, 19 nt, Artificial Sequence
  Description of Artificial Sequence: Synthetic oligonucleotide
gagaaaaggagugccaggc

SEQ ID NO: 3268976 - RNA, 19 nt, Artificial Sequence
  Description of Artificial Sequence: Synthetic oligonucleotide
auggaugucagcacaggcc

SEQ ID NO: 3268977 - RNA, 19 nt, Artificial Sequence
  Description of Artificial Sequence: Synthetic oligonucleotide
aggagaugcaaaucaguag

SEQ ID NO: 3268978 - RNA, 19 nt, Artificial Sequence
  Description of Artificial Sequence: Synthetic oligonucleotide
gagauucugggucaugaug

SEQ ID NO: 3268979 - RNA, 19 nt, Artificial Sequence
  Description of Artificial Sequence: Synthetic oligonucleotide
aaggugaaggcaguaagcu

SEQ ID NO: 3268980 - RNA, 19 nt, Artificial Sequence
  Description of Artificial Sequence: Synthetic oligonucleotide
ucuacagaauggcaacgug

SEQ ID NO: 3268981 - RNA, 19 nt, Artificial Sequence
  Description of Artificial Sequence: Synthetic oligonucleotide
ucagugcagccaaacacag

SEQ ID NO: 3268982 - RNA, 19 nt, Artificial Sequence
  Description of Artificial Sequence: Synthetic oligonucleotide
gaggcuauagugcagugga

SEQ ID NO: 3268983 - RNA, 19 nt, Artificial Sequence
  Description of Artificial Sequence: Synthetic oligonucleotide
cauaggagaugcaaaucag

SEQ ID NO: 3268984 - RNA, 19 nt, Artificial Sequence
  Description of Artificial Sequence: Synthetic oligonucleotide
gaaaacagucagugcagcc

SEQ ID NO: 3268985 - RNA, 19 nt, Artificial Sequence
  Description of Artificial Sequence: Synthetic oligonucleotide
aaaacauaggagaugcaaa

SEQ ID NO: 3268986 - RNA, 19 nt, Artificial Sequence
  Description of Artificial Sequence: Synthetic oligonucleotide
uaggagaugcaaaucagua

SEQ ID NO: 3268987 - RNA, 19 nt, Artificial Sequence
  Description of Artificial Sequence: Synthetic oligonucleotide
gauggaugucagcacaggc

SEQ ID NO: 3268988 - RNA, 19 nt, Artificial Sequence
  Description of Artificial Sequence: Synthetic oligonucleotide
gaaugggacugucagcacc

SEQ ID NO: 3268989 - RNA, 19 nt, Artificial Sequence
  Description of Artificial Sequence: Synthetic oligonucleotide
ucugcagacugcaugcgca

SEQ ID NO: 3268990 - RNA, 19 nt, Artificial Sequence
  Description of Artificial Sequence: Synthetic oligonucleotide
agaaaacagucagugcagc

SEQ ID NO: 3268991 - RNA, 19 nt, Artificial Sequence
  Description of Artificial Sequence: Synthetic oligonucleotide
augcaaaucaguaggaaug

SEQ ID NO: 3268992 - RNA, 19 nt, Artificial Sequence
  Description of Artificial Sequence: Synthetic oligonucleotide
augaugaggcuauagugca

SEQ ID NO: 3268993 - RNA, 19 nt, Artificial Sequence
  Description of Artificial Sequence: Synthetic oligonucleotide
aucaguaggaaugggacug

SEQ ID NO: 3268994 - RNA, 19 nt, Artificial Sequence
  Description of Artificial Sequence: Synthetic oligonucleotide
uugugucccacaaccagcc

SEQ ID NO: 3268995 - RNA, 19 nt, Artificial Sequence
  Description of Artificial Sequence: Synthetic oligonucleotide
caggccaggcgcaugaugg

SEQ ID NO: 3268996 - RNA, 19 nt, Artificial Sequence
  Description of Artificial Sequence: Synthetic oligonucleotide
uuccaggugaugucuacag

SEQ ID NO: 3268997 - RNA, 19 nt, Artificial Sequence
  Description of Artificial Sequence: Synthetic oligonucleotide
gaaaacauaggagaugcaa

SEQ ID NO: 3268998 - RNA, 19 nt, Artificial Sequence
  Description of Artificial Sequence: Synthetic oligonucleotide
aaacagucagugcagccaa

SEQ ID NO: 3268999 - RNA, 19 nt, Artificial Sequence
  Description of Artificial Sequence: Synthetic oligonucleotide
agaauggcaacgugaaggu

SEQ ID NO: 3269000 - RNA, 19 nt, Artificial Sequence
  Description of Artificial Sequence: Synthetic oligonucleotide
acauagaggacugccuggc

SEQ ID NO: 3269001 - RNA, 19 nt, Artificial Sequence
  Description of Artificial Sequence: Synthetic oligonucleotide
cucacuacauagaggacug

SEQ ID NO: 3269002 - RNA, 19 nt, Artificial Sequence
  Description of Artificial Sequence: Synthetic oligonucleotide
gacugcaugcgcaggaugg

SEQ ID NO: 3269003 - RNA, 19 nt, Artificial Sequence
  Description of Artificial Sequence: Synthetic oligonucleotide
auuuccaggugaugucuac

SEQ ID NO: 3269004 - RNA, 19 nt, Artificial Sequence
  Description of Artificial Sequence: Synthetic oligonucleotide
gaugcucacuacauagagg

SEQ ID NO: 3269005 - RNA, 19 nt, Artificial Sequence
  Description of Artificial Sequence: Synthetic oligonucleotide
aagucauauggucacaucc

SEQ ID NO: 3269006 - RNA, 19 nt, Artificial Sequence
  Description of Artificial Sequence: Synthetic oligonucleotide
uuuauauacacacagucac

SEQ ID NO: 3269007 - RNA, 19 nt, Artificial Sequence
  Description of Artificial Sequence: Synthetic oligonucleotide
acauuaccaaguuaggccc

SEQ ID NO: 3269008 - RNA, 19 nt, Artificial Sequence
  Description of Artificial Sequence: Synthetic oligonucleotide
auuacaacugcuauggccc

SEQ ID NO: 3269009 - RNA, 19 nt, Artificial Sequence
  Description of Artificial Sequence: Synthetic oligonucleotide
acuguaauuuaucuucugc

SEQ ID NO: 3269010 - RNA, 19 nt, Artificial Sequence
  Description of Artificial Sequence: Synthetic oligonucleotide
uauaccauccugcacagcc

SEQ ID NO: 3269011 - RNA, 19 nt, Artificial Sequence
  Description of Artificial Sequence: Synthetic oligonucleotide
cugugaacaagucauaugg

SEQ ID NO: 3269012 - RNA, 19 nt, Artificial Sequence
  Description of Artificial Sequence: Synthetic oligonucleotide
augaaagggacccucaugg

SEQ ID NO: 3269013 - RNA, 19 nt, Artificial Sequence
  Description of Artificial Sequence: Synthetic oligonucleotide
uaauuuaucuucugcaaag

SEQ ID NO: 3269014 - RNA, 19 nt, Artificial Sequence
  Description of Artificial Sequence: Synthetic oligonucleotide
uacauuaccaaguuaggcc

SEQ ID NO: 3269015 - RNA, 19 nt, Artificial Sequence
  Description of Artificial Sequence: Synthetic oligonucleotide
acugguuuuaauucaguac

SEQ ID NO: 3269016 - RNA, 19 nt, Artificial Sequence
  Description of Artificial Sequence: Synthetic oligonucleotide
uaugaaaauagacauggaa

SEQ ID NO: 3269017 - RNA, 19 nt, Artificial Sequence
  Description of Artificial Sequence: Synthetic oligonucleotide
uuaaaugaggucucucugg

SEQ ID NO: 3269018 - RNA, 19 nt, Artificial Sequence
  Description of Artificial Sequence: Synthetic oligonucleotide
gauuacaacugcuauggcc

SEQ ID NO: 3269019 - RNA, 19 nt, Artificial Sequence
  Description of Artificial Sequence: Synthetic oligonucleotide
agacaguccaaacaauacc

SEQ ID NO: 3269020 - RNA, 19 nt, Artificial Sequence
  Description of Artificial Sequence: Synthetic oligonucleotide
auaaaugucuauaauuaac

SEQ ID NO: 3269021 - RNA, 19 nt, Artificial Sequence
  Description of Artificial Sequence: Synthetic oligonucleotide
uaaaugaggucucucuggg

SEQ ID NO: 3269022 - RNA, 19 nt, Artificial Sequence
  Description of Artificial Sequence: Synthetic oligonucleotide
ugaaggauccgacucacag

SEQ ID NO: 3269023 - RNA, 19 nt, Artificial Sequence
  Description of Artificial Sequence: Synthetic oligonucleotide
ucaaaacacucugugaugg

SEQ ID NO: 3269024 - RNA, 19 nt, Artificial Sequence
  Description of Artificial Sequence: Synthetic oligonucleotide
uuuuguaucugcuuucuga

SEQ ID NO: 3269025 - RNA, 19 nt, Artificial Sequence
  Description of Artificial Sequence: Synthetic oligonucleotide
caaguuaggcccaugaaag

SEQ ID NO: 3269026 - RNA, 19 nt, Artificial Sequence
  Description of Artificial Sequence: Synthetic oligonucleotide
uacguguuuauauacacac

SEQ ID NO: 3269027 - RNA, 19 nt, Artificial Sequence
  Description of Artificial Sequence: Synthetic oligonucleotide
acagacacagccuggaggg

SEQ ID NO: 3269028 - RNA, 19 nt, Artificial Sequence
  Description of Artificial Sequence: Synthetic oligonucleotide
caaacaauaccccugugag

SEQ ID NO: 3269029 - RNA, 19 nt, Artificial Sequence
  Description of Artificial Sequence: Synthetic oligonucleotide
uaguguuacacugugaaca

SEQ ID NO: 3269030 - RNA, 19 nt, Artificial Sequence
  Description of Artificial Sequence: Synthetic oligonucleotide
aaugguacgacuugggcua

SEQ ID NO: 3269031 - RNA, 19 nt, Artificial Sequence
  Description of Artificial Sequence: Synthetic oligonucleotide
caauauauaggaaauacaa

SEQ ID NO: 3269032 - RNA, 19 nt, Artificial Sequence
  Description of Artificial Sequence: Synthetic oligonucleotide
uucacuggcccaaugacgc

SEQ ID NO: 3269033 - RNA, 19 nt, Artificial Sequence
  Description of Artificial Sequence: Synthetic oligonucleotide
agaaugguacgacuugggc

SEQ ID NO: 3269034 - RNA, 19 nt, Artificial Sequence
  Description of Artificial Sequence: Synthetic oligonucleotide
aagcacacgguuauggagc

SEQ ID NO: 3269035 - RNA, 19 nt, Artificial Sequence
  Description of Artificial Sequence: Synthetic oligonucleotide
aaaacacucugugaugggg

SEQ ID NO: 3269036 - RNA, 19 nt, Artificial Sequence
  Description of Artificial Sequence: Synthetic oligonucleotide
caggauaccauguugggag

SEQ ID NO: 3269037 - RNA, 19 nt, Artificial Sequence
  Description of Artificial Sequence: Synthetic oligonucleotide
uuuuaagcaauuacaguau

SEQ ID NO: 3269038 - RNA, 19 nt, Artificial Sequence
  Description of Artificial Sequence: Synthetic oligonucleotide
ugcacaccaagucucacag

SEQ ID NO: 3269039 - RNA, 19 nt, Artificial Sequence
  Description of Artificial Sequence: Synthetic oligonucleotide
agaugaauuggcaagcggg

SEQ ID NO: 3269040 - RNA, 19 nt, Artificial Sequence
  Description of Artificial Sequence: Synthetic oligonucleotide
gacaguccaaacaauaccc

SEQ ID NO: 3269041 - RNA, 19 nt, Artificial Sequence
  Description of Artificial Sequence: Synthetic oligonucleotide
aaguuaggcccaugaaagg

SEQ ID NO: 3269042 - RNA, 19 nt, Artificial Sequence
  Description of Artificial Sequence: Synthetic oligonucleotide
uuccaagaaguacuuauac

SEQ ID NO: 3269043 - RNA, 19 nt, Artificial Sequence
  Description of Artificial Sequence: Synthetic oligonucleotide
aaaccaggaugagaggcgc

SEQ ID NO: 3269044 - RNA, 19 nt, Artificial Sequence
  Description of Artificial Sequence: Synthetic oligonucleotide
uccuaauaggccaggcacg

SEQ ID NO: 3269045 - RNA, 19 nt, Artificial Sequence
  Description of Artificial Sequence: Synthetic oligonucleotide
aaaaccaggaugagaggcg

SEQ ID NO: 3269046 - RNA, 19 nt, Artificial Sequence
  Description of Artificial Sequence: Synthetic oligonucleotide
cugguuuuaauucaguaca

SEQ ID NO: 3269047 - RNA, 19 nt, Artificial Sequence
  Description of Artificial Sequence: Synthetic oligonucleotide
uagacauggaaauggacaa

SEQ ID NO: 3269048 - RNA, 19 nt, Artificial Sequence
  Description of Artificial Sequence: Synthetic oligonucleotide
uucagcuaugcacaccaag

SEQ ID NO: 3269049 - RNA, 19 nt, Artificial Sequence
  Description of Artificial Sequence: Synthetic oligonucleotide
gacgcaguaacuugucucc

SEQ ID NO: 3269050 - RNA, 19 nt, Artificial Sequence
  Description of Artificial Sequence: Synthetic oligonucleotide
gaacaagucauauggucac

SEQ ID NO: 3269051 - RNA, 19 nt, Artificial Sequence
  Description of Artificial Sequence: Synthetic oligonucleotide
aacuccagcucgaugcugc

SEQ ID NO: 3269052 - RNA, 19 nt, Artificial Sequence
  Description of Artificial Sequence: Synthetic oligonucleotide
uuggccaaguuguaccugg

SEQ ID NO: 3269053 - RNA, 19 nt, Artificial Sequence
  Description of Artificial Sequence: Synthetic oligonucleotide
ugaauuggcaagcgggaca

SEQ ID NO: 3269054 - RNA, 19 nt, Artificial Sequence
  Description of Artificial Sequence: Synthetic oligonucleotide
uuaacgaaagugaccauuu

SEQ ID NO: 3269055 - RNA, 19 nt, Artificial Sequence
  Description of Artificial Sequence: Synthetic oligonucleotide
uccaaauauacugagguuu

SEQ ID NO: 3269056 - RNA, 19 nt, Artificial Sequence
  Description of Artificial Sequence: Synthetic oligonucleotide
uauggaucuugcacuuugg

SEQ ID NO: 3269057 - RNA, 19 nt, Artificial Sequence
  Description of Artificial Sequence: Synthetic oligonucleotide
cacuuaaaacaccagauga

SEQ ID NO: 3269058 - RNA, 19 nt, Artificial Sequence
  Description of Artificial Sequence: Synthetic oligonucleotide
caggacuucagcuaugcac

SEQ ID NO: 3269059 - RNA, 19 nt, Artificial Sequence
  Description of Artificial Sequence: Synthetic oligonucleotide
ugaggcacuccucacacac

SEQ ID NO: 3269060 - RNA, 19 nt, Artificial Sequence
  Description of Artificial Sequence: Synthetic oligonucleotide
auauggaucuugcacuuug

SEQ ID NO: 3269061 - RNA, 19 nt, Artificial Sequence
  Description of Artificial Sequence: Synthetic oligonucleotide
ucaugggaaauccucugug

SEQ ID NO: 3269062 - RNA, 19 nt, Artificial Sequence
  Description of Artificial Sequence: Synthetic oligonucleotide
gacauggaaauggacaagc

SEQ ID NO: 3269063 - RNA, 19 nt, Artificial Sequence
  Description of Artificial Sequence: Synthetic oligonucleotide
augaaaauagacauggaaa

SEQ ID NO: 3269064 - RNA, 19 nt, Artificial Sequence
  Description of Artificial Sequence: Synthetic oligonucleotide
cuuaaaugaggucucucug

SEQ ID NO: 3269065 - RNA, 19 nt, Artificial Sequence
  Description of Artificial Sequence: Synthetic oligonucleotide
aguuaggcccaugaaaggg

SEQ ID NO: 3269066 - RNA, 19 nt, Artificial Sequence
  Description of Artificial Sequence: Synthetic oligonucleotide
guacuuauacuugauggag

SEQ ID NO: 3269067 - RNA, 19 nt, Artificial Sequence
  Description of Artificial Sequence: Synthetic oligonucleotide
ugcuauggccccuagugcc

SEQ ID NO: 3269068 - RNA, 19 nt, Artificial Sequence
  Description of Artificial Sequence: Synthetic oligonucleotide
cagacguauaccauccugc

SEQ ID NO: 3269069 - RNA, 19 nt, Artificial Sequence
  Description of Artificial Sequence: Synthetic oligonucleotide
cagaguugcuauauaaaug

SEQ ID NO: 3269070 - RNA, 19 nt, Artificial Sequence
  Description of Artificial Sequence: Synthetic oligonucleotide
aacuguaauuuaucuucug

SEQ ID NO: 3269071 - RNA, 19 nt, Artificial Sequence
  Description of Artificial Sequence: Synthetic oligonucleotide
cucauuaauuuaauuccac

SEQ ID NO: 3269072 - RNA, 19 nt, Artificial Sequence
  Description of Artificial Sequence: Synthetic oligonucleotide
caugggaaauccucugugg

SEQ ID NO: 3269073 - RNA, 19 nt, Artificial Sequence
  Description of Artificial Sequence: Synthetic oligonucleotide
aauuuaucuucugcaaagu

SEQ ID NO: 3269074 - RNA, 19 nt, Artificial Sequence
  Description of Artificial Sequence: Synthetic oligonucleotide
uguaccugggcgcucaggu

SEQ ID NO: 3269075 - RNA, 19 nt, Artificial Sequence
  Description of Artificial Sequence: Synthetic oligonucleotide
ucggccaaguuccaagaag

SEQ ID NO: 3269076 - RNA, 19 nt, Artificial Sequence
  Description of Artificial Sequence: Synthetic oligonucleotide
gaugagaggcgcaaugaag

SEQ ID NO: 3269077 - RNA, 19 nt, Artificial Sequence
  Description of Artificial Sequence: Synthetic oligonucleotide
cacacagucacauccuuac

SEQ ID NO: 3269078 - RNA, 19 nt, Artificial Sequence
  Description of Artificial Sequence: Synthetic oligonucleotide
aaagggacccucauggcug

SEQ ID NO: 3269079 - RNA, 19 nt, Artificial Sequence
  Description of Artificial Sequence: Synthetic oligonucleotide
uacccuguucucaaaauau

SEQ ID NO: 3269080 - RNA, 19 nt, Artificial Sequence
  Description of Artificial Sequence: Synthetic oligonucleotide
guauccaaagaacaagaga

SEQ ID NO: 3269081 - RNA, 19 nt, Artificial Sequence
  Description of Artificial Sequence: Synthetic oligonucleotide
gacucacagacguauacca

SEQ ID NO: 3269082 - RNA, 19 nt, Artificial Sequence
  Description of Artificial Sequence: Synthetic oligonucleotide
ugugaacaagucauauggu

SEQ ID NO: 3269083 - RNA, 19 nt, Artificial Sequence
  Description of Artificial Sequence: Synthetic oligonucleotide
acacgguucagacagucca

SEQ ID NO: 3269084 - RNA, 19 nt, Artificial Sequence
  Description of Artificial Sequence: Synthetic oligonucleotide
uacaccgagcacaagacuu

SEQ ID NO: 3269085 - RNA, 19 nt, Artificial Sequence
  Description of Artificial Sequence: Synthetic oligonucleotide
aaauauacugagguuugau

SEQ ID NO: 3269086 - RNA, 19 nt, Artificial Sequence
  Description of Artificial Sequence: Synthetic oligonucleotide
gaugucaugggaaauccuc

SEQ ID NO: 3269087 - RNA, 19 nt, Artificial Sequence
  Description of Artificial Sequence: Synthetic oligonucleotide
aguugcuauauaaaugucu

SEQ ID NO: 3269088 - RNA, 19 nt, Artificial Sequence
  Description of Artificial Sequence: Synthetic oligonucleotide
uucaguacauuaccaaguu

SEQ ID NO: 3269089 - RNA, 19 nt, Artificial Sequence
  Description of Artificial Sequence: Synthetic oligonucleotide
uggcagaaguuccucuagg

SEQ ID NO: 3269090 - RNA, 19 nt, Artificial Sequence
  Description of Artificial Sequence: Synthetic oligonucleotide
auacgcaccaguuacucau

SEQ ID NO: 3269091 - RNA, 19 nt, Artificial Sequence
  Description of Artificial Sequence: Synthetic oligonucleotide
gguagcgauauuugcaucc

SEQ ID NO: 3269092 - RNA, 19 nt, Artificial Sequence
  Description of Artificial Sequence: Synthetic oligonucleotide
uagugccaaucccaaaacc

SEQ ID NO: 3269093 - RNA, 19 nt, Artificial Sequence
  Description of Artificial Sequence: Synthetic oligonucleotide
cacaaacugacccucgaac

SEQ ID NO: 3269094 - RNA, 19 nt, Artificial Sequence
  Description of Artificial Sequence: Synthetic oligonucleotide
guacauuaccaaguuaggc

SEQ ID NO: 3269095 - RNA, 19 nt, Artificial Sequence
  Description of Artificial Sequence: Synthetic oligonucleotide
aagauggcagaaguuccuc

SEQ ID NO: 3269096 - RNA, 19 nt, Artificial Sequence
  Description of Artificial Sequence: Synthetic oligonucleotide
ugagaggcgcaaugaagag

SEQ ID NO: 3269097 - RNA, 19 nt, Artificial Sequence
  Description of Artificial Sequence: Synthetic oligonucleotide
aaguuguagacgacaguag

SEQ ID NO: 3269098 - RNA, 19 nt, Artificial Sequence
  Description of Artificial Sequence: Synthetic oligonucleotide
acaguccaaacaauacccc

SEQ ID NO: 3269099 - RNA, 19 nt, Artificial Sequence
  Description of Artificial Sequence: Synthetic oligonucleotide
cuccacaucgauaacaaaa

SEQ ID NO: 3269100 - RNA, 19 nt, Artificial Sequence
  Description of Artificial Sequence: Synthetic oligonucleotide
agcaauuuguuuagggaag

SEQ ID NO: 3269101 - RNA, 19 nt, Artificial Sequence
  Description of Artificial Sequence: Synthetic oligonucleotide
cucgcguccacgcagcccg

SEQ ID NO: 3269102 - RNA, 19 nt, Artificial Sequence
  Description of Artificial Sequence: Synthetic oligonucleotide
uugggcuacagaugaaaac

SEQ ID NO: 3269103 - RNA, 19 nt, Artificial Sequence
  Description of Artificial Sequence: Synthetic oligonucleotide
ggcaauauauaggaaauac

SEQ ID NO: 3269104 - RNA, 19 nt, Artificial Sequence
  Description of Artificial Sequence: Synthetic oligonucleotide
auccuuacacauacgcacc

SEQ ID NO: 3269105 - RNA, 19 nt, Artificial Sequence
  Description of Artificial Sequence: Synthetic oligonucleotide
aguaauacaguucacaaac

SEQ ID NO: 3269106 - RNA, 19 nt, Artificial Sequence
  Description of Artificial Sequence: Synthetic oligonucleotide
aaaccaauaaaguggaagg

SEQ ID NO: 3269107 - RNA, 19 nt, Artificial Sequence
  Description of Artificial Sequence: Synthetic oligonucleotide
uguacuaagauaucuacag

SEQ ID NO: 3269108 - RNA, 19 nt, Artificial Sequence
  Description of Artificial Sequence: Synthetic oligonucleotide
aauuuacugaaacacuggg

SEQ ID NO: 3269109 - RNA, 19 nt, Artificial Sequence
  Description of Artificial Sequence: Synthetic oligonucleotide
aauacauauauaugauagg

SEQ ID NO: 3269110 - RNA, 19 nt, Artificial Sequence
  Description of Artificial Sequence: Synthetic oligonucleotide
aaaucuauagcauuaguau

SEQ ID NO: 3269111 - RNA, 19 nt, Artificial Sequence
  Description of Artificial Sequence: Synthetic oligonucleotide
auacauauauaugauaggc

SEQ ID NO: 3269112 - RNA, 19 nt, Artificial Sequence
  Description of Artificial Sequence: Synthetic oligonucleotide
uauagcauuaguaugcuga

SEQ ID NO: 3269113 - RNA, 19 nt, Artificial Sequence
  Description of Artificial Sequence: Synthetic oligonucleotide
uaaacuucauuucaaguag

SEQ ID NO: 3269114 - RNA, 19 nt, Artificial Sequence
  Description of Artificial Sequence: Synthetic oligonucleotide
aaaagaaaugacaucacuc

SEQ ID NO: 3269115 - RNA, 19 nt, Artificial Sequence
  Description of Artificial Sequence: Synthetic oligonucleotide
uuuauagcaccucagggag

SEQ ID NO: 3269116 - RNA, 19 nt, Artificial Sequence
  Description of Artificial Sequence: Synthetic oligonucleotide
aaugacaucacuccugucu

SEQ ID NO: 3269117 - RNA, 19 nt, Artificial Sequence
  Description of Artificial Sequence: Synthetic oligonucleotide
augaaugacaugcacuucc

SEQ ID NO: 3269118 - RNA, 19 nt, Artificial Sequence
  Description of Artificial Sequence: Synthetic oligonucleotide
uguuuauagcaccucaggg

SEQ ID NO: 3269119 - RNA, 19 nt, Artificial Sequence
  Description of Artificial Sequence: Synthetic oligonucleotide
aagggcuacagucaacacc

SEQ ID NO: 3269120 - RNA, 19 nt, Artificial Sequence
  Description of Artificial Sequence: Synthetic oligonucleotide
uuuguguaaaauuauaaua

SEQ ID NO: 3269121 - RNA, 19 nt, Artificial Sequence
  Description of Artificial Sequence: Synthetic oligonucleotide
auuaucagcauaaauuuac

SEQ ID NO: 3269122 - RNA, 19 nt, Artificial Sequence
  Description of Artificial Sequence: Synthetic oligonucleotide
  modified_base (14)..(14): a, c, u, g, unknown or other
agauccagcggcunuaggg

SEQ ID NO: 3269123 - RNA, 19 nt, Artificial Sequence
  Description of Artificial Sequence: Synthetic oligonucleotide
gagacaaaccaauaaagug

SEQ ID NO: 3269124 - RNA, 19 nt, Artificial Sequence
  Description of Artificial Sequence: Synthetic oligonucleotide
aaagcuuggggacucggac

SEQ ID NO: 3269125 - RNA, 19 nt, Artificial Sequence
  Description of Artificial Sequence: Synthetic oligonucleotide
uuaugaagaccacaccugg

SEQ ID NO: 3269126 - RNA, 19 nt, Artificial Sequence
  Description of Artificial Sequence: Synthetic oligonucleotide
gauauagagagacuucugc

SEQ ID NO: 3269127 - RNA, 19 nt, Artificial Sequence
  Description of Artificial Sequence: Synthetic oligonucleotide
uaauacaguucacaaaccc

SEQ ID NO: 3269128 - RNA, 19 nt, Artificial Sequence
  Description of Artificial Sequence: Synthetic oligonucleotide
acuguacuaagauaucuac

SEQ ID NO: 3269129 - RNA, 19 nt, Artificial Sequence
  Description of Artificial Sequence: Synthetic oligonucleotide
cauccuauugccuugagac

SEQ ID NO: 3269130 - RNA, 19 nt, Artificial Sequence
  Description of Artificial Sequence: Synthetic oligonucleotide
auagagagacuucugcacc

SEQ ID NO: 3269131 - RNA, 19 nt, Artificial Sequence
  Description of Artificial Sequence: Synthetic oligonucleotide
gagagcaugaaugacaugc

SEQ ID NO: 3269132 - RNA, 19 nt, Artificial Sequence
  Description of Artificial Sequence: Synthetic oligonucleotide
aaccaugacagaaagcucg

SEQ ID NO: 3269133 - RNA, 19 nt, Artificial Sequence
  Description of Artificial Sequence: Synthetic oligonucleotide
uuuguguaggcguaagagg

SEQ ID NO: 3269134 - RNA, 19 nt, Artificial Sequence
  Description of Artificial Sequence: Synthetic oligonucleotide
aaggguucuagaucaaauc

SEQ ID NO: 3269135 - RNA, 19 nt, Artificial Sequence
  Description of Artificial Sequence: Synthetic oligonucleotide
aagaagauuugggaugucc

SEQ ID NO: 3269136 - RNA, 19 nt, Artificial Sequence
  Description of Artificial Sequence: Synthetic oligonucleotide
gaugccaggaguaauacag

SEQ ID NO: 3269137 - RNA, 19 nt, Artificial Sequence
  Description of Artificial Sequence: Synthetic oligonucleotide
aaggaagucauccaaugga

SEQ ID NO: 3269138 - RNA, 19 nt, Artificial Sequence
  Description of Artificial Sequence: Synthetic oligonucleotide
uuuaugaagaccacaccug

SEQ ID NO: 3269139 - RNA, 19 nt, Artificial Sequence
  Description of Artificial Sequence: Synthetic oligonucleotide
aauuaguaucugaaguccc

SEQ ID NO: 3269140 - RNA, 19 nt, Artificial Sequence
  Description of Artificial Sequence: Synthetic oligonucleotide
augguuguuaaguucacuc

SEQ ID NO: 3269141 - RNA, 19 nt, Artificial Sequence
  Description of Artificial Sequence: Synthetic oligonucleotide
uauucaaaagcaaaacuua

SEQ ID NO: 3269142 - RNA, 19 nt, Artificial Sequence
  Description of Artificial Sequence: Synthetic oligonucleotide
ucaaguaugguuguuaagu

SEQ ID NO: 3269143 - RNA, 19 nt, Artificial Sequence
  Description of Artificial Sequence: Synthetic oligonucleotide
cauugaaacaccauagcac

SEQ ID NO: 3269144 - RNA, 19 nt, Artificial Sequence
  Description of Artificial Sequence: Synthetic oligonucleotide
acauauauaugauaggcau

SEQ ID NO: 3269145 - RNA, 19 nt, Artificial Sequence
  Description of Artificial Sequence: Synthetic oligonucleotide
augaugggcaguuagagca

SEQ ID NO: 3269146 - RNA, 19 nt, Artificial Sequence
  Description of Artificial Sequence: Synthetic oligonucleotide
uuguguaggcguaagagga

SEQ ID NO: 3269147 - RNA, 19 nt, Artificial Sequence
  Description of Artificial Sequence: Synthetic oligonucleotide
cauuaacugcuuuagaaug

SEQ ID NO: 3269148 - RNA, 19 nt, Artificial Sequence
  Description of Artificial Sequence: Synthetic oligonucleotide
aaagcuacaaggguucuag

SEQ ID NO: 3269149 - RNA, 19 nt, Artificial Sequence
  Description of Artificial Sequence: Synthetic oligonucleotide
aguuuaugaagaccacacc

SEQ ID NO: 3269150 - RNA, 19 nt, Artificial Sequence
  Description of Artificial Sequence: Synthetic oligonucleotide
uacauauauaugauaggca

SEQ ID NO: 3269151 - RNA, 19 nt, Artificial Sequence
  Description of Artificial Sequence: Synthetic oligonucleotide
aacuucauuucaaguagcc

SEQ ID NO: 3269152 - RNA, 19 nt, Artificial Sequence
  Description of Artificial Sequence: Synthetic oligonucleotide
acuauuccaauucauaaaa

SEQ ID NO: 3269153 - RNA, 19 nt, Artificial Sequence
  Description of Artificial Sequence: Synthetic oligonucleotide
gaaagggaaaggaaggcgg

SEQ ID NO: 3269154 - RNA, 19 nt, Artificial Sequence
  Description of Artificial Sequence: Synthetic oligonucleotide
uucaaaagcaaaacuuaga

SEQ ID NO: 3269155 - RNA, 19 nt, Artificial Sequence
  Description of Artificial Sequence: Synthetic oligonucleotide
uuagaaugagcagagagaa

SEQ ID NO: 3269156 - RNA, 19 nt, Artificial Sequence
  Description of Artificial Sequence: Synthetic oligonucleotide
agguaacauacccucaugg

SEQ ID NO: 3269157 - RNA, 19 nt, Artificial Sequence
  Description of Artificial Sequence: Synthetic oligonucleotide
uauagagagacuucugcac

SEQ ID NO: 3269158 - RNA, 19 nt, Artificial Sequence
  Description of Artificial Sequence: Synthetic oligonucleotide
cuugauaacugcugucucg

SEQ ID NO: 3269159 - RNA, 19 nt, Artificial Sequence
  Description of Artificial Sequence: Synthetic oligonucleotide
ggcauauccauauauguag

SEQ ID NO: 3269160 - RNA, 19 nt, Artificial Sequence
  Description of Artificial Sequence: Synthetic oligonucleotide
cauuaguaugcugagacag

SEQ ID NO: 3269161 - RNA, 19 nt, Artificial Sequence
  Description of Artificial Sequence: Synthetic oligonucleotide
aaggcgguagcucaggaga

SEQ ID NO: 3269162 - RNA, 19 nt, Artificial Sequence
  Description of Artificial Sequence: Synthetic oligonucleotide
gaugaaguuggccuggaac

SEQ ID NO: 3269163 - RNA, 19 nt, Artificial Sequence
  Description of Artificial Sequence: Synthetic oligonucleotide
acguccacacguuuggacc

SEQ ID NO: 3269164 - RNA, 19 nt, Artificial Sequence
  Description of Artificial Sequence: Synthetic oligonucleotide
aaacuucauuucaaguagc

SEQ ID NO: 3269165 - RNA, 19 nt, Artificial Sequence
  Description of Artificial Sequence: Synthetic oligonucleotide
augagcagagagaauaacc

SEQ ID NO: 3269166 - RNA, 19 nt, Artificial Sequence
  Description of Artificial Sequence: Synthetic oligonucleotide
aagucaagacggaauauuc

SEQ ID NO: 3269167 - RNA, 19 nt, Artificial Sequence
  Description of Artificial Sequence: Synthetic oligonucleotide
ucaagacggaauauucaag

SEQ ID NO: 3269168 - RNA, 19 nt, Artificial Sequence
  Description of Artificial Sequence: Synthetic oligonucleotide
uaacauacccucauggaau

SEQ ID NO: 3269169 - RNA, 19 nt, Artificial Sequence
  Description of Artificial Sequence: Synthetic oligonucleotide
gggacagucacauugaaac

SEQ ID NO: 3269170 - RNA, 19 nt, Artificial Sequence
  Description of Artificial Sequence: Synthetic oligonucleotide
auuaguaucugaagucccc

SEQ ID NO: 3269171 - RNA, 19 nt, Artificial Sequence
  Description of Artificial Sequence: Synthetic oligonucleotide
auauagagagacuucugca

SEQ ID NO: 3269172 - RNA, 19 nt, Artificial Sequence
  Description of Artificial Sequence: Synthetic oligonucleotide
acaguuuacaaagucaaga

SEQ ID NO: 3269173 - RNA, 19 nt, Artificial Sequence
  Description of Artificial Sequence: Synthetic oligonucleotide
uuucuaggcacccuaaauu

SEQ ID NO: 3269174 - RNA, 19 nt, Artificial Sequence
  Description of Artificial Sequence: Synthetic oligonucleotide
caaggcaccgcaaagcuug

SEQ ID NO: 3269175 - RNA, 19 nt, Artificial Sequence
  Description of Artificial Sequence: Synthetic oligonucleotide
guuuauagcaccucaggga

SEQ ID NO: 3269176 - RNA, 19 nt, Artificial Sequence
  Description of Artificial Sequence: Synthetic oligonucleotide
gacggaauauucaaguaug

SEQ ID NO: 3269177 - RNA, 19 nt, Artificial Sequence
  Description of Artificial Sequence: Synthetic oligonucleotide
agcugcuucaucuuggccu

SEQ ID NO: 3269178 - RNA, 19 nt, Artificial Sequence
  Description of Artificial Sequence: Synthetic oligonucleotide
aggagauagguugaggcac

SEQ ID NO: 3269179 - RNA, 19 nt, Artificial Sequence
  Description of Artificial Sequence: Synthetic oligonucleotide
ugaccgcugagucuguggg

SEQ ID NO: 3269180 - RNA, 19 nt, Artificial Sequence
  Description of Artificial Sequence: Synthetic oligonucleotide
cuuuguguaggcguaagag

SEQ ID NO: 3269181 - RNA, 19 nt, Artificial Sequence
  Description of Artificial Sequence: Synthetic oligonucleotide
auagagcuuggccuccugc

SEQ ID NO: 3269182 - RNA, 19 nt, Artificial Sequence
  Description of Artificial Sequence: Synthetic oligonucleotide
uacgcucaguuuaugaaga

SEQ ID NO: 3269183 - RNA, 19 nt, Artificial Sequence
  Description of Artificial Sequence: Synthetic oligonucleotide
ugaaugaugggcaguuaga

SEQ ID NO: 3269184 - RNA, 19 nt, Artificial Sequence
  Description of Artificial Sequence: Synthetic oligonucleotide
guuaagguucuugugcugg

SEQ ID NO: 3269185 - RNA, 19 nt, Artificial Sequence
  Description of Artificial Sequence: Synthetic oligonucleotide
acacguuuggaccauaaau

SEQ ID NO: 3269186 - RNA, 19 nt, Artificial Sequence
  Description of Artificial Sequence: Synthetic oligonucleotide
auucaaaagcaaaacuuag

SEQ ID NO: 3269187 - RNA, 19 nt, Artificial Sequence
  Description of Artificial Sequence: Synthetic oligonucleotide
aguaugguuguuaaguuca

SEQ ID NO: 3269188 - RNA, 19 nt, Artificial Sequence
  Description of Artificial Sequence: Synthetic oligonucleotide
agcauaaauuuacuguacu

SEQ ID NO: 3269189 - RNA, 19 nt, Artificial Sequence
  Description of Artificial Sequence: Synthetic oligonucleotide
cuacagucaacacccagcc

SEQ ID NO: 3269190 - RNA, 19 nt, Artificial Sequence
  Description of Artificial Sequence: Synthetic oligonucleotide
gauaaaaccaggcguggga

SEQ ID NO: 3269191 - RNA, 19 nt, Artificial Sequence
  Description of Artificial Sequence: Synthetic oligonucleotide
ucaaaucuauagcauuagu

SEQ ID NO: 3269192 - RNA, 19 nt, Artificial Sequence
  Description of Artificial Sequence: Synthetic oligonucleotide
uccaauguguuauuugguc

SEQ ID NO: 3269193 - RNA, 19 nt, Artificial Sequence
  Description of Artificial Sequence: Synthetic oligonucleotide
aucugaaguccccauauga

SEQ ID NO: 3269194 - RNA, 19 nt, Artificial Sequence
  Description of Artificial Sequence: Synthetic oligonucleotide
gaagaccacaccuggcuag

SEQ ID NO: 3269195 - RNA, 19 nt, Artificial Sequence
  Description of Artificial Sequence: Synthetic oligonucleotide
agauaagaaauaaaacaca

SEQ ID NO: 3269196 - RNA, 19 nt, Artificial Sequence
  Description of Artificial Sequence: Synthetic oligonucleotide
ugggaguuuucaaaugaca

SEQ ID NO: 3269197 - RNA, 19 nt, Artificial Sequence
  Description of Artificial Sequence: Synthetic oligonucleotide
cuacgcucaguuuaugaag

SEQ ID NO: 3269198 - RNA, 19 nt, Artificial Sequence
  Description of Artificial Sequence: Synthetic oligonucleotide
auuaguaugcugagacagc

SEQ ID NO: 3269199 - RNA, 19 nt, Artificial Sequence
  Description of Artificial Sequence: Synthetic oligonucleotide
uccgaguccagaaaacacu

SEQ ID NO: 3269200 - RNA, 19 nt, Artificial Sequence
  Description of Artificial Sequence: Synthetic oligonucleotide
caaggaagucauccaaugg

SEQ ID NO: 3269201 - RNA, 19 nt, Artificial Sequence
  Description of Artificial Sequence: Synthetic oligonucleotide
aggagacaaaccaauaaag

SEQ ID NO: 3269202 - RNA, 19 nt, Artificial Sequence
  Description of Artificial Sequence: Synthetic oligonucleotide
uuggaccauaaauacauau

SEQ ID NO: 3269203 - RNA, 19 nt, Artificial Sequence
  Description of Artificial Sequence: Synthetic oligonucleotide
gauuaucuaucaguuuucc

SEQ ID NO: 3269204 - RNA, 19 nt, Artificial Sequence
  Description of Artificial Sequence: Synthetic oligonucleotide
guuuaugaagaccacaccu

SEQ ID NO: 3269205 - RNA, 19 nt, Artificial Sequence
  Description of Artificial Sequence: Synthetic oligonucleotide
ugugaagugagacaaagga

SEQ ID NO: 3269206 - RNA, 19 nt, Artificial Sequence
  Description of Artificial Sequence: Synthetic oligonucleotide
ucgguaauuaauauuauac

SEQ ID NO: 3269207 - RNA, 19 nt, Artificial Sequence
  Description of Artificial Sequence: Synthetic oligonucleotide
aucgugauugcauagcacc

SEQ ID NO: 3269208 - RNA, 19 nt, Artificial Sequence
  Description of Artificial Sequence: Synthetic oligonucleotide
auuucuaguuccugaaucc

SEQ ID NO: 3269209 - RNA, 19 nt, Artificial Sequence
  Description of Artificial Sequence: Synthetic oligonucleotide
aaagucaaggaucuguuca

SEQ ID NO: 3269210 - RNA, 19 nt, Artificial Sequence
  Description of Artificial Sequence: Synthetic oligonucleotide
aaaugauaaaucugugaag

SEQ ID NO: 3269211 - RNA, 19 nt, Artificial Sequence
  Description of Artificial Sequence: Synthetic oligonucleotide
cauaucaggaucauuagac

SEQ ID NO: 3269212 - RNA, 19 nt, Artificial Sequence
  Description of Artificial Sequence: Synthetic oligonucleotide
aaugaaugguuagaacugc

SEQ ID NO: 3269213 - RNA, 19 nt, Artificial Sequence
  Description of Artificial Sequence: Synthetic oligonucleotide
acagcuccaaauuacaguc

SEQ ID NO: 3269214 - RNA, 19 nt, Artificial Sequence
  Description of Artificial Sequence: Synthetic oligonucleotide
uauuauaccuucuucuucu

SEQ ID NO: 3269215 - RNA, 19 nt, Artificial Sequence
  Description of Artificial Sequence: Synthetic oligonucleotide
auuaacuggagaaaucccc

SEQ ID NO: 3269216 - RNA, 19 nt, Artificial Sequence
  Description of Artificial Sequence: Synthetic oligonucleotide
ucucccauaacuuaagcac

SEQ ID NO: 3269217 - RNA, 19 nt, Artificial Sequence
  Description of Artificial Sequence: Synthetic oligonucleotide
aaugggucuguuccaaagg

SEQ ID NO: 3269218 - RNA, 19 nt, Artificial Sequence
  Description of Artificial Sequence: Synthetic oligonucleotide
aauaccugauggucaaggg

SEQ ID NO: 3269219 - RNA, 19 nt, Artificial Sequence
  Description of Artificial Sequence: Synthetic oligonucleotide
uuauaacucaucacugucc

SEQ ID NO: 3269220 - RNA, 19 nt, Artificial Sequence
  Description of Artificial Sequence: Synthetic oligonucleotide
uuaauauuauaccuucuuc

SEQ ID NO: 3269221 - RNA, 19 nt, Artificial Sequence
  Description of Artificial Sequence: Synthetic oligonucleotide
uguacuaccauccucucuc

SEQ ID NO: 3269222 - RNA, 19 nt, Artificial Sequence
  Description of Artificial Sequence: Synthetic oligonucleotide
uugagaauggguuuccugc

SEQ ID NO: 3269223 - RNA, 19 nt, Artificial Sequence
  Description of Artificial Sequence: Synthetic oligonucleotide
aagucaaggaucuguucac

SEQ ID NO: 3269224 - RNA, 19 nt, Artificial Sequence
  Description of Artificial Sequence: Synthetic oligonucleotide
aauauuauaccuucuucuu

SEQ ID NO: 3269225 - RNA, 19 nt, Artificial Sequence
  Description of Artificial Sequence: Synthetic oligonucleotide
uagacuuuggaauaagagu

SEQ ID NO: 3269226 - RNA, 19 nt, Artificial Sequence
  Description of Artificial Sequence: Synthetic oligonucleotide
uacuacuagauaaaugcca

SEQ ID NO: 3269227 - RNA, 19 nt, Artificial Sequence
  Description of Artificial Sequence: Synthetic oligonucleotide
acauccaaaauacuacuag

SEQ ID NO: 3269228 - RNA, 19 nt, Artificial Sequence
  Description of Artificial Sequence: Synthetic oligonucleotide
auauuauaccuucuucuuc

SEQ ID NO: 3269229 - RNA, 19 nt, Artificial Sequence
  Description of Artificial Sequence: Synthetic oligonucleotide
aagugaagccagcauuggc

SEQ ID NO: 3269230 - RNA, 19 nt, Artificial Sequence
  Description of Artificial Sequence: Synthetic oligonucleotide
auuggauucuagcaguguc

SEQ ID NO: 3269231 - RNA, 19 nt, Artificial Sequence
  Description of Artificial Sequence: Synthetic oligonucleotide
uacagcuugguguuggagg

SEQ ID NO: 3269232 - RNA, 19 nt, Artificial Sequence
  Description of Artificial Sequence: Synthetic oligonucleotide
aaaucugugaagugagaca

SEQ ID NO: 3269233 - RNA, 19 nt, Artificial Sequence
  Description of Artificial Sequence: Synthetic oligonucleotide
aaauuacaguccccucucc

SEQ ID NO: 3269234 - RNA, 19 nt, Artificial Sequence
  Description of Artificial Sequence: Synthetic oligonucleotide
gauucuagcagugucauca

SEQ ID NO: 3269235 - RNA, 19 nt, Artificial Sequence
  Description of Artificial Sequence: Synthetic oligonucleotide
uauaacucaucacuguccu

SEQ ID NO: 3269236 - RNA, 19 nt, Artificial Sequence
  Description of Artificial Sequence: Synthetic oligonucleotide
uucaccaaagcucuagugu

SEQ ID NO: 3269237 - RNA, 19 nt, Artificial Sequence
  Description of Artificial Sequence: Synthetic oligonucleotide
cucaccacuguacacaucc

SEQ ID NO: 3269238 - RNA, 19 nt, Artificial Sequence
  Description of Artificial Sequence: Synthetic oligonucleotide
gacuugagccuguuuaugg

SEQ ID NO: 3269239 - RNA, 19 nt, Artificial Sequence
  Description of Artificial Sequence: Synthetic oligonucleotide
guugcuuccgguuugagga

SEQ ID NO: 3269240 - RNA, 19 nt, Artificial Sequence
  Description of Artificial Sequence: Synthetic oligonucleotide
aucacuuaguagcaugccg

SEQ ID NO: 3269241 - RNA, 19 nt, Artificial Sequence
  Description of Artificial Sequence: Synthetic oligonucleotide
aagcucuagugucaguuuc

SEQ ID NO: 3269242 - RNA, 19 nt, Artificial Sequence
  Description of Artificial Sequence: Synthetic oligonucleotide
uucaugggcagaaugcuug

SEQ ID NO: 3269243 - RNA, 19 nt, Artificial Sequence
  Description of Artificial Sequence: Synthetic oligonucleotide
aauccggagcacaagcugc

SEQ ID NO: 3269244 - RNA, 19 nt, Artificial Sequence
  Description of Artificial Sequence: Synthetic oligonucleotide
ucucuuucaccaaagcucu

SEQ ID NO: 3269245 - RNA, 19 nt, Artificial Sequence
  Description of Artificial Sequence: Synthetic oligonucleotide
ucuacgaacagcuccaaau

SEQ ID NO: 3269246 - RNA, 19 nt, Artificial Sequence
  Description of Artificial Sequence: Synthetic oligonucleotide
acagcuugcucacagaacu

SEQ ID NO: 3269247 - RNA, 19 nt, Artificial Sequence
  Description of Artificial Sequence: Synthetic oligonucleotide
acugaaaucagcugugcca

SEQ ID NO: 3269248 - RNA, 19 nt, Artificial Sequence
  Description of Artificial Sequence: Synthetic oligonucleotide
guucacaaguaaugaaugg

SEQ ID NO: 3269249 - RNA, 19 nt, Artificial Sequence
  Description of Artificial Sequence: Synthetic oligonucleotide
aaauacuacuagauaaaug

SEQ ID NO: 3269250 - RNA, 19 nt, Artificial Sequence
  Description of Artificial Sequence: Synthetic oligonucleotide
ugaaagguguuacuugcug

SEQ ID NO: 3269251 - RNA, 19 nt, Artificial Sequence
  Description of Artificial Sequence: Synthetic oligonucleotide
gauucgguaauuaauauua

SEQ ID NO: 3269252 - RNA, 19 nt, Artificial Sequence
  Description of Artificial Sequence: Synthetic oligonucleotide
uuaacuggagaaauccccu

SEQ ID NO: 3269253 - RNA, 19 nt, Artificial Sequence
  Description of Artificial Sequence: Synthetic oligonucleotide
uguuuauggcuuauaacuc

SEQ ID NO: 3269254 - RNA, 19 nt, Artificial Sequence
  Description of Artificial Sequence: Synthetic oligonucleotide
aguagcaugccguccaauc

SEQ ID NO: 3269255 - RNA, 19 nt, Artificial Sequence
  Description of Artificial Sequence: Synthetic oligonucleotide
ucacuuaguagcaugccgu

SEQ ID NO: 3269256 - RNA, 19 nt, Artificial Sequence
  Description of Artificial Sequence: Synthetic oligonucleotide
uucagaaugguuccuuugu

SEQ ID NO: 3269257 - RNA, 19 nt, Artificial Sequence
  Description of Artificial Sequence: Synthetic oligonucleotide
gaauaccugauggucaagg

SEQ ID NO: 3269258 - RNA, 19 nt, Artificial Sequence
  Description of Artificial Sequence: Synthetic oligonucleotide
auacuacuagauaaaugcc

SEQ ID NO: 3269259 - RNA, 19 nt, Artificial Sequence
  Description of Artificial Sequence: Synthetic oligonucleotide
aaugcuuggacaggaagca

SEQ ID NO: 3269260 - RNA, 19 nt, Artificial Sequence
  Description of Artificial Sequence: Synthetic oligonucleotide
agauuguaucacuuaguag

SEQ ID NO: 3269261 - RNA, 19 nt, Artificial Sequence
  Description of Artificial Sequence: Synthetic oligonucleotide
aaaauacuacuagauaaau

SEQ ID NO: 3269262 - RNA, 19 nt, Artificial Sequence
  Description of Artificial Sequence: Synthetic oligonucleotide
cugucuguguucuaacucc

SEQ ID NO: 3269263 - RNA, 19 nt, Artificial Sequence
  Description of Artificial Sequence: Synthetic oligonucleotide
uguccuccgagcuaaagcu

SEQ ID NO: 3269264 - RNA, 19 nt, Artificial Sequence
  Description of Artificial Sequence: Synthetic oligonucleotide
aaaucagcugugccaagug

SEQ ID NO: 3269265 - RNA, 19 nt, Artificial Sequence
  Description of Artificial Sequence: Synthetic oligonucleotide
gauggagucaguugcuggc

SEQ ID NO: 3269266 - RNA, 19 nt, Artificial Sequence
  Description of Artificial Sequence: Synthetic oligonucleotide
uggagaaauccccugcuca

SEQ ID NO: 3269267 - RNA, 19 nt, Artificial Sequence
  Description of Artificial Sequence: Synthetic oligonucleotide
cuuauaacucaucacuguc

SEQ ID NO: 3269268 - RNA, 19 nt, Artificial Sequence
  Description of Artificial Sequence: Synthetic oligonucleotide
gaaugggucuguuccaaag

SEQ ID NO: 3269269 - RNA, 19 nt, Artificial Sequence
  Description of Artificial Sequence: Synthetic oligonucleotide
cuguuuauggcuuauaacu

SEQ ID NO: 3269270 - RNA, 19 nt, Artificial Sequence
  Description of Artificial Sequence: Synthetic oligonucleotide
cuaaaugauaaaucuguga

SEQ ID NO: 3269271 - RNA, 19 nt, Artificial Sequence
  Description of Artificial Sequence: Synthetic oligonucleotide
uucacaaguaaugaauggu

SEQ ID NO: 3269272 - RNA, 19 nt, Artificial Sequence
  Description of Artificial Sequence: Synthetic oligonucleotide
uuccaauuucuucugucug

SEQ ID NO: 3269273 - RNA, 19 nt, Artificial Sequence
  Description of Artificial Sequence: Synthetic oligonucleotide
aguuccugaauccggagca

SEQ ID NO: 3269274 - RNA, 19 nt, Artificial Sequence
  Description of Artificial Sequence: Synthetic oligonucleotide
agggacugaaaucagcugu

SEQ ID NO: 3269275 - RNA, 19 nt, Artificial Sequence
  Description of Artificial Sequence: Synthetic oligonucleotide
ucugccagaggcauacagc

SEQ ID NO: 3269276 - RNA, 19 nt, Artificial Sequence
  Description of Artificial Sequence: Synthetic oligonucleotide
aggaucauuagacuuugga

SEQ ID NO: 3269277 - RNA, 19 nt, Artificial Sequence
  Description of Artificial Sequence: Synthetic oligonucleotide
aguugcuuccgguuugagg

SEQ ID NO: 3269278 - RNA, 19 nt, Artificial Sequence
  Description of Artificial Sequence: Synthetic oligonucleotide
caagcugccgguuagccug

SEQ ID NO: 3269279 - RNA, 19 nt, Artificial Sequence
  Description of Artificial Sequence: Synthetic oligonucleotide
ucgacuguucgcuuuggag

SEQ ID NO: 3269280 - RNA, 19 nt, Artificial Sequence
  Description of Artificial Sequence: Synthetic oligonucleotide
gguaauuaauauuauaccu

SEQ ID NO: 3269281 - RNA, 19 nt, Artificial Sequence
  Description of Artificial Sequence: Synthetic oligonucleotide
ucaccaaagcucuaguguc

SEQ ID NO: 3269282 - RNA, 19 nt, Artificial Sequence
  Description of Artificial Sequence: Synthetic oligonucleotide
uuagccuguuccaauuucu

SEQ ID NO: 3269283 - RNA, 19 nt, Artificial Sequence
  Description of Artificial Sequence: Synthetic oligonucleotide
uuucaccaaagcucuagug

SEQ ID NO: 3269284 - RNA, 19 nt, Artificial Sequence
  Description of Artificial Sequence: Synthetic oligonucleotide
aaguaaugaaugguuagaa

SEQ ID NO: 3269285 - RNA, 19 nt, Artificial Sequence
  Description of Artificial Sequence: Synthetic oligonucleotide
agauaaaugccauucugua

SEQ ID NO: 3269286 - RNA, 19 nt, Artificial Sequence
  Description of Artificial Sequence: Synthetic oligonucleotide
agauggagucaguugcugg

SEQ ID NO: 3269287 - RNA, 19 nt, Artificial Sequence
  Description of Artificial Sequence: Synthetic oligonucleotide
aauggguuuccugcacagc

SEQ ID NO: 3269288 - RNA, 19 nt, Artificial Sequence
  Description of Artificial Sequence: Synthetic oligonucleotide
uuuauggcuuauaacucau

SEQ ID NO: 3269289 - RNA, 19 nt, Artificial Sequence
  Description of Artificial Sequence: Synthetic oligonucleotide
uuuguuccucuuucaaggc

SEQ ID NO: 3269290 - RNA, 19 nt, Artificial Sequence
  Description of Artificial Sequence: Synthetic oligonucleotide
uaucaggaucauuagacuu

SEQ ID NO: 3269291 - RNA, 19 nt, Artificial Sequence
  Description of Artificial Sequence: Synthetic oligonucleotide
aaucagcugugccaaguga

SEQ ID NO: 3269292 - RNA, 19 nt, Artificial Sequence
  Description of Artificial Sequence: Synthetic oligonucleotide
gaauaagagugccaagcuc

SEQ ID NO: 3269293 - RNA, 19 nt, Artificial Sequence
  Description of Artificial Sequence: Synthetic oligonucleotide
uccaacugcgccuggacca

SEQ ID NO: 3269294 - RNA, 19 nt, Artificial Sequence
  Description of Artificial Sequence: Synthetic oligonucleotide
acacauccaaaauacuacu

SEQ ID NO: 3269295 - RNA, 19 nt, Artificial Sequence
  Description of Artificial Sequence: Synthetic oligonucleotide
ugcuuggacaggaagcacu

SEQ ID NO: 3269296 - RNA, 19 nt, Artificial Sequence
  Description of Artificial Sequence: Synthetic oligonucleotide
acgaacagcuccaaauuac

SEQ ID NO: 3269297 - RNA, 19 nt, Artificial Sequence
  Description of Artificial Sequence: Synthetic oligonucleotide
gacuguucgcuuuggagac

SEQ ID NO: 3269298 - RNA, 19 nt, Artificial Sequence
  Description of Artificial Sequence: Synthetic oligonucleotide
caaucuuuguuccucuuuc

SEQ ID NO: 3269299 - RNA, 19 nt, Artificial Sequence
  Description of Artificial Sequence: Synthetic oligonucleotide
ugauuggauucuagcagug

SEQ ID NO: 3269300 - RNA, 19 nt, Artificial Sequence
  Description of Artificial Sequence: Synthetic oligonucleotide
ugagaauggguuuccugca

SEQ ID NO: 3269301 - RNA, 19 nt, Artificial Sequence
  Description of Artificial Sequence: Synthetic oligonucleotide
uccgguuugaggacuugag

SEQ ID NO: 3269302 - RNA, 19 nt, Artificial Sequence
  Description of Artificial Sequence: Synthetic oligonucleotide
acugaugccuucagaaugg

SEQ ID NO: 3269303 - RNA, 19 nt, Artificial Sequence
  Description of Artificial Sequence: Synthetic oligonucleotide
caaaggggcagauuguauc

SEQ ID NO: 3269304 - RNA, 19 nt, Artificial Sequence
  Description of Artificial Sequence: Synthetic oligonucleotide
ugucuguguucuaacuccc

SEQ ID NO: 3269305 - RNA, 19 nt, Artificial Sequence
  Description of Artificial Sequence: Synthetic oligonucleotide
uaaaagaagaagaagauga

SEQ ID NO: 3269306 - RNA, 19 nt, Artificial Sequence
  Description of Artificial Sequence: Synthetic oligonucleotide
aaggagaauauguacgagc

SEQ ID NO: 3269307 - RNA, 19 nt, Artificial Sequence
  Description of Artificial Sequence: Synthetic oligonucleotide
agaagauggaguucaagcc

SEQ ID NO: 3269308 - RNA, 19 nt, Artificial Sequence
  Description of Artificial Sequence: Synthetic oligonucleotide
auauguacgagccauaugu

SEQ ID NO: 3269309 - RNA, 19 nt, Artificial Sequence
  Description of Artificial Sequence: Synthetic oligonucleotide
uuucaugccaacaugggug

SEQ ID NO: 3269310 - RNA, 19 nt, Artificial Sequence
  Description of Artificial Sequence: Synthetic oligonucleotide
uucuuucaugccaacaugg

SEQ ID NO: 3269311 - RNA, 19 nt, Artificial Sequence
  Description of Artificial Sequence: Synthetic oligonucleotide
gaagauggaguucaagccg

SEQ ID NO: 3269312 - RNA, 19 nt, Artificial Sequence
  Description of Artificial Sequence: Synthetic oligonucleotide
aagaagaagaagaugaaga

SEQ ID NO: 3269313 - RNA, 19 nt, Artificial Sequence
  Description of Artificial Sequence: Synthetic oligonucleotide
agaagaagaagaugaagag

SEQ ID NO: 3269314 - RNA, 19 nt, Artificial Sequence
  Description of Artificial Sequence: Synthetic oligonucleotide
uucacuuucuuucaugcca

SEQ ID NO: 3269315 - RNA, 19 nt, Artificial Sequence
  Description of Artificial Sequence: Synthetic oligonucleotide
aaagaagaagaagaugaag

SEQ ID NO: 3269316 - RNA, 19 nt, Artificial Sequence
  Description of Artificial Sequence: Synthetic oligonucleotide
gaguuuucugagcagaugc

SEQ ID NO: 3269317 - RNA, 19 nt, Artificial Sequence
  Description of Artificial Sequence: Synthetic oligonucleotide
cagaagauggaguucaagc

SEQ ID NO: 3269318 - RNA, 19 nt, Artificial Sequence
  Description of Artificial Sequence: Synthetic oligonucleotide
ucuucgaguuuucugagca

SEQ ID NO: 3269319 - RNA, 19 nt, Artificial Sequence
  Description of Artificial Sequence: Synthetic oligonucleotide
aggagaauauguacgagcc

SEQ ID NO: 3269320 - RNA, 19 nt, Artificial Sequence
  Description of Artificial Sequence: Synthetic oligonucleotide
ucuuucaugccaacauggg

SEQ ID NO: 3269321 - RNA, 19 nt, Artificial Sequence
  Description of Artificial Sequence: Synthetic oligonucleotide
uguacgagccauaugucac

SEQ ID NO: 3269322 - RNA, 19 nt, Artificial Sequence
  Description of Artificial Sequence: Synthetic oligonucleotide
uuucuuucaugccaacaug

SEQ ID NO: 3269323 - RNA, 19 nt, Artificial Sequence
  Description of Artificial Sequence: Synthetic oligonucleotide
auaaaagaagaagaagaug

SEQ ID NO: 3269324 - RNA, 19 nt, Artificial Sequence
  Description of Artificial Sequence: Synthetic oligonucleotide
aauauguacgagccauaug

SEQ ID NO: 3269325 - RNA, 19 nt, Artificial Sequence
  Description of Artificial Sequence: Synthetic oligonucleotide
uucaugccaacaugggugg

SEQ ID NO: 3269326 - RNA, 19 nt, Artificial Sequence
  Description of Artificial Sequence: Synthetic oligonucleotide
auauuuagcucuucgaguu

SEQ ID NO: 3269327 - RNA, 19 nt, Artificial Sequence
  Description of Artificial Sequence: Synthetic oligonucleotide
aagauggaguucaagccgg

SEQ ID NO: 3269328 - RNA, 19 nt, Artificial Sequence
  Description of Artificial Sequence: Synthetic oligonucleotide
uuuucugagcagaugcugu

SEQ ID NO: 3269329 - RNA, 19 nt, Artificial Sequence
  Description of Artificial Sequence: Synthetic oligonucleotide
agcucuucgaguuuucuga

SEQ ID NO: 3269330 - RNA, 19 nt, Artificial Sequence
  Description of Artificial Sequence: Synthetic oligonucleotide
uggaguucaagccggcugc

SEQ ID NO: 3269331 - RNA, 19 nt, Artificial Sequence
  Description of Artificial Sequence: Synthetic oligonucleotide
aguucaagccggcugcuuc

SEQ ID NO: 3269332 - RNA, 19 nt, Artificial Sequence
  Description of Artificial Sequence: Synthetic oligonucleotide
agccauaugucaccucggc

SEQ ID NO: 3269333 - RNA, 19 nt, Artificial Sequence
  Description of Artificial Sequence: Synthetic oligonucleotide
ucugagcagaugcuguggc

SEQ ID NO: 3269334 - RNA, 19 nt, Artificial Sequence
  Description of Artificial Sequence: Synthetic oligonucleotide
aaaagaagaagaagaugaa

SEQ ID NO: 3269335 - RNA, 19 nt, Artificial Sequence
  Description of Artificial Sequence: Synthetic oligonucleotide
cauaugucaccucggcucc

SEQ ID NO: 3269336 - RNA, 19 nt, Artificial Sequence
  Description of Artificial Sequence: Synthetic oligonucleotide
auguacgagccauauguca

SEQ ID NO: 3269337 - RNA, 19 nt, Artificial Sequence
  Description of Artificial Sequence: Synthetic oligonucleotide
uuucugagcagaugcugug

SEQ ID NO: 3269338 - RNA, 19 nt, Artificial Sequence
  Description of Artificial Sequence: Synthetic oligonucleotide
auggaguucaagccggcug

SEQ ID NO: 3269339 - RNA, 19 nt, Artificial Sequence
  Description of Artificial Sequence: Synthetic oligonucleotide
ucacuuucuuucaugccaa

SEQ ID NO: 3269340 - RNA, 19 nt, Artificial Sequence
  Description of Artificial Sequence: Synthetic oligonucleotide
uucgaguuuucugagcaga

SEQ ID NO: 3269341 - RNA, 19 nt, Artificial Sequence
  Description of Artificial Sequence: Synthetic oligonucleotide
ugcuucacuuucuuucaug

SEQ ID NO: 3269342 - RNA, 19 nt, Artificial Sequence
  Description of Artificial Sequence: Synthetic oligonucleotide
gaaggagaauauguacgag

SEQ ID NO: 3269343 - RNA, 19 nt, Artificial Sequence
  Description of Artificial Sequence: Synthetic oligonucleotide
cuucacuuucuuucaugcc

SEQ ID NO: 3269344 - RNA, 19 nt, Artificial Sequence
  Description of Artificial Sequence: Synthetic oligonucleotide
uauguacgagccauauguc

SEQ ID NO: 3269345 - RNA, 19 nt, Artificial Sequence
  Description of Artificial Sequence: Synthetic oligonucleotide
gcuucacuuucuuucaugc

SEQ ID NO: 3269346 - RNA, 19 nt, Artificial Sequence
  Description of Artificial Sequence: Synthetic oligonucleotide
cauaaaagaagaagaagau

SEQ ID NO: 3269347 - RNA, 19 nt, Artificial Sequence
  Description of Artificial Sequence: Synthetic oligonucleotide
gcgaaggagaauauguacg

SEQ ID NO: 3269348 - RNA, 19 nt, Artificial Sequence
  Description of Artificial Sequence: Synthetic oligonucleotide
uagcucuucgaguuuucug

SEQ ID NO: 3269349 - RNA, 19 nt, Artificial Sequence
  Description of Artificial Sequence: Synthetic oligonucleotide
guuuucugagcagaugcug

SEQ ID NO: 3269350 - RNA, 19 nt, Artificial Sequence
  Description of Artificial Sequence: Synthetic oligonucleotide
ccauaugucaccucggcuc

SEQ ID NO: 3269351 - RNA, 19 nt, Artificial Sequence
  Description of Artificial Sequence: Synthetic oligonucleotide
guacgagccauaugucacc

SEQ ID NO: 3269352 - RNA, 19 nt, Artificial Sequence
  Description of Artificial Sequence: Synthetic oligonucleotide
gagaauauguacgagccau

SEQ ID NO: 3269353 - RNA, 19 nt, Artificial Sequence
  Description of Artificial Sequence: Synthetic oligonucleotide
cucuucgaguuuucugagc

SEQ ID NO: 3269354 - RNA, 19 nt, Artificial Sequence
  Description of Artificial Sequence: Synthetic oligonucleotide
ggcugcuucacuuucuuuc

SEQ ID NO: 3269355 - RNA, 19 nt, Artificial Sequence
  Description of Artificial Sequence: Synthetic oligonucleotide
ggcgaaggagaauauguac

SEQ ID NO: 3269356 - RNA, 19 nt, Artificial Sequence
  Description of Artificial Sequence: Synthetic oligonucleotide
ucgaguuuucugagcagau

SEQ ID NO: 3269357 - RNA, 19 nt, Artificial Sequence
  Description of Artificial Sequence: Synthetic oligonucleotide
uuuagcucuucgaguuuuc

SEQ ID NO: 3269358 - RNA, 19 nt, Artificial Sequence
  Description of Artificial Sequence: Synthetic oligonucleotide
cuucgaguuuucugagcag

SEQ ID NO: 3269359 - RNA, 19 nt, Artificial Sequence
  Description of Artificial Sequence: Synthetic oligonucleotide
uauuuagcucuucgaguuu

SEQ ID NO: 3269360 - RNA, 19 nt, Artificial Sequence
  Description of Artificial Sequence: Synthetic oligonucleotide
acuuucuuucaugccaaca

SEQ ID NO: 3269361 - RNA, 19 nt, Artificial Sequence
  Description of Artificial Sequence: Synthetic oligonucleotide
ugagcagaugcuguggcuu

SEQ ID NO: 3269362 - RNA, 19 nt, Artificial Sequence
  Description of Artificial Sequence: Synthetic oligonucleotide
cuuucuuucaugccaacau

SEQ ID NO: 3269363 - RNA, 19 nt, Artificial Sequence
  Description of Artificial Sequence: Synthetic oligonucleotide
uuagcucuucgaguuuucu

SEQ ID NO: 3269364 - RNA, 19 nt, Artificial Sequence
  Description of Artificial Sequence: Synthetic oligonucleotide
auuuagcucuucgaguuuu

SEQ ID NO: 3269365 - RNA, 19 nt, Artificial Sequence
  Description of Artificial Sequence: Synthetic oligonucleotide
cgagccauaugucaccucg

SEQ ID NO: 3269366 - RNA, 19 nt, Artificial Sequence
  Description of Artificial Sequence: Synthetic oligonucleotide
gagccauaugucaccucgg

SEQ ID NO: 3269367 - RNA, 19 nt, Artificial Sequence
  Description of Artificial Sequence: Synthetic oligonucleotide
aguuuucugagcagaugcu

SEQ ID NO: 3269368 - RNA, 19 nt, Artificial Sequence
  Description of Artificial Sequence: Synthetic oligonucleotide
agauggaguucaagccggc

SEQ ID NO: 3269369 - RNA, 19 nt, Artificial Sequence
  Description of Artificial Sequence: Synthetic oligonucleotide
uacgagccauaugucaccu

SEQ ID NO: 3269370 - RNA, 19 nt, Artificial Sequence
  Description of Artificial Sequence: Synthetic oligonucleotide
guucaagccggcugcuuca

SEQ ID NO: 3269371 - RNA, 19 nt, Artificial Sequence
  Description of Artificial Sequence: Synthetic oligonucleotide
agccggcugcuucacuuuc

SEQ ID NO: 3269372 - RNA, 19 nt, Artificial Sequence
  Description of Artificial Sequence: Synthetic oligonucleotide
gaauauguacgagccauau

SEQ ID NO: 3269373 - RNA, 19 nt, Artificial Sequence
  Description of Artificial Sequence: Synthetic oligonucleotide
cuuucaugccaacaugggu

SEQ ID NO: 3269374 - RNA, 19 nt, Artificial Sequence
  Description of Artificial Sequence: Synthetic oligonucleotide
acgagccauaugucaccuc

SEQ ID NO: 3269375 - RNA, 19 nt, Artificial Sequence
  Description of Artificial Sequence: Synthetic oligonucleotide
gcucuucgaguuuucugag

SEQ ID NO: 3269376 - RNA, 19 nt, Artificial Sequence
  Description of Artificial Sequence: Synthetic oligonucleotide
gcugcuucacuuucuuuca

SEQ ID NO: 3269377 - RNA, 19 nt, Artificial Sequence
  Description of Artificial Sequence: Synthetic oligonucleotide
aagccggcugcuucacuuu

SEQ ID NO: 3269378 - RNA, 19 nt, Artificial Sequence
  Description of Artificial Sequence: Synthetic oligonucleotide
ggagaauauguacgagcca

SEQ ID NO: 3269379 - RNA, 19 nt, Artificial Sequence
  Description of Artificial Sequence: Synthetic oligonucleotide
cacuuucuuucaugccaac

SEQ ID NO: 3269380 - RNA, 19 nt, Artificial Sequence
  Description of Artificial Sequence: Synthetic oligonucleotide
ucaagccggcugcuucacu

SEQ ID NO: 3269381 - RNA, 19 nt, Artificial Sequence
  Description of Artificial Sequence: Synthetic oligonucleotide
agaauauguacgagccaua

SEQ ID NO: 3269382 - RNA, 19 nt, Artificial Sequence
  Description of Artificial Sequence: Synthetic oligonucleotide
uucaagccggcugcuucac

SEQ ID NO: 3269383 - RNA, 19 nt, Artificial Sequence
  Description of Artificial Sequence: Synthetic oligonucleotide
cgaaggagaauauguacga

SEQ ID NO: 3269384 - RNA, 19 nt, Artificial Sequence
  Description of Artificial Sequence: Synthetic oligonucleotide
gauggaguucaagccggcu

SEQ ID NO: 3269385 - RNA, 19 nt, Artificial Sequence
  Description of Artificial Sequence: Synthetic oligonucleotide
auaugucaccucggcucca

SEQ ID NO: 3269386 - RNA, 19 nt, Artificial Sequence
  Description of Artificial Sequence: Synthetic oligonucleotide
caagccggcugcuucacuu

SEQ ID NO: 3269387 - RNA, 19 nt, Artificial Sequence
  Description of Artificial Sequence: Synthetic oligonucleotide
gagcagaugcuguggcuuu

SEQ ID NO: 3269388 - RNA, 19 nt, Artificial Sequence
  Description of Artificial Sequence: Synthetic oligonucleotide
cugagcagaugcuguggcu

SEQ ID NO: 3269389 - RNA, 19 nt, Artificial Sequence
  Description of Artificial Sequence: Synthetic oligonucleotide
agcagaugcuguggcuuuu

SEQ ID NO: 3269390 - RNA, 19 nt, Artificial Sequence
  Description of Artificial Sequence: Synthetic oligonucleotide
cgaguuuucugagcagaug

SEQ ID NO: 3269391 - RNA, 19 nt, Artificial Sequence
  Description of Artificial Sequence: Synthetic oligonucleotide
gccauaugucaccucggcu

SEQ ID NO: 3269392 - RNA, 19 nt, Artificial Sequence
  Description of Artificial Sequence: Synthetic oligonucleotide
cugcuucacuuucuuucau

SEQ ID NO: 3269393 - RNA, 19 nt, Artificial Sequence
  Description of Artificial Sequence: Synthetic oligonucleotide
gaguucaagccggcugcuu

SEQ ID NO: 3269394 - RNA, 19 nt, Artificial Sequence
  Description of Artificial Sequence: Synthetic oligonucleotide
ggaguucaagccggcugcu

SEQ ID NO: 3269395 - RNA, 19 nt, Artificial Sequence
  Description of Artificial Sequence: Synthetic oligonucleotide
gccggcugcuucacuuucu

SEQ ID NO: 3269396 - RNA, 19 nt, Artificial Sequence
  Description of Artificial Sequence: Synthetic oligonucleotide
aaaacuucaaguauaagcc

SEQ ID NO: 3269397 - RNA, 19 nt, Artificial Sequence
  Description of Artificial Sequence: Synthetic oligonucleotide
aauauaaaagaugagcuuc

SEQ ID NO: 3269398 - RNA, 19 nt, Artificial Sequence
  Description of Artificial Sequence: Synthetic oligonucleotide
gaaaacuucaaguauaagc

SEQ ID NO: 3269399 - RNA, 19 nt, Artificial Sequence
  Description of Artificial Sequence: Synthetic oligonucleotide
ucaaucuagaauuagguag

SEQ ID NO: 3269400 - RNA, 19 nt, Artificial Sequence
  Description of Artificial Sequence: Synthetic oligonucleotide
aaauguugggccuugagag

SEQ ID NO: 3269401 - RNA, 19 nt, Artificial Sequence
  Description of Artificial Sequence: Synthetic oligonucleotide
gauuuuaaaauguugggcc

SEQ ID NO: 3269402 - RNA, 19 nt, Artificial Sequence
  Description of Artificial Sequence: Synthetic oligonucleotide
aauuagguagcauccagac

SEQ ID NO: 3269403 - RNA, 19 nt, Artificial Sequence
  Description of Artificial Sequence: Synthetic oligonucleotide
ugaauuaggaauuuuaguc

SEQ ID NO: 3269404 - RNA, 19 nt, Artificial Sequence
  Description of Artificial Sequence: Synthetic oligonucleotide
cauauuaagucccagacag

SEQ ID NO: 3269405 - RNA, 19 nt, Artificial Sequence
  Description of Artificial Sequence: Synthetic oligonucleotide
gaauacaaagguuucagag

SEQ ID NO: 3269406 - RNA, 19 nt, Artificial Sequence
  Description of Artificial Sequence: Synthetic oligonucleotide
auacaaagguuucagagac

SEQ ID NO: 3269407 - RNA, 19 nt, Artificial Sequence
  Description of Artificial Sequence: Synthetic oligonucleotide
aaacuucaaguauaagccc

SEQ ID NO: 3269408 - RNA, 19 nt, Artificial Sequence
  Description of Artificial Sequence: Synthetic oligonucleotide
uuagguagcauccagacuc

SEQ ID NO: 3269409 - RNA, 19 nt, Artificial Sequence
  Description of Artificial Sequence: Synthetic oligonucleotide
aaauacauacuucacagaa

SEQ ID NO: 3269410 - RNA, 19 nt, Artificial Sequence
  Description of Artificial Sequence: Synthetic oligonucleotide
uacaauauaaaagaugagc

SEQ ID NO: 3269411 - RNA, 19 nt, Artificial Sequence
  Description of Artificial Sequence: Synthetic oligonucleotide
uaaaagaugagcuucccug

SEQ ID NO: 3269412 - RNA, 19 nt, Artificial Sequence
  Description of Artificial Sequence: Synthetic oligonucleotide
uaaaggaaauaguaagugg

SEQ ID NO: 3269413 - RNA, 19 nt, Artificial Sequence
  Description of Artificial Sequence: Synthetic oligonucleotide
aagucguccaguuucagag

SEQ ID NO: 3269414 - RNA, 19 nt, Artificial Sequence
  Description of Artificial Sequence: Synthetic oligonucleotide
gaauuaggaauuuuagucc

SEQ ID NO: 3269415 - RNA, 19 nt, Artificial Sequence
  Description of Artificial Sequence: Synthetic oligonucleotide
aauacaaagguuucagaga

SEQ ID NO: 3269416 - RNA, 19 nt, Artificial Sequence
  Description of Artificial Sequence: Synthetic oligonucleotide
ugaguaucagugcagaagc

SEQ ID NO: 3269417 - RNA, 19 nt, Artificial Sequence
  Description of Artificial Sequence: Synthetic oligonucleotide
aauuaggaauuuuaguccu

SEQ ID NO: 3269418 - RNA, 19 nt, Artificial Sequence
  Description of Artificial Sequence: Synthetic oligonucleotide
gaauuuuaguccuauguug

SEQ ID NO: 3269419 - RNA, 19 nt, Artificial Sequence
  Description of Artificial Sequence: Synthetic oligonucleotide
aguuucagagauuuguagg

SEQ ID NO: 3269420 - RNA, 19 nt, Artificial Sequence
  Description of Artificial Sequence: Synthetic oligonucleotide
uuugccagaguuuagguga

SEQ ID NO: 3269421 - RNA, 19 nt, Artificial Sequence
  Description of Artificial Sequence: Synthetic oligonucleotide
aacuucaaguauaagcccc

SEQ ID NO: 3269422 - RNA, 19 nt, Artificial Sequence
  Description of Artificial Sequence: Synthetic oligonucleotide
uguucagaaaacuucaagu

SEQ ID NO: 3269423 - RNA, 19 nt, Artificial Sequence
  Description of Artificial Sequence: Synthetic oligonucleotide
aauacaguaccacugcccu

SEQ ID NO: 3269424 - RNA, 19 nt, Artificial Sequence
  Description of Artificial Sequence: Synthetic oligonucleotide
uacauauuaagucccagac

SEQ ID NO: 3269425 - RNA, 19 nt, Artificial Sequence
  Description of Artificial Sequence: Synthetic oligonucleotide
acaaagguuucagagaccc

SEQ ID NO: 3269426 - RNA, 19 nt, Artificial Sequence
  Description of Artificial Sequence: Synthetic oligonucleotide
aaauacaguaccacugccc

SEQ ID NO: 3269427 - RNA, 19 nt, Artificial Sequence
  Description of Artificial Sequence: Synthetic oligonucleotide
ucuagaauuagguagcauc

SEQ ID NO: 3269428 - RNA, 19 nt, Artificial Sequence
  Description of Artificial Sequence: Synthetic oligonucleotide
aaaauguugggccuugaga

SEQ ID NO: 3269429 - RNA, 19 nt, Artificial Sequence
  Description of Artificial Sequence: Synthetic oligonucleotide
cuagaauuagguagcaucc

SEQ ID NO: 3269430 - RNA, 19 nt, Artificial Sequence
  Description of Artificial Sequence: Synthetic oligonucleotide
ucuuguaaaggaaauagua

SEQ ID NO: 3269431 - RNA, 19 nt, Artificial Sequence
  Description of Artificial Sequence: Synthetic oligonucleotide
auacauacuucacagaaca

SEQ ID NO: 3269432 - RNA, 19 nt, Artificial Sequence
  Description of Artificial Sequence: Synthetic oligonucleotide
aaaggaaauaguaaguggu

SEQ ID NO: 3269433 - RNA, 19 nt, Artificial Sequence
  Description of Artificial Sequence: Synthetic oligonucleotide
aauaguaagugguuuuggu

SEQ ID NO: 3269434 - RNA, 19 nt, Artificial Sequence
  Description of Artificial Sequence: Synthetic oligonucleotide
agagauaaggcaccuaaag

SEQ ID NO: 3269435 - RNA, 19 nt, Artificial Sequence
  Description of Artificial Sequence: Synthetic oligonucleotide
ucaguauucuuguaaagga

SEQ ID NO: 3269436 - RNA, 19 nt, Artificial Sequence
  Description of Artificial Sequence: Synthetic oligonucleotide
caagguugcacagagaagg

SEQ ID NO: 3269437 - RNA, 19 nt, Artificial Sequence
  Description of Artificial Sequence: Synthetic oligonucleotide
uggucuacauauuaagucc

SEQ ID NO: 3269438 - RNA, 19 nt, Artificial Sequence
  Description of Artificial Sequence: Synthetic oligonucleotide
aagaauacaaagguuucag

SEQ ID NO: 3269439 - RNA, 19 nt, Artificial Sequence
  Description of Artificial Sequence: Synthetic oligonucleotide
auucuuguaaaggaaauag

SEQ ID NO: 3269440 - RNA, 19 nt, Artificial Sequence
  Description of Artificial Sequence: Synthetic oligonucleotide
accuaaagaauacaaaggu

SEQ ID NO: 3269441 - RNA, 19 nt, Artificial Sequence
  Description of Artificial Sequence: Synthetic oligonucleotide
uauuaagucccagacagcc

SEQ ID NO: 3269442 - RNA, 19 nt, Artificial Sequence
  Description of Artificial Sequence: Synthetic oligonucleotide
agauaaggcaccuaaagaa

SEQ ID NO: 3269443 - RNA, 19 nt, Artificial Sequence
  Description of Artificial Sequence: Synthetic oligonucleotide
aagccccaaauacaguacc

SEQ ID NO: 3269444 - RNA, 19 nt, Artificial Sequence
  Description of Artificial Sequence: Synthetic oligonucleotide
ucucaaucuagaauuaggu

SEQ ID NO: 3269445 - RNA, 19 nt, Artificial Sequence
  Description of Artificial Sequence: Synthetic oligonucleotide
uuugaggccagccuggucu

SEQ ID NO: 3269446 - RNA, 19 nt, Artificial Sequence
  Description of Artificial Sequence: Synthetic oligonucleotide
aauacauacuucacagaac

SEQ ID NO: 3269447 - RNA, 19 nt, Artificial Sequence
  Description of Artificial Sequence: Synthetic oligonucleotide
acaauauaaaagaugagcu

SEQ ID NO: 3269448 - RNA, 19 nt, Artificial Sequence
  Description of Artificial Sequence: Synthetic oligonucleotide
aaagguuucagagacccug

SEQ ID NO: 3269449 - RNA, 19 nt, Artificial Sequence
  Description of Artificial Sequence: Synthetic oligonucleotide
aggaauuuuaguccuaugu

SEQ ID NO: 3269450 - RNA, 19 nt, Artificial Sequence
  Description of Artificial Sequence: Synthetic oligonucleotide
caaucuagaauuagguagc

SEQ ID NO: 3269451 - RNA, 19 nt, Artificial Sequence
  Description of Artificial Sequence: Synthetic oligonucleotide
gagacccugaaauacauac

SEQ ID NO: 3269452 - RNA, 19 nt, Artificial Sequence
  Description of Artificial Sequence: Synthetic oligonucleotide
caccuaaagaauacaaagg

SEQ ID NO: 3269453 - RNA, 19 nt, Artificial Sequence
  Description of Artificial Sequence: Synthetic oligonucleotide
auauaaaagaugagcuucc

SEQ ID NO: 3269454 - RNA, 19 nt, Artificial Sequence
  Description of Artificial Sequence: Synthetic oligonucleotide
auaaggaccacguacaaua

SEQ ID NO: 3269455 - RNA, 19 nt, Artificial Sequence
  Description of Artificial Sequence: Synthetic oligonucleotide
aaauaguaagugguuuugg

SEQ ID NO: 3269456 - RNA, 19 nt, Artificial Sequence
  Description of Artificial Sequence: Synthetic oligonucleotide
aaaagaugagcuucccuga

SEQ ID NO: 3269457 - RNA, 19 nt, Artificial Sequence
  Description of Artificial Sequence: Synthetic oligonucleotide
guuucagagauuuguaggc

SEQ ID NO: 3269458 - RNA, 19 nt, Artificial Sequence
  Description of Artificial Sequence: Synthetic oligonucleotide
ucagaaaacuucaaguaua

SEQ ID NO: 3269459 - RNA, 19 nt, Artificial Sequence
  Description of Artificial Sequence: Synthetic oligonucleotide
ugagagauaaggcaccuaa

SEQ ID NO: 3269460 - RNA, 19 nt, Artificial Sequence
  Description of Artificial Sequence: Synthetic oligonucleotide
agauuuguaggcauuugcc

SEQ ID NO: 3269461 - RNA, 19 nt, Artificial Sequence
  Description of Artificial Sequence: Synthetic oligonucleotide
aauuuuaguccuauguugu

SEQ ID NO: 3269462 - RNA, 19 nt, Artificial Sequence
  Description of Artificial Sequence: Synthetic oligonucleotide
aguaucagugcagaagccc

SEQ ID NO: 3269463 - RNA, 19 nt, Artificial Sequence
  Description of Artificial Sequence: Synthetic oligonucleotide
uuuaguccuauguuguuca

SEQ ID NO: 3269464 - RNA, 19 nt, Artificial Sequence
  Description of Artificial Sequence: Synthetic oligonucleotide
agagaagggaaagucgucc

SEQ ID NO: 3269465 - RNA, 19 nt, Artificial Sequence
  Description of Artificial Sequence: Synthetic oligonucleotide
uaaagaauacaaagguuuc

SEQ ID NO: 3269466 - RNA, 19 nt, Artificial Sequence
  Description of Artificial Sequence: Synthetic oligonucleotide
auaguaagugguuuuggug

SEQ ID NO: 3269467 - RNA, 19 nt, Artificial Sequence
  Description of Artificial Sequence: Synthetic oligonucleotide
uguuguucagggauguuca

SEQ ID NO: 3269468 - RNA, 19 nt, Artificial Sequence
  Description of Artificial Sequence: Synthetic oligonucleotide
uucagaaaacuucaaguau

SEQ ID NO: 3269469 - RNA, 19 nt, Artificial Sequence
  Description of Artificial Sequence: Synthetic oligonucleotide
ugggccuugagagauaagg

SEQ ID NO: 3269470 - RNA, 19 nt, Artificial Sequence
  Description of Artificial Sequence: Synthetic oligonucleotide
uuuaggugaauuaggaauu

SEQ ID NO: 3269471 - RNA, 19 nt, Artificial Sequence
  Description of Artificial Sequence: Synthetic oligonucleotide
ucccagacagccaagguug

SEQ ID NO: 3269472 - RNA, 19 nt, Artificial Sequence
  Description of Artificial Sequence: Synthetic oligonucleotide
cucaguauucuuguaaagg

SEQ ID NO: 3269473 - RNA, 19 nt, Artificial Sequence
  Description of Artificial Sequence: Synthetic oligonucleotide
aaagaugagcuucccugag

SEQ ID NO: 3269474 - RNA, 19 nt, Artificial Sequence
  Description of Artificial Sequence: Synthetic oligonucleotide
guaaaggaaauaguaagug

SEQ ID NO: 3269475 - RNA, 19 nt, Artificial Sequence
  Description of Artificial Sequence: Synthetic oligonucleotide
agaauuagguagcauccag

SEQ ID NO: 3269476 - RNA, 19 nt, Artificial Sequence
  Description of Artificial Sequence: Synthetic oligonucleotide
gagauuuguaggcauuugc

SEQ ID NO: 3269477 - RNA, 19 nt, Artificial Sequence
  Description of Artificial Sequence: Synthetic oligonucleotide
auuuuaaaauguugggccu

SEQ ID NO: 3269478 - RNA, 19 nt, Artificial Sequence
  Description of Artificial Sequence: Synthetic oligonucleotide
uacaguaccacugcccugg

SEQ ID NO: 3269479 - RNA, 19 nt, Artificial Sequence
  Description of Artificial Sequence: Synthetic oligonucleotide
uuaagucccagacagccaa

SEQ ID NO: 3269480 - RNA, 19 nt, Artificial Sequence
  Description of Artificial Sequence: Synthetic oligonucleotide
uaaaauguugggccuugag

SEQ ID NO: 3269481 - RNA, 19 nt, Artificial Sequence
  Description of Artificial Sequence: Synthetic oligonucleotide
uccuauguuguucagggau

SEQ ID NO: 3269482 - RNA, 19 nt, Artificial Sequence
  Description of Artificial Sequence: Synthetic oligonucleotide
accacguacaauauaaaag

SEQ ID NO: 3269483 - RNA, 19 nt, Artificial Sequence
  Description of Artificial Sequence: Synthetic oligonucleotide
uccggauuuuaaaauguug

SEQ ID NO: 3269484 - RNA, 19 nt, Artificial Sequence
  Description of Artificial Sequence: Synthetic oligonucleotide
aaagaauacaaagguuuca

SEQ ID NO: 3269485 - RNA, 19 nt, Artificial Sequence
  Description of Artificial Sequence: Synthetic oligonucleotide
gcaccuaaagaauacaaag

SEQ ID NO: 3269486 - RNA, 19 nt, Artificial Sequence
  Description of Artificial Sequence: Synthetic oligonucleotide
auguucagaaaacuucaag

SEQ ID NO: 3269487 - RNA, 19 nt, Artificial Sequence
  Description of Artificial Sequence: Synthetic oligonucleotide
cuggucuacauauuaaguc

SEQ ID NO: 3269488 - RNA, 19 nt, Artificial Sequence
  Description of Artificial Sequence: Synthetic oligonucleotide
uguucagggauguucagaa

SEQ ID NO: 3269489 - RNA, 19 nt, Artificial Sequence
  Description of Artificial Sequence: Synthetic oligonucleotide
uccagacucaguauucuug

SEQ ID NO: 3269490 - RNA, 19 nt, Artificial Sequence
  Description of Artificial Sequence: Synthetic oligonucleotide
gauuuguaggcauuugcca

SEQ ID NO: 3269491 - RNA, 19 nt, Artificial Sequence
  Description of Artificial Sequence: Synthetic oligonucleotide
cacagagaagggaaagucg

SEQ ID NO: 3269492 - RNA, 19 nt, Artificial Sequence
  Description of Artificial Sequence: Synthetic oligonucleotide
aguaccacugcccugguaa

SEQ ID NO: 3269493 - RNA, 19 nt, Artificial Sequence
  Description of Artificial Sequence: Synthetic oligonucleotide
gaaauaguaagugguuuug

SEQ ID NO: 3269494 - RNA, 19 nt, Artificial Sequence
  Description of Artificial Sequence: Synthetic oligonucleotide
uucuuguaaaggaaauagu

SEQ ID NO: 3269495 - RNA, 19 nt, Artificial Sequence
  Description of Artificial Sequence: Synthetic oligonucleotide
uccaguuucagagauuugu

SEQ ID NO: 3269496 - RNA, 19 nt, Artificial Sequence
  Description of Artificial Sequence: Synthetic oligonucleotide
auaaauacaacauuggcuc

SEQ ID NO: 3269497 - RNA, 19 nt, Artificial Sequence
  Description of Artificial Sequence: Synthetic oligonucleotide
aaucuuaauaaauacaaca

SEQ ID NO: 3269498 - RNA, 19 nt, Artificial Sequence
  Description of Artificial Sequence: Synthetic oligonucleotide
cuuaauaaauacaacauug

SEQ ID NO: 3269499 - RNA, 19 nt, Artificial Sequence
  Description of Artificial Sequence: Synthetic oligonucleotide
uuaauaaauacaacauugg

SEQ ID NO: 3269500 - RNA, 19 nt, Artificial Sequence
  Description of Artificial Sequence: Synthetic oligonucleotide
aaagcaaaugcucccgggc

SEQ ID NO: 3269501 - RNA, 19 nt, Artificial Sequence
  Description of Artificial Sequence: Synthetic oligonucleotide
uaauaaauacaacauuggc

SEQ ID NO: 3269502 - RNA, 19 nt, Artificial Sequence
  Description of Artificial Sequence: Synthetic oligonucleotide
aauaaauacaacauuggcu

SEQ ID NO: 3269503 - RNA, 19 nt, Artificial Sequence
  Description of Artificial Sequence: Synthetic oligonucleotide
aacauuggcucucuguagg

SEQ ID NO: 3269504 - RNA, 19 nt, Artificial Sequence
  Description of Artificial Sequence: Synthetic oligonucleotide
aaaagcaaaugcucccggg

SEQ ID NO: 3269505 - RNA, 19 nt, Artificial Sequence
  Description of Artificial Sequence: Synthetic oligonucleotide
auaaucuuaauaaauacaa

SEQ ID NO: 3269506 - RNA, 19 nt, Artificial Sequence
  Description of Artificial Sequence: Synthetic oligonucleotide
auuggcucucuguagggcc

SEQ ID NO: 3269507 - RNA, 19 nt, Artificial Sequence
  Description of Artificial Sequence: Synthetic oligonucleotide
ucuuaauaaauacaacauu

SEQ ID NO: 3269508 - RNA, 19 nt, Artificial Sequence
  Description of Artificial Sequence: Synthetic oligonucleotide
aaauacaacauuggcucuc

SEQ ID NO: 3269509 - RNA, 19 nt, Artificial Sequence
  Description of Artificial Sequence: Synthetic oligonucleotide
uaaucuuaauaaauacaac

SEQ ID NO: 3269510 - RNA, 19 nt, Artificial Sequence
  Description of Artificial Sequence: Synthetic oligonucleotide
uucgacgccguacaaaagc

SEQ ID NO: 3269511 - RNA, 19 nt, Artificial Sequence
  Description of Artificial Sequence: Synthetic oligonucleotide
uacaaaagcaaaugcuccc

SEQ ID NO: 3269512 - RNA, 19 nt, Artificial Sequence
  Description of Artificial Sequence: Synthetic oligonucleotide
uguagggccauguucucgg

SEQ ID NO: 3269513 - RNA, 19 nt, Artificial Sequence
  Description of Artificial Sequence: Synthetic oligonucleotide
cauaaucuuaauaaauaca

SEQ ID NO: 3269514 - RNA, 19 nt, Artificial Sequence
  Description of Artificial Sequence: Synthetic oligonucleotide
aaugcucccgggcugagcu

SEQ ID NO: 3269515 - RNA, 19 nt, Artificial Sequence
  Description of Artificial Sequence: Synthetic oligonucleotide
caucuguggauuucgacgc

SEQ ID NO: 3269516 - RNA, 19 nt, Artificial Sequence
  Description of Artificial Sequence: Synthetic oligonucleotide
uguucucgggcauugagcu

SEQ ID NO: 3269517 - RNA, 19 nt, Artificial Sequence
  Description of Artificial Sequence: Synthetic oligonucleotide
uccuguuugucucucugag

SEQ ID NO: 3269518 - RNA, 19 nt, Artificial Sequence
  Description of Artificial Sequence: Synthetic oligonucleotide
guguguaccgcaucugugg

SEQ ID NO: 3269519 - RNA, 19 nt, Artificial Sequence
  Description of Artificial Sequence: Synthetic oligonucleotide
aagcaaaugcucccgggcu

SEQ ID NO: 3269520 - RNA, 19 nt, Artificial Sequence
  Description of Artificial Sequence: Synthetic oligonucleotide
auuucgacgccguacaaaa

SEQ ID NO: 3269521 - RNA, 19 nt, Artificial Sequence
  Description of Artificial Sequence: Synthetic oligonucleotide
gcaucuguggauuucgacg

SEQ ID NO: 3269522 - RNA, 19 nt, Artificial Sequence
  Description of Artificial Sequence: Synthetic oligonucleotide
acaaaagcaaaugcucccg

SEQ ID NO: 3269523 - RNA, 19 nt, Artificial Sequence
  Description of Artificial Sequence: Synthetic oligonucleotide
uggauuucgacgccguaca

SEQ ID NO: 3269524 - RNA, 19 nt, Artificial Sequence
  Description of Artificial Sequence: Synthetic oligonucleotide
gagcuagccauccuguuug

SEQ ID NO: 3269525 - RNA, 19 nt, Artificial Sequence
  Description of Artificial Sequence: Synthetic oligonucleotide
ucugagguugguuuccuac

SEQ ID NO: 3269526 - RNA, 19 nt, Artificial Sequence
  Description of Artificial Sequence: Synthetic oligonucleotide
guacaaaagcaaaugcucc

SEQ ID NO: 3269527 - RNA, 19 nt, Artificial Sequence
  Description of Artificial Sequence: Synthetic oligonucleotide
aucuuaauaaauacaacau

SEQ ID NO: 3269528 - RNA, 19 nt, Artificial Sequence
  Description of Artificial Sequence: Synthetic oligonucleotide
uuugucucucugagguugg

SEQ ID NO: 3269529 - RNA, 19 nt, Artificial Sequence
  Description of Artificial Sequence: Synthetic oligonucleotide
uacaacauuggcucucugu

SEQ ID NO: 3269530 - RNA, 19 nt, Artificial Sequence
  Description of Artificial Sequence: Synthetic oligonucleotide
acaacauuggcucucugua

SEQ ID NO: 3269531 - RNA, 19 nt, Artificial Sequence
  Description of Artificial Sequence: Synthetic oligonucleotide
uaaauacaacauuggcucu

SEQ ID NO: 3269532 - RNA, 19 nt, Artificial Sequence
  Description of Artificial Sequence: Synthetic oligonucleotide
aauacaacauuggcucucu

SEQ ID NO: 3269533 - RNA, 19 nt, Artificial Sequence
  Description of Artificial Sequence: Synthetic oligonucleotide
ucucuguagggccauguuc

SEQ ID NO: 3269534 - RNA, 19 nt, Artificial Sequence
  Description of Artificial Sequence: Synthetic oligonucleotide
caaaagcaaaugcucccgg

SEQ ID NO: 3269535 - RNA, 19 nt, Artificial Sequence
  Description of Artificial Sequence: Synthetic oligonucleotide
ucgggcauugagcucuggg

SEQ ID NO: 3269536 - RNA, 19 nt, Artificial Sequence
  Description of Artificial Sequence: Synthetic oligonucleotide
ucuggagguucucugggcu

SEQ ID NO: 3269537 - RNA, 19 nt, Artificial Sequence
  Description of Artificial Sequence: Synthetic oligonucleotide
guucucugggcucagugug

SEQ ID NO: 3269538 - RNA, 19 nt, Artificial Sequence
  Description of Artificial Sequence: Synthetic oligonucleotide
ucuguggauuucgacgccg

SEQ ID NO: 3269539 - RNA, 19 nt, Artificial Sequence
  Description of Artificial Sequence: Synthetic oligonucleotide
guuugucucucugagguug

SEQ ID NO: 3269540 - RNA, 19 nt, Artificial Sequence
  Description of Artificial Sequence: Synthetic oligonucleotide
acauuggcucucuguaggg

SEQ ID NO: 3269541 - RNA, 19 nt, Artificial Sequence
  Description of Artificial Sequence: Synthetic oligonucleotide
auguucucgggcauugagc

SEQ ID NO: 3269542 - RNA, 19 nt, Artificial Sequence
  Description of Artificial Sequence: Synthetic oligonucleotide
uugagcucugggcugcgag

SEQ ID NO: 3269543 - RNA, 19 nt, Artificial Sequence
  Description of Artificial Sequence: Synthetic oligonucleotide
uguguaccgcaucugugga

SEQ ID NO: 3269544 - RNA, 19 nt, Artificial Sequence
  Description of Artificial Sequence: Synthetic oligonucleotide
ugagcucugggcugcgagg

SEQ ID NO: 3269545 - RNA, 19 nt, Artificial Sequence
  Description of Artificial Sequence: Synthetic oligonucleotide
ucgacgccguacaaaagca

SEQ ID NO: 3269546 - RNA, 19 nt, Artificial Sequence
  Description of Artificial Sequence: Synthetic oligonucleotide
uucucgggcauugagcucu

SEQ ID NO: 3269547 - RNA, 19 nt, Artificial Sequence
  Description of Artificial Sequence: Synthetic oligonucleotide
ucugggcucaguguguacc

SEQ ID NO: 3269548 - RNA, 19 nt, Artificial Sequence
  Description of Artificial Sequence: Synthetic oligonucleotide
aucuguggauuucgacgcc

SEQ ID NO: 3269549 - RNA, 19 nt, Artificial Sequence
  Description of Artificial Sequence: Synthetic oligonucleotide
cauguucucgggcauugag

SEQ ID NO: 3269550 - RNA, 19 nt, Artificial Sequence
  Description of Artificial Sequence: Synthetic oligonucleotide
caacauuggcucucuguag

SEQ ID NO: 3269551 - RNA, 19 nt, Artificial Sequence
  Description of Artificial Sequence: Synthetic oligonucleotide
aaaugcucccgggcugagc

SEQ ID NO: 3269552 - RNA, 19 nt, Artificial Sequence
  Description of Artificial Sequence: Synthetic oligonucleotide
uuucgacgccguacaaaag

SEQ ID NO: 3269553 - RNA, 19 nt, Artificial Sequence
  Description of Artificial Sequence: Synthetic oligonucleotide
agcaaaugcucccgggcug

SEQ ID NO: 3269554 - RNA, 19 nt, Artificial Sequence
  Description of Artificial Sequence: Synthetic oligonucleotide
ugagcuagccauccuguuu

SEQ ID NO: 3269555 - RNA, 19 nt, Artificial Sequence
  Description of Artificial Sequence: Synthetic oligonucleotide
cguacaaaagcaaaugcuc

SEQ ID NO: 3269556 - RNA, 19 nt, Artificial Sequence
  Description of Artificial Sequence: Synthetic oligonucleotide
agggccauguucucgggca

SEQ ID NO: 3269557 - RNA, 19 nt, Artificial Sequence
  Description of Artificial Sequence: Synthetic oligonucleotide
cugggcucaguguguaccg

SEQ ID NO: 3269558 - RNA, 19 nt, Artificial Sequence
  Description of Artificial Sequence: Synthetic oligonucleotide
ugggcugcgaggcucugga

SEQ ID NO: 3269559 - RNA, 19 nt, Artificial Sequence
  Description of Artificial Sequence: Synthetic oligonucleotide
uagccauccuguuugucuc

SEQ ID NO: 3269560 - RNA, 19 nt, Artificial Sequence
  Description of Artificial Sequence: Synthetic oligonucleotide
agguucucugggcucagug

SEQ ID NO: 3269561 - RNA, 19 nt, Artificial Sequence
  Description of Artificial Sequence: Synthetic oligonucleotide
cuguuugucucucugaggu

SEQ ID NO: 3269562 - RNA, 19 nt, Artificial Sequence
  Description of Artificial Sequence: Synthetic oligonucleotide
gccguacaaaagcaaaugc

SEQ ID NO: 3269563 - RNA, 19 nt, Artificial Sequence
  Description of Artificial Sequence: Synthetic oligonucleotide
uuggcucucuguagggcca

SEQ ID NO: 3269564 - RNA, 19 nt, Artificial Sequence
  Description of Artificial Sequence: Synthetic oligonucleotide
accgcaucuguggauuucg

SEQ ID NO: 3269565 - RNA, 19 nt, Artificial Sequence
  Description of Artificial Sequence: Synthetic oligonucleotide
cauccuguuugucucucug

SEQ ID NO: 3269566 - RNA, 19 nt, Artificial Sequence
  Description of Artificial Sequence: Synthetic oligonucleotide
uguaccgcaucuguggauu

SEQ ID NO: 3269567 - RNA, 19 nt, Artificial Sequence
  Description of Artificial Sequence: Synthetic oligonucleotide
ucucucugagguugguuuc

SEQ ID NO: 3269568 - RNA, 19 nt, Artificial Sequence
  Description of Artificial Sequence: Synthetic oligonucleotide
ggcugcgaggcucuggagg

SEQ ID NO: 3269569 - RNA, 19 nt, Artificial Sequence
  Description of Artificial Sequence: Synthetic oligonucleotide
uucucugggcucagugugu

SEQ ID NO: 3269570 - RNA, 19 nt, Artificial Sequence
  Description of Artificial Sequence: Synthetic oligonucleotide
cucuguagggccauguucu

SEQ ID NO: 3269571 - RNA, 19 nt, Artificial Sequence
  Description of Artificial Sequence: Synthetic oligonucleotide
auccuguuugucucucuga

SEQ ID NO: 3269572 - RNA, 19 nt, Artificial Sequence
  Description of Artificial Sequence: Synthetic oligonucleotide
cucuggagguucucugggc

SEQ ID NO: 3269573 - RNA, 19 nt, Artificial Sequence
  Description of Artificial Sequence: Synthetic oligonucleotide
uagggccauguucucgggc

SEQ ID NO: 3269574 - RNA, 19 nt, Artificial Sequence
  Description of Artificial Sequence: Synthetic oligonucleotide
guggauuucgacgccguac

SEQ ID NO: 3269575 - RNA, 19 nt, Artificial Sequence
  Description of Artificial Sequence: Synthetic oligonucleotide
ucaguguguaccgcaucug

SEQ ID NO: 3269576 - RNA, 19 nt, Artificial Sequence
  Description of Artificial Sequence: Synthetic oligonucleotide
aguguguaccgcaucugug

SEQ ID NO: 3269577 - RNA, 19 nt, Artificial Sequence
  Description of Artificial Sequence: Synthetic oligonucleotide
cuagccauccuguuugucu

SEQ ID NO: 3269578 - RNA, 19 nt, Artificial Sequence
  Description of Artificial Sequence: Synthetic oligonucleotide
uggagguucucugggcuca

SEQ ID NO: 3269579 - RNA, 19 nt, Artificial Sequence
  Description of Artificial Sequence: Synthetic oligonucleotide
cauuggcucucuguagggc

SEQ ID NO: 3269580 - RNA, 19 nt, Artificial Sequence
  Description of Artificial Sequence: Synthetic oligonucleotide
gauuucgacgccguacaaa

SEQ ID NO: 3269581 - RNA, 19 nt, Artificial Sequence
  Description of Artificial Sequence: Synthetic oligonucleotide
cucucugagguugguuucc

SEQ ID NO: 3269582 - RNA, 19 nt, Artificial Sequence
  Description of Artificial Sequence: Synthetic oligonucleotide
cuguagggccauguucucg

SEQ ID NO: 3269583 - RNA, 19 nt, Artificial Sequence
  Description of Artificial Sequence: Synthetic oligonucleotide
gagcucugggcugcgaggc

SEQ ID NO: 3269584 - RNA, 19 nt, Artificial Sequence
  Description of Artificial Sequence: Synthetic oligonucleotide
ugcucccgggcugagcuag

SEQ ID NO: 3269585 - RNA, 19 nt, Artificial Sequence
  Description of Artificial Sequence: Synthetic oligonucleotide
ggcucuggagguucucugg

SEQ ID NO: 3269586 - RNA, 19 nt, Artificial Sequence
  Description of Artificial Sequence: Synthetic oligonucleotide
gacgccguacaaaagcaaa

SEQ ID NO: 3269587 - RNA, 19 nt, Artificial Sequence
  Description of Artificial Sequence: Synthetic oligonucleotide
aggcucuggagguucucug

SEQ ID NO: 3269588 - RNA, 19 nt, Artificial Sequence
  Description of Artificial Sequence: Synthetic oligonucleotide
gcucuggagguucucuggg

SEQ ID NO: 3269589 - RNA, 19 nt, Artificial Sequence
  Description of Artificial Sequence: Synthetic oligonucleotide
ucuguagggccauguucuc

SEQ ID NO: 3269590 - RNA, 19 nt, Artificial Sequence
  Description of Artificial Sequence: Synthetic oligonucleotide
ggcauugagcucugggcug

SEQ ID NO: 3269591 - RNA, 19 nt, Artificial Sequence
  Description of Artificial Sequence: Synthetic oligonucleotide
uguggauuucgacgccgua

SEQ ID NO: 3269592 - RNA, 19 nt, Artificial Sequence
  Description of Artificial Sequence: Synthetic oligonucleotide
uguuugucucucugagguu

SEQ ID NO: 3269593 - RNA, 19 nt, Artificial Sequence
  Description of Artificial Sequence: Synthetic oligonucleotide
auacaacauuggcucucug

SEQ ID NO: 3269594 - RNA, 19 nt, Artificial Sequence
  Description of Artificial Sequence: Synthetic oligonucleotide
guagggccauguucucggg

SEQ ID NO: 3269595 - RNA, 19 nt, Artificial Sequence
  Description of Artificial Sequence: Synthetic oligonucleotide
ccuguuugucucucugagg

SEQ ID NO: 3269596 - RNA, 19 nt, Artificial Sequence
  Description of Artificial Sequence: Synthetic oligonucleotide
aaagcgaagacacagaugc

SEQ ID NO: 3269597 - RNA, 19 nt, Artificial Sequence
  Description of Artificial Sequence: Synthetic oligonucleotide
uuaaauuuaauaaucaccu

SEQ ID NO: 3269598 - RNA, 19 nt, Artificial Sequence
  Description of Artificial Sequence: Synthetic oligonucleotide
uuuaaauuuaauaaucacc

SEQ ID NO: 3269599 - RNA, 19 nt, Artificial Sequence
  Description of Artificial Sequence: Synthetic oligonucleotide
aaauuuaauaaucaccuca

SEQ ID NO: 3269600 - RNA, 19 nt, Artificial Sequence
  Description of Artificial Sequence: Synthetic oligonucleotide
uuuaauaaucaccucauac

SEQ ID NO: 3269601 - RNA, 19 nt, Artificial Sequence
  Description of Artificial Sequence: Synthetic oligonucleotide
uaauaaucaccucauacug

SEQ ID NO: 3269602 - RNA, 19 nt, Artificial Sequence
  Description of Artificial Sequence: Synthetic oligonucleotide
uuaauaaucaccucauacu

SEQ ID NO: 3269603 - RNA, 19 nt, Artificial Sequence
  Description of Artificial Sequence: Synthetic oligonucleotide
agugagcuuauccucaucc

SEQ ID NO: 3269604 - RNA, 19 nt, Artificial Sequence
  Description of Artificial Sequence: Synthetic oligonucleotide
aggaaaguggcccucaggc

SEQ ID NO: 3269605 - RNA, 19 nt, Artificial Sequence
  Description of Artificial Sequence: Synthetic oligonucleotide
aaucaccucauacugguag

SEQ ID NO: 3269606 - RNA, 19 nt, Artificial Sequence
  Description of Artificial Sequence: Synthetic oligonucleotide
aaugaccagguacagagug

SEQ ID NO: 3269607 - RNA, 19 nt, Artificial Sequence
  Description of Artificial Sequence: Synthetic oligonucleotide
uuuuaaauuuaauaaucac

SEQ ID NO: 3269608 - RNA, 19 nt, Artificial Sequence
  Description of Artificial Sequence: Synthetic oligonucleotide
auacugguagcuuugggac

SEQ ID NO: 3269609 - RNA, 19 nt, Artificial Sequence
  Description of Artificial Sequence: Synthetic oligonucleotide
aagacacagaugccaaggc

SEQ ID NO: 3269610 - RNA, 19 nt, Artificial Sequence
  Description of Artificial Sequence: Synthetic oligonucleotide
agaggaaaagcgaagacac

SEQ ID NO: 3269611 - RNA, 19 nt, Artificial Sequence
  Description of Artificial Sequence: Synthetic oligonucleotide
agagcagccccucagggcc

SEQ ID NO: 3269612 - RNA, 19 nt, Artificial Sequence
  Description of Artificial Sequence: Synthetic oligonucleotide
acagacaagaggaaaagcg

SEQ ID NO: 3269613 - RNA, 19 nt, Artificial Sequence
  Description of Artificial Sequence: Synthetic oligonucleotide
aauaaucaccucauacugg

SEQ ID NO: 3269614 - RNA, 19 nt, Artificial Sequence
  Description of Artificial Sequence: Synthetic oligonucleotide
acugacauccaccaggugu

SEQ ID NO: 3269615 - RNA, 19 nt, Artificial Sequence
  Description of Artificial Sequence: Synthetic oligonucleotide
aacagcagcacagacaaga

SEQ ID NO: 3269616 - RNA, 19 nt, Artificial Sequence
  Description of Artificial Sequence: Synthetic oligonucleotide
guagcuuugggacagggug

SEQ ID NO: 3269617 - RNA, 19 nt, Artificial Sequence
  Description of Artificial Sequence: Synthetic oligonucleotide
uuauccucauccuggacag

SEQ ID NO: 3269618 - RNA, 19 nt, Artificial Sequence
  Description of Artificial Sequence: Synthetic oligonucleotide
auaaucaccucauacuggu

SEQ ID NO: 3269619 - RNA, 19 nt, Artificial Sequence
  Description of Artificial Sequence: Synthetic oligonucleotide
aauuuaauaaucaccucau

SEQ ID NO: 3269620 - RNA, 19 nt, Artificial Sequence
  Description of Artificial Sequence: Synthetic oligonucleotide
gaagacacagaugccaagg

SEQ ID NO: 3269621 - RNA, 19 nt, Artificial Sequence
  Description of Artificial Sequence: Synthetic oligonucleotide
caugcuacugacauccacc

SEQ ID NO: 3269622 - RNA, 19 nt, Artificial Sequence
  Description of Artificial Sequence: Synthetic oligonucleotide
acagagugagcuuauccuc

SEQ ID NO: 3269623 - RNA, 19 nt, Artificial Sequence
  Description of Artificial Sequence: Synthetic oligonucleotide
aagaggaaaagcgaagaca

SEQ ID NO: 3269624 - RNA, 19 nt, Artificial Sequence
  Description of Artificial Sequence: Synthetic oligonucleotide
gaugccaaggcaaugacca

SEQ ID NO: 3269625 - RNA, 19 nt, Artificial Sequence
  Description of Artificial Sequence: Synthetic oligonucleotide
gcaaugaccagguacagag

SEQ ID NO: 3269626 - RNA, 19 nt, Artificial Sequence
  Description of Artificial Sequence: Synthetic oligonucleotide
uacagagugagcuuauccu

SEQ ID NO: 3269627 - RNA, 19 nt, Artificial Sequence
  Description of Artificial Sequence: Synthetic oligonucleotide
aggaaaagcgaagacacag

SEQ ID NO: 3269628 - RNA, 19 nt, Artificial Sequence
  Description of Artificial Sequence: Synthetic oligonucleotide
gaaaguggcccucaggcac

SEQ ID NO: 3269629 - RNA, 19 nt, Artificial Sequence
  Description of Artificial Sequence: Synthetic oligonucleotide
ugagcuuauccucauccug

SEQ ID NO: 3269630 - RNA, 19 nt, Artificial Sequence
  Description of Artificial Sequence: Synthetic oligonucleotide
aucaccucauacugguagc

SEQ ID NO: 3269631 - RNA, 19 nt, Artificial Sequence
  Description of Artificial Sequence: Synthetic oligonucleotide
gcuacugacauccaccagg

SEQ ID NO: 3269632 - RNA, 19 nt, Artificial Sequence
  Description of Artificial Sequence: Synthetic oligonucleotide
ucaggcacagagcagcccc

SEQ ID NO: 3269633 - RNA, 19 nt, Artificial Sequence
  Description of Artificial Sequence: Synthetic oligonucleotide
caaggcaaugaccagguac

SEQ ID NO: 3269634 - RNA, 19 nt, Artificial Sequence
  Description of Artificial Sequence: Synthetic oligonucleotide
agggccgucgcccuggccc

SEQ ID NO: 3269635 - RNA, 19 nt, Artificial Sequence
  Description of Artificial Sequence: Synthetic oligonucleotide
aaggcaaugaccagguaca

SEQ ID NO: 3269636 - RNA, 19 nt, Artificial Sequence
  Description of Artificial Sequence: Synthetic oligonucleotide
uaaauuuaauaaucaccuc

SEQ ID NO: 3269637 - RNA, 19 nt, Artificial Sequence
  Description of Artificial Sequence: Synthetic oligonucleotide
gagcuuauccucauccugg

SEQ ID NO: 3269638 - RNA, 19 nt, Artificial Sequence
  Description of Artificial Sequence: Synthetic oligonucleotide
cagguguccaggaaagugg

SEQ ID NO: 3269639 - RNA, 19 nt, Artificial Sequence
  Description of Artificial Sequence: Synthetic oligonucleotide
acagccucaccccacgaac

SEQ ID NO: 3269640 - RNA, 19 nt, Artificial Sequence
  Description of Artificial Sequence: Synthetic oligonucleotide
ucauacugguagcuuuggg

SEQ ID NO: 3269641 - RNA, 19 nt, Artificial Sequence
  Description of Artificial Sequence: Synthetic oligonucleotide
ucauccuggacagagucgc

SEQ ID NO: 3269642 - RNA, 19 nt, Artificial Sequence
  Description of Artificial Sequence: Synthetic oligonucleotide
ugccaccucaggcagaggc

SEQ ID NO: 3269643 - RNA, 19 nt, Artificial Sequence
  Description of Artificial Sequence: Synthetic oligonucleotide
guacagagugagcuuaucc

SEQ ID NO: 3269644 - RNA, 19 nt, Artificial Sequence
  Description of Artificial Sequence: Synthetic oligonucleotide
agcagcacagacaagagga

SEQ ID NO: 3269645 - RNA, 19 nt, Artificial Sequence
  Description of Artificial Sequence: Synthetic oligonucleotide
cuuauccucauccuggaca

SEQ ID NO: 3269646 - RNA, 19 nt, Artificial Sequence
  Description of Artificial Sequence: Synthetic oligonucleotide
cauacugguagcuuuggga

SEQ ID NO: 3269647 - RNA, 19 nt, Artificial Sequence
  Description of Artificial Sequence: Synthetic oligonucleotide
gacaagaggaaaagcgaag

SEQ ID NO: 3269648 - RNA, 19 nt, Artificial Sequence
  Description of Artificial Sequence: Synthetic oligonucleotide
ugaccagguacagagugag

SEQ ID NO: 3269649 - RNA, 19 nt, Artificial Sequence
  Description of Artificial Sequence: Synthetic oligonucleotide
acagagcagccccucaggg

SEQ ID NO: 3269650 - RNA, 19 nt, Artificial Sequence
  Description of Artificial Sequence: Synthetic oligonucleotide
aaaagcgaagacacagaug

SEQ ID NO: 3269651 - RNA, 19 nt, Artificial Sequence
  Description of Artificial Sequence: Synthetic oligonucleotide
ugccaaggcaaugaccagg

SEQ ID NO: 3269652 - RNA, 19 nt, Artificial Sequence
  Description of Artificial Sequence: Synthetic oligonucleotide
accagguacagagugagcu

SEQ ID NO: 3269653 - RNA, 19 nt, Artificial Sequence
  Description of Artificial Sequence: Synthetic oligonucleotide
uagcuuugggacagggugc

SEQ ID NO: 3269654 - RNA, 19 nt, Artificial Sequence
  Description of Artificial Sequence: Synthetic oligonucleotide
cugacauccaccagguguc

SEQ ID NO: 3269655 - RNA, 19 nt, Artificial Sequence
  Description of Artificial Sequence: Synthetic oligonucleotide
acaagaggaaaagcgaaga

SEQ ID NO: 3269656 - RNA, 19 nt, Artificial Sequence
  Description of Artificial Sequence: Synthetic oligonucleotide
agaugccaaggcaaugacc

SEQ ID NO: 3269657 - RNA, 19 nt, Artificial Sequence
  Description of Artificial Sequence: Synthetic oligonucleotide
ugcacagccucaccccacg

SEQ ID NO: 3269658 - RNA, 19 nt, Artificial Sequence
  Description of Artificial Sequence: Synthetic oligonucleotide
acugguagcuuugggacag

SEQ ID NO: 3269659 - RNA, 19 nt, Artificial Sequence
  Description of Artificial Sequence: Synthetic oligonucleotide
caagaggaaaagcgaagac

SEQ ID NO: 3269660 - RNA, 19 nt, Artificial Sequence
  Description of Artificial Sequence: Synthetic oligonucleotide
agcuuugggacagggugcc

SEQ ID NO: 3269661 - RNA, 19 nt, Artificial Sequence
  Description of Artificial Sequence: Synthetic oligonucleotide
agacacagaugccaaggca

SEQ ID NO: 3269662 - RNA, 19 nt, Artificial Sequence
  Description of Artificial Sequence: Synthetic oligonucleotide
ugggacagggugcccaugc

SEQ ID NO: 3269663 - RNA, 19 nt, Artificial Sequence
  Description of Artificial Sequence: Synthetic oligonucleotide
cagacaagaggaaaagcga

SEQ ID NO: 3269664 - RNA, 19 nt, Artificial Sequence
  Description of Artificial Sequence: Synthetic oligonucleotide
acauccaccagguguccag

SEQ ID NO: 3269665 - RNA, 19 nt, Artificial Sequence
  Description of Artificial Sequence: Synthetic oligonucleotide
cucauccuggacagagucg

SEQ ID NO: 3269666 - RNA, 19 nt, Artificial Sequence
  Description of Artificial Sequence: Synthetic oligonucleotide
agcgaagacacagaugcca

SEQ ID NO: 3269667 - RNA, 19 nt, Artificial Sequence
  Description of Artificial Sequence: Synthetic oligonucleotide
ucaccccacgaacagcagc

SEQ ID NO: 3269668 - RNA, 19 nt, Artificial Sequence
  Description of Artificial Sequence: Synthetic oligonucleotide
augcuacugacauccacca

SEQ ID NO: 3269669 - RNA, 19 nt, Artificial Sequence
  Description of Artificial Sequence: Synthetic oligonucleotide
acagaugccaaggcaauga

SEQ ID NO: 3269670 - RNA, 19 nt, Artificial Sequence
  Description of Artificial Sequence: Synthetic oligonucleotide
agguguccaggaaaguggc

SEQ ID NO: 3269671 - RNA, 19 nt, Artificial Sequence
  Description of Artificial Sequence: Synthetic oligonucleotide
gaaaagcgaagacacagau

SEQ ID NO: 3269672 - RNA, 19 nt, Artificial Sequence
  Description of Artificial Sequence: Synthetic oligonucleotide
gacacagaugccaaggcaa

SEQ ID NO: 3269673 - RNA, 19 nt, Artificial Sequence
  Description of Artificial Sequence: Synthetic oligonucleotide
aagcgaagacacagaugcc

SEQ ID NO: 3269674 - RNA, 19 nt, Artificial Sequence
  Description of Artificial Sequence: Synthetic oligonucleotide
guguccaggaaaguggccc

SEQ ID NO: 3269675 - RNA, 19 nt, Artificial Sequence
  Description of Artificial Sequence: Synthetic oligonucleotide
auccucauccuggacagag

SEQ ID NO: 3269676 - RNA, 19 nt, Artificial Sequence
  Description of Artificial Sequence: Synthetic oligonucleotide
guggcccucaggcacagag

SEQ ID NO: 3269677 - RNA, 19 nt, Artificial Sequence
  Description of Artificial Sequence: Synthetic oligonucleotide
gacagagucgcgugccacc

SEQ ID NO: 3269678 - RNA, 19 nt, Artificial Sequence
  Description of Artificial Sequence: Synthetic oligonucleotide
auuuaauaaucaccucaua

SEQ ID NO: 3269679 - RNA, 19 nt, Artificial Sequence
  Description of Artificial Sequence: Synthetic oligonucleotide
gacagggugcccaugcuac

SEQ ID NO: 3269680 - RNA, 19 nt, Artificial Sequence
  Description of Artificial Sequence: Synthetic oligonucleotide
uacugguagcuuugggaca

SEQ ID NO: 3269681 - RNA, 19 nt, Artificial Sequence
  Description of Artificial Sequence: Synthetic oligonucleotide
caccagguguccaggaaag

SEQ ID NO: 3269682 - RNA, 19 nt, Artificial Sequence
  Description of Artificial Sequence: Synthetic oligonucleotide
uccugcacagccucacccc

SEQ ID NO: 3269683 - RNA, 19 nt, Artificial Sequence
  Description of Artificial Sequence: Synthetic oligonucleotide
cacagacaagaggaaaagc

SEQ ID NO: 3269684 - RNA, 19 nt, Artificial Sequence
  Description of Artificial Sequence: Synthetic oligonucleotide
agagucgcgugccaccuca

SEQ ID NO: 3269685 - RNA, 19 nt, Artificial Sequence
  Description of Artificial Sequence: Synthetic oligonucleotide
cagcagcacagacaagagg

SEQ ID NO: 3269686 - RNA, 19 nt, Artificial Sequence
  Description of Artificial Sequence: Synthetic oligonucleotide
cuccugcacagccucaccc

SEQ ID NO: 3269687 - RNA, 19 nt, Artificial Sequence
  Description of Artificial Sequence: Synthetic oligonucleotide
ugcuacugacauccaccag

SEQ ID NO: 3269688 - RNA, 19 nt, Artificial Sequence
  Description of Artificial Sequence: Synthetic oligonucleotide
uguccaggaaaguggcccu

SEQ ID NO: 3269689 - RNA, 19 nt, Artificial Sequence
  Description of Artificial Sequence: Synthetic oligonucleotide
uccuggacagagucgcgug

SEQ ID NO: 3269690 - RNA, 19 nt, Artificial Sequence
  Description of Artificial Sequence: Synthetic oligonucleotide
agacaagaggaaaagcgaa

SEQ ID NO: 3269691 - RNA, 19 nt, Artificial Sequence
  Description of Artificial Sequence: Synthetic oligonucleotide
cacagagcagccccucagg

SEQ ID NO: 3269692 - RNA, 19 nt, Artificial Sequence
  Description of Artificial Sequence: Synthetic oligonucleotide
accucauacugguagcuuu

SEQ ID NO: 3269693 - RNA, 19 nt, Artificial Sequence
  Description of Artificial Sequence: Synthetic oligonucleotide
ucgcgugccaccucaggca

SEQ ID NO: 3269694 - RNA, 19 nt, Artificial Sequence
  Description of Artificial Sequence: Synthetic oligonucleotide
ugguagcuuugggacaggg

SEQ ID NO: 3269695 - RNA, 19 nt, Artificial Sequence
  Description of Artificial Sequence: Synthetic oligonucleotide
gucgcgugccaccucaggc

SEQ ID NO: 3269696 - RNA, 19 nt, Artificial Sequence
  Description of Artificial Sequence: Synthetic oligonucleotide
aauucuacaaaucacuacc

SEQ ID NO: 3269697 - RNA, 19 nt, Artificial Sequence
  Description of Artificial Sequence: Synthetic oligonucleotide
uuaaauuaccuuaagauug

SEQ ID NO: 3269698 - RNA, 19 nt, Artificial Sequence
  Description of Artificial Sequence: Synthetic oligonucleotide
uacacuuaaagucacaaag

SEQ ID NO: 3269699 - RNA, 19 nt, Artificial Sequence
  Description of Artificial Sequence: Synthetic oligonucleotide
aagaauucuaagaagaaac

SEQ ID NO: 3269700 - RNA, 19 nt, Artificial Sequence
  Description of Artificial Sequence: Synthetic oligonucleotide
ugcuuaucuaccaagauag

SEQ ID NO: 3269701 - RNA, 19 nt, Artificial Sequence
  Description of Artificial Sequence: Synthetic oligonucleotide
aaucacuaccucuaaagac

SEQ ID NO: 3269702 - RNA, 19 nt, Artificial Sequence
  Description of Artificial Sequence: Synthetic oligonucleotide
aauaauuagcuacaguaug

SEQ ID NO: 3269703 - RNA, 19 nt, Artificial Sequence
  Description of Artificial Sequence: Synthetic oligonucleotide
aggaacacuacuuuguugc

SEQ ID NO: 3269704 - RNA, 19 nt, Artificial Sequence
  Description of Artificial Sequence: Synthetic oligonucleotide
aaagucacaaaguacaggu

SEQ ID NO: 3269705 - RNA, 19 nt, Artificial Sequence
  Description of Artificial Sequence: Synthetic oligonucleotide
aaaagagcuuuauaaacag

SEQ ID NO: 3269706 - RNA, 19 nt, Artificial Sequence
  Description of Artificial Sequence: Synthetic oligonucleotide
ucugcuacaauaaacuaag

SEQ ID NO: 3269707 - RNA, 19 nt, Artificial Sequence
  Description of Artificial Sequence: Synthetic oligonucleotide
ugagcuuguaauaagaccu

SEQ ID NO: 3269708 - RNA, 19 nt, Artificial Sequence
  Description of Artificial Sequence: Synthetic oligonucleotide
aauaaacuaagucugccga

SEQ ID NO: 3269709 - RNA, 19 nt, Artificial Sequence
  Description of Artificial Sequence: Synthetic oligonucleotide
uacuuuuaauaucuuacgg

SEQ ID NO: 3269710 - RNA, 19 nt, Artificial Sequence
  Description of Artificial Sequence: Synthetic oligonucleotide
aacacuacuuuguugcugg

SEQ ID NO: 3269711 - RNA, 19 nt, Artificial Sequence
  Description of Artificial Sequence: Synthetic oligonucleotide
uuuguaaugcucaaaugcc

SEQ ID NO: 3269712 - RNA, 19 nt, Artificial Sequence
  Description of Artificial Sequence: Synthetic oligonucleotide
uaccucuaaagacagaggg

SEQ ID NO: 3269713 - RNA, 19 nt, Artificial Sequence
  Description of Artificial Sequence: Synthetic oligonucleotide
uacaguaugguccagaaau

SEQ ID NO: 3269714 - RNA, 19 nt, Artificial Sequence
  Description of Artificial Sequence: Synthetic oligonucleotide
ugaagaacacuauaaaaug

SEQ ID NO: 3269715 - RNA, 19 nt, Artificial Sequence
  Description of Artificial Sequence: Synthetic oligonucleotide
uauaaacagauuuaucccc

SEQ ID NO: 3269716 - RNA, 19 nt, Artificial Sequence
  Description of Artificial Sequence: Synthetic oligonucleotide
aaucacaucaauucuacaa

SEQ ID NO: 3269717 - RNA, 19 nt, Artificial Sequence
  Description of Artificial Sequence: Synthetic oligonucleotide
uugaauggaauaauuagcu

SEQ ID NO: 3269718 - RNA, 19 nt, Artificial Sequence
  Description of Artificial Sequence: Synthetic oligonucleotide
auugaauggaauaauuagc

SEQ ID NO: 3269719 - RNA, 19 nt, Artificial Sequence
  Description of Artificial Sequence: Synthetic oligonucleotide
guaauaagaccuuuacucg

SEQ ID NO: 3269720 - RNA, 19 nt, Artificial Sequence
  Description of Artificial Sequence: Synthetic oligonucleotide
uauugauaauauaacugag

SEQ ID NO: 3269721 - RNA, 19 nt, Artificial Sequence
  Description of Artificial Sequence: Synthetic oligonucleotide
auagggaaagauucgaauc

SEQ ID NO: 3269722 - RNA, 19 nt, Artificial Sequence
  Description of Artificial Sequence: Synthetic oligonucleotide
uaucuuacggauuuuauaa

SEQ ID NO: 3269723 - RNA, 19 nt, Artificial Sequence
  Description of Artificial Sequence: Synthetic oligonucleotide
agucacaaaguacagguuc

SEQ ID NO: 3269724 - RNA, 19 nt, Artificial Sequence
  Description of Artificial Sequence: Synthetic oligonucleotide
aaagauucgaaucaucauu

SEQ ID NO: 3269725 - RNA, 19 nt, Artificial Sequence
  Description of Artificial Sequence: Synthetic oligonucleotide
ucuacuagaacuugaauau

SEQ ID NO: 3269726 - RNA, 19 nt, Artificial Sequence
  Description of Artificial Sequence: Synthetic oligonucleotide
cuacaauaaacuaagucug

SEQ ID NO: 3269727 - RNA, 19 nt, Artificial Sequence
  Description of Artificial Sequence: Synthetic oligonucleotide
uccuuuauacaauccaagg

SEQ ID NO: 3269728 - RNA, 19 nt, Artificial Sequence
  Description of Artificial Sequence: Synthetic oligonucleotide
gaaacucccagcuuuguag

SEQ ID NO: 3269729 - RNA, 19 nt, Artificial Sequence
  Description of Artificial Sequence: Synthetic oligonucleotide
caaaucacuaccucuaaag

SEQ ID NO: 3269730 - RNA, 19 nt, Artificial Sequence
  Description of Artificial Sequence: Synthetic oligonucleotide
caagauaugacaagaaauc

SEQ ID NO: 3269731 - RNA, 19 nt, Artificial Sequence
  Description of Artificial Sequence: Synthetic oligonucleotide
aacauuagcagcuuagauu

SEQ ID NO: 3269732 - RNA, 19 nt, Artificial Sequence
  Description of Artificial Sequence: Synthetic oligonucleotide
acaucaauucuacaaauca

SEQ ID NO: 3269733 - RNA, 19 nt, Artificial Sequence
  Description of Artificial Sequence: Synthetic oligonucleotide
gaacacuauaaaaugacag

SEQ ID NO: 3269734 - RNA, 19 nt, Artificial Sequence
  Description of Artificial Sequence: Synthetic oligonucleotide
uuauuuuauagguuuaaau

SEQ ID NO: 3269735 - RNA, 19 nt, Artificial Sequence
  Description of Artificial Sequence: Synthetic oligonucleotide
acuuuuaauaucuuacgga

SEQ ID NO: 3269736 - RNA, 19 nt, Artificial Sequence
  Description of Artificial Sequence: Synthetic oligonucleotide
aauuagcuacaguaugguc

SEQ ID NO: 3269737 - RNA, 19 nt, Artificial Sequence
  Description of Artificial Sequence: Synthetic oligonucleotide
aacaaaugcauccaauuuu

SEQ ID NO: 3269738 - RNA, 19 nt, Artificial Sequence
  Description of Artificial Sequence: Synthetic oligonucleotide
uggagaagaauucuaagaa

SEQ ID NO: 3269739 - RNA, 19 nt, Artificial Sequence
  Description of Artificial Sequence: Synthetic oligonucleotide
uucuacuagaacuugaaua

SEQ ID NO: 3269740 - RNA, 19 nt, Artificial Sequence
  Description of Artificial Sequence: Synthetic oligonucleotide
cuaaauguuuguaauggug

SEQ ID NO: 3269741 - RNA, 19 nt, Artificial Sequence
  Description of Artificial Sequence: Synthetic oligonucleotide
aaaucacuaccucuaaaga

SEQ ID NO: 3269742 - RNA, 19 nt, Artificial Sequence
  Description of Artificial Sequence: Synthetic oligonucleotide
ucuacaaaucacuaccucu

SEQ ID NO: 3269743 - RNA, 19 nt, Artificial Sequence
  Description of Artificial Sequence: Synthetic oligonucleotide
gauuuauccccacuccugg

SEQ ID NO: 3269744 - RNA, 19 nt, Artificial Sequence
  Description of Artificial Sequence: Synthetic oligonucleotide
aaugacagagugcuggaga

SEQ ID NO: 3269745 - RNA, 19 nt, Artificial Sequence
  Description of Artificial Sequence: Synthetic oligonucleotide
acauuagcagcuuagauuu

SEQ ID NO: 3269746 - RNA, 19 nt, Artificial Sequence
  Description of Artificial Sequence: Synthetic oligonucleotide
uuauagguuuaaauuaccu

SEQ ID NO: 3269747 - RNA, 19 nt, Artificial Sequence
  Description of Artificial Sequence: Synthetic oligonucleotide
uuuacucgauccaaaggag

SEQ ID NO: 3269748 - RNA, 19 nt, Artificial Sequence
  Description of Artificial Sequence: Synthetic oligonucleotide
acaauaaacuaagucugcc

SEQ ID NO: 3269749 - RNA, 19 nt, Artificial Sequence
  Description of Artificial Sequence: Synthetic oligonucleotide
ugcaccauuuccuuuauac

SEQ ID NO: 3269750 - RNA, 19 nt, Artificial Sequence
  Description of Artificial Sequence: Synthetic oligonucleotide
ucuuacggauuuuauaaca

SEQ ID NO: 3269751 - RNA, 19 nt, Artificial Sequence
  Description of Artificial Sequence: Synthetic oligonucleotide
acacuauaaaaugacagag

SEQ ID NO: 3269752 - RNA, 19 nt, Artificial Sequence
  Description of Artificial Sequence: Synthetic oligonucleotide
caauaaacuaagucugccg

SEQ ID NO: 3269753 - RNA, 19 nt, Artificial Sequence
  Description of Artificial Sequence: Synthetic oligonucleotide
ugcuacaauaaacuaaguc

SEQ ID NO: 3269754 - RNA, 19 nt, Artificial Sequence
  Description of Artificial Sequence: Synthetic oligonucleotide
aaacaaaugcauccaauuu

SEQ ID NO: 3269755 - RNA, 19 nt, Artificial Sequence
  Description of Artificial Sequence: Synthetic oligonucleotide
uaaauuaccuuaagauuga

SEQ ID NO: 3269756 - RNA, 19 nt, Artificial Sequence
  Description of Artificial Sequence: Synthetic oligonucleotide
uuuguaaugguggauguga

SEQ ID NO: 3269757 - RNA, 19 nt, Artificial Sequence
  Description of Artificial Sequence: Synthetic oligonucleotide
uuaagauugaauggaauaa

SEQ ID NO: 3269758 - RNA, 19 nt, Artificial Sequence
  Description of Artificial Sequence: Synthetic oligonucleotide
aaugaaacaaaugcaucca

SEQ ID NO: 3269759 - RNA, 19 nt, Artificial Sequence
  Description of Artificial Sequence: Synthetic oligonucleotide
aagauucgaaucaucauug

SEQ ID NO: 3269760 - RNA, 19 nt, Artificial Sequence
  Description of Artificial Sequence: Synthetic oligonucleotide
cuuguaauaagaccuuuac

SEQ ID NO: 3269761 - RNA, 19 nt, Artificial Sequence
  Description of Artificial Sequence: Synthetic oligonucleotide
aagacagagggucuaccag

SEQ ID NO: 3269762 - RNA, 19 nt, Artificial Sequence
  Description of Artificial Sequence: Synthetic oligonucleotide
aagauaugacaagaaaucu

SEQ ID NO: 3269763 - RNA, 19 nt, Artificial Sequence
  Description of Artificial Sequence: Synthetic oligonucleotide
uaauaagaccuuuacucga

SEQ ID NO: 3269764 - RNA, 19 nt, Artificial Sequence
  Description of Artificial Sequence: Synthetic oligonucleotide
acuaccucuaaagacagag

SEQ ID NO: 3269765 - RNA, 19 nt, Artificial Sequence
  Description of Artificial Sequence: Synthetic oligonucleotide
uacaauaaacuaagucugc

SEQ ID NO: 3269766 - RNA, 19 nt, Artificial Sequence
  Description of Artificial Sequence: Synthetic oligonucleotide
aacugagauauuuauuuua

SEQ ID NO: 3269767 - RNA, 19 nt, Artificial Sequence
  Description of Artificial Sequence: Synthetic oligonucleotide
uacgacaaggaaaggaugu

SEQ ID NO: 3269768 - RNA, 19 nt, Artificial Sequence
  Description of Artificial Sequence: Synthetic oligonucleotide
uaauauaacugagauauuu

SEQ ID NO: 3269769 - RNA, 19 nt, Artificial Sequence
  Description of Artificial Sequence: Synthetic oligonucleotide
ucucuuuuauugauaauau

SEQ ID NO: 3269770 - RNA, 19 nt, Artificial Sequence
  Description of Artificial Sequence: Synthetic oligonucleotide
uaaagucacaaaguacagg

SEQ ID NO: 3269771 - RNA, 19 nt, Artificial Sequence
  Description of Artificial Sequence: Synthetic oligonucleotide
aaacuaagucugccgauug

SEQ ID NO: 3269772 - RNA, 19 nt, Artificial Sequence
  Description of Artificial Sequence: Synthetic oligonucleotide
acuuaaagucacaaaguac

SEQ ID NO: 3269773 - RNA, 19 nt, Artificial Sequence
  Description of Artificial Sequence: Synthetic oligonucleotide
uaagucugccgauugaaga

SEQ ID NO: 3269774 - RNA, 19 nt, Artificial Sequence
  Description of Artificial Sequence: Synthetic oligonucleotide
uauguuucuacuagaacuu

SEQ ID NO: 3269775 - RNA, 19 nt, Artificial Sequence
  Description of Artificial Sequence: Synthetic oligonucleotide
uaucuaccaagauaggcga

SEQ ID NO: 3269776 - RNA, 19 nt, Artificial Sequence
  Description of Artificial Sequence: Synthetic oligonucleotide
aguaaugaacguuuuguaa

SEQ ID NO: 3269777 - RNA, 19 nt, Artificial Sequence
  Description of Artificial Sequence: Synthetic oligonucleotide
agagguagagugcuuaucu

SEQ ID NO: 3269778 - RNA, 19 nt, Artificial Sequence
  Description of Artificial Sequence: Synthetic oligonucleotide
uuguaauaagaccuuuacu

SEQ ID NO: 3269779 - RNA, 19 nt, Artificial Sequence
  Description of Artificial Sequence: Synthetic oligonucleotide
uuguaaugcucaaaugcca

SEQ ID NO: 3269780 - RNA, 19 nt, Artificial Sequence
  Description of Artificial Sequence: Synthetic oligonucleotide
agauucgaaucaucauugc

SEQ ID NO: 3269781 - RNA, 19 nt, Artificial Sequence
  Description of Artificial Sequence: Synthetic oligonucleotide
uaagaccuuuacucgaucc

SEQ ID NO: 3269782 - RNA, 19 nt, Artificial Sequence
  Description of Artificial Sequence: Synthetic oligonucleotide
uagaaugcaauuucuuacu

SEQ ID NO: 3269783 - RNA, 19 nt, Artificial Sequence
  Description of Artificial Sequence: Synthetic oligonucleotide
ugugccaugcuuacgacaa

SEQ ID NO: 3269784 - RNA, 19 nt, Artificial Sequence
  Description of Artificial Sequence: Synthetic oligonucleotide
aucuuacggauuuuauaac

SEQ ID NO: 3269785 - RNA, 19 nt, Artificial Sequence
  Description of Artificial Sequence: Synthetic oligonucleotide
uacucgauccaaaggagca

SEQ ID NO: 3269786 - RNA, 19 nt, Artificial Sequence
  Description of Artificial Sequence: Synthetic oligonucleotide
ugaacguuuuguaaugcuc

SEQ ID NO: 3269787 - RNA, 19 nt, Artificial Sequence
  Description of Artificial Sequence: Synthetic oligonucleotide
uauagguuuaaauuaccuu

SEQ ID NO: 3269788 - RNA, 19 nt, Artificial Sequence
  Description of Artificial Sequence: Synthetic oligonucleotide
cuauguuucuacuagaacu

SEQ ID NO: 3269789 - RNA, 19 nt, Artificial Sequence
  Description of Artificial Sequence: Synthetic oligonucleotide
ugugagcuuguaauaagac

SEQ ID NO: 3269790 - RNA, 19 nt, Artificial Sequence
  Description of Artificial Sequence: Synthetic oligonucleotide
ucacuaccucuaaagacag

SEQ ID NO: 3269791 - RNA, 19 nt, Artificial Sequence
  Description of Artificial Sequence: Synthetic oligonucleotide
aguucucuuuuauugauaa

SEQ ID NO: 3269792 - RNA, 19 nt, Artificial Sequence
  Description of Artificial Sequence: Synthetic oligonucleotide
ucaauucuacaaaucacua

SEQ ID NO: 3269793 - RNA, 19 nt, Artificial Sequence
  Description of Artificial Sequence: Synthetic oligonucleotide
cuuuauaaacagauuuauc

SEQ ID NO: 3269794 - RNA, 19 nt, Artificial Sequence
  Description of Artificial Sequence: Synthetic oligonucleotide
acuggagaagaauucuaag

SEQ ID NO: 3269795 - RNA, 19 nt, Artificial Sequence
  Description of Artificial Sequence: Synthetic oligonucleotide
aagaccuuuacucgaucca

SEQ ID NO: 3269796 - RNA, 19 nt, Artificial Sequence
  Description of Artificial Sequence: Synthetic oligonucleotide
uguaagaacagucagccug

SEQ ID NO: 3269797 - RNA, 19 nt, Artificial Sequence
  Description of Artificial Sequence: Synthetic oligonucleotide
ugugaguucacauauuucc

SEQ ID NO: 3269798 - RNA, 19 nt, Artificial Sequence
  Description of Artificial Sequence: Synthetic oligonucleotide
ugugaucugaggcagauug

SEQ ID NO: 3269799 - RNA, 19 nt, Artificial Sequence
  Description of Artificial Sequence: Synthetic oligonucleotide
ucauuugucuccauuuucg

SEQ ID NO: 3269800 - RNA, 19 nt, Artificial Sequence
  Description of Artificial Sequence: Synthetic oligonucleotide
guuuccuugacacaauucg

SEQ ID NO: 3269801 - RNA, 19 nt, Artificial Sequence
  Description of Artificial Sequence: Synthetic oligonucleotide
aaaggaucgauuguucagc

SEQ ID NO: 3269802 - RNA, 19 nt, Artificial Sequence
  Description of Artificial Sequence: Synthetic oligonucleotide
aaaacugguucucuaugac

SEQ ID NO: 3269803 - RNA, 19 nt, Artificial Sequence
  Description of Artificial Sequence: Synthetic oligonucleotide
agaacagucagccugcgag

SEQ ID NO: 3269804 - RNA, 19 nt, Artificial Sequence
  Description of Artificial Sequence: Synthetic oligonucleotide
uucugaaaguuucuguagg

SEQ ID NO: 3269805 - RNA, 19 nt, Artificial Sequence
  Description of Artificial Sequence: Synthetic oligonucleotide
auuguucagccucagcugc

SEQ ID NO: 3269806 - RNA, 19 nt, Artificial Sequence
  Description of Artificial Sequence: Synthetic oligonucleotide
uuugucuccauuuucgcug

SEQ ID NO: 3269807 - RNA, 19 nt, Artificial Sequence
  Description of Artificial Sequence: Synthetic oligonucleotide
uuucaagugccuaagcuga

SEQ ID NO: 3269808 - RNA, 19 nt, Artificial Sequence
  Description of Artificial Sequence: Synthetic oligonucleotide
aaggaucgauuguucagcc

SEQ ID NO: 3269809 - RNA, 19 nt, Artificial Sequence
  Description of Artificial Sequence: Synthetic oligonucleotide
uucacauauuucccgauag

SEQ ID NO: 3269810 - RNA, 19 nt, Artificial Sequence
  Description of Artificial Sequence: Synthetic oligonucleotide
ugaaaguuucuguagggcc

SEQ ID NO: 3269811 - RNA, 19 nt, Artificial Sequence
  Description of Artificial Sequence: Synthetic oligonucleotide
ugaguucacauauuucccg

SEQ ID NO: 3269812 - RNA, 19 nt, Artificial Sequence
  Description of Artificial Sequence: Synthetic oligonucleotide
aagaagcugccguagguuc

SEQ ID NO: 3269813 - RNA, 19 nt, Artificial Sequence
  Description of Artificial Sequence: Synthetic oligonucleotide
ucugaaaguuucuguaggg

SEQ ID NO: 3269814 - RNA, 19 nt, Artificial Sequence
  Description of Artificial Sequence: Synthetic oligonucleotide
uaaaggaucgauuguucag

SEQ ID NO: 3269815 - RNA, 19 nt, Artificial Sequence
  Description of Artificial Sequence: Synthetic oligonucleotide
auguaugucggcuagcuca

SEQ ID NO: 3269816 - RNA, 19 nt, Artificial Sequence
  Description of Artificial Sequence: Synthetic oligonucleotide
aauucgcuccuucuccugg

SEQ ID NO: 3269817 - RNA, 19 nt, Artificial Sequence
  Description of Artificial Sequence: Synthetic oligonucleotide
uucuguagggccugcaagg

SEQ ID NO: 3269818 - RNA, 19 nt, Artificial Sequence
  Description of Artificial Sequence: Synthetic oligonucleotide
cuuucaagugccuaagcug

SEQ ID NO: 3269819 - RNA, 19 nt, Artificial Sequence
  Description of Artificial Sequence: Synthetic oligonucleotide
cucacugucgguuucucgg

SEQ ID NO: 3269820 - RNA, 19 nt, Artificial Sequence
  Description of Artificial Sequence: Synthetic oligonucleotide
uucccgauagcuuucaagu

SEQ ID NO: 3269821 - RNA, 19 nt, Artificial Sequence
  Description of Artificial Sequence: Synthetic oligonucleotide
uucgcuguaagaacaguca

SEQ ID NO: 3269822 - RNA, 19 nt, Artificial Sequence
  Description of Artificial Sequence: Synthetic oligonucleotide
uuucuguagggccugcaag

SEQ ID NO: 3269823 - RNA, 19 nt, Artificial Sequence
  Description of Artificial Sequence: Synthetic oligonucleotide
guuucuuuggccaacugcc

SEQ ID NO: 3269824 - RNA, 19 nt, Artificial Sequence
  Description of Artificial Sequence: Synthetic oligonucleotide
ugcaaggcgucuuuggucc

SEQ ID NO: 3269825 - RNA, 19 nt, Artificial Sequence
  Description of Artificial Sequence: Synthetic oligonucleotide
uucucuuucugcaagguuu

SEQ ID NO: 3269826 - RNA, 19 nt, Artificial Sequence
  Description of Artificial Sequence: Synthetic oligonucleotide
uuuccuugacacaauucgc

SEQ ID NO: 3269827 - RNA, 19 nt, Artificial Sequence
  Description of Artificial Sequence: Synthetic oligonucleotide
uccauuuucgcuguaagaa

SEQ ID NO: 3269828 - RNA, 19 nt, Artificial Sequence
  Description of Artificial Sequence: Synthetic oligonucleotide
cuucaccucauucuggugc

SEQ ID NO: 3269829 - RNA, 19 nt, Artificial Sequence
  Description of Artificial Sequence: Synthetic oligonucleotide
gauuguucagccucagcug

SEQ ID NO: 3269830 - RNA, 19 nt, Artificial Sequence
  Description of Artificial Sequence: Synthetic oligonucleotide
uuucuuuggccaacugccg

SEQ ID NO: 3269831 - RNA, 19 nt, Artificial Sequence
  Description of Artificial Sequence: Synthetic oligonucleotide
augacaguggcuuccagcu

SEQ ID NO: 3269832 - RNA, 19 nt, Artificial Sequence
  Description of Artificial Sequence: Synthetic oligonucleotide
cagcuugcgauguaugucg

SEQ ID NO: 3269833 - RNA, 19 nt, Artificial Sequence
  Description of Artificial Sequence: Synthetic oligonucleotide
ucuccauuuucgcuguaag

SEQ ID NO: 3269834 - RNA, 19 nt, Artificial Sequence
  Description of Artificial Sequence: Synthetic oligonucleotide
uuucccgauagcuuucaag

SEQ ID NO: 3269835 - RNA, 19 nt, Artificial Sequence
  Description of Artificial Sequence: Synthetic oligonucleotide
uuccuugacacaauucgcu

SEQ ID NO: 3269836 - RNA, 19 nt, Artificial Sequence
  Description of Artificial Sequence: Synthetic oligonucleotide
ucugugaguucacauauuu

SEQ ID NO: 3269837 - RNA, 19 nt, Artificial Sequence
  Description of Artificial Sequence: Synthetic oligonucleotide
uuucgcuguaagaacaguc

SEQ ID NO: 3269838 - RNA, 19 nt, Artificial Sequence
  Description of Artificial Sequence: Synthetic oligonucleotide
uucucuaugacaguggcuu

SEQ ID NO: 3269839 - RNA, 19 nt, Artificial Sequence
  Description of Artificial Sequence: Synthetic oligonucleotide
cucagcaacucacugucgg

SEQ ID NO: 3269840 - RNA, 19 nt, Artificial Sequence
  Description of Artificial Sequence: Synthetic oligonucleotide
aucugaggcagauuguucu

SEQ ID NO: 3269841 - RNA, 19 nt, Artificial Sequence
  Description of Artificial Sequence: Synthetic oligonucleotide
cucggaguuuccuugacac

SEQ ID NO: 3269842 - RNA, 19 nt, Artificial Sequence
  Description of Artificial Sequence: Synthetic oligonucleotide
gacaguggcuuccagcuug

SEQ ID NO: 3269843 - RNA, 19 nt, Artificial Sequence
  Description of Artificial Sequence: Synthetic oligonucleotide
uucgcugugaucugaggca

SEQ ID NO: 3269844 - RNA, 19 nt, Artificial Sequence
  Description of Artificial Sequence: Synthetic oligonucleotide
uguuugagcugcuagcguc

SEQ ID NO: 3269845 - RNA, 19 nt, Artificial Sequence
  Description of Artificial Sequence: Synthetic oligonucleotide
ucgcuguaagaacagucag

SEQ ID NO: 3269846 - RNA, 19 nt, Artificial Sequence
  Description of Artificial Sequence: Synthetic oligonucleotide
uguagggccugcaaggcgu

SEQ ID NO: 3269847 - RNA, 19 nt, Artificial Sequence
  Description of Artificial Sequence: Synthetic oligonucleotide
acacaauucgcuccuucuc

SEQ ID NO: 3269848 - RNA, 19 nt, Artificial Sequence
  Description of Artificial Sequence: Synthetic oligonucleotide
cacaauucgcuccuucucc

SEQ ID NO: 3269849 - RNA, 19 nt, Artificial Sequence
  Description of Artificial Sequence: Synthetic oligonucleotide
ugguucucuaugacagugg

SEQ ID NO: 3269850 - RNA, 19 nt, Artificial Sequence
  Description of Artificial Sequence: Synthetic oligonucleotide
ugcgauguaugucggcuag

SEQ ID NO: 3269851 - RNA, 19 nt, Artificial Sequence
  Description of Artificial Sequence: Synthetic oligonucleotide
ucuccugggacuuccgaag

SEQ ID NO: 3269852 - RNA, 19 nt, Artificial Sequence
  Description of Artificial Sequence: Synthetic oligonucleotide
ucacauauuucccgauagc

SEQ ID NO: 3269853 - RNA, 19 nt, Artificial Sequence
  Description of Artificial Sequence: Synthetic oligonucleotide
cuucgcugugaucugaggc

SEQ ID NO: 3269854 - RNA, 19 nt, Artificial Sequence
  Description of Artificial Sequence: Synthetic oligonucleotide
uccucagcaacucacuguc

SEQ ID NO: 3269855 - RNA, 19 nt, Artificial Sequence
  Description of Artificial Sequence: Synthetic oligonucleotide
uggugcuucgcugugaucu

SEQ ID NO: 3269856 - RNA, 19 nt, Artificial Sequence
  Description of Artificial Sequence: Synthetic oligonucleotide
uuuuccaaguucuguauuu

SEQ ID NO: 3269857 - RNA, 19 nt, Artificial Sequence
  Description of Artificial Sequence: Synthetic oligonucleotide
aagugccuaagcugaagcu

SEQ ID NO: 3269858 - RNA, 19 nt, Artificial Sequence
  Description of Artificial Sequence: Synthetic oligonucleotide
agcuuucaagugccuaagc

SEQ ID NO: 3269859 - RNA, 19 nt, Artificial Sequence
  Description of Artificial Sequence: Synthetic oligonucleotide
uguucugugaguucacaua

SEQ ID NO: 3269860 - RNA, 19 nt, Artificial Sequence
  Description of Artificial Sequence: Synthetic oligonucleotide
auagcuuucaagugccuaa

SEQ ID NO: 3269861 - RNA, 19 nt, Artificial Sequence
  Description of Artificial Sequence: Synthetic oligonucleotide
guuucucggaguuuccuug

SEQ ID NO: 3269862 - RNA, 19 nt, Artificial Sequence
  Description of Artificial Sequence: Synthetic oligonucleotide
ucggcuagcucauucuuca

SEQ ID NO: 3269863 - RNA, 19 nt, Artificial Sequence
  Description of Artificial Sequence: Synthetic oligonucleotide
auuugucuccauuuucgcu

SEQ ID NO: 3269864 - RNA, 19 nt, Artificial Sequence
  Description of Artificial Sequence: Synthetic oligonucleotide
ucuuugguccucagcaacu

SEQ ID NO: 3269865 - RNA, 19 nt, Artificial Sequence
  Description of Artificial Sequence: Synthetic oligonucleotide
ucuuugucgcuguuugagc

SEQ ID NO: 3269866 - RNA, 19 nt, Artificial Sequence
  Description of Artificial Sequence: Synthetic oligonucleotide
aacagucagccugcgaguc

SEQ ID NO: 3269867 - RNA, 19 nt, Artificial Sequence
  Description of Artificial Sequence: Synthetic oligonucleotide
cauuuucgcuguaagaaca

SEQ ID NO: 3269868 - RNA, 19 nt, Artificial Sequence
  Description of Artificial Sequence: Synthetic oligonucleotide
agguucuucaccucauucu

SEQ ID NO: 3269869 - RNA, 19 nt, Artificial Sequence
  Description of Artificial Sequence: Synthetic oligonucleotide
caagugccuaagcugaagc

SEQ ID NO: 3269870 - RNA, 19 nt, Artificial Sequence
  Description of Artificial Sequence: Synthetic oligonucleotide
cauuugucuccauuuucgc

SEQ ID NO: 3269871 - RNA, 19 nt, Artificial Sequence
  Description of Artificial Sequence: Synthetic oligonucleotide
ugagcugcuagcgucuucc

SEQ ID NO: 3269872 - RNA, 19 nt, Artificial Sequence
  Description of Artificial Sequence: Synthetic oligonucleotide
uucuucaccucauucuggu

SEQ ID NO: 3269873 - RNA, 19 nt, Artificial Sequence
  Description of Artificial Sequence: Synthetic oligonucleotide
agauuguucugugaguuca

SEQ ID NO: 3269874 - RNA, 19 nt, Artificial Sequence
  Description of Artificial Sequence: Synthetic oligonucleotide
uuugucauuugucuccauu

SEQ ID NO: 3269875 - RNA, 19 nt, Artificial Sequence
  Description of Artificial Sequence: Synthetic oligonucleotide
uugucauuugucuccauuu

SEQ ID NO: 3269876 - RNA, 19 nt, Artificial Sequence
  Description of Artificial Sequence: Synthetic oligonucleotide
acuaaaggaucgauuguuc

SEQ ID NO: 3269877 - RNA, 19 nt, Artificial Sequence
  Description of Artificial Sequence: Synthetic oligonucleotide
gcuguaagaacagucagcc

SEQ ID NO: 3269878 - RNA, 19 nt, Artificial Sequence
  Description of Artificial Sequence: Synthetic oligonucleotide
uaugucggcuagcucauuc

SEQ ID NO: 3269879 - RNA, 19 nt, Artificial Sequence
  Description of Artificial Sequence: Synthetic oligonucleotide
uucuuuggccaacugccga

SEQ ID NO: 3269880 - RNA, 19 nt, Artificial Sequence
  Description of Artificial Sequence: Synthetic oligonucleotide
uugguccucagcaacucac

SEQ ID NO: 3269881 - RNA, 19 nt, Artificial Sequence
  Description of Artificial Sequence: Synthetic oligonucleotide
ucaggucuucucuuucugc

SEQ ID NO: 3269882 - RNA, 19 nt, Artificial Sequence
  Description of Artificial Sequence: Synthetic oligonucleotide
ucuuccgguuucuuuggcc

SEQ ID NO: 3269883 - RNA, 19 nt, Artificial Sequence
  Description of Artificial Sequence: Synthetic oligonucleotide
ucauucuggugcuucgcug

SEQ ID NO: 3269884 - RNA, 19 nt, Artificial Sequence
  Description of Artificial Sequence: Synthetic oligonucleotide
ugcuuuuccaaguucugua

SEQ ID NO: 3269885 - RNA, 19 nt, Artificial Sequence
  Description of Artificial Sequence: Synthetic oligonucleotide
ugcgagucaggucuucucu

SEQ ID NO: 3269886 - RNA, 19 nt, Artificial Sequence
  Description of Artificial Sequence: Synthetic oligonucleotide
ucgcuguuugagcugcuag

SEQ ID NO: 3269887 - RNA, 19 nt, Artificial Sequence
  Description of Artificial Sequence: Synthetic oligonucleotide
uagguucuucaccucauuc

SEQ ID NO: 3269888 - RNA, 19 nt, Artificial Sequence
  Description of Artificial Sequence: Synthetic oligonucleotide
ugccguagguucuucaccu

SEQ ID NO: 3269889 - RNA, 19 nt, Artificial Sequence
  Description of Artificial Sequence: Synthetic oligonucleotide
agcugaagcuguuucaaaa

SEQ ID NO: 3269890 - RNA, 19 nt, Artificial Sequence
  Description of Artificial Sequence: Synthetic oligonucleotide
acugccgacuaaaggaucg

SEQ ID NO: 3269891 - RNA, 19 nt, Artificial Sequence
  Description of Artificial Sequence: Synthetic oligonucleotide
cuaaaggaucgauuguuca

SEQ ID NO: 3269892 - RNA, 19 nt, Artificial Sequence
  Description of Artificial Sequence: Synthetic oligonucleotide
cugaaaguuucuguagggc

SEQ ID NO: 3269893 - RNA, 19 nt, Artificial Sequence
  Description of Artificial Sequence: Synthetic oligonucleotide
agugccuaagcugaagcug

SEQ ID NO: 3269894 - RNA, 19 nt, Artificial Sequence
  Description of Artificial Sequence: Synthetic oligonucleotide
gguuucuuuggccaacugc

SEQ ID NO: 3269895 - RNA, 19 nt, Artificial Sequence
  Description of Artificial Sequence: Synthetic oligonucleotide
uuugucgcuguuugagcug

SEQ ID NO: 3269896 - RNA, 19 nt, Artificial Sequence
  Description of Artificial Sequence: Synthetic oligonucleotide
aaugcaaagcaucaguuac

SEQ ID NO: 3269897 - RNA, 19 nt, Artificial Sequence
  Description of Artificial Sequence: Synthetic oligonucleotide
uaaauugccaucuugaugu

SEQ ID NO: 3269898 - RNA, 19 nt, Artificial Sequence
  Description of Artificial Sequence: Synthetic oligonucleotide
uuuauaauauucaagcugu

SEQ ID NO: 3269899 - RNA, 19 nt, Artificial Sequence
  Description of Artificial Sequence: Synthetic oligonucleotide
uaaggauuaaccaauggag

SEQ ID NO: 3269900 - RNA, 19 nt, Artificial Sequence
  Description of Artificial Sequence: Synthetic oligonucleotide
uuaauuucaucccaguuug

SEQ ID NO: 3269901 - RNA, 19 nt, Artificial Sequence
  Description of Artificial Sequence: Synthetic oligonucleotide
aacggaaugauacuuaacu

SEQ ID NO: 3269902 - RNA, 19 nt, Artificial Sequence
  Description of Artificial Sequence: Synthetic oligonucleotide
guuacaaagagcuuguaag

SEQ ID NO: 3269903 - RNA, 19 nt, Artificial Sequence
  Description of Artificial Sequence: Synthetic oligonucleotide
aauaccacaucccacacca

SEQ ID NO: 3269904 - RNA, 19 nt, Artificial Sequence
  Description of Artificial Sequence: Synthetic oligonucleotide
uauaaaauaccacauccca

SEQ ID NO: 3269905 - RNA, 19 nt, Artificial Sequence
  Description of Artificial Sequence: Synthetic oligonucleotide
uaaaguuccauauauauuu

SEQ ID NO: 3269906 - RNA, 19 nt, Artificial Sequence
  Description of Artificial Sequence: Synthetic oligonucleotide
uuguaaguaaugaugguag

SEQ ID NO: 3269907 - RNA, 19 nt, Artificial Sequence
  Description of Artificial Sequence: Synthetic oligonucleotide
aaaguauaaaguuccauau

SEQ ID NO: 3269908 - RNA, 19 nt, Artificial Sequence
  Description of Artificial Sequence: Synthetic oligonucleotide
ugggauauaaaauaccaca

SEQ ID NO: 3269909 - RNA, 19 nt, Artificial Sequence
  Description of Artificial Sequence: Synthetic oligonucleotide
acugaaauacuagaggagc

SEQ ID NO: 3269910 - RNA, 19 nt, Artificial Sequence
  Description of Artificial Sequence: Synthetic oligonucleotide
uaaaauaccacaucccaca

SEQ ID NO: 3269911 - RNA, 19 nt, Artificial Sequence
  Description of Artificial Sequence: Synthetic oligonucleotide
aauuuugcauccccuagag

SEQ ID NO: 3269912 - RNA, 19 nt, Artificial Sequence
  Description of Artificial Sequence: Synthetic oligonucleotide
uaacucuuccuuuuggugg

SEQ ID NO: 3269913 - RNA, 19 nt, Artificial Sequence
  Description of Artificial Sequence: Synthetic oligonucleotide
aacucuuccuuuugguggc

SEQ ID NO: 3269914 - RNA, 19 nt, Artificial Sequence
  Description of Artificial Sequence: Synthetic oligonucleotide
uuugacuaaggauuaacca

SEQ ID NO: 3269915 - RNA, 19 nt, Artificial Sequence
  Description of Artificial Sequence: Synthetic oligonucleotide
aagccugcggcuucgacgc

SEQ ID NO: 3269916 - RNA, 19 nt, Artificial Sequence
  Description of Artificial Sequence: Synthetic oligonucleotide
uaaccaauggaguauaacu

SEQ ID NO: 3269917 - RNA, 19 nt, Artificial Sequence
  Description of Artificial Sequence: Synthetic oligonucleotide
ccauauauauuuaaggucg

SEQ ID NO: 3269918 - RNA, 19 nt, Artificial Sequence
  Description of Artificial Sequence: Synthetic oligonucleotide
ugaaccuugaaacuguuuc

SEQ ID NO: 3269919 - RNA, 19 nt, Artificial Sequence
  Description of Artificial Sequence: Synthetic oligonucleotide
uuccauauauauuuaaggu

SEQ ID NO: 3269920 - RNA, 19 nt, Artificial Sequence
  Description of Artificial Sequence: Synthetic oligonucleotide
aaugauguuugcuacuagu

SEQ ID NO: 3269921 - RNA, 19 nt, Artificial Sequence
  Description of Artificial Sequence: Synthetic oligonucleotide
uacuaguccagacauagca

SEQ ID NO: 3269922 - RNA, 19 nt, Artificial Sequence
  Description of Artificial Sequence: Synthetic oligonucleotide
aaauaccacaucccacacc

SEQ ID NO: 3269923 - RNA, 19 nt, Artificial Sequence
  Description of Artificial Sequence: Synthetic oligonucleotide
ugaccauauguauaaauug

SEQ ID NO: 3269924 - RNA, 19 nt, Artificial Sequence
  Description of Artificial Sequence: Synthetic oligonucleotide
auacuuaacugccaaaugu

SEQ ID NO: 3269925 - RNA, 19 nt, Artificial Sequence
  Description of Artificial Sequence: Synthetic oligonucleotide
uauacacaggucuucagug

SEQ ID NO: 3269926 - RNA, 19 nt, Artificial Sequence
  Description of Artificial Sequence: Synthetic oligonucleotide
ugauguuugcuacuagucc

SEQ ID NO: 3269927 - RNA, 19 nt, Artificial Sequence
  Description of Artificial Sequence: Synthetic oligonucleotide
ucaaugauuucggagauca

SEQ ID NO: 3269928 - RNA, 19 nt, Artificial Sequence
  Description of Artificial Sequence: Synthetic oligonucleotide
auaauauucaagcuguuuu

SEQ ID NO: 3269929 - RNA, 19 nt, Artificial Sequence
  Description of Artificial Sequence: Synthetic oligonucleotide
ucuucagugcuucauguug

SEQ ID NO: 3269930 - RNA, 19 nt, Artificial Sequence
  Description of Artificial Sequence: Synthetic oligonucleotide
guaguuccaaaguauaaag

SEQ ID NO: 3269931 - RNA, 19 nt, Artificial Sequence
  Description of Artificial Sequence: Synthetic oligonucleotide
ugaauuuugcauccccuag

SEQ ID NO: 3269932 - RNA, 19 nt, Artificial Sequence
  Description of Artificial Sequence: Synthetic oligonucleotide
auuaauuucaucccaguuu

SEQ ID NO: 3269933 - RNA, 19 nt, Artificial Sequence
  Description of Artificial Sequence: Synthetic oligonucleotide
uuugcuacuaguccagaca

SEQ ID NO: 3269934 - RNA, 19 nt, Artificial Sequence
  Description of Artificial Sequence: Synthetic oligonucleotide
cagugcuucauguugaacc

SEQ ID NO: 3269935 - RNA, 19 nt, Artificial Sequence
  Description of Artificial Sequence: Synthetic oligonucleotide
aaauacuagaggagcagac

SEQ ID NO: 3269936 - RNA, 19 nt, Artificial Sequence
  Description of Artificial Sequence: Synthetic oligonucleotide
auaaauugccaucuugaug

SEQ ID NO: 3269937 - RNA, 19 nt, Artificial Sequence
  Description of Artificial Sequence: Synthetic oligonucleotide
uugacuaaggauuaaccaa

SEQ ID NO: 3269938 - RNA, 19 nt, Artificial Sequence
  Description of Artificial Sequence: Synthetic oligonucleotide
ugcuuaaguuaccugaaug

SEQ ID NO: 3269939 - RNA, 19 nt, Artificial Sequence
  Description of Artificial Sequence: Synthetic oligonucleotide
aaaauggaaggguagucaa

SEQ ID NO: 3269940 - RNA, 19 nt, Artificial Sequence
  Description of Artificial Sequence: Synthetic oligonucleotide
ucuagcuuccuucagcaac

SEQ ID NO: 3269941 - RNA, 19 nt, Artificial Sequence
  Description of Artificial Sequence: Synthetic oligonucleotide
auucaagcuguuuucaaug

SEQ ID NO: 3269942 - RNA, 19 nt, Artificial Sequence
  Description of Artificial Sequence: Synthetic oligonucleotide
cuucacuuuacugaaauac

SEQ ID NO: 3269943 - RNA, 19 nt, Artificial Sequence
  Description of Artificial Sequence: Synthetic oligonucleotide
uucagagcaagccugcggc

SEQ ID NO: 3269944 - RNA, 19 nt, Artificial Sequence
  Description of Artificial Sequence: Synthetic oligonucleotide
uacugaaauacuagaggag

SEQ ID NO: 3269945 - RNA, 19 nt, Artificial Sequence
  Description of Artificial Sequence: Synthetic oligonucleotide
uauccccgaauucagagca

SEQ ID NO: 3269946 - RNA, 19 nt, Artificial Sequence
  Description of Artificial Sequence: Synthetic oligonucleotide
aguuccaaaguauaaaguu

SEQ ID NO: 3269947 - RNA, 19 nt, Artificial Sequence
  Description of Artificial Sequence: Synthetic oligonucleotide
acauagcacuaguaguucc

SEQ ID NO: 3269948 - RNA, 19 nt, Artificial Sequence
  Description of Artificial Sequence: Synthetic oligonucleotide
accauauguauaaauugcc

SEQ ID NO: 3269949 - RNA, 19 nt, Artificial Sequence
  Description of Artificial Sequence: Synthetic oligonucleotide
uaaguaaugaugguagcca

SEQ ID NO: 3269950 - RNA, 19 nt, Artificial Sequence
  Description of Artificial Sequence: Synthetic oligonucleotide
cagacauuaauuucauccc

SEQ ID NO: 3269951 - RNA, 19 nt, Artificial Sequence
  Description of Artificial Sequence: Synthetic oligonucleotide
uugaaacuguuucugaaaa

SEQ ID NO: 3269952 - RNA, 19 nt, Artificial Sequence
  Description of Artificial Sequence: Synthetic oligonucleotide
aaagccagagcacugggau

SEQ ID NO: 3269953 - RNA, 19 nt, Artificial Sequence
  Description of Artificial Sequence: Synthetic oligonucleotide
gauguuugcuacuagucca

SEQ ID NO: 3269954 - RNA, 19 nt, Artificial Sequence
  Description of Artificial Sequence: Synthetic oligonucleotide
aucaguuacaaagagcuug

SEQ ID NO: 3269955 - RNA, 19 nt, Artificial Sequence
  Description of Artificial Sequence: Synthetic oligonucleotide
auauauuuaaggucgguuu

SEQ ID NO: 3269956 - RNA, 19 nt, Artificial Sequence
  Description of Artificial Sequence: Synthetic oligonucleotide
uuucaucccaguuugacua

SEQ ID NO: 3269957 - RNA, 19 nt, Artificial Sequence
  Description of Artificial Sequence: Synthetic oligonucleotide
caacacaccaguauccccg

SEQ ID NO: 3269958 - RNA, 19 nt, Artificial Sequence
  Description of Artificial Sequence: Synthetic oligonucleotide
uucacuuuacugaaauacu

SEQ ID NO: 3269959 - RNA, 19 nt, Artificial Sequence
  Description of Artificial Sequence: Synthetic oligonucleotide
uuacaaagagcuuguaagu

SEQ ID NO: 3269960 - RNA, 19 nt, Artificial Sequence
  Description of Artificial Sequence: Synthetic oligonucleotide
aguauccccgaauucagag

SEQ ID NO: 3269961 - RNA, 19 nt, Artificial Sequence
  Description of Artificial Sequence: Synthetic oligonucleotide
uggaguauaacucuuccuu

SEQ ID NO: 3269962 - RNA, 19 nt, Artificial Sequence
  Description of Artificial Sequence: Synthetic oligonucleotide
aauggaaggguagucaagu

SEQ ID NO: 3269963 - RNA, 19 nt, Artificial Sequence
  Description of Artificial Sequence: Synthetic oligonucleotide
auaaaauaccacaucccac

SEQ ID NO: 3269964 - RNA, 19 nt, Artificial Sequence
  Description of Artificial Sequence: Synthetic oligonucleotide
gauacuuaacugccaaaug

SEQ ID NO: 3269965 - RNA, 19 nt, Artificial Sequence
  Description of Artificial Sequence: Synthetic oligonucleotide
aauauucaagcuguuuuca

SEQ ID NO: 3269966 - RNA, 19 nt, Artificial Sequence
  Description of Artificial Sequence: Synthetic oligonucleotide
gaccauauguauaaauugc

SEQ ID NO: 3269967 - RNA, 19 nt, Artificial Sequence
  Description of Artificial Sequence: Synthetic oligonucleotide
uuaaguuaccugaaugcaa

SEQ ID NO: 3269968 - RNA, 19 nt, Artificial Sequence
  Description of Artificial Sequence: Synthetic oligonucleotide
uaauauucaagcuguuuuc

SEQ ID NO: 3269969 - RNA, 19 nt, Artificial Sequence
  Description of Artificial Sequence: Synthetic oligonucleotide
acuuaacugccaaaugucc

SEQ ID NO: 3269970 - RNA, 19 nt, Artificial Sequence
  Description of Artificial Sequence: Synthetic oligonucleotide
uuuuacgaaaagccagagc

SEQ ID NO: 3269971 - RNA, 19 nt, Artificial Sequence
  Description of Artificial Sequence: Synthetic oligonucleotide
guuaccugaaugcaaagca

SEQ ID NO: 3269972 - RNA, 19 nt, Artificial Sequence
  Description of Artificial Sequence: Synthetic oligonucleotide
aguuaccugaaugcaaagc

SEQ ID NO: 3269973 - RNA, 19 nt, Artificial Sequence
  Description of Artificial Sequence: Synthetic oligonucleotide
aaaugauguuugcuacuag

SEQ ID NO: 3269974 - RNA, 19 nt, Artificial Sequence
  Description of Artificial Sequence: Synthetic oligonucleotide
cauauauauuuaaggucgg

SEQ ID NO: 3269975 - RNA, 19 nt, Artificial Sequence
  Description of Artificial Sequence: Synthetic oligonucleotide
acuuuacugaaauacuaga

SEQ ID NO: 3269976 - RNA, 19 nt, Artificial Sequence
  Description of Artificial Sequence: Synthetic oligonucleotide
aauugccaucuugaugucc

SEQ ID NO: 3269977 - RNA, 19 nt, Artificial Sequence
  Description of Artificial Sequence: Synthetic oligonucleotide
ucagcaacacaccaguauc

SEQ ID NO: 3269978 - RNA, 19 nt, Artificial Sequence
  Description of Artificial Sequence: Synthetic oligonucleotide
uauauuuaaggucgguuuu

SEQ ID NO: 3269979 - RNA, 19 nt, Artificial Sequence
  Description of Artificial Sequence: Synthetic oligonucleotide
uauaacucuuccuuuuggu

SEQ ID NO: 3269980 - RNA, 19 nt, Artificial Sequence
  Description of Artificial Sequence: Synthetic oligonucleotide
aguacacuucucauaauac

SEQ ID NO: 3269981 - RNA, 19 nt, Artificial Sequence
  Description of Artificial Sequence: Synthetic oligonucleotide
caguggaacggaaugauac

SEQ ID NO: 3269982 - RNA, 19 nt, Artificial Sequence
  Description of Artificial Sequence: Synthetic oligonucleotide
uguugaaccuugaaacugu

SEQ ID NO: 3269983 - RNA, 19 nt, Artificial Sequence
  Description of Artificial Sequence: Synthetic oligonucleotide
ucauuggucugaauuuugc

SEQ ID NO: 3269984 - RNA, 19 nt, Artificial Sequence
  Description of Artificial Sequence: Synthetic oligonucleotide
uacuuaacugccaaauguc

SEQ ID NO: 3269985 - RNA, 19 nt, Artificial Sequence
  Description of Artificial Sequence: Synthetic oligonucleotide
aggagcagacauuaauuuc

SEQ ID NO: 3269986 - RNA, 19 nt, Artificial Sequence
  Description of Artificial Sequence: Synthetic oligonucleotide
cacuuuacugaaauacuag

SEQ ID NO: 3269987 - RNA, 19 nt, Artificial Sequence
  Description of Artificial Sequence: Synthetic oligonucleotide
guauaacucuuccuuuugg

SEQ ID NO: 3269988 - RNA, 19 nt, Artificial Sequence
  Description of Artificial Sequence: Synthetic oligonucleotide
ucaguuacaaagagcuugu

SEQ ID NO: 3269989 - RNA, 19 nt, Artificial Sequence
  Description of Artificial Sequence: Synthetic oligonucleotide
uuugcauccccuagagaag

SEQ ID NO: 3269990 - RNA, 19 nt, Artificial Sequence
  Description of Artificial Sequence: Synthetic oligonucleotide
aguuugacuaaggauuaac

SEQ ID NO: 3269991 - RNA, 19 nt, Artificial Sequence
  Description of Artificial Sequence: Synthetic oligonucleotide
agcacugggauauaaaaua

SEQ ID NO: 3269992 - RNA, 19 nt, Artificial Sequence
  Description of Artificial Sequence: Synthetic oligonucleotide
uuuugguggcaguggaacg

SEQ ID NO: 3269993 - RNA, 19 nt, Artificial Sequence
  Description of Artificial Sequence: Synthetic oligonucleotide
uguaaguaaugaugguagc

SEQ ID NO: 3269994 - RNA, 19 nt, Artificial Sequence
  Description of Artificial Sequence: Synthetic oligonucleotide
uuucggagaucauuggucu

SEQ ID NO: 3269995 - RNA, 19 nt, Artificial Sequence
  Description of Artificial Sequence: Synthetic oligonucleotide
cuaaggauuaaccaaugga

SEQ ID NO: 3269996 - RNA, 19 nt, Artificial Sequence
  Description of Artificial Sequence: Synthetic oligonucleotide
aaauaaaacauuuccagac

SEQ ID NO: 3269997 - RNA, 19 nt, Artificial Sequence
  Description of Artificial Sequence: Synthetic oligonucleotide
uuaacaaccuccaagaugc

SEQ ID NO: 3269998 - RNA, 19 nt, Artificial Sequence
  Description of Artificial Sequence: Synthetic oligonucleotide
ucaaauaaaacauuuccag

SEQ ID NO: 3269999 - RNA, 19 nt, Artificial Sequence
  Description of Artificial Sequence: Synthetic oligonucleotide
aauaaaacauuuccagacg

SEQ ID NO: 3270000 - RNA, 19 nt, Artificial Sequence
  Description of Artificial Sequence: Synthetic oligonucleotide
uuuaguucaaauaaaacau

SEQ ID NO: 3270001 - RNA, 19 nt, Artificial Sequence
  Description of Artificial Sequence: Synthetic oligonucleotide
auuuaguucaaauaaaaca

SEQ ID NO: 3270002 - RNA, 19 nt, Artificial Sequence
  Description of Artificial Sequence: Synthetic oligonucleotide
aaguauguuacccagcgag

SEQ ID NO: 3270003 - RNA, 19 nt, Artificial Sequence
  Description of Artificial Sequence: Synthetic oligonucleotide
cauuuaaccgucuacaugc

SEQ ID NO: 3270004 - RNA, 19 nt, Artificial Sequence
  Description of Artificial Sequence: Synthetic oligonucleotide
gaaaauuuaguucaaauaa

SEQ ID NO: 3270005 - RNA, 19 nt, Artificial Sequence
  Description of Artificial Sequence: Synthetic oligonucleotide
aaaucauuuaaccgucuac

SEQ ID NO: 3270006 - RNA, 19 nt, Artificial Sequence
  Description of Artificial Sequence: Synthetic oligonucleotide
ugaaguauguuacccagcg

SEQ ID NO: 3270007 - RNA, 19 nt, Artificial Sequence
  Description of Artificial Sequence: Synthetic oligonucleotide
uaaaguuggucuaaguucc

SEQ ID NO: 3270008 - RNA, 19 nt, Artificial Sequence
  Description of Artificial Sequence: Synthetic oligonucleotide
ucuacaugcacgcaaagca

SEQ ID NO: 3270009 - RNA, 19 nt, Artificial Sequence
  Description of Artificial Sequence: Synthetic oligonucleotide
acuguuucaaucaaguagc

SEQ ID NO: 3270010 - RNA, 19 nt, Artificial Sequence
  Description of Artificial Sequence: Synthetic oligonucleotide
uuaaccgucuacaugcacg

SEQ ID NO: 3270011 - RNA, 19 nt, Artificial Sequence
  Description of Artificial Sequence: Synthetic oligonucleotide
uuucaaucaaguagcauag

SEQ ID NO: 3270012 - RNA, 19 nt, Artificial Sequence
  Description of Artificial Sequence: Synthetic oligonucleotide
aauuuaguucaaauaaaac

SEQ ID NO: 3270013 - RNA, 19 nt, Artificial Sequence
  Description of Artificial Sequence: Synthetic oligonucleotide
cuagcaaaaucauuuaacc

SEQ ID NO: 3270014 - RNA, 19 nt, Artificial Sequence
  Description of Artificial Sequence: Synthetic oligonucleotide
agcaaaaucauuuaaccgu

SEQ ID NO: 3270015 - RNA, 19 nt, Artificial Sequence
  Description of Artificial Sequence: Synthetic oligonucleotide
aaugauuuugggcucagga

SEQ ID NO: 3270016 - RNA, 19 nt, Artificial Sequence
  Description of Artificial Sequence: Synthetic oligonucleotide
ugauccaugagaauagcag

SEQ ID NO: 3270017 - RNA, 19 nt, Artificial Sequence
  Description of Artificial Sequence: Synthetic oligonucleotide
aauagcagcgaauggacug

SEQ ID NO: 3270018 - RNA, 19 nt, Artificial Sequence
  Description of Artificial Sequence: Synthetic oligonucleotide
guuacuauuacaugguuug

SEQ ID NO: 3270019 - RNA, 19 nt, Artificial Sequence
  Description of Artificial Sequence: Synthetic oligonucleotide
uugggaagcccauagaggg

SEQ ID NO: 3270020 - RNA, 19 nt, Artificial Sequence
  Description of Artificial Sequence: Synthetic oligonucleotide
uuaaaguuggucuaaguuc

SEQ ID NO: 3270021 - RNA, 19 nt, Artificial Sequence
  Description of Artificial Sequence: Synthetic oligonucleotide
agcaucaaugauuuugggc

SEQ ID NO: 3270022 - RNA, 19 nt, Artificial Sequence
  Description of Artificial Sequence: Synthetic oligonucleotide
uacucaaaggaaaauuuag

SEQ ID NO: 3270023 - RNA, 19 nt, Artificial Sequence
  Description of Artificial Sequence: Synthetic oligonucleotide
aguagcauagcagugaguc

SEQ ID NO: 3270024 - RNA, 19 nt, Artificial Sequence
  Description of Artificial Sequence: Synthetic oligonucleotide
ugcuuuguccuuaacaacc

SEQ ID NO: 3270025 - RNA, 19 nt, Artificial Sequence
  Description of Artificial Sequence: Synthetic oligonucleotide
uagcaaaaucauuuaaccg

SEQ ID NO: 3270026 - RNA, 19 nt, Artificial Sequence
  Description of Artificial Sequence: Synthetic oligonucleotide
ugguuugauacucaaagga

SEQ ID NO: 3270027 - RNA, 19 nt, Artificial Sequence
  Description of Artificial Sequence: Synthetic oligonucleotide
ucaaucaaguagcauagca

SEQ ID NO: 3270028 - RNA, 19 nt, Artificial Sequence
  Description of Artificial Sequence: Synthetic oligonucleotide
ucucaugugauccaugaga

SEQ ID NO: 3270029 - RNA, 19 nt, Artificial Sequence
  Description of Artificial Sequence: Synthetic oligonucleotide
caaaggaaaauuuaguuca

SEQ ID NO: 3270030 - RNA, 19 nt, Artificial Sequence
  Description of Artificial Sequence: Synthetic oligonucleotide
uuuaaaguuggucuaaguu

SEQ ID NO: 3270031 - RNA, 19 nt, Artificial Sequence
  Description of Artificial Sequence: Synthetic oligonucleotide
uuacacuuuguccaggccc

SEQ ID NO: 3270032 - RNA, 19 nt, Artificial Sequence
  Description of Artificial Sequence: Synthetic oligonucleotide
ucaaaggaaaauuuaguuc

SEQ ID NO: 3270033 - RNA, 19 nt, Artificial Sequence
  Description of Artificial Sequence: Synthetic oligonucleotide
aaguccaaguuacuauuac

SEQ ID NO: 3270034 - RNA, 19 nt, Artificial Sequence
  Description of Artificial Sequence: Synthetic oligonucleotide
aacagcacuagcaaaauca

SEQ ID NO: 3270035 - RNA, 19 nt, Artificial Sequence
  Description of Artificial Sequence: Synthetic oligonucleotide
aaucauuuaaccgucuaca

SEQ ID NO: 3270036 - RNA, 19 nt, Artificial Sequence
  Description of Artificial Sequence: Synthetic oligonucleotide
uuuguccuuaacaaccucc

SEQ ID NO: 3270037 - RNA, 19 nt, Artificial Sequence
  Description of Artificial Sequence: Synthetic oligonucleotide
aguguguucaucccuuuac

SEQ ID NO: 3270038 - RNA, 19 nt, Artificial Sequence
  Description of Artificial Sequence: Synthetic oligonucleotide
auuacaugguuugauacuc

SEQ ID NO: 3270039 - RNA, 19 nt, Artificial Sequence
  Description of Artificial Sequence: Synthetic oligonucleotide
uccuuaacaaccuccaaga

SEQ ID NO: 3270040 - RNA, 19 nt, Artificial Sequence
  Description of Artificial Sequence: Synthetic oligonucleotide
uuugauacucaaaggaaaa

SEQ ID NO: 3270041 - RNA, 19 nt, Artificial Sequence
  Description of Artificial Sequence: Synthetic oligonucleotide
gauccaugagaauagcagc

SEQ ID NO: 3270042 - RNA, 19 nt, Artificial Sequence
  Description of Artificial Sequence: Synthetic oligonucleotide
auaaaacauuuccagacga

SEQ ID NO: 3270043 - RNA, 19 nt, Artificial Sequence
  Description of Artificial Sequence: Synthetic oligonucleotide
aaauuuaguucaaauaaaa

SEQ ID NO: 3270044 - RNA, 19 nt, Artificial Sequence
  Description of Artificial Sequence: Synthetic oligonucleotide
ccaaguuacuauuacaugg

SEQ ID NO: 3270045 - RNA, 19 nt, Artificial Sequence
  Description of Artificial Sequence: Synthetic oligonucleotide
ucauuuaaccgucuacaug

SEQ ID NO: 3270046 - RNA, 19 nt, Artificial Sequence
  Description of Artificial Sequence: Synthetic oligonucleotide
cuauuacaugguuugauac

SEQ ID NO: 3270047 - RNA, 19 nt, Artificial Sequence
  Description of Artificial Sequence: Synthetic oligonucleotide
ugagaauagcagcgaaugg

SEQ ID NO: 3270048 - RNA, 19 nt, Artificial Sequence
  Description of Artificial Sequence: Synthetic oligonucleotide
augagguccugcuuugucc

SEQ ID NO: 3270049 - RNA, 19 nt, Artificial Sequence
  Description of Artificial Sequence: Synthetic oligonucleotide
guugaaguauguuacccag

SEQ ID NO: 3270050 - RNA, 19 nt, Artificial Sequence
  Description of Artificial Sequence: Synthetic oligonucleotide
uuaaaguccaaguuacuau

SEQ ID NO: 3270051 - RNA, 19 nt, Artificial Sequence
  Description of Artificial Sequence: Synthetic oligonucleotide
auagcagugaguccuuggg

SEQ ID NO: 3270052 - RNA, 19 nt, Artificial Sequence
  Description of Artificial Sequence: Synthetic oligonucleotide
aguucauuuaaaguugguc

SEQ ID NO: 3270053 - RNA, 19 nt, Artificial Sequence
  Description of Artificial Sequence: Synthetic oligonucleotide
aauucccaggcaucgaugu

SEQ ID NO: 3270054 - RNA, 19 nt, Artificial Sequence
  Description of Artificial Sequence: Synthetic oligonucleotide
cuuaacaaccuccaagaug

SEQ ID NO: 3270055 - RNA, 19 nt, Artificial Sequence
  Description of Artificial Sequence: Synthetic oligonucleotide
auagccaacaaguguguuc

SEQ ID NO: 3270056 - RNA, 19 nt, Artificial Sequence
  Description of Artificial Sequence: Synthetic oligonucleotide
aguggaaauucccaguuca

SEQ ID NO: 3270057 - RNA, 19 nt, Artificial Sequence
  Description of Artificial Sequence: Synthetic oligonucleotide
aacauuuccagacgacugu

SEQ ID NO: 3270058 - RNA, 19 nt, Artificial Sequence
  Description of Artificial Sequence: Synthetic oligonucleotide
uggucuaaguuccuggaug

SEQ ID NO: 3270059 - RNA, 19 nt, Artificial Sequence
  Description of Artificial Sequence: Synthetic oligonucleotide
cuuuacgcaauucccaggc

SEQ ID NO: 3270060 - RNA, 19 nt, Artificial Sequence
  Description of Artificial Sequence: Synthetic oligonucleotide
guuucaaucaaguagcaua

SEQ ID NO: 3270061 - RNA, 19 nt, Artificial Sequence
  Description of Artificial Sequence: Synthetic oligonucleotide
aaaauuuaguucaaauaaa

SEQ ID NO: 3270062 - RNA, 19 nt, Artificial Sequence
  Description of Artificial Sequence: Synthetic oligonucleotide
uauuacaugguuugauacu

SEQ ID NO: 3270063 - RNA, 19 nt, Artificial Sequence
  Description of Artificial Sequence: Synthetic oligonucleotide
auucccaguucauuuaaag

SEQ ID NO: 3270064 - RNA, 19 nt, Artificial Sequence
  Description of Artificial Sequence: Synthetic oligonucleotide
augguuugauacucaaagg

SEQ ID NO: 3270065 - RNA, 19 nt, Artificial Sequence
  Description of Artificial Sequence: Synthetic oligonucleotide
aacaaguguguucaucccu

SEQ ID NO: 3270066 - RNA, 19 nt, Artificial Sequence
  Description of Artificial Sequence: Synthetic oligonucleotide
uaguucaaauaaaacauuu

SEQ ID NO: 3270067 - RNA, 19 nt, Artificial Sequence
  Description of Artificial Sequence: Synthetic oligonucleotide
aaguuccuggaugacauag

SEQ ID NO: 3270068 - RNA, 19 nt, Artificial Sequence
  Description of Artificial Sequence: Synthetic oligonucleotide
gaauggacuggacagcggc

SEQ ID NO: 3270069 - RNA, 19 nt, Artificial Sequence
  Description of Artificial Sequence: Synthetic oligonucleotide
ucaggaaccagaucauagc

SEQ ID NO: 3270070 - RNA, 19 nt, Artificial Sequence
  Description of Artificial Sequence: Synthetic oligonucleotide
uguugaaguauguuaccca

SEQ ID NO: 3270071 - RNA, 19 nt, Artificial Sequence
  Description of Artificial Sequence: Synthetic oligonucleotide
agaauagcagcgaauggac

SEQ ID NO: 3270072 - RNA, 19 nt, Artificial Sequence
  Description of Artificial Sequence: Synthetic oligonucleotide
guuccuggaugacauaggg

SEQ ID NO: 3270073 - RNA, 19 nt, Artificial Sequence
  Description of Artificial Sequence: Synthetic oligonucleotide
ucuggcuuguugaaguaug

SEQ ID NO: 3270074 - RNA, 19 nt, Artificial Sequence
  Description of Artificial Sequence: Synthetic oligonucleotide
aucauagccaacaagugug

SEQ ID NO: 3270075 - RNA, 19 nt, Artificial Sequence
  Description of Artificial Sequence: Synthetic oligonucleotide
aaacauuuccagacgacug

SEQ ID NO: 3270076 - RNA, 19 nt, Artificial Sequence
  Description of Artificial Sequence: Synthetic oligonucleotide
guucauuuaaaguuggucu

SEQ ID NO: 3270077 - RNA, 19 nt, Artificial Sequence
  Description of Artificial Sequence: Synthetic oligonucleotide
uaaaacauuuccagacgac

SEQ ID NO: 3270078 - RNA, 19 nt, Artificial Sequence
  Description of Artificial Sequence: Synthetic oligonucleotide
ucuggaguggaaauuccca

SEQ ID NO: 3270079 - RNA, 19 nt, Artificial Sequence
  Description of Artificial Sequence: Synthetic oligonucleotide
uguguucaucccuuuacgc

SEQ ID NO: 3270080 - RNA, 19 nt, Artificial Sequence
  Description of Artificial Sequence: Synthetic oligonucleotide
aaaaucauuuaaccgucua

SEQ ID NO: 3270081 - RNA, 19 nt, Artificial Sequence
  Description of Artificial Sequence: Synthetic oligonucleotide
aggaaaauuuaguucaaau

SEQ ID NO: 3270082 - RNA, 19 nt, Artificial Sequence
  Description of Artificial Sequence: Synthetic oligonucleotide
agcagcaucaaugauuuug

SEQ ID NO: 3270083 - RNA, 19 nt, Artificial Sequence
  Description of Artificial Sequence: Synthetic oligonucleotide
aguucaaauaaaacauuuc

SEQ ID NO: 3270084 - RNA, 19 nt, Artificial Sequence
  Description of Artificial Sequence: Synthetic oligonucleotide
uucauuuaaaguuggucua

SEQ ID NO: 3270085 - RNA, 19 nt, Artificial Sequence
  Description of Artificial Sequence: Synthetic oligonucleotide
uuaguucaaauaaaacauu

SEQ ID NO: 3270086 - RNA, 19 nt, Artificial Sequence
  Description of Artificial Sequence: Synthetic oligonucleotide
augagaauagcagcgaaug

SEQ ID NO: 3270087 - RNA, 19 nt, Artificial Sequence
  Description of Artificial Sequence: Synthetic oligonucleotide
cucaggaaccagaucauag

SEQ ID NO: 3270088 - RNA, 19 nt, Artificial Sequence
  Description of Artificial Sequence: Synthetic oligonucleotide
uacaugcacgcaaagcagc

SEQ ID NO: 3270089 - RNA, 19 nt, Artificial Sequence
  Description of Artificial Sequence: Synthetic oligonucleotide
aaagcagcaucaaugauuu

SEQ ID NO: 3270090 - RNA, 19 nt, Artificial Sequence
  Description of Artificial Sequence: Synthetic oligonucleotide
guccuuaacaaccuccaag

SEQ ID NO: 3270091 - RNA, 19 nt, Artificial Sequence
  Description of Artificial Sequence: Synthetic oligonucleotide
uccugcuuuguccuuaaca

SEQ ID NO: 3270092 - RNA, 19 nt, Artificial Sequence
  Description of Artificial Sequence: Synthetic oligonucleotide
uccaaguuacuauuacaug

SEQ ID NO: 3270093 - RNA, 19 nt, Artificial Sequence
  Description of Artificial Sequence: Synthetic oligonucleotide
uguucaucccuuuacgcaa

SEQ ID NO: 3270094 - RNA, 19 nt, Artificial Sequence
  Description of Artificial Sequence: Synthetic oligonucleotide
ugucucaugugauccauga

SEQ ID NO: 3270095 - RNA, 19 nt, Artificial Sequence
  Description of Artificial Sequence: Synthetic oligonucleotide
caaauaaaacauuuccaga

SEQ ID NO: 3270096 - RNA, 19 nt, Artificial Sequence
  Description of Artificial Sequence: Synthetic oligonucleotide
accuuguacacguacaccg

SEQ ID NO: 3270097 - RNA, 19 nt, Artificial Sequence
  Description of Artificial Sequence: Synthetic oligonucleotide
aaugcgccaggcgagaagc

SEQ ID NO: 3270098 - RNA, 19 nt, Artificial Sequence
  Description of Artificial Sequence: Synthetic oligonucleotide
uuggucacggccuucuugg

SEQ ID NO: 3270099 - RNA, 19 nt, Artificial Sequence
  Description of Artificial Sequence: Synthetic oligonucleotide
auggccuuggaggagaugc

SEQ ID NO: 3270100 - RNA, 19 nt, Artificial Sequence
  Description of Artificial Sequence: Synthetic oligonucleotide
uguuguaaugcgccaggcg

SEQ ID NO: 3270101 - RNA, 19 nt, Artificial Sequence
  Description of Artificial Sequence: Synthetic oligonucleotide
ugcuucagcaccuuguaca

SEQ ID NO: 3270102 - RNA, 19 nt, Artificial Sequence
  Description of Artificial Sequence: Synthetic oligonucleotide
uacacguacaccgaguagc

SEQ ID NO: 3270103 - RNA, 19 nt, Artificial Sequence
  Description of Artificial Sequence: Synthetic oligonucleotide
uucuucugggccuugguca

SEQ ID NO: 3270104 - RNA, 19 nt, Artificial Sequence
  Description of Artificial Sequence: Synthetic oligonucleotide
uucuuggagcccuucuucg

SEQ ID NO: 3270105 - RNA, 19 nt, Artificial Sequence
  Description of Artificial Sequence: Synthetic oligonucleotide
uucagcaccuuguacacgu

SEQ ID NO: 3270106 - RNA, 19 nt, Artificial Sequence
  Description of Artificial Sequence: Synthetic oligonucleotide
guuguaaugcgccaggcga

SEQ ID NO: 3270107 - RNA, 19 nt, Artificial Sequence
  Description of Artificial Sequence: Synthetic oligonucleotide
uuguaaugcgccaggcgag

SEQ ID NO: 3270108 - RNA, 19 nt, Artificial Sequence
  Description of Artificial Sequence: Synthetic oligonucleotide
cuuguuguaaugcgccagg

SEQ ID NO: 3270109 - RNA, 19 nt, Artificial Sequence
  Description of Artificial Sequence: Synthetic oligonucleotide
cuugccguccuucuucugg

SEQ ID NO: 3270110 - RNA, 19 nt, Artificial Sequence
  Description of Artificial Sequence: Synthetic oligonucleotide
acguacaccgaguagcucu

SEQ ID NO: 3270111 - RNA, 19 nt, Artificial Sequence
  Description of Artificial Sequence: Synthetic oligonucleotide
ucuuggagcccuucuucgg

SEQ ID NO: 3270112 - RNA, 19 nt, Artificial Sequence
  Description of Artificial Sequence: Synthetic oligonucleotide
uguacacguacaccgagua

SEQ ID NO: 3270113 - RNA, 19 nt, Artificial Sequence
  Description of Artificial Sequence: Synthetic oligonucleotide
gaagccucgcccgcgaugg

SEQ ID NO: 3270114 - RNA, 19 nt, Artificial Sequence
  Description of Artificial Sequence: Synthetic oligonucleotide
gagcgcuuguuguaaugcg

SEQ ID NO: 3270115 - RNA, 19 nt, Artificial Sequence
  Description of Artificial Sequence: Synthetic oligonucleotide
ugaaccugcuucagcaccu

SEQ ID NO: 3270116 - RNA, 19 nt, Artificial Sequence
  Description of Artificial Sequence: Synthetic oligonucleotide
cuuguacacguacaccgag

SEQ ID NO: 3270117 - RNA, 19 nt, Artificial Sequence
  Description of Artificial Sequence: Synthetic oligonucleotide
accgaguagcucuccuugc

SEQ ID NO: 3270118 - RNA, 19 nt, Artificial Sequence
  Description of Artificial Sequence: Synthetic oligonucleotide
cuuggagcccuucuucggg

SEQ ID NO: 3270119 - RNA, 19 nt, Artificial Sequence
  Description of Artificial Sequence: Synthetic oligonucleotide
gaguagcucuccuugcggc

SEQ ID NO: 3270120 - RNA, 19 nt, Artificial Sequence
  Description of Artificial Sequence: Synthetic oligonucleotide
gaggagaugccgguguccg

SEQ ID NO: 3270121 - RNA, 19 nt, Artificial Sequence
  Description of Artificial Sequence: Synthetic oligonucleotide
gucacggccuucuuggagc

SEQ ID NO: 3270122 - RNA, 19 nt, Artificial Sequence
  Description of Artificial Sequence: Synthetic oligonucleotide
uugccguccuucuucuggg

SEQ ID NO: 3270123 - RNA, 19 nt, Artificial Sequence
  Description of Artificial Sequence: Synthetic oligonucleotide
agcgcuuguuguaaugcgc

SEQ ID NO: 3270124 - RNA, 19 nt, Artificial Sequence
  Description of Artificial Sequence: Synthetic oligonucleotide
uuggaggagaugccggugu

SEQ ID NO: 3270125 - RNA, 19 nt, Artificial Sequence
  Description of Artificial Sequence: Synthetic oligonucleotide
uuggagcccuucuucgggg

SEQ ID NO: 3270126 - RNA, 19 nt, Artificial Sequence
  Description of Artificial Sequence: Synthetic oligonucleotide
ugcgcuugcgcuucuugcc

SEQ ID NO: 3270127 - RNA, 19 nt, Artificial Sequence
  Description of Artificial Sequence: Synthetic oligonucleotide
uaaugcgccaggcgagaag

SEQ ID NO: 3270128 - RNA, 19 nt, Artificial Sequence
  Description of Artificial Sequence: Synthetic oligonucleotide
gugaaccugcuucagcacc

SEQ ID NO: 3270129 - RNA, 19 nt, Artificial Sequence
  Description of Artificial Sequence: Synthetic oligonucleotide
uuguacacguacaccgagu

SEQ ID NO: 3270130 - RNA, 19 nt, Artificial Sequence
  Description of Artificial Sequence: Synthetic oligonucleotide
gauggucgagcgcuuguug

SEQ ID NO: 3270131 - RNA, 19 nt, Artificial Sequence
  Description of Artificial Sequence: Synthetic oligonucleotide
caggcgagaagccucgccc

SEQ ID NO: 3270132 - RNA, 19 nt, Artificial Sequence
  Description of Artificial Sequence: Synthetic oligonucleotide
cuucuugccguccuucuuc

SEQ ID NO: 3270133 - RNA, 19 nt, Artificial Sequence
  Description of Artificial Sequence: Synthetic oligonucleotide
ugggccuuggucacggccu

SEQ ID NO: 3270134 - RNA, 19 nt, Artificial Sequence
  Description of Artificial Sequence: Synthetic oligonucleotide
cuucuuggagcccuucuuc

SEQ ID NO: 3270135 - RNA, 19 nt, Artificial Sequence
  Description of Artificial Sequence: Synthetic oligonucleotide
ucuucugggccuuggucac

SEQ ID NO: 3270136 - RNA, 19 nt, Artificial Sequence
  Description of Artificial Sequence: Synthetic oligonucleotide
auggucgagcgcuuguugu

SEQ ID NO: 3270137 - RNA, 19 nt, Artificial Sequence
  Description of Artificial Sequence: Synthetic oligonucleotide
cccgcgauggccuuggagg

SEQ ID NO: 3270138 - RNA, 19 nt, Artificial Sequence
  Description of Artificial Sequence: Synthetic oligonucleotide
aggcgagaagccucgcccg

SEQ ID NO: 3270139 - RNA, 19 nt, Artificial Sequence
  Description of Artificial Sequence: Synthetic oligonucleotide
cuuggucacggccuucuug

SEQ ID NO: 3270140 - RNA, 19 nt, Artificial Sequence
  Description of Artificial Sequence: Synthetic oligonucleotide
uucugggccuuggucacgg

SEQ ID NO: 3270141 - RNA, 19 nt, Artificial Sequence
  Description of Artificial Sequence: Synthetic oligonucleotide
uuguuguaaugcgccaggc

SEQ ID NO: 3270142 - RNA, 19 nt, Artificial Sequence
  Description of Artificial Sequence: Synthetic oligonucleotide
guacacguacaccgaguag

SEQ ID NO: 3270143 - RNA, 19 nt, Artificial Sequence
  Description of Artificial Sequence: Synthetic oligonucleotide
aguagcucuccuugcggcu

SEQ ID NO: 3270144 - RNA, 19 nt, Artificial Sequence
  Description of Artificial Sequence: Synthetic oligonucleotide
uacaccgaguagcucuccu

SEQ ID NO: 3270145 - RNA, 19 nt, Artificial Sequence
  Description of Artificial Sequence: Synthetic oligonucleotide
uccgggugaaccugcuuca

SEQ ID NO: 3270146 - RNA, 19 nt, Artificial Sequence
  Description of Artificial Sequence: Synthetic oligonucleotide
cuucuucugggccuugguc

SEQ ID NO: 3270147 - RNA, 19 nt, Artificial Sequence
  Description of Artificial Sequence: Synthetic oligonucleotide
uguaaugcgccaggcgaga

SEQ ID NO: 3270148 - RNA, 19 nt, Artificial Sequence
  Description of Artificial Sequence: Synthetic oligonucleotide
ucgagcgcuuguuguaaug

SEQ ID NO: 3270149 - RNA, 19 nt, Artificial Sequence
  Description of Artificial Sequence: Synthetic oligonucleotide
caccgaguagcucuccuug

SEQ ID NO: 3270150 - RNA, 19 nt, Artificial Sequence
  Description of Artificial Sequence: Synthetic oligonucleotide
ucuucggggcgggaggcgg

SEQ ID NO: 3270151 - RNA, 19 nt, Artificial Sequence
  Description of Artificial Sequence: Synthetic oligonucleotide
cuugcggcugcgcuugcgc

SEQ ID NO: 3270152 - RNA, 19 nt, Artificial Sequence
  Description of Artificial Sequence: Synthetic oligonucleotide
uucuugccguccuucuucu

SEQ ID NO: 3270153 - RNA, 19 nt, Artificial Sequence
  Description of Artificial Sequence: Synthetic oligonucleotide
cugcgcuugcgcuucuugc

SEQ ID NO: 3270154 - RNA, 19 nt, Artificial Sequence
  Description of Artificial Sequence: Synthetic oligonucleotide
guccgggugaaccugcuuc

SEQ ID NO: 3270155 - RNA, 19 nt, Artificial Sequence
  Description of Artificial Sequence: Synthetic oligonucleotide
aaccugcuucagcaccuug

SEQ ID NO: 3270156 - RNA, 19 nt, Artificial Sequence
  Description of Artificial Sequence: Synthetic oligonucleotide
gggacgugauggucgagcg

SEQ ID NO: 3270157 - RNA, 19 nt, Artificial Sequence
  Description of Artificial Sequence: Synthetic oligonucleotide
gggugaaccugcuucagca

SEQ ID NO: 3270158 - RNA, 19 nt, Artificial Sequence
  Description of Artificial Sequence: Synthetic oligonucleotide
ucacggccuucuuggagcc

SEQ ID NO: 3270159 - RNA, 19 nt, Artificial Sequence
  Description of Artificial Sequence: Synthetic oligonucleotide
gacgugauggucgagcgcu

SEQ ID NO: 3270160 - RNA, 19 nt, Artificial Sequence
  Description of Artificial Sequence: Synthetic oligonucleotide
ggagaugccgguguccggg

SEQ ID NO: 3270161 - RNA, 19 nt, Artificial Sequence
  Description of Artificial Sequence: Synthetic oligonucleotide
uggccuuggaggagaugcc

SEQ ID NO: 3270162 - RNA, 19 nt, Artificial Sequence
  Description of Artificial Sequence: Synthetic oligonucleotide
agaagccucgcccgcgaug

SEQ ID NO: 3270163 - RNA, 19 nt, Artificial Sequence
  Description of Artificial Sequence: Synthetic oligonucleotide
gaugccgguguccggguga

SEQ ID NO: 3270164 - RNA, 19 nt, Artificial Sequence
  Description of Artificial Sequence: Synthetic oligonucleotide
caccuuguacacguacacc

SEQ ID NO: 3270165 - RNA, 19 nt, Artificial Sequence
  Description of Artificial Sequence: Synthetic oligonucleotide
uccuucuucugggccuugg

SEQ ID NO: 3270166 - RNA, 19 nt, Artificial Sequence
  Description of Artificial Sequence: Synthetic oligonucleotide
cugggccuuggucacggcc

SEQ ID NO: 3270167 - RNA, 19 nt, Artificial Sequence
  Description of Artificial Sequence: Synthetic oligonucleotide
agcaccuuguacacguaca

SEQ ID NO: 3270168 - RNA, 19 nt, Artificial Sequence
  Description of Artificial Sequence: Synthetic oligonucleotide
uggagcccuucuucggggc

SEQ ID NO: 3270169 - RNA, 19 nt, Artificial Sequence
  Description of Artificial Sequence: Synthetic oligonucleotide
gcuucagcaccuuguacac

SEQ ID NO: 3270170 - RNA, 19 nt, Artificial Sequence
  Description of Artificial Sequence: Synthetic oligonucleotide
aagccucgcccgcgauggc

SEQ ID NO: 3270171 - RNA, 19 nt, Artificial Sequence
  Description of Artificial Sequence: Synthetic oligonucleotide
aggagaugccgguguccgg

SEQ ID NO: 3270172 - RNA, 19 nt, Artificial Sequence
  Description of Artificial Sequence: Synthetic oligonucleotide
cuucagcaccuuguacacg

SEQ ID NO: 3270173 - RNA, 19 nt, Artificial Sequence
  Description of Artificial Sequence: Synthetic oligonucleotide
agccucgcccgcgauggcc

SEQ ID NO: 3270174 - RNA, 19 nt, Artificial Sequence
  Description of Artificial Sequence: Synthetic oligonucleotide
uagcucuccuugcggcugc

SEQ ID NO: 3270175 - RNA, 19 nt, Artificial Sequence
  Description of Artificial Sequence: Synthetic oligonucleotide
uggaggagaugccgguguc

SEQ ID NO: 3270176 - RNA, 19 nt, Artificial Sequence
  Description of Artificial Sequence: Synthetic oligonucleotide
cagcaccuuguacacguac

SEQ ID NO: 3270177 - RNA, 19 nt, Artificial Sequence
  Description of Artificial Sequence: Synthetic oligonucleotide
gagcccuucuucggggcgg

SEQ ID NO: 3270178 - RNA, 19 nt, Artificial Sequence
  Description of Artificial Sequence: Synthetic oligonucleotide
gcuuguuguaaugcgccag

SEQ ID NO: 3270179 - RNA, 19 nt, Artificial Sequence
  Description of Artificial Sequence: Synthetic oligonucleotide
cugcuucagcaccuuguac

SEQ ID NO: 3270180 - RNA, 19 nt, Artificial Sequence
  Description of Artificial Sequence: Synthetic oligonucleotide
uugcgcuucuugccguccu

SEQ ID NO: 3270181 - RNA, 19 nt, Artificial Sequence
  Description of Artificial Sequence: Synthetic oligonucleotide
guagcucuccuugcggcug

SEQ ID NO: 3270182 - RNA, 19 nt, Artificial Sequence
  Description of Artificial Sequence: Synthetic oligonucleotide
uggucgagcgcuuguugua

SEQ ID NO: 3270183 - RNA, 19 nt, Artificial Sequence
  Description of Artificial Sequence: Synthetic oligonucleotide
ggucacggccuucuuggag

SEQ ID NO: 3270184 - RNA, 19 nt, Artificial Sequence
  Description of Artificial Sequence: Synthetic oligonucleotide
cuucuucggggcgggaggc

SEQ ID NO: 3270185 - RNA, 19 nt, Artificial Sequence
  Description of Artificial Sequence: Synthetic oligonucleotide
cuuggaggagaugccggug

SEQ ID NO: 3270186 - RNA, 19 nt, Artificial Sequence
  Description of Artificial Sequence: Synthetic oligonucleotide
gcaccuuguacacguacac

SEQ ID NO: 3270187 - RNA, 19 nt, Artificial Sequence
  Description of Artificial Sequence: Synthetic oligonucleotide
acacguacaccgaguagcu

SEQ ID NO: 3270188 - RNA, 19 nt, Artificial Sequence
  Description of Artificial Sequence: Synthetic oligonucleotide
accugcuucagcaccuugu

SEQ ID NO: 3270189 - RNA, 19 nt, Artificial Sequence
  Description of Artificial Sequence: Synthetic oligonucleotide
ucuccuugcggcugcgcuu

SEQ ID NO: 3270190 - RNA, 19 nt, Artificial Sequence
  Description of Artificial Sequence: Synthetic oligonucleotide
uucuucggggcgggaggcg

SEQ ID NO: 3270191 - RNA, 19 nt, Artificial Sequence
  Description of Artificial Sequence: Synthetic oligonucleotide
ugcgccaggcgagaagccu

SEQ ID NO: 3270192 - RNA, 19 nt, Artificial Sequence
  Description of Artificial Sequence: Synthetic oligonucleotide
ggugaaccugcuucagcac

SEQ ID NO: 3270193 - RNA, 19 nt, Artificial Sequence
  Description of Artificial Sequence: Synthetic oligonucleotide
uugcggcugcgcuugcgcu

SEQ ID NO: 3270194 - RNA, 19 nt, Artificial Sequence
  Description of Artificial Sequence: Synthetic oligonucleotide
ccuucuucggggcgggagg

SEQ ID NO: 3270195 - RNA, 19 nt, Artificial Sequence
  Description of Artificial Sequence: Synthetic oligonucleotide
acaccgaguagcucuccuu

SEQ ID NO: 3270196 - RNA, 19 nt, Artificial Sequence
  Description of Artificial Sequence: Synthetic oligonucleotide
aaaaucaucucuucacugc

SEQ ID NO: 3270197 - RNA, 19 nt, Artificial Sequence
  Description of Artificial Sequence: Synthetic oligonucleotide
gagaaaaugacacaauccg

SEQ ID NO: 3270198 - RNA, 19 nt, Artificial Sequence
  Description of Artificial Sequence: Synthetic oligonucleotide
aagaaaaccaagcagauaa

SEQ ID NO: 3270199 - RNA, 19 nt, Artificial Sequence
  Description of Artificial Sequence: Synthetic oligonucleotide
aaaugacacaauccgacac

SEQ ID NO: 3270200 - RNA, 19 nt, Artificial Sequence
  Description of Artificial Sequence: Synthetic oligonucleotide
uucuagauucaucagaaag

SEQ ID NO: 3270201 - RNA, 19 nt, Artificial Sequence
  Description of Artificial Sequence: Synthetic oligonucleotide
aaagauguuuauugcauag

SEQ ID NO: 3270202 - RNA, 19 nt, Artificial Sequence
  Description of Artificial Sequence: Synthetic oligonucleotide
aaaaccaagcagauaaucg

SEQ ID NO: 3270203 - RNA, 19 nt, Artificial Sequence
  Description of Artificial Sequence: Synthetic oligonucleotide
uucaucagaaagaaaacca

SEQ ID NO: 3270204 - RNA, 19 nt, Artificial Sequence
  Description of Artificial Sequence: Synthetic oligonucleotide
ucuagauucaucagaaaga

SEQ ID NO: 3270205 - RNA, 19 nt, Artificial Sequence
  Description of Artificial Sequence: Synthetic oligonucleotide
aagcgaaagauguuuauug

SEQ ID NO: 3270206 - RNA, 19 nt, Artificial Sequence
  Description of Artificial Sequence: Synthetic oligonucleotide
caggaugucacucaaagcc

SEQ ID NO: 3270207 - RNA, 19 nt, Artificial Sequence
  Description of Artificial Sequence: Synthetic oligonucleotide
ugcuguuggacucagaugu

SEQ ID NO: 3270208 - RNA, 19 nt, Artificial Sequence
  Description of Artificial Sequence: Synthetic oligonucleotide
uuaucaaggagaaaaugac

SEQ ID NO: 3270209 - RNA, 19 nt, Artificial Sequence
  Description of Artificial Sequence: Synthetic oligonucleotide
aucguucucuucuagauuc

SEQ ID NO: 3270210 - RNA, 19 nt, Artificial Sequence
  Description of Artificial Sequence: Synthetic oligonucleotide
ucagaaagaaaaccaagca

SEQ ID NO: 3270211 - RNA, 19 nt, Artificial Sequence
  Description of Artificial Sequence: Synthetic oligonucleotide
uucucuucuagauucauca

SEQ ID NO: 3270212 - RNA, 19 nt, Artificial Sequence
  Description of Artificial Sequence: Synthetic oligonucleotide
auucaucagaaagaaaacc

SEQ ID NO: 3270213 - RNA, 19 nt, Artificial Sequence
  Description of Artificial Sequence: Synthetic oligonucleotide
aaaccaagcagauaaucgu

SEQ ID NO: 3270214 - RNA, 19 nt, Artificial Sequence
  Description of Artificial Sequence: Synthetic oligonucleotide
aucaaggagaaaaugacac

SEQ ID NO: 3270215 - RNA, 19 nt, Artificial Sequence
  Description of Artificial Sequence: Synthetic oligonucleotide
aucagaaagaaaaccaagc

SEQ ID NO: 3270216 - RNA, 19 nt, Artificial Sequence
  Description of Artificial Sequence: Synthetic oligonucleotide
aauuuauucuugcucugug

SEQ ID NO: 3270217 - RNA, 19 nt, Artificial Sequence
  Description of Artificial Sequence: Synthetic oligonucleotide
ucuugcucuguguugaagg

SEQ ID NO: 3270218 - RNA, 19 nt, Artificial Sequence
  Description of Artificial Sequence: Synthetic oligonucleotide
auguuuauugcauagugga

SEQ ID NO: 3270219 - RNA, 19 nt, Artificial Sequence
  Description of Artificial Sequence: Synthetic oligonucleotide
ucuggaaccuucuaugugc

SEQ ID NO: 3270220 - RNA, 19 nt, Artificial Sequence
  Description of Artificial Sequence: Synthetic oligonucleotide
aggagaaaaugacacaauc

SEQ ID NO: 3270221 - RNA, 19 nt, Artificial Sequence
  Description of Artificial Sequence: Synthetic oligonucleotide
agcgaaagauguuuauugc

SEQ ID NO: 3270222 - RNA, 19 nt, Artificial Sequence
  Description of Artificial Sequence: Synthetic oligonucleotide
agcccauacauccuguacc

SEQ ID NO: 3270223 - RNA, 19 nt, Artificial Sequence
  Description of Artificial Sequence: Synthetic oligonucleotide
aaagccagaauuuauucuu

SEQ ID NO: 3270224 - RNA, 19 nt, Artificial Sequence
  Description of Artificial Sequence: Synthetic oligonucleotide
ucuaugugcaggaggaugc

SEQ ID NO: 3270225 - RNA, 19 nt, Artificial Sequence
  Description of Artificial Sequence: Synthetic oligonucleotide
uccaggaugucacucaaag

SEQ ID NO: 3270226 - RNA, 19 nt, Artificial Sequence
  Description of Artificial Sequence: Synthetic oligonucleotide
agauguuuauugcauagug

SEQ ID NO: 3270227 - RNA, 19 nt, Artificial Sequence
  Description of Artificial Sequence: Synthetic oligonucleotide
ucuucuagauucaucagaa

SEQ ID NO: 3270228 - RNA, 19 nt, Artificial Sequence
  Description of Artificial Sequence: Synthetic oligonucleotide
ugcauaguggagcuuauca

SEQ ID NO: 3270229 - RNA, 19 nt, Artificial Sequence
  Description of Artificial Sequence: Synthetic oligonucleotide
cuuaucaaggagaaaauga

SEQ ID NO: 3270230 - RNA, 19 nt, Artificial Sequence
  Description of Artificial Sequence: Synthetic oligonucleotide
agaaagaaaaccaagcaga

SEQ ID NO: 3270231 - RNA, 19 nt, Artificial Sequence
  Description of Artificial Sequence: Synthetic oligonucleotide
agauucaucagaaagaaaa

SEQ ID NO: 3270232 - RNA, 19 nt, Artificial Sequence
  Description of Artificial Sequence: Synthetic oligonucleotide
gaaaaugacacaauccgac

SEQ ID NO: 3270233 - RNA, 19 nt, Artificial Sequence
  Description of Artificial Sequence: Synthetic oligonucleotide
agcagauaaucguuucucc

SEQ ID NO: 3270234 - RNA, 19 nt, Artificial Sequence
  Description of Artificial Sequence: Synthetic oligonucleotide
gauguuuauugcauagugg

SEQ ID NO: 3270235 - RNA, 19 nt, Artificial Sequence
  Description of Artificial Sequence: Synthetic oligonucleotide
aaugacacaauccgacaca

SEQ ID NO: 3270236 - RNA, 19 nt, Artificial Sequence
  Description of Artificial Sequence: Synthetic oligonucleotide
auaggaucuuggcaugucc

SEQ ID NO: 3270237 - RNA, 19 nt, Artificial Sequence
  Description of Artificial Sequence: Synthetic oligonucleotide
aaaaugacacaauccgaca

SEQ ID NO: 3270238 - RNA, 19 nt, Artificial Sequence
  Description of Artificial Sequence: Synthetic oligonucleotide
aaaucaucucuucacugcu

SEQ ID NO: 3270239 - RNA, 19 nt, Artificial Sequence
  Description of Artificial Sequence: Synthetic oligonucleotide
cauaguggagcuuaucaag

SEQ ID NO: 3270240 - RNA, 19 nt, Artificial Sequence
  Description of Artificial Sequence: Synthetic oligonucleotide
cagaaagaaaaccaagcag

SEQ ID NO: 3270241 - RNA, 19 nt, Artificial Sequence
  Description of Artificial Sequence: Synthetic oligonucleotide
uuuauugcauaguggagcu

SEQ ID NO: 3270242 - RNA, 19 nt, Artificial Sequence
  Description of Artificial Sequence: Synthetic oligonucleotide
uguugaagguucuggaacc

SEQ ID NO: 3270243 - RNA, 19 nt, Artificial Sequence
  Description of Artificial Sequence: Synthetic oligonucleotide
uguuuauugcauaguggag

SEQ ID NO: 3270244 - RNA, 19 nt, Artificial Sequence
  Description of Artificial Sequence: Synthetic oligonucleotide
uaucaaggagaaaaugaca

SEQ ID NO: 3270245 - RNA, 19 nt, Artificial Sequence
  Description of Artificial Sequence: Synthetic oligonucleotide
guuuauugcauaguggagc

SEQ ID NO: 3270246 - RNA, 19 nt, Artificial Sequence
  Description of Artificial Sequence: Synthetic oligonucleotide
aagcagauaaucguuucuc

SEQ ID NO: 3270247 - RNA, 19 nt, Artificial Sequence
  Description of Artificial Sequence: Synthetic oligonucleotide
ucaucagaaagaaaaccaa

SEQ ID NO: 3270248 - RNA, 19 nt, Artificial Sequence
  Description of Artificial Sequence: Synthetic oligonucleotide
ucuguguugaagguucugg

SEQ ID NO: 3270249 - RNA, 19 nt, Artificial Sequence
  Description of Artificial Sequence: Synthetic oligonucleotide
agauaaucguuucuccguc

SEQ ID NO: 3270250 - RNA, 19 nt, Artificial Sequence
  Description of Artificial Sequence: Synthetic oligonucleotide
caucagaaagaaaaccaag

SEQ ID NO: 3270251 - RNA, 19 nt, Artificial Sequence
  Description of Artificial Sequence: Synthetic oligonucleotide
uuuauucuugcucuguguu

SEQ ID NO: 3270252 - RNA, 19 nt, Artificial Sequence
  Description of Artificial Sequence: Synthetic oligonucleotide
gauguggaggcccagcggc

SEQ ID NO: 3270253 - RNA, 19 nt, Artificial Sequence
  Description of Artificial Sequence: Synthetic oligonucleotide
uuggacaucugcacggugc

SEQ ID NO: 3270254 - RNA, 19 nt, Artificial Sequence
  Description of Artificial Sequence: Synthetic oligonucleotide
ucaaagccagaauuuauuc

SEQ ID NO: 3270255 - RNA, 19 nt, Artificial Sequence
  Description of Artificial Sequence: Synthetic oligonucleotide
agccagaauuuauucuugc

SEQ ID NO: 3270256 - RNA, 19 nt, Artificial Sequence
  Description of Artificial Sequence: Synthetic oligonucleotide
aucucuucacugcuguugg

SEQ ID NO: 3270257 - RNA, 19 nt, Artificial Sequence
  Description of Artificial Sequence: Synthetic oligonucleotide
uccgucuauaggaucuugg

SEQ ID NO: 3270258 - RNA, 19 nt, Artificial Sequence
  Description of Artificial Sequence: Synthetic oligonucleotide
uuggacucagauguggagg

SEQ ID NO: 3270259 - RNA, 19 nt, Artificial Sequence
  Description of Artificial Sequence: Synthetic oligonucleotide
aggaucuuggcaugucccc

SEQ ID NO: 3270260 - RNA, 19 nt, Artificial Sequence
  Description of Artificial Sequence: Synthetic oligonucleotide
uguaccugucccuuggaca

SEQ ID NO: 3270261 - RNA, 19 nt, Artificial Sequence
  Description of Artificial Sequence: Synthetic oligonucleotide
uucuccgucuauaggaucu

SEQ ID NO: 3270262 - RNA, 19 nt, Artificial Sequence
  Description of Artificial Sequence: Synthetic oligonucleotide
uauucuugcucuguguuga

SEQ ID NO: 3270263 - RNA, 19 nt, Artificial Sequence
  Description of Artificial Sequence: Synthetic oligonucleotide
ucucacugucucaagugag

SEQ ID NO: 3270264 - RNA, 19 nt, Artificial Sequence
  Description of Artificial Sequence: Synthetic oligonucleotide
uuauucuugcucuguguug

SEQ ID NO: 3270265 - RNA, 19 nt, Artificial Sequence
  Description of Artificial Sequence: Synthetic oligonucleotide
gagcuuaucaaggagaaaa

SEQ ID NO: 3270266 - RNA, 19 nt, Artificial Sequence
  Description of Artificial Sequence: Synthetic oligonucleotide
ucaaggagaaaaugacaca

SEQ ID NO: 3270267 - RNA, 19 nt, Artificial Sequence
  Description of Artificial Sequence: Synthetic oligonucleotide
uaggaucuuggcauguccc

SEQ ID NO: 3270268 - RNA, 19 nt, Artificial Sequence
  Description of Artificial Sequence: Synthetic oligonucleotide
auaguggagcuuaucaagg

SEQ ID NO: 3270269 - RNA, 19 nt, Artificial Sequence
  Description of Artificial Sequence: Synthetic oligonucleotide
uucucacugucucaaguga

SEQ ID NO: 3270270 - RNA, 19 nt, Artificial Sequence
  Description of Artificial Sequence: Synthetic oligonucleotide
aguggagcuuaucaaggag

SEQ ID NO: 3270271 - RNA, 19 nt, Artificial Sequence
  Description of Artificial Sequence: Synthetic oligonucleotide
aucugcacggugcuccugc

SEQ ID NO: 3270272 - RNA, 19 nt, Artificial Sequence
  Description of Artificial Sequence: Synthetic oligonucleotide
ucuauaggaucuuggcaug

SEQ ID NO: 3270273 - RNA, 19 nt, Artificial Sequence
  Description of Artificial Sequence: Synthetic oligonucleotide
accuucuaugugcaggagg

SEQ ID NO: 3270274 - RNA, 19 nt, Artificial Sequence
  Description of Artificial Sequence: Synthetic oligonucleotide
ugcucuguguugaagguuc

SEQ ID NO: 3270275 - RNA, 19 nt, Artificial Sequence
  Description of Artificial Sequence: Synthetic oligonucleotide
aauccgacacacgucuuuc

SEQ ID NO: 3270276 - RNA, 19 nt, Artificial Sequence
  Description of Artificial Sequence: Synthetic oligonucleotide
auuuauucuugcucugugu

SEQ ID NO: 3270277 - RNA, 19 nt, Artificial Sequence
  Description of Artificial Sequence: Synthetic oligonucleotide
cacuucugcuucuucacgg

SEQ ID NO: 3270278 - RNA, 19 nt, Artificial Sequence
  Description of Artificial Sequence: Synthetic oligonucleotide
ucacugucucaagugagcg

SEQ ID NO: 3270279 - RNA, 19 nt, Artificial Sequence
  Description of Artificial Sequence: Synthetic oligonucleotide
auacauccuguaccugucc

SEQ ID NO: 3270280 - RNA, 19 nt, Artificial Sequence
  Description of Artificial Sequence: Synthetic oligonucleotide
ugucccuuggacaucugca

SEQ ID NO: 3270281 - RNA, 19 nt, Artificial Sequence
  Description of Artificial Sequence: Synthetic oligonucleotide
gauucaucagaaagaaaac

SEQ ID NO: 3270282 - RNA, 19 nt, Artificial Sequence
  Description of Artificial Sequence: Synthetic oligonucleotide
ucuucacggguucuccagg

SEQ ID NO: 3270283 - RNA, 19 nt, Artificial Sequence
  Description of Artificial Sequence: Synthetic oligonucleotide
agaauuuauucuugcucug

SEQ ID NO: 3270284 - RNA, 19 nt, Artificial Sequence
  Description of Artificial Sequence: Synthetic oligonucleotide
uggacucagauguggaggc

SEQ ID NO: 3270285 - RNA, 19 nt, Artificial Sequence
  Description of Artificial Sequence: Synthetic oligonucleotide
uccuguaccugucccuugg

SEQ ID NO: 3270286 - RNA, 19 nt, Artificial Sequence
  Description of Artificial Sequence: Synthetic oligonucleotide
ugcacggugcuccugcaag

SEQ ID NO: 3270287 - RNA, 19 nt, Artificial Sequence
  Description of Artificial Sequence: Synthetic oligonucleotide
uucuggaaccuucuaugug

SEQ ID NO: 3270288 - RNA, 19 nt, Artificial Sequence
  Description of Artificial Sequence: Synthetic oligonucleotide
ucuucacugccacuucugc

SEQ ID NO: 3270289 - RNA, 19 nt, Artificial Sequence
  Description of Artificial Sequence: Synthetic oligonucleotide
ucccuuggacaucugcacg

SEQ ID NO: 3270290 - RNA, 19 nt, Artificial Sequence
  Description of Artificial Sequence: Synthetic oligonucleotide
gacacaauccgacacacgu

SEQ ID NO: 3270291 - RNA, 19 nt, Artificial Sequence
  Description of Artificial Sequence: Synthetic oligonucleotide
acugcuguuggacucagau

SEQ ID NO: 3270292 - RNA, 19 nt, Artificial Sequence
  Description of Artificial Sequence: Synthetic oligonucleotide
uacauccuguaccuguccc

SEQ ID NO: 3270293 - RNA, 19 nt, Artificial Sequence
  Description of Artificial Sequence: Synthetic oligonucleotide
aucguuucuccgucuauag

SEQ ID NO: 3270294 - RNA, 19 nt, Artificial Sequence
  Description of Artificial Sequence: Synthetic oligonucleotide
ugaagguucuggaaccuuc

SEQ ID NO: 3270295 - RNA, 19 nt, Artificial Sequence
  Description of Artificial Sequence: Synthetic oligonucleotide
ucguuucuccgucuauagg

SEQ ID NO: 3270296 - RNA, 19 nt, Artificial Sequence
  Description of Artificial Sequence: Synthetic oligonucleotide
aaagagcuugcauagcucc

SEQ ID NO: 3270297 - RNA, 19 nt, Artificial Sequence
  Description of Artificial Sequence: Synthetic oligonucleotide
uuagcagaacuccagaugc

SEQ ID NO: 3270298 - RNA, 19 nt, Artificial Sequence
  Description of Artificial Sequence: Synthetic oligonucleotide
uuuguaggaguucagggug

SEQ ID NO: 3270299 - RNA, 19 nt, Artificial Sequence
  Description of Artificial Sequence: Synthetic oligonucleotide
cuuaucacaacacuccugc

SEQ ID NO: 3270300 - RNA, 19 nt, Artificial Sequence
  Description of Artificial Sequence: Synthetic oligonucleotide
uuuguguuccucaaagagc

SEQ ID NO: 3270301 - RNA, 19 nt, Artificial Sequence
  Description of Artificial Sequence: Synthetic oligonucleotide
aagcugauccaccuccucc

SEQ ID NO: 3270302 - RNA, 19 nt, Artificial Sequence
  Description of Artificial Sequence: Synthetic oligonucleotide
gucaucugcaccucgaugg

SEQ ID NO: 3270303 - RNA, 19 nt, Artificial Sequence
  Description of Artificial Sequence: Synthetic oligonucleotide
uuguguuccucaaagagcu

SEQ ID NO: 3270304 - RNA, 19 nt, Artificial Sequence
  Description of Artificial Sequence: Synthetic oligonucleotide
uaucacaacacuccugcag

SEQ ID NO: 3270305 - RNA, 19 nt, Artificial Sequence
  Description of Artificial Sequence: Synthetic oligonucleotide
guuuguguuccucaaagag

SEQ ID NO: 3270306 - RNA, 19 nt, Artificial Sequence
  Description of Artificial Sequence: Synthetic oligonucleotide
agcuccuugauguagagcu

SEQ ID NO: 3270307 - RNA, 19 nt, Artificial Sequence
  Description of Artificial Sequence: Synthetic oligonucleotide
aucacaacacuccugcagg

SEQ ID NO: 3270308 - RNA, 19 nt, Artificial Sequence
  Description of Artificial Sequence: Synthetic oligonucleotide
ucaaagagcuugcauagcu

SEQ ID NO: 3270309 - RNA, 19 nt, Artificial Sequence
  Description of Artificial Sequence: Synthetic oligonucleotide
uugcauagcuccuugaugu

SEQ ID NO: 3270310 - RNA, 19 nt, Artificial Sequence
  Description of Artificial Sequence: Synthetic oligonucleotide
gaguuuguguuccucaaag

SEQ ID NO: 3270311 - RNA, 19 nt, Artificial Sequence
  Description of Artificial Sequence: Synthetic oligonucleotide
uggaaguccccucuuauca

SEQ ID NO: 3270312 - RNA, 19 nt, Artificial Sequence
  Description of Artificial Sequence: Synthetic oligonucleotide
uugaacuugaguuuguguu

SEQ ID NO: 3270313 - RNA, 19 nt, Artificial Sequence
  Description of Artificial Sequence: Synthetic oligonucleotide
uguggugucaucugcaccu

SEQ ID NO: 3270314 - RNA, 19 nt, Artificial Sequence
  Description of Artificial Sequence: Synthetic oligonucleotide
gagcuggugaagcugaucc

SEQ ID NO: 3270315 - RNA, 19 nt, Artificial Sequence
  Description of Artificial Sequence: Synthetic oligonucleotide
ucggcagggacauugaacu

SEQ ID NO: 3270316 - RNA, 19 nt, Artificial Sequence
  Description of Artificial Sequence: Synthetic oligonucleotide
acuacgguggugauggggc

SEQ ID NO: 3270317 - RNA, 19 nt, Artificial Sequence
  Description of Artificial Sequence: Synthetic oligonucleotide
gaacuccagaugcuggucg

SEQ ID NO: 3270318 - RNA, 19 nt, Artificial Sequence
  Description of Artificial Sequence: Synthetic oligonucleotide
gacauugaacuugaguuug

SEQ ID NO: 3270319 - RNA, 19 nt, Artificial Sequence
  Description of Artificial Sequence: Synthetic oligonucleotide
ucuuaucacaacacuccug

SEQ ID NO: 3270320 - RNA, 19 nt, Artificial Sequence
  Description of Artificial Sequence: Synthetic oligonucleotide
aacuccagaugcuggucgg

SEQ ID NO: 3270321 - RNA, 19 nt, Artificial Sequence
  Description of Artificial Sequence: Synthetic oligonucleotide
uccucaaagagcuugcaua

SEQ ID NO: 3270322 - RNA, 19 nt, Artificial Sequence
  Description of Artificial Sequence: Synthetic oligonucleotide
uuguaggaguucagggugg

SEQ ID NO: 3270323 - RNA, 19 nt, Artificial Sequence
  Description of Artificial Sequence: Synthetic oligonucleotide
acaacacuccugcaggcuc

SEQ ID NO: 3270324 - RNA, 19 nt, Artificial Sequence
  Description of Artificial Sequence: Synthetic oligonucleotide
cuuagcagaacuccagaug

SEQ ID NO: 3270325 - RNA, 19 nt, Artificial Sequence
  Description of Artificial Sequence: Synthetic oligonucleotide
ugaacuugaguuuguguuc

SEQ ID NO: 3270326 - RNA, 19 nt, Artificial Sequence
  Description of Artificial Sequence: Synthetic oligonucleotide
gauguagagcuggugaagc

SEQ ID NO: 3270327 - RNA, 19 nt, Artificial Sequence
  Description of Artificial Sequence: Synthetic oligonucleotide
cuugauguagagcugguga

SEQ ID NO: 3270328 - RNA, 19 nt, Artificial Sequence
  Description of Artificial Sequence: Synthetic oligonucleotide
uucaggguggcuguggaag

SEQ ID NO: 3270329 - RNA, 19 nt, Artificial Sequence
  Description of Artificial Sequence: Synthetic oligonucleotide
uguuccucaaagagcuugc

SEQ ID NO: 3270330 - RNA, 19 nt, Artificial Sequence
  Description of Artificial Sequence: Synthetic oligonucleotide
auugaacuugaguuugugu

SEQ ID NO: 3270331 - RNA, 19 nt, Artificial Sequence
  Description of Artificial Sequence: Synthetic oligonucleotide
ucaucugcaccucgauggg

SEQ ID NO: 3270332 - RNA, 19 nt, Artificial Sequence
  Description of Artificial Sequence: Synthetic oligonucleotide
gaacuugaguuuguguucc

SEQ ID NO: 3270333 - RNA, 19 nt, Artificial Sequence
  Description of Artificial Sequence: Synthetic oligonucleotide
gugaagcugauccaccucc

SEQ ID NO: 3270334 - RNA, 19 nt, Artificial Sequence
  Description of Artificial Sequence: Synthetic oligonucleotide
accucgauggggcuucccc

SEQ ID NO: 3270335 - RNA, 19 nt, Artificial Sequence
  Description of Artificial Sequence: Synthetic oligonucleotide
uggggcuuccccacuacgg

SEQ ID NO: 3270336 - RNA, 19 nt, Artificial Sequence
  Description of Artificial Sequence: Synthetic oligonucleotide
uugauguagagcuggugaa

SEQ ID NO: 3270337 - RNA, 19 nt, Artificial Sequence
  Description of Artificial Sequence: Synthetic oligonucleotide
uguagagcuggugaagcug

SEQ ID NO: 3270338 - RNA, 19 nt, Artificial Sequence
  Description of Artificial Sequence: Synthetic oligonucleotide
cuugcauagcuccuugaug

SEQ ID NO: 3270339 - RNA, 19 nt, Artificial Sequence
  Description of Artificial Sequence: Synthetic oligonucleotide
guggugauggggcugucgg

SEQ ID NO: 3270340 - RNA, 19 nt, Artificial Sequence
  Description of Artificial Sequence: Synthetic oligonucleotide
uccaccuccuccucugagg

SEQ ID NO: 3270341 - RNA, 19 nt, Artificial Sequence
  Description of Artificial Sequence: Synthetic oligonucleotide
ugucaucugcaccucgaug

SEQ ID NO: 3270342 - RNA, 19 nt, Artificial Sequence
  Description of Artificial Sequence: Synthetic oligonucleotide
agggacauugaacuugagu

SEQ ID NO: 3270343 - RNA, 19 nt, Artificial Sequence
  Description of Artificial Sequence: Synthetic oligonucleotide
uaggaguucaggguggcug

SEQ ID NO: 3270344 - RNA, 19 nt, Artificial Sequence
  Description of Artificial Sequence: Synthetic oligonucleotide
ccucuuaucacaacacucc

SEQ ID NO: 3270345 - RNA, 19 nt, Artificial Sequence
  Description of Artificial Sequence: Synthetic oligonucleotide
ugauguagagcuggugaag

SEQ ID NO: 3270346 - RNA, 19 nt, Artificial Sequence
  Description of Artificial Sequence: Synthetic oligonucleotide
aucugcaccucgauggggc

SEQ ID NO: 3270347 - RNA, 19 nt, Artificial Sequence
  Description of Artificial Sequence: Synthetic oligonucleotide
aggcgcuuagcagaacucc

SEQ ID NO: 3270348 - RNA, 19 nt, Artificial Sequence
  Description of Artificial Sequence: Synthetic oligonucleotide
aguuuguguuccucaaaga

SEQ ID NO: 3270349 - RNA, 19 nt, Artificial Sequence
  Description of Artificial Sequence: Synthetic oligonucleotide
cuugaguuuguguuccuca

SEQ ID NO: 3270350 - RNA, 19 nt, Artificial Sequence
  Description of Artificial Sequence: Synthetic oligonucleotide
uguggaaguccccucuuau

SEQ ID NO: 3270351 - RNA, 19 nt, Artificial Sequence
  Description of Artificial Sequence: Synthetic oligonucleotide
ugauccaccuccuccucug

SEQ ID NO: 3270352 - RNA, 19 nt, Artificial Sequence
  Description of Artificial Sequence: Synthetic oligonucleotide
ucucagacgcagcuguccu

SEQ ID NO: 3270353 - RNA, 19 nt, Artificial Sequence
  Description of Artificial Sequence: Synthetic oligonucleotide
cuccuugauguagagcugg

SEQ ID NO: 3270354 - RNA, 19 nt, Artificial Sequence
  Description of Artificial Sequence: Synthetic oligonucleotide
auagcuccuugauguagag

SEQ ID NO: 3270355 - RNA, 19 nt, Artificial Sequence
  Description of Artificial Sequence: Synthetic oligonucleotide
uugaguuuguguuccucaa

SEQ ID NO: 3270356 - RNA, 19 nt, Artificial Sequence
  Description of Artificial Sequence: Synthetic oligonucleotide
gaugcuggucggcagggac

SEQ ID NO: 3270357 - RNA, 19 nt, Artificial Sequence
  Description of Artificial Sequence: Synthetic oligonucleotide
cuguccucuggcuggaggc

SEQ ID NO: 3270358 - RNA, 19 nt, Artificial Sequence
  Description of Artificial Sequence: Synthetic oligonucleotide
ugaguuuguguuccucaaa

SEQ ID NO: 3270359 - RNA, 19 nt, Artificial Sequence
  Description of Artificial Sequence: Synthetic oligonucleotide
uccccucuuaucacaacac

SEQ ID NO: 3270360 - RNA, 19 nt, Artificial Sequence
  Description of Artificial Sequence: Synthetic oligonucleotide
ucacaacacuccugcaggc

SEQ ID NO: 3270361 - RNA, 19 nt, Artificial Sequence
  Description of Artificial Sequence: Synthetic oligonucleotide
uccugcaggcucucagacg

SEQ ID NO: 3270362 - RNA, 19 nt, Artificial Sequence
  Description of Artificial Sequence: Synthetic oligonucleotide
caaagagcuugcauagcuc

SEQ ID NO: 3270363 - RNA, 19 nt, Artificial Sequence
  Description of Artificial Sequence: Synthetic oligonucleotide
agcugauccaccuccuccu

SEQ ID NO: 3270364 - RNA, 19 nt, Artificial Sequence
  Description of Artificial Sequence: Synthetic oligonucleotide
gacgcagcuguccucuggc

SEQ ID NO: 3270365 - RNA, 19 nt, Artificial Sequence
  Description of Artificial Sequence: Synthetic oligonucleotide
uggugaagcugauccaccu

SEQ ID NO: 3270366 - RNA, 19 nt, Artificial Sequence
  Description of Artificial Sequence: Synthetic oligonucleotide
gaaguccccucuuaucaca

SEQ ID NO: 3270367 - RNA, 19 nt, Artificial Sequence
  Description of Artificial Sequence: Synthetic oligonucleotide
uggugucaucugcaccucg

SEQ ID NO: 3270368 - RNA, 19 nt, Artificial Sequence
  Description of Artificial Sequence: Synthetic oligonucleotide
ccucaaagagcuugcauag

SEQ ID NO: 3270369 - RNA, 19 nt, Artificial Sequence
  Description of Artificial Sequence: Synthetic oligonucleotide
uuaucacaacacuccugca

SEQ ID NO: 3270370 - RNA, 19 nt, Artificial Sequence
  Description of Artificial Sequence: Synthetic oligonucleotide
uuccccacuacggugguga

SEQ ID NO: 3270371 - RNA, 19 nt, Artificial Sequence
  Description of Artificial Sequence: Synthetic oligonucleotide
gggacauugaacuugaguu

SEQ ID NO: 3270372 - RNA, 19 nt, Artificial Sequence
  Description of Artificial Sequence: Synthetic oligonucleotide
ucuggcuggaggcgcuuag

SEQ ID NO: 3270373 - RNA, 19 nt, Artificial Sequence
  Description of Artificial Sequence: Synthetic oligonucleotide
guuuguaggaguucagggu

SEQ ID NO: 3270374 - RNA, 19 nt, Artificial Sequence
  Description of Artificial Sequence: Synthetic oligonucleotide
uccagaugcuggucggcag

SEQ ID NO: 3270375 - RNA, 19 nt, Artificial Sequence
  Description of Artificial Sequence: Synthetic oligonucleotide
ugaagcugauccaccuccu

SEQ ID NO: 3270376 - RNA, 19 nt, Artificial Sequence
  Description of Artificial Sequence: Synthetic oligonucleotide
ucagacgcagcuguccucu

SEQ ID NO: 3270377 - RNA, 19 nt, Artificial Sequence
  Description of Artificial Sequence: Synthetic oligonucleotide
cuggugaagcugauccacc

SEQ ID NO: 3270378 - RNA, 19 nt, Artificial Sequence
  Description of Artificial Sequence: Synthetic oligonucleotide
uuccucaaagagcuugcau

SEQ ID NO: 3270379 - RNA, 19 nt, Artificial Sequence
  Description of Artificial Sequence: Synthetic oligonucleotide
guguuccucaaagagcuug

SEQ ID NO: 3270380 - RNA, 19 nt, Artificial Sequence
  Description of Artificial Sequence: Synthetic oligonucleotide
cccacuacgguggugaugg

SEQ ID NO: 3270381 - RNA, 19 nt, Artificial Sequence
  Description of Artificial Sequence: Synthetic oligonucleotide
ccugcaggcucucagacgc

SEQ ID NO: 3270382 - RNA, 19 nt, Artificial Sequence
  Description of Artificial Sequence: Synthetic oligonucleotide
acuugaguuuguguuccuc

SEQ ID NO: 3270383 - RNA, 19 nt, Artificial Sequence
  Description of Artificial Sequence: Synthetic oligonucleotide
uggcuggaggcgcuuagca

SEQ ID NO: 3270384 - RNA, 19 nt, Artificial Sequence
  Description of Artificial Sequence: Synthetic oligonucleotide
agaacuccagaugcugguc

SEQ ID NO: 3270385 - RNA, 19 nt, Artificial Sequence
  Description of Artificial Sequence: Synthetic oligonucleotide
agcagaacuccagaugcug

SEQ ID NO: 3270386 - RNA, 19 nt, Artificial Sequence
  Description of Artificial Sequence: Synthetic oligonucleotide
aggguggcuguggaagucc

SEQ ID NO: 3270387 - RNA, 19 nt, Artificial Sequence
  Description of Artificial Sequence: Synthetic oligonucleotide
uccucugagggcuguggug

SEQ ID NO: 3270388 - RNA, 19 nt, Artificial Sequence
  Description of Artificial Sequence: Synthetic oligonucleotide
cauagcuccuugauguaga

SEQ ID NO: 3270389 - RNA, 19 nt, Artificial Sequence
  Description of Artificial Sequence: Synthetic oligonucleotide
gcagcuguccucuggcugg

SEQ ID NO: 3270390 - RNA, 19 nt, Artificial Sequence
  Description of Artificial Sequence: Synthetic oligonucleotide
agacgcagcuguccucugg

SEQ ID NO: 3270391 - RNA, 19 nt, Artificial Sequence
  Description of Artificial Sequence: Synthetic oligonucleotide
auguagagcuggugaagcu

SEQ ID NO: 3270392 - RNA, 19 nt, Artificial Sequence
  Description of Artificial Sequence: Synthetic oligonucleotide
aggaguucaggguggcugu

SEQ ID NO: 3270393 - RNA, 19 nt, Artificial Sequence
  Description of Artificial Sequence: Synthetic oligonucleotide
aacuugaguuuguguuccu

SEQ ID NO: 3270394 - RNA, 19 nt, Artificial Sequence
  Description of Artificial Sequence: Synthetic oligonucleotide
uguccucuggcuggaggcg

SEQ ID NO: 3270395 - RNA, 19 nt, Artificial Sequence
  Description of Artificial Sequence: Synthetic oligonucleotide
aguucaggguggcugugga

SEQ ID NO: 3270396 - RNA, 19 nt, Artificial Sequence
  Description of Artificial Sequence: Synthetic oligonucleotide
uugauguuuauuaagauag

SEQ ID NO: 3270397 - RNA, 19 nt, Artificial Sequence
  Description of Artificial Sequence: Synthetic oligonucleotide
aaaaguaauaggcuuugcc

SEQ ID NO: 3270398 - RNA, 19 nt, Artificial Sequence
  Description of Artificial Sequence: Synthetic oligonucleotide
aggaagaacaguuaaaggc

SEQ ID NO: 3270399 - RNA, 19 nt, Artificial Sequence
  Description of Artificial Sequence: Synthetic oligonucleotide
aauucucugauguuuagac

SEQ ID NO: 3270400 - RNA, 19 nt, Artificial Sequence
  Description of Artificial Sequence: Synthetic oligonucleotide
uguuuauuaagauaggaag

SEQ ID NO: 3270401 - RNA, 19 nt, Artificial Sequence
  Description of Artificial Sequence: Synthetic oligonucleotide
auucuuuacauuuauagag

SEQ ID NO: 3270402 - RNA, 19 nt, Artificial Sequence
  Description of Artificial Sequence: Synthetic oligonucleotide
aauaugaauucucugaugu

SEQ ID NO: 3270403 - RNA, 19 nt, Artificial Sequence
  Description of Artificial Sequence: Synthetic oligonucleotide
aacaguuaaaggcuuugcc

SEQ ID NO: 3270404 - RNA, 19 nt, Artificial Sequence
  Description of Artificial Sequence: Synthetic oligonucleotide
aaguaauaggcuuugccac

SEQ ID NO: 3270405 - RNA, 19 nt, Artificial Sequence
  Description of Artificial Sequence: Synthetic oligonucleotide
uaugaaguacaguugaagg

SEQ ID NO: 3270406 - RNA, 19 nt, Artificial Sequence
  Description of Artificial Sequence: Synthetic oligonucleotide
uauuaagauaggaagaaca

SEQ ID NO: 3270407 - RNA, 19 nt, Artificial Sequence
  Description of Artificial Sequence: Synthetic oligonucleotide
uguuuagacagauaggaag

SEQ ID NO: 3270408 - RNA, 19 nt, Artificial Sequence
  Description of Artificial Sequence: Synthetic oligonucleotide
aaaguaauaggcuuugcca

SEQ ID NO: 3270409 - RNA, 19 nt, Artificial Sequence
  Description of Artificial Sequence: Synthetic oligonucleotide
acauucuuuacauuuauag

SEQ ID NO: 3270410 - RNA, 19 nt, Artificial Sequence
  Description of Artificial Sequence: Synthetic oligonucleotide
aacaguugaaggcuuugcc

SEQ ID NO: 3270411 - RNA, 19 nt, Artificial Sequence
  Description of Artificial Sequence: Synthetic oligonucleotide
ugugaagaaaaguaauagg

SEQ ID NO: 3270412 - RNA, 19 nt, Artificial Sequence
  Description of Artificial Sequence: Synthetic oligonucleotide
aggaagaacaguugaaggc

SEQ ID NO: 3270413 - RNA, 19 nt, Artificial Sequence
  Description of Artificial Sequence: Synthetic oligonucleotide
auuuauagagucugucucc

SEQ ID NO: 3270414 - RNA, 19 nt, Artificial Sequence
  Description of Artificial Sequence: Synthetic oligonucleotide
augaaguacaguugaaggc

SEQ ID NO: 3270415 - RNA, 19 nt, Artificial Sequence
  Description of Artificial Sequence: Synthetic oligonucleotide
uucucugauguuuagacag

SEQ ID NO: 3270416 - RNA, 19 nt, Artificial Sequence
  Description of Artificial Sequence: Synthetic oligonucleotide
auucuuuacauauguaggg

SEQ ID NO: 3270417 - RNA, 19 nt, Artificial Sequence
  Description of Artificial Sequence: Synthetic oligonucleotide
acauucuuuacauauguag

SEQ ID NO: 3270418 - RNA, 19 nt, Artificial Sequence
  Description of Artificial Sequence: Synthetic oligonucleotide
uccaguaugaauccucugg

SEQ ID NO: 3270419 - RNA, 19 nt, Artificial Sequence
  Description of Artificial Sequence: Synthetic oligonucleotide
uuuacauuuauagagucug

SEQ ID NO: 3270420 - RNA, 19 nt, Artificial Sequence
  Description of Artificial Sequence: Synthetic oligonucleotide
cugauguuuagacagauag

SEQ ID NO: 3270421 - RNA, 19 nt, Artificial Sequence
  Description of Artificial Sequence: Synthetic oligonucleotide
acauacguaagguuucucc

SEQ ID NO: 3270422 - RNA, 19 nt, Artificial Sequence
  Description of Artificial Sequence: Synthetic oligonucleotide
cauucuuuacauauguagg

SEQ ID NO: 3270423 - RNA, 19 nt, Artificial Sequence
  Description of Artificial Sequence: Synthetic oligonucleotide
aauaggcuuugccacauuc

SEQ ID NO: 3270424 - RNA, 19 nt, Artificial Sequence
  Description of Artificial Sequence: Synthetic oligonucleotide
uaagguaugaaguacaguu

SEQ ID NO: 3270425 - RNA, 19 nt, Artificial Sequence
  Description of Artificial Sequence: Synthetic oligonucleotide
auauguaggguuucucucc

SEQ ID NO: 3270426 - RNA, 19 nt, Artificial Sequence
  Description of Artificial Sequence: Synthetic oligonucleotide
uagacagauaggaagaaca

SEQ ID NO: 3270427 - RNA, 19 nt, Artificial Sequence
  Description of Artificial Sequence: Synthetic oligonucleotide
uaagauaggaagaacaguu

SEQ ID NO: 3270428 - RNA, 19 nt, Artificial Sequence
  Description of Artificial Sequence: Synthetic oligonucleotide
uccaauaugaauucucuga

SEQ ID NO: 3270429 - RNA, 19 nt, Artificial Sequence
  Description of Artificial Sequence: Synthetic oligonucleotide
ugaagaaaaguaauaggcu

SEQ ID NO: 3270430 - RNA, 19 nt, Artificial Sequence
  Description of Artificial Sequence: Synthetic oligonucleotide
uaagcugugaagaaaagua

SEQ ID NO: 3270431 - RNA, 19 nt, Artificial Sequence
  Description of Artificial Sequence: Synthetic oligonucleotide
uuucucuccaguaugaauc

SEQ ID NO: 3270432 - RNA, 19 nt, Artificial Sequence
  Description of Artificial Sequence: Synthetic oligonucleotide
gugaagaaaaguaauaggc

SEQ ID NO: 3270433 - RNA, 19 nt, Artificial Sequence
  Description of Artificial Sequence: Synthetic oligonucleotide
uaggaagaacaguugaagg

SEQ ID NO: 3270434 - RNA, 19 nt, Artificial Sequence
  Description of Artificial Sequence: Synthetic oligonucleotide
ucugucuccaauaugaauu

SEQ ID NO: 3270435 - RNA, 19 nt, Artificial Sequence
  Description of Artificial Sequence: Synthetic oligonucleotide
gauguuuagacagauagga

SEQ ID NO: 3270436 - RNA, 19 nt, Artificial Sequence
  Description of Artificial Sequence: Synthetic oligonucleotide
acucuuuacauacguaagg

SEQ ID NO: 3270437 - RNA, 19 nt, Artificial Sequence
  Description of Artificial Sequence: Synthetic oligonucleotide
ugauguuuagacagauagg

SEQ ID NO: 3270438 - RNA, 19 nt, Artificial Sequence
  Description of Artificial Sequence: Synthetic oligonucleotide
uuuauuaagauaggaagaa

SEQ ID NO: 3270439 - RNA, 19 nt, Artificial Sequence
  Description of Artificial Sequence: Synthetic oligonucleotide
uucgcugaugcuuaguaag

SEQ ID NO: 3270440 - RNA, 19 nt, Artificial Sequence
  Description of Artificial Sequence: Synthetic oligonucleotide
ugcuuaguaagguaugaag

SEQ ID NO: 3270441 - RNA, 19 nt, Artificial Sequence
  Description of Artificial Sequence: Synthetic oligonucleotide
auaggaagaacaguuaaag

SEQ ID NO: 3270442 - RNA, 19 nt, Artificial Sequence
  Description of Artificial Sequence: Synthetic oligonucleotide
auacguaagguuucucccc

SEQ ID NO: 3270443 - RNA, 19 nt, Artificial Sequence
  Description of Artificial Sequence: Synthetic oligonucleotide
ucuggugucgguuaagcug

SEQ ID NO: 3270444 - RNA, 19 nt, Artificial Sequence
  Description of Artificial Sequence: Synthetic oligonucleotide
uaggaagaacaguuaaagg

SEQ ID NO: 3270445 - RNA, 19 nt, Artificial Sequence
  Description of Artificial Sequence: Synthetic oligonucleotide
uucuuuacauuuauagagu

SEQ ID NO: 3270446 - RNA, 19 nt, Artificial Sequence
  Description of Artificial Sequence: Synthetic oligonucleotide
uuuacauacguaagguuuc

SEQ ID NO: 3270447 - RNA, 19 nt, Artificial Sequence
  Description of Artificial Sequence: Synthetic oligonucleotide
aguaugaauccucuggugu

SEQ ID NO: 3270448 - RNA, 19 nt, Artificial Sequence
  Description of Artificial Sequence: Synthetic oligonucleotide
ugauguuuauuaagauagg

SEQ ID NO: 3270449 - RNA, 19 nt, Artificial Sequence
  Description of Artificial Sequence: Synthetic oligonucleotide
acaguuaaaggcuuugcca

SEQ ID NO: 3270450 - RNA, 19 nt, Artificial Sequence
  Description of Artificial Sequence: Synthetic oligonucleotide
ugaaguacaguugaaggcu

SEQ ID NO: 3270451 - RNA, 19 nt, Artificial Sequence
  Description of Artificial Sequence: Synthetic oligonucleotide
auuaagauaggaagaacag

SEQ ID NO: 3270452 - RNA, 19 nt, Artificial Sequence
  Description of Artificial Sequence: Synthetic oligonucleotide
cauacguaagguuucuccc

SEQ ID NO: 3270453 - RNA, 19 nt, Artificial Sequence
  Description of Artificial Sequence: Synthetic oligonucleotide
uacguaagguuucuccccg

SEQ ID NO: 3270454 - RNA, 19 nt, Artificial Sequence
  Description of Artificial Sequence: Synthetic oligonucleotide
uuugccacauucuuuacau

SEQ ID NO: 3270455 - RNA, 19 nt, Artificial Sequence
  Description of Artificial Sequence: Synthetic oligonucleotide
cauuuauagagucugucuc

SEQ ID NO: 3270456 - RNA, 19 nt, Artificial Sequence
  Description of Artificial Sequence: Synthetic oligonucleotide
acauuuauagagucugucu

SEQ ID NO: 3270457 - RNA, 19 nt, Artificial Sequence
  Description of Artificial Sequence: Synthetic oligonucleotide
ucuccaauaugaauucucu

SEQ ID NO: 3270458 - RNA, 19 nt, Artificial Sequence
  Description of Artificial Sequence: Synthetic oligonucleotide
uacaguugaaggcuuugcc

SEQ ID NO: 3270459 - RNA, 19 nt, Artificial Sequence
  Description of Artificial Sequence: Synthetic oligonucleotide
uaguaagguaugaaguaca

SEQ ID NO: 3270460 - RNA, 19 nt, Artificial Sequence
  Description of Artificial Sequence: Synthetic oligonucleotide
agauaggaagaacaguuga

SEQ ID NO: 3270461 - RNA, 19 nt, Artificial Sequence
  Description of Artificial Sequence: Synthetic oligonucleotide
uuugccacacucuuuacau

SEQ ID NO: 3270462 - RNA, 19 nt, Artificial Sequence
  Description of Artificial Sequence: Synthetic oligonucleotide
ucuuuacauuuauagaguc

SEQ ID NO: 3270463 - RNA, 19 nt, Artificial Sequence
  Description of Artificial Sequence: Synthetic oligonucleotide
auaggaagaacaguugaag

SEQ ID NO: 3270464 - RNA, 19 nt, Artificial Sequence
  Description of Artificial Sequence: Synthetic oligonucleotide
caguuaaaggcuuugccac

SEQ ID NO: 3270465 - RNA, 19 nt, Artificial Sequence
  Description of Artificial Sequence: Synthetic oligonucleotide
cugugaagaaaaguaauag

SEQ ID NO: 3270466 - RNA, 19 nt, Artificial Sequence
  Description of Artificial Sequence: Synthetic oligonucleotide
uuaguaagguaugaaguac

SEQ ID NO: 3270467 - RNA, 19 nt, Artificial Sequence
  Description of Artificial Sequence: Synthetic oligonucleotide
agguaugaaguacaguuga

SEQ ID NO: 3270468 - RNA, 19 nt, Artificial Sequence
  Description of Artificial Sequence: Synthetic oligonucleotide
gguaugaauucgcugaugc

SEQ ID NO: 3270469 - RNA, 19 nt, Artificial Sequence
  Description of Artificial Sequence: Synthetic oligonucleotide
aauucgcugaugcuuagua

SEQ ID NO: 3270470 - RNA, 19 nt, Artificial Sequence
  Description of Artificial Sequence: Synthetic oligonucleotide
acauauguaggguuucucu

SEQ ID NO: 3270471 - RNA, 19 nt, Artificial Sequence
  Description of Artificial Sequence: Synthetic oligonucleotide
uaugaauccucuggugucg

SEQ ID NO: 3270472 - RNA, 19 nt, Artificial Sequence
  Description of Artificial Sequence: Synthetic oligonucleotide
gauguuuauuaagauagga

SEQ ID NO: 3270473 - RNA, 19 nt, Artificial Sequence
  Description of Artificial Sequence: Synthetic oligonucleotide
acacucuuuacauacguaa

SEQ ID NO: 3270474 - RNA, 19 nt, Artificial Sequence
  Description of Artificial Sequence: Synthetic oligonucleotide
uuaagauaggaagaacagu

SEQ ID NO: 3270475 - RNA, 19 nt, Artificial Sequence
  Description of Artificial Sequence: Synthetic oligonucleotide
guuuauuaagauaggaaga

SEQ ID NO: 3270476 - RNA, 19 nt, Artificial Sequence
  Description of Artificial Sequence: Synthetic oligonucleotide
uaagguuucuccccgguau

SEQ ID NO: 3270477 - RNA, 19 nt, Artificial Sequence
  Description of Artificial Sequence: Synthetic oligonucleotide
uaugaauucucugauguuu

SEQ ID NO: 3270478 - RNA, 19 nt, Artificial Sequence
  Description of Artificial Sequence: Synthetic oligonucleotide
agauaggaagaacaguuaa

SEQ ID NO: 3270479 - RNA, 19 nt, Artificial Sequence
  Description of Artificial Sequence: Synthetic oligonucleotide
uaugaauucgcugaugcuu

SEQ ID NO: 3270480 - RNA, 19 nt, Artificial Sequence
  Description of Artificial Sequence: Synthetic oligonucleotide
ugaugcuuaguaagguaug

SEQ ID NO: 3270481 - RNA, 19 nt, Artificial Sequence
  Description of Artificial Sequence: Synthetic oligonucleotide
ucgcugaugcuuaguaagg

SEQ ID NO: 3270482 - RNA, 19 nt, Artificial Sequence
  Description of Artificial Sequence: Synthetic oligonucleotide
ugccacauucuuuacauau

SEQ ID NO: 3270483 - RNA, 19 nt, Artificial Sequence
  Description of Artificial Sequence: Synthetic oligonucleotide
ugccacacucuuuacauac

SEQ ID NO: 3270484 - RNA, 19 nt, Artificial Sequence
  Description of Artificial Sequence: Synthetic oligonucleotide
uauagagucugucuccaau

SEQ ID NO: 3270485 - RNA, 19 nt, Artificial Sequence
  Description of Artificial Sequence: Synthetic oligonucleotide
acaguugaaggcuuugcca

SEQ ID NO: 3270486 - RNA, 19 nt, Artificial Sequence
  Description of Artificial Sequence: Synthetic oligonucleotide
gagucugucuccaauauga

SEQ ID NO: 3270487 - RNA, 19 nt, Artificial Sequence
  Description of Artificial Sequence: Synthetic oligonucleotide
uuaagcugugaagaaaagu

SEQ ID NO: 3270488 - RNA, 19 nt, Artificial Sequence
  Description of Artificial Sequence: Synthetic oligonucleotide
uuuauagagucugucucca

SEQ ID NO: 3270489 - RNA, 19 nt, Artificial Sequence
  Description of Artificial Sequence: Synthetic oligonucleotide
ugucgguuaagcugugaag

SEQ ID NO: 3270490 - RNA, 19 nt, Artificial Sequence
  Description of Artificial Sequence: Synthetic oligonucleotide
guaugaaguacaguugaag

SEQ ID NO: 3270491 - RNA, 19 nt, Artificial Sequence
  Description of Artificial Sequence: Synthetic oligonucleotide
ugaauucucugauguuuag

SEQ ID NO: 3270492 - RNA, 19 nt, Artificial Sequence
  Description of Artificial Sequence: Synthetic oligonucleotide
uauguaggguuucucucca

SEQ ID NO: 3270493 - RNA, 19 nt, Artificial Sequence
  Description of Artificial Sequence: Synthetic oligonucleotide
cauauguaggguuucucuc

SEQ ID NO: 3270494 - RNA, 19 nt, Artificial Sequence
  Description of Artificial Sequence: Synthetic oligonucleotide
cauucuuuacauuuauaga

SEQ ID NO: 3270495 - RNA, 19 nt, Artificial Sequence
  Description of Artificial Sequence: Synthetic oligonucleotide
caguugaaggcuuugccac

SEQ ID NO: 3270496 - RNA, 19 nt, Artificial Sequence
  Description of Artificial Sequence: Synthetic oligonucleotide
auaauuauacaguuccucc

SEQ ID NO: 3270497 - RNA, 19 nt, Artificial Sequence
  Description of Artificial Sequence: Synthetic oligonucleotide
ucuucaacaacguauaugc

SEQ ID NO: 3270498 - RNA, 19 nt, Artificial Sequence
  Description of Artificial Sequence: Synthetic oligonucleotide
auauucaccagcgugaucc

SEQ ID NO: 3270499 - RNA, 19 nt, Artificial Sequence
  Description of Artificial Sequence: Synthetic oligonucleotide
ucaacaacguauaugcugg

SEQ ID NO: 3270500 - RNA, 19 nt, Artificial Sequence
  Description of Artificial Sequence: Synthetic oligonucleotide
uuaauguugucuaagguca

SEQ ID NO: 3270501 - RNA, 19 nt, Artificial Sequence
  Description of Artificial Sequence: Synthetic oligonucleotide
aauuauacaguuccuccuc

SEQ ID NO: 3270502 - RNA, 19 nt, Artificial Sequence
  Description of Artificial Sequence: Synthetic oligonucleotide
agaauuguaggucgaaccc

SEQ ID NO: 3270503 - RNA, 19 nt, Artificial Sequence
  Description of Artificial Sequence: Synthetic oligonucleotide
acaacguauaugcuggagc

SEQ ID NO: 3270504 - RNA, 19 nt, Artificial Sequence
  Description of Artificial Sequence: Synthetic oligonucleotide
uuuucugaaugacagggcc

SEQ ID NO: 3270505 - RNA, 19 nt, Artificial Sequence
  Description of Artificial Sequence: Synthetic oligonucleotide
cacagugauaauuauacag

SEQ ID NO: 3270506 - RNA, 19 nt, Artificial Sequence
  Description of Artificial Sequence: Synthetic oligonucleotide
auuugcccugcauaaaugc

SEQ ID NO: 3270507 - RNA, 19 nt, Artificial Sequence
  Description of Artificial Sequence: Synthetic oligonucleotide
cacacagugauaauuauac

SEQ ID NO: 3270508 - RNA, 19 nt, Artificial Sequence
  Description of Artificial Sequence: Synthetic oligonucleotide
uucaacaacguauaugcug

SEQ ID NO: 3270509 - RNA, 19 nt, Artificial Sequence
  Description of Artificial Sequence: Synthetic oligonucleotide
uuucaaaugguccuucucu

SEQ ID NO: 3270510 - RNA, 19 nt, Artificial Sequence
  Description of Artificial Sequence: Synthetic oligonucleotide
aucagccacacuuuaaaac

SEQ ID NO: 3270511 - RNA, 19 nt, Artificial Sequence
  Description of Artificial Sequence: Synthetic oligonucleotide
ugcaucaugguccaggcca

SEQ ID NO: 3270512 - RNA, 19 nt, Artificial Sequence
  Description of Artificial Sequence: Synthetic oligonucleotide
aaugacagggccaacacug

SEQ ID NO: 3270513 - RNA, 19 nt, Artificial Sequence
  Description of Artificial Sequence: Synthetic oligonucleotide
ugugaaaccugacauugcc

SEQ ID NO: 3270514 - RNA, 19 nt, Artificial Sequence
  Description of Artificial Sequence: Synthetic oligonucleotide
ucuucuacugccacggugc

SEQ ID NO: 3270515 - RNA, 19 nt, Artificial Sequence
  Description of Artificial Sequence: Synthetic oligonucleotide
ugaacugugaaaccugaca

SEQ ID NO: 3270516 - RNA, 19 nt, Artificial Sequence
  Description of Artificial Sequence: Synthetic oligonucleotide
guaggucgaacccugaacg

SEQ ID NO: 3270517 - RNA, 19 nt, Artificial Sequence
  Description of Artificial Sequence: Synthetic oligonucleotide
gaacgcaaccaucagcucg

SEQ ID NO: 3270518 - RNA, 19 nt, Artificial Sequence
  Description of Artificial Sequence: Synthetic oligonucleotide
uggauaacccucuucaaca

SEQ ID NO: 3270519 - RNA, 19 nt, Artificial Sequence
  Description of Artificial Sequence: Synthetic oligonucleotide
cuugauaaccugcaguagc

SEQ ID NO: 3270520 - RNA, 19 nt, Artificial Sequence
  Description of Artificial Sequence: Synthetic oligonucleotide
gacauugccucuuccauag

SEQ ID NO: 3270521 - RNA, 19 nt, Artificial Sequence
  Description of Artificial Sequence: Synthetic oligonucleotide
ucuaaggucauuccugaac

SEQ ID NO: 3270522 - RNA, 19 nt, Artificial Sequence
  Description of Artificial Sequence: Synthetic oligonucleotide
uuauucgauccacaguugc

SEQ ID NO: 3270523 - RNA, 19 nt, Artificial Sequence
  Description of Artificial Sequence: Synthetic oligonucleotide
aagggcaucagaauuguag

SEQ ID NO: 3270524 - RNA, 19 nt, Artificial Sequence
  Description of Artificial Sequence: Synthetic oligonucleotide
uccauauucaccagcguga

SEQ ID NO: 3270525 - RNA, 19 nt, Artificial Sequence
  Description of Artificial Sequence: Synthetic oligonucleotide
gaaacuucuugauaaccug

SEQ ID NO: 3270526 - RNA, 19 nt, Artificial Sequence
  Description of Artificial Sequence: Synthetic oligonucleotide
ucuacugccacggugcagg

SEQ ID NO: 3270527 - RNA, 19 nt, Artificial Sequence
  Description of Artificial Sequence: Synthetic oligonucleotide
uuugcccugcauaaaugcg

SEQ ID NO: 3270528 - RNA, 19 nt, Artificial Sequence
  Description of Artificial Sequence: Synthetic oligonucleotide
uugucuaaggucauuccug

SEQ ID NO: 3270529 - RNA, 19 nt, Artificial Sequence
  Description of Artificial Sequence: Synthetic oligonucleotide
gauaaccugcaguagcucc

SEQ ID NO: 3270530 - RNA, 19 nt, Artificial Sequence
  Description of Artificial Sequence: Synthetic oligonucleotide
uaaauauauugcugcacug

SEQ ID NO: 3270531 - RNA, 19 nt, Artificial Sequence
  Description of Artificial Sequence: Synthetic oligonucleotide
auauugcugcacugcaucc

SEQ ID NO: 3270532 - RNA, 19 nt, Artificial Sequence
  Description of Artificial Sequence: Synthetic oligonucleotide
auucgauccacaguugccc

SEQ ID NO: 3270533 - RNA, 19 nt, Artificial Sequence
  Description of Artificial Sequence: Synthetic oligonucleotide
ugauaaauauauugcugca

SEQ ID NO: 3270534 - RNA, 19 nt, Artificial Sequence
  Description of Artificial Sequence: Synthetic oligonucleotide
cagaauuguaggucgaacc

SEQ ID NO: 3270535 - RNA, 19 nt, Artificial Sequence
  Description of Artificial Sequence: Synthetic oligonucleotide
uaauuauacaguuccuccu

SEQ ID NO: 3270536 - RNA, 19 nt, Artificial Sequence
  Description of Artificial Sequence: Synthetic oligonucleotide
caacguauaugcuggagcc

SEQ ID NO: 3270537 - RNA, 19 nt, Artificial Sequence
  Description of Artificial Sequence: Synthetic oligonucleotide
agggcaucagaauuguagg

SEQ ID NO: 3270538 - RNA, 19 nt, Artificial Sequence
  Description of Artificial Sequence: Synthetic oligonucleotide
ucuuuucuagaaauggauc

SEQ ID NO: 3270539 - RNA, 19 nt, Artificial Sequence
  Description of Artificial Sequence: Synthetic oligonucleotide
cuuuucuagaaauggauca

SEQ ID NO: 3270540 - RNA, 19 nt, Artificial Sequence
  Description of Artificial Sequence: Synthetic oligonucleotide
uugcccugcauaaaugcgg

SEQ ID NO: 3270541 - RNA, 19 nt, Artificial Sequence
  Description of Artificial Sequence: Synthetic oligonucleotide
auuccugaacugugaaacc

SEQ ID NO: 3270542 - RNA, 19 nt, Artificial Sequence
  Description of Artificial Sequence: Synthetic oligonucleotide
ucugcaaccgccauucccu

SEQ ID NO: 3270543 - RNA, 19 nt, Artificial Sequence
  Description of Artificial Sequence: Synthetic oligonucleotide
gauaauuauacaguuccuc

SEQ ID NO: 3270544 - RNA, 19 nt, Artificial Sequence
  Description of Artificial Sequence: Synthetic oligonucleotide
uauacaguuccuccucugc

SEQ ID NO: 3270545 - RNA, 19 nt, Artificial Sequence
  Description of Artificial Sequence: Synthetic oligonucleotide
ucuuccauaggcugagaag

SEQ ID NO: 3270546 - RNA, 19 nt, Artificial Sequence
  Description of Artificial Sequence: Synthetic oligonucleotide
gauuauucgauccacaguu

SEQ ID NO: 3270547 - RNA, 19 nt, Artificial Sequence
  Description of Artificial Sequence: Synthetic oligonucleotide
ugaaaccugacauugccuc

SEQ ID NO: 3270548 - RNA, 19 nt, Artificial Sequence
  Description of Artificial Sequence: Synthetic oligonucleotide
cacuuuaaaaccuuucuga

SEQ ID NO: 3270549 - RNA, 19 nt, Artificial Sequence
  Description of Artificial Sequence: Synthetic oligonucleotide
uguagugaugagcaaugga

SEQ ID NO: 3270550 - RNA, 19 nt, Artificial Sequence
  Description of Artificial Sequence: Synthetic oligonucleotide
gauaaauauauugcugcac

SEQ ID NO: 3270551 - RNA, 19 nt, Artificial Sequence
  Description of Artificial Sequence: Synthetic oligonucleotide
uauucgauccacaguugcc

SEQ ID NO: 3270552 - RNA, 19 nt, Artificial Sequence
  Description of Artificial Sequence: Synthetic oligonucleotide
ugagaagggccuccggacg

SEQ ID NO: 3270553 - RNA, 19 nt, Artificial Sequence
  Description of Artificial Sequence: Synthetic oligonucleotide
aagccugccacauuccaca

SEQ ID NO: 3270554 - RNA, 19 nt, Artificial Sequence
  Description of Artificial Sequence: Synthetic oligonucleotide
accagcgugauccacccgg

SEQ ID NO: 3270555 - RNA, 19 nt, Artificial Sequence
  Description of Artificial Sequence: Synthetic oligonucleotide
ucaucagccacacuuuaaa

SEQ ID NO: 3270556 - RNA, 19 nt, Artificial Sequence
  Description of Artificial Sequence: Synthetic oligonucleotide
cuucucaggauccuccucc

SEQ ID NO: 3270557 - RNA, 19 nt, Artificial Sequence
  Description of Artificial Sequence: Synthetic oligonucleotide
ugaaugacagggccaacac

SEQ ID NO: 3270558 - RNA, 19 nt, Artificial Sequence
  Description of Artificial Sequence: Synthetic oligonucleotide
gauccacccggauuauucg

SEQ ID NO: 3270559 - RNA, 19 nt, Artificial Sequence
  Description of Artificial Sequence: Synthetic oligonucleotide
agugauaauuauacaguuc

SEQ ID NO: 3270560 - RNA, 19 nt, Artificial Sequence
  Description of Artificial Sequence: Synthetic oligonucleotide
auaugcuggagccaacucu

SEQ ID NO: 3270561 - RNA, 19 nt, Artificial Sequence
  Description of Artificial Sequence: Synthetic oligonucleotide
aaugcgguuugcuccauau

SEQ ID NO: 3270562 - RNA, 19 nt, Artificial Sequence
  Description of Artificial Sequence: Synthetic oligonucleotide
uguaggucgaacccugaac

SEQ ID NO: 3270563 - RNA, 19 nt, Artificial Sequence
  Description of Artificial Sequence: Synthetic oligonucleotide
uuucugaaugacagggcca

SEQ ID NO: 3270564 - RNA, 19 nt, Artificial Sequence
  Description of Artificial Sequence: Synthetic oligonucleotide
ugucuaaggucauuccuga

SEQ ID NO: 3270565 - RNA, 19 nt, Artificial Sequence
  Description of Artificial Sequence: Synthetic oligonucleotide
auaaaugcgguuugcucca

SEQ ID NO: 3270566 - RNA, 19 nt, Artificial Sequence
  Description of Artificial Sequence: Synthetic oligonucleotide
ugauccacccggauuauuc

SEQ ID NO: 3270567 - RNA, 19 nt, Artificial Sequence
  Description of Artificial Sequence: Synthetic oligonucleotide
auacuucucaggauccucc

SEQ ID NO: 3270568 - RNA, 19 nt, Artificial Sequence
  Description of Artificial Sequence: Synthetic oligonucleotide
auuuucugaaugacagggc

SEQ ID NO: 3270569 - RNA, 19 nt, Artificial Sequence
  Description of Artificial Sequence: Synthetic oligonucleotide
uucaccagcgugauccacc

SEQ ID NO: 3270570 - RNA, 19 nt, Artificial Sequence
  Description of Artificial Sequence: Synthetic oligonucleotide
uguugucuaaggucauucc

SEQ ID NO: 3270571 - RNA, 19 nt, Artificial Sequence
  Description of Artificial Sequence: Synthetic oligonucleotide
uuuucaaaugguccuucuc

SEQ ID NO: 3270572 - RNA, 19 nt, Artificial Sequence
  Description of Artificial Sequence: Synthetic oligonucleotide
uugccggugacaaugcaac

SEQ ID NO: 3270573 - RNA, 19 nt, Artificial Sequence
  Description of Artificial Sequence: Synthetic oligonucleotide
cauugccucuuccauaggc

SEQ ID NO: 3270574 - RNA, 19 nt, Artificial Sequence
  Description of Artificial Sequence: Synthetic oligonucleotide
acugcauccagccuggaua

SEQ ID NO: 3270575 - RNA, 19 nt, Artificial Sequence
  Description of Artificial Sequence: Synthetic oligonucleotide
acaguugcccgguuaaugu

SEQ ID NO: 3270576 - RNA, 19 nt, Artificial Sequence
  Description of Artificial Sequence: Synthetic oligonucleotide
uucgauccacaguugcccg

SEQ ID NO: 3270577 - RNA, 19 nt, Artificial Sequence
  Description of Artificial Sequence: Synthetic oligonucleotide
ugcacugcauccagccugg

SEQ ID NO: 3270578 - RNA, 19 nt, Artificial Sequence
  Description of Artificial Sequence: Synthetic oligonucleotide
aacaacguauaugcuggag

SEQ ID NO: 3270579 - RNA, 19 nt, Artificial Sequence
  Description of Artificial Sequence: Synthetic oligonucleotide
cuccauauucaccagcgug

SEQ ID NO: 3270580 - RNA, 19 nt, Artificial Sequence
  Description of Artificial Sequence: Synthetic oligonucleotide
auuauacaguuccuccucu

SEQ ID NO: 3270581 - RNA, 19 nt, Artificial Sequence
  Description of Artificial Sequence: Synthetic oligonucleotide
acaguuccuccucugcaac

SEQ ID NO: 3270582 - RNA, 19 nt, Artificial Sequence
  Description of Artificial Sequence: Synthetic oligonucleotide
uacgugaccaucuuuucua

SEQ ID NO: 3270583 - RNA, 19 nt, Artificial Sequence
  Description of Artificial Sequence: Synthetic oligonucleotide
cacaagggcaucagaauug

SEQ ID NO: 3270584 - RNA, 19 nt, Artificial Sequence
  Description of Artificial Sequence: Synthetic oligonucleotide
ugucauggugcucaagcuc

SEQ ID NO: 3270585 - RNA, 19 nt, Artificial Sequence
  Description of Artificial Sequence: Synthetic oligonucleotide
aaggucauuccugaacugu

SEQ ID NO: 3270586 - RNA, 19 nt, Artificial Sequence
  Description of Artificial Sequence: Synthetic oligonucleotide
acugccacggugcaggcca

SEQ ID NO: 3270587 - RNA, 19 nt, Artificial Sequence
  Description of Artificial Sequence: Synthetic oligonucleotide
cuggauaacccucuucaac

SEQ ID NO: 3270588 - RNA, 19 nt, Artificial Sequence
  Description of Artificial Sequence: Synthetic oligonucleotide
guuguagugaugagcaaug

SEQ ID NO: 3270589 - RNA, 19 nt, Artificial Sequence
  Description of Artificial Sequence: Synthetic oligonucleotide
ugcugcacugcauccagcc

SEQ ID NO: 3270590 - RNA, 19 nt, Artificial Sequence
  Description of Artificial Sequence: Synthetic oligonucleotide
ugagcaauggacucuucua

SEQ ID NO: 3270591 - RNA, 19 nt, Artificial Sequence
  Description of Artificial Sequence: Synthetic oligonucleotide
ucccacauuuucugaauga

SEQ ID NO: 3270592 - RNA, 19 nt, Artificial Sequence
  Description of Artificial Sequence: Synthetic oligonucleotide
uuguagugaugagcaaugg

SEQ ID NO: 3270593 - RNA, 19 nt, Artificial Sequence
  Description of Artificial Sequence: Synthetic oligonucleotide
accuuucugauaaauauau

SEQ ID NO: 3270594 - RNA, 19 nt, Artificial Sequence
  Description of Artificial Sequence: Synthetic oligonucleotide
ucgucucgaaacuucuuga

SEQ ID NO: 3270595 - RNA, 19 nt, Artificial Sequence
  Description of Artificial Sequence: Synthetic oligonucleotide
cucgucucgaaacuucuug

SEQ ID NO: 3270596 - RNA, 19 nt, Artificial Sequence
  Description of Artificial Sequence: Synthetic oligonucleotide
aauugaacaaauuauaccc

SEQ ID NO: 3270597 - RNA, 19 nt, Artificial Sequence
  Description of Artificial Sequence: Synthetic oligonucleotide
uuuuauauuaacaacagca

SEQ ID NO: 3270598 - RNA, 19 nt, Artificial Sequence
  Description of Artificial Sequence: Synthetic oligonucleotide
aaauguguguacuaggacc

SEQ ID NO: 3270599 - RNA, 19 nt, Artificial Sequence
  Description of Artificial Sequence: Synthetic oligonucleotide
aaaucuaucuuguucuucc

SEQ ID NO: 3270600 - RNA, 19 nt, Artificial Sequence
  Description of Artificial Sequence: Synthetic oligonucleotide
aaaacauucacuucaaccu

SEQ ID NO: 3270601 - RNA, 19 nt, Artificial Sequence
  Description of Artificial Sequence: Synthetic oligonucleotide
uauauuacaaauaaaggaa

SEQ ID NO: 3270602 - RNA, 19 nt, Artificial Sequence
  Description of Artificial Sequence: Synthetic oligonucleotide
ugaaauguuauucauauaa

SEQ ID NO: 3270603 - RNA, 19 nt, Artificial Sequence
  Description of Artificial Sequence: Synthetic oligonucleotide
ugugguuugaucaauacca

SEQ ID NO: 3270604 - RNA, 19 nt, Artificial Sequence
  Description of Artificial Sequence: Synthetic oligonucleotide
gaaaugugcaaauucagag

SEQ ID NO: 3270605 - RNA, 19 nt, Artificial Sequence
  Description of Artificial Sequence: Synthetic oligonucleotide
aacuucaaauaauuaaauc

SEQ ID NO: 3270606 - RNA, 19 nt, Artificial Sequence
  Description of Artificial Sequence: Synthetic oligonucleotide
auuaaaucuaucuuguucu

SEQ ID NO: 3270607 - RNA, 19 nt, Artificial Sequence
  Description of Artificial Sequence: Synthetic oligonucleotide
aucaauaccacucaggaga

SEQ ID NO: 3270608 - RNA, 19 nt, Artificial Sequence
  Description of Artificial Sequence: Synthetic oligonucleotide
aauuucaggacaaauguuc

SEQ ID NO: 3270609 - RNA, 19 nt, Artificial Sequence
  Description of Artificial Sequence: Synthetic oligonucleotide
gaauauuucuuucaguagc

SEQ ID NO: 3270610 - RNA, 19 nt, Artificial Sequence
  Description of Artificial Sequence: Synthetic oligonucleotide
ucugaaauaugcuuaaaug

SEQ ID NO: 3270611 - RNA, 19 nt, Artificial Sequence
  Description of Artificial Sequence: Synthetic oligonucleotide
caaauuauacccaagagca

SEQ ID NO: 3270612 - RNA, 19 nt, Artificial Sequence
  Description of Artificial Sequence: Synthetic oligonucleotide
uuuacaauuuucuauuuac

SEQ ID NO: 3270613 - RNA, 19 nt, Artificial Sequence
  Description of Artificial Sequence: Synthetic oligonucleotide
aaaauucagagaguucucc

SEQ ID NO: 3270614 - RNA, 19 nt, Artificial Sequence
  Description of Artificial Sequence: Synthetic oligonucleotide
gaauugaacaaauuauacc

SEQ ID NO: 3270615 - RNA, 19 nt, Artificial Sequence
  Description of Artificial Sequence: Synthetic oligonucleotide
gaacaaaggaaucagagga

SEQ ID NO: 3270616 - RNA, 19 nt, Artificial Sequence
  Description of Artificial Sequence: Synthetic oligonucleotide
agaguauuaguauuuauca

SEQ ID NO: 3270617 - RNA, 19 nt, Artificial Sequence
  Description of Artificial Sequence: Synthetic oligonucleotide
uaaacaggaauauuaacac

SEQ ID NO: 3270618 - RNA, 19 nt, Artificial Sequence
  Description of Artificial Sequence: Synthetic oligonucleotide
uuugcuuugaagcugcaca

SEQ ID NO: 3270619 - RNA, 19 nt, Artificial Sequence
  Description of Artificial Sequence: Synthetic oligonucleotide
uucacuucaaccuuuaaaa

SEQ ID NO: 3270620 - RNA, 19 nt, Artificial Sequence
  Description of Artificial Sequence: Synthetic oligonucleotide
ugcucauucaugauggcgg

SEQ ID NO: 3270621 - RNA, 19 nt, Artificial Sequence
  Description of Artificial Sequence: Synthetic oligonucleotide
uuuuaguacuuucauaagu

SEQ ID NO: 3270622 - RNA, 19 nt, Artificial Sequence
  Description of Artificial Sequence: Synthetic oligonucleotide
uuuauauuaacaacagcaa

SEQ ID NO: 3270623 - RNA, 19 nt, Artificial Sequence
  Description of Artificial Sequence: Synthetic oligonucleotide
aauucagagaguucuccuc

SEQ ID NO: 3270624 - RNA, 19 nt, Artificial Sequence
  Description of Artificial Sequence: Synthetic oligonucleotide
uuuaaaauguguguacuag

SEQ ID NO: 3270625 - RNA, 19 nt, Artificial Sequence
  Description of Artificial Sequence: Synthetic oligonucleotide
ugagauggagaccauaggc

SEQ ID NO: 3270626 - RNA, 19 nt, Artificial Sequence
  Description of Artificial Sequence: Synthetic oligonucleotide
ugaucaauaccacucagga

SEQ ID NO: 3270627 - RNA, 19 nt, Artificial Sequence
  Description of Artificial Sequence: Synthetic oligonucleotide
uuugcauuagucuucuuca

SEQ ID NO: 3270628 - RNA, 19 nt, Artificial Sequence
  Description of Artificial Sequence: Synthetic oligonucleotide
agaggaaaugugcaaauuc

SEQ ID NO: 3270629 - RNA, 19 nt, Artificial Sequence
  Description of Artificial Sequence: Synthetic oligonucleotide
aaaauucucaagcuagcga

SEQ ID NO: 3270630 - RNA, 19 nt, Artificial Sequence
  Description of Artificial Sequence: Synthetic oligonucleotide
uuuuaauauaacaucugaa

SEQ ID NO: 3270631 - RNA, 19 nt, Artificial Sequence
  Description of Artificial Sequence: Synthetic oligonucleotide
agaacaaaggaaucagagg

SEQ ID NO: 3270632 - RNA, 19 nt, Artificial Sequence
  Description of Artificial Sequence: Synthetic oligonucleotide
auuaguauuuaucaacacu

SEQ ID NO: 3270633 - RNA, 19 nt, Artificial Sequence
  Description of Artificial Sequence: Synthetic oligonucleotide
acuuucauaaguaauaacu

SEQ ID NO: 3270634 - RNA, 19 nt, Artificial Sequence
  Description of Artificial Sequence: Synthetic oligonucleotide
aagcuagcgagguaaacag

SEQ ID NO: 3270635 - RNA, 19 nt, Artificial Sequence
  Description of Artificial Sequence: Synthetic oligonucleotide
uacaaauaaaggaacucca

SEQ ID NO: 3270636 - RNA, 19 nt, Artificial Sequence
  Description of Artificial Sequence: Synthetic oligonucleotide
cucauucacaucaagggcc

SEQ ID NO: 3270637 - RNA, 19 nt, Artificial Sequence
  Description of Artificial Sequence: Synthetic oligonucleotide
aaucuaucuuguucuuccc

SEQ ID NO: 3270638 - RNA, 19 nt, Artificial Sequence
  Description of Artificial Sequence: Synthetic oligonucleotide
uucauaaguaauaacuaaa

SEQ ID NO: 3270639 - RNA, 19 nt, Artificial Sequence
  Description of Artificial Sequence: Synthetic oligonucleotide
aagcacauauauuacaaau

SEQ ID NO: 3270640 - RNA, 19 nt, Artificial Sequence
  Description of Artificial Sequence: Synthetic oligonucleotide
ugaacggugucucaaagac

SEQ ID NO: 3270641 - RNA, 19 nt, Artificial Sequence
  Description of Artificial Sequence: Synthetic oligonucleotide
ugacugguggucaagacug

SEQ ID NO: 3270642 - RNA, 19 nt, Artificial Sequence
  Description of Artificial Sequence: Synthetic oligonucleotide
aacuuuagaguauuaguau

SEQ ID NO: 3270643 - RNA, 19 nt, Artificial Sequence
  Description of Artificial Sequence: Synthetic oligonucleotide
uuagucuucuucacguagg

SEQ ID NO: 3270644 - RNA, 19 nt, Artificial Sequence
  Description of Artificial Sequence: Synthetic oligonucleotide
uagaguauuaguauuuauc

SEQ ID NO: 3270645 - RNA, 19 nt, Artificial Sequence
  Description of Artificial Sequence: Synthetic oligonucleotide
uauuucuuugcauuagucu

SEQ ID NO: 3270646 - RNA, 19 nt, Artificial Sequence
  Description of Artificial Sequence: Synthetic oligonucleotide
aaaggaaucagaggaaaug

SEQ ID NO: 3270647 - RNA, 19 nt, Artificial Sequence
  Description of Artificial Sequence: Synthetic oligonucleotide
aauguuauucauauaauuu

SEQ ID NO: 3270648 - RNA, 19 nt, Artificial Sequence
  Description of Artificial Sequence: Synthetic oligonucleotide
caaauauuuuaauauaaca

SEQ ID NO: 3270649 - RNA, 19 nt, Artificial Sequence
  Description of Artificial Sequence: Synthetic oligonucleotide
agaccauaggcacagcugg

SEQ ID NO: 3270650 - RNA, 19 nt, Artificial Sequence
  Description of Artificial Sequence: Synthetic oligonucleotide
acaaauauuuuaauauaac

SEQ ID NO: 3270651 - RNA, 19 nt, Artificial Sequence
  Description of Artificial Sequence: Synthetic oligonucleotide
ugcuuuuagaagcacauau

SEQ ID NO: 3270652 - RNA, 19 nt, Artificial Sequence
  Description of Artificial Sequence: Synthetic oligonucleotide
uuucauaaguaauaacuaa

SEQ ID NO: 3270653 - RNA, 19 nt, Artificial Sequence
  Description of Artificial Sequence: Synthetic oligonucleotide
aauaccacucaggagaaca

SEQ ID NO: 3270654 - RNA, 19 nt, Artificial Sequence
  Description of Artificial Sequence: Synthetic oligonucleotide
auauauuuuacaauuuucu

SEQ ID NO: 3270655 - RNA, 19 nt, Artificial Sequence
  Description of Artificial Sequence: Synthetic oligonucleotide
caccauugcuuuuagaagc

SEQ ID NO: 3270656 - RNA, 19 nt, Artificial Sequence
  Description of Artificial Sequence: Synthetic oligonucleotide
uuacaauuuucuauuuaca

SEQ ID NO: 3270657 - RNA, 19 nt, Artificial Sequence
  Description of Artificial Sequence: Synthetic oligonucleotide
ucaaacuucagcacugggu

SEQ ID NO: 3270658 - RNA, 19 nt, Artificial Sequence
  Description of Artificial Sequence: Synthetic oligonucleotide
aggacaaauguucagugug

SEQ ID NO: 3270659 - RNA, 19 nt, Artificial Sequence
  Description of Artificial Sequence: Synthetic oligonucleotide
gugucucaaagacaaagcg

SEQ ID NO: 3270660 - RNA, 19 nt, Artificial Sequence
  Description of Artificial Sequence: Synthetic oligonucleotide
gucaaaauucucaagcuag

SEQ ID NO: 3270661 - RNA, 19 nt, Artificial Sequence
  Description of Artificial Sequence: Synthetic oligonucleotide
aaaggaacuccacaaacuu

SEQ ID NO: 3270662 - RNA, 19 nt, Artificial Sequence
  Description of Artificial Sequence: Synthetic oligonucleotide
aaauacuuuuauaauuuca

SEQ ID NO: 3270663 - RNA, 19 nt, Artificial Sequence
  Description of Artificial Sequence: Synthetic oligonucleotide
aauuauacccaagagcaaa

SEQ ID NO: 3270664 - RNA, 19 nt, Artificial Sequence
  Description of Artificial Sequence: Synthetic oligonucleotide
ugucucaaagacaaagcga

SEQ ID NO: 3270665 - RNA, 19 nt, Artificial Sequence
  Description of Artificial Sequence: Synthetic oligonucleotide
auuagucuucuucacguag

SEQ ID NO: 3270666 - RNA, 19 nt, Artificial Sequence
  Description of Artificial Sequence: Synthetic oligonucleotide
caaacuucagcacugggug

SEQ ID NO: 3270667 - RNA, 19 nt, Artificial Sequence
  Description of Artificial Sequence: Synthetic oligonucleotide
aaauucagagaguucuccu

SEQ ID NO: 3270668 - RNA, 19 nt, Artificial Sequence
  Description of Artificial Sequence: Synthetic oligonucleotide
agcaugucuuuauaguggg

SEQ ID NO: 3270669 - RNA, 19 nt, Artificial Sequence
  Description of Artificial Sequence: Synthetic oligonucleotide
auguuauucauauaauuuu

SEQ ID NO: 3270670 - RNA, 19 nt, Artificial Sequence
  Description of Artificial Sequence: Synthetic oligonucleotide
ucugcaaauugccugaaua

SEQ ID NO: 3270671 - RNA, 19 nt, Artificial Sequence
  Description of Artificial Sequence: Synthetic oligonucleotide
agugugguuugaucaauac

SEQ ID NO: 3270672 - RNA, 19 nt, Artificial Sequence
  Description of Artificial Sequence: Synthetic oligonucleotide
caauuuucuauuuacaucu

SEQ ID NO: 3270673 - RNA, 19 nt, Artificial Sequence
  Description of Artificial Sequence: Synthetic oligonucleotide
ugcaucugcaaauugccug

SEQ ID NO: 3270674 - RNA, 19 nt, Artificial Sequence
  Description of Artificial Sequence: Synthetic oligonucleotide
acaucugaaauguuauuca

SEQ ID NO: 3270675 - RNA, 19 nt, Artificial Sequence
  Description of Artificial Sequence: Synthetic oligonucleotide
aauauuucuuucaguagcu

SEQ ID NO: 3270676 - RNA, 19 nt, Artificial Sequence
  Description of Artificial Sequence: Synthetic oligonucleotide
aauucagaggcugucaaaa

SEQ ID NO: 3270677 - RNA, 19 nt, Artificial Sequence
  Description of Artificial Sequence: Synthetic oligonucleotide
acaacagcaaaauacuuuu

SEQ ID NO: 3270678 - RNA, 19 nt, Artificial Sequence
  Description of Artificial Sequence: Synthetic oligonucleotide
gcugucaaaauucucaagc

SEQ ID NO: 3270679 - RNA, 19 nt, Artificial Sequence
  Description of Artificial Sequence: Synthetic oligonucleotide
aauguguguacuaggaccu

SEQ ID NO: 3270680 - RNA, 19 nt, Artificial Sequence
  Description of Artificial Sequence: Synthetic oligonucleotide
uucacguaggggaacaagu

SEQ ID NO: 3270681 - RNA, 19 nt, Artificial Sequence
  Description of Artificial Sequence: Synthetic oligonucleotide
ucuuucaguagcuuuacuu

SEQ ID NO: 3270682 - RNA, 19 nt, Artificial Sequence
  Description of Artificial Sequence: Synthetic oligonucleotide
cuucaaauaauuaaaucua

SEQ ID NO: 3270683 - RNA, 19 nt, Artificial Sequence
  Description of Artificial Sequence: Synthetic oligonucleotide
uuuuacaauuuucuauuua

SEQ ID NO: 3270684 - RNA, 19 nt, Artificial Sequence
  Description of Artificial Sequence: Synthetic oligonucleotide
agcaaaauacuuuuauaau

SEQ ID NO: 3270685 - RNA, 19 nt, Artificial Sequence
  Description of Artificial Sequence: Synthetic oligonucleotide
uaggaccuggaauugaaca

SEQ ID NO: 3270686 - RNA, 19 nt, Artificial Sequence
  Description of Artificial Sequence: Synthetic oligonucleotide
uagucuucuucacguaggg

SEQ ID NO: 3270687 - RNA, 19 nt, Artificial Sequence
  Description of Artificial Sequence: Synthetic oligonucleotide
uagaagcacauauauuaca

SEQ ID NO: 3270688 - RNA, 19 nt, Artificial Sequence
  Description of Artificial Sequence: Synthetic oligonucleotide
acaccauugcuuuuagaag

SEQ ID NO: 3270689 - RNA, 19 nt, Artificial Sequence
  Description of Artificial Sequence: Synthetic oligonucleotide
cuaguuacacguguguagg

SEQ ID NO: 3270690 - RNA, 19 nt, Artificial Sequence
  Description of Artificial Sequence: Synthetic oligonucleotide
uugaacaaauuauacccaa

SEQ ID NO: 3270691 - RNA, 19 nt, Artificial Sequence
  Description of Artificial Sequence: Synthetic oligonucleotide
uuuauagugggaccucagu

SEQ ID NO: 3270692 - RNA, 19 nt, Artificial Sequence
  Description of Artificial Sequence: Synthetic oligonucleotide
caagagcaaacucaguuug

SEQ ID NO: 3270693 - RNA, 19 nt, Artificial Sequence
  Description of Artificial Sequence: Synthetic oligonucleotide
agcuuuacuugguugucgg

SEQ ID NO: 3270694 - RNA, 19 nt, Artificial Sequence
  Description of Artificial Sequence: Synthetic oligonucleotide
auacacaaauauuuuaaua

SEQ ID NO: 3270695 - RNA, 19 nt, Artificial Sequence
  Description of Artificial Sequence: Synthetic oligonucleotide
aacggugucucaaagacaa

SEQ ID NO: 3270696 - RNA, 19 nt, Artificial Sequence
  Description of Artificial Sequence: Synthetic oligonucleotide
uauguuaucaaucucauuu

SEQ ID NO: 3270697 - RNA, 19 nt, Artificial Sequence
  Description of Artificial Sequence: Synthetic oligonucleotide
uuaucaaucucauuuacca

SEQ ID NO: 3270698 - RNA, 19 nt, Artificial Sequence
  Description of Artificial Sequence: Synthetic oligonucleotide
uuuugaagauugcauaagg

SEQ ID NO: 3270699 - RNA, 19 nt, Artificial Sequence
  Description of Artificial Sequence: Synthetic oligonucleotide
ugaagauugcauaagguca

SEQ ID NO: 3270700 - RNA, 19 nt, Artificial Sequence
  Description of Artificial Sequence: Synthetic oligonucleotide
aaucucauuuaccacaugu

SEQ ID NO: 3270701 - RNA, 19 nt, Artificial Sequence
  Description of Artificial Sequence: Synthetic oligonucleotide
ugugaugucaucuuaggga

SEQ ID NO: 3270702 - RNA, 19 nt, Artificial Sequence
  Description of Artificial Sequence: Synthetic oligonucleotide
ugccuuaugaucuauaguc

SEQ ID NO: 3270703 - RNA, 19 nt, Artificial Sequence
  Description of Artificial Sequence: Synthetic oligonucleotide
aaggucauucugcacugcc

SEQ ID NO: 3270704 - RNA, 19 nt, Artificial Sequence
  Description of Artificial Sequence: Synthetic oligonucleotide
ucucauuuaccacauguga

SEQ ID NO: 3270705 - RNA, 19 nt, Artificial Sequence
  Description of Artificial Sequence: Synthetic oligonucleotide
ucauuuaccacaugugaug

SEQ ID NO: 3270706 - RNA, 19 nt, Artificial Sequence
  Description of Artificial Sequence: Synthetic oligonucleotide
uuugaagauugcauaaggu

SEQ ID NO: 3270707 - RNA, 19 nt, Artificial Sequence
  Description of Artificial Sequence: Synthetic oligonucleotide
aucaaucucauuuaccaca

SEQ ID NO: 3270708 - RNA, 19 nt, Artificial Sequence
  Description of Artificial Sequence: Synthetic oligonucleotide
uugaagauugcauaagguc

SEQ ID NO: 3270709 - RNA, 19 nt, Artificial Sequence
  Description of Artificial Sequence: Synthetic oligonucleotide
uuugcuguagggcuuguug

SEQ ID NO: 3270710 - RNA, 19 nt, Artificial Sequence
  Description of Artificial Sequence: Synthetic oligonucleotide
auuuuacccaugcaguguc

SEQ ID NO: 3270711 - RNA, 19 nt, Artificial Sequence
  Description of Artificial Sequence: Synthetic oligonucleotide
uugcauaaggucauucugc

SEQ ID NO: 3270712 - RNA, 19 nt, Artificial Sequence
  Description of Artificial Sequence: Synthetic oligonucleotide
auugccuuaugaucuauag

SEQ ID NO: 3270713 - RNA, 19 nt, Artificial Sequence
  Description of Artificial Sequence: Synthetic oligonucleotide
auugcauaaggucauucug

SEQ ID NO: 3270714 - RNA, 19 nt, Artificial Sequence
  Description of Artificial Sequence: Synthetic oligonucleotide
gugaugucaucuuagggag

SEQ ID NO: 3270715 - RNA, 19 nt, Artificial Sequence
  Description of Artificial Sequence: Synthetic oligonucleotide
uuuaccacaugugauguca

SEQ ID NO: 3270716 - RNA, 19 nt, Artificial Sequence
  Description of Artificial Sequence: Synthetic oligonucleotide
cuacccaccauauuuuacc

SEQ ID NO: 3270717 - RNA, 19 nt, Artificial Sequence
  Description of Artificial Sequence: Synthetic oligonucleotide
auauuuuacccaugcagug

SEQ ID NO: 3270718 - RNA, 19 nt, Artificial Sequence
  Description of Artificial Sequence: Synthetic oligonucleotide
uguuaucaaucucauuuac

SEQ ID NO: 3270719 - RNA, 19 nt, Artificial Sequence
  Description of Artificial Sequence: Synthetic oligonucleotide
caugcauugccuuaugauc

SEQ ID NO: 3270720 - RNA, 19 nt, Artificial Sequence
  Description of Artificial Sequence: Synthetic oligonucleotide
augugaugucaucuuaggg

SEQ ID NO: 3270721 - RNA, 19 nt, Artificial Sequence
  Description of Artificial Sequence: Synthetic oligonucleotide
caugugaugucaucuuagg

SEQ ID NO: 3270722 - RNA, 19 nt, Artificial Sequence
  Description of Artificial Sequence: Synthetic oligonucleotide
ugcauaaggucauucugca

SEQ ID NO: 3270723 - RNA, 19 nt, Artificial Sequence
  Description of Artificial Sequence: Synthetic oligonucleotide
caguauguuaucaaucuca

SEQ ID NO: 3270724 - RNA, 19 nt, Artificial Sequence
  Description of Artificial Sequence: Synthetic oligonucleotide
ccauauuuuacccaugcag

SEQ ID NO: 3270725 - RNA, 19 nt, Artificial Sequence
  Description of Artificial Sequence: Synthetic oligonucleotide
ugcuguagggcuuguugcg

SEQ ID NO: 3270726 - RNA, 19 nt, Artificial Sequence
  Description of Artificial Sequence: Synthetic oligonucleotide
auaaggucauucugcacug

SEQ ID NO: 3270727 - RNA, 19 nt, Artificial Sequence
  Description of Artificial Sequence: Synthetic oligonucleotide
ucaaucucauuuaccacau

SEQ ID NO: 3270728 - RNA, 19 nt, Artificial Sequence
  Description of Artificial Sequence: Synthetic oligonucleotide
uugcuguagggcuuguugc

SEQ ID NO: 3270729 - RNA, 19 nt, Artificial Sequence
  Description of Artificial Sequence: Synthetic oligonucleotide
ucaugcauugccuuaugau

SEQ ID NO: 3270730 - RNA, 19 nt, Artificial Sequence
  Description of Artificial Sequence: Synthetic oligonucleotide
uaucaaucucauuuaccac

SEQ ID NO: 3270731 - RNA, 19 nt, Artificial Sequence
  Description of Artificial Sequence: Synthetic oligonucleotide
guuaucaaucucauuuacc

SEQ ID NO: 3270732 - RNA, 19 nt, Artificial Sequence
  Description of Artificial Sequence: Synthetic oligonucleotide
caccauauuuuacccaugc

SEQ ID NO: 3270733 - RNA, 19 nt, Artificial Sequence
  Description of Artificial Sequence: Synthetic oligonucleotide
ugucaucuuagggaggacc

SEQ ID NO: 3270734 - RNA, 19 nt, Artificial Sequence
  Description of Artificial Sequence: Synthetic oligonucleotide
ugaugucaucuuagggagg

SEQ ID NO: 3270735 - RNA, 19 nt, Artificial Sequence
  Description of Artificial Sequence: Synthetic oligonucleotide
uauuuuacccaugcagugu

SEQ ID NO: 3270736 - RNA, 19 nt, Artificial Sequence
  Description of Artificial Sequence: Synthetic oligonucleotide
uuacccaugcagugucugg

SEQ ID NO: 3270737 - RNA, 19 nt, Artificial Sequence
  Description of Artificial Sequence: Synthetic oligonucleotide
cauauuuuacccaugcagu

SEQ ID NO: 3270738 - RNA, 19 nt, Artificial Sequence
  Description of Artificial Sequence: Synthetic oligonucleotide
uucugcacugccuacccac

SEQ ID NO: 3270739 - RNA, 19 nt, Artificial Sequence
  Description of Artificial Sequence: Synthetic oligonucleotide
uacccaccauauuuuaccc

SEQ ID NO: 3270740 - RNA, 19 nt, Artificial Sequence
  Description of Artificial Sequence: Synthetic oligonucleotide
auuuaccacaugugauguc

SEQ ID NO: 3270741 - RNA, 19 nt, Artificial Sequence
  Description of Artificial Sequence: Synthetic oligonucleotide
uugccuuaugaucuauagu

SEQ ID NO: 3270742 - RNA, 19 nt, Artificial Sequence
  Description of Artificial Sequence: Synthetic oligonucleotide
gaugucaucuuagggagga

SEQ ID NO: 3270743 - RNA, 19 nt, Artificial Sequence
  Description of Artificial Sequence: Synthetic oligonucleotide
cauaaggucauucugcacu

SEQ ID NO: 3270744 - RNA, 19 nt, Artificial Sequence
  Description of Artificial Sequence: Synthetic oligonucleotide
agauugcauaaggucauuc

SEQ ID NO: 3270745 - RNA, 19 nt, Artificial Sequence
  Description of Artificial Sequence: Synthetic oligonucleotide
uacccaugcagugucuggg

SEQ ID NO: 3270746 - RNA, 19 nt, Artificial Sequence
  Description of Artificial Sequence: Synthetic oligonucleotide
augcauugccuuaugaucu

SEQ ID NO: 3270747 - RNA, 19 nt, Artificial Sequence
  Description of Artificial Sequence: Synthetic oligonucleotide
gauugcauaaggucauucu

SEQ ID NO: 3270748 - RNA, 19 nt, Artificial Sequence
  Description of Artificial Sequence: Synthetic oligonucleotide
auguuaucaaucucauuua

SEQ ID NO: 3270749 - RNA, 19 nt, Artificial Sequence
  Description of Artificial Sequence: Synthetic oligonucleotide
acaugugaugucaucuuag

SEQ ID NO: 3270750 - RNA, 19 nt, Artificial Sequence
  Description of Artificial Sequence: Synthetic oligonucleotide
uuaugaucuauagucuuuu

SEQ ID NO: 3270751 - RNA, 19 nt, Artificial Sequence
  Description of Artificial Sequence: Synthetic oligonucleotide
cauucugcacugccuaccc

SEQ ID NO: 3270752 - RNA, 19 nt, Artificial Sequence
  Description of Artificial Sequence: Synthetic oligonucleotide
accacaugugaugucaucu

SEQ ID NO: 3270753 - RNA, 19 nt, Artificial Sequence
  Description of Artificial Sequence: Synthetic oligonucleotide
ugcgcaguauguuaucaau

SEQ ID NO: 3270754 - RNA, 19 nt, Artificial Sequence
  Description of Artificial Sequence: Synthetic oligonucleotide
uuguugcgcaguauguuau

SEQ ID NO: 3270755 - RNA, 19 nt, Artificial Sequence
  Description of Artificial Sequence: Synthetic oligonucleotide
uuuacccaugcagugucug

SEQ ID NO: 3270756 - RNA, 19 nt, Artificial Sequence
  Description of Artificial Sequence: Synthetic oligonucleotide
ucauucugcacugccuacc

SEQ ID NO: 3270757 - RNA, 19 nt, Artificial Sequence
  Description of Artificial Sequence: Synthetic oligonucleotide
aucucauuuaccacaugug

SEQ ID NO: 3270758 - RNA, 19 nt, Artificial Sequence
  Description of Artificial Sequence: Synthetic oligonucleotide
ucugcacugccuacccacc

SEQ ID NO: 3270759 - RNA, 19 nt, Artificial Sequence
  Description of Artificial Sequence: Synthetic oligonucleotide
accauauuuuacccaugca

SEQ ID NO: 3270760 - RNA, 19 nt, Artificial Sequence
  Description of Artificial Sequence: Synthetic oligonucleotide
uguagggcuuguugcgcag

SEQ ID NO: 3270761 - RNA, 19 nt, Artificial Sequence
  Description of Artificial Sequence: Synthetic oligonucleotide
aguauguuaucaaucucau

SEQ ID NO: 3270762 - RNA, 19 nt, Artificial Sequence
  Description of Artificial Sequence: Synthetic oligonucleotide
cagugucuggggcucaugc

SEQ ID NO: 3270763 - RNA, 19 nt, Artificial Sequence
  Description of Artificial Sequence: Synthetic oligonucleotide
uuuuacccaugcagugucu

SEQ ID NO: 3270764 - RNA, 19 nt, Artificial Sequence
  Description of Artificial Sequence: Synthetic oligonucleotide
acccaugcagugucugggg

SEQ ID NO: 3270765 - RNA, 19 nt, Artificial Sequence
  Description of Artificial Sequence: Synthetic oligonucleotide
agugucuggggcucaugca

SEQ ID NO: 3270766 - RNA, 19 nt, Artificial Sequence
  Description of Artificial Sequence: Synthetic oligonucleotide
uggggcucaugcauugccu

SEQ ID NO: 3270767 - RNA, 19 nt, Artificial Sequence
  Description of Artificial Sequence: Synthetic oligonucleotide
cuggggcucaugcauugcc

SEQ ID NO: 3270768 - RNA, 19 nt, Artificial Sequence
  Description of Artificial Sequence: Synthetic oligonucleotide
cuuguugcgcaguauguua

SEQ ID NO: 3270769 - RNA, 19 nt, Artificial Sequence
  Description of Artificial Sequence: Synthetic oligonucleotide
uuaccacaugugaugucau

SEQ ID NO: 3270770 - RNA, 19 nt, Artificial Sequence
  Description of Artificial Sequence: Synthetic oligonucleotide
ucaucuuagggaggaccug

SEQ ID NO: 3270771 - RNA, 19 nt, Artificial Sequence
  Description of Artificial Sequence: Synthetic oligonucleotide
ugccuacccaccauauuuu

SEQ ID NO: 3270772 - RNA, 19 nt, Artificial Sequence
  Description of Artificial Sequence: Synthetic oligonucleotide
uugcgcaguauguuaucaa

SEQ ID NO: 3270773 - RNA, 19 nt, Artificial Sequence
  Description of Artificial Sequence: Synthetic oligonucleotide
uguugcgcaguauguuauc

SEQ ID NO: 3270774 - RNA, 19 nt, Artificial Sequence
  Description of Artificial Sequence: Synthetic oligonucleotide
cucauuuaccacaugugau

SEQ ID NO: 3270775 - RNA, 19 nt, Artificial Sequence
  Description of Artificial Sequence: Synthetic oligonucleotide
gaagauugcauaaggucau

SEQ ID NO: 3270776 - RNA, 19 nt, Artificial Sequence
  Description of Artificial Sequence: Synthetic oligonucleotide
acccaccauauuuuaccca

SEQ ID NO: 3270777 - RNA, 19 nt, Artificial Sequence
  Description of Artificial Sequence: Synthetic oligonucleotide
uaccacaugugaugucauc

SEQ ID NO: 3270778 - RNA, 19 nt, Artificial Sequence
  Description of Artificial Sequence: Synthetic oligonucleotide
ugcauugccuuaugaucua

SEQ ID NO: 3270779 - RNA, 19 nt, Artificial Sequence
  Description of Artificial Sequence: Synthetic oligonucleotide
gucauucugcacugccuac

SEQ ID NO: 3270780 - RNA, 19 nt, Artificial Sequence
  Description of Artificial Sequence: Synthetic oligonucleotide
guugcgcaguauguuauca

SEQ ID NO: 3270781 - RNA, 19 nt, Artificial Sequence
  Description of Artificial Sequence: Synthetic oligonucleotide
ugcacugccuacccaccau

SEQ ID NO: 3270782 - RNA, 19 nt, Artificial Sequence
  Description of Artificial Sequence: Synthetic oligonucleotide
gucuggggcucaugcauug

SEQ ID NO: 3270783 - RNA, 19 nt, Artificial Sequence
  Description of Artificial Sequence: Synthetic oligonucleotide
uaaggucauucugcacugc

SEQ ID NO: 3270784 - RNA, 19 nt, Artificial Sequence
  Description of Artificial Sequence: Synthetic oligonucleotide
ugucuggggcucaugcauu

SEQ ID NO: 3270785 - RNA, 19 nt, Artificial Sequence
  Description of Artificial Sequence: Synthetic oligonucleotide
gggcuuguugcgcaguaug

SEQ ID NO: 3270786 - RNA, 19 nt, Artificial Sequence
  Description of Artificial Sequence: Synthetic oligonucleotide
cucaugcauugccuuauga

SEQ ID NO: 3270787 - RNA, 19 nt, Artificial Sequence
  Description of Artificial Sequence: Synthetic oligonucleotide
caugcagugucuggggcuc

SEQ ID NO: 3270788 - RNA, 19 nt, Artificial Sequence
  Description of Artificial Sequence: Synthetic oligonucleotide
caucuuagggaggaccuga

SEQ ID NO: 3270789 - RNA, 19 nt, Artificial Sequence
  Description of Artificial Sequence: Synthetic oligonucleotide
cuuaugaucuauagucuuu

SEQ ID NO: 3270790 - RNA, 19 nt, Artificial Sequence
  Description of Artificial Sequence: Synthetic oligonucleotide
auucugcacugccuaccca

SEQ ID NO: 3270791 - RNA, 19 nt, Artificial Sequence
  Description of Artificial Sequence: Synthetic oligonucleotide
uagggcuuguugcgcagua

SEQ ID NO: 3270792 - RNA, 19 nt, Artificial Sequence
  Description of Artificial Sequence: Synthetic oligonucleotide
aagauugcauaaggucauu

SEQ ID NO: 3270793 - RNA, 19 nt, Artificial Sequence
  Description of Artificial Sequence: Synthetic oligonucleotide
augucaucuuagggaggac

SEQ ID NO: 3270794 - RNA, 19 nt, Artificial Sequence
  Description of Artificial Sequence: Synthetic oligonucleotide
gcaguauguuaucaaucuc

SEQ ID NO: 3270795 - RNA, 19 nt, Artificial Sequence
  Description of Artificial Sequence: Synthetic oligonucleotide
cauuuaccacaugugaugu

SEQ ID NO: 3270796 - RNA, 19 nt, Artificial Sequence
  Description of Artificial Sequence: Synthetic oligonucleotide
auugauuacauucauacgg

SEQ ID NO: 3270797 - RNA, 19 nt, Artificial Sequence
  Description of Artificial Sequence: Synthetic oligonucleotide
uuuuauguaacucugaagu

SEQ ID NO: 3270798 - RNA, 19 nt, Artificial Sequence
  Description of Artificial Sequence: Synthetic oligonucleotide
aauuugaaaagguuuuacc

SEQ ID NO: 3270799 - RNA, 19 nt, Artificial Sequence
  Description of Artificial Sequence: Synthetic oligonucleotide
aaagguuuuccacauagac

SEQ ID NO: 3270800 - RNA, 19 nt, Artificial Sequence
  Description of Artificial Sequence: Synthetic oligonucleotide
auagacuacauucauaggg

SEQ ID NO: 3270801 - RNA, 19 nt, Artificial Sequence
  Description of Artificial Sequence: Synthetic oligonucleotide
uuuaaguugacuauaauua

SEQ ID NO: 3270802 - RNA, 19 nt, Artificial Sequence
  Description of Artificial Sequence: Synthetic oligonucleotide
guugaagacauucauaggg

SEQ ID NO: 3270803 - RNA, 19 nt, Artificial Sequence
  Description of Artificial Sequence: Synthetic oligonucleotide
aguauggagucuuucaugc

SEQ ID NO: 3270804 - RNA, 19 nt, Artificial Sequence
  Description of Artificial Sequence: Synthetic oligonucleotide
uauagaaaugugcauaggc

SEQ ID NO: 3270805 - RNA, 19 nt, Artificial Sequence
  Description of Artificial Sequence: Synthetic oligonucleotide
auugauugcauuuguaggg

SEQ ID NO: 3270806 - RNA, 19 nt, Artificial Sequence
  Description of Artificial Sequence: Synthetic oligonucleotide
acauagacuacauucauag

SEQ ID NO: 3270807 - RNA, 19 nt, Artificial Sequence
  Description of Artificial Sequence: Synthetic oligonucleotide
acugagugcauucauaagg

SEQ ID NO: 3270808 - RNA, 19 nt, Artificial Sequence
  Description of Artificial Sequence: Synthetic oligonucleotide
auguugaagacauucauag

SEQ ID NO: 3270809 - RNA, 19 nt, Artificial Sequence
  Description of Artificial Sequence: Synthetic oligonucleotide
uccuuuauguauuugaaga

SEQ ID NO: 3270810 - RNA, 19 nt, Artificial Sequence
  Description of Artificial Sequence: Synthetic oligonucleotide
auuugaagaguacuuugcc

SEQ ID NO: 3270811 - RNA, 19 nt, Artificial Sequence
  Description of Artificial Sequence: Synthetic oligonucleotide
gaagaugucuguuaugugc

SEQ ID NO: 3270812 - RNA, 19 nt, Artificial Sequence
  Description of Artificial Sequence: Synthetic oligonucleotide
uaugacaugucugagauga

SEQ ID NO: 3270813 - RNA, 19 nt, Artificial Sequence
  Description of Artificial Sequence: Synthetic oligonucleotide
aguguguguucuuuuaugc

SEQ ID NO: 3270814 - RNA, 19 nt, Artificial Sequence
  Description of Artificial Sequence: Synthetic oligonucleotide
auuugaaaagguuuuacca

SEQ ID NO: 3270815 - RNA, 19 nt, Artificial Sequence
  Description of Artificial Sequence: Synthetic oligonucleotide
gacuauaauuagcaaaagg

SEQ ID NO: 3270816 - RNA, 19 nt, Artificial Sequence
  Description of Artificial Sequence: Synthetic oligonucleotide
uguucuuuuaugcauuuug

SEQ ID NO: 3270817 - RNA, 19 nt, Artificial Sequence
  Description of Artificial Sequence: Synthetic oligonucleotide
uugacuauaauuagcaaaa

SEQ ID NO: 3270818 - RNA, 19 nt, Artificial Sequence
  Description of Artificial Sequence: Synthetic oligonucleotide
uuugaagaguacuuugccg

SEQ ID NO: 3270819 - RNA, 19 nt, Artificial Sequence
  Description of Artificial Sequence: Synthetic oligonucleotide
uauaauuagcaaaagguuu

SEQ ID NO: 3270820 - RNA, 19 nt, Artificial Sequence
  Description of Artificial Sequence: Synthetic oligonucleotide
uuuaugacaugucugagau

SEQ ID NO: 3270821 - RNA, 19 nt, Artificial Sequence
  Description of Artificial Sequence: Synthetic oligonucleotide
cauucauuacauuuguagg

SEQ ID NO: 3270822 - RNA, 19 nt, Artificial Sequence
  Description of Artificial Sequence: Synthetic oligonucleotide
uauuguguugugcaaaggc

SEQ ID NO: 3270823 - RNA, 19 nt, Artificial Sequence
  Description of Artificial Sequence: Synthetic oligonucleotide
uuaaguugacuauaauuag

SEQ ID NO: 3270824 - RNA, 19 nt, Artificial Sequence
  Description of Artificial Sequence: Synthetic oligonucleotide
acuauaauuagcaaaaggu

SEQ ID NO: 3270825 - RNA, 19 nt, Artificial Sequence
  Description of Artificial Sequence: Synthetic oligonucleotide
auugcuugcauucguaggg

SEQ ID NO: 3270826 - RNA, 19 nt, Artificial Sequence
  Description of Artificial Sequence: Synthetic oligonucleotide
aaguuuauuguguugugca

SEQ ID NO: 3270827 - RNA, 19 nt, Artificial Sequence
  Description of Artificial Sequence: Synthetic oligonucleotide
gguuuuaccacacugagug

SEQ ID NO: 3270828 - RNA, 19 nt, Artificial Sequence
  Description of Artificial Sequence: Synthetic oligonucleotide
aguauagaaaugugcauag

SEQ ID NO: 3270829 - RNA, 19 nt, Artificial Sequence
  Description of Artificial Sequence: Synthetic oligonucleotide
uacuuugccgagcaaaggg

SEQ ID NO: 3270830 - RNA, 19 nt, Artificial Sequence
  Description of Artificial Sequence: Synthetic oligonucleotide
aacucugaaguuuauugug

SEQ ID NO: 3270831 - RNA, 19 nt, Artificial Sequence
  Description of Artificial Sequence: Synthetic oligonucleotide
cuuuuaugcauuuugaaga

SEQ ID NO: 3270832 - RNA, 19 nt, Artificial Sequence
  Description of Artificial Sequence: Synthetic oligonucleotide
uguucuuuuauguaacucu

SEQ ID NO: 3270833 - RNA, 19 nt, Artificial Sequence
  Description of Artificial Sequence: Synthetic oligonucleotide
uuugaaaagguuuuaccac

SEQ ID NO: 3270834 - RNA, 19 nt, Artificial Sequence
  Description of Artificial Sequence: Synthetic oligonucleotide
ucuuuuaugacaugucuga

SEQ ID NO: 3270835 - RNA, 19 nt, Artificial Sequence
  Description of Artificial Sequence: Synthetic oligonucleotide
uuuuaaguugacuauaauu

SEQ ID NO: 3270836 - RNA, 19 nt, Artificial Sequence
  Description of Artificial Sequence: Synthetic oligonucleotide
uuuuaugcauuuugaagag

SEQ ID NO: 3270837 - RNA, 19 nt, Artificial Sequence
  Description of Artificial Sequence: Synthetic oligonucleotide
guaacucugaaguuuauug

SEQ ID NO: 3270838 - RNA, 19 nt, Artificial Sequence
  Description of Artificial Sequence: Synthetic oligonucleotide
uaaguugacuauaauuagc

SEQ ID NO: 3270839 - RNA, 19 nt, Artificial Sequence
  Description of Artificial Sequence: Synthetic oligonucleotide
acauugauugcauuuguag

SEQ ID NO: 3270840 - RNA, 19 nt, Artificial Sequence
  Description of Artificial Sequence: Synthetic oligonucleotide
cauugauugcauuuguagg

SEQ ID NO: 3270841 - RNA, 19 nt, Artificial Sequence
  Description of Artificial Sequence: Synthetic oligonucleotide
uugaagaguacuuugcugu

SEQ ID NO: 3270842 - RNA, 19 nt, Artificial Sequence
  Description of Artificial Sequence: Synthetic oligonucleotide
uuuauuguguugugcaaag

SEQ ID NO: 3270843 - RNA, 19 nt, Artificial Sequence
  Description of Artificial Sequence: Synthetic oligonucleotide
aauuagcaaaagguuuucc

SEQ ID NO: 3270844 - RNA, 19 nt, Artificial Sequence
  Description of Artificial Sequence: Synthetic oligonucleotide
aagaguauagaaaugugca

SEQ ID NO: 3270845 - RNA, 19 nt, Artificial Sequence
  Description of Artificial Sequence: Synthetic oligonucleotide
uuccacauagacuacauuc

SEQ ID NO: 3270846 - RNA, 19 nt, Artificial Sequence
  Description of Artificial Sequence: Synthetic oligonucleotide
aagacauucauaggguuuc

SEQ ID NO: 3270847 - RNA, 19 nt, Artificial Sequence
  Description of Artificial Sequence: Synthetic oligonucleotide
uugaagaguacuuugccga

SEQ ID NO: 3270848 - RNA, 19 nt, Artificial Sequence
  Description of Artificial Sequence: Synthetic oligonucleotide
uuucaugcguuuuaaguug

SEQ ID NO: 3270849 - RNA, 19 nt, Artificial Sequence
  Description of Artificial Sequence: Synthetic oligonucleotide
caaaagguuuuccacauag

SEQ ID NO: 3270850 - RNA, 19 nt, Artificial Sequence
  Description of Artificial Sequence: Synthetic oligonucleotide
uucuuuuaugacaugucug

SEQ ID NO: 3270851 - RNA, 19 nt, Artificial Sequence
  Description of Artificial Sequence: Synthetic oligonucleotide
agguuuuccacauagacua

SEQ ID NO: 3270852 - RNA, 19 nt, Artificial Sequence
  Description of Artificial Sequence: Synthetic oligonucleotide
gaagaguauagaaaugugc

SEQ ID NO: 3270853 - RNA, 19 nt, Artificial Sequence
  Description of Artificial Sequence: Synthetic oligonucleotide
auagaaaugugcauaggcg

SEQ ID NO: 3270854 - RNA, 19 nt, Artificial Sequence
  Description of Artificial Sequence: Synthetic oligonucleotide
uuagcaaaagguuuuccac

SEQ ID NO: 3270855 - RNA, 19 nt, Artificial Sequence
  Description of Artificial Sequence: Synthetic oligonucleotide
uucaugaugcugaagagua

SEQ ID NO: 3270856 - RNA, 19 nt, Artificial Sequence
  Description of Artificial Sequence: Synthetic oligonucleotide
uuaugcauuuugaagagua

SEQ ID NO: 3270857 - RNA, 19 nt, Artificial Sequence
  Description of Artificial Sequence: Synthetic oligonucleotide
uugaaaagguuuuaccaca

SEQ ID NO: 3270858 - RNA, 19 nt, Artificial Sequence
  Description of Artificial Sequence: Synthetic oligonucleotide
aguacuuugcuguagucga

SEQ ID NO: 3270859 - RNA, 19 nt, Artificial Sequence
  Description of Artificial Sequence: Synthetic oligonucleotide
auuagcaaaagguuuucca

SEQ ID NO: 3270860 - RNA, 19 nt, Artificial Sequence
  Description of Artificial Sequence: Synthetic oligonucleotide
uuuugaagaguacuuugcu

SEQ ID NO: 3270861 - RNA, 19 nt, Artificial Sequence
  Description of Artificial Sequence: Synthetic oligonucleotide
uagaaaugugcauaggcgu

SEQ ID NO: 3270862 - RNA, 19 nt, Artificial Sequence
  Description of Artificial Sequence: Synthetic oligonucleotide
ucuuuuauguaacucugaa

SEQ ID NO: 3270863 - RNA, 19 nt, Artificial Sequence
  Description of Artificial Sequence: Synthetic oligonucleotide
uuuuaugacaugucugaga

SEQ ID NO: 3270864 - RNA, 19 nt, Artificial Sequence
  Description of Artificial Sequence: Synthetic oligonucleotide
ugaagaguauagaaaugug

SEQ ID NO: 3270865 - RNA, 19 nt, Artificial Sequence
  Description of Artificial Sequence: Synthetic oligonucleotide
aaguugacuauaauuagca

SEQ ID NO: 3270866 - RNA, 19 nt, Artificial Sequence
  Description of Artificial Sequence: Synthetic oligonucleotide
uguguguucuuuuauguaa

SEQ ID NO: 3270867 - RNA, 19 nt, Artificial Sequence
  Description of Artificial Sequence: Synthetic oligonucleotide
uauggagucuuucaugccu

SEQ ID NO: 3270868 - RNA, 19 nt, Artificial Sequence
  Description of Artificial Sequence: Synthetic oligonucleotide
ugcugaagaguauagaaau

SEQ ID NO: 3270869 - RNA, 19 nt, Artificial Sequence
  Description of Artificial Sequence: Synthetic oligonucleotide
uuuaugcauccgaagaugu

SEQ ID NO: 3270870 - RNA, 19 nt, Artificial Sequence
  Description of Artificial Sequence: Synthetic oligonucleotide
uagacuacauucauagggu

SEQ ID NO: 3270871 - RNA, 19 nt, Artificial Sequence
  Description of Artificial Sequence: Synthetic oligonucleotide
uccacauagacuacauuca

SEQ ID NO: 3270872 - RNA, 19 nt, Artificial Sequence
  Description of Artificial Sequence: Synthetic oligonucleotide
uuuucaugaugcugaagag

SEQ ID NO: 3270873 - RNA, 19 nt, Artificial Sequence
  Description of Artificial Sequence: Synthetic oligonucleotide
ucuguuaugugcaaagguu

SEQ ID NO: 3270874 - RNA, 19 nt, Artificial Sequence
  Description of Artificial Sequence: Synthetic oligonucleotide
ugcauaggcgucaucaugu

SEQ ID NO: 3270875 - RNA, 19 nt, Artificial Sequence
  Description of Artificial Sequence: Synthetic oligonucleotide
uuucucuucaguauguguu

SEQ ID NO: 3270876 - RNA, 19 nt, Artificial Sequence
  Description of Artificial Sequence: Synthetic oligonucleotide
gaugcugaagaguauagaa

SEQ ID NO: 3270877 - RNA, 19 nt, Artificial Sequence
  Description of Artificial Sequence: Synthetic oligonucleotide
aagaguacuuugccgagca

SEQ ID NO: 3270878 - RNA, 19 nt, Artificial Sequence
  Description of Artificial Sequence: Synthetic oligonucleotide
uguugaagacauucauagg

SEQ ID NO: 3270879 - RNA, 19 nt, Artificial Sequence
  Description of Artificial Sequence: Synthetic oligonucleotide
guauuugaagaguacuuug

SEQ ID NO: 3270880 - RNA, 19 nt, Artificial Sequence
  Description of Artificial Sequence: Synthetic oligonucleotide
ugcaauuugaaaagguuuu

SEQ ID NO: 3270881 - RNA, 19 nt, Artificial Sequence
  Description of Artificial Sequence: Synthetic oligonucleotide
uugaagacauucauagggu

SEQ ID NO: 3270882 - RNA, 19 nt, Artificial Sequence
  Description of Artificial Sequence: Synthetic oligonucleotide
uuugaaggugacuguggcg

SEQ ID NO: 3270883 - RNA, 19 nt, Artificial Sequence
  Description of Artificial Sequence: Synthetic oligonucleotide
cauugauuacauucauacg

SEQ ID NO: 3270884 - RNA, 19 nt, Artificial Sequence
  Description of Artificial Sequence: Synthetic oligonucleotide
uuuuaugcauccgaagaug

SEQ ID NO: 3270885 - RNA, 19 nt, Artificial Sequence
  Description of Artificial Sequence: Synthetic oligonucleotide
uguguguguucuuuuaugu

SEQ ID NO: 3270886 - RNA, 19 nt, Artificial Sequence
  Description of Artificial Sequence: Synthetic oligonucleotide
aaagggcuuuaccacacug

SEQ ID NO: 3270887 - RNA, 19 nt, Artificial Sequence
  Description of Artificial Sequence: Synthetic oligonucleotide
uucaccacauucauuacau

SEQ ID NO: 3270888 - RNA, 19 nt, Artificial Sequence
  Description of Artificial Sequence: Synthetic oligonucleotide
uuugcuguagucgaaggcu

SEQ ID NO: 3270889 - RNA, 19 nt, Artificial Sequence
  Description of Artificial Sequence: Synthetic oligonucleotide
guugacuauaauuagcaaa

SEQ ID NO: 3270890 - RNA, 19 nt, Artificial Sequence
  Description of Artificial Sequence: Synthetic oligonucleotide
aagaguacuuugcuguagu

SEQ ID NO: 3270891 - RNA, 19 nt, Artificial Sequence
  Description of Artificial Sequence: Synthetic oligonucleotide
uauguaacucugaaguuua

SEQ ID NO: 3270892 - RNA, 19 nt, Artificial Sequence
  Description of Artificial Sequence: Synthetic oligonucleotide
gaguacuuugcuguagucg

SEQ ID NO: 3270893 - RNA, 19 nt, Artificial Sequence
  Description of Artificial Sequence: Synthetic oligonucleotide
uguguguucuuuuaugcau

SEQ ID NO: 3270894 - RNA, 19 nt, Artificial Sequence
  Description of Artificial Sequence: Synthetic oligonucleotide
uaacucugaaguuuauugu

SEQ ID NO: 3270895 - RNA, 19 nt, Artificial Sequence
  Description of Artificial Sequence: Synthetic oligonucleotide
ucauguugaagacauucau

SEQ ID NO: 3270896 - RNA, 19 nt, Artificial Sequence
  Description of Artificial Sequence: Synthetic oligonucleotide
gacaccaggaaccaaauag

SEQ ID NO: 3270897 - RNA, 19 nt, Artificial Sequence
  Description of Artificial Sequence: Synthetic oligonucleotide
auugaugacaccaggaacc

SEQ ID NO: 3270898 - RNA, 19 nt, Artificial Sequence
  Description of Artificial Sequence: Synthetic oligonucleotide
augucguagaagcacaacc

SEQ ID NO: 3270899 - RNA, 19 nt, Artificial Sequence
  Description of Artificial Sequence: Synthetic oligonucleotide
aaccaaauaguugggaugg

SEQ ID NO: 3270900 - RNA, 19 nt, Artificial Sequence
  Description of Artificial Sequence: Synthetic oligonucleotide
gaaguaauagguucccuag

SEQ ID NO: 3270901 - RNA, 19 nt, Artificial Sequence
  Description of Artificial Sequence: Synthetic oligonucleotide
accuccauccuccucaugc

SEQ ID NO: 3270902 - RNA, 19 nt, Artificial Sequence
  Description of Artificial Sequence: Synthetic oligonucleotide
aaguaauagguucccuagg

SEQ ID NO: 3270903 - RNA, 19 nt, Artificial Sequence
  Description of Artificial Sequence: Synthetic oligonucleotide
uagguuuucggucuaguca

SEQ ID NO: 3270904 - RNA, 19 nt, Artificial Sequence
  Description of Artificial Sequence: Synthetic oligonucleotide
aagggagcgugucaugucg

SEQ ID NO: 3270905 - RNA, 19 nt, Artificial Sequence
  Description of Artificial Sequence: Synthetic oligonucleotide
aaauaguugggauggaguu

SEQ ID NO: 3270906 - RNA, 19 nt, Artificial Sequence
  Description of Artificial Sequence: Synthetic oligonucleotide
aauguucgcagugugcuuc

SEQ ID NO: 3270907 - RNA, 19 nt, Artificial Sequence
  Description of Artificial Sequence: Synthetic oligonucleotide
aaccauguacaggaagucc

SEQ ID NO: 3270908 - RNA, 19 nt, Artificial Sequence
  Description of Artificial Sequence: Synthetic oligonucleotide
ugggauggaguuuugaaga

SEQ ID NO: 3270909 - RNA, 19 nt, Artificial Sequence
  Description of Artificial Sequence: Synthetic oligonucleotide
accagcuuggugcagacuc

SEQ ID NO: 3270910 - RNA, 19 nt, Artificial Sequence
  Description of Artificial Sequence: Synthetic oligonucleotide
ugugcuuccgucaggaacu

SEQ ID NO: 3270911 - RNA, 19 nt, Artificial Sequence
  Description of Artificial Sequence: Synthetic oligonucleotide
uuggccaucacugacuucc

SEQ ID NO: 3270912 - RNA, 19 nt, Artificial Sequence
  Description of Artificial Sequence: Synthetic oligonucleotide
agcacaaccugccaaaugu

SEQ ID NO: 3270913 - RNA, 19 nt, Artificial Sequence
  Description of Artificial Sequence: Synthetic oligonucleotide
gaaccaaauaguugggaug

SEQ ID NO: 3270914 - RNA, 19 nt, Artificial Sequence
  Description of Artificial Sequence: Synthetic oligonucleotide
ccaggaaccaaauaguugg

SEQ ID NO: 3270915 - RNA, 19 nt, Artificial Sequence
  Description of Artificial Sequence: Synthetic oligonucleotide
uugggauggaguuuugaag

SEQ ID NO: 3270916 - RNA, 19 nt, Artificial Sequence
  Description of Artificial Sequence: Synthetic oligonucleotide
aguaauagguucccuaggu

SEQ ID NO: 3270917 - RNA, 19 nt, Artificial Sequence
  Description of Artificial Sequence: Synthetic oligonucleotide
acaggaaguccacaugugg

SEQ ID NO: 3270918 - RNA, 19 nt, Artificial Sequence
  Description of Artificial Sequence: Synthetic oligonucleotide
acugaucagacguguaccg

SEQ ID NO: 3270919 - RNA, 19 nt, Artificial Sequence
  Description of Artificial Sequence: Synthetic oligonucleotide
ugucguagaagcacaaccu

SEQ ID NO: 3270920 - RNA, 19 nt, Artificial Sequence
  Description of Artificial Sequence: Synthetic oligonucleotide
acacugaucagacguguac

SEQ ID NO: 3270921 - RNA, 19 nt, Artificial Sequence
  Description of Artificial Sequence: Synthetic oligonucleotide
aaauggcuccaccagcuug

SEQ ID NO: 3270922 - RNA, 19 nt, Artificial Sequence
  Description of Artificial Sequence: Synthetic oligonucleotide
ucggucuagucauugauga

SEQ ID NO: 3270923 - RNA, 19 nt, Artificial Sequence
  Description of Artificial Sequence: Synthetic oligonucleotide
ucauugaugacaccaggaa

SEQ ID NO: 3270924 - RNA, 19 nt, Artificial Sequence
  Description of Artificial Sequence: Synthetic oligonucleotide
ucaaauggcuccaccagcu

SEQ ID NO: 3270925 - RNA, 19 nt, Artificial Sequence
  Description of Artificial Sequence: Synthetic oligonucleotide
uccgucaggaacuuggcca

SEQ ID NO: 3270926 - RNA, 19 nt, Artificial Sequence
  Description of Artificial Sequence: Synthetic oligonucleotide
ucguagaagcacaaccugc

SEQ ID NO: 3270927 - RNA, 19 nt, Artificial Sequence
  Description of Artificial Sequence: Synthetic oligonucleotide
agucauugaugacaccagg

SEQ ID NO: 3270928 - RNA, 19 nt, Artificial Sequence
  Description of Artificial Sequence: Synthetic oligonucleotide
ucgcagcugacacugauca

SEQ ID NO: 3270929 - RNA, 19 nt, Artificial Sequence
  Description of Artificial Sequence: Synthetic oligonucleotide
uaauagguucccuagguuu

SEQ ID NO: 3270930 - RNA, 19 nt, Artificial Sequence
  Description of Artificial Sequence: Synthetic oligonucleotide
uguacaggaaguccacaug

SEQ ID NO: 3270931 - RNA, 19 nt, Artificial Sequence
  Description of Artificial Sequence: Synthetic oligonucleotide
aauggcuccaccagcuugg

SEQ ID NO: 3270932 - RNA, 19 nt, Artificial Sequence
  Description of Artificial Sequence: Synthetic oligonucleotide
gauggaguuuugaagauuc

SEQ ID NO: 3270933 - RNA, 19 nt, Artificial Sequence
  Description of Artificial Sequence: Synthetic oligonucleotide
uagucauugaugacaccag

SEQ ID NO: 3270934 - RNA, 19 nt, Artificial Sequence
  Description of Artificial Sequence: Synthetic oligonucleotide
auguggcucaaauggcucc

SEQ ID NO: 3270935 - RNA, 19 nt, Artificial Sequence
  Description of Artificial Sequence: Synthetic oligonucleotide
ugucaggguggcaagggag

SEQ ID NO: 3270936 - RNA, 19 nt, Artificial Sequence
  Description of Artificial Sequence: Synthetic oligonucleotide
ugaucagacguguaccgug

SEQ ID NO: 3270937 - RNA, 19 nt, Artificial Sequence
  Description of Artificial Sequence: Synthetic oligonucleotide
ucacugacuucccagggga

SEQ ID NO: 3270938 - RNA, 19 nt, Artificial Sequence
  Description of Artificial Sequence: Synthetic oligonucleotide
ccacauguggcucaaaugg

SEQ ID NO: 3270939 - RNA, 19 nt, Artificial Sequence
  Description of Artificial Sequence: Synthetic oligonucleotide
caccacaggaccuccaucc

SEQ ID NO: 3270940 - RNA, 19 nt, Artificial Sequence
  Description of Artificial Sequence: Synthetic oligonucleotide
uucggucuagucauugaug

SEQ ID NO: 3270941 - RNA, 19 nt, Artificial Sequence
  Description of Artificial Sequence: Synthetic oligonucleotide
cauugaugacaccaggaac

SEQ ID NO: 3270942 - RNA, 19 nt, Artificial Sequence
  Description of Artificial Sequence: Synthetic oligonucleotide
caggaaguccacauguggc

SEQ ID NO: 3270943 - RNA, 19 nt, Artificial Sequence
  Description of Artificial Sequence: Synthetic oligonucleotide
aucacugacuucccagggg

SEQ ID NO: 3270944 - RNA, 19 nt, Artificial Sequence
  Description of Artificial Sequence: Synthetic oligonucleotide
cuuggugcagacucgcagc

SEQ ID NO: 3270945 - RNA, 19 nt, Artificial Sequence
  Description of Artificial Sequence: Synthetic oligonucleotide
aggggaaguaauagguucc

SEQ ID NO: 3270946 - RNA, 19 nt, Artificial Sequence
  Description of Artificial Sequence: Synthetic oligonucleotide
acaaccugccaaauguucg

SEQ ID NO: 3270947 - RNA, 19 nt, Artificial Sequence
  Description of Artificial Sequence: Synthetic oligonucleotide
agguuuucggucuagucau

SEQ ID NO: 3270948 - RNA, 19 nt, Artificial Sequence
  Description of Artificial Sequence: Synthetic oligonucleotide
uccauccuccucaugcucc

SEQ ID NO: 3270949 - RNA, 19 nt, Artificial Sequence
  Description of Artificial Sequence: Synthetic oligonucleotide
aggaacuuggccaucacug

SEQ ID NO: 3270950 - RNA, 19 nt, Artificial Sequence
  Description of Artificial Sequence: Synthetic oligonucleotide
ugucaugucguagaagcac

SEQ ID NO: 3270951 - RNA, 19 nt, Artificial Sequence
  Description of Artificial Sequence: Synthetic oligonucleotide
cuccucaugcuccagcucc

SEQ ID NO: 3270952 - RNA, 19 nt, Artificial Sequence
  Description of Artificial Sequence: Synthetic oligonucleotide
uccacauguggcucaaaug

SEQ ID NO: 3270953 - RNA, 19 nt, Artificial Sequence
  Description of Artificial Sequence: Synthetic oligonucleotide
cuagucauugaugacacca

SEQ ID NO: 3270954 - RNA, 19 nt, Artificial Sequence
  Description of Artificial Sequence: Synthetic oligonucleotide
uuucggucuagucauugau

SEQ ID NO: 3270955 - RNA, 19 nt, Artificial Sequence
  Description of Artificial Sequence: Synthetic oligonucleotide
cacaggaccuccauccucc

SEQ ID NO: 3270956 - RNA, 19 nt, Artificial Sequence
  Description of Artificial Sequence: Synthetic oligonucleotide
uagaagcacaaccugccaa

SEQ ID NO: 3270957 - RNA, 19 nt, Artificial Sequence
  Description of Artificial Sequence: Synthetic oligonucleotide
ucccaggggaaguaauagg

SEQ ID NO: 3270958 - RNA, 19 nt, Artificial Sequence
  Description of Artificial Sequence: Synthetic oligonucleotide
agaaccauguacaggaagu

SEQ ID NO: 3270959 - RNA, 19 nt, Artificial Sequence
  Description of Artificial Sequence: Synthetic oligonucleotide
acguguaccgugcugucag

SEQ ID NO: 3270960 - RNA, 19 nt, Artificial Sequence
  Description of Artificial Sequence: Synthetic oligonucleotide
aggaccuccauccuccuca

SEQ ID NO: 3270961 - RNA, 19 nt, Artificial Sequence
  Description of Artificial Sequence: Synthetic oligonucleotide
cucaaauggcuccaccagc

SEQ ID NO: 3270962 - RNA, 19 nt, Artificial Sequence
  Description of Artificial Sequence: Synthetic oligonucleotide
ggcuccaccagcuuggugc

SEQ ID NO: 3270963 - RNA, 19 nt, Artificial Sequence
  Description of Artificial Sequence: Synthetic oligonucleotide
acaggugagcagccgggcc

SEQ ID NO: 3270964 - RNA, 19 nt, Artificial Sequence
  Description of Artificial Sequence: Synthetic oligonucleotide
caggggaaguaauagguuc

SEQ ID NO: 3270965 - RNA, 19 nt, Artificial Sequence
  Description of Artificial Sequence: Synthetic oligonucleotide
aagcacaaccugccaaaug

SEQ ID NO: 3270966 - RNA, 19 nt, Artificial Sequence
  Description of Artificial Sequence: Synthetic oligonucleotide
uaccgugcugucagggugg

SEQ ID NO: 3270967 - RNA, 19 nt, Artificial Sequence
  Description of Artificial Sequence: Synthetic oligonucleotide
uacaggaaguccacaugug

SEQ ID NO: 3270968 - RNA, 19 nt, Artificial Sequence
  Description of Artificial Sequence: Synthetic oligonucleotide
uucccuagguuuucggucu

SEQ ID NO: 3270969 - RNA, 19 nt, Artificial Sequence
  Description of Artificial Sequence: Synthetic oligonucleotide
aggaaguccacauguggcu

SEQ ID NO: 3270970 - RNA, 19 nt, Artificial Sequence
  Description of Artificial Sequence: Synthetic oligonucleotide
uggaguuuugaagauuccu

SEQ ID NO: 3270971 - RNA, 19 nt, Artificial Sequence
  Description of Artificial Sequence: Synthetic oligonucleotide
cacauguggcucaaauggc

SEQ ID NO: 3270972 - RNA, 19 nt, Artificial Sequence
  Description of Artificial Sequence: Synthetic oligonucleotide
agaagcacaaccugccaaa

SEQ ID NO: 3270973 - RNA, 19 nt, Artificial Sequence
  Description of Artificial Sequence: Synthetic oligonucleotide
cgugucaugucguagaagc

SEQ ID NO: 3270974 - RNA, 19 nt, Artificial Sequence
  Description of Artificial Sequence: Synthetic oligonucleotide
auguucgcagugugcuucc

SEQ ID NO: 3270975 - RNA, 19 nt, Artificial Sequence
  Description of Artificial Sequence: Synthetic oligonucleotide
uucccaggggaaguaauag

SEQ ID NO: 3270976 - RNA, 19 nt, Artificial Sequence
  Description of Artificial Sequence: Synthetic oligonucleotide
gaacuuggccaucacugac

SEQ ID NO: 3270977 - RNA, 19 nt, Artificial Sequence
  Description of Artificial Sequence: Synthetic oligonucleotide
uuuucggucuagucauuga

SEQ ID NO: 3270978 - RNA, 19 nt, Artificial Sequence
  Description of Artificial Sequence: Synthetic oligonucleotide
auccuccucaugcuccagc

SEQ ID NO: 3270979 - RNA, 19 nt, Artificial Sequence
  Description of Artificial Sequence: Synthetic oligonucleotide
gucguagaagcacaaccug

SEQ ID NO: 3270980 - RNA, 19 nt, Artificial Sequence
  Description of Artificial Sequence: Synthetic oligonucleotide
caaccugccaaauguucgc

SEQ ID NO: 3270981 - RNA, 19 nt, Artificial Sequence
  Description of Artificial Sequence: Synthetic oligonucleotide
gaugacaccaggaaccaaa

SEQ ID NO: 3270982 - RNA, 19 nt, Artificial Sequence
  Description of Artificial Sequence: Synthetic oligonucleotide
auguacaggaaguccacau

SEQ ID NO: 3270983 - RNA, 19 nt, Artificial Sequence
  Description of Artificial Sequence: Synthetic oligonucleotide
caucacugacuucccaggg

SEQ ID NO: 3270984 - RNA, 19 nt, Artificial Sequence
  Description of Artificial Sequence: Synthetic oligonucleotide
cagaaccauguacaggaag

SEQ ID NO: 3270985 - RNA, 19 nt, Artificial Sequence
  Description of Artificial Sequence: Synthetic oligonucleotide
aauagguucccuagguuuu

SEQ ID NO: 3270986 - RNA, 19 nt, Artificial Sequence
  Description of Artificial Sequence: Synthetic oligonucleotide
cacacaggugagcagccgg

SEQ ID NO: 3270987 - RNA, 19 nt, Artificial Sequence
  Description of Artificial Sequence: Synthetic oligonucleotide
aauaguugggauggaguuu

SEQ ID NO: 3270988 - RNA, 19 nt, Artificial Sequence
  Description of Artificial Sequence: Synthetic oligonucleotide
cuagguuuucggucuaguc

SEQ ID NO: 3270989 - RNA, 19 nt, Artificial Sequence
  Description of Artificial Sequence: Synthetic oligonucleotide
ucagacguguaccgugcug

SEQ ID NO: 3270990 - RNA, 19 nt, Artificial Sequence
  Description of Artificial Sequence: Synthetic oligonucleotide
caggaaccaaauaguuggg

SEQ ID NO: 3270991 - RNA, 19 nt, Artificial Sequence
  Description of Artificial Sequence: Synthetic oligonucleotide
uuccgucaggaacuuggcc

SEQ ID NO: 3270992 - RNA, 19 nt, Artificial Sequence
  Description of Artificial Sequence: Synthetic oligonucleotide
gugugcuuccgucaggaac

SEQ ID NO: 3270993 - RNA, 19 nt, Artificial Sequence
  Description of Artificial Sequence: Synthetic oligonucleotide
uuggugcagacucgcagcu

SEQ ID NO: 3270994 - RNA, 19 nt, Artificial Sequence
  Description of Artificial Sequence: Synthetic oligonucleotide
cacugaucagacguguacc

SEQ ID NO: 3270995 - RNA, 19 nt, Artificial Sequence
  Description of Artificial Sequence: Synthetic oligonucleotide
guucccuagguuuucgguc

SEQ ID NO: 3270996 - RNA, 19 nt, Artificial Sequence
  Description of Artificial Sequence: Synthetic oligonucleotide
uguagagugacacuggcag

SEQ ID NO: 3270997 - RNA, 19 nt, Artificial Sequence
  Description of Artificial Sequence: Synthetic oligonucleotide
agcaacagcagcuugagcu

SEQ ID NO: 3270998 - RNA, 19 nt, Artificial Sequence
  Description of Artificial Sequence: Synthetic oligonucleotide
uccuugaccagcaacagca

SEQ ID NO: 3270999 - RNA, 19 nt, Artificial Sequence
  Description of Artificial Sequence: Synthetic oligonucleotide
ucacucagcagccuggagg

SEQ ID NO: 3271000 - RNA, 19 nt, Artificial Sequence
  Description of Artificial Sequence: Synthetic oligonucleotide
accacuagcacuuguagag

SEQ ID NO: 3271001 - RNA, 19 nt, Artificial Sequence
  Description of Artificial Sequence: Synthetic oligonucleotide
ugagcagcuggaaugacag

SEQ ID NO: 3271002 - RNA, 19 nt, Artificial Sequence
  Description of Artificial Sequence: Synthetic oligonucleotide
aucgccauuguccuugacc

SEQ ID NO: 3271003 - RNA, 19 nt, Artificial Sequence
  Description of Artificial Sequence: Synthetic oligonucleotide
agcagcuugagcuugggag

SEQ ID NO: 3271004 - RNA, 19 nt, Artificial Sequence
  Description of Artificial Sequence: Synthetic oligonucleotide
aucgcgcucacucagcagc

SEQ ID NO: 3271005 - RNA, 19 nt, Artificial Sequence
  Description of Artificial Sequence: Synthetic oligonucleotide
agcagcuggaaugacagcc

SEQ ID NO: 3271006 - RNA, 19 nt, Artificial Sequence
  Description of Artificial Sequence: Synthetic oligonucleotide
agcacuuguagagugacac

SEQ ID NO: 3271007 - RNA, 19 nt, Artificial Sequence
  Description of Artificial Sequence: Synthetic oligonucleotide
ugagcuugggagcaucgcg

SEQ ID NO: 3271008 - RNA, 19 nt, Artificial Sequence
  Description of Artificial Sequence: Synthetic oligonucleotide
auuguccuugaccagcaac

SEQ ID NO: 3271009 - RNA, 19 nt, Artificial Sequence
  Description of Artificial Sequence: Synthetic oligonucleotide
aggaggaucgccauugucc

SEQ ID NO: 3271010 - RNA, 19 nt, Artificial Sequence
  Description of Artificial Sequence: Synthetic oligonucleotide
uuguccuugaccagcaaca

SEQ ID NO: 3271011 - RNA, 19 nt, Artificial Sequence
  Description of Artificial Sequence: Synthetic oligonucleotide
agagaagccacuccaccac

SEQ ID NO: 3271012 - RNA, 19 nt, Artificial Sequence
  Description of Artificial Sequence: Synthetic oligonucleotide
uugaccagcaacagcagcu

SEQ ID NO: 3271013 - RNA, 19 nt, Artificial Sequence
  Description of Artificial Sequence: Synthetic oligonucleotide
ucgccauuguccuugacca

SEQ ID NO: 3271014 - RNA, 19 nt, Artificial Sequence
  Description of Artificial Sequence: Synthetic oligonucleotide
aagccacuccaccacuagc

SEQ ID NO: 3271015 - RNA, 19 nt, Artificial Sequence
  Description of Artificial Sequence: Synthetic oligonucleotide
ugagagaagccacuccacc

SEQ ID NO: 3271016 - RNA, 19 nt, Artificial Sequence
  Description of Artificial Sequence: Synthetic oligonucleotide
acagcccuggcucuguggc

SEQ ID NO: 3271017 - RNA, 19 nt, Artificial Sequence
  Description of Artificial Sequence: Synthetic oligonucleotide
uguggccuugagcagcugg

SEQ ID NO: 3271018 - RNA, 19 nt, Artificial Sequence
  Description of Artificial Sequence: Synthetic oligonucleotide
auugugagcccacacggug

SEQ ID NO: 3271019 - RNA, 19 nt, Artificial Sequence
  Description of Artificial Sequence: Synthetic oligonucleotide
cacuggcagaccuaggagg

SEQ ID NO: 3271020 - RNA, 19 nt, Artificial Sequence
  Description of Artificial Sequence: Synthetic oligonucleotide
ucgggcgagaggcagguag

SEQ ID NO: 3271021 - RNA, 19 nt, Artificial Sequence
  Description of Artificial Sequence: Synthetic oligonucleotide
cuuguagagugacacuggc

SEQ ID NO: 3271022 - RNA, 19 nt, Artificial Sequence
  Description of Artificial Sequence: Synthetic oligonucleotide
uugagcagcuggaaugaca

SEQ ID NO: 3271023 - RNA, 19 nt, Artificial Sequence
  Description of Artificial Sequence: Synthetic oligonucleotide
gacacuggcagaccuagga

SEQ ID NO: 3271024 - RNA, 19 nt, Artificial Sequence
  Description of Artificial Sequence: Synthetic oligonucleotide
cacuuguagagugacacug

SEQ ID NO: 3271025 - RNA, 19 nt, Artificial Sequence
  Description of Artificial Sequence: Synthetic oligonucleotide
uagagugacacuggcagac

SEQ ID NO: 3271026 - RNA, 19 nt, Artificial Sequence
  Description of Artificial Sequence: Synthetic oligonucleotide
aacagcccuggcucugugg

SEQ ID NO: 3271027 - RNA, 19 nt, Artificial Sequence
  Description of Artificial Sequence: Synthetic oligonucleotide
uuguagagugacacuggca

SEQ ID NO: 3271028 - RNA, 19 nt, Artificial Sequence
  Description of Artificial Sequence: Synthetic oligonucleotide
ggcucuguggccuugagca

SEQ ID NO: 3271029 - RNA, 19 nt, Artificial Sequence
  Description of Artificial Sequence: Synthetic oligonucleotide
cuugagcuugggagcaucg

SEQ ID NO: 3271030 - RNA, 19 nt, Artificial Sequence
  Description of Artificial Sequence: Synthetic oligonucleotide
gagagaagccacuccacca

SEQ ID NO: 3271031 - RNA, 19 nt, Artificial Sequence
  Description of Artificial Sequence: Synthetic oligonucleotide
ucagcagccuggaggugcg

SEQ ID NO: 3271032 - RNA, 19 nt, Artificial Sequence
  Description of Artificial Sequence: Synthetic oligonucleotide
caccucgccauugugagcc

SEQ ID NO: 3271033 - RNA, 19 nt, Artificial Sequence
  Description of Artificial Sequence: Synthetic oligonucleotide
ugagcccacacggugaaca

SEQ ID NO: 3271034 - RNA, 19 nt, Artificial Sequence
  Description of Artificial Sequence: Synthetic oligonucleotide
gaagccacuccaccacuag

SEQ ID NO: 3271035 - RNA, 19 nt, Artificial Sequence
  Description of Artificial Sequence: Synthetic oligonucleotide
cuugaccagcaacagcagc

SEQ ID NO: 3271036 - RNA, 19 nt, Artificial Sequence
  Description of Artificial Sequence: Synthetic oligonucleotide
acacuggcagaccuaggag

SEQ ID NO: 3271037 - RNA, 19 nt, Artificial Sequence
  Description of Artificial Sequence: Synthetic oligonucleotide
cacuagcacuuguagagug

SEQ ID NO: 3271038 - RNA, 19 nt, Artificial Sequence
  Description of Artificial Sequence: Synthetic oligonucleotide
uugugagcccacacgguga

SEQ ID NO: 3271039 - RNA, 19 nt, Artificial Sequence
  Description of Artificial Sequence: Synthetic oligonucleotide
acuuguagagugacacugg

SEQ ID NO: 3271040 - RNA, 19 nt, Artificial Sequence
  Description of Artificial Sequence: Synthetic oligonucleotide
gcgagaggcagguagggcg

SEQ ID NO: 3271041 - RNA, 19 nt, Artificial Sequence
  Description of Artificial Sequence: Synthetic oligonucleotide
ccauugugagcccacacgg

SEQ ID NO: 3271042 - RNA, 19 nt, Artificial Sequence
  Description of Artificial Sequence: Synthetic oligonucleotide
uguccuugaccagcaacag

SEQ ID NO: 3271043 - RNA, 19 nt, Artificial Sequence
  Description of Artificial Sequence: Synthetic oligonucleotide
uagggcgugagagaagcca

SEQ ID NO: 3271044 - RNA, 19 nt, Artificial Sequence
  Description of Artificial Sequence: Synthetic oligonucleotide
agagugacacuggcagacc

SEQ ID NO: 3271045 - RNA, 19 nt, Artificial Sequence
  Description of Artificial Sequence: Synthetic oligonucleotide
gccauugugagcccacacg

SEQ ID NO: 3271046 - RNA, 19 nt, Artificial Sequence
  Description of Artificial Sequence: Synthetic oligonucleotide
gagcaucgcgcucacucag

SEQ ID NO: 3271047 - RNA, 19 nt, Artificial Sequence
  Description of Artificial Sequence: Synthetic oligonucleotide
aggaucgccauuguccuug

SEQ ID NO: 3271048 - RNA, 19 nt, Artificial Sequence
  Description of Artificial Sequence: Synthetic oligonucleotide
cuagcacuuguagagugac

SEQ ID NO: 3271049 - RNA, 19 nt, Artificial Sequence
  Description of Artificial Sequence: Synthetic oligonucleotide
aacagcagcuugagcuugg

SEQ ID NO: 3271050 - RNA, 19 nt, Artificial Sequence
  Description of Artificial Sequence: Synthetic oligonucleotide
uccaccacuagcacuugua

SEQ ID NO: 3271051 - RNA, 19 nt, Artificial Sequence
  Description of Artificial Sequence: Synthetic oligonucleotide
acggugaacagcccuggcu

SEQ ID NO: 3271052 - RNA, 19 nt, Artificial Sequence
  Description of Artificial Sequence: Synthetic oligonucleotide
ucuguggccuugagcagcu

SEQ ID NO: 3271053 - RNA, 19 nt, Artificial Sequence
  Description of Artificial Sequence: Synthetic oligonucleotide
ugugagcccacacggugaa

SEQ ID NO: 3271054 - RNA, 19 nt, Artificial Sequence
  Description of Artificial Sequence: Synthetic oligonucleotide
gagcuugggagcaucgcgc

SEQ ID NO: 3271055 - RNA, 19 nt, Artificial Sequence
  Description of Artificial Sequence: Synthetic oligonucleotide
gugacacuggcagaccuag

SEQ ID NO: 3271056 - RNA, 19 nt, Artificial Sequence
  Description of Artificial Sequence: Synthetic oligonucleotide
cucagcagccuggaggugc

SEQ ID NO: 3271057 - RNA, 19 nt, Artificial Sequence
  Description of Artificial Sequence: Synthetic oligonucleotide
ugacacuggcagaccuagg

SEQ ID NO: 3271058 - RNA, 19 nt, Artificial Sequence
  Description of Artificial Sequence: Synthetic oligonucleotide
cacacggugaacagcccug

SEQ ID NO: 3271059 - RNA, 19 nt, Artificial Sequence
  Description of Artificial Sequence: Synthetic oligonucleotide
gguagggcgugagagaagc

SEQ ID NO: 3271060 - RNA, 19 nt, Artificial Sequence
  Description of Artificial Sequence: Synthetic oligonucleotide
gccuugagcagcuggaaug

SEQ ID NO: 3271061 - RNA, 19 nt, Artificial Sequence
  Description of Artificial Sequence: Synthetic oligonucleotide
gcagcuugagcuugggagc

SEQ ID NO: 3271062 - RNA, 19 nt, Artificial Sequence
  Description of Artificial Sequence: Synthetic oligonucleotide
agaccuaggaggaucgcca

SEQ ID NO: 3271063 - RNA, 19 nt, Artificial Sequence
  Description of Artificial Sequence: Synthetic oligonucleotide
uggaggugcgcaccucgcc

SEQ ID NO: 3271064 - RNA, 19 nt, Artificial Sequence
  Description of Artificial Sequence: Synthetic oligonucleotide
agggcgugagagaagccac

SEQ ID NO: 3271065 - RNA, 19 nt, Artificial Sequence
  Description of Artificial Sequence: Synthetic oligonucleotide
uaggaggaucgccauuguc

SEQ ID NO: 3271066 - RNA, 19 nt, Artificial Sequence
  Description of Artificial Sequence: Synthetic oligonucleotide
uggcucuguggccuugagc

SEQ ID NO: 3271067 - RNA, 19 nt, Artificial Sequence
  Description of Artificial Sequence: Synthetic oligonucleotide
cucuguggccuugagcagc

SEQ ID NO: 3271068 - RNA, 19 nt, Artificial Sequence
  Description of Artificial Sequence: Synthetic oligonucleotide
ggcagguagggcgugagag

SEQ ID NO: 3271069 - RNA, 19 nt, Artificial Sequence
  Description of Artificial Sequence: Synthetic oligonucleotide
cagaccuaggaggaucgcc

SEQ ID NO: 3271070 - RNA, 19 nt, Artificial Sequence
  Description of Artificial Sequence: Synthetic oligonucleotide
gagcccacacggugaacag

SEQ ID NO: 3271071 - RNA, 19 nt, Artificial Sequence
  Description of Artificial Sequence: Synthetic oligonucleotide
uagcacuuguagagugaca

SEQ ID NO: 3271072 - RNA, 19 nt, Artificial Sequence
  Description of Artificial Sequence: Synthetic oligonucleotide
uugagcuugggagcaucgc

SEQ ID NO: 3271073 - RNA, 19 nt, Artificial Sequence
  Description of Artificial Sequence: Synthetic oligonucleotide
acuggcagaccuaggagga

SEQ ID NO: 3271074 - RNA, 19 nt, Artificial Sequence
  Description of Artificial Sequence: Synthetic oligonucleotide
agccacuccaccacuagca

SEQ ID NO: 3271075 - RNA, 19 nt, Artificial Sequence
  Description of Artificial Sequence: Synthetic oligonucleotide
guccuugaccagcaacagc

SEQ ID NO: 3271076 - RNA, 19 nt, Artificial Sequence
  Description of Artificial Sequence: Synthetic oligonucleotide
gggagcaucgcgcucacuc

SEQ ID NO: 3271077 - RNA, 19 nt, Artificial Sequence
  Description of Artificial Sequence: Synthetic oligonucleotide
agcccacacggugaacagc

SEQ ID NO: 3271078 - RNA, 19 nt, Artificial Sequence
  Description of Artificial Sequence: Synthetic oligonucleotide
ucgcgcucacucagcagcc

SEQ ID NO: 3271079 - RNA, 19 nt, Artificial Sequence
  Description of Artificial Sequence: Synthetic oligonucleotide
agcuugggagcaucgcgcu

SEQ ID NO: 3271080 - RNA, 19 nt, Artificial Sequence
  Description of Artificial Sequence: Synthetic oligonucleotide
gaccagcaacagcagcuug

SEQ ID NO: 3271081 - RNA, 19 nt, Artificial Sequence
  Description of Artificial Sequence: Synthetic oligonucleotide
cagcuggaaugacagccag

SEQ ID NO: 3271082 - RNA, 19 nt, Artificial Sequence
  Description of Artificial Sequence: Synthetic oligonucleotide
acacggugaacagcccugg

SEQ ID NO: 3271083 - RNA, 19 nt, Artificial Sequence
  Description of Artificial Sequence: Synthetic oligonucleotide
guagagugacacuggcaga

SEQ ID NO: 3271084 - RNA, 19 nt, Artificial Sequence
  Description of Artificial Sequence: Synthetic oligonucleotide
agcaucgcgcucacucagc

SEQ ID NO: 3271085 - RNA, 19 nt, Artificial Sequence
  Description of Artificial Sequence: Synthetic oligonucleotide
ugcgcaccucgccauugug

SEQ ID NO: 3271086 - RNA, 19 nt, Artificial Sequence
  Description of Artificial Sequence: Synthetic oligonucleotide
cuugggagcaucgcgcuca

SEQ ID NO: 3271087 - RNA, 19 nt, Artificial Sequence
  Description of Artificial Sequence: Synthetic oligonucleotide
accagcaacagcagcuuga

SEQ ID NO: 3271088 - RNA, 19 nt, Artificial Sequence
  Description of Artificial Sequence: Synthetic oligonucleotide
acuagcacuuguagaguga

SEQ ID NO: 3271089 - RNA, 19 nt, Artificial Sequence
  Description of Artificial Sequence: Synthetic oligonucleotide
caccacuagcacuuguaga

SEQ ID NO: 3271090 - RNA, 19 nt, Artificial Sequence
  Description of Artificial Sequence: Synthetic oligonucleotide
ggcagaccuaggaggaucg

SEQ ID NO: 3271091 - RNA, 19 nt, Artificial Sequence
  Description of Artificial Sequence: Synthetic oligonucleotide
cuggaggugcgcaccucgc

SEQ ID NO: 3271092 - RNA, 19 nt, Artificial Sequence
  Description of Artificial Sequence: Synthetic oligonucleotide
uggcagaccuaggaggauc

SEQ ID NO: 3271093 - RNA, 19 nt, Artificial Sequence
  Description of Artificial Sequence: Synthetic oligonucleotide
ccuaggaggaucgccauug

SEQ ID NO: 3271094 - RNA, 19 nt, Artificial Sequence
  Description of Artificial Sequence: Synthetic oligonucleotide
gccauuguccuugaccagc

SEQ ID NO: 3271095 - RNA, 19 nt, Artificial Sequence
  Description of Artificial Sequence: Synthetic oligonucleotide
cucgccauugugagcccac

SEQ ID NO: 3271096 - RNA, 19 nt, Artificial Sequence
  Description of Artificial Sequence: Synthetic oligonucleotide
aauaaauuuccacagauuc

SEQ ID NO: 3271097 - RNA, 19 nt, Artificial Sequence
  Description of Artificial Sequence: Synthetic oligonucleotide
uuuuaauaaauuuccacag

SEQ ID NO: 3271098 - RNA, 19 nt, Artificial Sequence
  Description of Artificial Sequence: Synthetic oligonucleotide
auuccuauaagcuucuucg

SEQ ID NO: 3271099 - RNA, 19 nt, Artificial Sequence
  Description of Artificial Sequence: Synthetic oligonucleotide
uguuuguuuuaucacaugg

SEQ ID NO: 3271100 - RNA, 19 nt, Artificial Sequence
  Description of Artificial Sequence: Synthetic oligonucleotide
aaaauauucaaauuuuaau

SEQ ID NO: 3271101 - RNA, 19 nt, Artificial Sequence
  Description of Artificial Sequence: Synthetic oligonucleotide
ucugacgucaucuacagag

SEQ ID NO: 3271102 - RNA, 19 nt, Artificial Sequence
  Description of Artificial Sequence: Synthetic oligonucleotide
aaucguaucuuugauuucc

SEQ ID NO: 3271103 - RNA, 19 nt, Artificial Sequence
  Description of Artificial Sequence: Synthetic oligonucleotide
uugagaucauccuagaucc

SEQ ID NO: 3271104 - RNA, 19 nt, Artificial Sequence
  Description of Artificial Sequence: Synthetic oligonucleotide
ucaauauaugaacagccag

SEQ ID NO: 3271105 - RNA, 19 nt, Artificial Sequence
  Description of Artificial Sequence: Synthetic oligonucleotide
ucuucgaucuuuauaaaug

SEQ ID NO: 3271106 - RNA, 19 nt, Artificial Sequence
  Description of Artificial Sequence: Synthetic oligonucleotide
uuaauaaauuuccacagau

SEQ ID NO: 3271107 - RNA, 19 nt, Artificial Sequence
  Description of Artificial Sequence: Synthetic oligonucleotide
ugaaaagacucucugacgu

SEQ ID NO: 3271108 - RNA, 19 nt, Artificial Sequence
  Description of Artificial Sequence: Synthetic oligonucleotide
ucauccuagauccaggacc

SEQ ID NO: 3271109 - RNA, 19 nt, Artificial Sequence
  Description of Artificial Sequence: Synthetic oligonucleotide
guugaaaucacuaauucgc

SEQ ID NO: 3271110 - RNA, 19 nt, Artificial Sequence
  Description of Artificial Sequence: Synthetic oligonucleotide
aaugaagcgcuuauuagac

SEQ ID NO: 3271111 - RNA, 19 nt, Artificial Sequence
  Description of Artificial Sequence: Synthetic oligonucleotide
aguugaaaucacuaauucg

SEQ ID NO: 3271112 - RNA, 19 nt, Artificial Sequence
  Description of Artificial Sequence: Synthetic oligonucleotide
acgucuuugacaguuaugc

SEQ ID NO: 3271113 - RNA, 19 nt, Artificial Sequence
  Description of Artificial Sequence: Synthetic oligonucleotide
gaaaucacuaauucgcuug

SEQ ID NO: 3271114 - RNA, 19 nt, Artificial Sequence
  Description of Artificial Sequence: Synthetic oligonucleotide
ucgaucuuuauaaauguug

SEQ ID NO: 3271115 - RNA, 19 nt, Artificial Sequence
  Description of Artificial Sequence: Synthetic oligonucleotide
aaagcaauguuaccccacg

SEQ ID NO: 3271116 - RNA, 19 nt, Artificial Sequence
  Description of Artificial Sequence: Synthetic oligonucleotide
ucaaagcucaaauaaugcc

SEQ ID NO: 3271117 - RNA, 19 nt, Artificial Sequence
  Description of Artificial Sequence: Synthetic oligonucleotide
ucuuugauauuccaucacc

SEQ ID NO: 3271118 - RNA, 19 nt, Artificial Sequence
  Description of Artificial Sequence: Synthetic oligonucleotide
uaucacaugggaaagcaca

SEQ ID NO: 3271119 - RNA, 19 nt, Artificial Sequence
  Description of Artificial Sequence: Synthetic oligonucleotide
uuauaaauguugcugaauu

SEQ ID NO: 3271120 - RNA, 19 nt, Artificial Sequence
  Description of Artificial Sequence: Synthetic oligonucleotide
ucuuccuagacacuagaag

SEQ ID NO: 3271121 - RNA, 19 nt, Artificial Sequence
  Description of Artificial Sequence: Synthetic oligonucleotide
uucacguagauucagcaga

SEQ ID NO: 3271122 - RNA, 19 nt, Artificial Sequence
  Description of Artificial Sequence: Synthetic oligonucleotide
uuuaauaaauuuccacaga

SEQ ID NO: 3271123 - RNA, 19 nt, Artificial Sequence
  Description of Artificial Sequence: Synthetic oligonucleotide
uguacuguuucucucguug

SEQ ID NO: 3271124 - RNA, 19 nt, Artificial Sequence
  Description of Artificial Sequence: Synthetic oligonucleotide
gaucaauauaugaacagcc

SEQ ID NO: 3271125 - RNA, 19 nt, Artificial Sequence
  Description of Artificial Sequence: Synthetic oligonucleotide
aaacugucuguacuguuuc

SEQ ID NO: 3271126 - RNA, 19 nt, Artificial Sequence
  Description of Artificial Sequence: Synthetic oligonucleotide
aacaauggucuucccagac

SEQ ID NO: 3271127 - RNA, 19 nt, Artificial Sequence
  Description of Artificial Sequence: Synthetic oligonucleotide
ugagccaaaauauucaaau

SEQ ID NO: 3271128 - RNA, 19 nt, Artificial Sequence
  Description of Artificial Sequence: Synthetic oligonucleotide
uuagacguggucuuaaggu

SEQ ID NO: 3271129 - RNA, 19 nt, Artificial Sequence
  Description of Artificial Sequence: Synthetic oligonucleotide
auaaugccggugcugaggc

SEQ ID NO: 3271130 - RNA, 19 nt, Artificial Sequence
  Description of Artificial Sequence: Synthetic oligonucleotide
aauguugcugaauuggcau

SEQ ID NO: 3271131 - RNA, 19 nt, Artificial Sequence
  Description of Artificial Sequence: Synthetic oligonucleotide
ucaaucguaucuuugauuu

SEQ ID NO: 3271132 - RNA, 19 nt, Artificial Sequence
  Description of Artificial Sequence: Synthetic oligonucleotide
aucaauauucuguuuaggu

SEQ ID NO: 3271133 - RNA, 19 nt, Artificial Sequence
  Description of Artificial Sequence: Synthetic oligonucleotide
cuugaaacuucucacacac

SEQ ID NO: 3271134 - RNA, 19 nt, Artificial Sequence
  Description of Artificial Sequence: Synthetic oligonucleotide
uagguugugagucauggga

SEQ ID NO: 3271135 - RNA, 19 nt, Artificial Sequence
  Description of Artificial Sequence: Synthetic oligonucleotide
aauuggcaucguuggagcc

SEQ ID NO: 3271136 - RNA, 19 nt, Artificial Sequence
  Description of Artificial Sequence: Synthetic oligonucleotide
aauguuaccccacgaggag

SEQ ID NO: 3271137 - RNA, 19 nt, Artificial Sequence
  Description of Artificial Sequence: Synthetic oligonucleotide
ucaaugaagcgcuuauuag

SEQ ID NO: 3271138 - RNA, 19 nt, Artificial Sequence
  Description of Artificial Sequence: Synthetic oligonucleotide
aauaaugccggugcugagg

SEQ ID NO: 3271139 - RNA, 19 nt, Artificial Sequence
  Description of Artificial Sequence: Synthetic oligonucleotide
uauuccaucaccugcucug

SEQ ID NO: 3271140 - RNA, 19 nt, Artificial Sequence
  Description of Artificial Sequence: Synthetic oligonucleotide
acuaauucgcuuguuuagc

SEQ ID NO: 3271141 - RNA, 19 nt, Artificial Sequence
  Description of Artificial Sequence: Synthetic oligonucleotide
acagccagaaaacuucuuc

SEQ ID NO: 3271142 - RNA, 19 nt, Artificial Sequence
  Description of Artificial Sequence: Synthetic oligonucleotide
ugaagcgcuuauuagacgu

SEQ ID NO: 3271143 - RNA, 19 nt, Artificial Sequence
  Description of Artificial Sequence: Synthetic oligonucleotide
ucugaucacuucuuucugg

SEQ ID NO: 3271144 - RNA, 19 nt, Artificial Sequence
  Description of Artificial Sequence: Synthetic oligonucleotide
auuagacguggucuuaagg

SEQ ID NO: 3271145 - RNA, 19 nt, Artificial Sequence
  Description of Artificial Sequence: Synthetic oligonucleotide
augugucugguauucuucc

SEQ ID NO: 3271146 - RNA, 19 nt, Artificial Sequence
  Description of Artificial Sequence: Synthetic oligonucleotide
cuugaguuaucuuuaguuc

SEQ ID NO: 3271147 - RNA, 19 nt, Artificial Sequence
  Description of Artificial Sequence: Synthetic oligonucleotide
aaauggacuuucugccugg

SEQ ID NO: 3271148 - RNA, 19 nt, Artificial Sequence
  Description of Artificial Sequence: Synthetic oligonucleotide
augaaaagacucucugacg

SEQ ID NO: 3271149 - RNA, 19 nt, Artificial Sequence
  Description of Artificial Sequence: Synthetic oligonucleotide
uuuaucacaugggaaagca

SEQ ID NO: 3271150 - RNA, 19 nt, Artificial Sequence
  Description of Artificial Sequence: Synthetic oligonucleotide
ucucgaagcugcucaaucg

SEQ ID NO: 3271151 - RNA, 19 nt, Artificial Sequence
  Description of Artificial Sequence: Synthetic oligonucleotide
uuaugcuguuagcaaagag

SEQ ID NO: 3271152 - RNA, 19 nt, Artificial Sequence
  Description of Artificial Sequence: Synthetic oligonucleotide
uuguuuagcuuucggaugu

SEQ ID NO: 3271153 - RNA, 19 nt, Artificial Sequence
  Description of Artificial Sequence: Synthetic oligonucleotide
ugcugaauuggcaucguug

SEQ ID NO: 3271154 - RNA, 19 nt, Artificial Sequence
  Description of Artificial Sequence: Synthetic oligonucleotide
uucugcaucagaauccacu

SEQ ID NO: 3271155 - RNA, 19 nt, Artificial Sequence
  Description of Artificial Sequence: Synthetic oligonucleotide
uuugcucugccuuacgucu

SEQ ID NO: 3271156 - RNA, 19 nt, Artificial Sequence
  Description of Artificial Sequence: Synthetic oligonucleotide
agccaaaauauucaaauuu

SEQ ID NO: 3271157 - RNA, 19 nt, Artificial Sequence
  Description of Artificial Sequence: Synthetic oligonucleotide
cuaucaauauucuguuuag

SEQ ID NO: 3271158 - RNA, 19 nt, Artificial Sequence
  Description of Artificial Sequence: Synthetic oligonucleotide
aaaucacuaauucgcuugu

SEQ ID NO: 3271159 - RNA, 19 nt, Artificial Sequence
  Description of Artificial Sequence: Synthetic oligonucleotide
uguugcugaauuggcaucg

SEQ ID NO: 3271160 - RNA, 19 nt, Artificial Sequence
  Description of Artificial Sequence: Synthetic oligonucleotide
cuacagagcauccuucacg

SEQ ID NO: 3271161 - RNA, 19 nt, Artificial Sequence
  Description of Artificial Sequence: Synthetic oligonucleotide
uuuagaaagccugucuuga

SEQ ID NO: 3271162 - RNA, 19 nt, Artificial Sequence
  Description of Artificial Sequence: Synthetic oligonucleotide
ucaauauucuguuuagguu

SEQ ID NO: 3271163 - RNA, 19 nt, Artificial Sequence
  Description of Artificial Sequence: Synthetic oligonucleotide
gagauugucaaagucuccc

SEQ ID NO: 3271164 - RNA, 19 nt, Artificial Sequence
  Description of Artificial Sequence: Synthetic oligonucleotide
cuugcuaaugucaguuggg

SEQ ID NO: 3271165 - RNA, 19 nt, Artificial Sequence
  Description of Artificial Sequence: Synthetic oligonucleotide
uuucugccugguuagaaug

SEQ ID NO: 3271166 - RNA, 19 nt, Artificial Sequence
  Description of Artificial Sequence: Synthetic oligonucleotide
ucauacauuuucuggacuc

SEQ ID NO: 3271167 - RNA, 19 nt, Artificial Sequence
  Description of Artificial Sequence: Synthetic oligonucleotide
acucugaucacuucuuucu

SEQ ID NO: 3271168 - RNA, 19 nt, Artificial Sequence
  Description of Artificial Sequence: Synthetic oligonucleotide
guauucuucccaacaaugg

SEQ ID NO: 3271169 - RNA, 19 nt, Artificial Sequence
  Description of Artificial Sequence: Synthetic oligonucleotide
agcaauguuaccccacgag

SEQ ID NO: 3271170 - RNA, 19 nt, Artificial Sequence
  Description of Artificial Sequence: Synthetic oligonucleotide
auaauacucuuugaucuuc

SEQ ID NO: 3271171 - RNA, 19 nt, Artificial Sequence
  Description of Artificial Sequence: Synthetic oligonucleotide
uuguuuuaucacaugggaa

SEQ ID NO: 3271172 - RNA, 19 nt, Artificial Sequence
  Description of Artificial Sequence: Synthetic oligonucleotide
ucuggaugauacaccuugg

SEQ ID NO: 3271173 - RNA, 19 nt, Artificial Sequence
  Description of Artificial Sequence: Synthetic oligonucleotide
uacagagcauccuucacgu

SEQ ID NO: 3271174 - RNA, 19 nt, Artificial Sequence
  Description of Artificial Sequence: Synthetic oligonucleotide
uucgugcacaucauguuca

SEQ ID NO: 3271175 - RNA, 19 nt, Artificial Sequence
  Description of Artificial Sequence: Synthetic oligonucleotide
cacgaggagucaaugaagc

SEQ ID NO: 3271176 - RNA, 19 nt, Artificial Sequence
  Description of Artificial Sequence: Synthetic oligonucleotide
aucaaugugucugguauuc

SEQ ID NO: 3271177 - RNA, 19 nt, Artificial Sequence
  Description of Artificial Sequence: Synthetic oligonucleotide
aaaacuucuucagaggcuu

SEQ ID NO: 3271178 - RNA, 19 nt, Artificial Sequence
  Description of Artificial Sequence: Synthetic oligonucleotide
ugucccaaagcccacgccu

SEQ ID NO: 3271179 - RNA, 19 nt, Artificial Sequence
  Description of Artificial Sequence: Synthetic oligonucleotide
caaaauauucaaauuuuaa

SEQ ID NO: 3271180 - RNA, 19 nt, Artificial Sequence
  Description of Artificial Sequence: Synthetic oligonucleotide
uccacucuggcugauaccc

SEQ ID NO: 3271181 - RNA, 19 nt, Artificial Sequence
  Description of Artificial Sequence: Synthetic oligonucleotide
uucugccugguuagaaugg

SEQ ID NO: 3271182 - RNA, 19 nt, Artificial Sequence
  Description of Artificial Sequence: Synthetic oligonucleotide
ugggaaagcacauuccuau

SEQ ID NO: 3271183 - RNA, 19 nt, Artificial Sequence
  Description of Artificial Sequence: Synthetic oligonucleotide
gcugaauuggcaucguugg

SEQ ID NO: 3271184 - RNA, 19 nt, Artificial Sequence
  Description of Artificial Sequence: Synthetic oligonucleotide
ugcucaaucguaucuuuga

SEQ ID NO: 3271185 - RNA, 19 nt, Artificial Sequence
  Description of Artificial Sequence: Synthetic oligonucleotide
cacuaauucgcuuguuuag

SEQ ID NO: 3271186 - RNA, 19 nt, Artificial Sequence
  Description of Artificial Sequence: Synthetic oligonucleotide
uaauaaauuuccacagauu

SEQ ID NO: 3271187 - RNA, 19 nt, Artificial Sequence
  Description of Artificial Sequence: Synthetic oligonucleotide
gucuguacuguuucucucg

SEQ ID NO: 3271188 - RNA, 19 nt, Artificial Sequence
  Description of Artificial Sequence: Synthetic oligonucleotide
ucuucuucuucucuucuuc

SEQ ID NO: 3271189 - RNA, 19 nt, Artificial Sequence
  Description of Artificial Sequence: Synthetic oligonucleotide
aucaaguugaaaucacuaa

SEQ ID NO: 3271190 - RNA, 19 nt, Artificial Sequence
  Description of Artificial Sequence: Synthetic oligonucleotide
uuagcuuucggauguuuuc

SEQ ID NO: 3271191 - RNA, 19 nt, Artificial Sequence
  Description of Artificial Sequence: Synthetic oligonucleotide
aaauaaugccggugcugag

SEQ ID NO: 3271192 - RNA, 19 nt, Artificial Sequence
  Description of Artificial Sequence: Synthetic oligonucleotide
aaggucugcgccaucuucg

SEQ ID NO: 3271193 - RNA, 19 nt, Artificial Sequence
  Description of Artificial Sequence: Synthetic oligonucleotide
ucugucuuugauauuccau

SEQ ID NO: 3271194 - RNA, 19 nt, Artificial Sequence
  Description of Artificial Sequence: Synthetic oligonucleotide
ucuugaaacuucucacaca

SEQ ID NO: 3271195 - RNA, 19 nt, Artificial Sequence
  Description of Artificial Sequence: Synthetic oligonucleotide
aagcgcuuauuagacgugg

SEQ ID NO: 3271196 - RNA, 19 nt, Artificial Sequence
  Description of Artificial Sequence: Synthetic oligonucleotide
aacuuucaaauucugagcc

SEQ ID NO: 3271197 - RNA, 19 nt, Artificial Sequence
  Description of Artificial Sequence: Synthetic oligonucleotide
acaauuauuauuuauuggg

SEQ ID NO: 3271198 - RNA, 19 nt, Artificial Sequence
  Description of Artificial Sequence: Synthetic oligonucleotide
auuuaaaacauuucagugc

SEQ ID NO: 3271199 - RNA, 19 nt, Artificial Sequence
  Description of Artificial Sequence: Synthetic oligonucleotide
uguauuuguaacuauauga

SEQ ID NO: 3271200 - RNA, 19 nt, Artificial Sequence
  Description of Artificial Sequence: Synthetic oligonucleotide
uuuaaaacauuucagugca

SEQ ID NO: 3271201 - RNA, 19 nt, Artificial Sequence
  Description of Artificial Sequence: Synthetic oligonucleotide
auuaauacugcaaagacuc

SEQ ID NO: 3271202 - RNA, 19 nt, Artificial Sequence
  Description of Artificial Sequence: Synthetic oligonucleotide
auuuguaacuauaugaacc

SEQ ID NO: 3271203 - RNA, 19 nt, Artificial Sequence
  Description of Artificial Sequence: Synthetic oligonucleotide
auaacuuucaaauucugag

SEQ ID NO: 3271204 - RNA, 19 nt, Artificial Sequence
  Description of Artificial Sequence: Synthetic oligonucleotide
auauuaauacugcaaagac

SEQ ID NO: 3271205 - RNA, 19 nt, Artificial Sequence
  Description of Artificial Sequence: Synthetic oligonucleotide
aaauuuuaaacauguaaga

SEQ ID NO: 3271206 - RNA, 19 nt, Artificial Sequence
  Description of Artificial Sequence: Synthetic oligonucleotide
uguaccuuaaauaauuaca

SEQ ID NO: 3271207 - RNA, 19 nt, Artificial Sequence
  Description of Artificial Sequence: Synthetic oligonucleotide
uuuugucccacacucaugg

SEQ ID NO: 3271208 - RNA, 19 nt, Artificial Sequence
  Description of Artificial Sequence: Synthetic oligonucleotide
acugcaaagacucauagcu

SEQ ID NO: 3271209 - RNA, 19 nt, Artificial Sequence
  Description of Artificial Sequence: Synthetic oligonucleotide
uauacuguggccgagaagc

SEQ ID NO: 3271210 - RNA, 19 nt, Artificial Sequence
  Description of Artificial Sequence: Synthetic oligonucleotide
cuaauuuaaaacauuucag

SEQ ID NO: 3271211 - RNA, 19 nt, Artificial Sequence
  Description of Artificial Sequence: Synthetic oligonucleotide
auuaauuuccuauaaacau

SEQ ID NO: 3271212 - RNA, 19 nt, Artificial Sequence
  Description of Artificial Sequence: Synthetic oligonucleotide
aaaagaagugcccugggug

SEQ ID NO: 3271213 - RNA, 19 nt, Artificial Sequence
  Description of Artificial Sequence: Synthetic oligonucleotide
ugucaaagcagcaauaacu

SEQ ID NO: 3271214 - RNA, 19 nt, Artificial Sequence
  Description of Artificial Sequence: Synthetic oligonucleotide
augaaugucccucaaugcc

SEQ ID NO: 3271215 - RNA, 19 nt, Artificial Sequence
  Description of Artificial Sequence: Synthetic oligonucleotide
ucgaaugccacauucacag

SEQ ID NO: 3271216 - RNA, 19 nt, Artificial Sequence
  Description of Artificial Sequence: Synthetic oligonucleotide
uaauuacauauuaauacug

SEQ ID NO: 3271217 - RNA, 19 nt, Artificial Sequence
  Description of Artificial Sequence: Synthetic oligonucleotide
auuacuauaggacugugga

SEQ ID NO: 3271218 - RNA, 19 nt, Artificial Sequence
  Description of Artificial Sequence: Synthetic oligonucleotide
uaauugaagauguauaguc

SEQ ID NO: 3271219 - RNA, 19 nt, Artificial Sequence
  Description of Artificial Sequence: Synthetic oligonucleotide
aguauuucgagauuugaug

SEQ ID NO: 3271220 - RNA, 19 nt, Artificial Sequence
  Description of Artificial Sequence: Synthetic oligonucleotide
uauacaugguauuucaaca

SEQ ID NO: 3271221 - RNA, 19 nt, Artificial Sequence
  Description of Artificial Sequence: Synthetic oligonucleotide
ucagaauuaaugaguauca

SEQ ID NO: 3271222 - RNA, 19 nt, Artificial Sequence
  Description of Artificial Sequence: Synthetic oligonucleotide
aauuuugguaagugaacag

SEQ ID NO: 3271223 - RNA, 19 nt, Artificial Sequence
  Description of Artificial Sequence: Synthetic oligonucleotide
aaagacucauagcuaaaag

SEQ ID NO: 3271224 - RNA, 19 nt, Artificial Sequence
  Description of Artificial Sequence: Synthetic oligonucleotide
ggaauuaagaaagaaauag

SEQ ID NO: 3271225 - RNA, 19 nt, Artificial Sequence
  Description of Artificial Sequence: Synthetic oligonucleotide
aacauacauacacagaaau

SEQ ID NO: 3271226 - RNA, 19 nt, Artificial Sequence
  Description of Artificial Sequence: Synthetic oligonucleotide
uuuguaacuauaugaacca

SEQ ID NO: 3271227 - RNA, 19 nt, Artificial Sequence
  Description of Artificial Sequence: Synthetic oligonucleotide
aagacucauagcuaaaaga

SEQ ID NO: 3271228 - RNA, 19 nt, Artificial Sequence
  Description of Artificial Sequence: Synthetic oligonucleotide
uugaagaugcuuuuacccg

SEQ ID NO: 3271229 - RNA, 19 nt, Artificial Sequence
  Description of Artificial Sequence: Synthetic oligonucleotide
ugguauuucaacaguaagc

SEQ ID NO: 3271230 - RNA, 19 nt, Artificial Sequence
  Description of Artificial Sequence: Synthetic oligonucleotide
uaagcacuaaagaaaaugu

SEQ ID NO: 3271231 - RNA, 19 nt, Artificial Sequence
  Description of Artificial Sequence: Synthetic oligonucleotide
ugaaguuuguuucccaaag

SEQ ID NO: 3271232 - RNA, 19 nt, Artificial Sequence
  Description of Artificial Sequence: Synthetic oligonucleotide
aacauguaagauuuuacaa

SEQ ID NO: 3271233 - RNA, 19 nt, Artificial Sequence
  Description of Artificial Sequence: Synthetic oligonucleotide
cauagcuaaaagaagugcc

SEQ ID NO: 3271234 - RNA, 19 nt, Artificial Sequence
  Description of Artificial Sequence: Synthetic oligonucleotide
aagauguauagucuccauc

SEQ ID NO: 3271235 - RNA, 19 nt, Artificial Sequence
  Description of Artificial Sequence: Synthetic oligonucleotide
ugaaccacgaggaauuaag

SEQ ID NO: 3271236 - RNA, 19 nt, Artificial Sequence
  Description of Artificial Sequence: Synthetic oligonucleotide
gaugcuuuuacccgaaggc

SEQ ID NO: 3271237 - RNA, 19 nt, Artificial Sequence
  Description of Artificial Sequence: Synthetic oligonucleotide
ugagaaggagauaaggucu

SEQ ID NO: 3271238 - RNA, 19 nt, Artificial Sequence
  Description of Artificial Sequence: Synthetic oligonucleotide
uauuaauacugcaaagacu

SEQ ID NO: 3271239 - RNA, 19 nt, Artificial Sequence
  Description of Artificial Sequence: Synthetic oligonucleotide
uuaugagaaggagauaagg

SEQ ID NO: 3271240 - RNA, 19 nt, Artificial Sequence
  Description of Artificial Sequence: Synthetic oligonucleotide
uaauauacaugguauuuca

SEQ ID NO: 3271241 - RNA, 19 nt, Artificial Sequence
  Description of Artificial Sequence: Synthetic oligonucleotide
aauuuuaaacauguaagau

SEQ ID NO: 3271242 - RNA, 19 nt, Artificial Sequence
  Description of Artificial Sequence: Synthetic oligonucleotide
acagaaauaaaauuuuaaa

SEQ ID NO: 3271243 - RNA, 19 nt, Artificial Sequence
  Description of Artificial Sequence: Synthetic oligonucleotide
aauguuuccaccauuaauu

SEQ ID NO: 3271244 - RNA, 19 nt, Artificial Sequence
  Description of Artificial Sequence: Synthetic oligonucleotide
uguuaauugaagaugcuuu

SEQ ID NO: 3271245 - RNA, 19 nt, Artificial Sequence
  Description of Artificial Sequence: Synthetic oligonucleotide
agaugaaugucccucaaug

SEQ ID NO: 3271246 - RNA, 19 nt, Artificial Sequence
  Description of Artificial Sequence: Synthetic oligonucleotide
uaagugaacagaugaaugu

SEQ ID NO: 3271247 - RNA, 19 nt, Artificial Sequence
  Description of Artificial Sequence: Synthetic oligonucleotide
ucuuuuaagaugcauuaau

SEQ ID NO: 3271248 - RNA, 19 nt, Artificial Sequence
  Description of Artificial Sequence: Synthetic oligonucleotide
agauucuguucacagaauc

SEQ ID NO: 3271249 - RNA, 19 nt, Artificial Sequence
  Description of Artificial Sequence: Synthetic oligonucleotide
uuugauguuagcuccugcc

SEQ ID NO: 3271250 - RNA, 19 nt, Artificial Sequence
  Description of Artificial Sequence: Synthetic oligonucleotide
uaauugaagaugcuuuuac

SEQ ID NO: 3271251 - RNA, 19 nt, Artificial Sequence
  Description of Artificial Sequence: Synthetic oligonucleotide
gaauuaagaaagaaauagc

SEQ ID NO: 3271252 - RNA, 19 nt, Artificial Sequence
  Description of Artificial Sequence: Synthetic oligonucleotide
agaauuaaugaguaucaca

SEQ ID NO: 3271253 - RNA, 19 nt, Artificial Sequence
  Description of Artificial Sequence: Synthetic oligonucleotide
gugaaagugaggaugaucc

SEQ ID NO: 3271254 - RNA, 19 nt, Artificial Sequence
  Description of Artificial Sequence: Synthetic oligonucleotide
uaacuuucaaauucugagc

SEQ ID NO: 3271255 - RNA, 19 nt, Artificial Sequence
  Description of Artificial Sequence: Synthetic oligonucleotide
caaauucugagccuggccc

SEQ ID NO: 3271256 - RNA, 19 nt, Artificial Sequence
  Description of Artificial Sequence: Synthetic oligonucleotide
auagcuaaaagaagugccc

SEQ ID NO: 3271257 - RNA, 19 nt, Artificial Sequence
  Description of Artificial Sequence: Synthetic oligonucleotide
ugguaaacacaccugacac

SEQ ID NO: 3271258 - RNA, 19 nt, Artificial Sequence
  Description of Artificial Sequence: Synthetic oligonucleotide
acaccuacaacaguuuugc

SEQ ID NO: 3271259 - RNA, 19 nt, Artificial Sequence
  Description of Artificial Sequence: Synthetic oligonucleotide
aacuagacauucuccaaug

SEQ ID NO: 3271260 - RNA, 19 nt, Artificial Sequence
  Description of Artificial Sequence: Synthetic oligonucleotide
aaagaagugcccugggugu

SEQ ID NO: 3271261 - RNA, 19 nt, Artificial Sequence
  Description of Artificial Sequence: Synthetic oligonucleotide
uuucuuuuaagaugcauua

SEQ ID NO: 3271262 - RNA, 19 nt, Artificial Sequence
  Description of Artificial Sequence: Synthetic oligonucleotide
aaauaauuacauauuaaua

SEQ ID NO: 3271263 - RNA, 19 nt, Artificial Sequence
  Description of Artificial Sequence: Synthetic oligonucleotide
acaccacuaauuuaaaaca

SEQ ID NO: 3271264 - RNA, 19 nt, Artificial Sequence
  Description of Artificial Sequence: Synthetic oligonucleotide
ugcuauugcuuuaugagaa

SEQ ID NO: 3271265 - RNA, 19 nt, Artificial Sequence
  Description of Artificial Sequence: Synthetic oligonucleotide
ccuauaaacauacauacac

SEQ ID NO: 3271266 - RNA, 19 nt, Artificial Sequence
  Description of Artificial Sequence: Synthetic oligonucleotide
cuugagauucuguucacag

SEQ ID NO: 3271267 - RNA, 19 nt, Artificial Sequence
  Description of Artificial Sequence: Synthetic oligonucleotide
uuuaugagaaggagauaag

SEQ ID NO: 3271268 - RNA, 19 nt, Artificial Sequence
  Description of Artificial Sequence: Synthetic oligonucleotide
aaauagcuuggcuugcaug

SEQ ID NO: 3271269 - RNA, 19 nt, Artificial Sequence
  Description of Artificial Sequence: Synthetic oligonucleotide
uuuguuucccaaagaacug

SEQ ID NO: 3271270 - RNA, 19 nt, Artificial Sequence
  Description of Artificial Sequence: Synthetic oligonucleotide
aaacacaccugacacagaa

SEQ ID NO: 3271271 - RNA, 19 nt, Artificial Sequence
  Description of Artificial Sequence: Synthetic oligonucleotide
uagacauucuccaauguau

SEQ ID NO: 3271272 - RNA, 19 nt, Artificial Sequence
  Description of Artificial Sequence: Synthetic oligonucleotide
uauuuguaacuauaugaac

SEQ ID NO: 3271273 - RNA, 19 nt, Artificial Sequence
  Description of Artificial Sequence: Synthetic oligonucleotide
caugcucagaauuaaugag

SEQ ID NO: 3271274 - RNA, 19 nt, Artificial Sequence
  Description of Artificial Sequence: Synthetic oligonucleotide
guaagcacuaaagaaaaug

SEQ ID NO: 3271275 - RNA, 19 nt, Artificial Sequence
  Description of Artificial Sequence: Synthetic oligonucleotide
uauagucuccaucuggccu

SEQ ID NO: 3271276 - RNA, 19 nt, Artificial Sequence
  Description of Artificial Sequence: Synthetic oligonucleotide
uuuugguaagugaacagau

SEQ ID NO: 3271277 - RNA, 19 nt, Artificial Sequence
  Description of Artificial Sequence: Synthetic oligonucleotide
agaugcuuuuacccgaagg

SEQ ID NO: 3271278 - RNA, 19 nt, Artificial Sequence
  Description of Artificial Sequence: Synthetic oligonucleotide
auggcuuauacuguggccg

SEQ ID NO: 3271279 - RNA, 19 nt, Artificial Sequence
  Description of Artificial Sequence: Synthetic oligonucleotide
uucacagcagaacuuugcc

SEQ ID NO: 3271280 - RNA, 19 nt, Artificial Sequence
  Description of Artificial Sequence: Synthetic oligonucleotide
uuugcuaguaguacuuggu

SEQ ID NO: 3271281 - RNA, 19 nt, Artificial Sequence
  Description of Artificial Sequence: Synthetic oligonucleotide
cauucaacaggguauuuug

SEQ ID NO: 3271282 - RNA, 19 nt, Artificial Sequence
  Description of Artificial Sequence: Synthetic oligonucleotide
aagugaggaugauccaaac

SEQ ID NO: 3271283 - RNA, 19 nt, Artificial Sequence
  Description of Artificial Sequence: Synthetic oligonucleotide
aaaacuagacauucuccaa

SEQ ID NO: 3271284 - RNA, 19 nt, Artificial Sequence
  Description of Artificial Sequence: Synthetic oligonucleotide
ggaugauccaaacaacugg

SEQ ID NO: 3271285 - RNA, 19 nt, Artificial Sequence
  Description of Artificial Sequence: Synthetic oligonucleotide
aauaacuuucaaauucuga

SEQ ID NO: 3271286 - RNA, 19 nt, Artificial Sequence
  Description of Artificial Sequence: Synthetic oligonucleotide
agaacuuugcccauucaac

SEQ ID NO: 3271287 - RNA, 19 nt, Artificial Sequence
  Description of Artificial Sequence: Synthetic oligonucleotide
ugauccaaacaacuggagu

SEQ ID NO: 3271288 - RNA, 19 nt, Artificial Sequence
  Description of Artificial Sequence: Synthetic oligonucleotide
uaauguuuccaccauuaau

SEQ ID NO: 3271289 - RNA, 19 nt, Artificial Sequence
  Description of Artificial Sequence: Synthetic oligonucleotide
auuugauguuagcuccugc

SEQ ID NO: 3271290 - RNA, 19 nt, Artificial Sequence
  Description of Artificial Sequence: Synthetic oligonucleotide
uguaguauuucgagauuug

SEQ ID NO: 3271291 - RNA, 19 nt, Artificial Sequence
  Description of Artificial Sequence: Synthetic oligonucleotide
agaauuuugguaagugaac

SEQ ID NO: 3271292 - RNA, 19 nt, Artificial Sequence
  Description of Artificial Sequence: Synthetic oligonucleotide
aagcggagauggcuuauac

SEQ ID NO: 3271293 - RNA, 19 nt, Artificial Sequence
  Description of Artificial Sequence: Synthetic oligonucleotide
aauuaaugaguaucacaau

SEQ ID NO: 3271294 - RNA, 19 nt, Artificial Sequence
  Description of Artificial Sequence: Synthetic oligonucleotide
cuuaaauaauuacauauua

SEQ ID NO: 3271295 - RNA, 19 nt, Artificial Sequence
  Description of Artificial Sequence: Synthetic oligonucleotide
acuauaugaaccacgagga

SEQ ID NO: 3271296 - RNA, 19 nt, Artificial Sequence
  Description of Artificial Sequence: Synthetic oligonucleotide
aauguaaaugcuuuuagug

SEQ ID NO: 3271297 - RNA, 19 nt, Artificial Sequence
  Description of Artificial Sequence: Synthetic oligonucleotide
agugauauggaucaucacc

SEQ ID NO: 3271298 - RNA, 19 nt, Artificial Sequence
  Description of Artificial Sequence: Synthetic oligonucleotide
uuucauaugauucacggca

SEQ ID NO: 3271299 - RNA, 19 nt, Artificial Sequence
  Description of Artificial Sequence: Synthetic oligonucleotide
aaugcuuuuagugauguag

SEQ ID NO: 3271300 - RNA, 19 nt, Artificial Sequence
  Description of Artificial Sequence: Synthetic oligonucleotide
agugauguaggccaccucc

SEQ ID NO: 3271301 - RNA, 19 nt, Artificial Sequence
  Description of Artificial Sequence: Synthetic oligonucleotide
aauugagauggauauaugu

SEQ ID NO: 3271302 - RNA, 19 nt, Artificial Sequence
  Description of Artificial Sequence: Synthetic oligonucleotide
uauuguauagaugagcucc

SEQ ID NO: 3271303 - RNA, 19 nt, Artificial Sequence
  Description of Artificial Sequence: Synthetic oligonucleotide
acuuucauaugauucacgg

SEQ ID NO: 3271304 - RNA, 19 nt, Artificial Sequence
  Description of Artificial Sequence: Synthetic oligonucleotide
uuccuugacaaccaaaugc

SEQ ID NO: 3271305 - RNA, 19 nt, Artificial Sequence
  Description of Artificial Sequence: Synthetic oligonucleotide
auccaggaaauguaaaugc

SEQ ID NO: 3271306 - RNA, 19 nt, Artificial Sequence
  Description of Artificial Sequence: Synthetic oligonucleotide
uauguguugauuugcagag

SEQ ID NO: 3271307 - RNA, 19 nt, Artificial Sequence
  Description of Artificial Sequence: Synthetic oligonucleotide
ugaaggagaaacacggagg

SEQ ID NO: 3271308 - RNA, 19 nt, Artificial Sequence
  Description of Artificial Sequence: Synthetic oligonucleotide
gaaggagaaacacggaggg

SEQ ID NO: 3271309 - RNA, 19 nt, Artificial Sequence
  Description of Artificial Sequence: Synthetic oligonucleotide
gaaauguaaaugcuuuuag

SEQ ID NO: 3271310 - RNA, 19 nt, Artificial Sequence
  Description of Artificial Sequence: Synthetic oligonucleotide
aaauguaaaugcuuuuagu

SEQ ID NO: 3271311 - RNA, 19 nt, Artificial Sequence
  Description of Artificial Sequence: Synthetic oligonucleotide
uaaggugccuccaugcugg

SEQ ID NO: 3271312 - RNA, 19 nt, Artificial Sequence
  Description of Artificial Sequence: Synthetic oligonucleotide
uccuugacaaccaaaugcc

SEQ ID NO: 3271313 - RNA, 19 nt, Artificial Sequence
  Description of Artificial Sequence: Synthetic oligonucleotide
uguugauuugcagagacug

SEQ ID NO: 3271314 - RNA, 19 nt, Artificial Sequence
  Description of Artificial Sequence: Synthetic oligonucleotide
aggagcuucuuuuggaagc

SEQ ID NO: 3271315 - RNA, 19 nt, Artificial Sequence
  Description of Artificial Sequence: Synthetic oligonucleotide
uugacaaccaaaugccggg

SEQ ID NO: 3271316 - RNA, 19 nt, Artificial Sequence
  Description of Artificial Sequence: Synthetic oligonucleotide
uucuuuuggaagcugguca

SEQ ID NO: 3271317 - RNA, 19 nt, Artificial Sequence
  Description of Artificial Sequence: Synthetic oligonucleotide
uugagauggauauaugugu

SEQ ID NO: 3271318 - RNA, 19 nt, Artificial Sequence
  Description of Artificial Sequence: Synthetic oligonucleotide
cuugacaaccaaaugccgg

SEQ ID NO: 3271319 - RNA, 19 nt, Artificial Sequence
  Description of Artificial Sequence: Synthetic oligonucleotide
agcaaauugagauggauau

SEQ ID NO: 3271320 - RNA, 19 nt, Artificial Sequence
  Description of Artificial Sequence: Synthetic oligonucleotide
uguaaaugcuuuuagugau

SEQ ID NO: 3271321 - RNA, 19 nt, Artificial Sequence
  Description of Artificial Sequence: Synthetic oligonucleotide
acuggagugauauggauca

SEQ ID NO: 3271322 - RNA, 19 nt, Artificial Sequence
  Description of Artificial Sequence: Synthetic oligonucleotide
uguguugauuugcagagac

SEQ ID NO: 3271323 - RNA, 19 nt, Artificial Sequence
  Description of Artificial Sequence: Synthetic oligonucleotide
uguuauuguauagaugagc

SEQ ID NO: 3271324 - RNA, 19 nt, Artificial Sequence
  Description of Artificial Sequence: Synthetic oligonucleotide
aucuacuggagugauaugg

SEQ ID NO: 3271325 - RNA, 19 nt, Artificial Sequence
  Description of Artificial Sequence: Synthetic oligonucleotide
ugugauuccguauccagga

SEQ ID NO: 3271326 - RNA, 19 nt, Artificial Sequence
  Description of Artificial Sequence: Synthetic oligonucleotide
auguaaaugcuuuuaguga

SEQ ID NO: 3271327 - RNA, 19 nt, Artificial Sequence
  Description of Artificial Sequence: Synthetic oligonucleotide
cuuuuagugauguaggcca

SEQ ID NO: 3271328 - RNA, 19 nt, Artificial Sequence
  Description of Artificial Sequence: Synthetic oligonucleotide
uuugcagagacuguggcug

SEQ ID NO: 3271329 - RNA, 19 nt, Artificial Sequence
  Description of Artificial Sequence: Synthetic oligonucleotide
auauguguugauuugcaga

SEQ ID NO: 3271330 - RNA, 19 nt, Artificial Sequence
  Description of Artificial Sequence: Synthetic oligonucleotide
caugcuggaaagcaaauug

SEQ ID NO: 3271331 - RNA, 19 nt, Artificial Sequence
  Description of Artificial Sequence: Synthetic oligonucleotide
aggagaaacacggagggcg

SEQ ID NO: 3271332 - RNA, 19 nt, Artificial Sequence
  Description of Artificial Sequence: Synthetic oligonucleotide
aucaugugauuccguaucc

SEQ ID NO: 3271333 - RNA, 19 nt, Artificial Sequence
  Description of Artificial Sequence: Synthetic oligonucleotide
gauauauguguugauuugc

SEQ ID NO: 3271334 - RNA, 19 nt, Artificial Sequence
  Description of Artificial Sequence: Synthetic oligonucleotide
ugauuugcagagacugugg

SEQ ID NO: 3271335 - RNA, 19 nt, Artificial Sequence
  Description of Artificial Sequence: Synthetic oligonucleotide
ggaaagcaaauugagaugg

SEQ ID NO: 3271336 - RNA, 19 nt, Artificial Sequence
  Description of Artificial Sequence: Synthetic oligonucleotide
ugcuggaaagcaaauugag

SEQ ID NO: 3271337 - RNA, 19 nt, Artificial Sequence
  Description of Artificial Sequence: Synthetic oligonucleotide
aaugccaggagcuucuuuu

SEQ ID NO: 3271338 - RNA, 19 nt, Artificial Sequence
  Description of Artificial Sequence: Synthetic oligonucleotide
uaugauucacggcaugcug

SEQ ID NO: 3271339 - RNA, 19 nt, Artificial Sequence
  Description of Artificial Sequence: Synthetic oligonucleotide
aaugccgggaaaugccagg

SEQ ID NO: 3271340 - RNA, 19 nt, Artificial Sequence
  Description of Artificial Sequence: Synthetic oligonucleotide
uauauguguugauuugcag

SEQ ID NO: 3271341 - RNA, 19 nt, Artificial Sequence
  Description of Artificial Sequence: Synthetic oligonucleotide
aagcuggucaucuacugga

SEQ ID NO: 3271342 - RNA, 19 nt, Artificial Sequence
  Description of Artificial Sequence: Synthetic oligonucleotide
auguaggccacuuucauau

SEQ ID NO: 3271343 - RNA, 19 nt, Artificial Sequence
  Description of Artificial Sequence: Synthetic oligonucleotide
uauccaggaaauguaaaug

SEQ ID NO: 3271344 - RNA, 19 nt, Artificial Sequence
  Description of Artificial Sequence: Synthetic oligonucleotide
gagacuguggcugaaggag

SEQ ID NO: 3271345 - RNA, 19 nt, Artificial Sequence
  Description of Artificial Sequence: Synthetic oligonucleotide
auauggaucaucaccaucu

SEQ ID NO: 3271346 - RNA, 19 nt, Artificial Sequence
  Description of Artificial Sequence: Synthetic oligonucleotide
uggaaagcaaauugagaug

SEQ ID NO: 3271347 - RNA, 19 nt, Artificial Sequence
  Description of Artificial Sequence: Synthetic oligonucleotide
cugaaggagaaacacggag

SEQ ID NO: 3271348 - RNA, 19 nt, Artificial Sequence
  Description of Artificial Sequence: Synthetic oligonucleotide
uggauauauguguugauuu

SEQ ID NO: 3271349 - RNA, 19 nt, Artificial Sequence
  Description of Artificial Sequence: Synthetic oligonucleotide
ucaucuacuggagugauau

SEQ ID NO: 3271350 - RNA, 19 nt, Artificial Sequence
  Description of Artificial Sequence: Synthetic oligonucleotide
ugaacugcacaugucgggg

SEQ ID NO: 3271351 - RNA, 19 nt, Artificial Sequence
  Description of Artificial Sequence: Synthetic oligonucleotide
auugagauggauauaugug

SEQ ID NO: 3271352 - RNA, 19 nt, Artificial Sequence
  Description of Artificial Sequence: Synthetic oligonucleotide
gaagcuggucaucuacugg

SEQ ID NO: 3271353 - RNA, 19 nt, Artificial Sequence
  Description of Artificial Sequence: Synthetic oligonucleotide
gauuugcagagacuguggc

SEQ ID NO: 3271354 - RNA, 19 nt, Artificial Sequence
  Description of Artificial Sequence: Synthetic oligonucleotide
uugauuugcagagacugug

SEQ ID NO: 3271355 - RNA, 19 nt, Artificial Sequence
  Description of Artificial Sequence: Synthetic oligonucleotide
accaaaugccgggaaaugc

SEQ ID NO: 3271356 - RNA, 19 nt, Artificial Sequence
  Description of Artificial Sequence: Synthetic oligonucleotide
ucuacuggagugauaugga

SEQ ID NO: 3271357 - RNA, 19 nt, Artificial Sequence
  Description of Artificial Sequence: Synthetic oligonucleotide
ggaccuaugucuugcaugg

SEQ ID NO: 3271358 - RNA, 19 nt, Artificial Sequence
  Description of Artificial Sequence: Synthetic oligonucleotide
cuuucauaugauucacggc

SEQ ID NO: 3271359 - RNA, 19 nt, Artificial Sequence
  Description of Artificial Sequence: Synthetic oligonucleotide
ugcauggguggcauguagg

SEQ ID NO: 3271360 - RNA, 19 nt, Artificial Sequence
  Description of Artificial Sequence: Synthetic oligonucleotide
auuguauagaugagcuccc

SEQ ID NO: 3271361 - RNA, 19 nt, Artificial Sequence
  Description of Artificial Sequence: Synthetic oligonucleotide
uuuccuugacaaccaaaug

SEQ ID NO: 3271362 - RNA, 19 nt, Artificial Sequence
  Description of Artificial Sequence: Synthetic oligonucleotide
uccaggaaauguaaaugcu

SEQ ID NO: 3271363 - RNA, 19 nt, Artificial Sequence
  Description of Artificial Sequence: Synthetic oligonucleotide
uggcugaaggagaaacacg

SEQ ID NO: 3271364 - RNA, 19 nt, Artificial Sequence
  Description of Artificial Sequence: Synthetic oligonucleotide
uguauagaugagcucccca

SEQ ID NO: 3271365 - RNA, 19 nt, Artificial Sequence
  Description of Artificial Sequence: Synthetic oligonucleotide
auagaugagcuccccauca

SEQ ID NO: 3271366 - RNA, 19 nt, Artificial Sequence
  Description of Artificial Sequence: Synthetic oligonucleotide
ugguuccugacagacacgg

SEQ ID NO: 3271367 - RNA, 19 nt, Artificial Sequence
  Description of Artificial Sequence: Synthetic oligonucleotide
guuccugacagacacggug

SEQ ID NO: 3271368 - RNA, 19 nt, Artificial Sequence
  Description of Artificial Sequence: Synthetic oligonucleotide
cuaugucuugcaugggugg

SEQ ID NO: 3271369 - RNA, 19 nt, Artificial Sequence
  Description of Artificial Sequence: Synthetic oligonucleotide
caugugauuccguauccag

SEQ ID NO: 3271370 - RNA, 19 nt, Artificial Sequence
  Description of Artificial Sequence: Synthetic oligonucleotide
uucacggcaugcuggaaag

SEQ ID NO: 3271371 - RNA, 19 nt, Artificial Sequence
  Description of Artificial Sequence: Synthetic oligonucleotide
agugggaccuaugucuugc

SEQ ID NO: 3271372 - RNA, 19 nt, Artificial Sequence
  Description of Artificial Sequence: Synthetic oligonucleotide
aacugcacaugucggggag

SEQ ID NO: 3271373 - RNA, 19 nt, Artificial Sequence
  Description of Artificial Sequence: Synthetic oligonucleotide
ugcuuuuagugauguaggc

SEQ ID NO: 3271374 - RNA, 19 nt, Artificial Sequence
  Description of Artificial Sequence: Synthetic oligonucleotide
uaaaugcuuuuagugaugu

SEQ ID NO: 3271375 - RNA, 19 nt, Artificial Sequence
  Description of Artificial Sequence: Synthetic oligonucleotide
uuggaagcuggucaucuac

SEQ ID NO: 3271376 - RNA, 19 nt, Artificial Sequence
  Description of Artificial Sequence: Synthetic oligonucleotide
cuggucaucuacuggagug

SEQ ID NO: 3271377 - RNA, 19 nt, Artificial Sequence
  Description of Artificial Sequence: Synthetic oligonucleotide
aaggagaaacacggagggc

SEQ ID NO: 3271378 - RNA, 19 nt, Artificial Sequence
  Description of Artificial Sequence: Synthetic oligonucleotide
aaagcaaauugagauggau

SEQ ID NO: 3271379 - RNA, 19 nt, Artificial Sequence
  Description of Artificial Sequence: Synthetic oligonucleotide
gagauggauauauguguug

SEQ ID NO: 3271380 - RNA, 19 nt, Artificial Sequence
  Description of Artificial Sequence: Synthetic oligonucleotide
auggguggcauguaggcca

SEQ ID NO: 3271381 - RNA, 19 nt, Artificial Sequence
  Description of Artificial Sequence: Synthetic oligonucleotide
ugagauggauauauguguu

SEQ ID NO: 3271382 - RNA, 19 nt, Artificial Sequence
  Description of Artificial Sequence: Synthetic oligonucleotide
ugagcuccccaucauguga

SEQ ID NO: 3271383 - RNA, 19 nt, Artificial Sequence
  Description of Artificial Sequence: Synthetic oligonucleotide
caucaugugauuccguauc

SEQ ID NO: 3271384 - RNA, 19 nt, Artificial Sequence
  Description of Artificial Sequence: Synthetic oligonucleotide
ucauaugauucacggcaug

SEQ ID NO: 3271385 - RNA, 19 nt, Artificial Sequence
  Description of Artificial Sequence: Synthetic oligonucleotide
cauaugauucacggcaugc

SEQ ID NO: 3271386 - RNA, 19 nt, Artificial Sequence
  Description of Artificial Sequence: Synthetic oligonucleotide
uuccugacagacacgguga

SEQ ID NO: 3271387 - RNA, 19 nt, Artificial Sequence
  Description of Artificial Sequence: Synthetic oligonucleotide
gugaacugcacaugucggg

SEQ ID NO: 3271388 - RNA, 19 nt, Artificial Sequence
  Description of Artificial Sequence: Synthetic oligonucleotide
uacuggagugauauggauc

SEQ ID NO: 3271389 - RNA, 19 nt, Artificial Sequence
  Description of Artificial Sequence: Synthetic oligonucleotide
gugauauggaucaucacca

SEQ ID NO: 3271390 - RNA, 19 nt, Artificial Sequence
  Description of Artificial Sequence: Synthetic oligonucleotide
ggcugaaggagaaacacgg

SEQ ID NO: 3271391 - RNA, 19 nt, Artificial Sequence
  Description of Artificial Sequence: Synthetic oligonucleotide
uauagaugagcuccccauc

SEQ ID NO: 3271392 - RNA, 19 nt, Artificial Sequence
  Description of Artificial Sequence: Synthetic oligonucleotide
uuuuggaagcuggucaucu

SEQ ID NO: 3271393 - RNA, 19 nt, Artificial Sequence
  Description of Artificial Sequence: Synthetic oligonucleotide
uguaaggugccuccaugcu

SEQ ID NO: 3271394 - RNA, 19 nt, Artificial Sequence
  Description of Artificial Sequence: Synthetic oligonucleotide
augcuuuuagugauguagg

SEQ ID NO: 3271395 - RNA, 19 nt, Artificial Sequence
  Description of Artificial Sequence: Synthetic oligonucleotide
gauauggaucaucaccauc

SEQ ID NO: 3271396 - RNA, 19 nt, Artificial Sequence
  Description of Artificial Sequence: Synthetic oligonucleotide
aaaaguuggggccagaggc

SEQ ID NO: 3271397 - RNA, 19 nt, Artificial Sequence
  Description of Artificial Sequence: Synthetic oligonucleotide
gaaacagagaggcagaugg

SEQ ID NO: 3271398 - RNA, 19 nt, Artificial Sequence
  Description of Artificial Sequence: Synthetic oligonucleotide
uuuaguaaggggcaaagag

SEQ ID NO: 3271399 - RNA, 19 nt, Artificial Sequence
  Description of Artificial Sequence: Synthetic oligonucleotide
cuuacagucacacacaaag

SEQ ID NO: 3271400 - RNA, 19 nt, Artificial Sequence
  Description of Artificial Sequence: Synthetic oligonucleotide
aaauaucucagguacacca

SEQ ID NO: 3271401 - RNA, 19 nt, Artificial Sequence
  Description of Artificial Sequence: Synthetic oligonucleotide
caaguauuuaguaaggggc

SEQ ID NO: 3271402 - RNA, 19 nt, Artificial Sequence
  Description of Artificial Sequence: Synthetic oligonucleotide
aggaaagaaaaguuggggc

SEQ ID NO: 3271403 - RNA, 19 nt, Artificial Sequence
  Description of Artificial Sequence: Synthetic oligonucleotide
uuaguaaggggcaaagagg

SEQ ID NO: 3271404 - RNA, 19 nt, Artificial Sequence
  Description of Artificial Sequence: Synthetic oligonucleotide
aagcuuacacugcugaauc

SEQ ID NO: 3271405 - RNA, 19 nt, Artificial Sequence
  Description of Artificial Sequence: Synthetic oligonucleotide
ugcagccugaaacagagag

SEQ ID NO: 3271406 - RNA, 19 nt, Artificial Sequence
  Description of Artificial Sequence: Synthetic oligonucleotide
acugcugaauccuuugggc

SEQ ID NO: 3271407 - RNA, 19 nt, Artificial Sequence
  Description of Artificial Sequence: Synthetic oligonucleotide
aacagagaggcagauggcc

SEQ ID NO: 3271408 - RNA, 19 nt, Artificial Sequence
  Description of Artificial Sequence: Synthetic oligonucleotide
acacacaaagcuuacacug

SEQ ID NO: 3271409 - RNA, 19 nt, Artificial Sequence
  Description of Artificial Sequence: Synthetic oligonucleotide
uuuucuucuauaccuuucc

SEQ ID NO: 3271410 - RNA, 19 nt, Artificial Sequence
  Description of Artificial Sequence: Synthetic oligonucleotide
gagaggaaagaaaaguugg

SEQ ID NO: 3271411 - RNA, 19 nt, Artificial Sequence
  Description of Artificial Sequence: Synthetic oligonucleotide
uaaggggcaaagaggaugg

SEQ ID NO: 3271412 - RNA, 19 nt, Artificial Sequence
  Description of Artificial Sequence: Synthetic oligonucleotide
uaguaaggggcaaagagga

SEQ ID NO: 3271413 - RNA, 19 nt, Artificial Sequence
  Description of Artificial Sequence: Synthetic oligonucleotide
uacagucacacacaaagcu

SEQ ID NO: 3271414 - RNA, 19 nt, Artificial Sequence
  Description of Artificial Sequence: Synthetic oligonucleotide
ucuucuauaccuuuccacu

SEQ ID NO: 3271415 - RNA, 19 nt, Artificial Sequence
  Description of Artificial Sequence: Synthetic oligonucleotide
uucuauaccuuuccacugg

SEQ ID NO: 3271416 - RNA, 19 nt, Artificial Sequence
  Description of Artificial Sequence: Synthetic oligonucleotide
cucagguacaccaauuggg

SEQ ID NO: 3271417 - RNA, 19 nt, Artificial Sequence
  Description of Artificial Sequence: Synthetic oligonucleotide
uuaaauaucucagguacac

SEQ ID NO: 3271418 - RNA, 19 nt, Artificial Sequence
  Description of Artificial Sequence: Synthetic oligonucleotide
ucucagguacaccaauugg

SEQ ID NO: 3271419 - RNA, 19 nt, Artificial Sequence
  Description of Artificial Sequence: Synthetic oligonucleotide
uauaccuuuccacuggccu

SEQ ID NO: 3271420 - RNA, 19 nt, Artificial Sequence
  Description of Artificial Sequence: Synthetic oligonucleotide
gauggcugcagccugaaac

SEQ ID NO: 3271421 - RNA, 19 nt, Artificial Sequence
  Description of Artificial Sequence: Synthetic oligonucleotide
ucacacacaaagcuuacac

SEQ ID NO: 3271422 - RNA, 19 nt, Artificial Sequence
  Description of Artificial Sequence: Synthetic oligonucleotide
ucagguacaccaauugggc

SEQ ID NO: 3271423 - RNA, 19 nt, Artificial Sequence
  Description of Artificial Sequence: Synthetic oligonucleotide
gaggaaagaaaaguugggg

SEQ ID NO: 3271424 - RNA, 19 nt, Artificial Sequence
  Description of Artificial Sequence: Synthetic oligonucleotide
gaaguaggggaacagugcc

SEQ ID NO: 3271425 - RNA, 19 nt, Artificial Sequence
  Description of Artificial Sequence: Synthetic oligonucleotide
auugggcugggguaggacc

SEQ ID NO: 3271426 - RNA, 19 nt, Artificial Sequence
  Description of Artificial Sequence: Synthetic oligonucleotide
ggaacagugcccuugagcc

SEQ ID NO: 3271427 - RNA, 19 nt, Artificial Sequence
  Description of Artificial Sequence: Synthetic oligonucleotide
agaggacacagcugcagcc

SEQ ID NO: 3271428 - RNA, 19 nt, Artificial Sequence
  Description of Artificial Sequence: Synthetic oligonucleotide
gaaaaguuggggccagagg

SEQ ID NO: 3271429 - RNA, 19 nt, Artificial Sequence
  Description of Artificial Sequence: Synthetic oligonucleotide
ggaaagaaaaguuggggcc

SEQ ID NO: 3271430 - RNA, 19 nt, Artificial Sequence
  Description of Artificial Sequence: Synthetic oligonucleotide
uuuguaagugggugguggg

SEQ ID NO: 3271431 - RNA, 19 nt, Artificial Sequence
  Description of Artificial Sequence: Synthetic oligonucleotide
gcugcaaguauuuaguaag

SEQ ID NO: 3271432 - RNA, 19 nt, Artificial Sequence
  Description of Artificial Sequence: Synthetic oligonucleotide
ggugcuuacagucacacac

SEQ ID NO: 3271433 - RNA, 19 nt, Artificial Sequence
  Description of Artificial Sequence: Synthetic oligonucleotide
aagaaguaggggaacagug

SEQ ID NO: 3271434 - RNA, 19 nt, Artificial Sequence
  Description of Artificial Sequence: Synthetic oligonucleotide
uauuuaguaaggggcaaag

SEQ ID NO: 3271435 - RNA, 19 nt, Artificial Sequence
  Description of Artificial Sequence: Synthetic oligonucleotide
aauccuuugggcuuuucuu

SEQ ID NO: 3271436 - RNA, 19 nt, Artificial Sequence
  Description of Artificial Sequence: Synthetic oligonucleotide
ugcaaguauuuaguaaggg

SEQ ID NO: 3271437 - RNA, 19 nt, Artificial Sequence
  Description of Artificial Sequence: Synthetic oligonucleotide
gcaaguauuuaguaagggg

SEQ ID NO: 3271438 - RNA, 19 nt, Artificial Sequence
  Description of Artificial Sequence: Synthetic oligonucleotide
ugucuuuggagguugggcu

SEQ ID NO: 3271439 - RNA, 19 nt, Artificial Sequence
  Description of Artificial Sequence: Synthetic oligonucleotide
agaaguaggggaacagugc

SEQ ID NO: 3271440 - RNA, 19 nt, Artificial Sequence
  Description of Artificial Sequence: Synthetic oligonucleotide
uuggagguugggcugggcg

SEQ ID NO: 3271441 - RNA, 19 nt, Artificial Sequence
  Description of Artificial Sequence: Synthetic oligonucleotide
acaaagcuuacacugcuga

SEQ ID NO: 3271442 - RNA, 19 nt, Artificial Sequence
  Description of Artificial Sequence: Synthetic oligonucleotide
auccuuugggcuuuucuuc

SEQ ID NO: 3271443 - RNA, 19 nt, Artificial Sequence
  Description of Artificial Sequence: Synthetic oligonucleotide
uuacagucacacacaaagc

SEQ ID NO: 3271444 - RNA, 19 nt, Artificial Sequence
  Description of Artificial Sequence: Synthetic oligonucleotide
cuccucuugucuuuggagg

SEQ ID NO: 3271445 - RNA, 19 nt, Artificial Sequence
  Description of Artificial Sequence: Synthetic oligonucleotide
uucuucuauaccuuuccac

SEQ ID NO: 3271446 - RNA, 19 nt, Artificial Sequence
  Description of Artificial Sequence: Synthetic oligonucleotide
aaguauuuaguaaggggca

SEQ ID NO: 3271447 - RNA, 19 nt, Artificial Sequence
  Description of Artificial Sequence: Synthetic oligonucleotide
cuuuguaaguggguggugg

SEQ ID NO: 3271448 - RNA, 19 nt, Artificial Sequence
  Description of Artificial Sequence: Synthetic oligonucleotide
agguacaccaauugggcug

SEQ ID NO: 3271449 - RNA, 19 nt, Artificial Sequence
  Description of Artificial Sequence: Synthetic oligonucleotide
ugcacuuuguaagugggug

SEQ ID NO: 3271450 - RNA, 19 nt, Artificial Sequence
  Description of Artificial Sequence: Synthetic oligonucleotide
aaagcuuacacugcugaau

SEQ ID NO: 3271451 - RNA, 19 nt, Artificial Sequence
  Description of Artificial Sequence: Synthetic oligonucleotide
cagccugaaacagagaggc

SEQ ID NO: 3271452 - RNA, 19 nt, Artificial Sequence
  Description of Artificial Sequence: Synthetic oligonucleotide
guggccugcacuuuguaag

SEQ ID NO: 3271453 - RNA, 19 nt, Artificial Sequence
  Description of Artificial Sequence: Synthetic oligonucleotide
ugggcuuuucuucuauacc

SEQ ID NO: 3271454 - RNA, 19 nt, Artificial Sequence
  Description of Artificial Sequence: Synthetic oligonucleotide
ucuauaccuuuccacuggc

SEQ ID NO: 3271455 - RNA, 19 nt, Artificial Sequence
  Description of Artificial Sequence: Synthetic oligonucleotide
agcuuacacugcugaaucc

SEQ ID NO: 3271456 - RNA, 19 nt, Artificial Sequence
  Description of Artificial Sequence: Synthetic oligonucleotide
uugggcugggguaggaccg

SEQ ID NO: 3271457 - RNA, 19 nt, Artificial Sequence
  Description of Artificial Sequence: Synthetic oligonucleotide
aggcagauggccgaggugg

SEQ ID NO: 3271458 - RNA, 19 nt, Artificial Sequence
  Description of Artificial Sequence: Synthetic oligonucleotide
aaacagagaggcagauggc

SEQ ID NO: 3271459 - RNA, 19 nt, Artificial Sequence
  Description of Artificial Sequence: Synthetic oligonucleotide
aaguaggggaacagugccc

SEQ ID NO: 3271460 - RNA, 19 nt, Artificial Sequence
  Description of Artificial Sequence: Synthetic oligonucleotide
agaggauggaggcaggagu

SEQ ID NO: 3271461 - RNA, 19 nt, Artificial Sequence
  Description of Artificial Sequence: Synthetic oligonucleotide
guagggacagugcagagga

SEQ ID NO: 3271462 - RNA, 19 nt, Artificial Sequence
  Description of Artificial Sequence: Synthetic oligonucleotide
gugcagaggacacagcugc

SEQ ID NO: 3271463 - RNA, 19 nt, Artificial Sequence
  Description of Artificial Sequence: Synthetic oligonucleotide
cugcaaguauuuaguaagg

SEQ ID NO: 3271464 - RNA, 19 nt, Artificial Sequence
  Description of Artificial Sequence: Synthetic oligonucleotide
aucucagguacaccaauug

SEQ ID NO: 3271465 - RNA, 19 nt, Artificial Sequence
  Description of Artificial Sequence: Synthetic oligonucleotide
uuucuucuauaccuuucca

SEQ ID NO: 3271466 - RNA, 19 nt, Artificial Sequence
  Description of Artificial Sequence: Synthetic oligonucleotide
gacagugcagaggacacag

SEQ ID NO: 3271467 - RNA, 19 nt, Artificial Sequence
  Description of Artificial Sequence: Synthetic oligonucleotide
aaagaaaaguuggggccag

SEQ ID NO: 3271468 - RNA, 19 nt, Artificial Sequence
  Description of Artificial Sequence: Synthetic oligonucleotide
aacagugcccuugagccug

SEQ ID NO: 3271469 - RNA, 19 nt, Artificial Sequence
  Description of Artificial Sequence: Synthetic oligonucleotide
agaggaaagaaaaguuggg

SEQ ID NO: 3271470 - RNA, 19 nt, Artificial Sequence
  Description of Artificial Sequence: Synthetic oligonucleotide
cuucuauaccuuuccacug

SEQ ID NO: 3271471 - RNA, 19 nt, Artificial Sequence
  Description of Artificial Sequence: Synthetic oligonucleotide
aggaguggcacggaugggc

SEQ ID NO: 3271472 - RNA, 19 nt, Artificial Sequence
  Description of Artificial Sequence: Synthetic oligonucleotide
cacacaaagcuuacacugc

SEQ ID NO: 3271473 - RNA, 19 nt, Artificial Sequence
  Description of Artificial Sequence: Synthetic oligonucleotide
uggagguugggcugggcgg

SEQ ID NO: 3271474 - RNA, 19 nt, Artificial Sequence
  Description of Artificial Sequence: Synthetic oligonucleotide
aggagggauggcugcagcc

SEQ ID NO: 3271475 - RNA, 19 nt, Artificial Sequence
  Description of Artificial Sequence: Synthetic oligonucleotide
uugggcuuuucuucuauac

SEQ ID NO: 3271476 - RNA, 19 nt, Artificial Sequence
  Description of Artificial Sequence: Synthetic oligonucleotide
gaaagaaaaguuggggcca

SEQ ID NO: 3271477 - RNA, 19 nt, Artificial Sequence
  Description of Artificial Sequence: Synthetic oligonucleotide
guaaggggcaaagaggaug

SEQ ID NO: 3271478 - RNA, 19 nt, Artificial Sequence
  Description of Artificial Sequence: Synthetic oligonucleotide
uacacugcugaauccuuug

SEQ ID NO: 3271479 - RNA, 19 nt, Artificial Sequence
  Description of Artificial Sequence: Synthetic oligonucleotide
acacaaagcuuacacugcu

SEQ ID NO: 3271480 - RNA, 19 nt, Artificial Sequence
  Description of Artificial Sequence: Synthetic oligonucleotide
cuuuucuucuauaccuuuc

SEQ ID NO: 3271481 - RNA, 19 nt, Artificial Sequence
  Description of Artificial Sequence: Synthetic oligonucleotide
auaccuuuccacuggccug

SEQ ID NO: 3271482 - RNA, 19 nt, Artificial Sequence
  Description of Artificial Sequence: Synthetic oligonucleotide
uugucuuuggagguugggc

SEQ ID NO: 3271483 - RNA, 19 nt, Artificial Sequence
  Description of Artificial Sequence: Synthetic oligonucleotide
uaaauaucucagguacacc

SEQ ID NO: 3271484 - RNA, 19 nt, Artificial Sequence
  Description of Artificial Sequence: Synthetic oligonucleotide
aauugggcugggguaggac

SEQ ID NO: 3271485 - RNA, 19 nt, Artificial Sequence
  Description of Artificial Sequence: Synthetic oligonucleotide
acaccaauugggcuggggu

SEQ ID NO: 3271486 - RNA, 19 nt, Artificial Sequence
  Description of Artificial Sequence: Synthetic oligonucleotide
ucuugucuuuggagguugg

SEQ ID NO: 3271487 - RNA, 19 nt, Artificial Sequence
  Description of Artificial Sequence: Synthetic oligonucleotide
ucuuuggagguugggcugg

SEQ ID NO: 3271488 - RNA, 19 nt, Artificial Sequence
  Description of Artificial Sequence: Synthetic oligonucleotide
cacugcugaauccuuuggg

SEQ ID NO: 3271489 - RNA, 19 nt, Artificial Sequence
  Description of Artificial Sequence: Synthetic oligonucleotide
aggacacagcugcagccgc

SEQ ID NO: 3271490 - RNA, 19 nt, Artificial Sequence
  Description of Artificial Sequence: Synthetic oligonucleotide
acacugcugaauccuuugg

SEQ ID NO: 3271491 - RNA, 19 nt, Artificial Sequence
  Description of Artificial Sequence: Synthetic oligonucleotide
uaccuuuccacuggccugg

SEQ ID NO: 3271492 - RNA, 19 nt, Artificial Sequence
  Description of Artificial Sequence: Synthetic oligonucleotide
agaaaaguuggggccagag

SEQ ID NO: 3271493 - RNA, 19 nt, Artificial Sequence
  Description of Artificial Sequence: Synthetic oligonucleotide
guggccaggccucagcagg

SEQ ID NO: 3271494 - RNA, 19 nt, Artificial Sequence
  Description of Artificial Sequence: Synthetic oligonucleotide
uuguaaguggguggugggg

SEQ ID NO: 3271495 - RNA, 19 nt, Artificial Sequence
  Description of Artificial Sequence: Synthetic oligonucleotide
cagaggagaggaaagaaaa

SEQ ID NO: 3271496 - RNA, 19 nt, Artificial Sequence
  Description of Artificial Sequence: Synthetic oligonucleotide
agcaguaacagucugacac

SEQ ID NO: 3271497 - RNA, 19 nt, Artificial Sequence
  Description of Artificial Sequence: Synthetic oligonucleotide
ugaauaacacaucugauga

SEQ ID NO: 3271498 - RNA, 19 nt, Artificial Sequence
  Description of Artificial Sequence: Synthetic oligonucleotide
uuaugaauaacacaucuga

SEQ ID NO: 3271499 - RNA, 19 nt, Artificial Sequence
  Description of Artificial Sequence: Synthetic oligonucleotide
aauuaagucuguuucuuuc

SEQ ID NO: 3271500 - RNA, 19 nt, Artificial Sequence
  Description of Artificial Sequence: Synthetic oligonucleotide
aaaguuaugaauaacacau

SEQ ID NO: 3271501 - RNA, 19 nt, Artificial Sequence
  Description of Artificial Sequence: Synthetic oligonucleotide
uuuuaauuaagucuguuuc

SEQ ID NO: 3271502 - RNA, 19 nt, Artificial Sequence
  Description of Artificial Sequence: Synthetic oligonucleotide
auauagacaaaucugagca

SEQ ID NO: 3271503 - RNA, 19 nt, Artificial Sequence
  Description of Artificial Sequence: Synthetic oligonucleotide
gaugaggucauuuuguuag

SEQ ID NO: 3271504 - RNA, 19 nt, Artificial Sequence
  Description of Artificial Sequence: Synthetic oligonucleotide
ugugauauagacaaaucug

SEQ ID NO: 3271505 - RNA, 19 nt, Artificial Sequence
  Description of Artificial Sequence: Synthetic oligonucleotide
uucacagagaagcauacgg

SEQ ID NO: 3271506 - RNA, 19 nt, Artificial Sequence
  Description of Artificial Sequence: Synthetic oligonucleotide
uuuccugugauauagacaa

SEQ ID NO: 3271507 - RNA, 19 nt, Artificial Sequence
  Description of Artificial Sequence: Synthetic oligonucleotide
aaaaguuaugaauaacaca

SEQ ID NO: 3271508 - RNA, 19 nt, Artificial Sequence
  Description of Artificial Sequence: Synthetic oligonucleotide
uuuuguuagacuccucugg

SEQ ID NO: 3271509 - RNA, 19 nt, Artificial Sequence
  Description of Artificial Sequence: Synthetic oligonucleotide
uauauguccacucuauuug

SEQ ID NO: 3271510 - RNA, 19 nt, Artificial Sequence
  Description of Artificial Sequence: Synthetic oligonucleotide
ucugaugaaugacagaaug

SEQ ID NO: 3271511 - RNA, 19 nt, Artificial Sequence
  Description of Artificial Sequence: Synthetic oligonucleotide
uauuugccaauuuugauug

SEQ ID NO: 3271512 - RNA, 19 nt, Artificial Sequence
  Description of Artificial Sequence: Synthetic oligonucleotide
aagucuguuucuuucagag

SEQ ID NO: 3271513 - RNA, 19 nt, Artificial Sequence
  Description of Artificial Sequence: Synthetic oligonucleotide
auccacaauguuucgaucc

SEQ ID NO: 3271514 - RNA, 19 nt, Artificial Sequence
  Description of Artificial Sequence: Synthetic oligonucleotide
uugaaauccacaauguuuc

SEQ ID NO: 3271515 - RNA, 19 nt, Artificial Sequence
  Description of Artificial Sequence: Synthetic oligonucleotide
acugguaacugucaccugc

SEQ ID NO: 3271516 - RNA, 19 nt, Artificial Sequence
  Description of Artificial Sequence: Synthetic oligonucleotide
gaguuugaaauccacaaug

SEQ ID NO: 3271517 - RNA, 19 nt, Artificial Sequence
  Description of Artificial Sequence: Synthetic oligonucleotide
augggcuucacagagaagc

SEQ ID NO: 3271518 - RNA, 19 nt, Artificial Sequence
  Description of Artificial Sequence: Synthetic oligonucleotide
gauauagacaaaucugagc

SEQ ID NO: 3271519 - RNA, 19 nt, Artificial Sequence
  Description of Artificial Sequence: Synthetic oligonucleotide
aaggaggaguuugaaaucc

SEQ ID NO: 3271520 - RNA, 19 nt, Artificial Sequence
  Description of Artificial Sequence: Synthetic oligonucleotide
aauguuucgauccaugcuu

SEQ ID NO: 3271521 - RNA, 19 nt, Artificial Sequence
  Description of Artificial Sequence: Synthetic oligonucleotide
guaacugucaccugcacag

SEQ ID NO: 3271522 - RNA, 19 nt, Artificial Sequence
  Description of Artificial Sequence: Synthetic oligonucleotide
aggucauuuuguuagacuc

SEQ ID NO: 3271523 - RNA, 19 nt, Artificial Sequence
  Description of Artificial Sequence: Synthetic oligonucleotide
uuugaaauccacaauguuu

SEQ ID NO: 3271524 - RNA, 19 nt, Artificial Sequence
  Description of Artificial Sequence: Synthetic oligonucleotide
aguuaugaauaacacaucu

SEQ ID NO: 3271525 - RNA, 19 nt, Artificial Sequence
  Description of Artificial Sequence: Synthetic oligonucleotide
acaauguuucgauccaugc

SEQ ID NO: 3271526 - RNA, 19 nt, Artificial Sequence
  Description of Artificial Sequence: Synthetic oligonucleotide
gaagcauacgguuucuccg

SEQ ID NO: 3271527 - RNA, 19 nt, Artificial Sequence
  Description of Artificial Sequence: Synthetic oligonucleotide
agaagcauacgguuucucc

SEQ ID NO: 3271528 - RNA, 19 nt, Artificial Sequence
  Description of Artificial Sequence: Synthetic oligonucleotide
augaauaacacaucugaug

SEQ ID NO: 3271529 - RNA, 19 nt, Artificial Sequence
  Description of Artificial Sequence: Synthetic oligonucleotide
guaaacacccucccgaugg

SEQ ID NO: 3271530 - RNA, 19 nt, Artificial Sequence
  Description of Artificial Sequence: Synthetic oligonucleotide
gauuguagcaguaacaguc

SEQ ID NO: 3271531 - RNA, 19 nt, Artificial Sequence
  Description of Artificial Sequence: Synthetic oligonucleotide
ugaugaaugacagaaugcc

SEQ ID NO: 3271532 - RNA, 19 nt, Artificial Sequence
  Description of Artificial Sequence: Synthetic oligonucleotide
uuugauuguagcaguaaca

SEQ ID NO: 3271533 - RNA, 19 nt, Artificial Sequence
  Description of Artificial Sequence: Synthetic oligonucleotide
ugauauagacaaaucugag

SEQ ID NO: 3271534 - RNA, 19 nt, Artificial Sequence
  Description of Artificial Sequence: Synthetic oligonucleotide
uguuagacuccucuggugc

SEQ ID NO: 3271535 - RNA, 19 nt, Artificial Sequence
  Description of Artificial Sequence: Synthetic oligonucleotide
uuuaauuaagucuguuucu

SEQ ID NO: 3271536 - RNA, 19 nt, Artificial Sequence
  Description of Artificial Sequence: Synthetic oligonucleotide
uugauuguagcaguaacag

SEQ ID NO: 3271537 - RNA, 19 nt, Artificial Sequence
  Description of Artificial Sequence: Synthetic oligonucleotide
caaaaguuaugaauaacac

SEQ ID NO: 3271538 - RNA, 19 nt, Artificial Sequence
  Description of Artificial Sequence: Synthetic oligonucleotide
ucagagacuuacaucuugg

SEQ ID NO: 3271539 - RNA, 19 nt, Artificial Sequence
  Description of Artificial Sequence: Synthetic oligonucleotide
acuguguagguaaacaccc

SEQ ID NO: 3271540 - RNA, 19 nt, Artificial Sequence
  Description of Artificial Sequence: Synthetic oligonucleotide
uuucgauccaugcuuacug

SEQ ID NO: 3271541 - RNA, 19 nt, Artificial Sequence
  Description of Artificial Sequence: Synthetic oligonucleotide
aacacaucugaugaaugac

SEQ ID NO: 3271542 - RNA, 19 nt, Artificial Sequence
  Description of Artificial Sequence: Synthetic oligonucleotide
acaaggaggaguuugaaau

SEQ ID NO: 3271543 - RNA, 19 nt, Artificial Sequence
  Description of Artificial Sequence: Synthetic oligonucleotide
auauguccacucuauuugc

SEQ ID NO: 3271544 - RNA, 19 nt, Artificial Sequence
  Description of Artificial Sequence: Synthetic oligonucleotide
uuuugauuguagcaguaac

SEQ ID NO: 3271545 - RNA, 19 nt, Artificial Sequence
  Description of Artificial Sequence: Synthetic oligonucleotide
aaauccacaauguuucgau

SEQ ID NO: 3271546 - RNA, 19 nt, Artificial Sequence
  Description of Artificial Sequence: Synthetic oligonucleotide
aauuaugauuuccugugau

SEQ ID NO: 3271547 - RNA, 19 nt, Artificial Sequence
  Description of Artificial Sequence: Synthetic oligonucleotide
auagacaaaucugagcagg

SEQ ID NO: 3271548 - RNA, 19 nt, Artificial Sequence
  Description of Artificial Sequence: Synthetic oligonucleotide
uacuguguagguaaacacc

SEQ ID NO: 3271549 - RNA, 19 nt, Artificial Sequence
  Description of Artificial Sequence: Synthetic oligonucleotide
ugcacagucgaccacauau

SEQ ID NO: 3271550 - RNA, 19 nt, Artificial Sequence
  Description of Artificial Sequence: Synthetic oligonucleotide
gucguuuuaauuaagucug

SEQ ID NO: 3271551 - RNA, 19 nt, Artificial Sequence
  Description of Artificial Sequence: Synthetic oligonucleotide
gucuguuucuuucagagac

SEQ ID NO: 3271552 - RNA, 19 nt, Artificial Sequence
  Description of Artificial Sequence: Synthetic oligonucleotide
aauaacacaucugaugaau

SEQ ID NO: 3271553 - RNA, 19 nt, Artificial Sequence
  Description of Artificial Sequence: Synthetic oligonucleotide
uuaagucuguuucuuucag

SEQ ID NO: 3271554 - RNA, 19 nt, Artificial Sequence
  Description of Artificial Sequence: Synthetic oligonucleotide
uagguaaacacccucccga

SEQ ID NO: 3271555 - RNA, 19 nt, Artificial Sequence
  Description of Artificial Sequence: Synthetic oligonucleotide
augauuuccugugauauag

SEQ ID NO: 3271556 - RNA, 19 nt, Artificial Sequence
  Description of Artificial Sequence: Synthetic oligonucleotide
aaugccuucuggaugcugg

SEQ ID NO: 3271557 - RNA, 19 nt, Artificial Sequence
  Description of Artificial Sequence: Synthetic oligonucleotide
aaugacagaaugccuucug

SEQ ID NO: 3271558 - RNA, 19 nt, Artificial Sequence
  Description of Artificial Sequence: Synthetic oligonucleotide
aauccacaauguuucgauc

SEQ ID NO: 3271559 - RNA, 19 nt, Artificial Sequence
  Description of Artificial Sequence: Synthetic oligonucleotide
cuuucagagacuuacaucu

SEQ ID NO: 3271560 - RNA, 19 nt, Artificial Sequence
  Description of Artificial Sequence: Synthetic oligonucleotide
uguagguaaacacccuccc

SEQ ID NO: 3271561 - RNA, 19 nt, Artificial Sequence
  Description of Artificial Sequence: Synthetic oligonucleotide
uuuguuagacuccucuggu

SEQ ID NO: 3271562 - RNA, 19 nt, Artificial Sequence
  Description of Artificial Sequence: Synthetic oligonucleotide
uauagacaaaucugagcag

SEQ ID NO: 3271563 - RNA, 19 nt, Artificial Sequence
  Description of Artificial Sequence: Synthetic oligonucleotide
ugcccaaaaguuaugaaua

SEQ ID NO: 3271564 - RNA, 19 nt, Artificial Sequence
  Description of Artificial Sequence: Synthetic oligonucleotide
aaacacaaggaggaguuug

SEQ ID NO: 3271565 - RNA, 19 nt, Artificial Sequence
  Description of Artificial Sequence: Synthetic oligonucleotide
accacauauauguccacuc

SEQ ID NO: 3271566 - RNA, 19 nt, Artificial Sequence
  Description of Artificial Sequence: Synthetic oligonucleotide
aaucugagcaggccucgac

SEQ ID NO: 3271567 - RNA, 19 nt, Artificial Sequence
  Description of Artificial Sequence: Synthetic oligonucleotide
uucagagacuuacaucuug

SEQ ID NO: 3271568 - RNA, 19 nt, Artificial Sequence
  Description of Artificial Sequence: Synthetic oligonucleotide
gauuuccugugauauagac

SEQ ID NO: 3271569 - RNA, 19 nt, Artificial Sequence
  Description of Artificial Sequence: Synthetic oligonucleotide
uuaugauuuccugugauau

SEQ ID NO: 3271570 - RNA, 19 nt, Artificial Sequence
  Description of Artificial Sequence: Synthetic oligonucleotide
cagaaugccuucuggaugc

SEQ ID NO: 3271571 - RNA, 19 nt, Artificial Sequence
  Description of Artificial Sequence: Synthetic oligonucleotide
uaacacaucugaugaauga

SEQ ID NO: 3271572 - RNA, 19 nt, Artificial Sequence
  Description of Artificial Sequence: Synthetic oligonucleotide
cugaugaaugacagaaugc

SEQ ID NO: 3271573 - RNA, 19 nt, Artificial Sequence
  Description of Artificial Sequence: Synthetic oligonucleotide
guuucuuucagagacuuac

SEQ ID NO: 3271574 - RNA, 19 nt, Artificial Sequence
  Description of Artificial Sequence: Synthetic oligonucleotide
aacugucaccugcacaguc

SEQ ID NO: 3271575 - RNA, 19 nt, Artificial Sequence
  Description of Artificial Sequence: Synthetic oligonucleotide
uaacagucugacaccgucg

SEQ ID NO: 3271576 - RNA, 19 nt, Artificial Sequence
  Description of Artificial Sequence: Synthetic oligonucleotide
ucgaccacauauaugucca

SEQ ID NO: 3271577 - RNA, 19 nt, Artificial Sequence
  Description of Artificial Sequence: Synthetic oligonucleotide
uuacuguguagguaaacac

SEQ ID NO: 3271578 - RNA, 19 nt, Artificial Sequence
  Description of Artificial Sequence: Synthetic oligonucleotide
uaugaauaacacaucugau

SEQ ID NO: 3271579 - RNA, 19 nt, Artificial Sequence
  Description of Artificial Sequence: Synthetic oligonucleotide
uggaugcuggcaauuauga

SEQ ID NO: 3271580 - RNA, 19 nt, Artificial Sequence
  Description of Artificial Sequence: Synthetic oligonucleotide
uugccaauuuugauuguag

SEQ ID NO: 3271581 - RNA, 19 nt, Artificial Sequence
  Description of Artificial Sequence: Synthetic oligonucleotide
augacagaaugccuucugg

SEQ ID NO: 3271582 - RNA, 19 nt, Artificial Sequence
  Description of Artificial Sequence: Synthetic oligonucleotide
aggaguuugaaauccacaa

SEQ ID NO: 3271583 - RNA, 19 nt, Artificial Sequence
  Description of Artificial Sequence: Synthetic oligonucleotide
ugaaauccacaauguuucg

SEQ ID NO: 3271584 - RNA, 19 nt, Artificial Sequence
  Description of Artificial Sequence: Synthetic oligonucleotide
cacaucugaugaaugacag

SEQ ID NO: 3271585 - RNA, 19 nt, Artificial Sequence
  Description of Artificial Sequence: Synthetic oligonucleotide
uccguauggagugaugagg

SEQ ID NO: 3271586 - RNA, 19 nt, Artificial Sequence
  Description of Artificial Sequence: Synthetic oligonucleotide
auuaagucuguuucuuuca

SEQ ID NO: 3271587 - RNA, 19 nt, Artificial Sequence
  Description of Artificial Sequence: Synthetic oligonucleotide
gcaauuaugauuuccugug

SEQ ID NO: 3271588 - RNA, 19 nt, Artificial Sequence
  Description of Artificial Sequence: Synthetic oligonucleotide
auauauguccacucuauuu

SEQ ID NO: 3271589 - RNA, 19 nt, Artificial Sequence
  Description of Artificial Sequence: Synthetic oligonucleotide
aacagucugacaccgucgu

SEQ ID NO: 3271590 - RNA, 19 nt, Artificial Sequence
  Description of Artificial Sequence: Synthetic oligonucleotide
auuuuguuagacuccucug

SEQ ID NO: 3271591 - RNA, 19 nt, Artificial Sequence
  Description of Artificial Sequence: Synthetic oligonucleotide
acagaaugccuucuggaug

SEQ ID NO: 3271592 - RNA, 19 nt, Artificial Sequence
  Description of Artificial Sequence: Synthetic oligonucleotide
uguagcaguaacagucuga

SEQ ID NO: 3271593 - RNA, 19 nt, Artificial Sequence
  Description of Artificial Sequence: Synthetic oligonucleotide
ucacagagaagcauacggu

SEQ ID NO: 3271594 - RNA, 19 nt, Artificial Sequence
  Description of Artificial Sequence: Synthetic oligonucleotide
gacaccgucguuuuaauua

SEQ ID NO: 3271595 - RNA, 19 nt, Artificial Sequence
  Description of Artificial Sequence: Synthetic oligonucleotide
uucuuucagagacuuacau

SEQ ID NO: 3271596 - RNA, 19 nt, Artificial Sequence
  Description of Artificial Sequence: Synthetic oligonucleotide
aacaaauacaucuuggauc

SEQ ID NO: 3271597 - RNA, 19 nt, Artificial Sequence
  Description of Artificial Sequence: Synthetic oligonucleotide
acaaauacaucuuggaucc

SEQ ID NO: 3271598 - RNA, 19 nt, Artificial Sequence
  Description of Artificial Sequence: Synthetic oligonucleotide
uaaauuuacaaccuggaag

SEQ ID NO: 3271599 - RNA, 19 nt, Artificial Sequence
  Description of Artificial Sequence: Synthetic oligonucleotide
aaauuuacaaccuggaaga

SEQ ID NO: 3271600 - RNA, 19 nt, Artificial Sequence
  Description of Artificial Sequence: Synthetic oligonucleotide
uaauuauauugcuugaugg

SEQ ID NO: 3271601 - RNA, 19 nt, Artificial Sequence
  Description of Artificial Sequence: Synthetic oligonucleotide
auuaucucgagacagaucu

SEQ ID NO: 3271602 - RNA, 19 nt, Artificial Sequence
  Description of Artificial Sequence: Synthetic oligonucleotide
uuuacaaccuggaagagca

SEQ ID NO: 3271603 - RNA, 19 nt, Artificial Sequence
  Description of Artificial Sequence: Synthetic oligonucleotide
gagauaauuauauugcuug

SEQ ID NO: 3271604 - RNA, 19 nt, Artificial Sequence
  Description of Artificial Sequence: Synthetic oligonucleotide
gacaauuccagacuguugg

SEQ ID NO: 3271605 - RNA, 19 nt, Artificial Sequence
  Description of Artificial Sequence: Synthetic oligonucleotide
cuuuaaauuuacaaccugg

SEQ ID NO: 3271606 - RNA, 19 nt, Artificial Sequence
  Description of Artificial Sequence: Synthetic oligonucleotide
uugguagagguccagaagg

SEQ ID NO: 3271607 - RNA, 19 nt, Artificial Sequence
  Description of Artificial Sequence: Synthetic oligonucleotide
ucuucuaacaucuuuaaau

SEQ ID NO: 3271608 - RNA, 19 nt, Artificial Sequence
  Description of Artificial Sequence: Synthetic oligonucleotide
ucuauauuuugacagcucc

SEQ ID NO: 3271609 - RNA, 19 nt, Artificial Sequence
  Description of Artificial Sequence: Synthetic oligonucleotide
agcacauaaaccgagaaac

SEQ ID NO: 3271610 - RNA, 19 nt, Artificial Sequence
  Description of Artificial Sequence: Synthetic oligonucleotide
aaaacaaauacaucuugga

SEQ ID NO: 3271611 - RNA, 19 nt, Artificial Sequence
  Description of Artificial Sequence: Synthetic oligonucleotide
uugaugauagauaugcagc

SEQ ID NO: 3271612 - RNA, 19 nt, Artificial Sequence
  Description of Artificial Sequence: Synthetic oligonucleotide
gaaaugggcggcuucaucg

SEQ ID NO: 3271613 - RNA, 19 nt, Artificial Sequence
  Description of Artificial Sequence: Synthetic oligonucleotide
uauaggaggagacaagcag

SEQ ID NO: 3271614 - RNA, 19 nt, Artificial Sequence
  Description of Artificial Sequence: Synthetic oligonucleotide
aauuauauugcuugauggu

SEQ ID NO: 3271615 - RNA, 19 nt, Artificial Sequence
  Description of Artificial Sequence: Synthetic oligonucleotide
uuuaaauuuacaaccugga

SEQ ID NO: 3271616 - RNA, 19 nt, Artificial Sequence
  Description of Artificial Sequence: Synthetic oligonucleotide
aaucaaacucacuugcuug

SEQ ID NO: 3271617 - RNA, 19 nt, Artificial Sequence
  Description of Artificial Sequence: Synthetic oligonucleotide
cauggagauaauuauauug

SEQ ID NO: 3271618 - RNA, 19 nt, Artificial Sequence
  Description of Artificial Sequence: Synthetic oligonucleotide
uuuaucccggaacucaugg

SEQ ID NO: 3271619 - RNA, 19 nt, Artificial Sequence
  Description of Artificial Sequence: Synthetic oligonucleotide
aauuccagacuguugguag

SEQ ID NO: 3271620 - RNA, 19 nt, Artificial Sequence
  Description of Artificial Sequence: Synthetic oligonucleotide
cuuguauugaaaugggcgg

SEQ ID NO: 3271621 - RNA, 19 nt, Artificial Sequence
  Description of Artificial Sequence: Synthetic oligonucleotide
uugaauauuucuucuaaca

SEQ ID NO: 3271622 - RNA, 19 nt, Artificial Sequence
  Description of Artificial Sequence: Synthetic oligonucleotide
cuugcuuguauugaaaugg

SEQ ID NO: 3271623 - RNA, 19 nt, Artificial Sequence
  Description of Artificial Sequence: Synthetic oligonucleotide
auggagauaauuauauugc

SEQ ID NO: 3271624 - RNA, 19 nt, Artificial Sequence
  Description of Artificial Sequence: Synthetic oligonucleotide
ugaaauuugaauugguguc

SEQ ID NO: 3271625 - RNA, 19 nt, Artificial Sequence
  Description of Artificial Sequence: Synthetic oligonucleotide
uucaauaggcucuucaucu

SEQ ID NO: 3271626 - RNA, 19 nt, Artificial Sequence
  Description of Artificial Sequence: Synthetic oligonucleotide
uugauagugaaucucuuga

SEQ ID NO: 3271627 - RNA, 19 nt, Artificial Sequence
  Description of Artificial Sequence: Synthetic oligonucleotide
ucuguauggcuccagaccc

SEQ ID NO: 3271628 - RNA, 19 nt, Artificial Sequence
  Description of Artificial Sequence: Synthetic oligonucleotide
ucgagacagaucuugauag

SEQ ID NO: 3271629 - RNA, 19 nt, Artificial Sequence
  Description of Artificial Sequence: Synthetic oligonucleotide
augaaauuugaauuggugu

SEQ ID NO: 3271630 - RNA, 19 nt, Artificial Sequence
  Description of Artificial Sequence: Synthetic oligonucleotide
aaaccgagaaacugagaac

SEQ ID NO: 3271631 - RNA, 19 nt, Artificial Sequence
  Description of Artificial Sequence: Synthetic oligonucleotide
uccauaacaguguaucagg

SEQ ID NO: 3271632 - RNA, 19 nt, Artificial Sequence
  Description of Artificial Sequence: Synthetic oligonucleotide
gagacaagcagcuacaaga

SEQ ID NO: 3271633 - RNA, 19 nt, Artificial Sequence
  Description of Artificial Sequence: Synthetic oligonucleotide
acugagaacaguucacucg

SEQ ID NO: 3271634 - RNA, 19 nt, Artificial Sequence
  Description of Artificial Sequence: Synthetic oligonucleotide
ucuaacaucuuuaaauuua

SEQ ID NO: 3271635 - RNA, 19 nt, Artificial Sequence
  Description of Artificial Sequence: Synthetic oligonucleotide
aguauaggaggagacaagc

SEQ ID NO: 3271636 - RNA, 19 nt, Artificial Sequence
  Description of Artificial Sequence: Synthetic oligonucleotide
aaauacaucuuggaucccg

SEQ ID NO: 3271637 - RNA, 19 nt, Artificial Sequence
  Description of Artificial Sequence: Synthetic oligonucleotide
uaugcagcuaauuuauccc

SEQ ID NO: 3271638 - RNA, 19 nt, Artificial Sequence
  Description of Artificial Sequence: Synthetic oligonucleotide
aaacaaauacaucuuggau

SEQ ID NO: 3271639 - RNA, 19 nt, Artificial Sequence
  Description of Artificial Sequence: Synthetic oligonucleotide
ugcuugauggucuguaugg

SEQ ID NO: 3271640 - RNA, 19 nt, Artificial Sequence
  Description of Artificial Sequence: Synthetic oligonucleotide
agcuaauuuaucccggaac

SEQ ID NO: 3271641 - RNA, 19 nt, Artificial Sequence
  Description of Artificial Sequence: Synthetic oligonucleotide
gaauauuucuucuaacauc

SEQ ID NO: 3271642 - RNA, 19 nt, Artificial Sequence
  Description of Artificial Sequence: Synthetic oligonucleotide
uuuugaauauuucuucuaa

SEQ ID NO: 3271643 - RNA, 19 nt, Artificial Sequence
  Description of Artificial Sequence: Synthetic oligonucleotide
acaucuuggaucccguagc

SEQ ID NO: 3271644 - RNA, 19 nt, Artificial Sequence
  Description of Artificial Sequence: Synthetic oligonucleotide
augggugacaauuccagac

SEQ ID NO: 3271645 - RNA, 19 nt, Artificial Sequence
  Description of Artificial Sequence: Synthetic oligonucleotide
auuauauugcuugaugguc

SEQ ID NO: 3271646 - RNA, 19 nt, Artificial Sequence
  Description of Artificial Sequence: Synthetic oligonucleotide
uuauauugcuugauggucu

SEQ ID NO: 3271647 - RNA, 19 nt, Artificial Sequence
  Description of Artificial Sequence: Synthetic oligonucleotide
agaaaacaaauacaucuug

SEQ ID NO: 3271648 - RNA, 19 nt, Artificial Sequence
  Description of Artificial Sequence: Synthetic oligonucleotide
uggugcagaaaacaaauac

SEQ ID NO: 3271649 - RNA, 19 nt, Artificial Sequence
  Description of Artificial Sequence: Synthetic oligonucleotide
aacaguucacucgugacag

SEQ ID NO: 3271650 - RNA, 19 nt, Artificial Sequence
  Description of Artificial Sequence: Synthetic oligonucleotide
aaaugggcggcuucaucgc

SEQ ID NO: 3271651 - RNA, 19 nt, Artificial Sequence
  Description of Artificial Sequence: Synthetic oligonucleotide
uccaaguccuccauaacag

SEQ ID NO: 3271652 - RNA, 19 nt, Artificial Sequence
  Description of Artificial Sequence: Synthetic oligonucleotide
aacugagaacaguucacuc

SEQ ID NO: 3271653 - RNA, 19 nt, Artificial Sequence
  Description of Artificial Sequence: Synthetic oligonucleotide
ucuuuaaauuuacaaccug

SEQ ID NO: 3271654 - RNA, 19 nt, Artificial Sequence
  Description of Artificial Sequence: Synthetic oligonucleotide
uauauuuugacagcucccc

SEQ ID NO: 3271655 - RNA, 19 nt, Artificial Sequence
  Description of Artificial Sequence: Synthetic oligonucleotide
agaaacugagaacaguuca

SEQ ID NO: 3271656 - RNA, 19 nt, Artificial Sequence
  Description of Artificial Sequence: Synthetic oligonucleotide
ugaugggugacaauuccag

SEQ ID NO: 3271657 - RNA, 19 nt, Artificial Sequence
  Description of Artificial Sequence: Synthetic oligonucleotide
agacuguugguagaggucc

SEQ ID NO: 3271658 - RNA, 19 nt, Artificial Sequence
  Description of Artificial Sequence: Synthetic oligonucleotide
aacucauggagauaauuau

SEQ ID NO: 3271659 - RNA, 19 nt, Artificial Sequence
  Description of Artificial Sequence: Synthetic oligonucleotide
aaccgagaaacugagaaca

SEQ ID NO: 3271660 - RNA, 19 nt, Artificial Sequence
  Description of Artificial Sequence: Synthetic oligonucleotide
uaucccggaacucauggag

SEQ ID NO: 3271661 - RNA, 19 nt, Artificial Sequence
  Description of Artificial Sequence: Synthetic oligonucleotide
ucagacaaguauaggagga

SEQ ID NO: 3271662 - RNA, 19 nt, Artificial Sequence
  Description of Artificial Sequence: Synthetic oligonucleotide
uuaaauuuacaaccuggaa

SEQ ID NO: 3271663 - RNA, 19 nt, Artificial Sequence
  Description of Artificial Sequence: Synthetic oligonucleotide
uguggugauacugagucag

SEQ ID NO: 3271664 - RNA, 19 nt, Artificial Sequence
  Description of Artificial Sequence: Synthetic oligonucleotide
ugaugauagauaugcagcu

SEQ ID NO: 3271665 - RNA, 19 nt, Artificial Sequence
  Description of Artificial Sequence: Synthetic oligonucleotide
ugucuguucaucuucaaua

SEQ ID NO: 3271666 - RNA, 19 nt, Artificial Sequence
  Description of Artificial Sequence: Synthetic oligonucleotide
ucuggugcagaaaacaaau

SEQ ID NO: 3271667 - RNA, 19 nt, Artificial Sequence
  Description of Artificial Sequence: Synthetic oligonucleotide
cauaaaccgagaaacugag

SEQ ID NO: 3271668 - RNA, 19 nt, Artificial Sequence
  Description of Artificial Sequence: Synthetic oligonucleotide
agaacaguucacucgugac

SEQ ID NO: 3271669 - RNA, 19 nt, Artificial Sequence
  Description of Artificial Sequence: Synthetic oligonucleotide
uuccaaguccuccauaaca

SEQ ID NO: 3271670 - RNA, 19 nt, Artificial Sequence
  Description of Artificial Sequence: Synthetic oligonucleotide
uacaucuuggaucccguag

SEQ ID NO: 3271671 - RNA, 19 nt, Artificial Sequence
  Description of Artificial Sequence: Synthetic oligonucleotide
auuuacaaccuggaagagc

SEQ ID NO: 3271672 - RNA, 19 nt, Artificial Sequence
  Description of Artificial Sequence: Synthetic oligonucleotide
auagauaugcagcuaauuu

SEQ ID NO: 3271673 - RNA, 19 nt, Artificial Sequence
  Description of Artificial Sequence: Synthetic oligonucleotide
caugaaauuugaauuggug

SEQ ID NO: 3271674 - RNA, 19 nt, Artificial Sequence
  Description of Artificial Sequence: Synthetic oligonucleotide
cuaacaucuuuaaauuuac

SEQ ID NO: 3271675 - RNA, 19 nt, Artificial Sequence
  Description of Artificial Sequence: Synthetic oligonucleotide
uuugacagcuccccucugg

SEQ ID NO: 3271676 - RNA, 19 nt, Artificial Sequence
  Description of Artificial Sequence: Synthetic oligonucleotide
cuacaagacaagaucuucc

SEQ ID NO: 3271677 - RNA, 19 nt, Artificial Sequence
  Description of Artificial Sequence: Synthetic oligonucleotide
gagucagacaaguauagga

SEQ ID NO: 3271678 - RNA, 19 nt, Artificial Sequence
  Description of Artificial Sequence: Synthetic oligonucleotide
aauuggugucuguucaucu

SEQ ID NO: 3271679 - RNA, 19 nt, Artificial Sequence
  Description of Artificial Sequence: Synthetic oligonucleotide
auaacaguguaucaggguu

SEQ ID NO: 3271680 - RNA, 19 nt, Artificial Sequence
  Description of Artificial Sequence: Synthetic oligonucleotide
uuugggacucuauauuuug

SEQ ID NO: 3271681 - RNA, 19 nt, Artificial Sequence
  Description of Artificial Sequence: Synthetic oligonucleotide
gucagacaaguauaggagg

SEQ ID NO: 3271682 - RNA, 19 nt, Artificial Sequence
  Description of Artificial Sequence: Synthetic oligonucleotide
ucaucugaagaaucaaacu

SEQ ID NO: 3271683 - RNA, 19 nt, Artificial Sequence
  Description of Artificial Sequence: Synthetic oligonucleotide
uugcuuguauugaaauggg

SEQ ID NO: 3271684 - RNA, 19 nt, Artificial Sequence
  Description of Artificial Sequence: Synthetic oligonucleotide
ucuguucaucuucaauagg

SEQ ID NO: 3271685 - RNA, 19 nt, Artificial Sequence
  Description of Artificial Sequence: Synthetic oligonucleotide
uaauuuaucccggaacuca

SEQ ID NO: 3271686 - RNA, 19 nt, Artificial Sequence
  Description of Artificial Sequence: Synthetic oligonucleotide
aacucacuugcuuguauug

SEQ ID NO: 3271687 - RNA, 19 nt, Artificial Sequence
  Description of Artificial Sequence: Synthetic oligonucleotide
uacugagucagacaaguau

SEQ ID NO: 3271688 - RNA, 19 nt, Artificial Sequence
  Description of Artificial Sequence: Synthetic oligonucleotide
aagguuugggacucuauau

SEQ ID NO: 3271689 - RNA, 19 nt, Artificial Sequence
  Description of Artificial Sequence: Synthetic oligonucleotide
agccaugaaauuugaauug

SEQ ID NO: 3271690 - RNA, 19 nt, Artificial Sequence
  Description of Artificial Sequence: Synthetic oligonucleotide
augcagcuaauuuaucccg

SEQ ID NO: 3271691 - RNA, 19 nt, Artificial Sequence
  Description of Artificial Sequence: Synthetic oligonucleotide
uacaagacaagaucuucca

SEQ ID NO: 3271692 - RNA, 19 nt, Artificial Sequence
  Description of Artificial Sequence: Synthetic oligonucleotide
ucacucgugacagugguag

SEQ ID NO: 3271693 - RNA, 19 nt, Artificial Sequence
  Description of Artificial Sequence: Synthetic oligonucleotide
uuugaauuggugucuguuc

SEQ ID NO: 3271694 - RNA, 19 nt, Artificial Sequence
  Description of Artificial Sequence: Synthetic oligonucleotide
ucuuuaguuccucuguauc

SEQ ID NO: 3271695 - RNA, 19 nt, Artificial Sequence
  Description of Artificial Sequence: Synthetic oligonucleotide
uagccaugaaauuugaauu

SEQ ID NO: 3271696 - RNA, 19 nt, Artificial Sequence
  Description of Artificial Sequence: Synthetic oligonucleotide
aaauauaccauaguaacac

SEQ ID NO: 3271697 - RNA, 19 nt, Artificial Sequence
  Description of Artificial Sequence: Synthetic oligonucleotide
uauagaauagugcaaauga

SEQ ID NO: 3271698 - RNA, 19 nt, Artificial Sequence
  Description of Artificial Sequence: Synthetic oligonucleotide
uucacaauugugcagauga

SEQ ID NO: 3271699 - RNA, 19 nt, Artificial Sequence
  Description of Artificial Sequence: Synthetic oligonucleotide
agaguaaugagacauagca

SEQ ID NO: 3271700 - RNA, 19 nt, Artificial Sequence
  Description of Artificial Sequence: Synthetic oligonucleotide
gauaugauggaguauuuug

SEQ ID NO: 3271701 - RNA, 19 nt, Artificial Sequence
  Description of Artificial Sequence: Synthetic oligonucleotide
aauuauuucagguuuucau

SEQ ID NO: 3271702 - RNA, 19 nt, Artificial Sequence
  Description of Artificial Sequence: Synthetic oligonucleotide
aacaugauuacauaauaaa

SEQ ID NO: 3271703 - RNA, 19 nt, Artificial Sequence
  Description of Artificial Sequence: Synthetic oligonucleotide
aaugacugcacgugcaggg

SEQ ID NO: 3271704 - RNA, 19 nt, Artificial Sequence
  Description of Artificial Sequence: Synthetic oligonucleotide
uaacacagcagcaauagca

SEQ ID NO: 3271705 - RNA, 19 nt, Artificial Sequence
  Description of Artificial Sequence: Synthetic oligonucleotide
uuuccauuuagaaacugag

SEQ ID NO: 3271706 - RNA, 19 nt, Artificial Sequence
  Description of Artificial Sequence: Synthetic oligonucleotide
agauucuccagccuugugc

SEQ ID NO: 3271707 - RNA, 19 nt, Artificial Sequence
  Description of Artificial Sequence: Synthetic oligonucleotide
ugucauaucgagcaauucc

SEQ ID NO: 3271708 - RNA, 19 nt, Artificial Sequence
  Description of Artificial Sequence: Synthetic oligonucleotide
auaacaccuuuauaaaugg

SEQ ID NO: 3271709 - RNA, 19 nt, Artificial Sequence
  Description of Artificial Sequence: Synthetic oligonucleotide
auuuaguucaucccaggcg

SEQ ID NO: 3271710 - RNA, 19 nt, Artificial Sequence
  Description of Artificial Sequence: Synthetic oligonucleotide
uuuaguucaucccaggcgu

SEQ ID NO: 3271711 - RNA, 19 nt, Artificial Sequence
  Description of Artificial Sequence: Synthetic oligonucleotide
aacaagguagaguaaugag

SEQ ID NO: 3271712 - RNA, 19 nt, Artificial Sequence
  Description of Artificial Sequence: Synthetic oligonucleotide
uaaucauauuagcagacug

SEQ ID NO: 3271713 - RNA, 19 nt, Artificial Sequence
  Description of Artificial Sequence: Synthetic oligonucleotide
uguuaugacuuuaauguac

SEQ ID NO: 3271714 - RNA, 19 nt, Artificial Sequence
  Description of Artificial Sequence: Synthetic oligonucleotide
auuuccgccagcuccaggc

SEQ ID NO: 3271715 - RNA, 19 nt, Artificial Sequence
  Description of Artificial Sequence: Synthetic oligonucleotide
uaauuuacuggacaugaga

SEQ ID NO: 3271716 - RNA, 19 nt, Artificial Sequence
  Description of Artificial Sequence: Synthetic oligonucleotide
aaagagccacuacacaagg

SEQ ID NO: 3271717 - RNA, 19 nt, Artificial Sequence
  Description of Artificial Sequence: Synthetic oligonucleotide
uguuaucuacaauugcagg

SEQ ID NO: 3271718 - RNA, 19 nt, Artificial Sequence
  Description of Artificial Sequence: Synthetic oligonucleotide
uugauuauaggagacaagu

SEQ ID NO: 3271719 - RNA, 19 nt, Artificial Sequence
  Description of Artificial Sequence: Synthetic oligonucleotide
aaauguauccuguuccaca

SEQ ID NO: 3271720 - RNA, 19 nt, Artificial Sequence
  Description of Artificial Sequence: Synthetic oligonucleotide
ucaguuacuucccuuucgg

SEQ ID NO: 3271721 - RNA, 19 nt, Artificial Sequence
  Description of Artificial Sequence: Synthetic oligonucleotide
ucauaaguagacuuugcca

SEQ ID NO: 3271722 - RNA, 19 nt, Artificial Sequence
  Description of Artificial Sequence: Synthetic oligonucleotide
uggacuaugagugacagaa

SEQ ID NO: 3271723 - RNA, 19 nt, Artificial Sequence
  Description of Artificial Sequence: Synthetic oligonucleotide
uuucuuccaauucauaaaa

SEQ ID NO: 3271724 - RNA, 19 nt, Artificial Sequence
  Description of Artificial Sequence: Synthetic oligonucleotide
uuaggaugacccaucauga

SEQ ID NO: 3271725 - RNA, 19 nt, Artificial Sequence
  Description of Artificial Sequence: Synthetic oligonucleotide
ugaacaacauuuguggcag

SEQ ID NO: 3271726 - RNA, 19 nt, Artificial Sequence
  Description of Artificial Sequence: Synthetic oligonucleotide
gacaauuuagcuguggcug

SEQ ID NO: 3271727 - RNA, 19 nt, Artificial Sequence
  Description of Artificial Sequence: Synthetic oligonucleotide
cuaacaaucuugcaugcag

SEQ ID NO: 3271728 - RNA, 19 nt, Artificial Sequence
  Description of Artificial Sequence: Synthetic oligonucleotide
aaucauuuuaugcauuguu

SEQ ID NO: 3271729 - RNA, 19 nt, Artificial Sequence
  Description of Artificial Sequence: Synthetic oligonucleotide
guuaucuacaugcugacuc

SEQ ID NO: 3271730 - RNA, 19 nt, Artificial Sequence
  Description of Artificial Sequence: Synthetic oligonucleotide
ucauuuuaugcauuguuuc

SEQ ID NO: 3271731 - RNA, 19 nt, Artificial Sequence
  Description of Artificial Sequence: Synthetic oligonucleotide
ucuaccaacaagacuagaa

SEQ ID NO: 3271732 - RNA, 19 nt, Artificial Sequence
  Description of Artificial Sequence: Synthetic oligonucleotide
guuuaguucuucaacagcc

SEQ ID NO: 3271733 - RNA, 19 nt, Artificial Sequence
  Description of Artificial Sequence: Synthetic oligonucleotide
uaauuguacauauggggca

SEQ ID NO: 3271734 - RNA, 19 nt, Artificial Sequence
  Description of Artificial Sequence: Synthetic oligonucleotide
uauggggcaacaaauugca

SEQ ID NO: 3271735 - RNA, 19 nt, Artificial Sequence
  Description of Artificial Sequence: Synthetic oligonucleotide
uccagugaauccauuaucu

SEQ ID NO: 3271736 - RNA, 19 nt, Artificial Sequence
  Description of Artificial Sequence: Synthetic oligonucleotide
uuucuuuauauugugaaau

SEQ ID NO: 3271737 - RNA, 19 nt, Artificial Sequence
  Description of Artificial Sequence: Synthetic oligonucleotide
uaacauaguuaaaagacuu

SEQ ID NO: 3271738 - RNA, 19 nt, Artificial Sequence
  Description of Artificial Sequence: Synthetic oligonucleotide
uguuauucacaaauagcac

SEQ ID NO: 3271739 - RNA, 19 nt, Artificial Sequence
  Description of Artificial Sequence: Synthetic oligonucleotide
cacuaugugucauaguccc

SEQ ID NO: 3271740 - RNA, 19 nt, Artificial Sequence
  Description of Artificial Sequence: Synthetic oligonucleotide
acaaaacuuauuuuggaau

SEQ ID NO: 3271741 - RNA, 19 nt, Artificial Sequence
  Description of Artificial Sequence: Synthetic oligonucleotide
uaaauuucccagcaacugu

SEQ ID NO: 3271742 - RNA, 19 nt, Artificial Sequence
  Description of Artificial Sequence: Synthetic oligonucleotide
auuagcuuauauuaauuau

SEQ ID NO: 3271743 - RNA, 19 nt, Artificial Sequence
  Description of Artificial Sequence: Synthetic oligonucleotide
uaugacuuuaauguacuca

SEQ ID NO: 3271744 - RNA, 19 nt, Artificial Sequence
  Description of Artificial Sequence: Synthetic oligonucleotide
uccugaucuaacaaucuug

SEQ ID NO: 3271745 - RNA, 19 nt, Artificial Sequence
  Description of Artificial Sequence: Synthetic oligonucleotide
agugcugugcuguacaucu

SEQ ID NO: 3271746 - RNA, 19 nt, Artificial Sequence
  Description of Artificial Sequence: Synthetic oligonucleotide
ugauuaaacccaaaaguuu

SEQ ID NO: 3271747 - RNA, 19 nt, Artificial Sequence
  Description of Artificial Sequence: Synthetic oligonucleotide
uuggacuuccaauacaccu

SEQ ID NO: 3271748 - RNA, 19 nt, Artificial Sequence
  Description of Artificial Sequence: Synthetic oligonucleotide
aauauaccauaguaacaca

SEQ ID NO: 3271749 - RNA, 19 nt, Artificial Sequence
  Description of Artificial Sequence: Synthetic oligonucleotide
ucuacaauugcaggaauca

SEQ ID NO: 3271750 - RNA, 19 nt, Artificial Sequence
  Description of Artificial Sequence: Synthetic oligonucleotide
uuuucuuccaauucauaaa

SEQ ID NO: 3271751 - RNA, 19 nt, Artificial Sequence
  Description of Artificial Sequence: Synthetic oligonucleotide
aauuuacuggacaugagau

SEQ ID NO: 3271752 - RNA, 19 nt, Artificial Sequence
  Description of Artificial Sequence: Synthetic oligonucleotide
auauggggcaacaaauugc

SEQ ID NO: 3271753 - RNA, 19 nt, Artificial Sequence
  Description of Artificial Sequence: Synthetic oligonucleotide
aaaacggucguaauuccag

SEQ ID NO: 3271754 - RNA, 19 nt, Artificial Sequence
  Description of Artificial Sequence: Synthetic oligonucleotide
ucuuacggccauaauaccu

SEQ ID NO: 3271755 - RNA, 19 nt, Artificial Sequence
  Description of Artificial Sequence: Synthetic oligonucleotide
auuuaagauuagcuacugg

SEQ ID NO: 3271756 - RNA, 19 nt, Artificial Sequence
  Description of Artificial Sequence: Synthetic oligonucleotide
uccacaucuucccuuauga

SEQ ID NO: 3271757 - RNA, 19 nt, Artificial Sequence
  Description of Artificial Sequence: Synthetic oligonucleotide
agaaggacagaucuguacu

SEQ ID NO: 3271758 - RNA, 19 nt, Artificial Sequence
  Description of Artificial Sequence: Synthetic oligonucleotide
aucuucagaaaacccagag

SEQ ID NO: 3271759 - RNA, 19 nt, Artificial Sequence
  Description of Artificial Sequence: Synthetic oligonucleotide
uuggaguugagauuguuau

SEQ ID NO: 3271760 - RNA, 19 nt, Artificial Sequence
  Description of Artificial Sequence: Synthetic oligonucleotide
uaugagaucgccuuccuuu

SEQ ID NO: 3271761 - RNA, 19 nt, Artificial Sequence
  Description of Artificial Sequence: Synthetic oligonucleotide
gagaauuacacaacugggc

SEQ ID NO: 3271762 - RNA, 19 nt, Artificial Sequence
  Description of Artificial Sequence: Synthetic oligonucleotide
uagcuuauauuaauuauuu

SEQ ID NO: 3271763 - RNA, 19 nt, Artificial Sequence
  Description of Artificial Sequence: Synthetic oligonucleotide
augcaggcaacucaaaaug

SEQ ID NO: 3271764 - RNA, 19 nt, Artificial Sequence
  Description of Artificial Sequence: Synthetic oligonucleotide
augaacaacauuuguggca

SEQ ID NO: 3271765 - RNA, 19 nt, Artificial Sequence
  Description of Artificial Sequence: Synthetic oligonucleotide
uacucagcacuuucuaagg

SEQ ID NO: 3271766 - RNA, 19 nt, Artificial Sequence
  Description of Artificial Sequence: Synthetic oligonucleotide
aagauuucaguugucauua

SEQ ID NO: 3271767 - RNA, 19 nt, Artificial Sequence
  Description of Artificial Sequence: Synthetic oligonucleotide
gacuaugagugacagaaga

SEQ ID NO: 3271768 - RNA, 19 nt, Artificial Sequence
  Description of Artificial Sequence: Synthetic oligonucleotide
agcaaaauaacaccuuuau

SEQ ID NO: 3271769 - RNA, 19 nt, Artificial Sequence
  Description of Artificial Sequence: Synthetic oligonucleotide
acuaauuacuacugagucu

SEQ ID NO: 3271770 - RNA, 19 nt, Artificial Sequence
  Description of Artificial Sequence: Synthetic oligonucleotide
uagccuauuauuccuuuug

SEQ ID NO: 3271771 - RNA, 19 nt, Artificial Sequence
  Description of Artificial Sequence: Synthetic oligonucleotide
aauuaguguuugcacacaa

SEQ ID NO: 3271772 - RNA, 19 nt, Artificial Sequence
  Description of Artificial Sequence: Synthetic oligonucleotide
aaucauauuagcagacuga

SEQ ID NO: 3271773 - RNA, 19 nt, Artificial Sequence
  Description of Artificial Sequence: Synthetic oligonucleotide
cagaugaugaccucgugug

SEQ ID NO: 3271774 - RNA, 19 nt, Artificial Sequence
  Description of Artificial Sequence: Synthetic oligonucleotide
uucuaaggaauucgaggag

SEQ ID NO: 3271775 - RNA, 19 nt, Artificial Sequence
  Description of Artificial Sequence: Synthetic oligonucleotide
uucuuuaauauaugguaaa

SEQ ID NO: 3271776 - RNA, 19 nt, Artificial Sequence
  Description of Artificial Sequence: Synthetic oligonucleotide
aauucgaggagcugguuuu

SEQ ID NO: 3271777 - RNA, 19 nt, Artificial Sequence
  Description of Artificial Sequence: Synthetic oligonucleotide
auuucaguugucauuaugu

SEQ ID NO: 3271778 - RNA, 19 nt, Artificial Sequence
  Description of Artificial Sequence: Synthetic oligonucleotide
auaaauucugacccaucug

SEQ ID NO: 3271779 - RNA, 19 nt, Artificial Sequence
  Description of Artificial Sequence: Synthetic oligonucleotide
ugcaaaauauagcuuuaaa

SEQ ID NO: 3271780 - RNA, 19 nt, Artificial Sequence
  Description of Artificial Sequence: Synthetic oligonucleotide
gauuucaguugucauuaug

SEQ ID NO: 3271781 - RNA, 19 nt, Artificial Sequence
  Description of Artificial Sequence: Synthetic oligonucleotide
uuagaaucaugaagucgag

SEQ ID NO: 3271782 - RNA, 19 nt, Artificial Sequence
  Description of Artificial Sequence: Synthetic oligonucleotide
auauaccauaguaacacag

SEQ ID NO: 3271783 - RNA, 19 nt, Artificial Sequence
  Description of Artificial Sequence: Synthetic oligonucleotide
gaaaugacugcacgugcag

SEQ ID NO: 3271784 - RNA, 19 nt, Artificial Sequence
  Description of Artificial Sequence: Synthetic oligonucleotide
cauauggggcaacaaauug

SEQ ID NO: 3271785 - RNA, 19 nt, Artificial Sequence
  Description of Artificial Sequence: Synthetic oligonucleotide
uuuucugucauaucuuguu

SEQ ID NO: 3271786 - RNA, 19 nt, Artificial Sequence
  Description of Artificial Sequence: Synthetic oligonucleotide
uguucguauauuuccgcca

SEQ ID NO: 3271787 - RNA, 19 nt, Artificial Sequence
  Description of Artificial Sequence: Synthetic oligonucleotide
ucguaauuccagugaaucc

SEQ ID NO: 3271788 - RNA, 19 nt, Artificial Sequence
  Description of Artificial Sequence: Synthetic oligonucleotide
agugaauccauuaucucug

SEQ ID NO: 3271789 - RNA, 19 nt, Artificial Sequence
  Description of Artificial Sequence: Synthetic oligonucleotide
uuuauucguucccagggau

SEQ ID NO: 3271790 - RNA, 19 nt, Artificial Sequence
  Description of Artificial Sequence: Synthetic oligonucleotide
cuuauagucuuccugaucu

SEQ ID NO: 3271791 - RNA, 19 nt, Artificial Sequence
  Description of Artificial Sequence: Synthetic oligonucleotide
ugcaggcaacucaaaaugc

SEQ ID NO: 3271792 - RNA, 19 nt, Artificial Sequence
  Description of Artificial Sequence: Synthetic oligonucleotide
aaaagcaucucgagaaaca

SEQ ID NO: 3271793 - RNA, 19 nt, Artificial Sequence
  Description of Artificial Sequence: Synthetic oligonucleotide
uaugaauguguuagauucu

SEQ ID NO: 3271794 - RNA, 19 nt, Artificial Sequence
  Description of Artificial Sequence: Synthetic oligonucleotide
gaugcaucacuuucagaug

SEQ ID NO: 3271795 - RNA, 19 nt, Artificial Sequence
  Description of Artificial Sequence: Synthetic oligonucleotide
agugacagaagauauucuu

SEQ ID NO: 3271796 - RNA, 19 nt, Artificial Sequence
  Description of Artificial Sequence: Synthetic oligonucleotide
cuuacuuugguguagacgc

SEQ ID NO: 3271797 - RNA, 19 nt, Artificial Sequence
  Description of Artificial Sequence: Synthetic oligonucleotide
gucuuugucacuuugauag

SEQ ID NO: 3271798 - RNA, 19 nt, Artificial Sequence
  Description of Artificial Sequence: Synthetic oligonucleotide
ucuuagagaaaguagcugg

SEQ ID NO: 3271799 - RNA, 19 nt, Artificial Sequence
  Description of Artificial Sequence: Synthetic oligonucleotide
augucauugucacuggugc

SEQ ID NO: 3271800 - RNA, 19 nt, Artificial Sequence
  Description of Artificial Sequence: Synthetic oligonucleotide
uguugaguugcccacagcc

SEQ ID NO: 3271801 - RNA, 19 nt, Artificial Sequence
  Description of Artificial Sequence: Synthetic oligonucleotide
uucucugagaccauguugc

SEQ ID NO: 3271802 - RNA, 19 nt, Artificial Sequence
  Description of Artificial Sequence: Synthetic oligonucleotide
aaggugaggacagagguac

SEQ ID NO: 3271803 - RNA, 19 nt, Artificial Sequence
  Description of Artificial Sequence: Synthetic oligonucleotide
auccauucgagguagcggc

SEQ ID NO: 3271804 - RNA, 19 nt, Artificial Sequence
  Description of Artificial Sequence: Synthetic oligonucleotide
uggucuuagagaaaguagc

SEQ ID NO: 3271805 - RNA, 19 nt, Artificial Sequence
  Description of Artificial Sequence: Synthetic oligonucleotide
uuguccggcaggcagaugg

SEQ ID NO: 3271806 - RNA, 19 nt, Artificial Sequence
  Description of Artificial Sequence: Synthetic oligonucleotide
ucugagaccauguugcuca

SEQ ID NO: 3271807 - RNA, 19 nt, Artificial Sequence
  Description of Artificial Sequence: Synthetic oligonucleotide
acagcauguucucugagac

SEQ ID NO: 3271808 - RNA, 19 nt, Artificial Sequence
  Description of Artificial Sequence: Synthetic oligonucleotide
ugcaaugucauugucacug

SEQ ID NO: 3271809 - RNA, 19 nt, Artificial Sequence
  Description of Artificial Sequence: Synthetic oligonucleotide
agagaaaguagcuggcugg

SEQ ID NO: 3271810 - RNA, 19 nt, Artificial Sequence
  Description of Artificial Sequence: Synthetic oligonucleotide
ugaaggugaggacagaggu

SEQ ID NO: 3271811 - RNA, 19 nt, Artificial Sequence
  Description of Artificial Sequence: Synthetic oligonucleotide
gaugccugcacacagcaug

SEQ ID NO: 3271812 - RNA, 19 nt, Artificial Sequence
  Description of Artificial Sequence: Synthetic oligonucleotide
acuauggucuuagagaaag

SEQ ID NO: 3271813 - RNA, 19 nt, Artificial Sequence
  Description of Artificial Sequence: Synthetic oligonucleotide
uugcucaugaccugcaugc

SEQ ID NO: 3271814 - RNA, 19 nt, Artificial Sequence
  Description of Artificial Sequence: Synthetic oligonucleotide
gaaaguagcuggcugggcc

SEQ ID NO: 3271815 - RNA, 19 nt, Artificial Sequence
  Description of Artificial Sequence: Synthetic oligonucleotide
agggaagcauccuugucgc

SEQ ID NO: 3271816 - RNA, 19 nt, Artificial Sequence
  Description of Artificial Sequence: Synthetic oligonucleotide
ucugccaggccauuguccg

SEQ ID NO: 3271817 - RNA, 19 nt, Artificial Sequence
  Description of Artificial Sequence: Synthetic oligonucleotide
uucacaggcaucucuacug

SEQ ID NO: 3271818 - RNA, 19 nt, Artificial Sequence
  Description of Artificial Sequence: Synthetic oligonucleotide
uuugguguagacgccauag

SEQ ID NO: 3271819 - RNA, 19 nt, Artificial Sequence
  Description of Artificial Sequence: Synthetic oligonucleotide
agugagcucacgcucugcc

SEQ ID NO: 3271820 - RNA, 19 nt, Artificial Sequence
  Description of Artificial Sequence: Synthetic oligonucleotide
guugcuguggauccauucg

SEQ ID NO: 3271821 - RNA, 19 nt, Artificial Sequence
  Description of Artificial Sequence: Synthetic oligonucleotide
uagagaaaguagcuggcug

SEQ ID NO: 3271822 - RNA, 19 nt, Artificial Sequence
  Description of Artificial Sequence: Synthetic oligonucleotide
uuugucacuuugauagccc

SEQ ID NO: 3271823 - RNA, 19 nt, Artificial Sequence
  Description of Artificial Sequence: Synthetic oligonucleotide
cagggaagcauccuugucg

SEQ ID NO: 3271824 - RNA, 19 nt, Artificial Sequence
  Description of Artificial Sequence: Synthetic oligonucleotide
acagagguacgguuccucc

SEQ ID NO: 3271825 - RNA, 19 nt, Artificial Sequence
  Description of Artificial Sequence: Synthetic oligonucleotide
cuuagagaaaguagcuggc

SEQ ID NO: 3271826 - RNA, 19 nt, Artificial Sequence
  Description of Artificial Sequence: Synthetic oligonucleotide
auaguuguugaguugccca

SEQ ID NO: 3271827 - RNA, 19 nt, Artificial Sequence
  Description of Artificial Sequence: Synthetic oligonucleotide
aggacagagguacgguucc

SEQ ID NO: 3271828 - RNA, 19 nt, Artificial Sequence
  Description of Artificial Sequence: Synthetic oligonucleotide
uuugucuuugucacuuuga

SEQ ID NO: 3271829 - RNA, 19 nt, Artificial Sequence
  Description of Artificial Sequence: Synthetic oligonucleotide
ugagcucacgcucugccag

SEQ ID NO: 3271830 - RNA, 19 nt, Artificial Sequence
  Description of Artificial Sequence: Synthetic oligonucleotide
gagguagcggcuuacuuug

SEQ ID NO: 3271831 - RNA, 19 nt, Artificial Sequence
  Description of Artificial Sequence: Synthetic oligonucleotide
uugcccacagcccucaccc

SEQ ID NO: 3271832 - RNA, 19 nt, Artificial Sequence
  Description of Artificial Sequence: Synthetic oligonucleotide
aaugucauugucacuggug

SEQ ID NO: 3271833 - RNA, 19 nt, Artificial Sequence
  Description of Artificial Sequence: Synthetic oligonucleotide
guuucgugggaccacgggg

SEQ ID NO: 3271834 - RNA, 19 nt, Artificial Sequence
  Description of Artificial Sequence: Synthetic oligonucleotide
aaaguagcuggcugggcca

SEQ ID NO: 3271835 - RNA, 19 nt, Artificial Sequence
  Description of Artificial Sequence: Synthetic oligonucleotide
agcauguucucugagacca

SEQ ID NO: 3271836 - RNA, 19 nt, Artificial Sequence
  Description of Artificial Sequence: Synthetic oligonucleotide
uugaguugcccacagcccu

SEQ ID NO: 3271837 - RNA, 19 nt, Artificial Sequence
  Description of Artificial Sequence: Synthetic oligonucleotide
uuucgugggaccacgggga

SEQ ID NO: 3271838 - RNA, 19 nt, Artificial Sequence
  Description of Artificial Sequence: Synthetic oligonucleotide
gagaccauguugcucauga

SEQ ID NO: 3271839 - RNA, 19 nt, Artificial Sequence
  Description of Artificial Sequence: Synthetic oligonucleotide
uuugauagccccagccugu

SEQ ID NO: 3271840 - RNA, 19 nt, Artificial Sequence
  Description of Artificial Sequence: Synthetic oligonucleotide
caugcacucguuucguggg

SEQ ID NO: 3271841 - RNA, 19 nt, Artificial Sequence
  Description of Artificial Sequence: Synthetic oligonucleotide
uccuugucgccaauguugc

SEQ ID NO: 3271842 - RNA, 19 nt, Artificial Sequence
  Description of Artificial Sequence: Synthetic oligonucleotide
accaaggaugccugcacac

SEQ ID NO: 3271843 - RNA, 19 nt, Artificial Sequence
  Description of Artificial Sequence: Synthetic oligonucleotide
cuuugauagccccagccug

SEQ ID NO: 3271844 - RNA, 19 nt, Artificial Sequence
  Description of Artificial Sequence: Synthetic oligonucleotide
gauccauucgagguagcgg

SEQ ID NO: 3271845 - RNA, 19 nt, Artificial Sequence
  Description of Artificial Sequence: Synthetic oligonucleotide
cccacugucaccuucacag

SEQ ID NO: 3271846 - RNA, 19 nt, Artificial Sequence
  Description of Artificial Sequence: Synthetic oligonucleotide
cuuugucacuuugauagcc

SEQ ID NO: 3271847 - RNA, 19 nt, Artificial Sequence
  Description of Artificial Sequence: Synthetic oligonucleotide
acuuugauagccccagccu

SEQ ID NO: 3271848 - RNA, 19 nt, Artificial Sequence
  Description of Artificial Sequence: Synthetic oligonucleotide
cacuuugauagccccagcc

SEQ ID NO: 3271849 - RNA, 19 nt, Artificial Sequence
  Description of Artificial Sequence: Synthetic oligonucleotide
uugucuuugucacuuugau

SEQ ID NO: 3271850 - RNA, 19 nt, Artificial Sequence
  Description of Artificial Sequence: Synthetic oligonucleotide
uugucacuuugauagcccc

SEQ ID NO: 3271851 - RNA, 19 nt, Artificial Sequence
  Description of Artificial Sequence: Synthetic oligonucleotide
guucucugagaccauguug

SEQ ID NO: 3271852 - RNA, 19 nt, Artificial Sequence
  Description of Artificial Sequence: Synthetic oligonucleotide
uauggucuuagagaaagua

SEQ ID NO: 3271853 - RNA, 19 nt, Artificial Sequence
  Description of Artificial Sequence: Synthetic oligonucleotide
accugcaugcacucguuuc

SEQ ID NO: 3271854 - RNA, 19 nt, Artificial Sequence
  Description of Artificial Sequence: Synthetic oligonucleotide
gagcagugcaaugucauug

SEQ ID NO: 3271855 - RNA, 19 nt, Artificial Sequence
  Description of Artificial Sequence: Synthetic oligonucleotide
gagaaaguagcuggcuggg

SEQ ID NO: 3271856 - RNA, 19 nt, Artificial Sequence
  Description of Artificial Sequence: Synthetic oligonucleotide
uugcuguggauccauucga

SEQ ID NO: 3271857 - RNA, 19 nt, Artificial Sequence
  Description of Artificial Sequence: Synthetic oligonucleotide
aaggaugccugcacacagc

SEQ ID NO: 3271858 - RNA, 19 nt, Artificial Sequence
  Description of Artificial Sequence: Synthetic oligonucleotide
ugcuguggauccauucgag

SEQ ID NO: 3271859 - RNA, 19 nt, Artificial Sequence
  Description of Artificial Sequence: Synthetic oligonucleotide
auggucuuagagaaaguag

SEQ ID NO: 3271860 - RNA, 19 nt, Artificial Sequence
  Description of Artificial Sequence: Synthetic oligonucleotide
agcccgagugagcucacgc

SEQ ID NO: 3271861 - RNA, 19 nt, Artificial Sequence
  Description of Artificial Sequence: Synthetic oligonucleotide
caaggaugccugcacacag

SEQ ID NO: 3271862 - RNA, 19 nt, Artificial Sequence
  Description of Artificial Sequence: Synthetic oligonucleotide
uguggauccauucgaggua

SEQ ID NO: 3271863 - RNA, 19 nt, Artificial Sequence
  Description of Artificial Sequence: Synthetic oligonucleotide
ugguguagacgccauaguu

SEQ ID NO: 3271864 - RNA, 19 nt, Artificial Sequence
  Description of Artificial Sequence: Synthetic oligonucleotide
guuguugaguugcccacag

SEQ ID NO: 3271865 - RNA, 19 nt, Artificial Sequence
  Description of Artificial Sequence: Synthetic oligonucleotide
ggcacuauggucuuagaga

SEQ ID NO: 3271866 - RNA, 19 nt, Artificial Sequence
  Description of Artificial Sequence: Synthetic oligonucleotide
ucuuugucacuuugauagc

SEQ ID NO: 3271867 - RNA, 19 nt, Artificial Sequence
  Description of Artificial Sequence: Synthetic oligonucleotide
auccuugucgccaauguug

SEQ ID NO: 3271868 - RNA, 19 nt, Artificial Sequence
  Description of Artificial Sequence: Synthetic oligonucleotide
agagguacgguuccuccug

SEQ ID NO: 3271869 - RNA, 19 nt, Artificial Sequence
  Description of Artificial Sequence: Synthetic oligonucleotide
guagacgccauaguuguug

SEQ ID NO: 3271870 - RNA, 19 nt, Artificial Sequence
  Description of Artificial Sequence: Synthetic oligonucleotide
uuacuuugguguagacgcc

SEQ ID NO: 3271871 - RNA, 19 nt, Artificial Sequence
  Description of Artificial Sequence: Synthetic oligonucleotide
cucaccaggcccaccagcc

SEQ ID NO: 3271872 - RNA, 19 nt, Artificial Sequence
  Description of Artificial Sequence: Synthetic oligonucleotide
auagccccagccugucacc

SEQ ID NO: 3271873 - RNA, 19 nt, Artificial Sequence
  Description of Artificial Sequence: Synthetic oligonucleotide
uaguuguugaguugcccac

SEQ ID NO: 3271874 - RNA, 19 nt, Artificial Sequence
  Description of Artificial Sequence: Synthetic oligonucleotide
acugucaccaaggaugccu

SEQ ID NO: 3271875 - RNA, 19 nt, Artificial Sequence
  Description of Artificial Sequence: Synthetic oligonucleotide
ucgccaauguugcugugga

SEQ ID NO: 3271876 - RNA, 19 nt, Artificial Sequence
  Description of Artificial Sequence: Synthetic oligonucleotide
cuuugucuuugucacuuug

SEQ ID NO: 3271877 - RNA, 19 nt, Artificial Sequence
  Description of Artificial Sequence: Synthetic oligonucleotide
uagcggcuuacuuuggugu

SEQ ID NO: 3271878 - RNA, 19 nt, Artificial Sequence
  Description of Artificial Sequence: Synthetic oligonucleotide
ugucacuuugauagcccca

SEQ ID NO: 3271879 - RNA, 19 nt, Artificial Sequence
  Description of Artificial Sequence: Synthetic oligonucleotide
cacugucaccuucacaggc

SEQ ID NO: 3271880 - RNA, 19 nt, Artificial Sequence
  Description of Artificial Sequence: Synthetic oligonucleotide
ucucuacugucaccaagga

SEQ ID NO: 3271881 - RNA, 19 nt, Artificial Sequence
  Description of Artificial Sequence: Synthetic oligonucleotide
aggcagaugggcacuaugg

SEQ ID NO: 3271882 - RNA, 19 nt, Artificial Sequence
  Description of Artificial Sequence: Synthetic oligonucleotide
guugcucaugaccugcaug

SEQ ID NO: 3271883 - RNA, 19 nt, Artificial Sequence
  Description of Artificial Sequence: Synthetic oligonucleotide
ucuucagggaagcauccuu

SEQ ID NO: 3271884 - RNA, 19 nt, Artificial Sequence
  Description of Artificial Sequence: Synthetic oligonucleotide
augaccugcaugcacucgu

SEQ ID NO: 3271885 - RNA, 19 nt, Artificial Sequence
  Description of Artificial Sequence: Synthetic oligonucleotide
cuugucgccaauguugcug

SEQ ID NO: 3271886 - RNA, 19 nt, Artificial Sequence
  Description of Artificial Sequence: Synthetic oligonucleotide
gucacuuugauagccccag

SEQ ID NO: 3271887 - RNA, 19 nt, Artificial Sequence
  Description of Artificial Sequence: Synthetic oligonucleotide
ucacaggcaucucuacugu

SEQ ID NO: 3271888 - RNA, 19 nt, Artificial Sequence
  Description of Artificial Sequence: Synthetic oligonucleotide
ccaucuuugucuuugucac

SEQ ID NO: 3271889 - RNA, 19 nt, Artificial Sequence
  Description of Artificial Sequence: Synthetic oligonucleotide
agccccuggcucuucaggg

SEQ ID NO: 3271890 - RNA, 19 nt, Artificial Sequence
  Description of Artificial Sequence: Synthetic oligonucleotide
agcagugcaaugucauugu

SEQ ID NO: 3271891 - RNA, 19 nt, Artificial Sequence
  Description of Artificial Sequence: Synthetic oligonucleotide
cauguugcucaugaccugc

SEQ ID NO: 3271892 - RNA, 19 nt, Artificial Sequence
  Description of Artificial Sequence: Synthetic oligonucleotide
augcggaugaaggugagga

SEQ ID NO: 3271893 - RNA, 19 nt, Artificial Sequence
  Description of Artificial Sequence: Synthetic oligonucleotide
agaaaguagcuggcugggc

SEQ ID NO: 3271894 - RNA, 19 nt, Artificial Sequence
  Description of Artificial Sequence: Synthetic oligonucleotide
ucauugucacuggugcucc

SEQ ID NO: 3271895 - RNA, 19 nt, Artificial Sequence
  Description of Artificial Sequence: Synthetic oligonucleotide
ucaccaaggaugccugcac

SEQ ID NO: 3271896 - RNA, 19 nt, Artificial Sequence
  Description of Artificial Sequence: Synthetic oligonucleotide
uuuaauauugcuuugaaug

SEQ ID NO: 3271897 - RNA, 19 nt, Artificial Sequence
  Description of Artificial Sequence: Synthetic oligonucleotide
aaaaucauuauccccugac

SEQ ID NO: 3271898 - RNA, 19 nt, Artificial Sequence
  Description of Artificial Sequence: Synthetic oligonucleotide
uuaauauugcuuugaaugg

SEQ ID NO: 3271899 - RNA, 19 nt, Artificial Sequence
  Description of Artificial Sequence: Synthetic oligonucleotide
gauuuuccaaacuaggccg

SEQ ID NO: 3271900 - RNA, 19 nt, Artificial Sequence
  Description of Artificial Sequence: Synthetic oligonucleotide
aaagcaagugcaccaaagc

SEQ ID NO: 3271901 - RNA, 19 nt, Artificial Sequence
  Description of Artificial Sequence: Synthetic oligonucleotide
uacuggaaaaucauuaucc

SEQ ID NO: 3271902 - RNA, 19 nt, Artificial Sequence
  Description of Artificial Sequence: Synthetic oligonucleotide
uuuguagugaugaacaggu

SEQ ID NO: 3271903 - RNA, 19 nt, Artificial Sequence
  Description of Artificial Sequence: Synthetic oligonucleotide
uauaauguacagaucaaca

SEQ ID NO: 3271904 - RNA, 19 nt, Artificial Sequence
  Description of Artificial Sequence: Synthetic oligonucleotide
ugauguauaauguacagau

SEQ ID NO: 3271905 - RNA, 19 nt, Artificial Sequence
  Description of Artificial Sequence: Synthetic oligonucleotide
aauagauuugaccaauccu

SEQ ID NO: 3271906 - RNA, 19 nt, Artificial Sequence
  Description of Artificial Sequence: Synthetic oligonucleotide
auguauaauguacagauca

SEQ ID NO: 3271907 - RNA, 19 nt, Artificial Sequence
  Description of Artificial Sequence: Synthetic oligonucleotide
ugauuuuccaaacuaggcc

SEQ ID NO: 3271908 - RNA, 19 nt, Artificial Sequence
  Description of Artificial Sequence: Synthetic oligonucleotide
aauguacagaucaacauag

SEQ ID NO: 3271909 - RNA, 19 nt, Artificial Sequence
  Description of Artificial Sequence: Synthetic oligonucleotide
uggaaaaucauuauccccu

SEQ ID NO: 3271910 - RNA, 19 nt, Artificial Sequence
  Description of Artificial Sequence: Synthetic oligonucleotide
aacauaguccaguugaagu

SEQ ID NO: 3271911 - RNA, 19 nt, Artificial Sequence
  Description of Artificial Sequence: Synthetic oligonucleotide
acuggaaaaucauuauccc

SEQ ID NO: 3271912 - RNA, 19 nt, Artificial Sequence
  Description of Artificial Sequence: Synthetic oligonucleotide
uacagaucaacauagucca

SEQ ID NO: 3271913 - RNA, 19 nt, Artificial Sequence
  Description of Artificial Sequence: Synthetic oligonucleotide
auugcagacagguuuguac

SEQ ID NO: 3271914 - RNA, 19 nt, Artificial Sequence
  Description of Artificial Sequence: Synthetic oligonucleotide
acagguuuguacuuaaguc

SEQ ID NO: 3271915 - RNA, 19 nt, Artificial Sequence
  Description of Artificial Sequence: Synthetic oligonucleotide
uguagugaugaacaggucu

SEQ ID NO: 3271916 - RNA, 19 nt, Artificial Sequence
  Description of Artificial Sequence: Synthetic oligonucleotide
aucaacauaguccaguuga

SEQ ID NO: 3271917 - RNA, 19 nt, Artificial Sequence
  Description of Artificial Sequence: Synthetic oligonucleotide
aaguuggacaccccaauag

SEQ ID NO: 3271918 - RNA, 19 nt, Artificial Sequence
  Description of Artificial Sequence: Synthetic oligonucleotide
uccaaugccucccacgugg

SEQ ID NO: 3271919 - RNA, 19 nt, Artificial Sequence
  Description of Artificial Sequence: Synthetic oligonucleotide
ugugguuaaaguuggacac

SEQ ID NO: 3271920 - RNA, 19 nt, Artificial Sequence
  Description of Artificial Sequence: Synthetic oligonucleotide
acaguaauuucccuuguuc

SEQ ID NO: 3271921 - RNA, 19 nt, Artificial Sequence
  Description of Artificial Sequence: Synthetic oligonucleotide
aauccacugugucaaacag

SEQ ID NO: 3271922 - RNA, 19 nt, Artificial Sequence
  Description of Artificial Sequence: Synthetic oligonucleotide
uuuucagugauuuuccaaa

SEQ ID NO: 3271923 - RNA, 19 nt, Artificial Sequence
  Description of Artificial Sequence: Synthetic oligonucleotide
ugucaaacaguaauuuccc

SEQ ID NO: 3271924 - RNA, 19 nt, Artificial Sequence
  Description of Artificial Sequence: Synthetic oligonucleotide
cagguuuguacuuaagucc

SEQ ID NO: 3271925 - RNA, 19 nt, Artificial Sequence
  Description of Artificial Sequence: Synthetic oligonucleotide
uuauccccugacuucaucg

SEQ ID NO: 3271926 - RNA, 19 nt, Artificial Sequence
  Description of Artificial Sequence: Synthetic oligonucleotide
auagauuugaccaauccug

SEQ ID NO: 3271927 - RNA, 19 nt, Artificial Sequence
  Description of Artificial Sequence: Synthetic oligonucleotide
ucucuuuacaucaccagcu

SEQ ID NO: 3271928 - RNA, 19 nt, Artificial Sequence
  Description of Artificial Sequence: Synthetic oligonucleotide
uucaucuacuggaaaauca

SEQ ID NO: 3271929 - RNA, 19 nt, Artificial Sequence
  Description of Artificial Sequence: Synthetic oligonucleotide
aaucauuauccccugacuu

SEQ ID NO: 3271930 - RNA, 19 nt, Artificial Sequence
  Description of Artificial Sequence: Synthetic oligonucleotide
uacaucaccagcuuuaaua

SEQ ID NO: 3271931 - RNA, 19 nt, Artificial Sequence
  Description of Artificial Sequence: Synthetic oligonucleotide
accccaauagauuugacca

SEQ ID NO: 3271932 - RNA, 19 nt, Artificial Sequence
  Description of Artificial Sequence: Synthetic oligonucleotide
aaaucauuauccccugacu

SEQ ID NO: 3271933 - RNA, 19 nt, Artificial Sequence
  Description of Artificial Sequence: Synthetic oligonucleotide
aagcaagugcaccaaagcu

SEQ ID NO: 3271934 - RNA, 19 nt, Artificial Sequence
  Description of Artificial Sequence: Synthetic oligonucleotide
aucauuauccccugacuuc

SEQ ID NO: 3271935 - RNA, 19 nt, Artificial Sequence
  Description of Artificial Sequence: Synthetic oligonucleotide
uguacagaucaacauaguc

SEQ ID NO: 3271936 - RNA, 19 nt, Artificial Sequence
  Description of Artificial Sequence: Synthetic oligonucleotide
uguacuuaaguccuggcuu

SEQ ID NO: 3271937 - RNA, 19 nt, Artificial Sequence
  Description of Artificial Sequence: Synthetic oligonucleotide
caaacaguaauuucccuug

SEQ ID NO: 3271938 - RNA, 19 nt, Artificial Sequence
  Description of Artificial Sequence: Synthetic oligonucleotide
guacagaucaacauagucc

SEQ ID NO: 3271939 - RNA, 19 nt, Artificial Sequence
  Description of Artificial Sequence: Synthetic oligonucleotide
uaauguacagaucaacaua

SEQ ID NO: 3271940 - RNA, 19 nt, Artificial Sequence
  Description of Artificial Sequence: Synthetic oligonucleotide
aaauccacugugucaaaca

SEQ ID NO: 3271941 - RNA, 19 nt, Artificial Sequence
  Description of Artificial Sequence: Synthetic oligonucleotide
auuugaccaauccugcauc

SEQ ID NO: 3271942 - RNA, 19 nt, Artificial Sequence
  Description of Artificial Sequence: Synthetic oligonucleotide
ugaugaacaggucuucucu

SEQ ID NO: 3271943 - RNA, 19 nt, Artificial Sequence
  Description of Artificial Sequence: Synthetic oligonucleotide
aagcuuuguagugaugaac

SEQ ID NO: 3271944 - RNA, 19 nt, Artificial Sequence
  Description of Artificial Sequence: Synthetic oligonucleotide
uuacacuucuccaaugccu

SEQ ID NO: 3271945 - RNA, 19 nt, Artificial Sequence
  Description of Artificial Sequence: Synthetic oligonucleotide
ucaggauucucucuagcug

SEQ ID NO: 3271946 - RNA, 19 nt, Artificial Sequence
  Description of Artificial Sequence: Synthetic oligonucleotide
auaauguacagaucaacau

SEQ ID NO: 3271947 - RNA, 19 nt, Artificial Sequence
  Description of Artificial Sequence: Synthetic oligonucleotide
auuucccuuguucaucuac

SEQ ID NO: 3271948 - RNA, 19 nt, Artificial Sequence
  Description of Artificial Sequence: Synthetic oligonucleotide
ugcaccaaagcuuuguagu

SEQ ID NO: 3271949 - RNA, 19 nt, Artificial Sequence
  Description of Artificial Sequence: Synthetic oligonucleotide
ugggugauguauaauguac

SEQ ID NO: 3271950 - RNA, 19 nt, Artificial Sequence
  Description of Artificial Sequence: Synthetic oligonucleotide
uagauuugaccaauccugc

SEQ ID NO: 3271951 - RNA, 19 nt, Artificial Sequence
  Description of Artificial Sequence: Synthetic oligonucleotide
gugucaaacaguaauuucc

SEQ ID NO: 3271952 - RNA, 19 nt, Artificial Sequence
  Description of Artificial Sequence: Synthetic oligonucleotide
ucagugauuuuccaaacua

SEQ ID NO: 3271953 - RNA, 19 nt, Artificial Sequence
  Description of Artificial Sequence: Synthetic oligonucleotide
uaaguccuggcuuauucag

SEQ ID NO: 3271954 - RNA, 19 nt, Artificial Sequence
  Description of Artificial Sequence: Synthetic oligonucleotide
aaugccucccacguggcac

SEQ ID NO: 3271955 - RNA, 19 nt, Artificial Sequence
  Description of Artificial Sequence: Synthetic oligonucleotide
agugauuuuccaaacuagg

SEQ ID NO: 3271956 - RNA, 19 nt, Artificial Sequence
  Description of Artificial Sequence: Synthetic oligonucleotide
uccacugugucaaacagua

SEQ ID NO: 3271957 - RNA, 19 nt, Artificial Sequence
  Description of Artificial Sequence: Synthetic oligonucleotide
caauagauuugaccaaucc

SEQ ID NO: 3271958 - RNA, 19 nt, Artificial Sequence
  Description of Artificial Sequence: Synthetic oligonucleotide
acuucaucggcacugggug

SEQ ID NO: 3271959 - RNA, 19 nt, Artificial Sequence
  Description of Artificial Sequence: Synthetic oligonucleotide
aauccugcauccuuacacu

SEQ ID NO: 3271960 - RNA, 19 nt, Artificial Sequence
  Description of Artificial Sequence: Synthetic oligonucleotide
cuggaaaaucauuaucccc

SEQ ID NO: 3271961 - RNA, 19 nt, Artificial Sequence
  Description of Artificial Sequence: Synthetic oligonucleotide
uaauauugcuuugaauggc

SEQ ID NO: 3271962 - RNA, 19 nt, Artificial Sequence
  Description of Artificial Sequence: Synthetic oligonucleotide
auucaggauucucucuagc

SEQ ID NO: 3271963 - RNA, 19 nt, Artificial Sequence
  Description of Artificial Sequence: Synthetic oligonucleotide
uuauucaggauucucucua

SEQ ID NO: 3271964 - RNA, 19 nt, Artificial Sequence
  Description of Artificial Sequence: Synthetic oligonucleotide
uguauaauguacagaucaa

SEQ ID NO: 3271965 - RNA, 19 nt, Artificial Sequence
  Description of Artificial Sequence: Synthetic oligonucleotide
aauauugcuuugaauggcu

SEQ ID NO: 3271966 - RNA, 19 nt, Artificial Sequence
  Description of Artificial Sequence: Synthetic oligonucleotide
uuguacuuaaguccuggcu

SEQ ID NO: 3271967 - RNA, 19 nt, Artificial Sequence
  Description of Artificial Sequence: Synthetic oligonucleotide
caauccugcauccuuacac

SEQ ID NO: 3271968 - RNA, 19 nt, Artificial Sequence
  Description of Artificial Sequence: Synthetic oligonucleotide
ucaucuacuggaaaaucau

SEQ ID NO: 3271969 - RNA, 19 nt, Artificial Sequence
  Description of Artificial Sequence: Synthetic oligonucleotide
caggauucucucuagcugc

SEQ ID NO: 3271970 - RNA, 19 nt, Artificial Sequence
  Description of Artificial Sequence: Synthetic oligonucleotide
uauugcuuugaauggcuug

SEQ ID NO: 3271971 - RNA, 19 nt, Artificial Sequence
  Description of Artificial Sequence: Synthetic oligonucleotide
ucaaacaguaauuucccuu

SEQ ID NO: 3271972 - RNA, 19 nt, Artificial Sequence
  Description of Artificial Sequence: Synthetic oligonucleotide
cuuuguagugaugaacagg

SEQ ID NO: 3271973 - RNA, 19 nt, Artificial Sequence
  Description of Artificial Sequence: Synthetic oligonucleotide
uaauuucccuuguucaucu

SEQ ID NO: 3271974 - RNA, 19 nt, Artificial Sequence
  Description of Artificial Sequence: Synthetic oligonucleotide
uuaaaguuggacaccccaa

SEQ ID NO: 3271975 - RNA, 19 nt, Artificial Sequence
  Description of Artificial Sequence: Synthetic oligonucleotide
uuguucaucuacuggaaaa

SEQ ID NO: 3271976 - RNA, 19 nt, Artificial Sequence
  Description of Artificial Sequence: Synthetic oligonucleotide
ugcauccuuacacuucucc

SEQ ID NO: 3271977 - RNA, 19 nt, Artificial Sequence
  Description of Artificial Sequence: Synthetic oligonucleotide
acagaaauccacuguguca

SEQ ID NO: 3271978 - RNA, 19 nt, Artificial Sequence
  Description of Artificial Sequence: Synthetic oligonucleotide
ugccugugguuaaaguugg

SEQ ID NO: 3271979 - RNA, 19 nt, Artificial Sequence
  Description of Artificial Sequence: Synthetic oligonucleotide
cucucuuuacaucaccagc

SEQ ID NO: 3271980 - RNA, 19 nt, Artificial Sequence
  Description of Artificial Sequence: Synthetic oligonucleotide
cacugggugauguauaaug

SEQ ID NO: 3271981 - RNA, 19 nt, Artificial Sequence
  Description of Artificial Sequence: Synthetic oligonucleotide
aucaccagcuuuaauauug

SEQ ID NO: 3271982 - RNA, 19 nt, Artificial Sequence
  Description of Artificial Sequence: Synthetic oligonucleotide
uucucucuuuacaucacca

SEQ ID NO: 3271983 - RNA, 19 nt, Artificial Sequence
  Description of Artificial Sequence: Synthetic oligonucleotide
ucuacuggaaaaucauuau

SEQ ID NO: 3271984 - RNA, 19 nt, Artificial Sequence
  Description of Artificial Sequence: Synthetic oligonucleotide
ucucucuuuacaucaccag

SEQ ID NO: 3271985 - RNA, 19 nt, Artificial Sequence
  Description of Artificial Sequence: Synthetic oligonucleotide
gaaagcaagugcaccaaag

SEQ ID NO: 3271986 - RNA, 19 nt, Artificial Sequence
  Description of Artificial Sequence: Synthetic oligonucleotide
ucccuuguucaucuacugg

SEQ ID NO: 3271987 - RNA, 19 nt, Artificial Sequence
  Description of Artificial Sequence: Synthetic oligonucleotide
uuaaguccuggcuuauuca

SEQ ID NO: 3271988 - RNA, 19 nt, Artificial Sequence
  Description of Artificial Sequence: Synthetic oligonucleotide
uucaggauucucucuagcu

SEQ ID NO: 3271989 - RNA, 19 nt, Artificial Sequence
  Description of Artificial Sequence: Synthetic oligonucleotide
ugugucaaacaguaauuuc

SEQ ID NO: 3271990 - RNA, 19 nt, Artificial Sequence
  Description of Artificial Sequence: Synthetic oligonucleotide
uuugaccaauccugcaucc

SEQ ID NO: 3271991 - RNA, 19 nt, Artificial Sequence
  Description of Artificial Sequence: Synthetic oligonucleotide
ucuccaaugccucccacgu

SEQ ID NO: 3271992 - RNA, 19 nt, Artificial Sequence
  Description of Artificial Sequence: Synthetic oligonucleotide
uucuccaaugccucccacg

SEQ ID NO: 3271993 - RNA, 19 nt, Artificial Sequence
  Description of Artificial Sequence: Synthetic oligonucleotide
cuuaaguccuggcuuauuc

SEQ ID NO: 3271994 - RNA, 19 nt, Artificial Sequence
  Description of Artificial Sequence: Synthetic oligonucleotide
uauucaggauucucucuag

SEQ ID NO: 3271995 - RNA, 19 nt, Artificial Sequence
  Description of Artificial Sequence: Synthetic oligonucleotide
uuccaaacuaggccggacc

SEQ ID NO: 3271996 - RNA, 19 nt, Artificial Sequence
  Description of Artificial Sequence: Synthetic oligonucleotide
aauuguguggcccuggggc

SEQ ID NO: 3271997 - RNA, 19 nt, Artificial Sequence
  Description of Artificial Sequence: Synthetic oligonucleotide
uucaauacuauccugcaag

SEQ ID NO: 3271998 - RNA, 19 nt, Artificial Sequence
  Description of Artificial Sequence: Synthetic oligonucleotide
auagggaacugcuugaacc

SEQ ID NO: 3271999 - RNA, 19 nt, Artificial Sequence
  Description of Artificial Sequence: Synthetic oligonucleotide
auaaauacaacccaggcaa

SEQ ID NO: 3272000 - RNA, 19 nt, Artificial Sequence
  Description of Artificial Sequence: Synthetic oligonucleotide
ugcucuuucaauacuaucc

SEQ ID NO: 3272001 - RNA, 19 nt, Artificial Sequence
  Description of Artificial Sequence: Synthetic oligonucleotide
aacaaaggcagcuauaaau

SEQ ID NO: 3272002 - RNA, 19 nt, Artificial Sequence
  Description of Artificial Sequence: Synthetic oligonucleotide
aauacuauccugcaaguaa

SEQ ID NO: 3272003 - RNA, 19 nt, Artificial Sequence
  Description of Artificial Sequence: Synthetic oligonucleotide
ucuuucaauacuauccugc

SEQ ID NO: 3272004 - RNA, 19 nt, Artificial Sequence
  Description of Artificial Sequence: Synthetic oligonucleotide
uauaaauacaacccaggca

SEQ ID NO: 3272005 - RNA, 19 nt, Artificial Sequence
  Description of Artificial Sequence: Synthetic oligonucleotide
aacccaggcaaccaugagc

SEQ ID NO: 3272006 - RNA, 19 nt, Artificial Sequence
  Description of Artificial Sequence: Synthetic oligonucleotide
aaguaaaugaaagcccggc

SEQ ID NO: 3272007 - RNA, 19 nt, Artificial Sequence
  Description of Artificial Sequence: Synthetic oligonucleotide
aaugauugcucuuucaaua

SEQ ID NO: 3272008 - RNA, 19 nt, Artificial Sequence
  Description of Artificial Sequence: Synthetic oligonucleotide
uguaauucaaugauugcuc

SEQ ID NO: 3272009 - RNA, 19 nt, Artificial Sequence
  Description of Artificial Sequence: Synthetic oligonucleotide
aaauacaacccaggcaacc

SEQ ID NO: 3272010 - RNA, 19 nt, Artificial Sequence
  Description of Artificial Sequence: Synthetic oligonucleotide
ucuuucaugaagcagggau

SEQ ID NO: 3272011 - RNA, 19 nt, Artificial Sequence
  Description of Artificial Sequence: Synthetic oligonucleotide
aacugcuugaaccuggaca

SEQ ID NO: 3272012 - RNA, 19 nt, Artificial Sequence
  Description of Artificial Sequence: Synthetic oligonucleotide
ugcaaguaaaugaaagccc

SEQ ID NO: 3272013 - RNA, 19 nt, Artificial Sequence
  Description of Artificial Sequence: Synthetic oligonucleotide
acugcuugaaccuggacag

SEQ ID NO: 3272014 - RNA, 19 nt, Artificial Sequence
  Description of Artificial Sequence: Synthetic oligonucleotide
ucaugaagcagggauaggg

SEQ ID NO: 3272015 - RNA, 19 nt, Artificial Sequence
  Description of Artificial Sequence: Synthetic oligonucleotide
ugaggaagcucuuucauga

SEQ ID NO: 3272016 - RNA, 19 nt, Artificial Sequence
  Description of Artificial Sequence: Synthetic oligonucleotide
uccugcaaguaaaugaaag

SEQ ID NO: 3272017 - RNA, 19 nt, Artificial Sequence
  Description of Artificial Sequence: Synthetic oligonucleotide
cuauaaauacaacccaggc

SEQ ID NO: 3272018 - RNA, 19 nt, Artificial Sequence
  Description of Artificial Sequence: Synthetic oligonucleotide
guuuguaauucaaugauug

SEQ ID NO: 3272019 - RNA, 19 nt, Artificial Sequence
  Description of Artificial Sequence: Synthetic oligonucleotide
ugugugauggagaauugug

SEQ ID NO: 3272020 - RNA, 19 nt, Artificial Sequence
  Description of Artificial Sequence: Synthetic oligonucleotide
aauaggagacacuggugag

SEQ ID NO: 3272021 - RNA, 19 nt, Artificial Sequence
  Description of Artificial Sequence: Synthetic oligonucleotide
ugugauggagaauugugug

SEQ ID NO: 3272022 - RNA, 19 nt, Artificial Sequence
  Description of Artificial Sequence: Synthetic oligonucleotide
augauugcucuuucaauac

SEQ ID NO: 3272023 - RNA, 19 nt, Artificial Sequence
  Description of Artificial Sequence: Synthetic oligonucleotide
aagggaauaggagacacug

SEQ ID NO: 3272024 - RNA, 19 nt, Artificial Sequence
  Description of Artificial Sequence: Synthetic oligonucleotide
gaauaggagacacugguga

SEQ ID NO: 3272025 - RNA, 19 nt, Artificial Sequence
  Description of Artificial Sequence: Synthetic oligonucleotide
uccuguuuguaauucaaug

SEQ ID NO: 3272026 - RNA, 19 nt, Artificial Sequence
  Description of Artificial Sequence: Synthetic oligonucleotide
aaccuggacagcaacuucc

SEQ ID NO: 3272027 - RNA, 19 nt, Artificial Sequence
  Description of Artificial Sequence: Synthetic oligonucleotide
uuguaauucaaugauugcu

SEQ ID NO: 3272028 - RNA, 19 nt, Artificial Sequence
  Description of Artificial Sequence: Synthetic oligonucleotide
uuuguaauucaaugauugc

SEQ ID NO: 3272029 - RNA, 19 nt, Artificial Sequence
  Description of Artificial Sequence: Synthetic oligonucleotide
ucaaugauugcucuuucaa

SEQ ID NO: 3272030 - RNA, 19 nt, Artificial Sequence
  Description of Artificial Sequence: Synthetic oligonucleotide
uaaaugaaagcccggcugu

SEQ ID NO: 3272031 - RNA, 19 nt, Artificial Sequence
  Description of Artificial Sequence: Synthetic oligonucleotide
guaaaugaaagcccggcug

SEQ ID NO: 3272032 - RNA, 19 nt, Artificial Sequence
  Description of Artificial Sequence: Synthetic oligonucleotide
cuggacagcaacuuccugg

SEQ ID NO: 3272033 - RNA, 19 nt, Artificial Sequence
  Description of Artificial Sequence: Synthetic oligonucleotide
cugcaaguaaaugaaagcc

SEQ ID NO: 3272034 - RNA, 19 nt, Artificial Sequence
  Description of Artificial Sequence: Synthetic oligonucleotide
uauccugcaaguaaaugaa

SEQ ID NO: 3272035 - RNA, 19 nt, Artificial Sequence
  Description of Artificial Sequence: Synthetic oligonucleotide
uuucaugaagcagggauag

SEQ ID NO: 3272036 - RNA, 19 nt, Artificial Sequence
  Description of Artificial Sequence: Synthetic oligonucleotide
uuuuaacaaaggcagcuau

SEQ ID NO: 3272037 - RNA, 19 nt, Artificial Sequence
  Description of Artificial Sequence: Synthetic oligonucleotide
agcucuuucaugaagcagg

SEQ ID NO: 3272038 - RNA, 19 nt, Artificial Sequence
  Description of Artificial Sequence: Synthetic oligonucleotide
gacagcaacuuccugggag

SEQ ID NO: 3272039 - RNA, 19 nt, Artificial Sequence
  Description of Artificial Sequence: Synthetic oligonucleotide
uggacagcaacuuccuggg

SEQ ID NO: 3272040 - RNA, 19 nt, Artificial Sequence
  Description of Artificial Sequence: Synthetic oligonucleotide
uuaacaaaggcagcuauaa

SEQ ID NO: 3272041 - RNA, 19 nt, Artificial Sequence
  Description of Artificial Sequence: Synthetic oligonucleotide
gcaaccaugagcacgaucg

SEQ ID NO: 3272042 - RNA, 19 nt, Artificial Sequence
  Description of Artificial Sequence: Synthetic oligonucleotide
cuuccugggaguuucuucc

SEQ ID NO: 3272043 - RNA, 19 nt, Artificial Sequence
  Description of Artificial Sequence: Synthetic oligonucleotide
auuguguggcccuggggcc

SEQ ID NO: 3272044 - RNA, 19 nt, Artificial Sequence
  Description of Artificial Sequence: Synthetic oligonucleotide
aauucaaugauugcucuuu

SEQ ID NO: 3272045 - RNA, 19 nt, Artificial Sequence
  Description of Artificial Sequence: Synthetic oligonucleotide
ugauggagaauuguguggc

SEQ ID NO: 3272046 - RNA, 19 nt, Artificial Sequence
  Description of Artificial Sequence: Synthetic oligonucleotide
cuauccugcaaguaaauga

SEQ ID NO: 3272047 - RNA, 19 nt, Artificial Sequence
  Description of Artificial Sequence: Synthetic oligonucleotide
aucggaagggaauaggaga

SEQ ID NO: 3272048 - RNA, 19 nt, Artificial Sequence
  Description of Artificial Sequence: Synthetic oligonucleotide
aaagcccggcuguagaucu

SEQ ID NO: 3272049 - RNA, 19 nt, Artificial Sequence
  Description of Artificial Sequence: Synthetic oligonucleotide
agaucugguugugugaugg

SEQ ID NO: 3272050 - RNA, 19 nt, Artificial Sequence
  Description of Artificial Sequence: Synthetic oligonucleotide
gugauggagaauugugugg

SEQ ID NO: 3272051 - RNA, 19 nt, Artificial Sequence
  Description of Artificial Sequence: Synthetic oligonucleotide
ggcagcuauaaauacaacc

SEQ ID NO: 3272052 - RNA, 19 nt, Artificial Sequence
  Description of Artificial Sequence: Synthetic oligonucleotide
agggauagggaacugcuug

SEQ ID NO: 3272053 - RNA, 19 nt, Artificial Sequence
  Description of Artificial Sequence: Synthetic oligonucleotide
ucggaagggaauaggagac

SEQ ID NO: 3272054 - RNA, 19 nt, Artificial Sequence
  Description of Artificial Sequence: Synthetic oligonucleotide
aauacaacccaggcaacca

SEQ ID NO: 3272055 - RNA, 19 nt, Artificial Sequence
  Description of Artificial Sequence: Synthetic oligonucleotide
ucugguugugugauggaga

SEQ ID NO: 3272056 - RNA, 19 nt, Artificial Sequence
  Description of Artificial Sequence: Synthetic oligonucleotide
aguaaaugaaagcccggcu

SEQ ID NO: 3272057 - RNA, 19 nt, Artificial Sequence
  Description of Artificial Sequence: Synthetic oligonucleotide
auggagaauuguguggccc

SEQ ID NO: 3272058 - RNA, 19 nt, Artificial Sequence
  Description of Artificial Sequence: Synthetic oligonucleotide
gcagcuauaaauacaaccc

SEQ ID NO: 3272059 - RNA, 19 nt, Artificial Sequence
  Description of Artificial Sequence: Synthetic oligonucleotide
ugaagcagggauagggaac

SEQ ID NO: 3272060 - RNA, 19 nt, Artificial Sequence
  Description of Artificial Sequence: Synthetic oligonucleotide
uguagaucugguuguguga

SEQ ID NO: 3272061 - RNA, 19 nt, Artificial Sequence
  Description of Artificial Sequence: Synthetic oligonucleotide
cucauggagccgaaggucc

SEQ ID NO: 3272062 - RNA, 19 nt, Artificial Sequence
  Description of Artificial Sequence: Synthetic oligonucleotide
auucaaugauugcucuuuc

SEQ ID NO: 3272063 - RNA, 19 nt, Artificial Sequence
  Description of Artificial Sequence: Synthetic oligonucleotide
caaguaaaugaaagcccgg

SEQ ID NO: 3272064 - RNA, 19 nt, Artificial Sequence
  Description of Artificial Sequence: Synthetic oligonucleotide
aaggcagcuauaaauacaa

SEQ ID NO: 3272065 - RNA, 19 nt, Artificial Sequence
  Description of Artificial Sequence: Synthetic oligonucleotide
uuuaacaaaggcagcuaua

SEQ ID NO: 3272066 - RNA, 19 nt, Artificial Sequence
  Description of Artificial Sequence: Synthetic oligonucleotide
caaaggcagcuauaaauac

SEQ ID NO: 3272067 - RNA, 19 nt, Artificial Sequence
  Description of Artificial Sequence: Synthetic oligonucleotide
uguuuguaauucaaugauu

SEQ ID NO: 3272068 - RNA, 19 nt, Artificial Sequence
  Description of Artificial Sequence: Synthetic oligonucleotide
gaagguccuucucauaaac

SEQ ID NO: 3272069 - RNA, 19 nt, Artificial Sequence
  Description of Artificial Sequence: Synthetic oligonucleotide
ucaauacuauccugcaagu

SEQ ID NO: 3272070 - RNA, 19 nt, Artificial Sequence
  Description of Artificial Sequence: Synthetic oligonucleotide
gcaaguaaaugaaagcccg

SEQ ID NO: 3272071 - RNA, 19 nt, Artificial Sequence
  Description of Artificial Sequence: Synthetic oligonucleotide
aaaggcagcuauaaauaca

SEQ ID NO: 3272072 - RNA, 19 nt, Artificial Sequence
  Description of Artificial Sequence: Synthetic oligonucleotide
aaugaaagcccggcuguag

SEQ ID NO: 3272073 - RNA, 19 nt, Artificial Sequence
  Description of Artificial Sequence: Synthetic oligonucleotide
agcuauaaauacaacccag

SEQ ID NO: 3272074 - RNA, 19 nt, Artificial Sequence
  Description of Artificial Sequence: Synthetic oligonucleotide
acuuccugggaguuucuuc

SEQ ID NO: 3272075 - RNA, 19 nt, Artificial Sequence
  Description of Artificial Sequence: Synthetic oligonucleotide
agguccuucucauaaacaa

SEQ ID NO: 3272076 - RNA, 19 nt, Artificial Sequence
  Description of Artificial Sequence: Synthetic oligonucleotide
augagcacgaucggaaggg

SEQ ID NO: 3272077 - RNA, 19 nt, Artificial Sequence
  Description of Artificial Sequence: Synthetic oligonucleotide
agaauuguguggcccuggg

SEQ ID NO: 3272078 - RNA, 19 nt, Artificial Sequence
  Description of Artificial Sequence: Synthetic oligonucleotide
uucaaugauugcucuuuca

SEQ ID NO: 3272079 - RNA, 19 nt, Artificial Sequence
  Description of Artificial Sequence: Synthetic oligonucleotide
guccuucucauaaacaagc

SEQ ID NO: 3272080 - RNA, 19 nt, Artificial Sequence
  Description of Artificial Sequence: Synthetic oligonucleotide
uagggaacugcuugaaccu

SEQ ID NO: 3272081 - RNA, 19 nt, Artificial Sequence
  Description of Artificial Sequence: Synthetic oligonucleotide
caugagcacgaucggaagg

SEQ ID NO: 3272082 - RNA, 19 nt, Artificial Sequence
  Description of Artificial Sequence: Synthetic oligonucleotide
aggaagcucuuucaugaag

SEQ ID NO: 3272083 - RNA, 19 nt, Artificial Sequence
  Description of Artificial Sequence: Synthetic oligonucleotide
ugauugcucuuucaauacu

SEQ ID NO: 3272084 - RNA, 19 nt, Artificial Sequence
  Description of Artificial Sequence: Synthetic oligonucleotide
uuucaauacuauccugcaa

SEQ ID NO: 3272085 - RNA, 19 nt, Artificial Sequence
  Description of Artificial Sequence: Synthetic oligonucleotide
gaucggaagggaauaggag

SEQ ID NO: 3272086 - RNA, 19 nt, Artificial Sequence
  Description of Artificial Sequence: Synthetic oligonucleotide
cuguagaucugguugugug

SEQ ID NO: 3272087 - RNA, 19 nt, Artificial Sequence
  Description of Artificial Sequence: Synthetic oligonucleotide
auaggagacacuggugagg

SEQ ID NO: 3272088 - RNA, 19 nt, Artificial Sequence
  Description of Artificial Sequence: Synthetic oligonucleotide
gaauuguguggcccugggg

SEQ ID NO: 3272089 - RNA, 19 nt, Artificial Sequence
  Description of Artificial Sequence: Synthetic oligonucleotide
aguuucuuccuguuuguaa

SEQ ID NO: 3272090 - RNA, 19 nt, Artificial Sequence
  Description of Artificial Sequence: Synthetic oligonucleotide
ucuuccuguuuguaauuca

SEQ ID NO: 3272091 - RNA, 19 nt, Artificial Sequence
  Description of Artificial Sequence: Synthetic oligonucleotide
gcuauaaauacaacccagg

SEQ ID NO: 3272092 - RNA, 19 nt, Artificial Sequence
  Description of Artificial Sequence: Synthetic oligonucleotide
uacaacccaggcaaccaug

SEQ ID NO: 3272093 - RNA, 19 nt, Artificial Sequence
  Description of Artificial Sequence: Synthetic oligonucleotide
uaaauacaacccaggcaac

SEQ ID NO: 3272094 - RNA, 19 nt, Artificial Sequence
  Description of Artificial Sequence: Synthetic oligonucleotide
uugaaccuggacagcaacu

SEQ ID NO: 3272095 - RNA, 19 nt, Artificial Sequence
  Description of Artificial Sequence: Synthetic oligonucleotide
uucucauaaacaagcuuuu

SEQ ID NO: 3272096 - RNA, 19 nt, Artificial Sequence
  Description of Artificial Sequence: Synthetic oligonucleotide
caaagaauauucuagauug

SEQ ID NO: 3272097 - RNA, 19 nt, Artificial Sequence
  Description of Artificial Sequence: Synthetic oligonucleotide
auauucuagauugugaagc

SEQ ID NO: 3272098 - RNA, 19 nt, Artificial Sequence
  Description of Artificial Sequence: Synthetic oligonucleotide
uuuccaaagaauauucuag

SEQ ID NO: 3272099 - RNA, 19 nt, Artificial Sequence
  Description of Artificial Sequence: Synthetic oligonucleotide
aacaggacccacaagaacc

SEQ ID NO: 3272100 - RNA, 19 nt, Artificial Sequence
  Description of Artificial Sequence: Synthetic oligonucleotide
aucacaaguuuucagauuc

SEQ ID NO: 3272101 - RNA, 19 nt, Artificial Sequence
  Description of Artificial Sequence: Synthetic oligonucleotide
uaugaaugcauuuccaaag

SEQ ID NO: 3272102 - RNA, 19 nt, Artificial Sequence
  Description of Artificial Sequence: Synthetic oligonucleotide
aguuuucagauucuuuucc

SEQ ID NO: 3272103 - RNA, 19 nt, Artificial Sequence
  Description of Artificial Sequence: Synthetic oligonucleotide
aauauucuagauugugaag

SEQ ID NO: 3272104 - RNA, 19 nt, Artificial Sequence
  Description of Artificial Sequence: Synthetic oligonucleotide
ucucaucugaccaaggacc

SEQ ID NO: 3272105 - RNA, 19 nt, Artificial Sequence
  Description of Artificial Sequence: Synthetic oligonucleotide
uuaggguuugacuuguagg

SEQ ID NO: 3272106 - RNA, 19 nt, Artificial Sequence
  Description of Artificial Sequence: Synthetic oligonucleotide
auaugguucaugcccaggc

SEQ ID NO: 3272107 - RNA, 19 nt, Artificial Sequence
  Description of Artificial Sequence: Synthetic oligonucleotide
aaguuuucagauucuuuuc

SEQ ID NO: 3272108 - RNA, 19 nt, Artificial Sequence
  Description of Artificial Sequence: Synthetic oligonucleotide
agauucuuuucccagauga

SEQ ID NO: 3272109 - RNA, 19 nt, Artificial Sequence
  Description of Artificial Sequence: Synthetic oligonucleotide
ucccauaugguucaugccc

SEQ ID NO: 3272110 - RNA, 19 nt, Artificial Sequence
  Description of Artificial Sequence: Synthetic oligonucleotide
uucuuuucccagaugaggc

SEQ ID NO: 3272111 - RNA, 19 nt, Artificial Sequence
  Description of Artificial Sequence: Synthetic oligonucleotide
ucugauuaggguuugacuu

SEQ ID NO: 3272112 - RNA, 19 nt, Artificial Sequence
  Description of Artificial Sequence: Synthetic oligonucleotide
uagauugugaagcaucaca

SEQ ID NO: 3272113 - RNA, 19 nt, Artificial Sequence
  Description of Artificial Sequence: Synthetic oligonucleotide
auugugaagcaucacaagu

SEQ ID NO: 3272114 - RNA, 19 nt, Artificial Sequence
  Description of Artificial Sequence: Synthetic oligonucleotide
ugguauuucacuuccguga

SEQ ID NO: 3272115 - RNA, 19 nt, Artificial Sequence
  Description of Artificial Sequence: Synthetic oligonucleotide
aauccaccagguucugugc

SEQ ID NO: 3272116 - RNA, 19 nt, Artificial Sequence
  Description of Artificial Sequence: Synthetic oligonucleotide
aagaauauucuagauugug

SEQ ID NO: 3272117 - RNA, 19 nt, Artificial Sequence
  Description of Artificial Sequence: Synthetic oligonucleotide
ucuagauugugaagcauca

SEQ ID NO: 3272118 - RNA, 19 nt, Artificial Sequence
  Description of Artificial Sequence: Synthetic oligonucleotide
gaauauucuagauugugaa

SEQ ID NO: 3272119 - RNA, 19 nt, Artificial Sequence
  Description of Artificial Sequence: Synthetic oligonucleotide
ugaaagcccaacaggaccc

SEQ ID NO: 3272120 - RNA, 19 nt, Artificial Sequence
  Description of Artificial Sequence: Synthetic oligonucleotide
aaugcauuuccaaagaaua

SEQ ID NO: 3272121 - RNA, 19 nt, Artificial Sequence
  Description of Artificial Sequence: Synthetic oligonucleotide
ggucaugucucccauaugg

SEQ ID NO: 3272122 - RNA, 19 nt, Artificial Sequence
  Description of Artificial Sequence: Synthetic oligonucleotide
uuucagauucuuuucccag

SEQ ID NO: 3272123 - RNA, 19 nt, Artificial Sequence
  Description of Artificial Sequence: Synthetic oligonucleotide
uguuuucagcuucagcugc

SEQ ID NO: 3272124 - RNA, 19 nt, Artificial Sequence
  Description of Artificial Sequence: Synthetic oligonucleotide
cauagaaucgggcaguuuc

SEQ ID NO: 3272125 - RNA, 19 nt, Artificial Sequence
  Description of Artificial Sequence: Synthetic oligonucleotide
uauaugaaugcauuuccaa

SEQ ID NO: 3272126 - RNA, 19 nt, Artificial Sequence
  Description of Artificial Sequence: Synthetic oligonucleotide
uaggguuugacuuguaggu

SEQ ID NO: 3272127 - RNA, 19 nt, Artificial Sequence
  Description of Artificial Sequence: Synthetic oligonucleotide
ucucccauaugguucaugc

SEQ ID NO: 3272128 - RNA, 19 nt, Artificial Sequence
  Description of Artificial Sequence: Synthetic oligonucleotide
ugaagcaucacaaguuuuc

SEQ ID NO: 3272129 - RNA, 19 nt, Artificial Sequence
  Description of Artificial Sequence: Synthetic oligonucleotide
uuccaaagaauauucuaga

SEQ ID NO: 3272130 - RNA, 19 nt, Artificial Sequence
  Description of Artificial Sequence: Synthetic oligonucleotide
agagacaccagcuucccug

SEQ ID NO: 3272131 - RNA, 19 nt, Artificial Sequence
  Description of Artificial Sequence: Synthetic oligonucleotide
auucuuuucccagaugagg

SEQ ID NO: 3272132 - RNA, 19 nt, Artificial Sequence
  Description of Artificial Sequence: Synthetic oligonucleotide
uggcugggaacucucaggg

SEQ ID NO: 3272133 - RNA, 19 nt, Artificial Sequence
  Description of Artificial Sequence: Synthetic oligonucleotide
uauucuagauugugaagca

SEQ ID NO: 3272134 - RNA, 19 nt, Artificial Sequence
  Description of Artificial Sequence: Synthetic oligonucleotide
agcaucacaaguuuucaga

SEQ ID NO: 3272135 - RNA, 19 nt, Artificial Sequence
  Description of Artificial Sequence: Synthetic oligonucleotide
guuucuaugccgcuggcug

SEQ ID NO: 3272136 - RNA, 19 nt, Artificial Sequence
  Description of Artificial Sequence: Synthetic oligonucleotide
uucuagauugugaagcauc

SEQ ID NO: 3272137 - RNA, 19 nt, Artificial Sequence
  Description of Artificial Sequence: Synthetic oligonucleotide
ucuuuucccagaugaggcg

SEQ ID NO: 3272138 - RNA, 19 nt, Artificial Sequence
  Description of Artificial Sequence: Synthetic oligonucleotide
auuaggguuugacuuguag

SEQ ID NO: 3272139 - RNA, 19 nt, Artificial Sequence
  Description of Artificial Sequence: Synthetic oligonucleotide
gauugugaagcaucacaag

SEQ ID NO: 3272140 - RNA, 19 nt, Artificial Sequence
  Description of Artificial Sequence: Synthetic oligonucleotide
uuuucagauucuuuuccca

SEQ ID NO: 3272141 - RNA, 19 nt, Artificial Sequence
  Description of Artificial Sequence: Synthetic oligonucleotide
uucagcugcgccuccaggg

SEQ ID NO: 3272142 - RNA, 19 nt, Artificial Sequence
  Description of Artificial Sequence: Synthetic oligonucleotide
uauuucacuuccgugacac

SEQ ID NO: 3272143 - RNA, 19 nt, Artificial Sequence
  Description of Artificial Sequence: Synthetic oligonucleotide
aacccugguauuucacuuc

SEQ ID NO: 3272144 - RNA, 19 nt, Artificial Sequence
  Description of Artificial Sequence: Synthetic oligonucleotide
aagcaucacaaguuuucag

SEQ ID NO: 3272145 - RNA, 19 nt, Artificial Sequence
  Description of Artificial Sequence: Synthetic oligonucleotide
cugaaagcccaacaggacc

SEQ ID NO: 3272146 - RNA, 19 nt, Artificial Sequence
  Description of Artificial Sequence: Synthetic oligonucleotide
aguccauagaaucgggcag

SEQ ID NO: 3272147 - RNA, 19 nt, Artificial Sequence
  Description of Artificial Sequence: Synthetic oligonucleotide
auaugaaugcauuuccaaa

SEQ ID NO: 3272148 - RNA, 19 nt, Artificial Sequence
  Description of Artificial Sequence: Synthetic oligonucleotide
auuuccaaagaauauucua

SEQ ID NO: 3272149 - RNA, 19 nt, Artificial Sequence
  Description of Artificial Sequence: Synthetic oligonucleotide
ugcgcugagagacaccagc

SEQ ID NO: 3272150 - RNA, 19 nt, Artificial Sequence
  Description of Artificial Sequence: Synthetic oligonucleotide
guuuucagauucuuuuccc

SEQ ID NO: 3272151 - RNA, 19 nt, Artificial Sequence
  Description of Artificial Sequence: Synthetic oligonucleotide
acccugguauuucacuucc

SEQ ID NO: 3272152 - RNA, 19 nt, Artificial Sequence
  Description of Artificial Sequence: Synthetic oligonucleotide
guaggugcuguuucuaugc

SEQ ID NO: 3272153 - RNA, 19 nt, Artificial Sequence
  Description of Artificial Sequence: Synthetic oligonucleotide
ugacacaccccuucucucg

SEQ ID NO: 3272154 - RNA, 19 nt, Artificial Sequence
  Description of Artificial Sequence: Synthetic oligonucleotide
ucgccaguccauagaaucg

SEQ ID NO: 3272155 - RNA, 19 nt, Artificial Sequence
  Description of Artificial Sequence: Synthetic oligonucleotide
acuuccgugacacaccccu

SEQ ID NO: 3272156 - RNA, 19 nt, Artificial Sequence
  Description of Artificial Sequence: Synthetic oligonucleotide
uuucuaugccgcuggcugg

SEQ ID NO: 3272157 - RNA, 19 nt, Artificial Sequence
  Description of Artificial Sequence: Synthetic oligonucleotide
ugugaagcaucacaaguuu

SEQ ID NO: 3272158 - RNA, 19 nt, Artificial Sequence
  Description of Artificial Sequence: Synthetic oligonucleotide
uucugauuaggguuugacu

SEQ ID NO: 3272159 - RNA, 19 nt, Artificial Sequence
  Description of Artificial Sequence: Synthetic oligonucleotide
gcuauaugaaugcauuucc

SEQ ID NO: 3272160 - RNA, 19 nt, Artificial Sequence
  Description of Artificial Sequence: Synthetic oligonucleotide
ucaugcccaggcuauauga

SEQ ID NO: 3272161 - RNA, 19 nt, Artificial Sequence
  Description of Artificial Sequence: Synthetic oligonucleotide
uuucacuuccgugacacac

SEQ ID NO: 3272162 - RNA, 19 nt, Artificial Sequence
  Description of Artificial Sequence: Synthetic oligonucleotide
ugcccaggcuauaugaaug

SEQ ID NO: 3272163 - RNA, 19 nt, Artificial Sequence
  Description of Artificial Sequence: Synthetic oligonucleotide
caugucucccauaugguuc

SEQ ID NO: 3272164 - RNA, 19 nt, Artificial Sequence
  Description of Artificial Sequence: Synthetic oligonucleotide
uugugaagcaucacaaguu

SEQ ID NO: 3272165 - RNA, 19 nt, Artificial Sequence
  Description of Artificial Sequence: Synthetic oligonucleotide
augaaugcauuuccaaaga

SEQ ID NO: 3272166 - RNA, 19 nt, Artificial Sequence
  Description of Artificial Sequence: Synthetic oligonucleotide
acucucaggggucucaucu

SEQ ID NO: 3272167 - RNA, 19 nt, Artificial Sequence
  Description of Artificial Sequence: Synthetic oligonucleotide
ugaaugcauuuccaaagaa

SEQ ID NO: 3272168 - RNA, 19 nt, Artificial Sequence
  Description of Artificial Sequence: Synthetic oligonucleotide
ucuucacuggucaugucuc

SEQ ID NO: 3272169 - RNA, 19 nt, Artificial Sequence
  Description of Artificial Sequence: Synthetic oligonucleotide
accaaggaccucuucacug

SEQ ID NO: 3272170 - RNA, 19 nt, Artificial Sequence
  Description of Artificial Sequence: Synthetic oligonucleotide
uguaggugcuguuucuaug

SEQ ID NO: 3272171 - RNA, 19 nt, Artificial Sequence
  Description of Artificial Sequence: Synthetic oligonucleotide
uucacuuccgugacacacc

SEQ ID NO: 3272172 - RNA, 19 nt, Artificial Sequence
  Description of Artificial Sequence: Synthetic oligonucleotide
uccaaagaauauucuagau

SEQ ID NO: 3272173 - RNA, 19 nt, Artificial Sequence
  Description of Artificial Sequence: Synthetic oligonucleotide
caauccaccagguucugug

SEQ ID NO: 3272174 - RNA, 19 nt, Artificial Sequence
  Description of Artificial Sequence: Synthetic oligonucleotide
ucagauucuuuucccagau

SEQ ID NO: 3272175 - RNA, 19 nt, Artificial Sequence
  Description of Artificial Sequence: Synthetic oligonucleotide
uucagauucuuuucccaga

SEQ ID NO: 3272176 - RNA, 19 nt, Artificial Sequence
  Description of Artificial Sequence: Synthetic oligonucleotide
ucacuuccgugacacaccc

SEQ ID NO: 3272177 - RNA, 19 nt, Artificial Sequence
  Description of Artificial Sequence: Synthetic oligonucleotide
cugagagacaccagcuucc

SEQ ID NO: 3272178 - RNA, 19 nt, Artificial Sequence
  Description of Artificial Sequence: Synthetic oligonucleotide
agaauauucuagauuguga

SEQ ID NO: 3272179 - RNA, 19 nt, Artificial Sequence
  Description of Artificial Sequence: Synthetic oligonucleotide
cugauuaggguuugacuug

SEQ ID NO: 3272180 - RNA, 19 nt, Artificial Sequence
  Description of Artificial Sequence: Synthetic oligonucleotide
cucgccaguccauagaauc

SEQ ID NO: 3272181 - RNA, 19 nt, Artificial Sequence
  Description of Artificial Sequence: Synthetic oligonucleotide
uucagcuucagcugcgccu

SEQ ID NO: 3272182 - RNA, 19 nt, Artificial Sequence
  Description of Artificial Sequence: Synthetic oligonucleotide
agguucugugcgcugagag

SEQ ID NO: 3272183 - RNA, 19 nt, Artificial Sequence
  Description of Artificial Sequence: Synthetic oligonucleotide
ugugcgcugagagacacca

SEQ ID NO: 3272184 - RNA, 19 nt, Artificial Sequence
  Description of Artificial Sequence: Synthetic oligonucleotide
uuugacuuguaggugcugu

SEQ ID NO: 3272185 - RNA, 19 nt, Artificial Sequence
  Description of Artificial Sequence: Synthetic oligonucleotide
gauucuuuucccagaugag

SEQ ID NO: 3272186 - RNA, 19 nt, Artificial Sequence
  Description of Artificial Sequence: Synthetic oligonucleotide
ugaccaaggaccucuucac

SEQ ID NO: 3272187 - RNA, 19 nt, Artificial Sequence
  Description of Artificial Sequence: Synthetic oligonucleotide
aaagaauauucuagauugu

SEQ ID NO: 3272188 - RNA, 19 nt, Artificial Sequence
  Description of Artificial Sequence: Synthetic oligonucleotide
uaugguucaugcccaggcu

SEQ ID NO: 3272189 - RNA, 19 nt, Artificial Sequence
  Description of Artificial Sequence: Synthetic oligonucleotide
cacugaaagcccaacagga

SEQ ID NO: 3272190 - RNA, 19 nt, Artificial Sequence
  Description of Artificial Sequence: Synthetic oligonucleotide
cuguuuucagcuucagcug

SEQ ID NO: 3272191 - RNA, 19 nt, Artificial Sequence
  Description of Artificial Sequence: Synthetic oligonucleotide
ugcauuuccaaagaauauu

SEQ ID NO: 3272192 - RNA, 19 nt, Artificial Sequence
  Description of Artificial Sequence: Synthetic oligonucleotide
aggugcuguuucuaugccg

SEQ ID NO: 3272193 - RNA, 19 nt, Artificial Sequence
  Description of Artificial Sequence: Synthetic oligonucleotide
acaggacccacaagaaccc

SEQ ID NO: 3272194 - RNA, 19 nt, Artificial Sequence
  Description of Artificial Sequence: Synthetic oligonucleotide
agaacccugguauuucacu

SEQ ID NO: 3272195 - RNA, 19 nt, Artificial Sequence
  Description of Artificial Sequence: Synthetic oligonucleotide
aagaacccugguauuucac

SEQ ID NO: 3272196 - RNA, 19 nt, Artificial Sequence
  Description of Artificial Sequence: Synthetic oligonucleotide
uucaaguacauucagacag

SEQ ID NO: 3272197 - RNA, 19 nt, Artificial Sequence
  Description of Artificial Sequence: Synthetic oligonucleotide
ugugcuaagauucaaacug

SEQ ID NO: 3272198 - RNA, 19 nt, Artificial Sequence
  Description of Artificial Sequence: Synthetic oligonucleotide
uaaguuuuaauuuauuuug

SEQ ID NO: 3272199 - RNA, 19 nt, Artificial Sequence
  Description of Artificial Sequence: Synthetic oligonucleotide
uuuaauuuauuuuguauag

SEQ ID NO: 3272200 - RNA, 19 nt, Artificial Sequence
  Description of Artificial Sequence: Synthetic oligonucleotide
uauuuuguauaguagaaag

SEQ ID NO: 3272201 - RNA, 19 nt, Artificial Sequence
  Description of Artificial Sequence: Synthetic oligonucleotide
aguacauucagacagaggu

SEQ ID NO: 3272202 - RNA, 19 nt, Artificial Sequence
  Description of Artificial Sequence: Synthetic oligonucleotide
aguucaaguacauucagac

SEQ ID NO: 3272203 - RNA, 19 nt, Artificial Sequence
  Description of Artificial Sequence: Synthetic oligonucleotide
aaaagaaguagccuaaggu

SEQ ID NO: 3272204 - RNA, 19 nt, Artificial Sequence
  Description of Artificial Sequence: Synthetic oligonucleotide
aaaauuaaguuuuaauuua

SEQ ID NO: 3272205 - RNA, 19 nt, Artificial Sequence
  Description of Artificial Sequence: Synthetic oligonucleotide
uuauuguacaaaauuaagu

SEQ ID NO: 3272206 - RNA, 19 nt, Artificial Sequence
  Description of Artificial Sequence: Synthetic oligonucleotide
ugaauuauggcuuuaugac

SEQ ID NO: 3272207 - RNA, 19 nt, Artificial Sequence
  Description of Artificial Sequence: Synthetic oligonucleotide
auuuauuuuguauaguaga

SEQ ID NO: 3272208 - RNA, 19 nt, Artificial Sequence
  Description of Artificial Sequence: Synthetic oligonucleotide
acaaaauuaaguuuuaauu

SEQ ID NO: 3272209 - RNA, 19 nt, Artificial Sequence
  Description of Artificial Sequence: Synthetic oligonucleotide
uuuuaauuuauuuuguaua

SEQ ID NO: 3272210 - RNA, 19 nt, Artificial Sequence
  Description of Artificial Sequence: Synthetic oligonucleotide
uauuguacaaaauuaaguu

SEQ ID NO: 3272211 - RNA, 19 nt, Artificial Sequence
  Description of Artificial Sequence: Synthetic oligonucleotide
uguacauugcauuacucag

SEQ ID NO: 3272212 - RNA, 19 nt, Artificial Sequence
  Description of Artificial Sequence: Synthetic oligonucleotide
uugaauuauggcuuuauga

SEQ ID NO: 3272213 - RNA, 19 nt, Artificial Sequence
  Description of Artificial Sequence: Synthetic oligonucleotide
aacucuuccaaguucaagu

SEQ ID NO: 3272214 - RNA, 19 nt, Artificial Sequence
  Description of Artificial Sequence: Synthetic oligonucleotide
uuuuguauaguagaaaggu

SEQ ID NO: 3272215 - RNA, 19 nt, Artificial Sequence
  Description of Artificial Sequence: Synthetic oligonucleotide
uauggguucuaccucaucc

SEQ ID NO: 3272216 - RNA, 19 nt, Artificial Sequence
  Description of Artificial Sequence: Synthetic oligonucleotide
aaagaaguagccuaagguu

SEQ ID NO: 3272217 - RNA, 19 nt, Artificial Sequence
  Description of Artificial Sequence: Synthetic oligonucleotide
uuuauuuuguauaguagaa

SEQ ID NO: 3272218 - RNA, 19 nt, Artificial Sequence
  Description of Artificial Sequence: Synthetic oligonucleotide
cuuauuguacaaaauuaag

SEQ ID NO: 3272219 - RNA, 19 nt, Artificial Sequence
  Description of Artificial Sequence: Synthetic oligonucleotide
uccaaguucaaguacauuc

SEQ ID NO: 3272220 - RNA, 19 nt, Artificial Sequence
  Description of Artificial Sequence: Synthetic oligonucleotide
uuaaguuuuaauuuauuuu

SEQ ID NO: 3272221 - RNA, 19 nt, Artificial Sequence
  Description of Artificial Sequence: Synthetic oligonucleotide
uuguauaguagaaagguau

SEQ ID NO: 3272222 - RNA, 19 nt, Artificial Sequence
  Description of Artificial Sequence: Synthetic oligonucleotide
uuugucuugugccacaugu

SEQ ID NO: 3272223 - RNA, 19 nt, Artificial Sequence
  Description of Artificial Sequence: Synthetic oligonucleotide
aauuuauuuuguauaguag

SEQ ID NO: 3272224 - RNA, 19 nt, Artificial Sequence
  Description of Artificial Sequence: Synthetic oligonucleotide
uuacucaguugaauuaugg

SEQ ID NO: 3272225 - RNA, 19 nt, Artificial Sequence
  Description of Artificial Sequence: Synthetic oligonucleotide
auggcuuuaugacaucugc

SEQ ID NO: 3272226 - RNA, 19 nt, Artificial Sequence
  Description of Artificial Sequence: Synthetic oligonucleotide
gacuuaauagaacucuucc

SEQ ID NO: 3272227 - RNA, 19 nt, Artificial Sequence
  Description of Artificial Sequence: Synthetic oligonucleotide
uuguacaaaauuaaguuuu

SEQ ID NO: 3272228 - RNA, 19 nt, Artificial Sequence
  Description of Artificial Sequence: Synthetic oligonucleotide
uaauuuauuuuguauagua

SEQ ID NO: 3272229 - RNA, 19 nt, Artificial Sequence
  Description of Artificial Sequence: Synthetic oligonucleotide
uaguagaaagguauguuug

SEQ ID NO: 3272230 - RNA, 19 nt, Artificial Sequence
  Description of Artificial Sequence: Synthetic oligonucleotide
cuuuaugacaucugcuugg

SEQ ID NO: 3272231 - RNA, 19 nt, Artificial Sequence
  Description of Artificial Sequence: Synthetic oligonucleotide
uuaauagaacucuuccaag

SEQ ID NO: 3272232 - RNA, 19 nt, Artificial Sequence
  Description of Artificial Sequence: Synthetic oligonucleotide
ucuugugccacauguaaag

SEQ ID NO: 3272233 - RNA, 19 nt, Artificial Sequence
  Description of Artificial Sequence: Synthetic oligonucleotide
ucuuccaaguucaaguaca

SEQ ID NO: 3272234 - RNA, 19 nt, Artificial Sequence
  Description of Artificial Sequence: Synthetic oligonucleotide
ugaacaggaauauuuauuu

SEQ ID NO: 3272235 - RNA, 19 nt, Artificial Sequence
  Description of Artificial Sequence: Synthetic oligonucleotide
uucuaccucauccagugag

SEQ ID NO: 3272236 - RNA, 19 nt, Artificial Sequence
  Description of Artificial Sequence: Synthetic oligonucleotide
acucaguugaauuauggcu

SEQ ID NO: 3272237 - RNA, 19 nt, Artificial Sequence
  Description of Artificial Sequence: Synthetic oligonucleotide
uguauaguagaaagguaug

SEQ ID NO: 3272238 - RNA, 19 nt, Artificial Sequence
  Description of Artificial Sequence: Synthetic oligonucleotide
uaagauucaaacuggguau

SEQ ID NO: 3272239 - RNA, 19 nt, Artificial Sequence
  Description of Artificial Sequence: Synthetic oligonucleotide
agguauguuugucuugugc

SEQ ID NO: 3272240 - RNA, 19 nt, Artificial Sequence
  Description of Artificial Sequence: Synthetic oligonucleotide
auuaaguuuuaauuuauuu

SEQ ID NO: 3272241 - RNA, 19 nt, Artificial Sequence
  Description of Artificial Sequence: Synthetic oligonucleotide
auagaacucuuccaaguuc

SEQ ID NO: 3272242 - RNA, 19 nt, Artificial Sequence
  Description of Artificial Sequence: Synthetic oligonucleotide
ucacuuauuguacaaaauu

SEQ ID NO: 3272243 - RNA, 19 nt, Artificial Sequence
  Description of Artificial Sequence: Synthetic oligonucleotide
uacaaaauuaaguuuuaau

SEQ ID NO: 3272244 - RNA, 19 nt, Artificial Sequence
  Description of Artificial Sequence: Synthetic oligonucleotide
uaugacaucugcuuggcuc

SEQ ID NO: 3272245 - RNA, 19 nt, Artificial Sequence
  Description of Artificial Sequence: Synthetic oligonucleotide
uaauagaacucuuccaagu

SEQ ID NO: 3272246 - RNA, 19 nt, Artificial Sequence
  Description of Artificial Sequence: Synthetic oligonucleotide
uagaacucuuccaaguuca

SEQ ID NO: 3272247 - RNA, 19 nt, Artificial Sequence
  Description of Artificial Sequence: Synthetic oligonucleotide
acagaggucaccuauugcu

SEQ ID NO: 3272248 - RNA, 19 nt, Artificial Sequence
  Description of Artificial Sequence: Synthetic oligonucleotide
aauuauggcuuuaugacau

SEQ ID NO: 3272249 - RNA, 19 nt, Artificial Sequence
  Description of Artificial Sequence: Synthetic oligonucleotide
ucaccuauugcugaacagg

SEQ ID NO: 3272250 - RNA, 19 nt, Artificial Sequence
  Description of Artificial Sequence: Synthetic oligonucleotide
ugcuaagauucaaacuggg

SEQ ID NO: 3272251 - RNA, 19 nt, Artificial Sequence
  Description of Artificial Sequence: Synthetic oligonucleotide
aaggacuuaauagaacucu

SEQ ID NO: 3272252 - RNA, 19 nt, Artificial Sequence
  Description of Artificial Sequence: Synthetic oligonucleotide
aaagguauguuugucuugu

SEQ ID NO: 3272253 - RNA, 19 nt, Artificial Sequence
  Description of Artificial Sequence: Synthetic oligonucleotide
aauagaacucuuccaaguu

SEQ ID NO: 3272254 - RNA, 19 nt, Artificial Sequence
  Description of Artificial Sequence: Synthetic oligonucleotide
ggcucuaaggacuuaauag

SEQ ID NO: 3272255 - RNA, 19 nt, Artificial Sequence
  Description of Artificial Sequence: Synthetic oligonucleotide
uuucacuuauuguacaaaa

SEQ ID NO: 3272256 - RNA, 19 nt, Artificial Sequence
  Description of Artificial Sequence: Synthetic oligonucleotide
cauugcauuacucaguuga

SEQ ID NO: 3272257 - RNA, 19 nt, Artificial Sequence
  Description of Artificial Sequence: Synthetic oligonucleotide
uacauucagacagagguca

SEQ ID NO: 3272258 - RNA, 19 nt, Artificial Sequence
  Description of Artificial Sequence: Synthetic oligonucleotide
auuguacaaaauuaaguuu

SEQ ID NO: 3272259 - RNA, 19 nt, Artificial Sequence
  Description of Artificial Sequence: Synthetic oligonucleotide
ucuaaggacuuaauagaac

SEQ ID NO: 3272260 - RNA, 19 nt, Artificial Sequence
  Description of Artificial Sequence: Synthetic oligonucleotide
auuuuguauaguagaaagg

SEQ ID NO: 3272261 - RNA, 19 nt, Artificial Sequence
  Description of Artificial Sequence: Synthetic oligonucleotide
acuuaauagaacucuucca

SEQ ID NO: 3272262 - RNA, 19 nt, Artificial Sequence
  Description of Artificial Sequence: Synthetic oligonucleotide
gaauuauggcuuuaugaca

SEQ ID NO: 3272263 - RNA, 19 nt, Artificial Sequence
  Description of Artificial Sequence: Synthetic oligonucleotide
cuuaauagaacucuuccaa

SEQ ID NO: 3272264 - RNA, 19 nt, Artificial Sequence
  Description of Artificial Sequence: Synthetic oligonucleotide
uagaaagguauguuugucu

SEQ ID NO: 3272265 - RNA, 19 nt, Artificial Sequence
  Description of Artificial Sequence: Synthetic oligonucleotide
gguauguuugucuugugcc

SEQ ID NO: 3272266 - RNA, 19 nt, Artificial Sequence
  Description of Artificial Sequence: Synthetic oligonucleotide
auaguagaaagguauguuu

SEQ ID NO: 3272267 - RNA, 19 nt, Artificial Sequence
  Description of Artificial Sequence: Synthetic oligonucleotide
accucauccagugagagug

SEQ ID NO: 3272268 - RNA, 19 nt, Artificial Sequence
  Description of Artificial Sequence: Synthetic oligonucleotide
uacucaguugaauuauggc

SEQ ID NO: 3272269 - RNA, 19 nt, Artificial Sequence
  Description of Artificial Sequence: Synthetic oligonucleotide
uuuguauaguagaaaggua

SEQ ID NO: 3272270 - RNA, 19 nt, Artificial Sequence
  Description of Artificial Sequence: Synthetic oligonucleotide
guuagcugugcuaagauuc

SEQ ID NO: 3272271 - RNA, 19 nt, Artificial Sequence
  Description of Artificial Sequence: Synthetic oligonucleotide
aaauuaaguuuuaauuuau

SEQ ID NO: 3272272 - RNA, 19 nt, Artificial Sequence
  Description of Artificial Sequence: Synthetic oligonucleotide
aguagaaagguauguuugu

SEQ ID NO: 3272273 - RNA, 19 nt, Artificial Sequence
  Description of Artificial Sequence: Synthetic oligonucleotide
auucaaacuggguaugggu

SEQ ID NO: 3272274 - RNA, 19 nt, Artificial Sequence
  Description of Artificial Sequence: Synthetic oligonucleotide
uugcugaacaggaauauuu

SEQ ID NO: 3272275 - RNA, 19 nt, Artificial Sequence
  Description of Artificial Sequence: Synthetic oligonucleotide
ugucuugugccacauguaa

SEQ ID NO: 3272276 - RNA, 19 nt, Artificial Sequence
  Description of Artificial Sequence: Synthetic oligonucleotide
aucugcuuggcucuaagga

SEQ ID NO: 3272277 - RNA, 19 nt, Artificial Sequence
  Description of Artificial Sequence: Synthetic oligonucleotide
cuaagauucaaacugggua

SEQ ID NO: 3272278 - RNA, 19 nt, Artificial Sequence
  Description of Artificial Sequence: Synthetic oligonucleotide
ucugcuuggcucuaaggac

SEQ ID NO: 3272279 - RNA, 19 nt, Artificial Sequence
  Description of Artificial Sequence: Synthetic oligonucleotide
ugcauuacucaguugaauu

SEQ ID NO: 3272280 - RNA, 19 nt, Artificial Sequence
  Description of Artificial Sequence: Synthetic oligonucleotide
acuggguauggguucuacc

SEQ ID NO: 3272281 - RNA, 19 nt, Artificial Sequence
  Description of Artificial Sequence: Synthetic oligonucleotide
uuaauuuauuuuguauagu

SEQ ID NO: 3272282 - RNA, 19 nt, Artificial Sequence
  Description of Artificial Sequence: Synthetic oligonucleotide
aaguuuuaauuuauuuugu

SEQ ID NO: 3272283 - RNA, 19 nt, Artificial Sequence
  Description of Artificial Sequence: Synthetic oligonucleotide
gauucaaacuggguauggg

SEQ ID NO: 3272284 - RNA, 19 nt, Artificial Sequence
  Description of Artificial Sequence: Synthetic oligonucleotide
ucaaguacauucagacaga

SEQ ID NO: 3272285 - RNA, 19 nt, Artificial Sequence
  Description of Artificial Sequence: Synthetic oligonucleotide
ucagacagaggucaccuau

SEQ ID NO: 3272286 - RNA, 19 nt, Artificial Sequence
  Description of Artificial Sequence: Synthetic oligonucleotide
uacauugcauuacucaguu

SEQ ID NO: 3272287 - RNA, 19 nt, Artificial Sequence
  Description of Artificial Sequence: Synthetic oligonucleotide
uuauuuuguauaguagaaa

SEQ ID NO: 3272288 - RNA, 19 nt, Artificial Sequence
  Description of Artificial Sequence: Synthetic oligonucleotide
caaaauuaaguuuuaauuu

SEQ ID NO: 3272289 - RNA, 19 nt, Artificial Sequence
  Description of Artificial Sequence: Synthetic oligonucleotide
uaaggacuuaauagaacuc

SEQ ID NO: 3272290 - RNA, 19 nt, Artificial Sequence
  Description of Artificial Sequence: Synthetic oligonucleotide
uuagcugugcuaagauuca

SEQ ID NO: 3272291 - RNA, 19 nt, Artificial Sequence
  Description of Artificial Sequence: Synthetic oligonucleotide
uucacuuauuguacaaaau

SEQ ID NO: 3272292 - RNA, 19 nt, Artificial Sequence
  Description of Artificial Sequence: Synthetic oligonucleotide
gaaagguauguuugucuug

SEQ ID NO: 3272293 - RNA, 19 nt, Artificial Sequence
  Description of Artificial Sequence: Synthetic oligonucleotide
uguacaaaauuaaguuuua

SEQ ID NO: 3272294 - RNA, 19 nt, Artificial Sequence
  Description of Artificial Sequence: Synthetic oligonucleotide
agugagaguguacauugca

SEQ ID NO: 3272295 - RNA, 19 nt, Artificial Sequence
  Description of Artificial Sequence: Synthetic oligonucleotide
uucaaacuggguauggguu

SEQ ID NO: 3272296 - RNA, 19 nt, Artificial Sequence
  Description of Artificial Sequence: Synthetic oligonucleotide
aaugguaucaacuauacca

SEQ ID NO: 3272297 - RNA, 19 nt, Artificial Sequence
  Description of Artificial Sequence: Synthetic oligonucleotide
agagucaucaauuucaaac

SEQ ID NO: 3272298 - RNA, 19 nt, Artificial Sequence
  Description of Artificial Sequence: Synthetic oligonucleotide
aauuucaaacugcagugcc

SEQ ID NO: 3272299 - RNA, 19 nt, Artificial Sequence
  Description of Artificial Sequence: Synthetic oligonucleotide
agagcaacugcacaaaggc

SEQ ID NO: 3272300 - RNA, 19 nt, Artificial Sequence
  Description of Artificial Sequence: Synthetic oligonucleotide
aagaacauggcccagguca

SEQ ID NO: 3272301 - RNA, 19 nt, Artificial Sequence
  Description of Artificial Sequence: Synthetic oligonucleotide
aacuauaccaagaaggagg

SEQ ID NO: 3272302 - RNA, 19 nt, Artificial Sequence
  Description of Artificial Sequence: Synthetic oligonucleotide
aucaacuauaccaagaagg

SEQ ID NO: 3272303 - RNA, 19 nt, Artificial Sequence
  Description of Artificial Sequence: Synthetic oligonucleotide
aaaugguaucaacuauacc

SEQ ID NO: 3272304 - RNA, 19 nt, Artificial Sequence
  Description of Artificial Sequence: Synthetic oligonucleotide
cuuaacaccaggaagagga

SEQ ID NO: 3272305 - RNA, 19 nt, Artificial Sequence
  Description of Artificial Sequence: Synthetic oligonucleotide
ucaacuauaccaagaagga

SEQ ID NO: 3272306 - RNA, 19 nt, Artificial Sequence
  Description of Artificial Sequence: Synthetic oligonucleotide
uuugccaugccucaaggca

SEQ ID NO: 3272307 - RNA, 19 nt, Artificial Sequence
  Description of Artificial Sequence: Synthetic oligonucleotide
aggagagcggcacaggugc

SEQ ID NO: 3272308 - RNA, 19 nt, Artificial Sequence
  Description of Artificial Sequence: Synthetic oligonucleotide
acaccagugacagacaagc

SEQ ID NO: 3272309 - RNA, 19 nt, Artificial Sequence
  Description of Artificial Sequence: Synthetic oligonucleotide
ugaguucaaguucuaagcc

SEQ ID NO: 3272310 - RNA, 19 nt, Artificial Sequence
  Description of Artificial Sequence: Synthetic oligonucleotide
cucagaaucucguaggagc

SEQ ID NO: 3272311 - RNA, 19 nt, Artificial Sequence
  Description of Artificial Sequence: Synthetic oligonucleotide
cuguaaaugguucugggag

SEQ ID NO: 3272312 - RNA, 19 nt, Artificial Sequence
  Description of Artificial Sequence: Synthetic oligonucleotide
aaguucuaagccugcacuc

SEQ ID NO: 3272313 - RNA, 19 nt, Artificial Sequence
  Description of Artificial Sequence: Synthetic oligonucleotide
ucagagagcuaucagcacc

SEQ ID NO: 3272314 - RNA, 19 nt, Artificial Sequence
  Description of Artificial Sequence: Synthetic oligonucleotide
agugacuucacuguaaaug

SEQ ID NO: 3272315 - RNA, 19 nt, Artificial Sequence
  Description of Artificial Sequence: Synthetic oligonucleotide
auuguguuuaaauucaguu

SEQ ID NO: 3272316 - RNA, 19 nt, Artificial Sequence
  Description of Artificial Sequence: Synthetic oligonucleotide
uauaccaagaaggaggggu

SEQ ID NO: 3272317 - RNA, 19 nt, Artificial Sequence
  Description of Artificial Sequence: Synthetic oligonucleotide
cugauaggcgccaugauug

SEQ ID NO: 3272318 - RNA, 19 nt, Artificial Sequence
  Description of Artificial Sequence: Synthetic oligonucleotide
aguaggaggaaaugguauc

SEQ ID NO: 3272319 - RNA, 19 nt, Artificial Sequence
  Description of Artificial Sequence: Synthetic oligonucleotide
ucauucagggcuaaggcaa

SEQ ID NO: 3272320 - RNA, 19 nt, Artificial Sequence
  Description of Artificial Sequence: Synthetic oligonucleotide
uaagccugcacucucuuca

SEQ ID NO: 3272321 - RNA, 19 nt, Artificial Sequence
  Description of Artificial Sequence: Synthetic oligonucleotide
uaucaacuauaccaagaag

SEQ ID NO: 3272322 - RNA, 19 nt, Artificial Sequence
  Description of Artificial Sequence: Synthetic oligonucleotide
gaagaggacaggccuaagg

SEQ ID NO: 3272323 - RNA, 19 nt, Artificial Sequence
  Description of Artificial Sequence: Synthetic oligonucleotide
ugauguaucccaguggggc

SEQ ID NO: 3272324 - RNA, 19 nt, Artificial Sequence
  Description of Artificial Sequence: Synthetic oligonucleotide
ugacuguccccaaacuugg

SEQ ID NO: 3272325 - RNA, 19 nt, Artificial Sequence
  Description of Artificial Sequence: Synthetic oligonucleotide
uguagggugacaccaguga

SEQ ID NO: 3272326 - RNA, 19 nt, Artificial Sequence
  Description of Artificial Sequence: Synthetic oligonucleotide
agacaagcagcggugagcc

SEQ ID NO: 3272327 - RNA, 19 nt, Artificial Sequence
  Description of Artificial Sequence: Synthetic oligonucleotide
cucaaggcagaacucaggg

SEQ ID NO: 3272328 - RNA, 19 nt, Artificial Sequence
  Description of Artificial Sequence: Synthetic oligonucleotide
aaucucguaggagcagucc

SEQ ID NO: 3272329 - RNA, 19 nt, Artificial Sequence
  Description of Artificial Sequence: Synthetic oligonucleotide
cuucauccuuugaagaagg

SEQ ID NO: 3272330 - RNA, 19 nt, Artificial Sequence
  Description of Artificial Sequence: Synthetic oligonucleotide
aguggcaaguguguguucc

SEQ ID NO: 3272331 - RNA, 19 nt, Artificial Sequence
  Description of Artificial Sequence: Synthetic oligonucleotide
uaaccccaccuucagagag

SEQ ID NO: 3272332 - RNA, 19 nt, Artificial Sequence
  Description of Artificial Sequence: Synthetic oligonucleotide
aaguucuuugccaugccuc

SEQ ID NO: 3272333 - RNA, 19 nt, Artificial Sequence
  Description of Artificial Sequence: Synthetic oligonucleotide
caagaguaggaggaaaugg

SEQ ID NO: 3272334 - RNA, 19 nt, Artificial Sequence
  Description of Artificial Sequence: Synthetic oligonucleotide
ucaggaugaguucaaguuc

SEQ ID NO: 3272335 - RNA, 19 nt, Artificial Sequence
  Description of Artificial Sequence: Synthetic oligonucleotide
ugggguaccuggcaagugg

SEQ ID NO: 3272336 - RNA, 19 nt, Artificial Sequence
  Description of Artificial Sequence: Synthetic oligonucleotide
uuguguuuaaauucaguua

SEQ ID NO: 3272337 - RNA, 19 nt, Artificial Sequence
  Description of Artificial Sequence: Synthetic oligonucleotide
acugcacaaaggcaaguuc

SEQ ID NO: 3272338 - RNA, 19 nt, Artificial Sequence
  Description of Artificial Sequence: Synthetic oligonucleotide
ugauuguguuuaaauucag

SEQ ID NO: 3272339 - RNA, 19 nt, Artificial Sequence
  Description of Artificial Sequence: Synthetic oligonucleotide
agucaucaauuucaaacug

SEQ ID NO: 3272340 - RNA, 19 nt, Artificial Sequence
  Description of Artificial Sequence: Synthetic oligonucleotide
aguggcaacagccaccaca

SEQ ID NO: 3272341 - RNA, 19 nt, Artificial Sequence
  Description of Artificial Sequence: Synthetic oligonucleotide
acuauaccaagaaggaggg

SEQ ID NO: 3272342 - RNA, 19 nt, Artificial Sequence
  Description of Artificial Sequence: Synthetic oligonucleotide
gguaaccccaccuucagag

SEQ ID NO: 3272343 - RNA, 19 nt, Artificial Sequence
  Description of Artificial Sequence: Synthetic oligonucleotide
ucagagagcaacugcacaa

SEQ ID NO: 3272344 - RNA, 19 nt, Artificial Sequence
  Description of Artificial Sequence: Synthetic oligonucleotide
agagcuaucagcaccaaga

SEQ ID NO: 3272345 - RNA, 19 nt, Artificial Sequence
  Description of Artificial Sequence: Synthetic oligonucleotide
aaacuugguccuccggcuc

SEQ ID NO: 3272346 - RNA, 19 nt, Artificial Sequence
  Description of Artificial Sequence: Synthetic oligonucleotide
uguaaaugguucugggagu

SEQ ID NO: 3272347 - RNA, 19 nt, Artificial Sequence
  Description of Artificial Sequence: Synthetic oligonucleotide
cugacuguccccaaacuug

SEQ ID NO: 3272348 - RNA, 19 nt, Artificial Sequence
  Description of Artificial Sequence: Synthetic oligonucleotide
ucuacugcuccccacgggu

SEQ ID NO: 3272349 - RNA, 19 nt, Artificial Sequence
  Description of Artificial Sequence: Synthetic oligonucleotide
ucggaagaacugauaggcg

SEQ ID NO: 3272350 - RNA, 19 nt, Artificial Sequence
  Description of Artificial Sequence: Synthetic oligonucleotide
aagaguaggaggaaauggu

SEQ ID NO: 3272351 - RNA, 19 nt, Artificial Sequence
  Description of Artificial Sequence: Synthetic oligonucleotide
uugccaugccucaaggcag

SEQ ID NO: 3272352 - RNA, 19 nt, Artificial Sequence
  Description of Artificial Sequence: Synthetic oligonucleotide
aaaugguucugggaguuca

SEQ ID NO: 3272353 - RNA, 19 nt, Artificial Sequence
  Description of Artificial Sequence: Synthetic oligonucleotide
gaguucaguggcaacagcc

SEQ ID NO: 3272354 - RNA, 19 nt, Artificial Sequence
  Description of Artificial Sequence: Synthetic oligonucleotide
ucaaguucuaagccugcac

SEQ ID NO: 3272355 - RNA, 19 nt, Artificial Sequence
  Description of Artificial Sequence: Synthetic oligonucleotide
cacaaaggcaaguucuuug

SEQ ID NO: 3272356 - RNA, 19 nt, Artificial Sequence
  Description of Artificial Sequence: Synthetic oligonucleotide
gauguaucccaguggggcc

SEQ ID NO: 3272357 - RNA, 19 nt, Artificial Sequence
  Description of Artificial Sequence: Synthetic oligonucleotide
acuguaaaugguucuggga

SEQ ID NO: 3272358 - RNA, 19 nt, Artificial Sequence
  Description of Artificial Sequence: Synthetic oligonucleotide
aguaccuggcgucauucag

SEQ ID NO: 3272359 - RNA, 19 nt, Artificial Sequence
  Description of Artificial Sequence: Synthetic oligonucleotide
acuguccccaaacuugguc

SEQ ID NO: 3272360 - RNA, 19 nt, Artificial Sequence
  Description of Artificial Sequence: Synthetic oligonucleotide
uguagggguaaccccaccu

SEQ ID NO: 3272361 - RNA, 19 nt, Artificial Sequence
  Description of Artificial Sequence: Synthetic oligonucleotide
cuggcaaguggcuuaacac

SEQ ID NO: 3272362 - RNA, 19 nt, Artificial Sequence
  Description of Artificial Sequence: Synthetic oligonucleotide
aggagagugacuucacugu

SEQ ID NO: 3272363 - RNA, 19 nt, Artificial Sequence
  Description of Artificial Sequence: Synthetic oligonucleotide
aggcagugaggacuggggc

SEQ ID NO: 3272364 - RNA, 19 nt, Artificial Sequence
  Description of Artificial Sequence: Synthetic oligonucleotide
augauuguguuuaaauuca

SEQ ID NO: 3272365 - RNA, 19 nt, Artificial Sequence
  Description of Artificial Sequence: Synthetic oligonucleotide
guaucaacuauaccaagaa

SEQ ID NO: 3272366 - RNA, 19 nt, Artificial Sequence
  Description of Artificial Sequence: Synthetic oligonucleotide
uugaagaaggcagccacug

SEQ ID NO: 3272367 - RNA, 19 nt, Artificial Sequence
  Description of Artificial Sequence: Synthetic oligonucleotide
ucauccuuugaagaaggca

SEQ ID NO: 3272368 - RNA, 19 nt, Artificial Sequence
  Description of Artificial Sequence: Synthetic oligonucleotide
uuugaagaaggcagccacu

SEQ ID NO: 3272369 - RNA, 19 nt, Artificial Sequence
  Description of Artificial Sequence: Synthetic oligonucleotide
gguucugggaguucagugg

SEQ ID NO: 3272370 - RNA, 19 nt, Artificial Sequence
  Description of Artificial Sequence: Synthetic oligonucleotide
uucacuguaaaugguucug

SEQ ID NO: 3272371 - RNA, 19 nt, Artificial Sequence
  Description of Artificial Sequence: Synthetic oligonucleotide
gaggaaaugguaucaacua

SEQ ID NO: 3272372 - RNA, 19 nt, Artificial Sequence
  Description of Artificial Sequence: Synthetic oligonucleotide
aguucaaguucuaagccug

SEQ ID NO: 3272373 - RNA, 19 nt, Artificial Sequence
  Description of Artificial Sequence: Synthetic oligonucleotide
ugguaucaacuauaccaag

SEQ ID NO: 3272374 - RNA, 19 nt, Artificial Sequence
  Description of Artificial Sequence: Synthetic oligonucleotide
aaggcagccacuguagggu

SEQ ID NO: 3272375 - RNA, 19 nt, Artificial Sequence
  Description of Artificial Sequence: Synthetic oligonucleotide
caaacugcagugccucucg

SEQ ID NO: 3272376 - RNA, 19 nt, Artificial Sequence
  Description of Artificial Sequence: Synthetic oligonucleotide
augcugacuguccccaaac

SEQ ID NO: 3272377 - RNA, 19 nt, Artificial Sequence
  Description of Artificial Sequence: Synthetic oligonucleotide
agaacucagggacggcaac

SEQ ID NO: 3272378 - RNA, 19 nt, Artificial Sequence
  Description of Artificial Sequence: Synthetic oligonucleotide
aguucuuugccaugccuca

SEQ ID NO: 3272379 - RNA, 19 nt, Artificial Sequence
  Description of Artificial Sequence: Synthetic oligonucleotide
uugguuuugcuuccuugga

SEQ ID NO: 3272380 - RNA, 19 nt, Artificial Sequence
  Description of Artificial Sequence: Synthetic oligonucleotide
cacagugccgccugugugg

SEQ ID NO: 3272381 - RNA, 19 nt, Artificial Sequence
  Description of Artificial Sequence: Synthetic oligonucleotide
aaacugcagugccucucgg

SEQ ID NO: 3272382 - RNA, 19 nt, Artificial Sequence
  Description of Artificial Sequence: Synthetic oligonucleotide
guacucucgggguaguacc

SEQ ID NO: 3272383 - RNA, 19 nt, Artificial Sequence
  Description of Artificial Sequence: Synthetic oligonucleotide
aggaaaugguaucaacuau

SEQ ID NO: 3272384 - RNA, 19 nt, Artificial Sequence
  Description of Artificial Sequence: Synthetic oligonucleotide
guguguuccuaggugaggg

SEQ ID NO: 3272385 - RNA, 19 nt, Artificial Sequence
  Description of Artificial Sequence: Synthetic oligonucleotide
agcaccaagaguaggagga

SEQ ID NO: 3272386 - RNA, 19 nt, Artificial Sequence
  Description of Artificial Sequence: Synthetic oligonucleotide
uucuacugcuccccacggg

SEQ ID NO: 3272387 - RNA, 19 nt, Artificial Sequence
  Description of Artificial Sequence: Synthetic oligonucleotide
aagaaggagggguccuucu

SEQ ID NO: 3272388 - RNA, 19 nt, Artificial Sequence
  Description of Artificial Sequence: Synthetic oligonucleotide
caauuucaaacugcagugc

SEQ ID NO: 3272389 - RNA, 19 nt, Artificial Sequence
  Description of Artificial Sequence: Synthetic oligonucleotide
cugaaaggcauuccugaug

SEQ ID NO: 3272390 - RNA, 19 nt, Artificial Sequence
  Description of Artificial Sequence: Synthetic oligonucleotide
cuaucagcaccaagaguag

SEQ ID NO: 3272391 - RNA, 19 nt, Artificial Sequence
  Description of Artificial Sequence: Synthetic oligonucleotide
uccucagacagggagggug

SEQ ID NO: 3272392 - RNA, 19 nt, Artificial Sequence
  Description of Artificial Sequence: Synthetic oligonucleotide
uugcuuccuuggaagaaca

SEQ ID NO: 3272393 - RNA, 19 nt, Artificial Sequence
  Description of Artificial Sequence: Synthetic oligonucleotide
uuaacaccaggaagaggac

SEQ ID NO: 3272394 - RNA, 19 nt, Artificial Sequence
  Description of Artificial Sequence: Synthetic oligonucleotide
uucauccuuugaagaaggc

SEQ ID NO: 3272395 - RNA, 19 nt, Artificial Sequence
  Description of Artificial Sequence: Synthetic oligonucleotide
cucauugaggcagugagga

SEQ ID NO: 3272396 - RNA, 19 nt, Artificial Sequence
  Description of Artificial Sequence: Synthetic oligonucleotide
aaaguucuccaucaaacac

SEQ ID NO: 3272397 - RNA, 19 nt, Artificial Sequence
  Description of Artificial Sequence: Synthetic oligonucleotide
aaaggugccauuuccuccc

SEQ ID NO: 3272398 - RNA, 19 nt, Artificial Sequence
  Description of Artificial Sequence: Synthetic oligonucleotide
acacauagaguucacuucc

SEQ ID NO: 3272399 - RNA, 19 nt, Artificial Sequence
  Description of Artificial Sequence: Synthetic oligonucleotide
uaaaaguucuccaucaaac

SEQ ID NO: 3272400 - RNA, 19 nt, Artificial Sequence
  Description of Artificial Sequence: Synthetic oligonucleotide
aaagcuccgagccuggcac

SEQ ID NO: 3272401 - RNA, 19 nt, Artificial Sequence
  Description of Artificial Sequence: Synthetic oligonucleotide
aagggcaacaccauugucc

SEQ ID NO: 3272402 - RNA, 19 nt, Artificial Sequence
  Description of Artificial Sequence: Synthetic oligonucleotide
uucuccaucaaacaccacc

SEQ ID NO: 3272403 - RNA, 19 nt, Artificial Sequence
  Description of Artificial Sequence: Synthetic oligonucleotide
aaguucuccaucaaacacc

SEQ ID NO: 3272404 - RNA, 19 nt, Artificial Sequence
  Description of Artificial Sequence: Synthetic oligonucleotide
uccauguuaggucuaagcc

SEQ ID NO: 3272405 - RNA, 19 nt, Artificial Sequence
  Description of Artificial Sequence: Synthetic oligonucleotide
aaaaguucuccaucaaaca

SEQ ID NO: 3272406 - RNA, 19 nt, Artificial Sequence
  Description of Artificial Sequence: Synthetic oligonucleotide
ugaguucaggguuauaggc

SEQ ID NO: 3272407 - RNA, 19 nt, Artificial Sequence
  Description of Artificial Sequence: Synthetic oligonucleotide
auccccaccaaucaccacc

SEQ ID NO: 3272408 - RNA, 19 nt, Artificial Sequence
  Description of Artificial Sequence: Synthetic oligonucleotide
agggcaacaccauuguccc

SEQ ID NO: 3272409 - RNA, 19 nt, Artificial Sequence
  Description of Artificial Sequence: Synthetic oligonucleotide
auugaguucaggguuauag

SEQ ID NO: 3272410 - RNA, 19 nt, Artificial Sequence
  Description of Artificial Sequence: Synthetic oligonucleotide
ugcaagauggcugucuucg

SEQ ID NO: 3272411 - RNA, 19 nt, Artificial Sequence
  Description of Artificial Sequence: Synthetic oligonucleotide
aagauggcugucuucgguc

SEQ ID NO: 3272412 - RNA, 19 nt, Artificial Sequence
  Description of Artificial Sequence: Synthetic oligonucleotide
aggguuauaggccuacgcg

SEQ ID NO: 3272413 - RNA, 19 nt, Artificial Sequence
  Description of Artificial Sequence: Synthetic oligonucleotide
guugaagccaacguguugg

SEQ ID NO: 3272414 - RNA, 19 nt, Artificial Sequence
  Description of Artificial Sequence: Synthetic oligonucleotide
cacaguucguaccagaccc

SEQ ID NO: 3272415 - RNA, 19 nt, Artificial Sequence
  Description of Artificial Sequence: Synthetic oligonucleotide
ucaaacaccaccagcggga

SEQ ID NO: 3272416 - RNA, 19 nt, Artificial Sequence
  Description of Artificial Sequence: Synthetic oligonucleotide
acaguggaaagcccgggcc

SEQ ID NO: 3272417 - RNA, 19 nt, Artificial Sequence
  Description of Artificial Sequence: Synthetic oligonucleotide
uugaguucaggguuauagg

SEQ ID NO: 3272418 - RNA, 19 nt, Artificial Sequence
  Description of Artificial Sequence: Synthetic oligonucleotide
ucuccaucaaacaccacca

SEQ ID NO: 3272419 - RNA, 19 nt, Artificial Sequence
  Description of Artificial Sequence: Synthetic oligonucleotide
accauugucccguccaccc

SEQ ID NO: 3272420 - RNA, 19 nt, Artificial Sequence
  Description of Artificial Sequence: Synthetic oligonucleotide
uucacuuccuguuaggcuc

SEQ ID NO: 3272421 - RNA, 19 nt, Artificial Sequence
  Description of Artificial Sequence: Synthetic oligonucleotide
gagaguugaagccaacgug

SEQ ID NO: 3272422 - RNA, 19 nt, Artificial Sequence
  Description of Artificial Sequence: Synthetic oligonucleotide
uccaccugagaguugaagc

SEQ ID NO: 3272423 - RNA, 19 nt, Artificial Sequence
  Description of Artificial Sequence: Synthetic oligonucleotide
acaaaggugccauuuccuc

SEQ ID NO: 3272424 - RNA, 19 nt, Artificial Sequence
  Description of Artificial Sequence: Synthetic oligonucleotide
ugagaguugaagccaacgu

SEQ ID NO: 3272425 - RNA, 19 nt, Artificial Sequence
  Description of Artificial Sequence: Synthetic oligonucleotide
aacaccauugucccgucca

SEQ ID NO: 3272426 - RNA, 19 nt, Artificial Sequence
  Description of Artificial Sequence: Synthetic oligonucleotide
guucguaccagacccaugc

SEQ ID NO: 3272427 - RNA, 19 nt, Artificial Sequence
  Description of Artificial Sequence: Synthetic oligonucleotide
aucaaacaccaccagcggg

SEQ ID NO: 3272428 - RNA, 19 nt, Artificial Sequence
  Description of Artificial Sequence: Synthetic oligonucleotide
uccaucaaacaccaccagc

SEQ ID NO: 3272429 - RNA, 19 nt, Artificial Sequence
  Description of Artificial Sequence: Synthetic oligonucleotide
agauggcugucuucggucc

SEQ ID NO: 3272430 - RNA, 19 nt, Artificial Sequence
  Description of Artificial Sequence: Synthetic oligonucleotide
ccaucaaacaccaccagcg

SEQ ID NO: 3272431 - RNA, 19 nt, Artificial Sequence
  Description of Artificial Sequence: Synthetic oligonucleotide
aguucacuuccuguuaggc

SEQ ID NO: 3272432 - RNA, 19 nt, Artificial Sequence
  Description of Artificial Sequence: Synthetic oligonucleotide
uuuccucccagucuucuug

SEQ ID NO: 3272433 - RNA, 19 nt, Artificial Sequence
  Description of Artificial Sequence: Synthetic oligonucleotide
ugccacaguggaaagcccg

SEQ ID NO: 3272434 - RNA, 19 nt, Artificial Sequence
  Description of Artificial Sequence: Synthetic oligonucleotide
uaggucuaagcccaucccc

SEQ ID NO: 3272435 - RNA, 19 nt, Artificial Sequence
  Description of Artificial Sequence: Synthetic oligonucleotide
ucuaagcccauccccacca

SEQ ID NO: 3272436 - RNA, 19 nt, Artificial Sequence
  Description of Artificial Sequence: Synthetic oligonucleotide
guuaggucuaagcccaucc

SEQ ID NO: 3272437 - RNA, 19 nt, Artificial Sequence
  Description of Artificial Sequence: Synthetic oligonucleotide
auuaagggcaacaccauug

SEQ ID NO: 3272438 - RNA, 19 nt, Artificial Sequence
  Description of Artificial Sequence: Synthetic oligonucleotide
auaaaaguucuccaucaaa

SEQ ID NO: 3272439 - RNA, 19 nt, Artificial Sequence
  Description of Artificial Sequence: Synthetic oligonucleotide
uuaagggcaacaccauugu

SEQ ID NO: 3272440 - RNA, 19 nt, Artificial Sequence
  Description of Artificial Sequence: Synthetic oligonucleotide
aguucaggguuauaggccu

SEQ ID NO: 3272441 - RNA, 19 nt, Artificial Sequence
  Description of Artificial Sequence: Synthetic oligonucleotide
cauguuaggucuaagccca

SEQ ID NO: 3272442 - RNA, 19 nt, Artificial Sequence
  Description of Artificial Sequence: Synthetic oligonucleotide
agaguucacuuccuguuag

SEQ ID NO: 3272443 - RNA, 19 nt, Artificial Sequence
  Description of Artificial Sequence: Synthetic oligonucleotide
uggcaggucaggcagccgg

SEQ ID NO: 3272444 - RNA, 19 nt, Artificial Sequence
  Description of Artificial Sequence: Synthetic oligonucleotide
uuaggucuaagcccauccc

SEQ ID NO: 3272445 - RNA, 19 nt, Artificial Sequence
  Description of Artificial Sequence: Synthetic oligonucleotide
accacacuuugcaagaugg

SEQ ID NO: 3272446 - RNA, 19 nt, Artificial Sequence
  Description of Artificial Sequence: Synthetic oligonucleotide
ggcaccauuccacaguucg

SEQ ID NO: 3272447 - RNA, 19 nt, Artificial Sequence
  Description of Artificial Sequence: Synthetic oligonucleotide
gagccuggcacaaaggugc

SEQ ID NO: 3272448 - RNA, 19 nt, Artificial Sequence
  Description of Artificial Sequence: Synthetic oligonucleotide
caaaggugccauuuccucc

SEQ ID NO: 3272449 - RNA, 19 nt, Artificial Sequence
  Description of Artificial Sequence: Synthetic oligonucleotide
caugccacaguggaaagcc

SEQ ID NO: 3272450 - RNA, 19 nt, Artificial Sequence
  Description of Artificial Sequence: Synthetic oligonucleotide
uccacccagggcauaaaag

SEQ ID NO: 3272451 - RNA, 19 nt, Artificial Sequence
  Description of Artificial Sequence: Synthetic oligonucleotide
ggaauuaagggcaacacca

SEQ ID NO: 3272452 - RNA, 19 nt, Artificial Sequence
  Description of Artificial Sequence: Synthetic oligonucleotide
cucccagucuucuugacug

SEQ ID NO: 3272453 - RNA, 19 nt, Artificial Sequence
  Description of Artificial Sequence: Synthetic oligonucleotide
aauuaagggcaacaccauu

SEQ ID NO: 3272454 - RNA, 19 nt, Artificial Sequence
  Description of Artificial Sequence: Synthetic oligonucleotide
ugucuucgguccauguuag

SEQ ID NO: 3272455 - RNA, 19 nt, Artificial Sequence
  Description of Artificial Sequence: Synthetic oligonucleotide
ccaccaaucaccaccagcg

SEQ ID NO: 3272456 - RNA, 19 nt, Artificial Sequence
  Description of Artificial Sequence: Synthetic oligonucleotide
auagaguucacuuccuguu

SEQ ID NO: 3272457 - RNA, 19 nt, Artificial Sequence
  Description of Artificial Sequence: Synthetic oligonucleotide
aaaagcuccgagccuggca

SEQ ID NO: 3272458 - RNA, 19 nt, Artificial Sequence
  Description of Artificial Sequence: Synthetic oligonucleotide
aacaccaccagcgggaaaa

SEQ ID NO: 3272459 - RNA, 19 nt, Artificial Sequence
  Description of Artificial Sequence: Synthetic oligonucleotide
agacauugaguucaggguu

SEQ ID NO: 3272460 - RNA, 19 nt, Artificial Sequence
  Description of Artificial Sequence: Synthetic oligonucleotide
ucuucuugacuggagcucc

SEQ ID NO: 3272461 - RNA, 19 nt, Artificial Sequence
  Description of Artificial Sequence: Synthetic oligonucleotide
ggguuauaggccuacgcgg

SEQ ID NO: 3272462 - RNA, 19 nt, Artificial Sequence
  Description of Artificial Sequence: Synthetic oligonucleotide
ccagacauugaguucaggg

SEQ ID NO: 3272463 - RNA, 19 nt, Artificial Sequence
  Description of Artificial Sequence: Synthetic oligonucleotide
agaguugaagccaacgugu

SEQ ID NO: 3272464 - RNA, 19 nt, Artificial Sequence
  Description of Artificial Sequence: Synthetic oligonucleotide
ucacuuccuguuaggcucg

SEQ ID NO: 3272465 - RNA, 19 nt, Artificial Sequence
  Description of Artificial Sequence: Synthetic oligonucleotide
uucgguccauguuaggucu

SEQ ID NO: 3272466 - RNA, 19 nt, Artificial Sequence
  Description of Artificial Sequence: Synthetic oligonucleotide
aacguguuggcguggcugu

SEQ ID NO: 3272467 - RNA, 19 nt, Artificial Sequence
  Description of Artificial Sequence: Synthetic oligonucleotide
acacacauagaguucacuu

SEQ ID NO: 3272468 - RNA, 19 nt, Artificial Sequence
  Description of Artificial Sequence: Synthetic oligonucleotide
gcuguagaaauccuguccc

SEQ ID NO: 3272469 - RNA, 19 nt, Artificial Sequence
  Description of Artificial Sequence: Synthetic oligonucleotide
agacccaugccacagugga

SEQ ID NO: 3272470 - RNA, 19 nt, Artificial Sequence
  Description of Artificial Sequence: Synthetic oligonucleotide
accauuccacaguucguac

SEQ ID NO: 3272471 - RNA, 19 nt, Artificial Sequence
  Description of Artificial Sequence: Synthetic oligonucleotide
cacacauagaguucacuuc

SEQ ID NO: 3272472 - RNA, 19 nt, Artificial Sequence
  Description of Artificial Sequence: Synthetic oligonucleotide
uccuguuaggcucgcagcu

SEQ ID NO: 3272473 - RNA, 19 nt, Artificial Sequence
  Description of Artificial Sequence: Synthetic oligonucleotide
gaguucaggguuauaggcc

SEQ ID NO: 3272474 - RNA, 19 nt, Artificial Sequence
  Description of Artificial Sequence: Synthetic oligonucleotide
agggcauaaaaguucucca

SEQ ID NO: 3272475 - RNA, 19 nt, Artificial Sequence
  Description of Artificial Sequence: Synthetic oligonucleotide
ucguaccagacccaugcca

SEQ ID NO: 3272476 - RNA, 19 nt, Artificial Sequence
  Description of Artificial Sequence: Synthetic oligonucleotide
cagggcauaaaaguucucc

SEQ ID NO: 3272477 - RNA, 19 nt, Artificial Sequence
  Description of Artificial Sequence: Synthetic oligonucleotide
uccacaguucguaccagac

SEQ ID NO: 3272478 - RNA, 19 nt, Artificial Sequence
  Description of Artificial Sequence: Synthetic oligonucleotide
cuuccuguuaggcucgcag

SEQ ID NO: 3272479 - RNA, 19 nt, Artificial Sequence
  Description of Artificial Sequence: Synthetic oligonucleotide
aggucaggcagccggcacc

SEQ ID NO: 3272480 - RNA, 19 nt, Artificial Sequence
  Description of Artificial Sequence: Synthetic oligonucleotide
guccauguuaggucuaagc

SEQ ID NO: 3272481 - RNA, 19 nt, Artificial Sequence
  Description of Artificial Sequence: Synthetic oligonucleotide
agucuucuugacuggagcu

SEQ ID NO: 3272482 - RNA, 19 nt, Artificial Sequence
  Description of Artificial Sequence: Synthetic oligonucleotide
caucaaacaccaccagcgg

SEQ ID NO: 3272483 - RNA, 19 nt, Artificial Sequence
  Description of Artificial Sequence: Synthetic oligonucleotide
ucuucgguccauguuaggu

SEQ ID NO: 3272484 - RNA, 19 nt, Artificial Sequence
  Description of Artificial Sequence: Synthetic oligonucleotide
uaggcucgcagcuccaugc

SEQ ID NO: 3272485 - RNA, 19 nt, Artificial Sequence
  Description of Artificial Sequence: Synthetic oligonucleotide
aagccaacguguuggcgug

SEQ ID NO: 3272486 - RNA, 19 nt, Artificial Sequence
  Description of Artificial Sequence: Synthetic oligonucleotide
agcuccaugccgaaagcgc

SEQ ID NO: 3272487 - RNA, 19 nt, Artificial Sequence
  Description of Artificial Sequence: Synthetic oligonucleotide
aagcccauccccaccaauc

SEQ ID NO: 3272488 - RNA, 19 nt, Artificial Sequence
  Description of Artificial Sequence: Synthetic oligonucleotide
gaguucacuuccuguuagg

SEQ ID NO: 3272489 - RNA, 19 nt, Artificial Sequence
  Description of Artificial Sequence: Synthetic oligonucleotide
ucuugacuggagcuccacc

SEQ ID NO: 3272490 - RNA, 19 nt, Artificial Sequence
  Description of Artificial Sequence: Synthetic oligonucleotide
ccauguuaggucuaagccc

SEQ ID NO: 3272491 - RNA, 19 nt, Artificial Sequence
  Description of Artificial Sequence: Synthetic oligonucleotide
uugacuggagcuccaccug

SEQ ID NO: 3272492 - RNA, 19 nt, Artificial Sequence
  Description of Artificial Sequence: Synthetic oligonucleotide
uuugcaagauggcugucuu

SEQ ID NO: 3272493 - RNA, 19 nt, Artificial Sequence
  Description of Artificial Sequence: Synthetic oligonucleotide
acauagaguucacuuccug

SEQ ID NO: 3272494 - RNA, 19 nt, Artificial Sequence
  Description of Artificial Sequence: Synthetic oligonucleotide
accaccagcgcuuggucag

SEQ ID NO: 3272495 - RNA, 19 nt, Artificial Sequence
  Description of Artificial Sequence: Synthetic oligonucleotide
uuccuguuaggcucgcagc

SEQ ID NO: 3272496 - RNA, 19 nt, Artificial Sequence
  Description of Artificial Sequence: Synthetic oligonucleotide
aacaacaccuuccaggacc

SEQ ID NO: 3272497 - RNA, 19 nt, Artificial Sequence
  Description of Artificial Sequence: Synthetic oligonucleotide
uaaacagcaguauuuaucc

SEQ ID NO: 3272498 - RNA, 19 nt, Artificial Sequence
  Description of Artificial Sequence: Synthetic oligonucleotide
uccauguugagccacaugc

SEQ ID NO: 3272499 - RNA, 19 nt, Artificial Sequence
  Description of Artificial Sequence: Synthetic oligonucleotide
ugucucauugcacuaaggg

SEQ ID NO: 3272500 - RNA, 19 nt, Artificial Sequence
  Description of Artificial Sequence: Synthetic oligonucleotide
ugagauuugcuccagggcc

SEQ ID NO: 3272501 - RNA, 19 nt, Artificial Sequence
  Description of Artificial Sequence: Synthetic oligonucleotide
ugcacagucagaaggaggg

SEQ ID NO: 3272502 - RNA, 19 nt, Artificial Sequence
  Description of Artificial Sequence: Synthetic oligonucleotide
uguaguaguaugcugccag

SEQ ID NO: 3272503 - RNA, 19 nt, Artificial Sequence
  Description of Artificial Sequence: Synthetic oligonucleotide
uaugcugccagcuggagag

SEQ ID NO: 3272504 - RNA, 19 nt, Artificial Sequence
  Description of Artificial Sequence: Synthetic oligonucleotide
aagaugaccaacaauacgu

SEQ ID NO: 3272505 - RNA, 19 nt, Artificial Sequence
  Description of Artificial Sequence: Synthetic oligonucleotide
ucuaaguucuccucgguag

SEQ ID NO: 3272506 - RNA, 19 nt, Artificial Sequence
  Description of Artificial Sequence: Synthetic oligonucleotide
acuacugccacuuaaugca

SEQ ID NO: 3272507 - RNA, 19 nt, Artificial Sequence
  Description of Artificial Sequence: Synthetic oligonucleotide
uccacaggaaccucuaugg

SEQ ID NO: 3272508 - RNA, 19 nt, Artificial Sequence
  Description of Artificial Sequence: Synthetic oligonucleotide
ugcugaaaguccuaaaggc

SEQ ID NO: 3272509 - RNA, 19 nt, Artificial Sequence
  Description of Artificial Sequence: Synthetic oligonucleotide
uacuuuuggaacuugacau

SEQ ID NO: 3272510 - RNA, 19 nt, Artificial Sequence
  Description of Artificial Sequence: Synthetic oligonucleotide
gucacaauuggacucaucc

SEQ ID NO: 3272511 - RNA, 19 nt, Artificial Sequence
  Description of Artificial Sequence: Synthetic oligonucleotide
aagcuguuugaucaaugac

SEQ ID NO: 3272512 - RNA, 19 nt, Artificial Sequence
  Description of Artificial Sequence: Synthetic oligonucleotide
caagugcugaaauucaucc

SEQ ID NO: 3272513 - RNA, 19 nt, Artificial Sequence
  Description of Artificial Sequence: Synthetic oligonucleotide
ggagagacaaugcugagcg

SEQ ID NO: 3272514 - RNA, 19 nt, Artificial Sequence
  Description of Artificial Sequence: Synthetic oligonucleotide
gaucaaugacaccaggucc

SEQ ID NO: 3272515 - RNA, 19 nt, Artificial Sequence
  Description of Artificial Sequence: Synthetic oligonucleotide
uucucugcuguacaucugg

SEQ ID NO: 3272516 - RNA, 19 nt, Artificial Sequence
  Description of Artificial Sequence: Synthetic oligonucleotide
gugacuagauucuaggagc

SEQ ID NO: 3272517 - RNA, 19 nt, Artificial Sequence
  Description of Artificial Sequence: Synthetic oligonucleotide
uugcaaaagaacuuccgug

SEQ ID NO: 3272518 - RNA, 19 nt, Artificial Sequence
  Description of Artificial Sequence: Synthetic oligonucleotide
gaugaccaacaauacgugg

SEQ ID NO: 3272519 - RNA, 19 nt, Artificial Sequence
  Description of Artificial Sequence: Synthetic oligonucleotide
aaacauggagccaaucggg

SEQ ID NO: 3272520 - RNA, 19 nt, Artificial Sequence
  Description of Artificial Sequence: Synthetic oligonucleotide
ugaucaaugacaccagguc

SEQ ID NO: 3272521 - RNA, 19 nt, Artificial Sequence
  Description of Artificial Sequence: Synthetic oligonucleotide
guaguagugaagcuguuug

SEQ ID NO: 3272522 - RNA, 19 nt, Artificial Sequence
  Description of Artificial Sequence: Synthetic oligonucleotide
guaguaugcugccagcugg

SEQ ID NO: 3272523 - RNA, 19 nt, Artificial Sequence
  Description of Artificial Sequence: Synthetic oligonucleotide
agugugcagucauaacucc

SEQ ID NO: 3272524 - RNA, 19 nt, Artificial Sequence
  Description of Artificial Sequence: Synthetic oligonucleotide
auggugacuagauucuagg

SEQ ID NO: 3272525 - RNA, 19 nt, Artificial Sequence
  Description of Artificial Sequence: Synthetic oligonucleotide
ucaucagcacagaagggcc

SEQ ID NO: 3272526 - RNA, 19 nt, Artificial Sequence
  Description of Artificial Sequence: Synthetic oligonucleotide
caagaugaccaacaauacg

SEQ ID NO: 3272527 - RNA, 19 nt, Artificial Sequence
  Description of Artificial Sequence: Synthetic oligonucleotide
ugccaguugcaaaagaacu

SEQ ID NO: 3272528 - RNA, 19 nt, Artificial Sequence
  Description of Artificial Sequence: Synthetic oligonucleotide
aacaauacguggauagaag

SEQ ID NO: 3272529 - RNA, 19 nt, Artificial Sequence
  Description of Artificial Sequence: Synthetic oligonucleotide
acucauccaccuuagugac

SEQ ID NO: 3272530 - RNA, 19 nt, Artificial Sequence
  Description of Artificial Sequence: Synthetic oligonucleotide
cacaagaugaccaacaaua

SEQ ID NO: 3272531 - RNA, 19 nt, Artificial Sequence
  Description of Artificial Sequence: Synthetic oligonucleotide
cacaauuggacucauccac

SEQ ID NO: 3272532 - RNA, 19 nt, Artificial Sequence
  Description of Artificial Sequence: Synthetic oligonucleotide
agugccuggauucgaggcc

SEQ ID NO: 3272533 - RNA, 19 nt, Artificial Sequence
  Description of Artificial Sequence: Synthetic oligonucleotide
uagagagagcggcagaucu

SEQ ID NO: 3272534 - RNA, 19 nt, Artificial Sequence
  Description of Artificial Sequence: Synthetic oligonucleotide
gauacauuucacgaacagc

SEQ ID NO: 3272535 - RNA, 19 nt, Artificial Sequence
  Description of Artificial Sequence: Synthetic oligonucleotide
agcucaagucaccagagug

SEQ ID NO: 3272536 - RNA, 19 nt, Artificial Sequence
  Description of Artificial Sequence: Synthetic oligonucleotide
guagcgauuuucuucauuc

SEQ ID NO: 3272537 - RNA, 19 nt, Artificial Sequence
  Description of Artificial Sequence: Synthetic oligonucleotide
gagaguagcgauuuucuuc

SEQ ID NO: 3272538 - RNA, 19 nt, Artificial Sequence
  Description of Artificial Sequence: Synthetic oligonucleotide
gugcugaaaguccuaaagg

SEQ ID NO: 3272539 - RNA, 19 nt, Artificial Sequence
  Description of Artificial Sequence: Synthetic oligonucleotide
uuuguccacacugguaugg

SEQ ID NO: 3272540 - RNA, 19 nt, Artificial Sequence
  Description of Artificial Sequence: Synthetic oligonucleotide
augaccaagagcucugcag

SEQ ID NO: 3272541 - RNA, 19 nt, Artificial Sequence
  Description of Artificial Sequence: Synthetic oligonucleotide
agugacagcugagauuugc

SEQ ID NO: 3272542 - RNA, 19 nt, Artificial Sequence
  Description of Artificial Sequence: Synthetic oligonucleotide
ugucccacagaguucagca

SEQ ID NO: 3272543 - RNA, 19 nt, Artificial Sequence
  Description of Artificial Sequence: Synthetic oligonucleotide
ggaucaacccuguaaagag

SEQ ID NO: 3272544 - RNA, 19 nt, Artificial Sequence
  Description of Artificial Sequence: Synthetic oligonucleotide
gucucauugcacuaagggc

SEQ ID NO: 3272545 - RNA, 19 nt, Artificial Sequence
  Description of Artificial Sequence: Synthetic oligonucleotide
ucaucuuuugcagaccuga

SEQ ID NO: 3272546 - RNA, 19 nt, Artificial Sequence
  Description of Artificial Sequence: Synthetic oligonucleotide
cacuacugccacuuaaugc

SEQ ID NO: 3272547 - RNA, 19 nt, Artificial Sequence
  Description of Artificial Sequence: Synthetic oligonucleotide
uugcaagaguaaaaucaag

SEQ ID NO: 3272548 - RNA, 19 nt, Artificial Sequence
  Description of Artificial Sequence: Synthetic oligonucleotide
ugcaguagguccucagcgg

SEQ ID NO: 3272549 - RNA, 19 nt, Artificial Sequence
  Description of Artificial Sequence: Synthetic oligonucleotide
uuccacaggaaccucuaug

SEQ ID NO: 3272550 - RNA, 19 nt, Artificial Sequence
  Description of Artificial Sequence: Synthetic oligonucleotide
acaauuggacucauccacc

SEQ ID NO: 3272551 - RNA, 19 nt, Artificial Sequence
  Description of Artificial Sequence: Synthetic oligonucleotide
uuggaaacacuucuguuuu

SEQ ID NO: 3272552 - RNA, 19 nt, Artificial Sequence
  Description of Artificial Sequence: Synthetic oligonucleotide
cucaaugucagcuaugucu

SEQ ID NO: 3272553 - RNA, 19 nt, Artificial Sequence
  Description of Artificial Sequence: Synthetic oligonucleotide
uggauucgaggccucacag

SEQ ID NO: 3272554 - RNA, 19 nt, Artificial Sequence
  Description of Artificial Sequence: Synthetic oligonucleotide
gaagcuguuugaucaauga

SEQ ID NO: 3272555 - RNA, 19 nt, Artificial Sequence
  Description of Artificial Sequence: Synthetic oligonucleotide
uuuagccucugccagcuuc

SEQ ID NO: 3272556 - RNA, 19 nt, Artificial Sequence
  Description of Artificial Sequence: Synthetic oligonucleotide
ucaagugcugaaauucauc

SEQ ID NO: 3272557 - RNA, 19 nt, Artificial Sequence
  Description of Artificial Sequence: Synthetic oligonucleotide
ugccugguaaccaucuuga

SEQ ID NO: 3272558 - RNA, 19 nt, Artificial Sequence
  Description of Artificial Sequence: Synthetic oligonucleotide
ucacaauuggacucaucca

SEQ ID NO: 3272559 - RNA, 19 nt, Artificial Sequence
  Description of Artificial Sequence: Synthetic oligonucleotide
ugacuagauucuaggagcu

SEQ ID NO: 3272560 - RNA, 19 nt, Artificial Sequence
  Description of Artificial Sequence: Synthetic oligonucleotide
ugguuggaaacacuucugu

SEQ ID NO: 3272561 - RNA, 19 nt, Artificial Sequence
  Description of Artificial Sequence: Synthetic oligonucleotide
agcggcagaucuucaacac

SEQ ID NO: 3272562 - RNA, 19 nt, Artificial Sequence
  Description of Artificial Sequence: Synthetic oligonucleotide
uguaaagaggauggcaccu

SEQ ID NO: 3272563 - RNA, 19 nt, Artificial Sequence
  Description of Artificial Sequence: Synthetic oligonucleotide
uugaugaccaagagcucug

SEQ ID NO: 3272564 - RNA, 19 nt, Artificial Sequence
  Description of Artificial Sequence: Synthetic oligonucleotide
uaaccaucuugauuaacuc

SEQ ID NO: 3272565 - RNA, 19 nt, Artificial Sequence
  Description of Artificial Sequence: Synthetic oligonucleotide
uucaagcagcuccugguca

SEQ ID NO: 3272566 - RNA, 19 nt, Artificial Sequence
  Description of Artificial Sequence: Synthetic oligonucleotide
uccccuuuguccacacugg

SEQ ID NO: 3272567 - RNA, 19 nt, Artificial Sequence
  Description of Artificial Sequence: Synthetic oligonucleotide
ucacuuuucauagguggcc

SEQ ID NO: 3272568 - RNA, 19 nt, Artificial Sequence
  Description of Artificial Sequence: Synthetic oligonucleotide
ggagauacauuucacgaac

SEQ ID NO: 3272569 - RNA, 19 nt, Artificial Sequence
  Description of Artificial Sequence: Synthetic oligonucleotide
aguugcaaaagaacuuccg

SEQ ID NO: 3272570 - RNA, 19 nt, Artificial Sequence
  Description of Artificial Sequence: Synthetic oligonucleotide
guacuuuuggaacuugaca

SEQ ID NO: 3272571 - RNA, 19 nt, Artificial Sequence
  Description of Artificial Sequence: Synthetic oligonucleotide
ucccaugaggauaaugauc

SEQ ID NO: 3272572 - RNA, 19 nt, Artificial Sequence
  Description of Artificial Sequence: Synthetic oligonucleotide
ucccacagaguucagcacu

SEQ ID NO: 3272573 - RNA, 19 nt, Artificial Sequence
  Description of Artificial Sequence: Synthetic oligonucleotide
ugucaugucauucgccaaa

SEQ ID NO: 3272574 - RNA, 19 nt, Artificial Sequence
  Description of Artificial Sequence: Synthetic oligonucleotide
ugauuaacucuuugggauc

SEQ ID NO: 3272575 - RNA, 19 nt, Artificial Sequence
  Description of Artificial Sequence: Synthetic oligonucleotide
auuugcuccagggccaugg

SEQ ID NO: 3272576 - RNA, 19 nt, Artificial Sequence
  Description of Artificial Sequence: Synthetic oligonucleotide
aacuugacauuucccaaua

SEQ ID NO: 3272577 - RNA, 19 nt, Artificial Sequence
  Description of Artificial Sequence: Synthetic oligonucleotide
acagucagaaggagggacc

SEQ ID NO: 3272578 - RNA, 19 nt, Artificial Sequence
  Description of Artificial Sequence: Synthetic oligonucleotide
ucacucagauggaaggacu

SEQ ID NO: 3272579 - RNA, 19 nt, Artificial Sequence
  Description of Artificial Sequence: Synthetic oligonucleotide
cauggugacuagauucuag

SEQ ID NO: 3272580 - RNA, 19 nt, Artificial Sequence
  Description of Artificial Sequence: Synthetic oligonucleotide
ugugacacauucacuuuuc

SEQ ID NO: 3272581 - RNA, 19 nt, Artificial Sequence
  Description of Artificial Sequence: Synthetic oligonucleotide
uuuggagugccuggauucg

SEQ ID NO: 3272582 - RNA, 19 nt, Artificial Sequence
  Description of Artificial Sequence: Synthetic oligonucleotide
auuggacucauccaccuua

SEQ ID NO: 3272583 - RNA, 19 nt, Artificial Sequence
  Description of Artificial Sequence: Synthetic oligonucleotide
caaucgggcauagaucugg

SEQ ID NO: 3272584 - RNA, 19 nt, Artificial Sequence
  Description of Artificial Sequence: Synthetic oligonucleotide
uauggacugccccaacaac

SEQ ID NO: 3272585 - RNA, 19 nt, Artificial Sequence
  Description of Artificial Sequence: Synthetic oligonucleotide
gaugcacucuacugccagg

SEQ ID NO: 3272586 - RNA, 19 nt, Artificial Sequence
  Description of Artificial Sequence: Synthetic oligonucleotide
gagugccuggauucgaggc

SEQ ID NO: 3272587 - RNA, 19 nt, Artificial Sequence
  Description of Artificial Sequence: Synthetic oligonucleotide
ucacccauggauugcuggc

SEQ ID NO: 3272588 - RNA, 19 nt, Artificial Sequence
  Description of Artificial Sequence: Synthetic oligonucleotide
cauagcucaagucaccaga

SEQ ID NO: 3272589 - RNA, 19 nt, Artificial Sequence
  Description of Artificial Sequence: Synthetic oligonucleotide
ucuauggccagggugguaa

SEQ ID NO: 3272590 - RNA, 19 nt, Artificial Sequence
  Description of Artificial Sequence: Synthetic oligonucleotide
augccugguaaccaucuug

SEQ ID NO: 3272591 - RNA, 19 nt, Artificial Sequence
  Description of Artificial Sequence: Synthetic oligonucleotide
gauuaacucuuugggauca

SEQ ID NO: 3272592 - RNA, 19 nt, Artificial Sequence
  Description of Artificial Sequence: Synthetic oligonucleotide
aucugcuugguguuguaga

SEQ ID NO: 3272593 - RNA, 19 nt, Artificial Sequence
  Description of Artificial Sequence: Synthetic oligonucleotide
gacaccagguccucaggcc

SEQ ID NO: 3272594 - RNA, 19 nt, Artificial Sequence
  Description of Artificial Sequence: Synthetic oligonucleotide
uccucgguaguugaugacc

SEQ ID NO: 3272595 - RNA, 19 nt, Artificial Sequence
  Description of Artificial Sequence: Synthetic oligonucleotide
uggugaguccccugcacag

SEQ ID NO: 3272596 - RNA, 19 nt, Artificial Sequence
  Description of Artificial Sequence: Synthetic oligonucleotide
uuggccauagcaaagagcg

SEQ ID NO: 3272597 - RNA, 19 nt, Artificial Sequence
  Description of Artificial Sequence: Synthetic oligonucleotide
uuuguuaccgcaaaugacc

SEQ ID NO: 3272598 - RNA, 19 nt, Artificial Sequence
  Description of Artificial Sequence: Synthetic oligonucleotide
uuugguuuuguucuugagg

SEQ ID NO: 3272599 - RNA, 19 nt, Artificial Sequence
  Description of Artificial Sequence: Synthetic oligonucleotide
accgcaaaugaccagaggc

SEQ ID NO: 3272600 - RNA, 19 nt, Artificial Sequence
  Description of Artificial Sequence: Synthetic oligonucleotide
auaggcacaacgcugaggg

SEQ ID NO: 3272601 - RNA, 19 nt, Artificial Sequence
  Description of Artificial Sequence: Synthetic oligonucleotide
ucucgaaauaggcacaacg

SEQ ID NO: 3272602 - RNA, 19 nt, Artificial Sequence
  Description of Artificial Sequence: Synthetic oligonucleotide
uugguuuuguucuugaggc

SEQ ID NO: 3272603 - RNA, 19 nt, Artificial Sequence
  Description of Artificial Sequence: Synthetic oligonucleotide
uaacugaugacacagcgcu

SEQ ID NO: 3272604 - RNA, 19 nt, Artificial Sequence
  Description of Artificial Sequence: Synthetic oligonucleotide
uucucuuugguuuuguucu

SEQ ID NO: 3272605 - RNA, 19 nt, Artificial Sequence
  Description of Artificial Sequence: Synthetic oligonucleotide
agacuuggugucuagaauc

SEQ ID NO: 3272606 - RNA, 19 nt, Artificial Sequence
  Description of Artificial Sequence: Synthetic oligonucleotide
gagaucucgaaauaggcac

SEQ ID NO: 3272607 - RNA, 19 nt, Artificial Sequence
  Description of Artificial Sequence: Synthetic oligonucleotide
uucuucuuggcugagaucu

SEQ ID NO: 3272608 - RNA, 19 nt, Artificial Sequence
  Description of Artificial Sequence: Synthetic oligonucleotide
acgaauguacaugaggucg

SEQ ID NO: 3272609 - RNA, 19 nt, Artificial Sequence
  Description of Artificial Sequence: Synthetic oligonucleotide
cacaguacugcacagacac

SEQ ID NO: 3272610 - RNA, 19 nt, Artificial Sequence
  Description of Artificial Sequence: Synthetic oligonucleotide
acugaugacacagcgcucc

SEQ ID NO: 3272611 - RNA, 19 nt, Artificial Sequence
  Description of Artificial Sequence: Synthetic oligonucleotide
ugcacagacacuuugcggu

SEQ ID NO: 3272612 - RNA, 19 nt, Artificial Sequence
  Description of Artificial Sequence: Synthetic oligonucleotide
cucgaaauaggcacaacgc

SEQ ID NO: 3272613 - RNA, 19 nt, Artificial Sequence
  Description of Artificial Sequence: Synthetic oligonucleotide
uucaaucucgcgcugcucc

SEQ ID NO: 3272614 - RNA, 19 nt, Artificial Sequence
  Description of Artificial Sequence: Synthetic oligonucleotide
ugagaucucgaaauaggca

SEQ ID NO: 3272615 - RNA, 19 nt, Artificial Sequence
  Description of Artificial Sequence: Synthetic oligonucleotide
cuugucuuuggccugacug

SEQ ID NO: 3272616 - RNA, 19 nt, Artificial Sequence
  Description of Artificial Sequence: Synthetic oligonucleotide
ucgaaauaggcacaacgcu

SEQ ID NO: 3272617 - RNA, 19 nt, Artificial Sequence
  Description of Artificial Sequence: Synthetic oligonucleotide
agggucgucgccuaccagc

SEQ ID NO: 3272618 - RNA, 19 nt, Artificial Sequence
  Description of Artificial Sequence: Synthetic oligonucleotide
aacgcugagggucgucgcc

SEQ ID NO: 3272619 - RNA, 19 nt, Artificial Sequence
  Description of Artificial Sequence: Synthetic oligonucleotide
cuuggugucuagaaucugc

SEQ ID NO: 3272620 - RNA, 19 nt, Artificial Sequence
  Description of Artificial Sequence: Synthetic oligonucleotide
acugcacagacacuuugcg

SEQ ID NO: 3272621 - RNA, 19 nt, Artificial Sequence
  Description of Artificial Sequence: Synthetic oligonucleotide
ucuagaaucugcuguuuga

SEQ ID NO: 3272622 - RNA, 19 nt, Artificial Sequence
  Description of Artificial Sequence: Synthetic oligonucleotide
cugagaucucgaaauaggc

SEQ ID NO: 3272623 - RNA, 19 nt, Artificial Sequence
  Description of Artificial Sequence: Synthetic oligonucleotide
uccacauucucuuugguuu

SEQ ID NO: 3272624 - RNA, 19 nt, Artificial Sequence
  Description of Artificial Sequence: Synthetic oligonucleotide
ugggucugcgcgcaaaggg

SEQ ID NO: 3272625 - RNA, 19 nt, Artificial Sequence
  Description of Artificial Sequence: Synthetic oligonucleotide
gaugacacagcgcuccuug

SEQ ID NO: 3272626 - RNA, 19 nt, Artificial Sequence
  Description of Artificial Sequence: Synthetic oligonucleotide
uccacuucucgguagaagu

SEQ ID NO: 3272627 - RNA, 19 nt, Artificial Sequence
  Description of Artificial Sequence: Synthetic oligonucleotide
uuggcugagaucucgaaau

SEQ ID NO: 3272628 - RNA, 19 nt, Artificial Sequence
  Description of Artificial Sequence: Synthetic oligonucleotide
gauuccaaaggcgucuccg

SEQ ID NO: 3272629 - RNA, 19 nt, Artificial Sequence
  Description of Artificial Sequence: Synthetic oligonucleotide
uguucuucuuggcugagau

SEQ ID NO: 3272630 - RNA, 19 nt, Artificial Sequence
  Description of Artificial Sequence: Synthetic oligonucleotide
cuaacugaugacacagcgc

SEQ ID NO: 3272631 - RNA, 19 nt, Artificial Sequence
  Description of Artificial Sequence: Synthetic oligonucleotide
aauaggcacaacgcugagg

SEQ ID NO: 3272632 - RNA, 19 nt, Artificial Sequence
  Description of Artificial Sequence: Synthetic oligonucleotide
cauagcaaagagcgcacgg

SEQ ID NO: 3272633 - RNA, 19 nt, Artificial Sequence
  Description of Artificial Sequence: Synthetic oligonucleotide
uuguuaccgcaaaugacca

SEQ ID NO: 3272634 - RNA, 19 nt, Artificial Sequence
  Description of Artificial Sequence: Synthetic oligonucleotide
aacaucugguccaggcugc

SEQ ID NO: 3272635 - RNA, 19 nt, Artificial Sequence
  Description of Artificial Sequence: Synthetic oligonucleotide
ugcagcacgucacaguacu

SEQ ID NO: 3272636 - RNA, 19 nt, Artificial Sequence
  Description of Artificial Sequence: Synthetic oligonucleotide
ugcaagucggggcucaucu

SEQ ID NO: 3272637 - RNA, 19 nt, Artificial Sequence
  Description of Artificial Sequence: Synthetic oligonucleotide
caugaggucgcugugcacg

SEQ ID NO: 3272638 - RNA, 19 nt, Artificial Sequence
  Description of Artificial Sequence: Synthetic oligonucleotide
auuccaaaggcgucuccgg

SEQ ID NO: 3272639 - RNA, 19 nt, Artificial Sequence
  Description of Artificial Sequence: Synthetic oligonucleotide
uuccaaaggcgucuccggg

SEQ ID NO: 3272640 - RNA, 19 nt, Artificial Sequence
  Description of Artificial Sequence: Synthetic oligonucleotide
aagacuuggugucuagaau

SEQ ID NO: 3272641 - RNA, 19 nt, Artificial Sequence
  Description of Artificial Sequence: Synthetic oligonucleotide
ugcacgcugggucugcgcg

SEQ ID NO: 3272642 - RNA, 19 nt, Artificial Sequence
  Description of Artificial Sequence: Synthetic oligonucleotide
auguacaugaggucgcugu

SEQ ID NO: 3272643 - RNA, 19 nt, Artificial Sequence
  Description of Artificial Sequence: Synthetic oligonucleotide
uccaaaggcgucuccgggg

SEQ ID NO: 3272644 - RNA, 19 nt, Artificial Sequence
  Description of Artificial Sequence: Synthetic oligonucleotide
ugugcagcacgucacagua

SEQ ID NO: 3272645 - RNA, 19 nt, Artificial Sequence
  Description of Artificial Sequence: Synthetic oligonucleotide
caagucggggcucaucucg

SEQ ID NO: 3272646 - RNA, 19 nt, Artificial Sequence
  Description of Artificial Sequence: Synthetic oligonucleotide
uaccagcuguucaaucucg

SEQ ID NO: 3272647 - RNA, 19 nt, Artificial Sequence
  Description of Artificial Sequence: Synthetic oligonucleotide
ugaggcaagacuugguguc

SEQ ID NO: 3272648 - RNA, 19 nt, Artificial Sequence
  Description of Artificial Sequence: Synthetic oligonucleotide
cuugaggcaagacuuggug

SEQ ID NO: 3272649 - RNA, 19 nt, Artificial Sequence
  Description of Artificial Sequence: Synthetic oligonucleotide
cacuuugcggugcaagucg

SEQ ID NO: 3272650 - RNA, 19 nt, Artificial Sequence
  Description of Artificial Sequence: Synthetic oligonucleotide
ucgguagaagucccggucc

SEQ ID NO: 3272651 - RNA, 19 nt, Artificial Sequence
  Description of Artificial Sequence: Synthetic oligonucleotide
gagcgcacggaacaucugg

SEQ ID NO: 3272652 - RNA, 19 nt, Artificial Sequence
  Description of Artificial Sequence: Synthetic oligonucleotide
aaauaggcacaacgcugag

SEQ ID NO: 3272653 - RNA, 19 nt, Artificial Sequence
  Description of Artificial Sequence: Synthetic oligonucleotide
gaaauaggcacaacgcuga

SEQ ID NO: 3272654 - RNA, 19 nt, Artificial Sequence
  Description of Artificial Sequence: Synthetic oligonucleotide
uacaugaggucgcugugca

SEQ ID NO: 3272655 - RNA, 19 nt, Artificial Sequence
  Description of Artificial Sequence: Synthetic oligonucleotide
uguacaugaggucgcugug

SEQ ID NO: 3272656 - RNA, 19 nt, Artificial Sequence
  Description of Artificial Sequence: Synthetic oligonucleotide
cuuggccauagcaaagagc

SEQ ID NO: 3272657 - RNA, 19 nt, Artificial Sequence
  Description of Artificial Sequence: Synthetic oligonucleotide
uucuugaggcaagacuugg

SEQ ID NO: 3272658 - RNA, 19 nt, Artificial Sequence
  Description of Artificial Sequence: Synthetic oligonucleotide
uuugcggugcaagucgggg

SEQ ID NO: 3272659 - RNA, 19 nt, Artificial Sequence
  Description of Artificial Sequence: Synthetic oligonucleotide
gucacaguacugcacagac

SEQ ID NO: 3272660 - RNA, 19 nt, Artificial Sequence
  Description of Artificial Sequence: Synthetic oligonucleotide
agcuguucaaucucgcgcu

SEQ ID NO: 3272661 - RNA, 19 nt, Artificial Sequence
  Description of Artificial Sequence: Synthetic oligonucleotide
uuaccgcaaaugaccagag

SEQ ID NO: 3272662 - RNA, 19 nt, Artificial Sequence
  Description of Artificial Sequence: Synthetic oligonucleotide
uuuugugcagcacgucaca

SEQ ID NO: 3272663 - RNA, 19 nt, Artificial Sequence
  Description of Artificial Sequence: Synthetic oligonucleotide
gacacuggucuuuucacga

SEQ ID NO: 3272664 - RNA, 19 nt, Artificial Sequence
  Description of Artificial Sequence: Synthetic oligonucleotide
aaagagcgcacggaacauc

SEQ ID NO: 3272665 - RNA, 19 nt, Artificial Sequence
  Description of Artificial Sequence: Synthetic oligonucleotide
uugaggcaagacuuggugu

SEQ ID NO: 3272666 - RNA, 19 nt, Artificial Sequence
  Description of Artificial Sequence: Synthetic oligonucleotide
ugacugccgacacuggucu

SEQ ID NO: 3272667 - RNA, 19 nt, Artificial Sequence
  Description of Artificial Sequence: Synthetic oligonucleotide
cuagaaucugcuguuugag

SEQ ID NO: 3272668 - RNA, 19 nt, Artificial Sequence
  Description of Artificial Sequence: Synthetic oligonucleotide
cuccuaacugaugacacag

SEQ ID NO: 3272669 - RNA, 19 nt, Artificial Sequence
  Description of Artificial Sequence: Synthetic oligonucleotide
ggcgccaagauuccaaagg

SEQ ID NO: 3272670 - RNA, 19 nt, Artificial Sequence
  Description of Artificial Sequence: Synthetic oligonucleotide
ucuuugguuuuguucuuga

SEQ ID NO: 3272671 - RNA, 19 nt, Artificial Sequence
  Description of Artificial Sequence: Synthetic oligonucleotide
cagcuguucaaucucgcgc

SEQ ID NO: 3272672 - RNA, 19 nt, Artificial Sequence
  Description of Artificial Sequence: Synthetic oligonucleotide
augaggucgcugugcacgc

SEQ ID NO: 3272673 - RNA, 19 nt, Artificial Sequence
  Description of Artificial Sequence: Synthetic oligonucleotide
aagauuccaaaggcgucuc

SEQ ID NO: 3272674 - RNA, 19 nt, Artificial Sequence
  Description of Artificial Sequence: Synthetic oligonucleotide
acgcagaagcuucuuguuc

SEQ ID NO: 3272675 - RNA, 19 nt, Artificial Sequence
  Description of Artificial Sequence: Synthetic oligonucleotide
aggcacaacgcugaggguc

SEQ ID NO: 3272676 - RNA, 19 nt, Artificial Sequence
  Description of Artificial Sequence: Synthetic oligonucleotide
ccuaacugaugacacagcg

SEQ ID NO: 3272677 - RNA, 19 nt, Artificial Sequence
  Description of Artificial Sequence: Synthetic oligonucleotide
uguucaaucucgcgcugcu

SEQ ID NO: 3272678 - RNA, 19 nt, Artificial Sequence
  Description of Artificial Sequence: Synthetic oligonucleotide
ucggggcucaucucgcucg

SEQ ID NO: 3272679 - RNA, 19 nt, Artificial Sequence
  Description of Artificial Sequence: Synthetic oligonucleotide
agauuccaaaggcgucucc

SEQ ID NO: 3272680 - RNA, 19 nt, Artificial Sequence
  Description of Artificial Sequence: Synthetic oligonucleotide
ucuuuggccugacugccga

SEQ ID NO: 3272681 - RNA, 19 nt, Artificial Sequence
  Description of Artificial Sequence: Synthetic oligonucleotide
ggucuuuucacgaauguac

SEQ ID NO: 3272682 - RNA, 19 nt, Artificial Sequence
  Description of Artificial Sequence: Synthetic oligonucleotide
uucucgguagaagucccgg

SEQ ID NO: 3272683 - RNA, 19 nt, Artificial Sequence
  Description of Artificial Sequence: Synthetic oligonucleotide
uagcaaagagcgcacggaa

SEQ ID NO: 3272684 - RNA, 19 nt, Artificial Sequence
  Description of Artificial Sequence: Synthetic oligonucleotide
ucuuuucacgaauguacau

SEQ ID NO: 3272685 - RNA, 19 nt, Artificial Sequence
  Description of Artificial Sequence: Synthetic oligonucleotide
cuuugguuuuguucuugag

SEQ ID NO: 3272686 - RNA, 19 nt, Artificial Sequence
  Description of Artificial Sequence: Synthetic oligonucleotide
agguccucagguugugugg

SEQ ID NO: 3272687 - RNA, 19 nt, Artificial Sequence
  Description of Artificial Sequence: Synthetic oligonucleotide
cugcacagacacuuugcgg

SEQ ID NO: 3272688 - RNA, 19 nt, Artificial Sequence
  Description of Artificial Sequence: Synthetic oligonucleotide
ugucuuuggccugacugcc

SEQ ID NO: 3272689 - RNA, 19 nt, Artificial Sequence
  Description of Artificial Sequence: Synthetic oligonucleotide
cugcuguucuucuuggcug

SEQ ID NO: 3272690 - RNA, 19 nt, Artificial Sequence
  Description of Artificial Sequence: Synthetic oligonucleotide
uuugugcagcacgucacag

SEQ ID NO: 3272691 - RNA, 19 nt, Artificial Sequence
  Description of Artificial Sequence: Synthetic oligonucleotide
acuucucgguagaaguccc

SEQ ID NO: 3272692 - RNA, 19 nt, Artificial Sequence
  Description of Artificial Sequence: Synthetic oligonucleotide
acaacgcugagggucgucg

SEQ ID NO: 3272693 - RNA, 19 nt, Artificial Sequence
  Description of Artificial Sequence: Synthetic oligonucleotide
uguuaccgcaaaugaccag

SEQ ID NO: 3272694 - RNA, 19 nt, Artificial Sequence
  Description of Artificial Sequence: Synthetic oligonucleotide
ugcggugcaagucggggcu

SEQ ID NO: 3272695 - RNA, 19 nt, Artificial Sequence
  Description of Artificial Sequence: Synthetic oligonucleotide
uccuaacugaugacacagc

SEQ ID NO: 3272696 - RNA, 19 nt, Artificial Sequence
  Description of Artificial Sequence: Synthetic oligonucleotide
ucuaaaugcagcaacaugu

SEQ ID NO: 3272697 - RNA, 19 nt, Artificial Sequence
  Description of Artificial Sequence: Synthetic oligonucleotide
ugacucacuauccacauag

SEQ ID NO: 3272698 - RNA, 19 nt, Artificial Sequence
  Description of Artificial Sequence: Synthetic oligonucleotide
ucugcaaacccucuggagg

SEQ ID NO: 3272699 - RNA, 19 nt, Artificial Sequence
  Description of Artificial Sequence: Synthetic oligonucleotide
augggugcauucuaaaugc

SEQ ID NO: 3272700 - RNA, 19 nt, Artificial Sequence
  Description of Artificial Sequence: Synthetic oligonucleotide
ucuggaucaacuccgaagc

SEQ ID NO: 3272701 - RNA, 19 nt, Artificial Sequence
  Description of Artificial Sequence: Synthetic oligonucleotide
aagggcucgaaccagugac

SEQ ID NO: 3272702 - RNA, 19 nt, Artificial Sequence
  Description of Artificial Sequence: Synthetic oligonucleotide
aucgaucccaguuacagac

SEQ ID NO: 3272703 - RNA, 19 nt, Artificial Sequence
  Description of Artificial Sequence: Synthetic oligonucleotide
caguucaucuuccagaugg

SEQ ID NO: 3272704 - RNA, 19 nt, Artificial Sequence
  Description of Artificial Sequence: Synthetic oligonucleotide
aaaauguccucgcucauca

SEQ ID NO: 3272705 - RNA, 19 nt, Artificial Sequence
  Description of Artificial Sequence: Synthetic oligonucleotide
uccacuuucaucauugagu

SEQ ID NO: 3272706 - RNA, 19 nt, Artificial Sequence
  Description of Artificial Sequence: Synthetic oligonucleotide
aacugugaaaaggaauccc

SEQ ID NO: 3272707 - RNA, 19 nt, Artificial Sequence
  Description of Artificial Sequence: Synthetic oligonucleotide
uuucaguauccugauaucg

SEQ ID NO: 3272708 - RNA, 19 nt, Artificial Sequence
  Description of Artificial Sequence: Synthetic oligonucleotide
auucagguaaacuagccca

SEQ ID NO: 3272709 - RNA, 19 nt, Artificial Sequence
  Description of Artificial Sequence: Synthetic oligonucleotide
ucuaaaggaauuguggucu

SEQ ID NO: 3272710 - RNA, 19 nt, Artificial Sequence
  Description of Artificial Sequence: Synthetic oligonucleotide
uauucagguaaacuagccc

SEQ ID NO: 3272711 - RNA, 19 nt, Artificial Sequence
  Description of Artificial Sequence: Synthetic oligonucleotide
aguucuaaaggaauugugg

SEQ ID NO: 3272712 - RNA, 19 nt, Artificial Sequence
  Description of Artificial Sequence: Synthetic oligonucleotide
acuuucaucauugaguucu

SEQ ID NO: 3272713 - RNA, 19 nt, Artificial Sequence
  Description of Artificial Sequence: Synthetic oligonucleotide
ucucuccagucauagaugg

SEQ ID NO: 3272714 - RNA, 19 nt, Artificial Sequence
  Description of Artificial Sequence: Synthetic oligonucleotide
uccgaagcaacguuaagcc

SEQ ID NO: 3272715 - RNA, 19 nt, Artificial Sequence
  Description of Artificial Sequence: Synthetic oligonucleotide
uuggacaugaaguuucacc

SEQ ID NO: 3272716 - RNA, 19 nt, Artificial Sequence
  Description of Artificial Sequence: Synthetic oligonucleotide
aaaaggaauccccugcaga

SEQ ID NO: 3272717 - RNA, 19 nt, Artificial Sequence
  Description of Artificial Sequence: Synthetic oligonucleotide
cuaucuuucuucuagaaaa

SEQ ID NO: 3272718 - RNA, 19 nt, Artificial Sequence
  Description of Artificial Sequence: Synthetic oligonucleotide
uauucagaugccaucaaaa

SEQ ID NO: 3272719 - RNA, 19 nt, Artificial Sequence
  Description of Artificial Sequence: Synthetic oligonucleotide
ugcuauaagcauaaauaac

SEQ ID NO: 3272720 - RNA, 19 nt, Artificial Sequence
  Description of Artificial Sequence: Synthetic oligonucleotide
ucuuaagcugucuuugccc

SEQ ID NO: 3272721 - RNA, 19 nt, Artificial Sequence
  Description of Artificial Sequence: Synthetic oligonucleotide
uucuaaaugcagcaacaug

SEQ ID NO: 3272722 - RNA, 19 nt, Artificial Sequence
  Description of Artificial Sequence: Synthetic oligonucleotide
uauaagcauaaauaacagu

SEQ ID NO: 3272723 - RNA, 19 nt, Artificial Sequence
  Description of Artificial Sequence: Synthetic oligonucleotide
cagacuaucuuucuucuag

SEQ ID NO: 3272724 - RNA, 19 nt, Artificial Sequence
  Description of Artificial Sequence: Synthetic oligonucleotide
cuuaagcugucuuugcccc

SEQ ID NO: 3272725 - RNA, 19 nt, Artificial Sequence
  Description of Artificial Sequence: Synthetic oligonucleotide
aaguuucaccaucccauuc

SEQ ID NO: 3272726 - RNA, 19 nt, Artificial Sequence
  Description of Artificial Sequence: Synthetic oligonucleotide
agcauaaauaacaguauag

SEQ ID NO: 3272727 - RNA, 19 nt, Artificial Sequence
  Description of Artificial Sequence: Synthetic oligonucleotide
uuacagacuaucuuucuuc

SEQ ID NO: 3272728 - RNA, 19 nt, Artificial Sequence
  Description of Artificial Sequence: Synthetic oligonucleotide
cuuucugcaaacccucugg

SEQ ID NO: 3272729 - RNA, 19 nt, Artificial Sequence
  Description of Artificial Sequence: Synthetic oligonucleotide
uucaguauccugauaucga

SEQ ID NO: 3272730 - RNA, 19 nt, Artificial Sequence
  Description of Artificial Sequence: Synthetic oligonucleotide
aguauagguuagcaugggg

SEQ ID NO: 3272731 - RNA, 19 nt, Artificial Sequence
  Description of Artificial Sequence: Synthetic oligonucleotide
ugaaaaggaauccccugca

SEQ ID NO: 3272732 - RNA, 19 nt, Artificial Sequence
  Description of Artificial Sequence: Synthetic oligonucleotide
aaaucggaacugugaaaag

SEQ ID NO: 3272733 - RNA, 19 nt, Artificial Sequence
  Description of Artificial Sequence: Synthetic oligonucleotide
ugugaaaaggaauccccug

SEQ ID NO: 3272734 - RNA, 19 nt, Artificial Sequence
  Description of Artificial Sequence: Synthetic oligonucleotide
cagcucuuugccaucaucg

SEQ ID NO: 3272735 - RNA, 19 nt, Artificial Sequence
  Description of Artificial Sequence: Synthetic oligonucleotide
auaucgaucccaguuacag

SEQ ID NO: 3272736 - RNA, 19 nt, Artificial Sequence
  Description of Artificial Sequence: Synthetic oligonucleotide
uuucaccugaggaaguucu

SEQ ID NO: 3272737 - RNA, 19 nt, Artificial Sequence
  Description of Artificial Sequence: Synthetic oligonucleotide
acucacuauccacauagag

SEQ ID NO: 3272738 - RNA, 19 nt, Artificial Sequence
  Description of Artificial Sequence: Synthetic oligonucleotide
uuacuuagaaggcaaccaa

SEQ ID NO: 3272739 - RNA, 19 nt, Artificial Sequence
  Description of Artificial Sequence: Synthetic oligonucleotide
gaaccagugacucacuauc

SEQ ID NO: 3272740 - RNA, 19 nt, Artificial Sequence
  Description of Artificial Sequence: Synthetic oligonucleotide
agggcuuugucuuaagcug

SEQ ID NO: 3272741 - RNA, 19 nt, Artificial Sequence
  Description of Artificial Sequence: Synthetic oligonucleotide
caugggugcauucuaaaug

SEQ ID NO: 3272742 - RNA, 19 nt, Artificial Sequence
  Description of Artificial Sequence: Synthetic oligonucleotide
aauucugcuuuggacauga

SEQ ID NO: 3272743 - RNA, 19 nt, Artificial Sequence
  Description of Artificial Sequence: Synthetic oligonucleotide
gcauaaauaacaguauagg

SEQ ID NO: 3272744 - RNA, 19 nt, Artificial Sequence
  Description of Artificial Sequence: Synthetic oligonucleotide
ugauaucgaucccaguuac

SEQ ID NO: 3272745 - RNA, 19 nt, Artificial Sequence
  Description of Artificial Sequence: Synthetic oligonucleotide
cugaauucugcuuuggaca

SEQ ID NO: 3272746 - RNA, 19 nt, Artificial Sequence
  Description of Artificial Sequence: Synthetic oligonucleotide
acaguauagguuagcaugg

SEQ ID NO: 3272747 - RNA, 19 nt, Artificial Sequence
  Description of Artificial Sequence: Synthetic oligonucleotide
aguuucaccaucccauucu

SEQ ID NO: 3272748 - RNA, 19 nt, Artificial Sequence
  Description of Artificial Sequence: Synthetic oligonucleotide
uucuaaaggaauugugguc

SEQ ID NO: 3272749 - RNA, 19 nt, Artificial Sequence
  Description of Artificial Sequence: Synthetic oligonucleotide
gugaaaaggaauccccugc

SEQ ID NO: 3272750 - RNA, 19 nt, Artificial Sequence
  Description of Artificial Sequence: Synthetic oligonucleotide
gcuauaagcauaaauaaca

SEQ ID NO: 3272751 - RNA, 19 nt, Artificial Sequence
  Description of Artificial Sequence: Synthetic oligonucleotide
aaccagugacucacuaucc

SEQ ID NO: 3272752 - RNA, 19 nt, Artificial Sequence
  Description of Artificial Sequence: Synthetic oligonucleotide
uauagguuagcauggggua

SEQ ID NO: 3272753 - RNA, 19 nt, Artificial Sequence
  Description of Artificial Sequence: Synthetic oligonucleotide
gaaaaggaauccccugcag

SEQ ID NO: 3272754 - RNA, 19 nt, Artificial Sequence
  Description of Artificial Sequence: Synthetic oligonucleotide
uuuucaggaacuguuuccu

SEQ ID NO: 3272755 - RNA, 19 nt, Artificial Sequence
  Description of Artificial Sequence: Synthetic oligonucleotide
ugucuguucagguuccaca

SEQ ID NO: 3272756 - RNA, 19 nt, Artificial Sequence
  Description of Artificial Sequence: Synthetic oligonucleotide
aacguuaagccggacugag

SEQ ID NO: 3272757 - RNA, 19 nt, Artificial Sequence
  Description of Artificial Sequence: Synthetic oligonucleotide
ucuccagucauagauggcu

SEQ ID NO: 3272758 - RNA, 19 nt, Artificial Sequence
  Description of Artificial Sequence: Synthetic oligonucleotide
auaacaguauagguuagca

SEQ ID NO: 3272759 - RNA, 19 nt, Artificial Sequence
  Description of Artificial Sequence: Synthetic oligonucleotide
uugucuuaagcugucuuug

SEQ ID NO: 3272760 - RNA, 19 nt, Artificial Sequence
  Description of Artificial Sequence: Synthetic oligonucleotide
uucuccucggcaaaucgga

SEQ ID NO: 3272761 - RNA, 19 nt, Artificial Sequence
  Description of Artificial Sequence: Synthetic oligonucleotide
accaucccauucuuucucc

SEQ ID NO: 3272762 - RNA, 19 nt, Artificial Sequence
  Description of Artificial Sequence: Synthetic oligonucleotide
cauagauggcuuuucagga

SEQ ID NO: 3272763 - RNA, 19 nt, Artificial Sequence
  Description of Artificial Sequence: Synthetic oligonucleotide
uugauccccuccucgaucc

SEQ ID NO: 3272764 - RNA, 19 nt, Artificial Sequence
  Description of Artificial Sequence: Synthetic oligonucleotide
aauguccucgcucaucauu

SEQ ID NO: 3272765 - RNA, 19 nt, Artificial Sequence
  Description of Artificial Sequence: Synthetic oligonucleotide
agcagcagaucugagcucg

SEQ ID NO: 3272766 - RNA, 19 nt, Artificial Sequence
  Description of Artificial Sequence: Synthetic oligonucleotide
gacaugaaguuucaccauc

SEQ ID NO: 3272767 - RNA, 19 nt, Artificial Sequence
  Description of Artificial Sequence: Synthetic oligonucleotide
uccucggcaaaucggaacu

SEQ ID NO: 3272768 - RNA, 19 nt, Artificial Sequence
  Description of Artificial Sequence: Synthetic oligonucleotide
aaaggaauuguggucugga

SEQ ID NO: 3272769 - RNA, 19 nt, Artificial Sequence
  Description of Artificial Sequence: Synthetic oligonucleotide
gagacaucuggucugggca

SEQ ID NO: 3272770 - RNA, 19 nt, Artificial Sequence
  Description of Artificial Sequence: Synthetic oligonucleotide
ugugcuugucuguucaggu

SEQ ID NO: 3272771 - RNA, 19 nt, Artificial Sequence
  Description of Artificial Sequence: Synthetic oligonucleotide
aacuagcccauccuuacuu

SEQ ID NO: 3272772 - RNA, 19 nt, Artificial Sequence
  Description of Artificial Sequence: Synthetic oligonucleotide
uucucuccagucauagaug

SEQ ID NO: 3272773 - RNA, 19 nt, Artificial Sequence
  Description of Artificial Sequence: Synthetic oligonucleotide
cauaaauaacaguauaggu

SEQ ID NO: 3272774 - RNA, 19 nt, Artificial Sequence
  Description of Artificial Sequence: Synthetic oligonucleotide
uacagacuaucuuucuucu

SEQ ID NO: 3272775 - RNA, 19 nt, Artificial Sequence
  Description of Artificial Sequence: Synthetic oligonucleotide
uuugucuuaagcugucuuu

SEQ ID NO: 3272776 - RNA, 19 nt, Artificial Sequence
  Description of Artificial Sequence: Synthetic oligonucleotide
aucucugucuggcuccugg

SEQ ID NO: 3272777 - RNA, 19 nt, Artificial Sequence
  Description of Artificial Sequence: Synthetic oligonucleotide
uauccugauaucgauccca

SEQ ID NO: 3272778 - RNA, 19 nt, Artificial Sequence
  Description of Artificial Sequence: Synthetic oligonucleotide
aagccggacugagaggggc

SEQ ID NO: 3272779 - RNA, 19 nt, Artificial Sequence
  Description of Artificial Sequence: Synthetic oligonucleotide
ugucuuaagcugucuuugc

SEQ ID NO: 3272780 - RNA, 19 nt, Artificial Sequence
  Description of Artificial Sequence: Synthetic oligonucleotide
ucaguauccugauaucgau

SEQ ID NO: 3272781 - RNA, 19 nt, Artificial Sequence
  Description of Artificial Sequence: Synthetic oligonucleotide
uucaucauugaguucuuuu

SEQ ID NO: 3272782 - RNA, 19 nt, Artificial Sequence
  Description of Artificial Sequence: Synthetic oligonucleotide
uagagugcugaauucugcu

SEQ ID NO: 3272783 - RNA, 19 nt, Artificial Sequence
  Description of Artificial Sequence: Synthetic oligonucleotide
gaacugugaaaaggaaucc

SEQ ID NO: 3272784 - RNA, 19 nt, Artificial Sequence
  Description of Artificial Sequence: Synthetic oligonucleotide
ugugauucuccacuuucau

SEQ ID NO: 3272785 - RNA, 19 nt, Artificial Sequence
  Description of Artificial Sequence: Synthetic oligonucleotide
caggaaaucaugcugucca

SEQ ID NO: 3272786 - RNA, 19 nt, Artificial Sequence
  Description of Artificial Sequence: Synthetic oligonucleotide
uaaaggaauuguggucugg

SEQ ID NO: 3272787 - RNA, 19 nt, Artificial Sequence
  Description of Artificial Sequence: Synthetic oligonucleotide
uccugagacaucuggucug

SEQ ID NO: 3272788 - RNA, 19 nt, Artificial Sequence
  Description of Artificial Sequence: Synthetic oligonucleotide
aguuacagacuaucuuucu

SEQ ID NO: 3272789 - RNA, 19 nt, Artificial Sequence
  Description of Artificial Sequence: Synthetic oligonucleotide
gucuuaagcugucuuugcc

SEQ ID NO: 3272790 - RNA, 19 nt, Artificial Sequence
  Description of Artificial Sequence: Synthetic oligonucleotide
gcaacguuaagccggacug

SEQ ID NO: 3272791 - RNA, 19 nt, Artificial Sequence
  Description of Artificial Sequence: Synthetic oligonucleotide
aacagaagguaggcauugg

SEQ ID NO: 3272792 - RNA, 19 nt, Artificial Sequence
  Description of Artificial Sequence: Synthetic oligonucleotide
uuaacugcaugcccagcuc

SEQ ID NO: 3272793 - RNA, 19 nt, Artificial Sequence
  Description of Artificial Sequence: Synthetic oligonucleotide
uaacaguauagguuagcau

SEQ ID NO: 3272794 - RNA, 19 nt, Artificial Sequence
  Description of Artificial Sequence: Synthetic oligonucleotide
ggaacugugaaaaggaauc

SEQ ID NO: 3272795 - RNA, 19 nt, Artificial Sequence
  Description of Artificial Sequence: Synthetic oligonucleotide
aaacuagcccauccuuacu

SEQ ID NO: 3272796 - RNA, 19 nt, Artificial Sequence
  Description of Artificial Sequence: Synthetic oligonucleotide
caaaguacaaauaagacug

SEQ ID NO: 3272797 - RNA, 19 nt, Artificial Sequence
  Description of Artificial Sequence: Synthetic oligonucleotide
aacgaaaucucucuugacc

SEQ ID NO: 3272798 - RNA, 19 nt, Artificial Sequence
  Description of Artificial Sequence: Synthetic oligonucleotide
aaagacaacaugcuccugc

SEQ ID NO: 3272799 - RNA, 19 nt, Artificial Sequence
  Description of Artificial Sequence: Synthetic oligonucleotide
uuaucaauaaguaccacag

SEQ ID NO: 3272800 - RNA, 19 nt, Artificial Sequence
  Description of Artificial Sequence: Synthetic oligonucleotide
aaagaacagccccacaugc

SEQ ID NO: 3272801 - RNA, 19 nt, Artificial Sequence
  Description of Artificial Sequence: Synthetic oligonucleotide
acagugaugaccuuauugc

SEQ ID NO: 3272802 - RNA, 19 nt, Artificial Sequence
  Description of Artificial Sequence: Synthetic oligonucleotide
aagccuaaagaacagcccc

SEQ ID NO: 3272803 - RNA, 19 nt, Artificial Sequence
  Description of Artificial Sequence: Synthetic oligonucleotide
agaacuuuaccuuuucacc

SEQ ID NO: 3272804 - RNA, 19 nt, Artificial Sequence
  Description of Artificial Sequence: Synthetic oligonucleotide
auaaguaccacagagacag

SEQ ID NO: 3272805 - RNA, 19 nt, Artificial Sequence
  Description of Artificial Sequence: Synthetic oligonucleotide
aacuuugggugauugaacg

SEQ ID NO: 3272806 - RNA, 19 nt, Artificial Sequence
  Description of Artificial Sequence: Synthetic oligonucleotide
aucaauaaguaccacagag

SEQ ID NO: 3272807 - RNA, 19 nt, Artificial Sequence
  Description of Artificial Sequence: Synthetic oligonucleotide
ucauagguaaggaucaagg

SEQ ID NO: 3272808 - RNA, 19 nt, Artificial Sequence
  Description of Artificial Sequence: Synthetic oligonucleotide
acaaaagacaacaugcucc

SEQ ID NO: 3272809 - RNA, 19 nt, Artificial Sequence
  Description of Artificial Sequence: Synthetic oligonucleotide
aaguaauuaacacuuuuca

SEQ ID NO: 3272810 - RNA, 19 nt, Artificial Sequence
  Description of Artificial Sequence: Synthetic oligonucleotide
aacaaaagacaacaugcuc

SEQ ID NO: 3272811 - RNA, 19 nt, Artificial Sequence
  Description of Artificial Sequence: Synthetic oligonucleotide
agacaagaaaaccaugggc

SEQ ID NO: 3272812 - RNA, 19 nt, Artificial Sequence
  Description of Artificial Sequence: Synthetic oligonucleotide
auuccuacaguacacaauc

SEQ ID NO: 3272813 - RNA, 19 nt, Artificial Sequence
  Description of Artificial Sequence: Synthetic oligonucleotide
aacaaaguacaaauaagac

SEQ ID NO: 3272814 - RNA, 19 nt, Artificial Sequence
  Description of Artificial Sequence: Synthetic oligonucleotide
acgaaaucucucuugaccc

SEQ ID NO: 3272815 - RNA, 19 nt, Artificial Sequence
  Description of Artificial Sequence: Synthetic oligonucleotide
aacacuuuucaaaaucucc

SEQ ID NO: 3272816 - RNA, 19 nt, Artificial Sequence
  Description of Artificial Sequence: Synthetic oligonucleotide
auuaaucuccacuugagug

SEQ ID NO: 3272817 - RNA, 19 nt, Artificial Sequence
  Description of Artificial Sequence: Synthetic oligonucleotide
uucaaaaucuccauggggu

SEQ ID NO: 3272818 - RNA, 19 nt, Artificial Sequence
  Description of Artificial Sequence: Synthetic oligonucleotide
uuucaaaaucuccaugggg

SEQ ID NO: 3272819 - RNA, 19 nt, Artificial Sequence
  Description of Artificial Sequence: Synthetic oligonucleotide
uuaagccuaaagaacagcc

SEQ ID NO: 3272820 - RNA, 19 nt, Artificial Sequence
  Description of Artificial Sequence: Synthetic oligonucleotide
aggaucaaggcauuggcgc

SEQ ID NO: 3272821 - RNA, 19 nt, Artificial Sequence
  Description of Artificial Sequence: Synthetic oligonucleotide
uggacaaaaguaauuaaca

SEQ ID NO: 3272822 - RNA, 19 nt, Artificial Sequence
  Description of Artificial Sequence: Synthetic oligonucleotide
uuuguuguggacaaaagua

SEQ ID NO: 3272823 - RNA, 19 nt, Artificial Sequence
  Description of Artificial Sequence: Synthetic oligonucleotide
auaagacugaugcuuuucc

SEQ ID NO: 3272824 - RNA, 19 nt, Artificial Sequence
  Description of Artificial Sequence: Synthetic oligonucleotide
acaaaguacaaauaagacu

SEQ ID NO: 3272825 - RNA, 19 nt, Artificial Sequence
  Description of Artificial Sequence: Synthetic oligonucleotide
auugcuagcauacuguucu

SEQ ID NO: 3272826 - RNA, 19 nt, Artificial Sequence
  Description of Artificial Sequence: Synthetic oligonucleotide
ugcagaucaacaaaguaca

SEQ ID NO: 3272827 - RNA, 19 nt, Artificial Sequence
  Description of Artificial Sequence: Synthetic oligonucleotide
uguucuaucucucgcaacc

SEQ ID NO: 3272828 - RNA, 19 nt, Artificial Sequence
  Description of Artificial Sequence: Synthetic oligonucleotide
uuaacacuuuucaaaaucu

SEQ ID NO: 3272829 - RNA, 19 nt, Artificial Sequence
  Description of Artificial Sequence: Synthetic oligonucleotide
cacauuaucagauuccuug

SEQ ID NO: 3272830 - RNA, 19 nt, Artificial Sequence
  Description of Artificial Sequence: Synthetic oligonucleotide
aaggauuccucacagguga

SEQ ID NO: 3272831 - RNA, 19 nt, Artificial Sequence
  Description of Artificial Sequence: Synthetic oligonucleotide
uuuucaccuauuaaucucc

SEQ ID NO: 3272832 - RNA, 19 nt, Artificial Sequence
  Description of Artificial Sequence: Synthetic oligonucleotide
agaucaacaaaguacaaau

SEQ ID NO: 3272833 - RNA, 19 nt, Artificial Sequence
  Description of Artificial Sequence: Synthetic oligonucleotide
caauaaguaccacagagac

SEQ ID NO: 3272834 - RNA, 19 nt, Artificial Sequence
  Description of Artificial Sequence: Synthetic oligonucleotide
uagacaagaaaaccauggg

SEQ ID NO: 3272835 - RNA, 19 nt, Artificial Sequence
  Description of Artificial Sequence: Synthetic oligonucleotide
guagacaagaaaaccaugg

SEQ ID NO: 3272836 - RNA, 19 nt, Artificial Sequence
  Description of Artificial Sequence: Synthetic oligonucleotide
aacagccccacaugcaccc

SEQ ID NO: 3272837 - RNA, 19 nt, Artificial Sequence
  Description of Artificial Sequence: Synthetic oligonucleotide
auagguaaggaucaaggca

SEQ ID NO: 3272838 - RNA, 19 nt, Artificial Sequence
  Description of Artificial Sequence: Synthetic oligonucleotide
uuaaucuccacuugaguga

SEQ ID NO: 3272839 - RNA, 19 nt, Artificial Sequence
  Description of Artificial Sequence: Synthetic oligonucleotide
aguuucuccacauuaucag

SEQ ID NO: 3272840 - RNA, 19 nt, Artificial Sequence
  Description of Artificial Sequence: Synthetic oligonucleotide
ucaccuauuaaucuccacu

SEQ ID NO: 3272841 - RNA, 19 nt, Artificial Sequence
  Description of Artificial Sequence: Synthetic oligonucleotide
uguucuaccaguguguucu

SEQ ID NO: 3272842 - RNA, 19 nt, Artificial Sequence
  Description of Artificial Sequence: Synthetic oligonucleotide
acaagaaaaccaugggcac

SEQ ID NO: 3272843 - RNA, 19 nt, Artificial Sequence
  Description of Artificial Sequence: Synthetic oligonucleotide
uccaguuuugguuuuaccu

SEQ ID NO: 3272844 - RNA, 19 nt, Artificial Sequence
  Description of Artificial Sequence: Synthetic oligonucleotide
uaccacuuaagccuaaaga

SEQ ID NO: 3272845 - RNA, 19 nt, Artificial Sequence
  Description of Artificial Sequence: Synthetic oligonucleotide
uggaagaguacauuguucu

SEQ ID NO: 3272846 - RNA, 19 nt, Artificial Sequence
  Description of Artificial Sequence: Synthetic oligonucleotide
uaaggaucaaggcauuggc

SEQ ID NO: 3272847 - RNA, 19 nt, Artificial Sequence
  Description of Artificial Sequence: Synthetic oligonucleotide
uagaacuuuaccuuuucac

SEQ ID NO: 3272848 - RNA, 19 nt, Artificial Sequence
  Description of Artificial Sequence: Synthetic oligonucleotide
auacuguucuaucucucgc

SEQ ID NO: 3272849 - RNA, 19 nt, Artificial Sequence
  Description of Artificial Sequence: Synthetic oligonucleotide
accacuuaagccuaaagaa

SEQ ID NO: 3272850 - RNA, 19 nt, Artificial Sequence
  Description of Artificial Sequence: Synthetic oligonucleotide
acauuaucagauuccuugg

SEQ ID NO: 3272851 - RNA, 19 nt, Artificial Sequence
  Description of Artificial Sequence: Synthetic oligonucleotide
cugcagaucaacaaaguac

SEQ ID NO: 3272852 - RNA, 19 nt, Artificial Sequence
  Description of Artificial Sequence: Synthetic oligonucleotide
agaacagccccacaugcac

SEQ ID NO: 3272853 - RNA, 19 nt, Artificial Sequence
  Description of Artificial Sequence: Synthetic oligonucleotide
guaauacauguccugagcc

SEQ ID NO: 3272854 - RNA, 19 nt, Artificial Sequence
  Description of Artificial Sequence: Synthetic oligonucleotide
gacaagaaaaccaugggca

SEQ ID NO: 3272855 - RNA, 19 nt, Artificial Sequence
  Description of Artificial Sequence: Synthetic oligonucleotide
ugucuugcuucacugauga

SEQ ID NO: 3272856 - RNA, 19 nt, Artificial Sequence
  Description of Artificial Sequence: Synthetic oligonucleotide
uuaucagauuccuuggcug

SEQ ID NO: 3272857 - RNA, 19 nt, Artificial Sequence
  Description of Artificial Sequence: Synthetic oligonucleotide
ucaggaaggcaacggaagg

SEQ ID NO: 3272858 - RNA, 19 nt, Artificial Sequence
  Description of Artificial Sequence: Synthetic oligonucleotide
gaaucgucggacuaggcac

SEQ ID NO: 3272859 - RNA, 19 nt, Artificial Sequence
  Description of Artificial Sequence: Synthetic oligonucleotide
uuuucagccaggucaaucu

SEQ ID NO: 3272860 - RNA, 19 nt, Artificial Sequence
  Description of Artificial Sequence: Synthetic oligonucleotide
cuuguagacaagaaaacca

SEQ ID NO: 3272861 - RNA, 19 nt, Artificial Sequence
  Description of Artificial Sequence: Synthetic oligonucleotide
uaaagaacagccccacaug

SEQ ID NO: 3272862 - RNA, 19 nt, Artificial Sequence
  Description of Artificial Sequence: Synthetic oligonucleotide
uccuacaguacacaauccc

SEQ ID NO: 3272863 - RNA, 19 nt, Artificial Sequence
  Description of Artificial Sequence: Synthetic oligonucleotide
cacagagacaguauuggcc

SEQ ID NO: 3272864 - RNA, 19 nt, Artificial Sequence
  Description of Artificial Sequence: Synthetic oligonucleotide
ugaaucgucggacuaggca

SEQ ID NO: 3272865 - RNA, 19 nt, Artificial Sequence
  Description of Artificial Sequence: Synthetic oligonucleotide
guuaucaauaaguaccaca

SEQ ID NO: 3272866 - RNA, 19 nt, Artificial Sequence
  Description of Artificial Sequence: Synthetic oligonucleotide
cuauuaaucuccacuugag

SEQ ID NO: 3272867 - RNA, 19 nt, Artificial Sequence
  Description of Artificial Sequence: Synthetic oligonucleotide
cauagguaaggaucaaggc

SEQ ID NO: 3272868 - RNA, 19 nt, Artificial Sequence
  Description of Artificial Sequence: Synthetic oligonucleotide
uauuaaucuccacuugagu

SEQ ID NO: 3272869 - RNA, 19 nt, Artificial Sequence
  Description of Artificial Sequence: Synthetic oligonucleotide
uguagacaagaaaaccaug

SEQ ID NO: 3272870 - RNA, 19 nt, Artificial Sequence
  Description of Artificial Sequence: Synthetic oligonucleotide
agaguuucuccacauuauc

SEQ ID NO: 3272871 - RNA, 19 nt, Artificial Sequence
  Description of Artificial Sequence: Synthetic oligonucleotide
augggcaccagauuaccac

SEQ ID NO: 3272872 - RNA, 19 nt, Artificial Sequence
  Description of Artificial Sequence: Synthetic oligonucleotide
ucuuguugcccacuaacac

SEQ ID NO: 3272873 - RNA, 19 nt, Artificial Sequence
  Description of Artificial Sequence: Synthetic oligonucleotide
acaguauuggccuuuucca

SEQ ID NO: 3272874 - RNA, 19 nt, Artificial Sequence
  Description of Artificial Sequence: Synthetic oligonucleotide
gugaugaccuuauugcuag

SEQ ID NO: 3272875 - RNA, 19 nt, Artificial Sequence
  Description of Artificial Sequence: Synthetic oligonucleotide
gggguuaucaauaaguacc

SEQ ID NO: 3272876 - RNA, 19 nt, Artificial Sequence
  Description of Artificial Sequence: Synthetic oligonucleotide
cuugcuucacugaugaguc

SEQ ID NO: 3272877 - RNA, 19 nt, Artificial Sequence
  Description of Artificial Sequence: Synthetic oligonucleotide
uuguagacaagaaaaccau

SEQ ID NO: 3272878 - RNA, 19 nt, Artificial Sequence
  Description of Artificial Sequence: Synthetic oligonucleotide
uagggauuccuacaguaca

SEQ ID NO: 3272879 - RNA, 19 nt, Artificial Sequence
  Description of Artificial Sequence: Synthetic oligonucleotide
uugaacgaaaucucucuug

SEQ ID NO: 3272880 - RNA, 19 nt, Artificial Sequence
  Description of Artificial Sequence: Synthetic oligonucleotide
agaucuagaacuuuaccuu

SEQ ID NO: 3272881 - RNA, 19 nt, Artificial Sequence
  Description of Artificial Sequence: Synthetic oligonucleotide
uuuaccuuuucaccuauua

SEQ ID NO: 3272882 - RNA, 19 nt, Artificial Sequence
  Description of Artificial Sequence: Synthetic oligonucleotide
cuccagguaauacaugucc

SEQ ID NO: 3272883 - RNA, 19 nt, Artificial Sequence
  Description of Artificial Sequence: Synthetic oligonucleotide
acuaacacagugaugaccu

SEQ ID NO: 3272884 - RNA, 19 nt, Artificial Sequence
  Description of Artificial Sequence: Synthetic oligonucleotide
gcgguaauaacuuugggug

SEQ ID NO: 3272885 - RNA, 19 nt, Artificial Sequence
  Description of Artificial Sequence: Synthetic oligonucleotide
uguccugagccucugagaa

SEQ ID NO: 3272886 - RNA, 19 nt, Artificial Sequence
  Description of Artificial Sequence: Synthetic oligonucleotide
cuuuucaccuauuaaucuc

SEQ ID NO: 3272887 - RNA, 19 nt, Artificial Sequence
  Description of Artificial Sequence: Synthetic oligonucleotide
aagaaaaccaugggcacca

SEQ ID NO: 3272888 - RNA, 19 nt, Artificial Sequence
  Description of Artificial Sequence: Synthetic oligonucleotide
ugauugaacgaaaucucuc

SEQ ID NO: 3272889 - RNA, 19 nt, Artificial Sequence
  Description of Artificial Sequence: Synthetic oligonucleotide
aaggcauuggcgcugcggu

SEQ ID NO: 3272890 - RNA, 19 nt, Artificial Sequence
  Description of Artificial Sequence: Synthetic oligonucleotide
gaugucuccagguaauaca

SEQ ID NO: 3272891 - RNA, 19 nt, Artificial Sequence
  Description of Artificial Sequence: Synthetic oligonucleotide
aaaaccaugggcaccagau

SEQ ID NO: 3272892 - RNA, 19 nt, Artificial Sequence
  Description of Artificial Sequence: Synthetic oligonucleotide
uaagucaaggaagaguuuc

SEQ ID NO: 3272893 - RNA, 19 nt, Artificial Sequence
  Description of Artificial Sequence: Synthetic oligonucleotide
aaccaugggcaccagauua

SEQ ID NO: 3272894 - RNA, 19 nt, Artificial Sequence
  Description of Artificial Sequence: Synthetic oligonucleotide
aagacaacaugcuccugca

SEQ ID NO: 3272895 - RNA, 19 nt, Artificial Sequence
  Description of Artificial Sequence: Synthetic oligonucleotide
ugcuucacugaugagucgg

SEQ ID NO: 3272896 - RNA, 19 nt, Artificial Sequence
  Description of Artificial Sequence: Synthetic oligonucleotide
aaugcugacaucuuacacc

SEQ ID NO: 3272897 - RNA, 19 nt, Artificial Sequence
  Description of Artificial Sequence: Synthetic oligonucleotide
uuuacugcagacaugaugc

SEQ ID NO: 3272898 - RNA, 19 nt, Artificial Sequence
  Description of Artificial Sequence: Synthetic oligonucleotide
cuuuguaucacagacaugg

SEQ ID NO: 3272899 - RNA, 19 nt, Artificial Sequence
  Description of Artificial Sequence: Synthetic oligonucleotide
aagacaauucuucuguaac

SEQ ID NO: 3272900 - RNA, 19 nt, Artificial Sequence
  Description of Artificial Sequence: Synthetic oligonucleotide
guuagaaguuccuugaugg

SEQ ID NO: 3272901 - RNA, 19 nt, Artificial Sequence
  Description of Artificial Sequence: Synthetic oligonucleotide
ucuuacaccaugaacuugg

SEQ ID NO: 3272902 - RNA, 19 nt, Artificial Sequence
  Description of Artificial Sequence: Synthetic oligonucleotide
uugaagaguagauagauga

SEQ ID NO: 3272903 - RNA, 19 nt, Artificial Sequence
  Description of Artificial Sequence: Synthetic oligonucleotide
cauuaaaccugucaaaggg

SEQ ID NO: 3272904 - RNA, 19 nt, Artificial Sequence
  Description of Artificial Sequence: Synthetic oligonucleotide
uucucaauaaaguacuugc

SEQ ID NO: 3272905 - RNA, 19 nt, Artificial Sequence
  Description of Artificial Sequence: Synthetic oligonucleotide
aaagggaacguccauaaga

SEQ ID NO: 3272906 - RNA, 19 nt, Artificial Sequence
  Description of Artificial Sequence: Synthetic oligonucleotide
ugcuuugaagaguagauag

SEQ ID NO: 3272907 - RNA, 19 nt, Artificial Sequence
  Description of Artificial Sequence: Synthetic oligonucleotide
uucauucucaauaaaguac

SEQ ID NO: 3272908 - RNA, 19 nt, Artificial Sequence
  Description of Artificial Sequence: Synthetic oligonucleotide
cucauaacaagcuuggcag

SEQ ID NO: 3272909 - RNA, 19 nt, Artificial Sequence
  Description of Artificial Sequence: Synthetic oligonucleotide
ucuguaagauuccaaagug

SEQ ID NO: 3272910 - RNA, 19 nt, Artificial Sequence
  Description of Artificial Sequence: Synthetic oligonucleotide
uguaagauuccaaagugcu

SEQ ID NO: 3272911 - RNA, 19 nt, Artificial Sequence
  Description of Artificial Sequence: Synthetic oligonucleotide
uugaugguaaugaugagcu

SEQ ID NO: 3272912 - RNA, 19 nt, Artificial Sequence
  Description of Artificial Sequence: Synthetic oligonucleotide
uuagguugaggacacaagc

SEQ ID NO: 3272913 - RNA, 19 nt, Artificial Sequence
  Description of Artificial Sequence: Synthetic oligonucleotide
uccauaagaaucuuggaac

SEQ ID NO: 3272914 - RNA, 19 nt, Artificial Sequence
  Description of Artificial Sequence: Synthetic oligonucleotide
ucauucucaauaaaguacu

SEQ ID NO: 3272915 - RNA, 19 nt, Artificial Sequence
  Description of Artificial Sequence: Synthetic oligonucleotide
ucuaagacuuggaugauga

SEQ ID NO: 3272916 - RNA, 19 nt, Artificial Sequence
  Description of Artificial Sequence: Synthetic oligonucleotide
ugauucugcauuccuauag

SEQ ID NO: 3272917 - RNA, 19 nt, Artificial Sequence
  Description of Artificial Sequence: Synthetic oligonucleotide
uauuguuagaaguuccuug

SEQ ID NO: 3272918 - RNA, 19 nt, Artificial Sequence
  Description of Artificial Sequence: Synthetic oligonucleotide
uguaucacagacauggaaa

SEQ ID NO: 3272919 - RNA, 19 nt, Artificial Sequence
  Description of Artificial Sequence: Synthetic oligonucleotide
ucguucauugcuuugaaga

SEQ ID NO: 3272920 - RNA, 19 nt, Artificial Sequence
  Description of Artificial Sequence: Synthetic oligonucleotide
uuguggagcagacugauga

SEQ ID NO: 3272921 - RNA, 19 nt, Artificial Sequence
  Description of Artificial Sequence: Synthetic oligonucleotide
aaugaugagcucuuccuga

SEQ ID NO: 3272922 - RNA, 19 nt, Artificial Sequence
  Description of Artificial Sequence: Synthetic oligonucleotide
acaucuuacaccaugaacu

SEQ ID NO: 3272923 - RNA, 19 nt, Artificial Sequence
  Description of Artificial Sequence: Synthetic oligonucleotide
aucuguaggucaccaaugc

SEQ ID NO: 3272924 - RNA, 19 nt, Artificial Sequence
  Description of Artificial Sequence: Synthetic oligonucleotide
uguaacuguugguaguagg

SEQ ID NO: 3272925 - RNA, 19 nt, Artificial Sequence
  Description of Artificial Sequence: Synthetic oligonucleotide
aaguagcucacuucuaugu

SEQ ID NO: 3272926 - RNA, 19 nt, Artificial Sequence
  Description of Artificial Sequence: Synthetic oligonucleotide
ucugacaacaggcgaacag

SEQ ID NO: 3272927 - RNA, 19 nt, Artificial Sequence
  Description of Artificial Sequence: Synthetic oligonucleotide
uguuagaaguuccuugaug

SEQ ID NO: 3272928 - RNA, 19 nt, Artificial Sequence
  Description of Artificial Sequence: Synthetic oligonucleotide
auaagaaucuuggaacugg

SEQ ID NO: 3272929 - RNA, 19 nt, Artificial Sequence
  Description of Artificial Sequence: Synthetic oligonucleotide
aagcuuggcagcauuaaac

SEQ ID NO: 3272930 - RNA, 19 nt, Artificial Sequence
  Description of Artificial Sequence: Synthetic oligonucleotide
acugaugauaugucucagc

SEQ ID NO: 3272931 - RNA, 19 nt, Artificial Sequence
  Description of Artificial Sequence: Synthetic oligonucleotide
gucucuaagacuuggauga

SEQ ID NO: 3272932 - RNA, 19 nt, Artificial Sequence
  Description of Artificial Sequence: Synthetic oligonucleotide
agcuauguuguucaaaaga

SEQ ID NO: 3272933 - RNA, 19 nt, Artificial Sequence
  Description of Artificial Sequence: Synthetic oligonucleotide
ucugcauuccuauagccac

SEQ ID NO: 3272934 - RNA, 19 nt, Artificial Sequence
  Description of Artificial Sequence: Synthetic oligonucleotide
gaagaguagauagaugacc

SEQ ID NO: 3272935 - RNA, 19 nt, Artificial Sequence
  Description of Artificial Sequence: Synthetic oligonucleotide
aagaucacgccucugcaca

SEQ ID NO: 3272936 - RNA, 19 nt, Artificial Sequence
  Description of Artificial Sequence: Synthetic oligonucleotide
uuaaaccugucaaagggaa

SEQ ID NO: 3272937 - RNA, 19 nt, Artificial Sequence
  Description of Artificial Sequence: Synthetic oligonucleotide
agugcuuucagaguaaaca

SEQ ID NO: 3272938 - RNA, 19 nt, Artificial Sequence
  Description of Artificial Sequence: Synthetic oligonucleotide
agugcugucugucacaggu

SEQ ID NO: 3272939 - RNA, 19 nt, Artificial Sequence
  Description of Artificial Sequence: Synthetic oligonucleotide
uuugaagaguagauagaug

SEQ ID NO: 3272940 - RNA, 19 nt, Artificial Sequence
  Description of Artificial Sequence: Synthetic oligonucleotide
uuuugucugaguauuguua

SEQ ID NO: 3272941 - RNA, 19 nt, Artificial Sequence
  Description of Artificial Sequence: Synthetic oligonucleotide
ugauuucaaagaucuguag

SEQ ID NO: 3272942 - RNA, 19 nt, Artificial Sequence
  Description of Artificial Sequence: Synthetic oligonucleotide
ugcuuucagaguaaacaag

SEQ ID NO: 3272943 - RNA, 19 nt, Artificial Sequence
  Description of Artificial Sequence: Synthetic oligonucleotide
uaaugaugagcucuuccug

SEQ ID NO: 3272944 - RNA, 19 nt, Artificial Sequence
  Description of Artificial Sequence: Synthetic oligonucleotide
ucucaauaaaguacuugca

SEQ ID NO: 3272945 - RNA, 19 nt, Artificial Sequence
  Description of Artificial Sequence: Synthetic oligonucleotide
acuucuauguugcuguugu

SEQ ID NO: 3272946 - RNA, 19 nt, Artificial Sequence
  Description of Artificial Sequence: Synthetic oligonucleotide
uaucacaccagcagcgaag

SEQ ID NO: 3272947 - RNA, 19 nt, Artificial Sequence
  Description of Artificial Sequence: Synthetic oligonucleotide
aagauuccaaagugcuuuc

SEQ ID NO: 3272948 - RNA, 19 nt, Artificial Sequence
  Description of Artificial Sequence: Synthetic oligonucleotide
ucuauguugcuguugugga

SEQ ID NO: 3272949 - RNA, 19 nt, Artificial Sequence
  Description of Artificial Sequence: Synthetic oligonucleotide
auggaaaacgucucuaaga

SEQ ID NO: 3272950 - RNA, 19 nt, Artificial Sequence
  Description of Artificial Sequence: Synthetic oligonucleotide
ugaccucugacaacaggcg

SEQ ID NO: 3272951 - RNA, 19 nt, Artificial Sequence
  Description of Artificial Sequence: Synthetic oligonucleotide
agagaagacaauucuucug

SEQ ID NO: 3272952 - RNA, 19 nt, Artificial Sequence
  Description of Artificial Sequence: Synthetic oligonucleotide
aauucguucauugcuuuga

SEQ ID NO: 3272953 - RNA, 19 nt, Artificial Sequence
  Description of Artificial Sequence: Synthetic oligonucleotide
uagaugaccucugacaaca

SEQ ID NO: 3272954 - RNA, 19 nt, Artificial Sequence
  Description of Artificial Sequence: Synthetic oligonucleotide
aauccuggauuguugcaug

SEQ ID NO: 3272955 - RNA, 19 nt, Artificial Sequence
  Description of Artificial Sequence: Synthetic oligonucleotide
gagagaaguugucaaggag

SEQ ID NO: 3272956 - RNA, 19 nt, Artificial Sequence
  Description of Artificial Sequence: Synthetic oligonucleotide
gacaucuuacaccaugaac

SEQ ID NO: 3272957 - RNA, 19 nt, Artificial Sequence
  Description of Artificial Sequence: Synthetic oligonucleotide
cuguaagauuccaaagugc

SEQ ID NO: 3272958 - RNA, 19 nt, Artificial Sequence
  Description of Artificial Sequence: Synthetic oligonucleotide
ggggaaaaugauuucaaag

SEQ ID NO: 3272959 - RNA, 19 nt, Artificial Sequence
  Description of Artificial Sequence: Synthetic oligonucleotide
gacaauucuucuguaacug

SEQ ID NO: 3272960 - RNA, 19 nt, Artificial Sequence
  Description of Artificial Sequence: Synthetic oligonucleotide
aaauucguucauugcuuug

SEQ ID NO: 3272961 - RNA, 19 nt, Artificial Sequence
  Description of Artificial Sequence: Synthetic oligonucleotide
auagaugaccucugacaac

SEQ ID NO: 3272962 - RNA, 19 nt, Artificial Sequence
  Description of Artificial Sequence: Synthetic oligonucleotide
uaagauuccaaagugcuuu

SEQ ID NO: 3272963 - RNA, 19 nt, Artificial Sequence
  Description of Artificial Sequence: Synthetic oligonucleotide
gggaaaaugauuucaaaga

SEQ ID NO: 3272964 - RNA, 19 nt, Artificial Sequence
  Description of Artificial Sequence: Synthetic oligonucleotide
ugacaacaggcgaacaggc

SEQ ID NO: 3272965 - RNA, 19 nt, Artificial Sequence
  Description of Artificial Sequence: Synthetic oligonucleotide
uuccuugaugguaaugaug

SEQ ID NO: 3272966 - RNA, 19 nt, Artificial Sequence
  Description of Artificial Sequence: Synthetic oligonucleotide
aguaggggaaauucguuca

SEQ ID NO: 3272967 - RNA, 19 nt, Artificial Sequence
  Description of Artificial Sequence: Synthetic oligonucleotide
ugaagaguagauagaugac

SEQ ID NO: 3272968 - RNA, 19 nt, Artificial Sequence
  Description of Artificial Sequence: Synthetic oligonucleotide
ucacgcguuagguugagga

SEQ ID NO: 3272969 - RNA, 19 nt, Artificial Sequence
  Description of Artificial Sequence: Synthetic oligonucleotide
ugcacuggcagauccugcg

SEQ ID NO: 3272970 - RNA, 19 nt, Artificial Sequence
  Description of Artificial Sequence: Synthetic oligonucleotide
uguugcaugcaaguccugg

SEQ ID NO: 3272971 - RNA, 19 nt, Artificial Sequence
  Description of Artificial Sequence: Synthetic oligonucleotide
gagcuucagggcuagaaug

SEQ ID NO: 3272972 - RNA, 19 nt, Artificial Sequence
  Description of Artificial Sequence: Synthetic oligonucleotide
gaaggugacaucauuuaac

SEQ ID NO: 3272973 - RNA, 19 nt, Artificial Sequence
  Description of Artificial Sequence: Synthetic oligonucleotide
uuguucaaaagaccaagua

SEQ ID NO: 3272974 - RNA, 19 nt, Artificial Sequence
  Description of Artificial Sequence: Synthetic oligonucleotide
uagcucacuucuauguugc

SEQ ID NO: 3272975 - RNA, 19 nt, Artificial Sequence
  Description of Artificial Sequence: Synthetic oligonucleotide
aaacgucucuaagacuugg

SEQ ID NO: 3272976 - RNA, 19 nt, Artificial Sequence
  Description of Artificial Sequence: Synthetic oligonucleotide
agacaauucuucuguaacu

SEQ ID NO: 3272977 - RNA, 19 nt, Artificial Sequence
  Description of Artificial Sequence: Synthetic oligonucleotide
uugcaugcaaguccuggag

SEQ ID NO: 3272978 - RNA, 19 nt, Artificial Sequence
  Description of Artificial Sequence: Synthetic oligonucleotide
gaaucuuggaacugguuaa

SEQ ID NO: 3272979 - RNA, 19 nt, Artificial Sequence
  Description of Artificial Sequence: Synthetic oligonucleotide
ucuggcugagagaaguugu

SEQ ID NO: 3272980 - RNA, 19 nt, Artificial Sequence
  Description of Artificial Sequence: Synthetic oligonucleotide
acaagcacuggcugugaac

SEQ ID NO: 3272981 - RNA, 19 nt, Artificial Sequence
  Description of Artificial Sequence: Synthetic oligonucleotide
ugcugucugucacagguca

SEQ ID NO: 3272982 - RNA, 19 nt, Artificial Sequence
  Description of Artificial Sequence: Synthetic oligonucleotide
aggggaaauucguucauug

SEQ ID NO: 3272983 - RNA, 19 nt, Artificial Sequence
  Description of Artificial Sequence: Synthetic oligonucleotide
cagacaugaugcauggccc

SEQ ID NO: 3272984 - RNA, 19 nt, Artificial Sequence
  Description of Artificial Sequence: Synthetic oligonucleotide
uaagaaucuuggaacuggu

SEQ ID NO: 3272985 - RNA, 19 nt, Artificial Sequence
  Description of Artificial Sequence: Synthetic oligonucleotide
uagauagaugaccucugac

SEQ ID NO: 3272986 - RNA, 19 nt, Artificial Sequence
  Description of Artificial Sequence: Synthetic oligonucleotide
ucacaggcuagccagugcu

SEQ ID NO: 3272987 - RNA, 19 nt, Artificial Sequence
  Description of Artificial Sequence: Synthetic oligonucleotide
gagaaguugucaaggagug

SEQ ID NO: 3272988 - RNA, 19 nt, Artificial Sequence
  Description of Artificial Sequence: Synthetic oligonucleotide
acaggcauucucuuggcca

SEQ ID NO: 3272989 - RNA, 19 nt, Artificial Sequence
  Description of Artificial Sequence: Synthetic oligonucleotide
agagaaguugucaaggagu

SEQ ID NO: 3272990 - RNA, 19 nt, Artificial Sequence
  Description of Artificial Sequence: Synthetic oligonucleotide
gcuagaauggaggugaugc

SEQ ID NO: 3272991 - RNA, 19 nt, Artificial Sequence
  Description of Artificial Sequence: Synthetic oligonucleotide
agacugaugauaugucuca

SEQ ID NO: 3272992 - RNA, 19 nt, Artificial Sequence
  Description of Artificial Sequence: Synthetic oligonucleotide
cauggaaaacgucucuaag

SEQ ID NO: 3272993 - RNA, 19 nt, Artificial Sequence
  Description of Artificial Sequence: Synthetic oligonucleotide
guagcucacuucuauguug

SEQ ID NO: 3272994 - RNA, 19 nt, Artificial Sequence
  Description of Artificial Sequence: Synthetic oligonucleotide
ugguuaaggagagaagaca

SEQ ID NO: 3272995 - RNA, 19 nt, Artificial Sequence
  Description of Artificial Sequence: Synthetic oligonucleotide
ucauaacaagcuuggcagc

SEQ ID NO: 3272996 - RNA, 19 nt, Artificial Sequence
  Description of Artificial Sequence: Synthetic oligonucleotide
uaaaacauagcauauuuag

SEQ ID NO: 3272997 - RNA, 19 nt, Artificial Sequence
  Description of Artificial Sequence: Synthetic oligonucleotide
ucuauagauaucaagacga

SEQ ID NO: 3272998 - RNA, 19 nt, Artificial Sequence
  Description of Artificial Sequence: Synthetic oligonucleotide
uagaaaaugauuaauuucu

SEQ ID NO: 3272999 - RNA, 19 nt, Artificial Sequence
  Description of Artificial Sequence: Synthetic oligonucleotide
caugguaagaauuucauag

SEQ ID NO: 3273000 - RNA, 19 nt, Artificial Sequence
  Description of Artificial Sequence: Synthetic oligonucleotide
uaagucagcacuaaguuca

SEQ ID NO: 3273001 - RNA, 19 nt, Artificial Sequence
  Description of Artificial Sequence: Synthetic oligonucleotide
uucauugagauucuccacg

SEQ ID NO: 3273002 - RNA, 19 nt, Artificial Sequence
  Description of Artificial Sequence: Synthetic oligonucleotide
ucuucugucucauagaugu

SEQ ID NO: 3273003 - RNA, 19 nt, Artificial Sequence
  Description of Artificial Sequence: Synthetic oligonucleotide
cauuucgaaauuuugacag

SEQ ID NO: 3273004 - RNA, 19 nt, Artificial Sequence
  Description of Artificial Sequence: Synthetic oligonucleotide
uaacauagggacaaaacug

SEQ ID NO: 3273005 - RNA, 19 nt, Artificial Sequence
  Description of Artificial Sequence: Synthetic oligonucleotide
gauagcaaguuuuagacga

SEQ ID NO: 3273006 - RNA, 19 nt, Artificial Sequence
  Description of Artificial Sequence: Synthetic oligonucleotide
aaaacagucauuaucuucu

SEQ ID NO: 3273007 - RNA, 19 nt, Artificial Sequence
  Description of Artificial Sequence: Synthetic oligonucleotide
auaacauagggacaaaacu

SEQ ID NO: 3273008 - RNA, 19 nt, Artificial Sequence
  Description of Artificial Sequence: Synthetic oligonucleotide
uugauagcaaguuuuagac

SEQ ID NO: 3273009 - RNA, 19 nt, Artificial Sequence
  Description of Artificial Sequence: Synthetic oligonucleotide
aauaugaugcuccaugaau

SEQ ID NO: 3273010 - RNA, 19 nt, Artificial Sequence
  Description of Artificial Sequence: Synthetic oligonucleotide
aaaucuuuagcaaacauuu

SEQ ID NO: 3273011 - RNA, 19 nt, Artificial Sequence
  Description of Artificial Sequence: Synthetic oligonucleotide
aaugugaaauaugaugcuc

SEQ ID NO: 3273012 - RNA, 19 nt, Artificial Sequence
  Description of Artificial Sequence: Synthetic oligonucleotide
cauuauuagagcuggacug

SEQ ID NO: 3273013 - RNA, 19 nt, Artificial Sequence
  Description of Artificial Sequence: Synthetic oligonucleotide
aaugcaucccaguccuucc

SEQ ID NO: 3273014 - RNA, 19 nt, Artificial Sequence
  Description of Artificial Sequence: Synthetic oligonucleotide
cugaucauauagcagauag

SEQ ID NO: 3273015 - RNA, 19 nt, Artificial Sequence
  Description of Artificial Sequence: Synthetic oligonucleotide
uggugaaggaauaauguug

SEQ ID NO: 3273016 - RNA, 19 nt, Artificial Sequence
  Description of Artificial Sequence: Synthetic oligonucleotide
gauguaugagagcaaaccc

SEQ ID NO: 3273017 - RNA, 19 nt, Artificial Sequence
  Description of Artificial Sequence: Synthetic oligonucleotide
uagaugucaaguaacgaug

SEQ ID NO: 3273018 - RNA, 19 nt, Artificial Sequence
  Description of Artificial Sequence: Synthetic oligonucleotide
gacaaaacuggccagaaga

SEQ ID NO: 3273019 - RNA, 19 nt, Artificial Sequence
  Description of Artificial Sequence: Synthetic oligonucleotide
gagcuaucaaauaacauag

SEQ ID NO: 3273020 - RNA, 19 nt, Artificial Sequence
  Description of Artificial Sequence: Synthetic oligonucleotide
acgaugagcagcuaaaaug

SEQ ID NO: 3273021 - RNA, 19 nt, Artificial Sequence
  Description of Artificial Sequence: Synthetic oligonucleotide
uagauaucaagacgaaacc

SEQ ID NO: 3273022 - RNA, 19 nt, Artificial Sequence
  Description of Artificial Sequence: Synthetic oligonucleotide
acauuugucaucaaaguag

SEQ ID NO: 3273023 - RNA, 19 nt, Artificial Sequence
  Description of Artificial Sequence: Synthetic oligonucleotide
aaucaucccaauaauccac

SEQ ID NO: 3273024 - RNA, 19 nt, Artificial Sequence
  Description of Artificial Sequence: Synthetic oligonucleotide
aguucaaaugcucucagga

SEQ ID NO: 3273025 - RNA, 19 nt, Artificial Sequence
  Description of Artificial Sequence: Synthetic oligonucleotide
ugugcaagcaaaucuuuag

SEQ ID NO: 3273026 - RNA, 19 nt, Artificial Sequence
  Description of Artificial Sequence: Synthetic oligonucleotide
ucauauagcagauagucuu

SEQ ID NO: 3273027 - RNA, 19 nt, Artificial Sequence
  Description of Artificial Sequence: Synthetic oligonucleotide
uuugggagcuaucaaauaa

SEQ ID NO: 3273028 - RNA, 19 nt, Artificial Sequence
  Description of Artificial Sequence: Synthetic oligonucleotide
ugauguaugagagcaaacc

SEQ ID NO: 3273029 - RNA, 19 nt, Artificial Sequence
  Description of Artificial Sequence: Synthetic oligonucleotide
uccugcuuuaaaagcaugg

SEQ ID NO: 3273030 - RNA, 19 nt, Artificial Sequence
  Description of Artificial Sequence: Synthetic oligonucleotide
augguuuaggauaacuucc

SEQ ID NO: 3273031 - RNA, 19 nt, Artificial Sequence
  Description of Artificial Sequence: Synthetic oligonucleotide
gauaucaagacgaaaccug

SEQ ID NO: 3273032 - RNA, 19 nt, Artificial Sequence
  Description of Artificial Sequence: Synthetic oligonucleotide
caugacaaagcugagcugg

SEQ ID NO: 3273033 - RNA, 19 nt, Artificial Sequence
  Description of Artificial Sequence: Synthetic oligonucleotide
uguuauggaaaauuauuuc

SEQ ID NO: 3273034 - RNA, 19 nt, Artificial Sequence
  Description of Artificial Sequence: Synthetic oligonucleotide
gcuaucaaauaacauaggg

SEQ ID NO: 3273035 - RNA, 19 nt, Artificial Sequence
  Description of Artificial Sequence: Synthetic oligonucleotide
acuguuuugccguuuugac

SEQ ID NO: 3273036 - RNA, 19 nt, Artificial Sequence
  Description of Artificial Sequence: Synthetic oligonucleotide
uacagguggguuuacggcg

SEQ ID NO: 3273037 - RNA, 19 nt, Artificial Sequence
  Description of Artificial Sequence: Synthetic oligonucleotide
augugaaauaugaugcucc

SEQ ID NO: 3273038 - RNA, 19 nt, Artificial Sequence
  Description of Artificial Sequence: Synthetic oligonucleotide
ugauagcaaguuuuagacg

SEQ ID NO: 3273039 - RNA, 19 nt, Artificial Sequence
  Description of Artificial Sequence: Synthetic oligonucleotide
uugacugggagacaaacuc

SEQ ID NO: 3273040 - RNA, 19 nt, Artificial Sequence
  Description of Artificial Sequence: Synthetic oligonucleotide
guagucuauucucucaagg

SEQ ID NO: 3273041 - RNA, 19 nt, Artificial Sequence
  Description of Artificial Sequence: Synthetic oligonucleotide
ugcaagcaaaucuuuagca

SEQ ID NO: 3273042 - RNA, 19 nt, Artificial Sequence
  Description of Artificial Sequence: Synthetic oligonucleotide
aagcaaaucuuuagcaaac

SEQ ID NO: 3273043 - RNA, 19 nt, Artificial Sequence
  Description of Artificial Sequence: Synthetic oligonucleotide
gauucugccaaauugagau

SEQ ID NO: 3273044 - RNA, 19 nt, Artificial Sequence
  Description of Artificial Sequence: Synthetic oligonucleotide
cuuucuuccaauagucccc

SEQ ID NO: 3273045 - RNA, 19 nt, Artificial Sequence
  Description of Artificial Sequence: Synthetic oligonucleotide
caucuauagauaucaagac

SEQ ID NO: 3273046 - RNA, 19 nt, Artificial Sequence
  Description of Artificial Sequence: Synthetic oligonucleotide
auuguagacaagugaguag

SEQ ID NO: 3273047 - RNA, 19 nt, Artificial Sequence
  Description of Artificial Sequence: Synthetic oligonucleotide
acauuauuagagcuggacu

SEQ ID NO: 3273048 - RNA, 19 nt, Artificial Sequence
  Description of Artificial Sequence: Synthetic oligonucleotide
caagacgaaaccuggaaug

SEQ ID NO: 3273049 - RNA, 19 nt, Artificial Sequence
  Description of Artificial Sequence: Synthetic oligonucleotide
cuaucaaauaacauaggga

SEQ ID NO: 3273050 - RNA, 19 nt, Artificial Sequence
  Description of Artificial Sequence: Synthetic oligonucleotide
ucucauagaugucaaguaa

SEQ ID NO: 3273051 - RNA, 19 nt, Artificial Sequence
  Description of Artificial Sequence: Synthetic oligonucleotide
cuugggcaaagacacaucc

SEQ ID NO: 3273052 - RNA, 19 nt, Artificial Sequence
  Description of Artificial Sequence: Synthetic oligonucleotide
ugaugcuccaugaauaaua

SEQ ID NO: 3273053 - RNA, 19 nt, Artificial Sequence
  Description of Artificial Sequence: Synthetic oligonucleotide
uuuguccaaaccaaacggu

SEQ ID NO: 3273054 - RNA, 19 nt, Artificial Sequence
  Description of Artificial Sequence: Synthetic oligonucleotide
uauagcagauagucuuugg

SEQ ID NO: 3273055 - RNA, 19 nt, Artificial Sequence
  Description of Artificial Sequence: Synthetic oligonucleotide
uuguagacaagugaguaga

SEQ ID NO: 3273056 - RNA, 19 nt, Artificial Sequence
  Description of Artificial Sequence: Synthetic oligonucleotide
uagcagauagucuuuggug

SEQ ID NO: 3273057 - RNA, 19 nt, Artificial Sequence
  Description of Artificial Sequence: Synthetic oligonucleotide
uacauuugucaucaaagua

SEQ ID NO: 3273058 - RNA, 19 nt, Artificial Sequence
  Description of Artificial Sequence: Synthetic oligonucleotide
gaaauaugaugcuccauga

SEQ ID NO: 3273059 - RNA, 19 nt, Artificial Sequence
  Description of Artificial Sequence: Synthetic oligonucleotide
uucaaaugcucucaggauu

SEQ ID NO: 3273060 - RNA, 19 nt, Artificial Sequence
  Description of Artificial Sequence: Synthetic oligonucleotide
augucaaguaacgaugcac

SEQ ID NO: 3273061 - RNA, 19 nt, Artificial Sequence
  Description of Artificial Sequence: Synthetic oligonucleotide
aaugucugaccaaaucauc

SEQ ID NO: 3273062 - RNA, 19 nt, Artificial Sequence
  Description of Artificial Sequence: Synthetic oligonucleotide
aaagucuucuaacccuuca

SEQ ID NO: 3273063 - RNA, 19 nt, Artificial Sequence
  Description of Artificial Sequence: Synthetic oligonucleotide
auaccagagucucuuaaug

SEQ ID NO: 3273064 - RNA, 19 nt, Artificial Sequence
  Description of Artificial Sequence: Synthetic oligonucleotide
uguacgaugagcagcuaaa

SEQ ID NO: 3273065 - RNA, 19 nt, Artificial Sequence
  Description of Artificial Sequence: Synthetic oligonucleotide
aguuuuagacgacuuaaau

SEQ ID NO: 3273066 - RNA, 19 nt, Artificial Sequence
  Description of Artificial Sequence: Synthetic oligonucleotide
guuauggaaaauuauuucu

SEQ ID NO: 3273067 - RNA, 19 nt, Artificial Sequence
  Description of Artificial Sequence: Synthetic oligonucleotide
gacuacugaucauauagca

SEQ ID NO: 3273068 - RNA, 19 nt, Artificial Sequence
  Description of Artificial Sequence: Synthetic oligonucleotide
gguaaccugacauuugucc

SEQ ID NO: 3273069 - RNA, 19 nt, Artificial Sequence
  Description of Artificial Sequence: Synthetic oligonucleotide
agguagagggaauucauga

SEQ ID NO: 3273070 - RNA, 19 nt, Artificial Sequence
  Description of Artificial Sequence: Synthetic oligonucleotide
cuuaaugucugaccaaauc

SEQ ID NO: 3273071 - RNA, 19 nt, Artificial Sequence
  Description of Artificial Sequence: Synthetic oligonucleotide
uuacagguggguuuacggc

SEQ ID NO: 3273072 - RNA, 19 nt, Artificial Sequence
  Description of Artificial Sequence: Synthetic oligonucleotide
uaugagagcaaacccacuu

SEQ ID NO: 3273073 - RNA, 19 nt, Artificial Sequence
  Description of Artificial Sequence: Synthetic oligonucleotide
ucuccacuccuucaaacug

SEQ ID NO: 3273074 - RNA, 19 nt, Artificial Sequence
  Description of Artificial Sequence: Synthetic oligonucleotide
aaauaugaugcuccaugaa

SEQ ID NO: 3273075 - RNA, 19 nt, Artificial Sequence
  Description of Artificial Sequence: Synthetic oligonucleotide
auaucaagacgaaaccugg

SEQ ID NO: 3273076 - RNA, 19 nt, Artificial Sequence
  Description of Artificial Sequence: Synthetic oligonucleotide
uucacgugaauuccgggcu

SEQ ID NO: 3273077 - RNA, 19 nt, Artificial Sequence
  Description of Artificial Sequence: Synthetic oligonucleotide
uuaagucagcacuaaguuc

SEQ ID NO: 3273078 - RNA, 19 nt, Artificial Sequence
  Description of Artificial Sequence: Synthetic oligonucleotide
gagaagguagucuauucuc

SEQ ID NO: 3273079 - RNA, 19 nt, Artificial Sequence
  Description of Artificial Sequence: Synthetic oligonucleotide
auuagagcuggacuggcca

SEQ ID NO: 3273080 - RNA, 19 nt, Artificial Sequence
  Description of Artificial Sequence: Synthetic oligonucleotide
agaaguccgaaagccaagc

SEQ ID NO: 3273081 - RNA, 19 nt, Artificial Sequence
  Description of Artificial Sequence: Synthetic oligonucleotide
uuugacagaucuuggcgca

SEQ ID NO: 3273082 - RNA, 19 nt, Artificial Sequence
  Description of Artificial Sequence: Synthetic oligonucleotide
auagcagauagucuuuggu

SEQ ID NO: 3273083 - RNA, 19 nt, Artificial Sequence
  Description of Artificial Sequence: Synthetic oligonucleotide
aagugaguagagauuuagg

SEQ ID NO: 3273084 - RNA, 19 nt, Artificial Sequence
  Description of Artificial Sequence: Synthetic oligonucleotide
uguagacaagugaguagag

SEQ ID NO: 3273085 - RNA, 19 nt, Artificial Sequence
  Description of Artificial Sequence: Synthetic oligonucleotide
ugguuuaggauaacuucca

SEQ ID NO: 3273086 - RNA, 19 nt, Artificial Sequence
  Description of Artificial Sequence: Synthetic oligonucleotide
ucauuguagacaagugagu

SEQ ID NO: 3273087 - RNA, 19 nt, Artificial Sequence
  Description of Artificial Sequence: Synthetic oligonucleotide
uuugacugggagacaaacu

SEQ ID NO: 3273088 - RNA, 19 nt, Artificial Sequence
  Description of Artificial Sequence: Synthetic oligonucleotide
ugggagcuaucaaauaaca

SEQ ID NO: 3273089 - RNA, 19 nt, Artificial Sequence
  Description of Artificial Sequence: Synthetic oligonucleotide
agacuacugaucauauagc

SEQ ID NO: 3273090 - RNA, 19 nt, Artificial Sequence
  Description of Artificial Sequence: Synthetic oligonucleotide
ugacugggagacaaacucc

SEQ ID NO: 3273091 - RNA, 19 nt, Artificial Sequence
  Description of Artificial Sequence: Synthetic oligonucleotide
gauaacuuccaguucacgu

SEQ ID NO: 3273092 - RNA, 19 nt, Artificial Sequence
  Description of Artificial Sequence: Synthetic oligonucleotide
agcagcuaaaaugacaggu

SEQ ID NO: 3273093 - RNA, 19 nt, Artificial Sequence
  Description of Artificial Sequence: Synthetic oligonucleotide
caucaaaguagcuaagcca

SEQ ID NO: 3273094 - RNA, 19 nt, Artificial Sequence
  Description of Artificial Sequence: Synthetic oligonucleotide
acgacuuaaauucauucuu

SEQ ID NO: 3273095 - RNA, 19 nt, Artificial Sequence
  Description of Artificial Sequence: Synthetic oligonucleotide
augguaagaauuucauagu

SEQ ID NO: 3273096 - RNA, 19 nt, Artificial Sequence
  Description of Artificial Sequence: Synthetic oligonucleotide
uuaacaacaacauauaaac

SEQ ID NO: 3273097 - RNA, 19 nt, Artificial Sequence
  Description of Artificial Sequence: Synthetic oligonucleotide
acaacauauaaacaugacc

SEQ ID NO: 3273098 - RNA, 19 nt, Artificial Sequence
  Description of Artificial Sequence: Synthetic oligonucleotide
aacaacaacauauaaacau

SEQ ID NO: 3273099 - RNA, 19 nt, Artificial Sequence
  Description of Artificial Sequence: Synthetic oligonucleotide
aaagcuaauaguuguuuac

SEQ ID NO: 3273100 - RNA, 19 nt, Artificial Sequence
  Description of Artificial Sequence: Synthetic oligonucleotide
aaaagggcucauuuguucc

SEQ ID NO: 3273101 - RNA, 19 nt, Artificial Sequence
  Description of Artificial Sequence: Synthetic oligonucleotide
uuugucagacuuuaaaagg

SEQ ID NO: 3273102 - RNA, 19 nt, Artificial Sequence
  Description of Artificial Sequence: Synthetic oligonucleotide
uuuaaaagggcucauuugu

SEQ ID NO: 3273103 - RNA, 19 nt, Artificial Sequence
  Description of Artificial Sequence: Synthetic oligonucleotide
cuuaacagagcaaaugacg

SEQ ID NO: 3273104 - RNA, 19 nt, Artificial Sequence
  Description of Artificial Sequence: Synthetic oligonucleotide
uugucagacuuuaaaaggg

SEQ ID NO: 3273105 - RNA, 19 nt, Artificial Sequence
  Description of Artificial Sequence: Synthetic oligonucleotide
caacauauaaacaugacca

SEQ ID NO: 3273106 - RNA, 19 nt, Artificial Sequence
  Description of Artificial Sequence: Synthetic oligonucleotide
auuugucagacuuuaaaag

SEQ ID NO: 3273107 - RNA, 19 nt, Artificial Sequence
  Description of Artificial Sequence: Synthetic oligonucleotide
uuaacagagcaaaugacga

SEQ ID NO: 3273108 - RNA, 19 nt, Artificial Sequence
  Description of Artificial Sequence: Synthetic oligonucleotide
aaaacaucaggauuucuga

SEQ ID NO: 3273109 - RNA, 19 nt, Artificial Sequence
  Description of Artificial Sequence: Synthetic oligonucleotide
auaaacaugaccagcaacg

SEQ ID NO: 3273110 - RNA, 19 nt, Artificial Sequence
  Description of Artificial Sequence: Synthetic oligonucleotide
agagacaccauuuucccac

SEQ ID NO: 3273111 - RNA, 19 nt, Artificial Sequence
  Description of Artificial Sequence: Synthetic oligonucleotide
uagucuuucaucaaaacau

SEQ ID NO: 3273112 - RNA, 19 nt, Artificial Sequence
  Description of Artificial Sequence: Synthetic oligonucleotide
aaacaugaccagcaacgcc

SEQ ID NO: 3273113 - RNA, 19 nt, Artificial Sequence
  Description of Artificial Sequence: Synthetic oligonucleotide
aacauauaaacaugaccag

SEQ ID NO: 3273114 - RNA, 19 nt, Artificial Sequence
  Description of Artificial Sequence: Synthetic oligonucleotide
agagcaaaugacgagagac

SEQ ID NO: 3273115 - RNA, 19 nt, Artificial Sequence
  Description of Artificial Sequence: Synthetic oligonucleotide
aucucugugacuucaaauc

SEQ ID NO: 3273116 - RNA, 19 nt, Artificial Sequence
  Description of Artificial Sequence: Synthetic oligonucleotide
uuucugacaauccuuuucc

SEQ ID NO: 3273117 - RNA, 19 nt, Artificial Sequence
  Description of Artificial Sequence: Synthetic oligonucleotide
cuuucaucaaaacaucagg

SEQ ID NO: 3273118 - RNA, 19 nt, Artificial Sequence
  Description of Artificial Sequence: Synthetic oligonucleotide
ucauuuguucccuuaacag

SEQ ID NO: 3273119 - RNA, 19 nt, Artificial Sequence
  Description of Artificial Sequence: Synthetic oligonucleotide
aaacaucaggauuucugac

SEQ ID NO: 3273120 - RNA, 19 nt, Artificial Sequence
  Description of Artificial Sequence: Synthetic oligonucleotide
uuucaucaaaacaucagga

SEQ ID NO: 3273121 - RNA, 19 nt, Artificial Sequence
  Description of Artificial Sequence: Synthetic oligonucleotide
ugacuucaaaucuuaaucc

SEQ ID NO: 3273122 - RNA, 19 nt, Artificial Sequence
  Description of Artificial Sequence: Synthetic oligonucleotide
ucuuucaucaaaacaucag

SEQ ID NO: 3273123 - RNA, 19 nt, Artificial Sequence
  Description of Artificial Sequence: Synthetic oligonucleotide
aguuguuuacauuugucag

SEQ ID NO: 3273124 - RNA, 19 nt, Artificial Sequence
  Description of Artificial Sequence: Synthetic oligonucleotide
uuuagcuugggaaagcuaa

SEQ ID NO: 3273125 - RNA, 19 nt, Artificial Sequence
  Description of Artificial Sequence: Synthetic oligonucleotide
aaaucuuaauccuuccccu

SEQ ID NO: 3273126 - RNA, 19 nt, Artificial Sequence
  Description of Artificial Sequence: Synthetic oligonucleotide
aauaguuguuuacauuugu

SEQ ID NO: 3273127 - RNA, 19 nt, Artificial Sequence
  Description of Artificial Sequence: Synthetic oligonucleotide
aaagggcucauuuguuccc

SEQ ID NO: 3273128 - RNA, 19 nt, Artificial Sequence
  Description of Artificial Sequence: Synthetic oligonucleotide
auuucugacaauccuuuuc

SEQ ID NO: 3273129 - RNA, 19 nt, Artificial Sequence
  Description of Artificial Sequence: Synthetic oligonucleotide
caaaucuuaauccuucccc

SEQ ID NO: 3273130 - RNA, 19 nt, Artificial Sequence
  Description of Artificial Sequence: Synthetic oligonucleotide
acauauaaacaugaccagc

SEQ ID NO: 3273131 - RNA, 19 nt, Artificial Sequence
  Description of Artificial Sequence: Synthetic oligonucleotide
aacaucaggauuucugaca

SEQ ID NO: 3273132 - RNA, 19 nt, Artificial Sequence
  Description of Artificial Sequence: Synthetic oligonucleotide
aaucuuaauccuuccccuc

SEQ ID NO: 3273133 - RNA, 19 nt, Artificial Sequence
  Description of Artificial Sequence: Synthetic oligonucleotide
aucuuaauccuuccccucc

SEQ ID NO: 3273134 - RNA, 19 nt, Artificial Sequence
  Description of Artificial Sequence: Synthetic oligonucleotide
uaguuguuuacauuuguca

SEQ ID NO: 3273135 - RNA, 19 nt, Artificial Sequence
  Description of Artificial Sequence: Synthetic oligonucleotide
caaaacaucaggauuucug

SEQ ID NO: 3273136 - RNA, 19 nt, Artificial Sequence
  Description of Artificial Sequence: Synthetic oligonucleotide
uauaaacaugaccagcaac

SEQ ID NO: 3273137 - RNA, 19 nt, Artificial Sequence
  Description of Artificial Sequence: Synthetic oligonucleotide
ucaaaucuuaauccuuccc

SEQ ID NO: 3273138 - RNA, 19 nt, Artificial Sequence
  Description of Artificial Sequence: Synthetic oligonucleotide
gugacuucaaaucuuaauc

SEQ ID NO: 3273139 - RNA, 19 nt, Artificial Sequence
  Description of Artificial Sequence: Synthetic oligonucleotide
aacaacauauaaacaugac

SEQ ID NO: 3273140 - RNA, 19 nt, Artificial Sequence
  Description of Artificial Sequence: Synthetic oligonucleotide
auuuguucccuuaacagag

SEQ ID NO: 3273141 - RNA, 19 nt, Artificial Sequence
  Description of Artificial Sequence: Synthetic oligonucleotide
cauauaaacaugaccagca

SEQ ID NO: 3273142 - RNA, 19 nt, Artificial Sequence
  Description of Artificial Sequence: Synthetic oligonucleotide
ucaucaaaacaucaggauu

SEQ ID NO: 3273143 - RNA, 19 nt, Artificial Sequence
  Description of Artificial Sequence: Synthetic oligonucleotide
aacaugaccagcaacgcca

SEQ ID NO: 3273144 - RNA, 19 nt, Artificial Sequence
  Description of Artificial Sequence: Synthetic oligonucleotide
uucccacacauuaacaaca

SEQ ID NO: 3273145 - RNA, 19 nt, Artificial Sequence
  Description of Artificial Sequence: Synthetic oligonucleotide
acuagucuuucaucaaaac

SEQ ID NO: 3273146 - RNA, 19 nt, Artificial Sequence
  Description of Artificial Sequence: Synthetic oligonucleotide
uaauaguuguuuacauuug

SEQ ID NO: 3273147 - RNA, 19 nt, Artificial Sequence
  Description of Artificial Sequence: Synthetic oligonucleotide
uguccaggucuccaaaggg

SEQ ID NO: 3273148 - RNA, 19 nt, Artificial Sequence
  Description of Artificial Sequence: Synthetic oligonucleotide
gagacacucuuuuagcuug

SEQ ID NO: 3273149 - RNA, 19 nt, Artificial Sequence
  Description of Artificial Sequence: Synthetic oligonucleotide
agcaaaugacgagagacac

SEQ ID NO: 3273150 - RNA, 19 nt, Artificial Sequence
  Description of Artificial Sequence: Synthetic oligonucleotide
uuuucccacacauuaacaa

SEQ ID NO: 3273151 - RNA, 19 nt, Artificial Sequence
  Description of Artificial Sequence: Synthetic oligonucleotide
acgagagacaccauuuucc

SEQ ID NO: 3273152 - RNA, 19 nt, Artificial Sequence
  Description of Artificial Sequence: Synthetic oligonucleotide
ugucagacuuuaaaagggc

SEQ ID NO: 3273153 - RNA, 19 nt, Artificial Sequence
  Description of Artificial Sequence: Synthetic oligonucleotide
cuuuaaaagggcucauuug

SEQ ID NO: 3273154 - RNA, 19 nt, Artificial Sequence
  Description of Artificial Sequence: Synthetic oligonucleotide
aucaggauuucugacaauc

SEQ ID NO: 3273155 - RNA, 19 nt, Artificial Sequence
  Description of Artificial Sequence: Synthetic oligonucleotide
uugggaaagcuaauaguug

SEQ ID NO: 3273156 - RNA, 19 nt, Artificial Sequence
  Description of Artificial Sequence: Synthetic oligonucleotide
aacagagcaaaugacgaga

SEQ ID NO: 3273157 - RNA, 19 nt, Artificial Sequence
  Description of Artificial Sequence: Synthetic oligonucleotide
ugggaaagcuaauaguugu

SEQ ID NO: 3273158 - RNA, 19 nt, Artificial Sequence
  Description of Artificial Sequence: Synthetic oligonucleotide
uaacaacaacauauaaaca

SEQ ID NO: 3273159 - RNA, 19 nt, Artificial Sequence
  Description of Artificial Sequence: Synthetic oligonucleotide
ugaccagcaacgccaacgg

SEQ ID NO: 3273160 - RNA, 19 nt, Artificial Sequence
  Description of Artificial Sequence: Synthetic oligonucleotide
aaugacgagagacaccauu

SEQ ID NO: 3273161 - RNA, 19 nt, Artificial Sequence
  Description of Artificial Sequence: Synthetic oligonucleotide
ucucugugacuucaaaucu

SEQ ID NO: 3273162 - RNA, 19 nt, Artificial Sequence
  Description of Artificial Sequence: Synthetic oligonucleotide
cacauuaacaacaacauau

SEQ ID NO: 3273163 - RNA, 19 nt, Artificial Sequence
  Description of Artificial Sequence: Synthetic oligonucleotide
cuucaaaucuuaauccuuc

SEQ ID NO: 3273164 - RNA, 19 nt, Artificial Sequence
  Description of Artificial Sequence: Synthetic oligonucleotide
accauuuucccacacauua

SEQ ID NO: 3273165 - RNA, 19 nt, Artificial Sequence
  Description of Artificial Sequence: Synthetic oligonucleotide
ucaggauuucugacaaucc

SEQ ID NO: 3273166 - RNA, 19 nt, Artificial Sequence
  Description of Artificial Sequence: Synthetic oligonucleotide
uucaucaaaacaucaggau

SEQ ID NO: 3273167 - RNA, 19 nt, Artificial Sequence
  Description of Artificial Sequence: Synthetic oligonucleotide
aaggguacuagucuuucau

SEQ ID NO: 3273168 - RNA, 19 nt, Artificial Sequence
  Description of Artificial Sequence: Synthetic oligonucleotide
auuaacaacaacauauaaa

SEQ ID NO: 3273169 - RNA, 19 nt, Artificial Sequence
  Description of Artificial Sequence: Synthetic oligonucleotide
uuguuuacauuugucagac

SEQ ID NO: 3273170 - RNA, 19 nt, Artificial Sequence
  Description of Artificial Sequence: Synthetic oligonucleotide
uccuuuuccgaacuuuuga

SEQ ID NO: 3273171 - RNA, 19 nt, Artificial Sequence
  Description of Artificial Sequence: Synthetic oligonucleotide
ucagacuuuaaaagggcuc

SEQ ID NO: 3273172 - RNA, 19 nt, Artificial Sequence
  Description of Artificial Sequence: Synthetic oligonucleotide
acuuuaaaagggcucauuu

SEQ ID NO: 3273173 - RNA, 19 nt, Artificial Sequence
  Description of Artificial Sequence: Synthetic oligonucleotide
uucaaaucuuaauccuucc

SEQ ID NO: 3273174 - RNA, 19 nt, Artificial Sequence
  Description of Artificial Sequence: Synthetic oligonucleotide
uaacagagcaaaugacgag

SEQ ID NO: 3273175 - RNA, 19 nt, Artificial Sequence
  Description of Artificial Sequence: Synthetic oligonucleotide
agcuugggaaagcuaauag

SEQ ID NO: 3273176 - RNA, 19 nt, Artificial Sequence
  Description of Artificial Sequence: Synthetic oligonucleotide
uuucccacacauuaacaac

SEQ ID NO: 3273177 - RNA, 19 nt, Artificial Sequence
  Description of Artificial Sequence: Synthetic oligonucleotide
ucugacaauccuuuuccga

SEQ ID NO: 3273178 - RNA, 19 nt, Artificial Sequence
  Description of Artificial Sequence: Synthetic oligonucleotide
acgccaacggcucucaguc

SEQ ID NO: 3273179 - RNA, 19 nt, Artificial Sequence
  Description of Artificial Sequence: Synthetic oligonucleotide
acauuugucagacuuuaaa

SEQ ID NO: 3273180 - RNA, 19 nt, Artificial Sequence
  Description of Artificial Sequence: Synthetic oligonucleotide
aauccuuccccucccugag

SEQ ID NO: 3273181 - RNA, 19 nt, Artificial Sequence
  Description of Artificial Sequence: Synthetic oligonucleotide
ucagucgggaauucugucc

SEQ ID NO: 3273182 - RNA, 19 nt, Artificial Sequence
  Description of Artificial Sequence: Synthetic oligonucleotide
uaaaagggcucauuuguuc

SEQ ID NO: 3273183 - RNA, 19 nt, Artificial Sequence
  Description of Artificial Sequence: Synthetic oligonucleotide
ucuccaaaggguacuaguc

SEQ ID NO: 3273184 - RNA, 19 nt, Artificial Sequence
  Description of Artificial Sequence: Synthetic oligonucleotide
acaacaacauauaaacaug

SEQ ID NO: 3273185 - RNA, 19 nt, Artificial Sequence
  Description of Artificial Sequence: Synthetic oligonucleotide
ugugacuucaaaucuuaau

SEQ ID NO: 3273186 - RNA, 19 nt, Artificial Sequence
  Description of Artificial Sequence: Synthetic oligonucleotide
cauuuucccacacauuaac

SEQ ID NO: 3273187 - RNA, 19 nt, Artificial Sequence
  Description of Artificial Sequence: Synthetic oligonucleotide
aagcuaauaguuguuuaca

SEQ ID NO: 3273188 - RNA, 19 nt, Artificial Sequence
  Description of Artificial Sequence: Synthetic oligonucleotide
augaccagcaacgccaacg

SEQ ID NO: 3273189 - RNA, 19 nt, Artificial Sequence
  Description of Artificial Sequence: Synthetic oligonucleotide
uuuacauuugucagacuuu

SEQ ID NO: 3273190 - RNA, 19 nt, Artificial Sequence
  Description of Artificial Sequence: Synthetic oligonucleotide
ucuuaauccuuccccuccc

SEQ ID NO: 3273191 - RNA, 19 nt, Artificial Sequence
  Description of Artificial Sequence: Synthetic oligonucleotide
caaaugacgagagacacca

SEQ ID NO: 3273192 - RNA, 19 nt, Artificial Sequence
  Description of Artificial Sequence: Synthetic oligonucleotide
auaguuguuuacauuuguc

SEQ ID NO: 3273193 - RNA, 19 nt, Artificial Sequence
  Description of Artificial Sequence: Synthetic oligonucleotide
uucugacaauccuuuuccg

SEQ ID NO: 3273194 - RNA, 19 nt, Artificial Sequence
  Description of Artificial Sequence: Synthetic oligonucleotide
guuguuuacauuugucaga

SEQ ID NO: 3273195 - RNA, 19 nt, Artificial Sequence
  Description of Artificial Sequence: Synthetic oligonucleotide
uacuagucuuucaucaaaa

SEQ ID NO: 3273196 - RNA, 19 nt, Artificial Sequence
  Description of Artificial Sequence: Synthetic oligonucleotide
aaaaguaaggauuaaguuc

SEQ ID NO: 3273197 - RNA, 19 nt, Artificial Sequence
  Description of Artificial Sequence: Synthetic oligonucleotide
aaaugguagguucauaccc

SEQ ID NO: 3273198 - RNA, 19 nt, Artificial Sequence
  Description of Artificial Sequence: Synthetic oligonucleotide
aaaguaaggauuaaguucg

SEQ ID NO: 3273199 - RNA, 19 nt, Artificial Sequence
  Description of Artificial Sequence: Synthetic oligonucleotide
uugaagucauauaaaaugg

SEQ ID NO: 3273200 - RNA, 19 nt, Artificial Sequence
  Description of Artificial Sequence: Synthetic oligonucleotide
cuuaaaggaacccuuaugg

SEQ ID NO: 3273201 - RNA, 19 nt, Artificial Sequence
  Description of Artificial Sequence: Synthetic oligonucleotide
ucuuuuaucauccugaauu

SEQ ID NO: 3273202 - RNA, 19 nt, Artificial Sequence
  Description of Artificial Sequence: Synthetic oligonucleotide
ucuucagaaaugcuaaugg

SEQ ID NO: 3273203 - RNA, 19 nt, Artificial Sequence
  Description of Artificial Sequence: Synthetic oligonucleotide
uguacaauagucuccaaag

SEQ ID NO: 3273204 - RNA, 19 nt, Artificial Sequence
  Description of Artificial Sequence: Synthetic oligonucleotide
uaucauauuaaaugguagg

SEQ ID NO: 3273205 - RNA, 19 nt, Artificial Sequence
  Description of Artificial Sequence: Synthetic oligonucleotide
aaguuuaugugccaaccac

SEQ ID NO: 3273206 - RNA, 19 nt, Artificial Sequence
  Description of Artificial Sequence: Synthetic oligonucleotide
uaaguaauaauucgagugc

SEQ ID NO: 3273207 - RNA, 19 nt, Artificial Sequence
  Description of Artificial Sequence: Synthetic oligonucleotide
aagauuugugacuugagga

SEQ ID NO: 3273208 - RNA, 19 nt, Artificial Sequence
  Description of Artificial Sequence: Synthetic oligonucleotide
uuuagaguguuguagagga

SEQ ID NO: 3273209 - RNA, 19 nt, Artificial Sequence
  Description of Artificial Sequence: Synthetic oligonucleotide
ucaagaagagcucaaggag

SEQ ID NO: 3273210 - RNA, 19 nt, Artificial Sequence
  Description of Artificial Sequence: Synthetic oligonucleotide
aauaucagucaauccaguc

SEQ ID NO: 3273211 - RNA, 19 nt, Artificial Sequence
  Description of Artificial Sequence: Synthetic oligonucleotide
uuggcuuuuguuuuaagcc

SEQ ID NO: 3273212 - RNA, 19 nt, Artificial Sequence
  Description of Artificial Sequence: Synthetic oligonucleotide
acaaagaucucuuucaaga

SEQ ID NO: 3273213 - RNA, 19 nt, Artificial Sequence
  Description of Artificial Sequence: Synthetic oligonucleotide
uaaugauguaugcauauca

SEQ ID NO: 3273214 - RNA, 19 nt, Artificial Sequence
  Description of Artificial Sequence: Synthetic oligonucleotide
ugacucaggaauaacagca

SEQ ID NO: 3273215 - RNA, 19 nt, Artificial Sequence
  Description of Artificial Sequence: Synthetic oligonucleotide
agauuugugacuugaggac

SEQ ID NO: 3273216 - RNA, 19 nt, Artificial Sequence
  Description of Artificial Sequence: Synthetic oligonucleotide
ucuauauucucugcaaugg

SEQ ID NO: 3273217 - RNA, 19 nt, Artificial Sequence
  Description of Artificial Sequence: Synthetic oligonucleotide
acaagaaucaaauuccacu

SEQ ID NO: 3273218 - RNA, 19 nt, Artificial Sequence
  Description of Artificial Sequence: Synthetic oligonucleotide
acugaguaacuccagaguc

SEQ ID NO: 3273219 - RNA, 19 nt, Artificial Sequence
  Description of Artificial Sequence: Synthetic oligonucleotide
aucuucaugagucuggaag

SEQ ID NO: 3273220 - RNA, 19 nt, Artificial Sequence
  Description of Artificial Sequence: Synthetic oligonucleotide
aaucucucuucucuccucc

SEQ ID NO: 3273221 - RNA, 19 nt, Artificial Sequence
  Description of Artificial Sequence: Synthetic oligonucleotide
ugauauguccuggagaagg

SEQ ID NO: 3273222 - RNA, 19 nt, Artificial Sequence
  Description of Artificial Sequence: Synthetic oligonucleotide
auggacagaacgcaugacc

SEQ ID NO: 3273223 - RNA, 19 nt, Artificial Sequence
  Description of Artificial Sequence: Synthetic oligonucleotide
aaauggacuguuucugggg

SEQ ID NO: 3273224 - RNA, 19 nt, Artificial Sequence
  Description of Artificial Sequence: Synthetic oligonucleotide
cuauaugcagcacaguagg

SEQ ID NO: 3273225 - RNA, 19 nt, Artificial Sequence
  Description of Artificial Sequence: Synthetic oligonucleotide
ucaagaacguaacucaaga

SEQ ID NO: 3273226 - RNA, 19 nt, Artificial Sequence
  Description of Artificial Sequence: Synthetic oligonucleotide
ucaaguuuacugaggaugc

SEQ ID NO: 3273227 - RNA, 19 nt, Artificial Sequence
  Description of Artificial Sequence: Synthetic oligonucleotide
ucuguuuguacaauagucu

SEQ ID NO: 3273228 - RNA, 19 nt, Artificial Sequence
  Description of Artificial Sequence: Synthetic oligonucleotide
auaauucgagugcauauuc

SEQ ID NO: 3273229 - RNA, 19 nt, Artificial Sequence
  Description of Artificial Sequence: Synthetic oligonucleotide
uaaaauggacuguuucugg

SEQ ID NO: 3273230 - RNA, 19 nt, Artificial Sequence
  Description of Artificial Sequence: Synthetic oligonucleotide
uggaaggccacaccaaugg

SEQ ID NO: 3273231 - RNA, 19 nt, Artificial Sequence
  Description of Artificial Sequence: Synthetic oligonucleotide
aaacuucugucucugaagu

SEQ ID NO: 3273232 - RNA, 19 nt, Artificial Sequence
  Description of Artificial Sequence: Synthetic oligonucleotide
acagaugucuuccagucuc

SEQ ID NO: 3273233 - RNA, 19 nt, Artificial Sequence
  Description of Artificial Sequence: Synthetic oligonucleotide
uaacuuuugugcagcaggg

SEQ ID NO: 3273234 - RNA, 19 nt, Artificial Sequence
  Description of Artificial Sequence: Synthetic oligonucleotide
uaucagucaauccagucac

SEQ ID NO: 3273235 - RNA, 19 nt, Artificial Sequence
  Description of Artificial Sequence: Synthetic oligonucleotide
aacaaagaucucuuucaag

SEQ ID NO: 3273236 - RNA, 19 nt, Artificial Sequence
  Description of Artificial Sequence: Synthetic oligonucleotide
uuuucuguaacugaaacuu

SEQ ID NO: 3273237 - RNA, 19 nt, Artificial Sequence
  Description of Artificial Sequence: Synthetic oligonucleotide
uucaauuucaggaccagaa

SEQ ID NO: 3273238 - RNA, 19 nt, Artificial Sequence
  Description of Artificial Sequence: Synthetic oligonucleotide
aacguaacucaagaagagc

SEQ ID NO: 3273239 - RNA, 19 nt, Artificial Sequence
  Description of Artificial Sequence: Synthetic oligonucleotide
  modified_base (7)..(7): a, c, u, g, unknown or other
aaaccgngagaaugguaac

SEQ ID NO: 3273240 - RNA, 19 nt, Artificial Sequence
  Description of Artificial Sequence: Synthetic oligonucleotide
ugggacaaccuuaauaaug

SEQ ID NO: 3273241 - RNA, 19 nt, Artificial Sequence
  Description of Artificial Sequence: Synthetic oligonucleotide
uaaauauucugccauucuc

SEQ ID NO: 3273242 - RNA, 19 nt, Artificial Sequence
  Description of Artificial Sequence: Synthetic oligonucleotide
uucauccagauuuuaaucu

SEQ ID NO: 3273243 - RNA, 19 nt, Artificial Sequence
  Description of Artificial Sequence: Synthetic oligonucleotide
ucauacucuaugcacaccu

SEQ ID NO: 3273244 - RNA, 19 nt, Artificial Sequence
  Description of Artificial Sequence: Synthetic oligonucleotide
uggauauauuucuaguuug

SEQ ID NO: 3273245 - RNA, 19 nt, Artificial Sequence
  Description of Artificial Sequence: Synthetic oligonucleotide
agugcaugaaaacagugcu

SEQ ID NO: 3273246 - RNA, 19 nt, Artificial Sequence
  Description of Artificial Sequence: Synthetic oligonucleotide
ucuuaaaggaacccuuaug

SEQ ID NO: 3273247 - RNA, 19 nt, Artificial Sequence
  Description of Artificial Sequence: Synthetic oligonucleotide
uuccagugcaugaaaacag

SEQ ID NO: 3273248 - RNA, 19 nt, Artificial Sequence
  Description of Artificial Sequence: Synthetic oligonucleotide
uguuaagccaagcucuuca

SEQ ID NO: 3273249 - RNA, 19 nt, Artificial Sequence
  Description of Artificial Sequence: Synthetic oligonucleotide
aagagagugguacuuuucu

SEQ ID NO: 3273250 - RNA, 19 nt, Artificial Sequence
  Description of Artificial Sequence: Synthetic oligonucleotide
uuaaaggaacccuuauggc

SEQ ID NO: 3273251 - RNA, 19 nt, Artificial Sequence
  Description of Artificial Sequence: Synthetic oligonucleotide
ucugaguuucuguugaaga

SEQ ID NO: 3273252 - RNA, 19 nt, Artificial Sequence
  Description of Artificial Sequence: Synthetic oligonucleotide
aaaaccuggaaggccacac

SEQ ID NO: 3273253 - RNA, 19 nt, Artificial Sequence
  Description of Artificial Sequence: Synthetic oligonucleotide
ugaagucauauaaaaugga

SEQ ID NO: 3273254 - RNA, 19 nt, Artificial Sequence
  Description of Artificial Sequence: Synthetic oligonucleotide
agaacgcaugaccacagac

SEQ ID NO: 3273255 - RNA, 19 nt, Artificial Sequence
  Description of Artificial Sequence: Synthetic oligonucleotide
  modified_base (8)..(8): a, c, u, g, unknown or other
aaaaccgngagaaugguaa

SEQ ID NO: 3273256 - RNA, 19 nt, Artificial Sequence
  Description of Artificial Sequence: Synthetic oligonucleotide
uacugagucagacagcagu

SEQ ID NO: 3273257 - RNA, 19 nt, Artificial Sequence
  Description of Artificial Sequence: Synthetic oligonucleotide
gacuggacuguauuuacag

SEQ ID NO: 3273258 - RNA, 19 nt, Artificial Sequence
  Description of Artificial Sequence: Synthetic oligonucleotide
uucaagaacguaacucaag

SEQ ID NO: 3273259 - RNA, 19 nt, Artificial Sequence
  Description of Artificial Sequence: Synthetic oligonucleotide
uuacugaggaugcugccag

SEQ ID NO: 3273260 - RNA, 19 nt, Artificial Sequence
  Description of Artificial Sequence: Synthetic oligonucleotide
cucaaauucccgcaggagc

SEQ ID NO: 3273261 - RNA, 19 nt, Artificial Sequence
  Description of Artificial Sequence: Synthetic oligonucleotide
uaaaugguagguucauacc

SEQ ID NO: 3273262 - RNA, 19 nt, Artificial Sequence
  Description of Artificial Sequence: Synthetic oligonucleotide
gagaacagauggcugagcc

SEQ ID NO: 3273263 - RNA, 19 nt, Artificial Sequence
  Description of Artificial Sequence: Synthetic oligonucleotide
uacacgaaugacuggacug

SEQ ID NO: 3273264 - RNA, 19 nt, Artificial Sequence
  Description of Artificial Sequence: Synthetic oligonucleotide
uuagagagaacaguuuuca

SEQ ID NO: 3273265 - RNA, 19 nt, Artificial Sequence
  Description of Artificial Sequence: Synthetic oligonucleotide
uugaucuuccacaucuuca

SEQ ID NO: 3273266 - RNA, 19 nt, Artificial Sequence
  Description of Artificial Sequence: Synthetic oligonucleotide
cuucgaguccuuuucaaag

SEQ ID NO: 3273267 - RNA, 19 nt, Artificial Sequence
  Description of Artificial Sequence: Synthetic oligonucleotide
agaggacucaggcucuucc

SEQ ID NO: 3273268 - RNA, 19 nt, Artificial Sequence
  Description of Artificial Sequence: Synthetic oligonucleotide
cuuucaagaacguaacuca

SEQ ID NO: 3273269 - RNA, 19 nt, Artificial Sequence
  Description of Artificial Sequence: Synthetic oligonucleotide
aguaagaugcucuaacuuu

SEQ ID NO: 3273270 - RNA, 19 nt, Artificial Sequence
  Description of Artificial Sequence: Synthetic oligonucleotide
uacucaacugcuuggaaac

SEQ ID NO: 3273271 - RNA, 19 nt, Artificial Sequence
  Description of Artificial Sequence: Synthetic oligonucleotide
uguaucguuuugaucuucc

SEQ ID NO: 3273272 - RNA, 19 nt, Artificial Sequence
  Description of Artificial Sequence: Synthetic oligonucleotide
gaagauugcugaauccugg

SEQ ID NO: 3273273 - RNA, 19 nt, Artificial Sequence
  Description of Artificial Sequence: Synthetic oligonucleotide
augacuggacuguauuuac

SEQ ID NO: 3273274 - RNA, 19 nt, Artificial Sequence
  Description of Artificial Sequence: Synthetic oligonucleotide
aggaauaagucguagggaa

SEQ ID NO: 3273275 - RNA, 19 nt, Artificial Sequence
  Description of Artificial Sequence: Synthetic oligonucleotide
aacgugauguaccuuucca

SEQ ID NO: 3273276 - RNA, 19 nt, Artificial Sequence
  Description of Artificial Sequence: Synthetic oligonucleotide
aaacuggccgcuuuagagu

SEQ ID NO: 3273277 - RNA, 19 nt, Artificial Sequence
  Description of Artificial Sequence: Synthetic oligonucleotide
ugugacuugaggacaaauc

SEQ ID NO: 3273278 - RNA, 19 nt, Artificial Sequence
  Description of Artificial Sequence: Synthetic oligonucleotide
uggaacaaagaucucuuuc

SEQ ID NO: 3273279 - RNA, 19 nt, Artificial Sequence
  Description of Artificial Sequence: Synthetic oligonucleotide
aacuggccgcuuuagagug

SEQ ID NO: 3273280 - RNA, 19 nt, Artificial Sequence
  Description of Artificial Sequence: Synthetic oligonucleotide
ucagacagcaguucauuca

SEQ ID NO: 3273281 - RNA, 19 nt, Artificial Sequence
  Description of Artificial Sequence: Synthetic oligonucleotide
acaccugcuucuuuggagg

SEQ ID NO: 3273282 - RNA, 19 nt, Artificial Sequence
  Description of Artificial Sequence: Synthetic oligonucleotide
gucgugaagaauccugugg

SEQ ID NO: 3273283 - RNA, 19 nt, Artificial Sequence
  Description of Artificial Sequence: Synthetic oligonucleotide
uucguguucucugaggugc

SEQ ID NO: 3273284 - RNA, 19 nt, Artificial Sequence
  Description of Artificial Sequence: Synthetic oligonucleotide
guaucauauuaaaugguag

SEQ ID NO: 3273285 - RNA, 19 nt, Artificial Sequence
  Description of Artificial Sequence: Synthetic oligonucleotide
uccuguuuagagagaacag

SEQ ID NO: 3273286 - RNA, 19 nt, Artificial Sequence
  Description of Artificial Sequence: Synthetic oligonucleotide
aguagaucaggcccuacug

SEQ ID NO: 3273287 - RNA, 19 nt, Artificial Sequence
  Description of Artificial Sequence: Synthetic oligonucleotide
uaaggauuaaguucguguu

SEQ ID NO: 3273288 - RNA, 19 nt, Artificial Sequence
  Description of Artificial Sequence: Synthetic oligonucleotide
uagugaguccaucucagcu

SEQ ID NO: 3273289 - RNA, 19 nt, Artificial Sequence
  Description of Artificial Sequence: Synthetic oligonucleotide
uucacuggaaacuccacuc

SEQ ID NO: 3273290 - RNA, 19 nt, Artificial Sequence
  Description of Artificial Sequence: Synthetic oligonucleotide
gaagccauaaugagguaag

SEQ ID NO: 3273291 - RNA, 19 nt, Artificial Sequence
  Description of Artificial Sequence: Synthetic oligonucleotide
uggcuuuuguuuuaagcca

SEQ ID NO: 3273292 - RNA, 19 nt, Artificial Sequence
  Description of Artificial Sequence: Synthetic oligonucleotide
cugacuauagugguuagac

SEQ ID NO: 3273293 - RNA, 19 nt, Artificial Sequence
  Description of Artificial Sequence: Synthetic oligonucleotide
guagaucaggcccuacugg

SEQ ID NO: 3273294 - RNA, 19 nt, Artificial Sequence
  Description of Artificial Sequence: Synthetic oligonucleotide
gaaucaggccaccaauaag

SEQ ID NO: 3273295 - RNA, 19 nt, Artificial Sequence
  Description of Artificial Sequence: Synthetic oligonucleotide
uauaggcccauuccagugc

SEQ ID NO: 3273296 - RNA, 19 nt, Artificial Sequence
  Description of Artificial Sequence: Synthetic oligonucleotide
aauuuuauagucaaugugc

SEQ ID NO: 3273297 - RNA, 19 nt, Artificial Sequence
  Description of Artificial Sequence: Synthetic oligonucleotide
aaaaguaaacguuaccagc

SEQ ID NO: 3273298 - RNA, 19 nt, Artificial Sequence
  Description of Artificial Sequence: Synthetic oligonucleotide
aagaaaacaauacacauca

SEQ ID NO: 3273299 - RNA, 19 nt, Artificial Sequence
  Description of Artificial Sequence: Synthetic oligonucleotide
aacguuaccagcuagguag

SEQ ID NO: 3273300 - RNA, 19 nt, Artificial Sequence
  Description of Artificial Sequence: Synthetic oligonucleotide
uauuugaucgcaaaggccg

SEQ ID NO: 3273301 - RNA, 19 nt, Artificial Sequence
  Description of Artificial Sequence: Synthetic oligonucleotide
aaaggaaacaauuagcaca

SEQ ID NO: 3273302 - RNA, 19 nt, Artificial Sequence
  Description of Artificial Sequence: Synthetic oligonucleotide
aaacaauuagcacaauuac

SEQ ID NO: 3273303 - RNA, 19 nt, Artificial Sequence
  Description of Artificial Sequence: Synthetic oligonucleotide
agcacaauuacuuuagacc

SEQ ID NO: 3273304 - RNA, 19 nt, Artificial Sequence
  Description of Artificial Sequence: Synthetic oligonucleotide
uuaacaaggaauuaaaagu

SEQ ID NO: 3273305 - RNA, 19 nt, Artificial Sequence
  Description of Artificial Sequence: Synthetic oligonucleotide
aauuuaacuacccuuuguc

SEQ ID NO: 3273306 - RNA, 19 nt, Artificial Sequence
  Description of Artificial Sequence: Synthetic oligonucleotide
auuacuuuagaccuaauug

SEQ ID NO: 3273307 - RNA, 19 nt, Artificial Sequence
  Description of Artificial Sequence: Synthetic oligonucleotide
aaaacuaaggaugucauug

SEQ ID NO: 3273308 - RNA, 19 nt, Artificial Sequence
  Description of Artificial Sequence: Synthetic oligonucleotide
aaauuuuauagucaaugug

SEQ ID NO: 3273309 - RNA, 19 nt, Artificial Sequence
  Description of Artificial Sequence: Synthetic oligonucleotide
gaauuguagauucauagcc

SEQ ID NO: 3273310 - RNA, 19 nt, Artificial Sequence
  Description of Artificial Sequence: Synthetic oligonucleotide
uaaacuaaauuuuauaguc

SEQ ID NO: 3273311 - RNA, 19 nt, Artificial Sequence
  Description of Artificial Sequence: Synthetic oligonucleotide
uaaguuauuaauuuaacua

SEQ ID NO: 3273312 - RNA, 19 nt, Artificial Sequence
  Description of Artificial Sequence: Synthetic oligonucleotide
caaaacucagauaagaaac

SEQ ID NO: 3273313 - RNA, 19 nt, Artificial Sequence
  Description of Artificial Sequence: Synthetic oligonucleotide
aaacuaaggaugucauugc

SEQ ID NO: 3273314 - RNA, 19 nt, Artificial Sequence
  Description of Artificial Sequence: Synthetic oligonucleotide
uggaauuguagauucauag

SEQ ID NO: 3273315 - RNA, 19 nt, Artificial Sequence
  Description of Artificial Sequence: Synthetic oligonucleotide
auuuaacuacccuuugucc

SEQ ID NO: 3273316 - RNA, 19 nt, Artificial Sequence
  Description of Artificial Sequence: Synthetic oligonucleotide
aagaccacuacauccuacc

SEQ ID NO: 3273317 - RNA, 19 nt, Artificial Sequence
  Description of Artificial Sequence: Synthetic oligonucleotide
agucauaucugguaguucg

SEQ ID NO: 3273318 - RNA, 19 nt, Artificial Sequence
  Description of Artificial Sequence: Synthetic oligonucleotide
auacacaucauccaaaacu

SEQ ID NO: 3273319 - RNA, 19 nt, Artificial Sequence
  Description of Artificial Sequence: Synthetic oligonucleotide
cuugaagcgacuuacacac

SEQ ID NO: 3273320 - RNA, 19 nt, Artificial Sequence
  Description of Artificial Sequence: Synthetic oligonucleotide
cacauguaguauuugaucg

SEQ ID NO: 3273321 - RNA, 19 nt, Artificial Sequence
  Description of Artificial Sequence: Synthetic oligonucleotide
aaaaguuuaacuggucuuc

SEQ ID NO: 3273322 - RNA, 19 nt, Artificial Sequence
  Description of Artificial Sequence: Synthetic oligonucleotide
uaaaaguaaacguuaccag

SEQ ID NO: 3273323 - RNA, 19 nt, Artificial Sequence
  Description of Artificial Sequence: Synthetic oligonucleotide
aggaauuaaaaguaaacgu

SEQ ID NO: 3273324 - RNA, 19 nt, Artificial Sequence
  Description of Artificial Sequence: Synthetic oligonucleotide
ugugcuacugcauaaacac

SEQ ID NO: 3273325 - RNA, 19 nt, Artificial Sequence
  Description of Artificial Sequence: Synthetic oligonucleotide
aaagaaaacaauacacauc

SEQ ID NO: 3273326 - RNA, 19 nt, Artificial Sequence
  Description of Artificial Sequence: Synthetic oligonucleotide
uuaaguuauuaauuuaacu

SEQ ID NO: 3273327 - RNA, 19 nt, Artificial Sequence
  Description of Artificial Sequence: Synthetic oligonucleotide
aacuaaauuuuauagucaa

SEQ ID NO: 3273328 - RNA, 19 nt, Artificial Sequence
  Description of Artificial Sequence: Synthetic oligonucleotide
aauacacaucauccaaaac

SEQ ID NO: 3273329 - RNA, 19 nt, Artificial Sequence
  Description of Artificial Sequence: Synthetic oligonucleotide
aauuguagauucauagccg

SEQ ID NO: 3273330 - RNA, 19 nt, Artificial Sequence
  Description of Artificial Sequence: Synthetic oligonucleotide
uucauuaaaaugcugcaaa

SEQ ID NO: 3273331 - RNA, 19 nt, Artificial Sequence
  Description of Artificial Sequence: Synthetic oligonucleotide
uucaaagcaaucuucauua

SEQ ID NO: 3273332 - RNA, 19 nt, Artificial Sequence
  Description of Artificial Sequence: Synthetic oligonucleotide
uggaauuuguaaccguugg

SEQ ID NO: 3273333 - RNA, 19 nt, Artificial Sequence
  Description of Artificial Sequence: Synthetic oligonucleotide
uuuuagaauaaauacccuc

SEQ ID NO: 3273334 - RNA, 19 nt, Artificial Sequence
  Description of Artificial Sequence: Synthetic oligonucleotide
uaguauuugaucgcaaagg

SEQ ID NO: 3273335 - RNA, 19 nt, Artificial Sequence
  Description of Artificial Sequence: Synthetic oligonucleotide
uuuaacuacccuuuguccu

SEQ ID NO: 3273336 - RNA, 19 nt, Artificial Sequence
  Description of Artificial Sequence: Synthetic oligonucleotide
uuagaauaaauacccuccc

SEQ ID NO: 3273337 - RNA, 19 nt, Artificial Sequence
  Description of Artificial Sequence: Synthetic oligonucleotide
accacuguccguuucaacg

SEQ ID NO: 3273338 - RNA, 19 nt, Artificial Sequence
  Description of Artificial Sequence: Synthetic oligonucleotide
ugauacuguaaaccgauca

SEQ ID NO: 3273339 - RNA, 19 nt, Artificial Sequence
  Description of Artificial Sequence: Synthetic oligonucleotide
ucuaagaggcuaaauucag

SEQ ID NO: 3273340 - RNA, 19 nt, Artificial Sequence
  Description of Artificial Sequence: Synthetic oligonucleotide
uauuaauuuaacuacccuu

SEQ ID NO: 3273341 - RNA, 19 nt, Artificial Sequence
  Description of Artificial Sequence: Synthetic oligonucleotide
aacaauacacaucauccaa

SEQ ID NO: 3273342 - RNA, 19 nt, Artificial Sequence
  Description of Artificial Sequence: Synthetic oligonucleotide
agaauaaauacccuccccu

SEQ ID NO: 3273343 - RNA, 19 nt, Artificial Sequence
  Description of Artificial Sequence: Synthetic oligonucleotide
auuauuuccuuucucaaau

SEQ ID NO: 3273344 - RNA, 19 nt, Artificial Sequence
  Description of Artificial Sequence: Synthetic oligonucleotide
acauguaguauuugaucgc

SEQ ID NO: 3273345 - RNA, 19 nt, Artificial Sequence
  Description of Artificial Sequence: Synthetic oligonucleotide
ucauuaaaaugcugcaaag

SEQ ID NO: 3273346 - RNA, 19 nt, Artificial Sequence
  Description of Artificial Sequence: Synthetic oligonucleotide
ucucuaagaggcuaaauuc

SEQ ID NO: 3273347 - RNA, 19 nt, Artificial Sequence
  Description of Artificial Sequence: Synthetic oligonucleotide
uaagaggcuaaauucaggu

SEQ ID NO: 3273348 - RNA, 19 nt, Artificial Sequence
  Description of Artificial Sequence: Synthetic oligonucleotide
uguaaaccgaucauuauuu

SEQ ID NO: 3273349 - RNA, 19 nt, Artificial Sequence
  Description of Artificial Sequence: Synthetic oligonucleotide
aauuacuuuagaccuaauu

SEQ ID NO: 3273350 - RNA, 19 nt, Artificial Sequence
  Description of Artificial Sequence: Synthetic oligonucleotide
aaaguaaacguuaccagcu

SEQ ID NO: 3273351 - RNA, 19 nt, Artificial Sequence
  Description of Artificial Sequence: Synthetic oligonucleotide
ugucuagagucauaucugg

SEQ ID NO: 3273352 - RNA, 19 nt, Artificial Sequence
  Description of Artificial Sequence: Synthetic oligonucleotide
accacuacauccuaccuag

SEQ ID NO: 3273353 - RNA, 19 nt, Artificial Sequence
  Description of Artificial Sequence: Synthetic oligonucleotide
aaucucugauuccuuaucu

SEQ ID NO: 3273354 - RNA, 19 nt, Artificial Sequence
  Description of Artificial Sequence: Synthetic oligonucleotide
gauaagaaacacuguuucc

SEQ ID NO: 3273355 - RNA, 19 nt, Artificial Sequence
  Description of Artificial Sequence: Synthetic oligonucleotide
uaaaccgaucauuauuucc

SEQ ID NO: 3273356 - RNA, 19 nt, Artificial Sequence
  Description of Artificial Sequence: Synthetic oligonucleotide
aauuagcacaauuacuuua

SEQ ID NO: 3273357 - RNA, 19 nt, Artificial Sequence
  Description of Artificial Sequence: Synthetic oligonucleotide
aaggaugucauugcaguuc

SEQ ID NO: 3273358 - RNA, 19 nt, Artificial Sequence
  Description of Artificial Sequence: Synthetic oligonucleotide
ugccugauacuguaaaccg

SEQ ID NO: 3273359 - RNA, 19 nt, Artificial Sequence
  Description of Artificial Sequence: Synthetic oligonucleotide
uuuauuauugccucauuuu

SEQ ID NO: 3273360 - RNA, 19 nt, Artificial Sequence
  Description of Artificial Sequence: Synthetic oligonucleotide
uguagauucauagccguag

SEQ ID NO: 3273361 - RNA, 19 nt, Artificial Sequence
  Description of Artificial Sequence: Synthetic oligonucleotide
ucucugauuccuuaucucc

SEQ ID NO: 3273362 - RNA, 19 nt, Artificial Sequence
  Description of Artificial Sequence: Synthetic oligonucleotide
ucucaaaucuucaggugag

SEQ ID NO: 3273363 - RNA, 19 nt, Artificial Sequence
  Description of Artificial Sequence: Synthetic oligonucleotide
uguuaaacuagcuggaauu

SEQ ID NO: 3273364 - RNA, 19 nt, Artificial Sequence
  Description of Artificial Sequence: Synthetic oligonucleotide
aaacacuucaaagcaaucu

SEQ ID NO: 3273365 - RNA, 19 nt, Artificial Sequence
  Description of Artificial Sequence: Synthetic oligonucleotide
auuuucauacgcuuucuca

SEQ ID NO: 3273366 - RNA, 19 nt, Artificial Sequence
  Description of Artificial Sequence: Synthetic oligonucleotide
ugcuauuucuuccuugucu

SEQ ID NO: 3273367 - RNA, 19 nt, Artificial Sequence
  Description of Artificial Sequence: Synthetic oligonucleotide
cugcauaaacacuucaaag

SEQ ID NO: 3273368 - RNA, 19 nt, Artificial Sequence
  Description of Artificial Sequence: Synthetic oligonucleotide
ucugugcuaaacuaaauuu

SEQ ID NO: 3273369 - RNA, 19 nt, Artificial Sequence
  Description of Artificial Sequence: Synthetic oligonucleotide
uaaacuggagcccaggcua

SEQ ID NO: 3273370 - RNA, 19 nt, Artificial Sequence
  Description of Artificial Sequence: Synthetic oligonucleotide
aagacuguguuuccucauc

SEQ ID NO: 3273371 - RNA, 19 nt, Artificial Sequence
  Description of Artificial Sequence: Synthetic oligonucleotide
cuuacacacaaacagcaac

SEQ ID NO: 3273372 - RNA, 19 nt, Artificial Sequence
  Description of Artificial Sequence: Synthetic oligonucleotide
aacgucuucaaucucugau

SEQ ID NO: 3273373 - RNA, 19 nt, Artificial Sequence
  Description of Artificial Sequence: Synthetic oligonucleotide
ugugcuaaacuaaauuuua

SEQ ID NO: 3273374 - RNA, 19 nt, Artificial Sequence
  Description of Artificial Sequence: Synthetic oligonucleotide
aaaccgaucauuauuuccu

SEQ ID NO: 3273375 - RNA, 19 nt, Artificial Sequence
  Description of Artificial Sequence: Synthetic oligonucleotide
auaagaaacacuguuucca

SEQ ID NO: 3273376 - RNA, 19 nt, Artificial Sequence
  Description of Artificial Sequence: Synthetic oligonucleotide
aacacuucaaagcaaucuu

SEQ ID NO: 3273377 - RNA, 19 nt, Artificial Sequence
  Description of Artificial Sequence: Synthetic oligonucleotide
uagaauaaauacccucccc

SEQ ID NO: 3273378 - RNA, 19 nt, Artificial Sequence
  Description of Artificial Sequence: Synthetic oligonucleotide
uucgugagaagucacggac

SEQ ID NO: 3273379 - RNA, 19 nt, Artificial Sequence
  Description of Artificial Sequence: Synthetic oligonucleotide
uugucuagagucauaucug

SEQ ID NO: 3273380 - RNA, 19 nt, Artificial Sequence
  Description of Artificial Sequence: Synthetic oligonucleotide
auaaguuagagaccaauuu

SEQ ID NO: 3273381 - RNA, 19 nt, Artificial Sequence
  Description of Artificial Sequence: Synthetic oligonucleotide
caguaggucuucuaaaggc

SEQ ID NO: 3273382 - RNA, 19 nt, Artificial Sequence
  Description of Artificial Sequence: Synthetic oligonucleotide
acaucauccaaaacuaagg

SEQ ID NO: 3273383 - RNA, 19 nt, Artificial Sequence
  Description of Artificial Sequence: Synthetic oligonucleotide
guaguauuugaucgcaaag

SEQ ID NO: 3273384 - RNA, 19 nt, Artificial Sequence
  Description of Artificial Sequence: Synthetic oligonucleotide
uuuucuaagucuucauuuc

SEQ ID NO: 3273385 - RNA, 19 nt, Artificial Sequence
  Description of Artificial Sequence: Synthetic oligonucleotide
aucaucacccgacaauagg

SEQ ID NO: 3273386 - RNA, 19 nt, Artificial Sequence
  Description of Artificial Sequence: Synthetic oligonucleotide
aacaauuagcacaauuacu

SEQ ID NO: 3273387 - RNA, 19 nt, Artificial Sequence
  Description of Artificial Sequence: Synthetic oligonucleotide
uccaaaacuaaggauguca

SEQ ID NO: 3273388 - RNA, 19 nt, Artificial Sequence
  Description of Artificial Sequence: Synthetic oligonucleotide
agaaaucagaaguuucgug

SEQ ID NO: 3273389 - RNA, 19 nt, Artificial Sequence
  Description of Artificial Sequence: Synthetic oligonucleotide
ucaucacccgacaauaggu

SEQ ID NO: 3273390 - RNA, 19 nt, Artificial Sequence
  Description of Artificial Sequence: Synthetic oligonucleotide
gaaacaauuagcacaauua

SEQ ID NO: 3273391 - RNA, 19 nt, Artificial Sequence
  Description of Artificial Sequence: Synthetic oligonucleotide
aaacuaaauuuuauaguca

SEQ ID NO: 3273392 - RNA, 19 nt, Artificial Sequence
  Description of Artificial Sequence: Synthetic oligonucleotide
auuguagauucauagccgu

SEQ ID NO: 3273393 - RNA, 19 nt, Artificial Sequence
  Description of Artificial Sequence: Synthetic oligonucleotide
cuacauccuaccuagucag

SEQ ID NO: 3273394 - RNA, 19 nt, Artificial Sequence
  Description of Artificial Sequence: Synthetic oligonucleotide
uaaccguuggaauuguaga

SEQ ID NO: 3273395 - RNA, 19 nt, Artificial Sequence
  Description of Artificial Sequence: Synthetic oligonucleotide
acuacauccuaccuaguca

SEQ ID NO: 3273396 - RNA, 19 nt, Artificial Sequence
  Description of Artificial Sequence: Synthetic oligonucleotide
uuuguaagcaaccagguug

SEQ ID NO: 3273397 - RNA, 19 nt, Artificial Sequence
  Description of Artificial Sequence: Synthetic oligonucleotide
aguaaugacgaucacacuc

SEQ ID NO: 3273398 - RNA, 19 nt, Artificial Sequence
  Description of Artificial Sequence: Synthetic oligonucleotide
ucauaaagcagcuucaugu

SEQ ID NO: 3273399 - RNA, 19 nt, Artificial Sequence
  Description of Artificial Sequence: Synthetic oligonucleotide
uaaagcagcuucauguugg

SEQ ID NO: 3273400 - RNA, 19 nt, Artificial Sequence
  Description of Artificial Sequence: Synthetic oligonucleotide
ucaccauccaagcacagcg

SEQ ID NO: 3273401 - RNA, 19 nt, Artificial Sequence
  Description of Artificial Sequence: Synthetic oligonucleotide
uguugaguaaugacgauca

SEQ ID NO: 3273402 - RNA, 19 nt, Artificial Sequence
  Description of Artificial Sequence: Synthetic oligonucleotide
uaagcaaccagguuguuga

SEQ ID NO: 3273403 - RNA, 19 nt, Artificial Sequence
  Description of Artificial Sequence: Synthetic oligonucleotide
gaucucaggauccucauug

SEQ ID NO: 3273404 - RNA, 19 nt, Artificial Sequence
  Description of Artificial Sequence: Synthetic oligonucleotide
guuucuaugaacaugugac

SEQ ID NO: 3273405 - RNA, 19 nt, Artificial Sequence
  Description of Artificial Sequence: Synthetic oligonucleotide
ucuguaagcgguuugcuga

SEQ ID NO: 3273406 - RNA, 19 nt, Artificial Sequence
  Description of Artificial Sequence: Synthetic oligonucleotide
auaucaagcaacgacacca

SEQ ID NO: 3273407 - RNA, 19 nt, Artificial Sequence
  Description of Artificial Sequence: Synthetic oligonucleotide
ucaagcaacgacaccagca

SEQ ID NO: 3273408 - RNA, 19 nt, Artificial Sequence
  Description of Artificial Sequence: Synthetic oligonucleotide
uggacgaaaccucagagau

SEQ ID NO: 3273409 - RNA, 19 nt, Artificial Sequence
  Description of Artificial Sequence: Synthetic oligonucleotide
uccucauugggaagcagcg

SEQ ID NO: 3273410 - RNA, 19 nt, Artificial Sequence
  Description of Artificial Sequence: Synthetic oligonucleotide
acaugugacagacgugacc

SEQ ID NO: 3273411 - RNA, 19 nt, Artificial Sequence
  Description of Artificial Sequence: Synthetic oligonucleotide
augacgaucacacucugca

SEQ ID NO: 3273412 - RNA, 19 nt, Artificial Sequence
  Description of Artificial Sequence: Synthetic oligonucleotide
auggacaggcacuuggacg

SEQ ID NO: 3273413 - RNA, 19 nt, Artificial Sequence
  Description of Artificial Sequence: Synthetic oligonucleotide
aaccucagagaucucagga

SEQ ID NO: 3273414 - RNA, 19 nt, Artificial Sequence
  Description of Artificial Sequence: Synthetic oligonucleotide
aaaccucagagaucucagg

SEQ ID NO: 3273415 - RNA, 19 nt, Artificial Sequence
  Description of Artificial Sequence: Synthetic oligonucleotide
uugcucauaaagcagcuuc

SEQ ID NO: 3273416 - RNA, 19 nt, Artificial Sequence
  Description of Artificial Sequence: Synthetic oligonucleotide
cucauugggaagcagcggg

SEQ ID NO: 3273417 - RNA, 19 nt, Artificial Sequence
  Description of Artificial Sequence: Synthetic oligonucleotide
aguccuugcucauaaagca

SEQ ID NO: 3273418 - RNA, 19 nt, Artificial Sequence
  Description of Artificial Sequence: Synthetic oligonucleotide
ucuugagccugacuucugg

SEQ ID NO: 3273419 - RNA, 19 nt, Artificial Sequence
  Description of Artificial Sequence: Synthetic oligonucleotide
aagcgguuugcugagcagc

SEQ ID NO: 3273420 - RNA, 19 nt, Artificial Sequence
  Description of Artificial Sequence: Synthetic oligonucleotide
caggauaucaagcaacgac

SEQ ID NO: 3273421 - RNA, 19 nt, Artificial Sequence
  Description of Artificial Sequence: Synthetic oligonucleotide
uccuugcucauaaagcagc

SEQ ID NO: 3273422 - RNA, 19 nt, Artificial Sequence
  Description of Artificial Sequence: Synthetic oligonucleotide
agguuguugaguaaugacg

SEQ ID NO: 3273423 - RNA, 19 nt, Artificial Sequence
  Description of Artificial Sequence: Synthetic oligonucleotide
ugccgcacgacauuagagg

SEQ ID NO: 3273424 - RNA, 19 nt, Artificial Sequence
  Description of Artificial Sequence: Synthetic oligonucleotide
gauaagcaggcugaugagg

SEQ ID NO: 3273425 - RNA, 19 nt, Artificial Sequence
  Description of Artificial Sequence: Synthetic oligonucleotide
gaagugaccauccuccuga

SEQ ID NO: 3273426 - RNA, 19 nt, Artificial Sequence
  Description of Artificial Sequence: Synthetic oligonucleotide
gugagcuggagccagacgc

SEQ ID NO: 3273427 - RNA, 19 nt, Artificial Sequence
  Description of Artificial Sequence: Synthetic oligonucleotide
uggacaggcacuuggacga

SEQ ID NO: 3273428 - RNA, 19 nt, Artificial Sequence
  Description of Artificial Sequence: Synthetic oligonucleotide
uuguaagcaaccagguugu

SEQ ID NO: 3273429 - RNA, 19 nt, Artificial Sequence
  Description of Artificial Sequence: Synthetic oligonucleotide
uuucuaugaacaugugaca

SEQ ID NO: 3273430 - RNA, 19 nt, Artificial Sequence
  Description of Artificial Sequence: Synthetic oligonucleotide
ucucaggauccucauuggg

SEQ ID NO: 3273431 - RNA, 19 nt, Artificial Sequence
  Description of Artificial Sequence: Synthetic oligonucleotide
cucugcaugguauugccag

SEQ ID NO: 3273432 - RNA, 19 nt, Artificial Sequence
  Description of Artificial Sequence: Synthetic oligonucleotide
gaacaugugacagacguga

SEQ ID NO: 3273433 - RNA, 19 nt, Artificial Sequence
  Description of Artificial Sequence: Synthetic oligonucleotide
cugccugugcucuugaggc

SEQ ID NO: 3273434 - RNA, 19 nt, Artificial Sequence
  Description of Artificial Sequence: Synthetic oligonucleotide
auaaagcagcuucauguug

SEQ ID NO: 3273435 - RNA, 19 nt, Artificial Sequence
  Description of Artificial Sequence: Synthetic oligonucleotide
ugagccugacuucugggcc

SEQ ID NO: 3273436 - RNA, 19 nt, Artificial Sequence
  Description of Artificial Sequence: Synthetic oligonucleotide
uaucaagcaacgacaccag

SEQ ID NO: 3273437 - RNA, 19 nt, Artificial Sequence
  Description of Artificial Sequence: Synthetic oligonucleotide
aaugacgaucacacucugc

SEQ ID NO: 3273438 - RNA, 19 nt, Artificial Sequence
  Description of Artificial Sequence: Synthetic oligonucleotide
uggaaucuuuguaagcaac

SEQ ID NO: 3273439 - RNA, 19 nt, Artificial Sequence
  Description of Artificial Sequence: Synthetic oligonucleotide
cuuggacgaaaccucagag

SEQ ID NO: 3273440 - RNA, 19 nt, Artificial Sequence
  Description of Artificial Sequence: Synthetic oligonucleotide
agguguuucccguuggaag

SEQ ID NO: 3273441 - RNA, 19 nt, Artificial Sequence
  Description of Artificial Sequence: Synthetic oligonucleotide
uugaguaaugacgaucaca

SEQ ID NO: 3273442 - RNA, 19 nt, Artificial Sequence
  Description of Artificial Sequence: Synthetic oligonucleotide
ugcaccaggauggacaggc

SEQ ID NO: 3273443 - RNA, 19 nt, Artificial Sequence
  Description of Artificial Sequence: Synthetic oligonucleotide
gauaucaagcaacgacacc

SEQ ID NO: 3273444 - RNA, 19 nt, Artificial Sequence
  Description of Artificial Sequence: Synthetic oligonucleotide
guccuuugcaccaggaugg

SEQ ID NO: 3273445 - RNA, 19 nt, Artificial Sequence
  Description of Artificial Sequence: Synthetic oligonucleotide
ucaggauccucauugggaa

SEQ ID NO: 3273446 - RNA, 19 nt, Artificial Sequence
  Description of Artificial Sequence: Synthetic oligonucleotide
cugaugaggucuguaagcg

SEQ ID NO: 3273447 - RNA, 19 nt, Artificial Sequence
  Description of Artificial Sequence: Synthetic oligonucleotide
cuggaggaguucuagggcc

SEQ ID NO: 3273448 - RNA, 19 nt, Artificial Sequence
  Description of Artificial Sequence: Synthetic oligonucleotide
gugaccauccuccugagga

SEQ ID NO: 3273449 - RNA, 19 nt, Artificial Sequence
  Description of Artificial Sequence: Synthetic oligonucleotide
ucgauaggcgagcugugag

SEQ ID NO: 3273450 - RNA, 19 nt, Artificial Sequence
  Description of Artificial Sequence: Synthetic oligonucleotide
agcagcuucauguuggaau

SEQ ID NO: 3273451 - RNA, 19 nt, Artificial Sequence
  Description of Artificial Sequence: Synthetic oligonucleotide
aacgaguccuugcucauaa

SEQ ID NO: 3273452 - RNA, 19 nt, Artificial Sequence
  Description of Artificial Sequence: Synthetic oligonucleotide
ugaugaggucuguaagcgg

SEQ ID NO: 3273453 - RNA, 19 nt, Artificial Sequence
  Description of Artificial Sequence: Synthetic oligonucleotide
aucaagcaacgacaccagc

SEQ ID NO: 3273454 - RNA, 19 nt, Artificial Sequence
  Description of Artificial Sequence: Synthetic oligonucleotide
uuaugucaccauccaagca

SEQ ID NO: 3273455 - RNA, 19 nt, Artificial Sequence
  Description of Artificial Sequence: Synthetic oligonucleotide
ugcucauaaagcagcuuca

SEQ ID NO: 3273456 - RNA, 19 nt, Artificial Sequence
  Description of Artificial Sequence: Synthetic oligonucleotide
aacgacaccagcagcgcgg

SEQ ID NO: 3273457 - RNA, 19 nt, Artificial Sequence
  Description of Artificial Sequence: Synthetic oligonucleotide
cuuugcaccaggauggaca

SEQ ID NO: 3273458 - RNA, 19 nt, Artificial Sequence
  Description of Artificial Sequence: Synthetic oligonucleotide
gaguccuugcucauaaagc

SEQ ID NO: 3273459 - RNA, 19 nt, Artificial Sequence
  Description of Artificial Sequence: Synthetic oligonucleotide
ugaccaacgaguccuugcu

SEQ ID NO: 3273460 - RNA, 19 nt, Artificial Sequence
  Description of Artificial Sequence: Synthetic oligonucleotide
aggauaucaagcaacgaca

SEQ ID NO: 3273461 - RNA, 19 nt, Artificial Sequence
  Description of Artificial Sequence: Synthetic oligonucleotide
uuggacgaaaccucagaga

SEQ ID NO: 3273462 - RNA, 19 nt, Artificial Sequence
  Description of Artificial Sequence: Synthetic oligonucleotide
gacuucugggccugcaaag

SEQ ID NO: 3273463 - RNA, 19 nt, Artificial Sequence
  Description of Artificial Sequence: Synthetic oligonucleotide
gacauuagagguguguguc

SEQ ID NO: 3273464 - RNA, 19 nt, Artificial Sequence
  Description of Artificial Sequence: Synthetic oligonucleotide
accaacgaguccuugcuca

SEQ ID NO: 3273465 - RNA, 19 nt, Artificial Sequence
  Description of Artificial Sequence: Synthetic oligonucleotide
agacgugaccaacgagucc

SEQ ID NO: 3273466 - RNA, 19 nt, Artificial Sequence
  Description of Artificial Sequence: Synthetic oligonucleotide
uugagccugacuucugggc

SEQ ID NO: 3273467 - RNA, 19 nt, Artificial Sequence
  Description of Artificial Sequence: Synthetic oligonucleotide
gacgaaaccucagagaucu

SEQ ID NO: 3273468 - RNA, 19 nt, Artificial Sequence
  Description of Artificial Sequence: Synthetic oligonucleotide
acagacgugaccaacgagu

SEQ ID NO: 3273469 - RNA, 19 nt, Artificial Sequence
  Description of Artificial Sequence: Synthetic oligonucleotide
uucccguuggaagugacca

SEQ ID NO: 3273470 - RNA, 19 nt, Artificial Sequence
  Description of Artificial Sequence: Synthetic oligonucleotide
aggucuguaagcgguuugc

SEQ ID NO: 3273471 - RNA, 19 nt, Artificial Sequence
  Description of Artificial Sequence: Synthetic oligonucleotide
cagcagaagcuucuggucc

SEQ ID NO: 3273472 - RNA, 19 nt, Artificial Sequence
  Description of Artificial Sequence: Synthetic oligonucleotide
gaagccacgacagugucga

SEQ ID NO: 3273473 - RNA, 19 nt, Artificial Sequence
  Description of Artificial Sequence: Synthetic oligonucleotide
ugguauugccagaauguuc

SEQ ID NO: 3273474 - RNA, 19 nt, Artificial Sequence
  Description of Artificial Sequence: Synthetic oligonucleotide
gaaucuuuguaagcaacca

SEQ ID NO: 3273475 - RNA, 19 nt, Artificial Sequence
  Description of Artificial Sequence: Synthetic oligonucleotide
ugugugucagcaugcccag

SEQ ID NO: 3273476 - RNA, 19 nt, Artificial Sequence
  Description of Artificial Sequence: Synthetic oligonucleotide
ugugagcuggagccagacg

SEQ ID NO: 3273477 - RNA, 19 nt, Artificial Sequence
  Description of Artificial Sequence: Synthetic oligonucleotide
aagcuucugguccuuugca

SEQ ID NO: 3273478 - RNA, 19 nt, Artificial Sequence
  Description of Artificial Sequence: Synthetic oligonucleotide
cuugagccugacuucuggg

SEQ ID NO: 3273479 - RNA, 19 nt, Artificial Sequence
  Description of Artificial Sequence: Synthetic oligonucleotide
ucuagggccaaggaagcca

SEQ ID NO: 3273480 - RNA, 19 nt, Artificial Sequence
  Description of Artificial Sequence: Synthetic oligonucleotide
uaaugacgaucacacucug

SEQ ID NO: 3273481 - RNA, 19 nt, Artificial Sequence
  Description of Artificial Sequence: Synthetic oligonucleotide
caugugacagacgugacca

SEQ ID NO: 3273482 - RNA, 19 nt, Artificial Sequence
  Description of Artificial Sequence: Synthetic oligonucleotide
ugacagacgugaccaacga

SEQ ID NO: 3273483 - RNA, 19 nt, Artificial Sequence
  Description of Artificial Sequence: Synthetic oligonucleotide
acacucugcaugguauugc

SEQ ID NO: 3273484 - RNA, 19 nt, Artificial Sequence
  Description of Artificial Sequence: Synthetic oligonucleotide
ugcccagcaggauaucaag

SEQ ID NO: 3273485 - RNA, 19 nt, Artificial Sequence
  Description of Artificial Sequence: Synthetic oligonucleotide
ugcguguccccucuugagc

SEQ ID NO: 3273486 - RNA, 19 nt, Artificial Sequence
  Description of Artificial Sequence: Synthetic oligonucleotide
ucagcagaagcuucugguc

SEQ ID NO: 3273487 - RNA, 19 nt, Artificial Sequence
  Description of Artificial Sequence: Synthetic oligonucleotide
uccagguguuucccguugg

SEQ ID NO: 3273488 - RNA, 19 nt, Artificial Sequence
  Description of Artificial Sequence: Synthetic oligonucleotide
uuguugaguaaugacgauc

SEQ ID NO: 3273489 - RNA, 19 nt, Artificial Sequence
  Description of Artificial Sequence: Synthetic oligonucleotide
cagcaggauaucaagcaac

SEQ ID NO: 3273490 - RNA, 19 nt, Artificial Sequence
  Description of Artificial Sequence: Synthetic oligonucleotide
auaagcaggcugaugaggu

SEQ ID NO: 3273491 - RNA, 19 nt, Artificial Sequence
  Description of Artificial Sequence: Synthetic oligonucleotide
gguccuuugcaccaggaug

SEQ ID NO: 3273492 - RNA, 19 nt, Artificial Sequence
  Description of Artificial Sequence: Synthetic oligonucleotide
cacgacagugucgauaggc

SEQ ID NO: 3273493 - RNA, 19 nt, Artificial Sequence
  Description of Artificial Sequence: Synthetic oligonucleotide
acagugucgauaggcgagc

SEQ ID NO: 3273494 - RNA, 19 nt, Artificial Sequence
  Description of Artificial Sequence: Synthetic oligonucleotide
caaggaagccacgacagug

SEQ ID NO: 3273495 - RNA, 19 nt, Artificial Sequence
  Description of Artificial Sequence: Synthetic oligonucleotide
aacaugugacagacgugac

SEQ ID NO: 3273496 - RNA, 19 nt, Artificial Sequence
  Description of Artificial Sequence: Synthetic oligonucleotide
auuuaacacaaguauauac

SEQ ID NO: 3273497 - RNA, 19 nt, Artificial Sequence
  Description of Artificial Sequence: Synthetic oligonucleotide
acaguauagaguuuugacc

SEQ ID NO: 3273498 - RNA, 19 nt, Artificial Sequence
  Description of Artificial Sequence: Synthetic oligonucleotide
aaucuauagugacacacgg

SEQ ID NO: 3273499 - RNA, 19 nt, Artificial Sequence
  Description of Artificial Sequence: Synthetic oligonucleotide
uuuaacacaaguauauaca

SEQ ID NO: 3273500 - RNA, 19 nt, Artificial Sequence
  Description of Artificial Sequence: Synthetic oligonucleotide
uaauucauucacuauaugc

SEQ ID NO: 3273501 - RNA, 19 nt, Artificial Sequence
  Description of Artificial Sequence: Synthetic oligonucleotide
aauaaccuaugucaguagg

SEQ ID NO: 3273502 - RNA, 19 nt, Artificial Sequence
  Description of Artificial Sequence: Synthetic oligonucleotide
augcaugugaaauacauuc

SEQ ID NO: 3273503 - RNA, 19 nt, Artificial Sequence
  Description of Artificial Sequence: Synthetic oligonucleotide
aacucaauaacucccuuuc

SEQ ID NO: 3273504 - RNA, 19 nt, Artificial Sequence
  Description of Artificial Sequence: Synthetic oligonucleotide
aacuaggagauauacuaac

SEQ ID NO: 3273505 - RNA, 19 nt, Artificial Sequence
  Description of Artificial Sequence: Synthetic oligonucleotide
ucuauagugacacacggga

SEQ ID NO: 3273506 - RNA, 19 nt, Artificial Sequence
  Description of Artificial Sequence: Synthetic oligonucleotide
gaaaugaccacugugagug

SEQ ID NO: 3273507 - RNA, 19 nt, Artificial Sequence
  Description of Artificial Sequence: Synthetic oligonucleotide
uuuaaacgcauacagaguc

SEQ ID NO: 3273508 - RNA, 19 nt, Artificial Sequence
  Description of Artificial Sequence: Synthetic oligonucleotide
uuugaacucaauaacuccc

SEQ ID NO: 3273509 - RNA, 19 nt, Artificial Sequence
  Description of Artificial Sequence: Synthetic oligonucleotide
ucauauaggugucacauca

SEQ ID NO: 3273510 - RNA, 19 nt, Artificial Sequence
  Description of Artificial Sequence: Synthetic oligonucleotide
uuucauagguucuuuaaag

SEQ ID NO: 3273511 - RNA, 19 nt, Artificial Sequence
  Description of Artificial Sequence: Synthetic oligonucleotide
aaauuaccaacucuuuauc

SEQ ID NO: 3273512 - RNA, 19 nt, Artificial Sequence
  Description of Artificial Sequence: Synthetic oligonucleotide
aacaggaggacaaauuacc

SEQ ID NO: 3273513 - RNA, 19 nt, Artificial Sequence
  Description of Artificial Sequence: Synthetic oligonucleotide
uguaacuagccaaucaacc

SEQ ID NO: 3273514 - RNA, 19 nt, Artificial Sequence
  Description of Artificial Sequence: Synthetic oligonucleotide
gaaaaguauuuucuaaaag

SEQ ID NO: 3273515 - RNA, 19 nt, Artificial Sequence
  Description of Artificial Sequence: Synthetic oligonucleotide
cauuccaccaguuucagag

SEQ ID NO: 3273516 - RNA, 19 nt, Artificial Sequence
  Description of Artificial Sequence: Synthetic oligonucleotide
aacuuugacaaucuaugug

SEQ ID NO: 3273517 - RNA, 19 nt, Artificial Sequence
  Description of Artificial Sequence: Synthetic oligonucleotide
uauacuuacaaggauaggu

SEQ ID NO: 3273518 - RNA, 19 nt, Artificial Sequence
  Description of Artificial Sequence: Synthetic oligonucleotide
accacugugagugauaucg

SEQ ID NO: 3273519 - RNA, 19 nt, Artificial Sequence
  Description of Artificial Sequence: Synthetic oligonucleotide
uguauuuaauaaaccaucu

SEQ ID NO: 3273520 - RNA, 19 nt, Artificial Sequence
  Description of Artificial Sequence: Synthetic oligonucleotide
  modified_base (6)..(6): a, c, u, g, unknown or other
aacugnuuuccccacauca

SEQ ID NO: 3273521 - RNA, 19 nt, Artificial Sequence
  Description of Artificial Sequence: Synthetic oligonucleotide
uucauagguucuuuaaagg

SEQ ID NO: 3273522 - RNA, 19 nt, Artificial Sequence
  Description of Artificial Sequence: Synthetic oligonucleotide
ugucuuaggagacagacau

SEQ ID NO: 3273523 - RNA, 19 nt, Artificial Sequence
  Description of Artificial Sequence: Synthetic oligonucleotide
agaagaaccgaguaacagg

SEQ ID NO: 3273524 - RNA, 19 nt, Artificial Sequence
  Description of Artificial Sequence: Synthetic oligonucleotide
  modified_base (15)..(15): a, c, u, g, unknown or other
uaaauuuucaacugnuuuc

SEQ ID NO: 3273525 - RNA, 19 nt, Artificial Sequence
  Description of Artificial Sequence: Synthetic oligonucleotide
guaaauguaacucugccca

SEQ ID NO: 3273526 - RNA, 19 nt, Artificial Sequence
  Description of Artificial Sequence: Synthetic oligonucleotide
ugcggaaugaaucacuagc

SEQ ID NO: 3273527 - RNA, 19 nt, Artificial Sequence
  Description of Artificial Sequence: Synthetic oligonucleotide
auguguuuaagacuaaaug

SEQ ID NO: 3273528 - RNA, 19 nt, Artificial Sequence
  Description of Artificial Sequence: Synthetic oligonucleotide
uaggaaauggaauugaaua

SEQ ID NO: 3273529 - RNA, 19 nt, Artificial Sequence
  Description of Artificial Sequence: Synthetic oligonucleotide
uccucugaaguccauaaag

SEQ ID NO: 3273530 - RNA, 19 nt, Artificial Sequence
  Description of Artificial Sequence: Synthetic oligonucleotide
gaggaauuaaauuuucaac

SEQ ID NO: 3273531 - RNA, 19 nt, Artificial Sequence
  Description of Artificial Sequence: Synthetic oligonucleotide
acaauauacaugcauguga

SEQ ID NO: 3273532 - RNA, 19 nt, Artificial Sequence
  Description of Artificial Sequence: Synthetic oligonucleotide
uuggaagcuacauauauaa

SEQ ID NO: 3273533 - RNA, 19 nt, Artificial Sequence
  Description of Artificial Sequence: Synthetic oligonucleotide
gauaucgccauacacacga

SEQ ID NO: 3273534 - RNA, 19 nt, Artificial Sequence
  Description of Artificial Sequence: Synthetic oligonucleotide
auuuaagcaggaaaugagc

SEQ ID NO: 3273535 - RNA, 19 nt, Artificial Sequence
  Description of Artificial Sequence: Synthetic oligonucleotide
aggauuguaaacuauguau

SEQ ID NO: 3273536 - RNA, 19 nt, Artificial Sequence
  Description of Artificial Sequence: Synthetic oligonucleotide
  modified_base (11)..(11): a, c, u, g, unknown or other
uuuucaacugnuuucccca

SEQ ID NO: 3273537 - RNA, 19 nt, Artificial Sequence
  Description of Artificial Sequence: Synthetic oligonucleotide
acuauaugcaguucaaaca

SEQ ID NO: 3273538 - RNA, 19 nt, Artificial Sequence
  Description of Artificial Sequence: Synthetic oligonucleotide
auauuacacaaacuuugac

SEQ ID NO: 3273539 - RNA, 19 nt, Artificial Sequence
  Description of Artificial Sequence: Synthetic oligonucleotide
gaagaaucuauagugacac

SEQ ID NO: 3273540 - RNA, 19 nt, Artificial Sequence
  Description of Artificial Sequence: Synthetic oligonucleotide
agccaaucaaccaacauac

SEQ ID NO: 3273541 - RNA, 19 nt, Artificial Sequence
  Description of Artificial Sequence: Synthetic oligonucleotide
cagaaagcuagcuaucugg

SEQ ID NO: 3273542 - RNA, 19 nt, Artificial Sequence
  Description of Artificial Sequence: Synthetic oligonucleotide
ucauagguucuuuaaagga

SEQ ID NO: 3273543 - RNA, 19 nt, Artificial Sequence
  Description of Artificial Sequence: Synthetic oligonucleotide
uguauuuauucacggaccu

SEQ ID NO: 3273544 - RNA, 19 nt, Artificial Sequence
  Description of Artificial Sequence: Synthetic oligonucleotide
auaggugucacaucauguc

SEQ ID NO: 3273545 - RNA, 19 nt, Artificial Sequence
  Description of Artificial Sequence: Synthetic oligonucleotide
aauaacucccuuucuauuu

SEQ ID NO: 3273546 - RNA, 19 nt, Artificial Sequence
  Description of Artificial Sequence: Synthetic oligonucleotide
uauucacggaccuugcucc

SEQ ID NO: 3273547 - RNA, 19 nt, Artificial Sequence
  Description of Artificial Sequence: Synthetic oligonucleotide
ucacuuuugaaagagcccc

SEQ ID NO: 3273548 - RNA, 19 nt, Artificial Sequence
  Description of Artificial Sequence: Synthetic oligonucleotide
uuuugauuccuccucaaau

SEQ ID NO: 3273549 - RNA, 19 nt, Artificial Sequence
  Description of Artificial Sequence: Synthetic oligonucleotide
aaaauacaucagcuuguuc

SEQ ID NO: 3273550 - RNA, 19 nt, Artificial Sequence
  Description of Artificial Sequence: Synthetic oligonucleotide
ucuuaggagacagacaucu

SEQ ID NO: 3273551 - RNA, 19 nt, Artificial Sequence
  Description of Artificial Sequence: Synthetic oligonucleotide
aaacuuugacaaucuaugu

SEQ ID NO: 3273552 - RNA, 19 nt, Artificial Sequence
  Description of Artificial Sequence: Synthetic oligonucleotide
aucauuauaaauacaauau

SEQ ID NO: 3273553 - RNA, 19 nt, Artificial Sequence
  Description of Artificial Sequence: Synthetic oligonucleotide
uauagucaccacaugguga

SEQ ID NO: 3273554 - RNA, 19 nt, Artificial Sequence
  Description of Artificial Sequence: Synthetic oligonucleotide
gacaguauagaguuuugac

SEQ ID NO: 3273555 - RNA, 19 nt, Artificial Sequence
  Description of Artificial Sequence: Synthetic oligonucleotide
aagaggcuauguuucacag

SEQ ID NO: 3273556 - RNA, 19 nt, Artificial Sequence
  Description of Artificial Sequence: Synthetic oligonucleotide
ugcuuugaacucaauaacu

SEQ ID NO: 3273557 - RNA, 19 nt, Artificial Sequence
  Description of Artificial Sequence: Synthetic oligonucleotide
auacuaacauuuaagcagg

SEQ ID NO: 3273558 - RNA, 19 nt, Artificial Sequence
  Description of Artificial Sequence: Synthetic oligonucleotide
uacuuacaaggauaggucc

SEQ ID NO: 3273559 - RNA, 19 nt, Artificial Sequence
  Description of Artificial Sequence: Synthetic oligonucleotide
augucaguaggcaaaagac

SEQ ID NO: 3273560 - RNA, 19 nt, Artificial Sequence
  Description of Artificial Sequence: Synthetic oligonucleotide
uuugaaagagccccaacau

SEQ ID NO: 3273561 - RNA, 19 nt, Artificial Sequence
  Description of Artificial Sequence: Synthetic oligonucleotide
acaaggauagguccaaaug

SEQ ID NO: 3273562 - RNA, 19 nt, Artificial Sequence
  Description of Artificial Sequence: Synthetic oligonucleotide
uaggucuuuauacuuacaa

SEQ ID NO: 3273563 - RNA, 19 nt, Artificial Sequence
  Description of Artificial Sequence: Synthetic oligonucleotide
uauaggugucacaucaugu

SEQ ID NO: 3273564 - RNA, 19 nt, Artificial Sequence
  Description of Artificial Sequence: Synthetic oligonucleotide
caguauagaguuuugacca

SEQ ID NO: 3273565 - RNA, 19 nt, Artificial Sequence
  Description of Artificial Sequence: Synthetic oligonucleotide
aaacaugacagcauuuuca

SEQ ID NO: 3273566 - RNA, 19 nt, Artificial Sequence
  Description of Artificial Sequence: Synthetic oligonucleotide
ugucaguaggcaaaagaca

SEQ ID NO: 3273567 - RNA, 19 nt, Artificial Sequence
  Description of Artificial Sequence: Synthetic oligonucleotide
aguuucagaggugacaauc

SEQ ID NO: 3273568 - RNA, 19 nt, Artificial Sequence
  Description of Artificial Sequence: Synthetic oligonucleotide
acagggaguagucuccagc

SEQ ID NO: 3273569 - RNA, 19 nt, Artificial Sequence
  Description of Artificial Sequence: Synthetic oligonucleotide
auaacugccuaucaaugcu

SEQ ID NO: 3273570 - RNA, 19 nt, Artificial Sequence
  Description of Artificial Sequence: Synthetic oligonucleotide
aaaccaagagacaguauag

SEQ ID NO: 3273571 - RNA, 19 nt, Artificial Sequence
  Description of Artificial Sequence: Synthetic oligonucleotide
uugcuuugaacucaauaac

SEQ ID NO: 3273572 - RNA, 19 nt, Artificial Sequence
  Description of Artificial Sequence: Synthetic oligonucleotide
aguccauaaaguaaacccg

SEQ ID NO: 3273573 - RNA, 19 nt, Artificial Sequence
  Description of Artificial Sequence: Synthetic oligonucleotide
cauguauuuuaauauuuuc

SEQ ID NO: 3273574 - RNA, 19 nt, Artificial Sequence
  Description of Artificial Sequence: Synthetic oligonucleotide
uucgccgaagucuacacug

SEQ ID NO: 3273575 - RNA, 19 nt, Artificial Sequence
  Description of Artificial Sequence: Synthetic oligonucleotide
caaacuugguucuuuguug

SEQ ID NO: 3273576 - RNA, 19 nt, Artificial Sequence
  Description of Artificial Sequence: Synthetic oligonucleotide
acaaucuauguguuuaaga

SEQ ID NO: 3273577 - RNA, 19 nt, Artificial Sequence
  Description of Artificial Sequence: Synthetic oligonucleotide
uauguguuuaagacuaaau

SEQ ID NO: 3273578 - RNA, 19 nt, Artificial Sequence
  Description of Artificial Sequence: Synthetic oligonucleotide
uugaauaacugccuaucaa

SEQ ID NO: 3273579 - RNA, 19 nt, Artificial Sequence
  Description of Artificial Sequence: Synthetic oligonucleotide
uaacuagccaaucaaccaa

SEQ ID NO: 3273580 - RNA, 19 nt, Artificial Sequence
  Description of Artificial Sequence: Synthetic oligonucleotide
uuugauuccuccucaaaua

SEQ ID NO: 3273581 - RNA, 19 nt, Artificial Sequence
  Description of Artificial Sequence: Synthetic oligonucleotide
aaaggauuguaaacuaugu

SEQ ID NO: 3273582 - RNA, 19 nt, Artificial Sequence
  Description of Artificial Sequence: Synthetic oligonucleotide
aggucuuuauacuuacaag

SEQ ID NO: 3273583 - RNA, 19 nt, Artificial Sequence
  Description of Artificial Sequence: Synthetic oligonucleotide
guaggcaaaagacauucug

SEQ ID NO: 3273584 - RNA, 19 nt, Artificial Sequence
  Description of Artificial Sequence: Synthetic oligonucleotide
ucaauaacucccuuucuau

SEQ ID NO: 3273585 - RNA, 19 nt, Artificial Sequence
  Description of Artificial Sequence: Synthetic oligonucleotide
uguuuaagacuaaaugcua

SEQ ID NO: 3273586 - RNA, 19 nt, Artificial Sequence
  Description of Artificial Sequence: Synthetic oligonucleotide
auacuuacaaggauagguc

SEQ ID NO: 3273587 - RNA, 19 nt, Artificial Sequence
  Description of Artificial Sequence: Synthetic oligonucleotide
auauaggugucacaucaug

SEQ ID NO: 3273588 - RNA, 19 nt, Artificial Sequence
  Description of Artificial Sequence: Synthetic oligonucleotide
auauacaugcaugugaaau

SEQ ID NO: 3273589 - RNA, 19 nt, Artificial Sequence
  Description of Artificial Sequence: Synthetic oligonucleotide
agugauaucgccauacaca

SEQ ID NO: 3273590 - RNA, 19 nt, Artificial Sequence
  Description of Artificial Sequence: Synthetic oligonucleotide
aaaagacauucugaggaug

SEQ ID NO: 3273591 - RNA, 19 nt, Artificial Sequence
  Description of Artificial Sequence: Synthetic oligonucleotide
uagaagaaccgaguaacag

SEQ ID NO: 3273592 - RNA, 19 nt, Artificial Sequence
  Description of Artificial Sequence: Synthetic oligonucleotide
aaugccuuccuaguguucu

SEQ ID NO: 3273593 - RNA, 19 nt, Artificial Sequence
  Description of Artificial Sequence: Synthetic oligonucleotide
aacuagccaaucaaccaac

SEQ ID NO: 3273594 - RNA, 19 nt, Artificial Sequence
  Description of Artificial Sequence: Synthetic oligonucleotide
augcaguucaaacaugaca

SEQ ID NO: 3273595 - RNA, 19 nt, Artificial Sequence
  Description of Artificial Sequence: Synthetic oligonucleotide
uauaugcaguucaaacaug

SEQ ID NO: 3273596 - RNA, 19 nt, Artificial Sequence
  Description of Artificial Sequence: Synthetic oligonucleotide
uuaauaauaagccuucuag

SEQ ID NO: 3273597 - RNA, 19 nt, Artificial Sequence
  Description of Artificial Sequence: Synthetic oligonucleotide
uugaaauggaaauaggucg

SEQ ID NO: 3273598 - RNA, 19 nt, Artificial Sequence
  Description of Artificial Sequence: Synthetic oligonucleotide
agauaaaacucuuugguuc

SEQ ID NO: 3273599 - RNA, 19 nt, Artificial Sequence
  Description of Artificial Sequence: Synthetic oligonucleotide
aacucuuugguucacuuuc

SEQ ID NO: 3273600 - RNA, 19 nt, Artificial Sequence
  Description of Artificial Sequence: Synthetic oligonucleotide
uauuuagacgaacauauca

SEQ ID NO: 3273601 - RNA, 19 nt, Artificial Sequence
  Description of Artificial Sequence: Synthetic oligonucleotide
aauaggucguuacagggag

SEQ ID NO: 3273602 - RNA, 19 nt, Artificial Sequence
  Description of Artificial Sequence: Synthetic oligonucleotide
aaacgggcacgauugaggc

SEQ ID NO: 3273603 - RNA, 19 nt, Artificial Sequence
  Description of Artificial Sequence: Synthetic oligonucleotide
ucaucuagaaauaaugcaa

SEQ ID NO: 3273604 - RNA, 19 nt, Artificial Sequence
  Description of Artificial Sequence: Synthetic oligonucleotide
guccauauugcuuugacag

SEQ ID NO: 3273605 - RNA, 19 nt, Artificial Sequence
  Description of Artificial Sequence: Synthetic oligonucleotide
aaguuugaagucuagaaua

SEQ ID NO: 3273606 - RNA, 19 nt, Artificial Sequence
  Description of Artificial Sequence: Synthetic oligonucleotide
ugugccacuguccagaucu

SEQ ID NO: 3273607 - RNA, 19 nt, Artificial Sequence
  Description of Artificial Sequence: Synthetic oligonucleotide
uaauaauaagccuucuagc

SEQ ID NO: 3273608 - RNA, 19 nt, Artificial Sequence
  Description of Artificial Sequence: Synthetic oligonucleotide
uuaauaaaagggaucugug

SEQ ID NO: 3273609 - RNA, 19 nt, Artificial Sequence
  Description of Artificial Sequence: Synthetic oligonucleotide
ugaaucaucaguucaacaa

SEQ ID NO: 3273610 - RNA, 19 nt, Artificial Sequence
  Description of Artificial Sequence: Synthetic oligonucleotide
ucuagaauaaaagauugcu

SEQ ID NO: 3273611 - RNA, 19 nt, Artificial Sequence
  Description of Artificial Sequence: Synthetic oligonucleotide
uccgcgaagaacuugaaga

SEQ ID NO: 3273612 - RNA, 19 nt, Artificial Sequence
  Description of Artificial Sequence: Synthetic oligonucleotide
ucaucaguucaacaaaagc

SEQ ID NO: 3273613 - RNA, 19 nt, Artificial Sequence
  Description of Artificial Sequence: Synthetic oligonucleotide
auugaaauggaaauagguc

SEQ ID NO: 3273614 - RNA, 19 nt, Artificial Sequence
  Description of Artificial Sequence: Synthetic oligonucleotide
guaaauagcucucuagcag

SEQ ID NO: 3273615 - RNA, 19 nt, Artificial Sequence
  Description of Artificial Sequence: Synthetic oligonucleotide
agcauccucacucauaaag

SEQ ID NO: 3273616 - RNA, 19 nt, Artificial Sequence
  Description of Artificial Sequence: Synthetic oligonucleotide
aauaaaagauugcuggguu

SEQ ID NO: 3273617 - RNA, 19 nt, Artificial Sequence
  Description of Artificial Sequence: Synthetic oligonucleotide
auuuagacgaacauaucac

SEQ ID NO: 3273618 - RNA, 19 nt, Artificial Sequence
  Description of Artificial Sequence: Synthetic oligonucleotide
uuggcuaugaaaugguccc

SEQ ID NO: 3273619 - RNA, 19 nt, Artificial Sequence
  Description of Artificial Sequence: Synthetic oligonucleotide
ucauaggaugacccgaggg

SEQ ID NO: 3273620 - RNA, 19 nt, Artificial Sequence
  Description of Artificial Sequence: Synthetic oligonucleotide
uuagacgaacauaucacga

SEQ ID NO: 3273621 - RNA, 19 nt, Artificial Sequence
  Description of Artificial Sequence: Synthetic oligonucleotide
uuuggguucaggacuauga

SEQ ID NO: 3273622 - RNA, 19 nt, Artificial Sequence
  Description of Artificial Sequence: Synthetic oligonucleotide
acucaucuagaaauaaugc

SEQ ID NO: 3273623 - RNA, 19 nt, Artificial Sequence
  Description of Artificial Sequence: Synthetic oligonucleotide
aagcaaguccuccauagcu

SEQ ID NO: 3273624 - RNA, 19 nt, Artificial Sequence
  Description of Artificial Sequence: Synthetic oligonucleotide
uaaauagcucucuagcaga

SEQ ID NO: 3273625 - RNA, 19 nt, Artificial Sequence
  Description of Artificial Sequence: Synthetic oligonucleotide
uauuuugugaugaucucuc

SEQ ID NO: 3273626 - RNA, 19 nt, Artificial Sequence
  Description of Artificial Sequence: Synthetic oligonucleotide
ugaaauggaaauaggucgu

SEQ ID NO: 3273627 - RNA, 19 nt, Artificial Sequence
  Description of Artificial Sequence: Synthetic oligonucleotide
uauaguuuucauuuggguu

SEQ ID NO: 3273628 - RNA, 19 nt, Artificial Sequence
  Description of Artificial Sequence: Synthetic oligonucleotide
uaauaaaagggaucugugu

SEQ ID NO: 3273629 - RNA, 19 nt, Artificial Sequence
  Description of Artificial Sequence: Synthetic oligonucleotide
uucucguugaaucaucagu

SEQ ID NO: 3273630 - RNA, 19 nt, Artificial Sequence
  Description of Artificial Sequence: Synthetic oligonucleotide
aaaacgggcacgauugagg

SEQ ID NO: 3273631 - RNA, 19 nt, Artificial Sequence
  Description of Artificial Sequence: Synthetic oligonucleotide
cucguaaacauauuuugug

SEQ ID NO: 3273632 - RNA, 19 nt, Artificial Sequence
  Description of Artificial Sequence: Synthetic oligonucleotide
caacaguucucucucaucc

SEQ ID NO: 3273633 - RNA, 19 nt, Artificial Sequence
  Description of Artificial Sequence: Synthetic oligonucleotide
ucguaaacauauuuuguga

SEQ ID NO: 3273634 - RNA, 19 nt, Artificial Sequence
  Description of Artificial Sequence: Synthetic oligonucleotide
agcucguaaacauauuuug

SEQ ID NO: 3273635 - RNA, 19 nt, Artificial Sequence
  Description of Artificial Sequence: Synthetic oligonucleotide
guauccccaaaccacauag

SEQ ID NO: 3273636 - RNA, 19 nt, Artificial Sequence
  Description of Artificial Sequence: Synthetic oligonucleotide
aacaccacuaccaugaauu

SEQ ID NO: 3273637 - RNA, 19 nt, Artificial Sequence
  Description of Artificial Sequence: Synthetic oligonucleotide
aggauugguauccccaaac

SEQ ID NO: 3273638 - RNA, 19 nt, Artificial Sequence
  Description of Artificial Sequence: Synthetic oligonucleotide
cagauugaaauggaaauag

SEQ ID NO: 3273639 - RNA, 19 nt, Artificial Sequence
  Description of Artificial Sequence: Synthetic oligonucleotide
uucuacaaaagagaggagu

SEQ ID NO: 3273640 - RNA, 19 nt, Artificial Sequence
  Description of Artificial Sequence: Synthetic oligonucleotide
aacauaucacgacucugug

SEQ ID NO: 3273641 - RNA, 19 nt, Artificial Sequence
  Description of Artificial Sequence: Synthetic oligonucleotide
aguucucucucauccauuc

SEQ ID NO: 3273642 - RNA, 19 nt, Artificial Sequence
  Description of Artificial Sequence: Synthetic oligonucleotide
auauaguuuucauuugggu

SEQ ID NO: 3273643 - RNA, 19 nt, Artificial Sequence
  Description of Artificial Sequence: Synthetic oligonucleotide
ucaauuuaaaguuggcauu

SEQ ID NO: 3273644 - RNA, 19 nt, Artificial Sequence
  Description of Artificial Sequence: Synthetic oligonucleotide
ucugucaaugccacagcag

SEQ ID NO: 3273645 - RNA, 19 nt, Artificial Sequence
  Description of Artificial Sequence: Synthetic oligonucleotide
agucuagaauaaaagauug

SEQ ID NO: 3273646 - RNA, 19 nt, Artificial Sequence
  Description of Artificial Sequence: Synthetic oligonucleotide
uccaaugguucugagcugg

SEQ ID NO: 3273647 - RNA, 19 nt, Artificial Sequence
  Description of Artificial Sequence: Synthetic oligonucleotide
ucagcagacaacuguuugc

SEQ ID NO: 3273648 - RNA, 19 nt, Artificial Sequence
  Description of Artificial Sequence: Synthetic oligonucleotide
aaauagcucucuagcagac

SEQ ID NO: 3273649 - RNA, 19 nt, Artificial Sequence
  Description of Artificial Sequence: Synthetic oligonucleotide
aggaaguuagcucguggcg

SEQ ID NO: 3273650 - RNA, 19 nt, Artificial Sequence
  Description of Artificial Sequence: Synthetic oligonucleotide
ucaaagaaaucacggcgcu

SEQ ID NO: 3273651 - RNA, 19 nt, Artificial Sequence
  Description of Artificial Sequence: Synthetic oligonucleotide
gaugaucucucccagagcu

SEQ ID NO: 3273652 - RNA, 19 nt, Artificial Sequence
  Description of Artificial Sequence: Synthetic oligonucleotide
uccagaucuucauuaauaa

SEQ ID NO: 3273653 - RNA, 19 nt, Artificial Sequence
  Description of Artificial Sequence: Synthetic oligonucleotide
augaaauggucccauacau

SEQ ID NO: 3273654 - RNA, 19 nt, Artificial Sequence
  Description of Artificial Sequence: Synthetic oligonucleotide
uuucacaucugcuucucgu

SEQ ID NO: 3273655 - RNA, 19 nt, Artificial Sequence
  Description of Artificial Sequence: Synthetic oligonucleotide
uuugucaaagcauccucac

SEQ ID NO: 3273656 - RNA, 19 nt, Artificial Sequence
  Description of Artificial Sequence: Synthetic oligonucleotide
ggaaauaggucguuacagg

SEQ ID NO: 3273657 - RNA, 19 nt, Artificial Sequence
  Description of Artificial Sequence: Synthetic oligonucleotide
uaucacgacucugugcugg

SEQ ID NO: 3273658 - RNA, 19 nt, Artificial Sequence
  Description of Artificial Sequence: Synthetic oligonucleotide
uuuucacaucugcuucucg

SEQ ID NO: 3273659 - RNA, 19 nt, Artificial Sequence
  Description of Artificial Sequence: Synthetic oligonucleotide
uagacgaacauaucacgac

SEQ ID NO: 3273660 - RNA, 19 nt, Artificial Sequence
  Description of Artificial Sequence: Synthetic oligonucleotide
cucaucuagaaauaaugca

SEQ ID NO: 3273661 - RNA, 19 nt, Artificial Sequence
  Description of Artificial Sequence: Synthetic oligonucleotide
gguaggaccgcgcagacgc

SEQ ID NO: 3273662 - RNA, 19 nt, Artificial Sequence
  Description of Artificial Sequence: Synthetic oligonucleotide
acuauggcuuucuacaaaa

SEQ ID NO: 3273663 - RNA, 19 nt, Artificial Sequence
  Description of Artificial Sequence: Synthetic oligonucleotide
uucucaauuuaaaguuggc

SEQ ID NO: 3273664 - RNA, 19 nt, Artificial Sequence
  Description of Artificial Sequence: Synthetic oligonucleotide
acagucaggcagcauggac

SEQ ID NO: 3273665 - RNA, 19 nt, Artificial Sequence
  Description of Artificial Sequence: Synthetic oligonucleotide
agacgaacauaucacgacu

SEQ ID NO: 3273666 - RNA, 19 nt, Artificial Sequence
  Description of Artificial Sequence: Synthetic oligonucleotide
uugaaucaucaguucaaca

SEQ ID NO: 3273667 - RNA, 19 nt, Artificial Sequence
  Description of Artificial Sequence: Synthetic oligonucleotide
aaagauugcuggguuuaag

SEQ ID NO: 3273668 - RNA, 19 nt, Artificial Sequence
  Description of Artificial Sequence: Synthetic oligonucleotide
uucauaggaugacccgagg

SEQ ID NO: 3273669 - RNA, 19 nt, Artificial Sequence
  Description of Artificial Sequence: Synthetic oligonucleotide
agucugucaaugccacagc

SEQ ID NO: 3273670 - RNA, 19 nt, Artificial Sequence
  Description of Artificial Sequence: Synthetic oligonucleotide
gacgggaagcucuuccagg

SEQ ID NO: 3273671 - RNA, 19 nt, Artificial Sequence
  Description of Artificial Sequence: Synthetic oligonucleotide
aaaucacggcgcuucuuug

SEQ ID NO: 3273672 - RNA, 19 nt, Artificial Sequence
  Description of Artificial Sequence: Synthetic oligonucleotide
caggaaguuagcucguggc

SEQ ID NO: 3273673 - RNA, 19 nt, Artificial Sequence
  Description of Artificial Sequence: Synthetic oligonucleotide
gauugaaauggaaauaggu

SEQ ID NO: 3273674 - RNA, 19 nt, Artificial Sequence
  Description of Artificial Sequence: Synthetic oligonucleotide
ugcuuugacaguugcacuc

SEQ ID NO: 3273675 - RNA, 19 nt, Artificial Sequence
  Description of Artificial Sequence: Synthetic oligonucleotide
aaucacggcgcuucuuugu

SEQ ID NO: 3273676 - RNA, 19 nt, Artificial Sequence
  Description of Artificial Sequence: Synthetic oligonucleotide
gcgaagaacuugaagaugg

SEQ ID NO: 3273677 - RNA, 19 nt, Artificial Sequence
  Description of Artificial Sequence: Synthetic oligonucleotide
auauuuugugaugaucucu

SEQ ID NO: 3273678 - RNA, 19 nt, Artificial Sequence
  Description of Artificial Sequence: Synthetic oligonucleotide
uuucuacaaaagagaggag

SEQ ID NO: 3273679 - RNA, 19 nt, Artificial Sequence
  Description of Artificial Sequence: Synthetic oligonucleotide
agauugaaauggaaauagg

SEQ ID NO: 3273680 - RNA, 19 nt, Artificial Sequence
  Description of Artificial Sequence: Synthetic oligonucleotide
aacaguucucucucaucca

SEQ ID NO: 3273681 - RNA, 19 nt, Artificial Sequence
  Description of Artificial Sequence: Synthetic oligonucleotide
uaggucguuacagggagag

SEQ ID NO: 3273682 - RNA, 19 nt, Artificial Sequence
  Description of Artificial Sequence: Synthetic oligonucleotide
aauuaaaguuugaagucua

SEQ ID NO: 3273683 - RNA, 19 nt, Artificial Sequence
  Description of Artificial Sequence: Synthetic oligonucleotide
aucugugccaucagcagac

SEQ ID NO: 3273684 - RNA, 19 nt, Artificial Sequence
  Description of Artificial Sequence: Synthetic oligonucleotide
aucaguucaacaaaagcaa

SEQ ID NO: 3273685 - RNA, 19 nt, Artificial Sequence
  Description of Artificial Sequence: Synthetic oligonucleotide
cauaucacgacucugugcu

SEQ ID NO: 3273686 - RNA, 19 nt, Artificial Sequence
  Description of Artificial Sequence: Synthetic oligonucleotide
ugaugccacacauugugaa

SEQ ID NO: 3273687 - RNA, 19 nt, Artificial Sequence
  Description of Artificial Sequence: Synthetic oligonucleotide
agcagacaacuguuugcgc

SEQ ID NO: 3273688 - RNA, 19 nt, Artificial Sequence
  Description of Artificial Sequence: Synthetic oligonucleotide
cucaauuuaaaguuggcau

SEQ ID NO: 3273689 - RNA, 19 nt, Artificial Sequence
  Description of Artificial Sequence: Synthetic oligonucleotide
gaugccacacauugugaac

SEQ ID NO: 3273690 - RNA, 19 nt, Artificial Sequence
  Description of Artificial Sequence: Synthetic oligonucleotide
ugaaauggucccauacaua

SEQ ID NO: 3273691 - RNA, 19 nt, Artificial Sequence
  Description of Artificial Sequence: Synthetic oligonucleotide
auaaaagauugcuggguuu

SEQ ID NO: 3273692 - RNA, 19 nt, Artificial Sequence
  Description of Artificial Sequence: Synthetic oligonucleotide
cagcagacaacuguuugcg

SEQ ID NO: 3273693 - RNA, 19 nt, Artificial Sequence
  Description of Artificial Sequence: Synthetic oligonucleotide
aucuagaaauaaugcaaaa

SEQ ID NO: 3273694 - RNA, 19 nt, Artificial Sequence
  Description of Artificial Sequence: Synthetic oligonucleotide
caucuagaaauaaugcaaa

SEQ ID NO: 3273695 - RNA, 19 nt, Artificial Sequence
  Description of Artificial Sequence: Synthetic oligonucleotide
uugucaaagcauccucacu

SEQ ID NO: 3273696 - RNA, 19 nt, Artificial Sequence
  Description of Artificial Sequence: Synthetic oligonucleotide
aaguuaaucauguagaugg

SEQ ID NO: 3273697 - RNA, 19 nt, Artificial Sequence
  Description of Artificial Sequence: Synthetic oligonucleotide
uuugacauagaaaugaaca

SEQ ID NO: 3273698 - RNA, 19 nt, Artificial Sequence
  Description of Artificial Sequence: Synthetic oligonucleotide
acaauuuugacauagaaau

SEQ ID NO: 3273699 - RNA, 19 nt, Artificial Sequence
  Description of Artificial Sequence: Synthetic oligonucleotide
uuaaggaagguacugaagc

SEQ ID NO: 3273700 - RNA, 19 nt, Artificial Sequence
  Description of Artificial Sequence: Synthetic oligonucleotide
aauguauucuagcuguuuc

SEQ ID NO: 3273701 - RNA, 19 nt, Artificial Sequence
  Description of Artificial Sequence: Synthetic oligonucleotide
agaaaugaacaauuacucc

SEQ ID NO: 3273702 - RNA, 19 nt, Artificial Sequence
  Description of Artificial Sequence: Synthetic oligonucleotide
aauuuugacauagaaauga

SEQ ID NO: 3273703 - RNA, 19 nt, Artificial Sequence
  Description of Artificial Sequence: Synthetic oligonucleotide
uuaaucauguagauggaag

SEQ ID NO: 3273704 - RNA, 19 nt, Artificial Sequence
  Description of Artificial Sequence: Synthetic oligonucleotide
aagacagccaaguuaauca

SEQ ID NO: 3273705 - RNA, 19 nt, Artificial Sequence
  Description of Artificial Sequence: Synthetic oligonucleotide
gaaaugaacaauuacucca

SEQ ID NO: 3273706 - RNA, 19 nt, Artificial Sequence
  Description of Artificial Sequence: Synthetic oligonucleotide
uuauccacgucaucgaacg

SEQ ID NO: 3273707 - RNA, 19 nt, Artificial Sequence
  Description of Artificial Sequence: Synthetic oligonucleotide
ugaacaauuacuccacuug

SEQ ID NO: 3273708 - RNA, 19 nt, Artificial Sequence
  Description of Artificial Sequence: Synthetic oligonucleotide
uguuucuucuuaaggaagg

SEQ ID NO: 3273709 - RNA, 19 nt, Artificial Sequence
  Description of Artificial Sequence: Synthetic oligonucleotide
acaguugucacuugcauag

SEQ ID NO: 3273710 - RNA, 19 nt, Artificial Sequence
  Description of Artificial Sequence: Synthetic oligonucleotide
uagaaaugaacaauuacuc

SEQ ID NO: 3273711 - RNA, 19 nt, Artificial Sequence
  Description of Artificial Sequence: Synthetic oligonucleotide
aaaugaacaauuacuccac

SEQ ID NO: 3273712 - RNA, 19 nt, Artificial Sequence
  Description of Artificial Sequence: Synthetic oligonucleotide
uucuucuuaaggaagguac

SEQ ID NO: 3273713 - RNA, 19 nt, Artificial Sequence
  Description of Artificial Sequence: Synthetic oligonucleotide
aauuacuccacuugcggca

SEQ ID NO: 3273714 - RNA, 19 nt, Artificial Sequence
  Description of Artificial Sequence: Synthetic oligonucleotide
acaauuacuccacuugcgg

SEQ ID NO: 3273715 - RNA, 19 nt, Artificial Sequence
  Description of Artificial Sequence: Synthetic oligonucleotide
auagggacggcucauguuc

SEQ ID NO: 3273716 - RNA, 19 nt, Artificial Sequence
  Description of Artificial Sequence: Synthetic oligonucleotide
auagaaaugaacaauuacu

SEQ ID NO: 3273717 - RNA, 19 nt, Artificial Sequence
  Description of Artificial Sequence: Synthetic oligonucleotide
aguggcaauguauucuagc

SEQ ID NO: 3273718 - RNA, 19 nt, Artificial Sequence
  Description of Artificial Sequence: Synthetic oligonucleotide
ucaucgaacgaacaguugu

SEQ ID NO: 3273719 - RNA, 19 nt, Artificial Sequence
  Description of Artificial Sequence: Synthetic oligonucleotide
uugaaugggagcgagagca

SEQ ID NO: 3273720 - RNA, 19 nt, Artificial Sequence
  Description of Artificial Sequence: Synthetic oligonucleotide
ucgccaaguagauuaaggg

SEQ ID NO: 3273721 - RNA, 19 nt, Artificial Sequence
  Description of Artificial Sequence: Synthetic oligonucleotide
gaacaauuacuccacuugc

SEQ ID NO: 3273722 - RNA, 19 nt, Artificial Sequence
  Description of Artificial Sequence: Synthetic oligonucleotide
ucgaagacagccaaguuaa

SEQ ID NO: 3273723 - RNA, 19 nt, Artificial Sequence
  Description of Artificial Sequence: Synthetic oligonucleotide
cauagaaaugaacaauuac

SEQ ID NO: 3273724 - RNA, 19 nt, Artificial Sequence
  Description of Artificial Sequence: Synthetic oligonucleotide
agauuaagggaccaggcca

SEQ ID NO: 3273725 - RNA, 19 nt, Artificial Sequence
  Description of Artificial Sequence: Synthetic oligonucleotide
agccaaguuaaucauguag

SEQ ID NO: 3273726 - RNA, 19 nt, Artificial Sequence
  Description of Artificial Sequence: Synthetic oligonucleotide
uauucuagcuguuucuucu

SEQ ID NO: 3273727 - RNA, 19 nt, Artificial Sequence
  Description of Artificial Sequence: Synthetic oligonucleotide
uggacugccagcugcaagg

SEQ ID NO: 3273728 - RNA, 19 nt, Artificial Sequence
  Description of Artificial Sequence: Synthetic oligonucleotide
aguagauuaagggaccagg

SEQ ID NO: 3273729 - RNA, 19 nt, Artificial Sequence
  Description of Artificial Sequence: Synthetic oligonucleotide
uaaucauguagauggaagu

SEQ ID NO: 3273730 - RNA, 19 nt, Artificial Sequence
  Description of Artificial Sequence: Synthetic oligonucleotide
ucuugaaugggagcgagag

SEQ ID NO: 3273731 - RNA, 19 nt, Artificial Sequence
  Description of Artificial Sequence: Synthetic oligonucleotide
ucauguagauggaaguggc

SEQ ID NO: 3273732 - RNA, 19 nt, Artificial Sequence
  Description of Artificial Sequence: Synthetic oligonucleotide
uagcuguuucuucuuaagg

SEQ ID NO: 3273733 - RNA, 19 nt, Artificial Sequence
  Description of Artificial Sequence: Synthetic oligonucleotide
aacaauuacuccacuugcg

SEQ ID NO: 3273734 - RNA, 19 nt, Artificial Sequence
  Description of Artificial Sequence: Synthetic oligonucleotide
uagauuaagggaccaggcc

SEQ ID NO: 3273735 - RNA, 19 nt, Artificial Sequence
  Description of Artificial Sequence: Synthetic oligonucleotide
acgaacaguugucacuugc

SEQ ID NO: 3273736 - RNA, 19 nt, Artificial Sequence
  Description of Artificial Sequence: Synthetic oligonucleotide
ugucacuugcauagggacg

SEQ ID NO: 3273737 - RNA, 19 nt, Artificial Sequence
  Description of Artificial Sequence: Synthetic oligonucleotide
uuuugacauagaaaugaac

SEQ ID NO: 3273738 - RNA, 19 nt, Artificial Sequence
  Description of Artificial Sequence: Synthetic oligonucleotide
aaucauguagauggaagug

SEQ ID NO: 3273739 - RNA, 19 nt, Artificial Sequence
  Description of Artificial Sequence: Synthetic oligonucleotide
uugacauagaaaugaacaa

SEQ ID NO: 3273740 - RNA, 19 nt, Artificial Sequence
  Description of Artificial Sequence: Synthetic oligonucleotide
ugcaagguacucaucagcu

SEQ ID NO: 3273741 - RNA, 19 nt, Artificial Sequence
  Description of Artificial Sequence: Synthetic oligonucleotide
uaaggaagguacugaagcc

SEQ ID NO: 3273742 - RNA, 19 nt, Artificial Sequence
  Description of Artificial Sequence: Synthetic oligonucleotide
aucauguagauggaagugg

SEQ ID NO: 3273743 - RNA, 19 nt, Artificial Sequence
  Description of Artificial Sequence: Synthetic oligonucleotide
aguugucacuugcauaggg

SEQ ID NO: 3273744 - RNA, 19 nt, Artificial Sequence
  Description of Artificial Sequence: Synthetic oligonucleotide
agcuguuucuucuuaagga

SEQ ID NO: 3273745 - RNA, 19 nt, Artificial Sequence
  Description of Artificial Sequence: Synthetic oligonucleotide
acaagcagcaagucgaaga

SEQ ID NO: 3273746 - RNA, 19 nt, Artificial Sequence
  Description of Artificial Sequence: Synthetic oligonucleotide
guacugaagccucggaucg

SEQ ID NO: 3273747 - RNA, 19 nt, Artificial Sequence
  Description of Artificial Sequence: Synthetic oligonucleotide
uacucaucagcuuauccac

SEQ ID NO: 3273748 - RNA, 19 nt, Artificial Sequence
  Description of Artificial Sequence: Synthetic oligonucleotide
gauguggacugccagcugc

SEQ ID NO: 3273749 - RNA, 19 nt, Artificial Sequence
  Description of Artificial Sequence: Synthetic oligonucleotide
aaugaacaauuacuccacu

SEQ ID NO: 3273750 - RNA, 19 nt, Artificial Sequence
  Description of Artificial Sequence: Synthetic oligonucleotide
ucuucuuaaggaagguacu

SEQ ID NO: 3273751 - RNA, 19 nt, Artificial Sequence
  Description of Artificial Sequence: Synthetic oligonucleotide
cuuaaggaagguacugaag

SEQ ID NO: 3273752 - RNA, 19 nt, Artificial Sequence
  Description of Artificial Sequence: Synthetic oligonucleotide
uaagggaccaggccaagga

SEQ ID NO: 3273753 - RNA, 19 nt, Artificial Sequence
  Description of Artificial Sequence: Synthetic oligonucleotide
ucuuaaggaagguacugaa

SEQ ID NO: 3273754 - RNA, 19 nt, Artificial Sequence
  Description of Artificial Sequence: Synthetic oligonucleotide
gucacuugcauagggacgg

SEQ ID NO: 3273755 - RNA, 19 nt, Artificial Sequence
  Description of Artificial Sequence: Synthetic oligonucleotide
cagcuuauccacgucaucg

SEQ ID NO: 3273756 - RNA, 19 nt, Artificial Sequence
  Description of Artificial Sequence: Synthetic oligonucleotide
acugccagcugcaagguac

SEQ ID NO: 3273757 - RNA, 19 nt, Artificial Sequence
  Description of Artificial Sequence: Synthetic oligonucleotide
uugucacuugcauagggac

SEQ ID NO: 3273758 - RNA, 19 nt, Artificial Sequence
  Description of Artificial Sequence: Synthetic oligonucleotide
caauuacuccacuugcggc

SEQ ID NO: 3273759 - RNA, 19 nt, Artificial Sequence
  Description of Artificial Sequence: Synthetic oligonucleotide
gagcacaagcagcaagucg

SEQ ID NO: 3273760 - RNA, 19 nt, Artificial Sequence
  Description of Artificial Sequence: Synthetic oligonucleotide
agcugcaagguacucauca

SEQ ID NO: 3273761 - RNA, 19 nt, Artificial Sequence
  Description of Artificial Sequence: Synthetic oligonucleotide
aagguggggauguggacug

SEQ ID NO: 3273762 - RNA, 19 nt, Artificial Sequence
  Description of Artificial Sequence: Synthetic oligonucleotide
guacucaucagcuuaucca

SEQ ID NO: 3273763 - RNA, 19 nt, Artificial Sequence
  Description of Artificial Sequence: Synthetic oligonucleotide
caauuuugacauagaaaug

SEQ ID NO: 3273764 - RNA, 19 nt, Artificial Sequence
  Description of Artificial Sequence: Synthetic oligonucleotide
cuguuucuucuuaaggaag

SEQ ID NO: 3273765 - RNA, 19 nt, Artificial Sequence
  Description of Artificial Sequence: Synthetic oligonucleotide
uggcaauguauucuagcug

SEQ ID NO: 3273766 - RNA, 19 nt, Artificial Sequence
  Description of Artificial Sequence: Synthetic oligonucleotide
aaggaagguacugaagccu

SEQ ID NO: 3273767 - RNA, 19 nt, Artificial Sequence
  Description of Artificial Sequence: Synthetic oligonucleotide
ugacauagaaaugaacaau

SEQ ID NO: 3273768 - RNA, 19 nt, Artificial Sequence
  Description of Artificial Sequence: Synthetic oligonucleotide
aagucgaagacagccaagu

SEQ ID NO: 3273769 - RNA, 19 nt, Artificial Sequence
  Description of Artificial Sequence: Synthetic oligonucleotide
aacaguugucacuugcaua

SEQ ID NO: 3273770 - RNA, 19 nt, Artificial Sequence
  Description of Artificial Sequence: Synthetic oligonucleotide
aagggaccaggccaaggag

SEQ ID NO: 3273771 - RNA, 19 nt, Artificial Sequence
  Description of Artificial Sequence: Synthetic oligonucleotide
agcagcaagucgaagacag

SEQ ID NO: 3273772 - RNA, 19 nt, Artificial Sequence
  Description of Artificial Sequence: Synthetic oligonucleotide
cuagcuguuucuucuuaag

SEQ ID NO: 3273773 - RNA, 19 nt, Artificial Sequence
  Description of Artificial Sequence: Synthetic oligonucleotide
auguauucuagcuguuucu

SEQ ID NO: 3273774 - RNA, 19 nt, Artificial Sequence
  Description of Artificial Sequence: Synthetic oligonucleotide
agcacaagcagcaagucga

SEQ ID NO: 3273775 - RNA, 19 nt, Artificial Sequence
  Description of Artificial Sequence: Synthetic oligonucleotide
ggcagggccaucuugaaug

SEQ ID NO: 3273776 - RNA, 19 nt, Artificial Sequence
  Description of Artificial Sequence: Synthetic oligonucleotide
caagcagcaagucgaagac

SEQ ID NO: 3273777 - RNA, 19 nt, Artificial Sequence
  Description of Artificial Sequence: Synthetic oligonucleotide
cuuauccacgucaucgaac

SEQ ID NO: 3273778 - RNA, 19 nt, Artificial Sequence
  Description of Artificial Sequence: Synthetic oligonucleotide
uucuuaaggaagguacuga

SEQ ID NO: 3273779 - RNA, 19 nt, Artificial Sequence
  Description of Artificial Sequence: Synthetic oligonucleotide
acugaagccucggaucgcc

SEQ ID NO: 3273780 - RNA, 19 nt, Artificial Sequence
  Description of Artificial Sequence: Synthetic oligonucleotide
aucgccaaguagauuaagg

SEQ ID NO: 3273781 - RNA, 19 nt, Artificial Sequence
  Description of Artificial Sequence: Synthetic oligonucleotide
guagauuaagggaccaggc

SEQ ID NO: 3273782 - RNA, 19 nt, Artificial Sequence
  Description of Artificial Sequence: Synthetic oligonucleotide
aggccaaggaggaaggugg

SEQ ID NO: 3273783 - RNA, 19 nt, Artificial Sequence
  Description of Artificial Sequence: Synthetic oligonucleotide
cagcaagucgaagacagcc

SEQ ID NO: 3273784 - RNA, 19 nt, Artificial Sequence
  Description of Artificial Sequence: Synthetic oligonucleotide
cacgucaucgaacgaacag

SEQ ID NO: 3273785 - RNA, 19 nt, Artificial Sequence
  Description of Artificial Sequence: Synthetic oligonucleotide
uguagauggaaguggcaau

SEQ ID NO: 3273786 - RNA, 19 nt, Artificial Sequence
  Description of Artificial Sequence: Synthetic oligonucleotide
aaguagauuaagggaccag

SEQ ID NO: 3273787 - RNA, 19 nt, Artificial Sequence
  Description of Artificial Sequence: Synthetic oligonucleotide
gaagguacugaagccucgg

SEQ ID NO: 3273788 - RNA, 19 nt, Artificial Sequence
  Description of Artificial Sequence: Synthetic oligonucleotide
caaguuaaucauguagaug

SEQ ID NO: 3273789 - RNA, 19 nt, Artificial Sequence
  Description of Artificial Sequence: Synthetic oligonucleotide
gaagacagccaaguuaauc

SEQ ID NO: 3273790 - RNA, 19 nt, Artificial Sequence
  Description of Artificial Sequence: Synthetic oligonucleotide
acagccaaguuaaucaugu

SEQ ID NO: 3273791 - RNA, 19 nt, Artificial Sequence
  Description of Artificial Sequence: Synthetic oligonucleotide
uccacgucaucgaacgaac

SEQ ID NO: 3273792 - RNA, 19 nt, Artificial Sequence
  Description of Artificial Sequence: Synthetic oligonucleotide
uccacuugcggcagggcca

SEQ ID NO: 3273793 - RNA, 19 nt, Artificial Sequence
  Description of Artificial Sequence: Synthetic oligonucleotide
cugcaagguacucaucagc

SEQ ID NO: 3273794 - RNA, 19 nt, Artificial Sequence
  Description of Artificial Sequence: Synthetic oligonucleotide
ucuagcuguuucuucuuaa

SEQ ID NO: 3273795 - RNA, 19 nt, Artificial Sequence
  Description of Artificial Sequence: Synthetic oligonucleotide
uuaagggaccaggccaagg

SEQ ID NO: 3273796 - RNA, 19 nt, Artificial Sequence
  Description of Artificial Sequence: Synthetic oligonucleotide
uccagagugaguuccaggg

SEQ ID NO: 3273797 - RNA, 19 nt, Artificial Sequence
  Description of Artificial Sequence: Synthetic oligonucleotide
uuugaggccagccuggucu

SEQ ID NO: 3273798 - RNA, 19 nt, Artificial Sequence
  Description of Artificial Sequence: Synthetic oligonucleotide
cucuguguggguuugaggc

SEQ ID NO: 3273799 - RNA, 19 nt, Artificial Sequence
  Description of Artificial Sequence: Synthetic oligonucleotide
gaucccagcacuugggagg

SEQ ID NO: 3273800 - RNA, 19 nt, Artificial Sequence
  Description of Artificial Sequence: Synthetic oligonucleotide
augucuuugaucccagcac

SEQ ID NO: 3273801 - RNA, 19 nt, Artificial Sequence
  Description of Artificial Sequence: Synthetic oligonucleotide
uggcgcaugucuuugaucc

SEQ ID NO: 3273802 - RNA, 19 nt, Artificial Sequence
  Description of Artificial Sequence: Synthetic oligonucleotide
uccaaagcuacagagaaac

SEQ ID NO: 3273803 - RNA, 19 nt, Artificial Sequence
  Description of Artificial Sequence: Synthetic oligonucleotide
uuugaucccagcacuuggg

SEQ ID NO: 3273804 - RNA, 19 nt, Artificial Sequence
  Description of Artificial Sequence: Synthetic oligonucleotide
caaagcuacagagaaaccc

SEQ ID NO: 3273805 - RNA, 19 nt, Artificial Sequence
  Description of Artificial Sequence: Synthetic oligonucleotide
uacagagaaacccugucuc

SEQ ID NO: 3273806 - RNA, 19 nt, Artificial Sequence
  Description of Artificial Sequence: Synthetic oligonucleotide
aaagcuacagagaaacccu

SEQ ID NO: 3273807 - RNA, 19 nt, Artificial Sequence
  Description of Artificial Sequence: Synthetic oligonucleotide
ugucuuugaucccagcacu

SEQ ID NO: 3273808 - RNA, 19 nt, Artificial Sequence
  Description of Artificial Sequence: Synthetic oligonucleotide
acagagaaacccugucucg

SEQ ID NO: 3273809 - RNA, 19 nt, Artificial Sequence
  Description of Artificial Sequence: Synthetic oligonucleotide
cuuugaucccagcacuugg

SEQ ID NO: 3273810 - RNA, 19 nt, Artificial Sequence
  Description of Artificial Sequence: Synthetic oligonucleotide
uggguuugaggccagccug

SEQ ID NO: 3273811 - RNA, 19 nt, Artificial Sequence
  Description of Artificial Sequence: Synthetic oligonucleotide
agccuccaaagcuacagag

SEQ ID NO: 3273812 - RNA, 19 nt, Artificial Sequence
  Description of Artificial Sequence: Synthetic oligonucleotide
ugaucccagcacuugggag

SEQ ID NO: 3273813 - RNA, 19 nt, Artificial Sequence
  Description of Artificial Sequence: Synthetic oligonucleotide
uccagggcagccuccaaag

SEQ ID NO: 3273814 - RNA, 19 nt, Artificial Sequence
  Description of Artificial Sequence: Synthetic oligonucleotide
ucucuguguggguuugagg

SEQ ID NO: 3273815 - RNA, 19 nt, Artificial Sequence
  Description of Artificial Sequence: Synthetic oligonucleotide
agugaguuccagggcagcc

SEQ ID NO: 3273816 - RNA, 19 nt, Artificial Sequence
  Description of Artificial Sequence: Synthetic oligonucleotide
ucuguguggguuugaggcc

SEQ ID NO: 3273817 - RNA, 19 nt, Artificial Sequence
  Description of Artificial Sequence: Synthetic oligonucleotide
uugaucccagcacuuggga

SEQ ID NO: 3273818 - RNA, 19 nt, Artificial Sequence
  Description of Artificial Sequence: Synthetic oligonucleotide
acuugggaggcagaggcag

SEQ ID NO: 3273819 - RNA, 19 nt, Artificial Sequence
  Description of Artificial Sequence: Synthetic oligonucleotide
agaaacccugucucgaaaa

SEQ ID NO: 3273820 - RNA, 19 nt, Artificial Sequence
  Description of Artificial Sequence: Synthetic oligonucleotide
ucuuugaucccagcacuug

SEQ ID NO: 3273821 - RNA, 19 nt, Artificial Sequence
  Description of Artificial Sequence: Synthetic oligonucleotide
caugucuuugaucccagca

SEQ ID NO: 3273822 - RNA, 19 nt, Artificial Sequence
  Description of Artificial Sequence: Synthetic oligonucleotide
aggcugauucucugugugg

SEQ ID NO: 3273823 - RNA, 19 nt, Artificial Sequence
  Description of Artificial Sequence: Synthetic oligonucleotide
gcacuugggaggcagaggc

SEQ ID NO: 3273824 - RNA, 19 nt, Artificial Sequence
  Description of Artificial Sequence: Synthetic oligonucleotide
ugaguuccagggcagccuc

SEQ ID NO: 3273825 - RNA, 19 nt, Artificial Sequence
  Description of Artificial Sequence: Synthetic oligonucleotide
aucccagcacuugggaggc

SEQ ID NO: 3273826 - RNA, 19 nt, Artificial Sequence
  Description of Artificial Sequence: Synthetic oligonucleotide
uguggguuugaggccagcc

SEQ ID NO: 3273827 - RNA, 19 nt, Artificial Sequence
  Description of Artificial Sequence: Synthetic oligonucleotide
aagcuacagagaaacccug

SEQ ID NO: 3273828 - RNA, 19 nt, Artificial Sequence
  Description of Artificial Sequence: Synthetic oligonucleotide
uucucuguguggguuugag

SEQ ID NO: 3273829 - RNA, 19 nt, Artificial Sequence
  Description of Artificial Sequence: Synthetic oligonucleotide
cagagugaguuccagggca

SEQ ID NO: 3273830 - RNA, 19 nt, Artificial Sequence
  Description of Artificial Sequence: Synthetic oligonucleotide
cuccagagugaguuccagg

SEQ ID NO: 3273831 - RNA, 19 nt, Artificial Sequence
  Description of Artificial Sequence: Synthetic oligonucleotide
caggcugauucucugugug

SEQ ID NO: 3273832 - RNA, 19 nt, Artificial Sequence
  Description of Artificial Sequence: Synthetic oligonucleotide
ggcugauucucuguguggg

SEQ ID NO: 3273833 - RNA, 19 nt, Artificial Sequence
  Description of Artificial Sequence: Synthetic oligonucleotide
cuugggaggcagaggcagg

SEQ ID NO: 3273834 - RNA, 19 nt, Artificial Sequence
  Description of Artificial Sequence: Synthetic oligonucleotide
gaggcaggcugauucucug

SEQ ID NO: 3273835 - RNA, 19 nt, Artificial Sequence
  Description of Artificial Sequence: Synthetic oligonucleotide
gauucucuguguggguuug

SEQ ID NO: 3273836 - RNA, 19 nt, Artificial Sequence
  Description of Artificial Sequence: Synthetic oligonucleotide
ggcagaggcaggcugauuc

SEQ ID NO: 3273837 - RNA, 19 nt, Artificial Sequence
  Description of Artificial Sequence: Synthetic oligonucleotide
cagccuggucuccagagug

SEQ ID NO: 3273838 - RNA, 19 nt, Artificial Sequence
  Description of Artificial Sequence: Synthetic oligonucleotide
agagaaacccugucucgaa

SEQ ID NO: 3273839 - RNA, 19 nt, Artificial Sequence
  Description of Artificial Sequence: Synthetic oligonucleotide
uuccagggcagccuccaaa

SEQ ID NO: 3273840 - RNA, 19 nt, Artificial Sequence
  Description of Artificial Sequence: Synthetic oligonucleotide
uguugguggcgcaugucuu

SEQ ID NO: 3273841 - RNA, 19 nt, Artificial Sequence
  Description of Artificial Sequence: Synthetic oligonucleotide
ugauucucuguguggguuu

SEQ ID NO: 3273842 - RNA, 19 nt, Artificial Sequence
  Description of Artificial Sequence: Synthetic oligonucleotide
ucuccagagugaguuccag

SEQ ID NO: 3273843 - RNA, 19 nt, Artificial Sequence
  Description of Artificial Sequence: Synthetic oligonucleotide
uugggaggcagaggcaggc

SEQ ID NO: 3273844 - RNA, 19 nt, Artificial Sequence
  Description of Artificial Sequence: Synthetic oligonucleotide
uguguggguuugaggccag

SEQ ID NO: 3273845 - RNA, 19 nt, Artificial Sequence
  Description of Artificial Sequence: Synthetic oligonucleotide
agcacuugggaggcagagg

SEQ ID NO: 3273846 - RNA, 19 nt, Artificial Sequence
  Description of Artificial Sequence: Synthetic oligonucleotide
agagugaguuccagggcag

SEQ ID NO: 3273847 - RNA, 19 nt, Artificial Sequence
  Description of Artificial Sequence: Synthetic oligonucleotide
gagaaacccugucucgaaa

SEQ ID NO: 3273848 - RNA, 19 nt, Artificial Sequence
  Description of Artificial Sequence: Synthetic oligonucleotide
uugguggcgcaugucuuug

SEQ ID NO: 3273849 - RNA, 19 nt, Artificial Sequence
  Description of Artificial Sequence: Synthetic oligonucleotide
ggucuccagagugaguucc

SEQ ID NO: 3273850 - RNA, 19 nt, Artificial Sequence
  Description of Artificial Sequence: Synthetic oligonucleotide
gcuacagagaaacccuguc

SEQ ID NO: 3273851 - RNA, 19 nt, Artificial Sequence
  Description of Artificial Sequence: Synthetic oligonucleotide
ggcaggcugauucucugug

SEQ ID NO: 3273852 - RNA, 19 nt, Artificial Sequence
  Description of Artificial Sequence: Synthetic oligonucleotide
gcagccuccaaagcuacag

SEQ ID NO: 3273853 - RNA, 19 nt, Artificial Sequence
  Description of Artificial Sequence: Synthetic oligonucleotide
cuacagagaaacccugucu

SEQ ID NO: 3273854 - RNA, 19 nt, Artificial Sequence
  Description of Artificial Sequence: Synthetic oligonucleotide
ccuccaaagcuacagagaa

SEQ ID NO: 3273855 - RNA, 19 nt, Artificial Sequence
  Description of Artificial Sequence: Synthetic oligonucleotide
uggguguugguggcgcaug

SEQ ID NO: 3273856 - RNA, 19 nt, Artificial Sequence
  Description of Artificial Sequence: Synthetic oligonucleotide
guguugguggcgcaugucu

SEQ ID NO: 3273857 - RNA, 19 nt, Artificial Sequence
  Description of Artificial Sequence: Synthetic oligonucleotide
agcuacagagaaacccugu

SEQ ID NO: 3273858 - RNA, 19 nt, Artificial Sequence
  Description of Artificial Sequence: Synthetic oligonucleotide
cagagaaacccugucucga

SEQ ID NO: 3273859 - RNA, 19 nt, Artificial Sequence
  Description of Artificial Sequence: Synthetic oligonucleotide
uugaggccagccuggucuc

SEQ ID NO: 3273860 - RNA, 19 nt, Artificial Sequence
  Description of Artificial Sequence: Synthetic oligonucleotide
ccaaagcuacagagaaacc

SEQ ID NO: 3273861 - RNA, 19 nt, Artificial Sequence
  Description of Artificial Sequence: Synthetic oligonucleotide
gagugaguuccagggcagc

SEQ ID NO: 3273862 - RNA, 19 nt, Artificial Sequence
  Description of Artificial Sequence: Synthetic oligonucleotide
cagcacuugggaggcagag

SEQ ID NO: 3273863 - RNA, 19 nt, Artificial Sequence
  Description of Artificial Sequence: Synthetic oligonucleotide
aguuccagggcagccucca

SEQ ID NO: 3273864 - RNA, 19 nt, Artificial Sequence
  Description of Artificial Sequence: Synthetic oligonucleotide
aggcaggcugauucucugu

SEQ ID NO: 3273865 - RNA, 19 nt, Artificial Sequence
  Description of Artificial Sequence: Synthetic oligonucleotide
agaggcaggcugauucucu

SEQ ID NO: 3273866 - RNA, 19 nt, Artificial Sequence
  Description of Artificial Sequence: Synthetic oligonucleotide
ggguuugaggccagccugg

SEQ ID NO: 3273867 - RNA, 19 nt, Artificial Sequence
  Description of Artificial Sequence: Synthetic oligonucleotide
cuguguggguuugaggcca

SEQ ID NO: 3273868 - RNA, 19 nt, Artificial Sequence
  Description of Artificial Sequence: Synthetic oligonucleotide
uggucuccagagugaguuc

SEQ ID NO: 3273869 - RNA, 19 nt, Artificial Sequence
  Description of Artificial Sequence: Synthetic oligonucleotide
gccagccuggucuccagag

SEQ ID NO: 3273870 - RNA, 19 nt, Artificial Sequence
  Description of Artificial Sequence: Synthetic oligonucleotide
gggaggcagaggcaggcug

SEQ ID NO: 3273871 - RNA, 19 nt, Artificial Sequence
  Description of Artificial Sequence: Synthetic oligonucleotide
guggcgcaugucuuugauc

SEQ ID NO: 3273872 - RNA, 19 nt, Artificial Sequence
  Description of Artificial Sequence: Synthetic oligonucleotide
ccagagugaguuccagggc

SEQ ID NO: 3273873 - RNA, 19 nt, Artificial Sequence
  Description of Artificial Sequence: Synthetic oligonucleotide
ugguggcgcaugucuuuga

SEQ ID NO: 3273874 - RNA, 19 nt, Artificial Sequence
  Description of Artificial Sequence: Synthetic oligonucleotide
guuugaggccagccugguc

SEQ ID NO: 3273875 - RNA, 19 nt, Artificial Sequence
  Description of Artificial Sequence: Synthetic oligonucleotide
cuccaaagcuacagagaaa

SEQ ID NO: 3273876 - RNA, 19 nt, Artificial Sequence
  Description of Artificial Sequence: Synthetic oligonucleotide
guggguuugaggccagccu

SEQ ID NO: 3273877 - RNA, 19 nt, Artificial Sequence
  Description of Artificial Sequence: Synthetic oligonucleotide
cagggcagccuccaaagcu

SEQ ID NO: 3273878 - RNA, 19 nt, Artificial Sequence
  Description of Artificial Sequence: Synthetic oligonucleotide
gaguuccagggcagccucc

SEQ ID NO: 3273879 - RNA, 19 nt, Artificial Sequence
  Description of Artificial Sequence: Synthetic oligonucleotide
agggcagccuccaaagcua

SEQ ID NO: 3273880 - RNA, 19 nt, Artificial Sequence
  Description of Artificial Sequence: Synthetic oligonucleotide
cagaggcaggcugauucuc

SEQ ID NO: 3273881 - RNA, 19 nt, Artificial Sequence
  Description of Artificial Sequence: Synthetic oligonucleotide
aggccagccuggucuccag

SEQ ID NO: 3273882 - RNA, 19 nt, Artificial Sequence
  Description of Artificial Sequence: Synthetic oligonucleotide
cuggucuccagagugaguu

SEQ ID NO: 3273883 - RNA, 19 nt, Artificial Sequence
  Description of Artificial Sequence: Synthetic oligonucleotide
ggcgcaugucuuugauccc

SEQ ID NO: 3273884 - RNA, 19 nt, Artificial Sequence
  Description of Artificial Sequence: Synthetic oligonucleotide
ugaggccagccuggucucc

SEQ ID NO: 3273885 - RNA, 19 nt, Artificial Sequence
  Description of Artificial Sequence: Synthetic oligonucleotide
gcaugucuuugaucccagc

SEQ ID NO: 3273886 - RNA, 19 nt, Artificial Sequence
  Description of Artificial Sequence: Synthetic oligonucleotide
ugggaggcagaggcaggcu

SEQ ID NO: 3273887 - RNA, 19 nt, Artificial Sequence
  Description of Artificial Sequence: Synthetic oligonucleotide
cacuugggaggcagaggca

SEQ ID NO: 3273888 - RNA, 19 nt, Artificial Sequence
  Description of Artificial Sequence: Synthetic oligonucleotide
cagccuccaaagcuacaga

SEQ ID NO: 3273889 - RNA, 19 nt, Artificial Sequence
  Description of Artificial Sequence: Synthetic oligonucleotide
auucucuguguggguuuga

SEQ ID NO: 3273890 - RNA, 19 nt, Artificial Sequence
  Description of Artificial Sequence: Synthetic oligonucleotide
gaggccagccuggucucca

SEQ ID NO: 3273891 - RNA, 19 nt, Artificial Sequence
  Description of Artificial Sequence: Synthetic oligonucleotide
guugguggcgcaugucuuu

SEQ ID NO: 3273892 - RNA, 19 nt, Artificial Sequence
  Description of Artificial Sequence: Synthetic oligonucleotide
gccuggucuccagagugag

SEQ ID NO: 3273893 - RNA, 19 nt, Artificial Sequence
  Description of Artificial Sequence: Synthetic oligonucleotide
agccuggucuccagaguga

SEQ ID NO: 3273894 - RNA, 19 nt, Artificial Sequence
  Description of Artificial Sequence: Synthetic oligonucleotide
gccuccaaagcuacagaga

SEQ ID NO: 3273895 - RNA, 19 nt, Artificial Sequence
  Description of Artificial Sequence: Synthetic oligonucleotide
ggaggcagaggcaggcuga

SEQ ID NO: 3273896 - RNA, 19 nt, Artificial Sequence
  Description of Artificial Sequence: Synthetic oligonucleotide
ucuuaaauaagcuagaugg

SEQ ID NO: 3273897 - RNA, 19 nt, Artificial Sequence
  Description of Artificial Sequence: Synthetic oligonucleotide
uuacugaggagccagaugg

SEQ ID NO: 3273898 - RNA, 19 nt, Artificial Sequence
  Description of Artificial Sequence: Synthetic oligonucleotide
aaauaagcuagauggcugc

SEQ ID NO: 3273899 - RNA, 19 nt, Artificial Sequence
  Description of Artificial Sequence: Synthetic oligonucleotide
gauaaacuagaauagcuag

SEQ ID NO: 3273900 - RNA, 19 nt, Artificial Sequence
  Description of Artificial Sequence: Synthetic oligonucleotide
aaaagugcaaucuaucgga

SEQ ID NO: 3273901 - RNA, 19 nt, Artificial Sequence
  Description of Artificial Sequence: Synthetic oligonucleotide
ugaaaagugcaaucuaucg

SEQ ID NO: 3273902 - RNA, 19 nt, Artificial Sequence
  Description of Artificial Sequence: Synthetic oligonucleotide
aacuagaauagcuagcucu

SEQ ID NO: 3273903 - RNA, 19 nt, Artificial Sequence
  Description of Artificial Sequence: Synthetic oligonucleotide
aaagucagaagacagcucu

SEQ ID NO: 3273904 - RNA, 19 nt, Artificial Sequence
  Description of Artificial Sequence: Synthetic oligonucleotide
gaaaagugcaaucuaucgg

SEQ ID NO: 3273905 - RNA, 19 nt, Artificial Sequence
  Description of Artificial Sequence: Synthetic oligonucleotide
uggguguaaacacagagug

SEQ ID NO: 3273906 - RNA, 19 nt, Artificial Sequence
  Description of Artificial Sequence: Synthetic oligonucleotide
aaacacagaguguucagag

SEQ ID NO: 3273907 - RNA, 19 nt, Artificial Sequence
  Description of Artificial Sequence: Synthetic oligonucleotide
uuuucucugagccugaaaa

SEQ ID NO: 3273908 - RNA, 19 nt, Artificial Sequence
  Description of Artificial Sequence: Synthetic oligonucleotide
gagaggauaaacuagaaua

SEQ ID NO: 3273909 - RNA, 19 nt, Artificial Sequence
  Description of Artificial Sequence: Synthetic oligonucleotide
aauagcuagcucuugggca

SEQ ID NO: 3273910 - RNA, 19 nt, Artificial Sequence
  Description of Artificial Sequence: Synthetic oligonucleotide
uaaauaagcuagauggcug

SEQ ID NO: 3273911 - RNA, 19 nt, Artificial Sequence
  Description of Artificial Sequence: Synthetic oligonucleotide
ucagagaucugagagaaag

SEQ ID NO: 3273912 - RNA, 19 nt, Artificial Sequence
  Description of Artificial Sequence: Synthetic oligonucleotide
agugcaaucuaucggagag

SEQ ID NO: 3273913 - RNA, 19 nt, Artificial Sequence
  Description of Artificial Sequence: Synthetic oligonucleotide
caaagguuuaaucuugggg

SEQ ID NO: 3273914 - RNA, 19 nt, Artificial Sequence
  Description of Artificial Sequence: Synthetic oligonucleotide
uacccuuucuuaaauaagc

SEQ ID NO: 3273915 - RNA, 19 nt, Artificial Sequence
  Description of Artificial Sequence: Synthetic oligonucleotide
uaagcuagauggcugcugg

SEQ ID NO: 3273916 - RNA, 19 nt, Artificial Sequence
  Description of Artificial Sequence: Synthetic oligonucleotide
caaucuaucggagaggagg

SEQ ID NO: 3273917 - RNA, 19 nt, Artificial Sequence
  Description of Artificial Sequence: Synthetic oligonucleotide
uagaauagcuagcucuugg

SEQ ID NO: 3273918 - RNA, 19 nt, Artificial Sequence
  Description of Artificial Sequence: Synthetic oligonucleotide
agagaucugagagaaagcg

SEQ ID NO: 3273919 - RNA, 19 nt, Artificial Sequence
  Description of Artificial Sequence: Synthetic oligonucleotide
uucuuaaauaagcuagaug

SEQ ID NO: 3273920 - RNA, 19 nt, Artificial Sequence
  Description of Artificial Sequence: Synthetic oligonucleotide
uuaaauaagcuagauggcu

SEQ ID NO: 3273921 - RNA, 19 nt, Artificial Sequence
  Description of Artificial Sequence: Synthetic oligonucleotide
cauuccagauacaagacug

SEQ ID NO: 3273922 - RNA, 19 nt, Artificial Sequence
  Description of Artificial Sequence: Synthetic oligonucleotide
uaaacuagaauagcuagcu

SEQ ID NO: 3273923 - RNA, 19 nt, Artificial Sequence
  Description of Artificial Sequence: Synthetic oligonucleotide
cuuaaauaagcuagauggc

SEQ ID NO: 3273924 - RNA, 19 nt, Artificial Sequence
  Description of Artificial Sequence: Synthetic oligonucleotide
ugggaaagucagaagacag

SEQ ID NO: 3273925 - RNA, 19 nt, Artificial Sequence
  Description of Artificial Sequence: Synthetic oligonucleotide
uuccuguuuucucugagcc

SEQ ID NO: 3273926 - RNA, 19 nt, Artificial Sequence
  Description of Artificial Sequence: Synthetic oligonucleotide
auaaacuagaauagcuagc

SEQ ID NO: 3273927 - RNA, 19 nt, Artificial Sequence
  Description of Artificial Sequence: Synthetic oligonucleotide
uugggcaaagguuuaaucu

SEQ ID NO: 3273928 - RNA, 19 nt, Artificial Sequence
  Description of Artificial Sequence: Synthetic oligonucleotide
aaagcgcuguccugggagc

SEQ ID NO: 3273929 - RNA, 19 nt, Artificial Sequence
  Description of Artificial Sequence: Synthetic oligonucleotide
agauacaagacugggaaag

SEQ ID NO: 3273930 - RNA, 19 nt, Artificial Sequence
  Description of Artificial Sequence: Synthetic oligonucleotide
agaauagcuagcucuuggg

SEQ ID NO: 3273931 - RNA, 19 nt, Artificial Sequence
  Description of Artificial Sequence: Synthetic oligonucleotide
guguucagagaucugagag

SEQ ID NO: 3273932 - RNA, 19 nt, Artificial Sequence
  Description of Artificial Sequence: Synthetic oligonucleotide
aaacuagaauagcuagcuc

SEQ ID NO: 3273933 - RNA, 19 nt, Artificial Sequence
  Description of Artificial Sequence: Synthetic oligonucleotide
auccccaggaccuaggcuc

SEQ ID NO: 3273934 - RNA, 19 nt, Artificial Sequence
  Description of Artificial Sequence: Synthetic oligonucleotide
uuucucagugcuuuggugu

SEQ ID NO: 3273935 - RNA, 19 nt, Artificial Sequence
  Description of Artificial Sequence: Synthetic oligonucleotide
uacaagacugggaaaguca

SEQ ID NO: 3273936 - RNA, 19 nt, Artificial Sequence
  Description of Artificial Sequence: Synthetic oligonucleotide
ccuuucuuaaauaagcuag

SEQ ID NO: 3273937 - RNA, 19 nt, Artificial Sequence
  Description of Artificial Sequence: Synthetic oligonucleotide
aaaacuuucucagugcuuu

SEQ ID NO: 3273938 - RNA, 19 nt, Artificial Sequence
  Description of Artificial Sequence: Synthetic oligonucleotide
gacugggaaagucagaaga

SEQ ID NO: 3273939 - RNA, 19 nt, Artificial Sequence
  Description of Artificial Sequence: Synthetic oligonucleotide
ugugcugcugcucuugccc

SEQ ID NO: 3273940 - RNA, 19 nt, Artificial Sequence
  Description of Artificial Sequence: Synthetic oligonucleotide
agaggauaaacuagaauag

SEQ ID NO: 3273941 - RNA, 19 nt, Artificial Sequence
  Description of Artificial Sequence: Synthetic oligonucleotide
uguaaacacagaguguuca

SEQ ID NO: 3273942 - RNA, 19 nt, Artificial Sequence
  Description of Artificial Sequence: Synthetic oligonucleotide
ugagagaaagcgcuguccu

SEQ ID NO: 3273943 - RNA, 19 nt, Artificial Sequence
  Description of Artificial Sequence: Synthetic oligonucleotide
gaaagcgcuguccugggag

SEQ ID NO: 3273944 - RNA, 19 nt, Artificial Sequence
  Description of Artificial Sequence: Synthetic oligonucleotide
gaauagcuagcucuugggc

SEQ ID NO: 3273945 - RNA, 19 nt, Artificial Sequence
  Description of Artificial Sequence: Synthetic oligonucleotide
agagaaagcgcuguccugg

SEQ ID NO: 3273946 - RNA, 19 nt, Artificial Sequence
  Description of Artificial Sequence: Synthetic oligonucleotide
uuucucugagccugaaaag

SEQ ID NO: 3273947 - RNA, 19 nt, Artificial Sequence
  Description of Artificial Sequence: Synthetic oligonucleotide
ucucugagccugaaaagug

SEQ ID NO: 3273948 - RNA, 19 nt, Artificial Sequence
  Description of Artificial Sequence: Synthetic oligonucleotide
aacuuucucagugcuuugg

SEQ ID NO: 3273949 - RNA, 19 nt, Artificial Sequence
  Description of Artificial Sequence: Synthetic oligonucleotide
uguucagagaucugagaga

SEQ ID NO: 3273950 - RNA, 19 nt, Artificial Sequence
  Description of Artificial Sequence: Synthetic oligonucleotide
aagacugggaaagucagaa

SEQ ID NO: 3273951 - RNA, 19 nt, Artificial Sequence
  Description of Artificial Sequence: Synthetic oligonucleotide
acacagaguguucagagau

SEQ ID NO: 3273952 - RNA, 19 nt, Artificial Sequence
  Description of Artificial Sequence: Synthetic oligonucleotide
gacugggcauuccagauac

SEQ ID NO: 3273953 - RNA, 19 nt, Artificial Sequence
  Description of Artificial Sequence: Synthetic oligonucleotide
aagcuagauggcugcuggc

SEQ ID NO: 3273954 - RNA, 19 nt, Artificial Sequence
  Description of Artificial Sequence: Synthetic oligonucleotide
agaucugagagaaagcgcu

SEQ ID NO: 3273955 - RNA, 19 nt, Artificial Sequence
  Description of Artificial Sequence: Synthetic oligonucleotide
uguccugggagcuuacuga

SEQ ID NO: 3273956 - RNA, 19 nt, Artificial Sequence
  Description of Artificial Sequence: Synthetic oligonucleotide
ucgguggguguaaacacag

SEQ ID NO: 3273957 - RNA, 19 nt, Artificial Sequence
  Description of Artificial Sequence: Synthetic oligonucleotide
aacacagaguguucagaga

SEQ ID NO: 3273958 - RNA, 19 nt, Artificial Sequence
  Description of Artificial Sequence: Synthetic oligonucleotide
ucagaagacagcucuuccu

SEQ ID NO: 3273959 - RNA, 19 nt, Artificial Sequence
  Description of Artificial Sequence: Synthetic oligonucleotide
gaggauaaacuagaauagc

SEQ ID NO: 3273960 - RNA, 19 nt, Artificial Sequence
  Description of Artificial Sequence: Synthetic oligonucleotide
uuccagauacaagacuggg

SEQ ID NO: 3273961 - RNA, 19 nt, Artificial Sequence
  Description of Artificial Sequence: Synthetic oligonucleotide
ucugagccugaaaagugca

SEQ ID NO: 3273962 - RNA, 19 nt, Artificial Sequence
  Description of Artificial Sequence: Synthetic oligonucleotide
ucuaugguacccuuucuua

SEQ ID NO: 3273963 - RNA, 19 nt, Artificial Sequence
  Description of Artificial Sequence: Synthetic oligonucleotide
ugcaaucuaucggagagga

SEQ ID NO: 3273964 - RNA, 19 nt, Artificial Sequence
  Description of Artificial Sequence: Synthetic oligonucleotide
uuucgguggguguaaacac

SEQ ID NO: 3273965 - RNA, 19 nt, Artificial Sequence
  Description of Artificial Sequence: Synthetic oligonucleotide
uccagauacaagacuggga

SEQ ID NO: 3273966 - RNA, 19 nt, Artificial Sequence
  Description of Artificial Sequence: Synthetic oligonucleotide
aggauaaacuagaauagcu

SEQ ID NO: 3273967 - RNA, 19 nt, Artificial Sequence
  Description of Artificial Sequence: Synthetic oligonucleotide
ucuuccuguuuucucugag

SEQ ID NO: 3273968 - RNA, 19 nt, Artificial Sequence
  Description of Artificial Sequence: Synthetic oligonucleotide
agcuagauggcugcuggcc

SEQ ID NO: 3273969 - RNA, 19 nt, Artificial Sequence
  Description of Artificial Sequence: Synthetic oligonucleotide
guaaacacagaguguucag

SEQ ID NO: 3273970 - RNA, 19 nt, Artificial Sequence
  Description of Artificial Sequence: Synthetic oligonucleotide
gguggguguaaacacagag

SEQ ID NO: 3273971 - RNA, 19 nt, Artificial Sequence
  Description of Artificial Sequence: Synthetic oligonucleotide
cugaaaagugcaaucuauc

SEQ ID NO: 3273972 - RNA, 19 nt, Artificial Sequence
  Description of Artificial Sequence: Synthetic oligonucleotide
acugggaaagucagaagac

SEQ ID NO: 3273973 - RNA, 19 nt, Artificial Sequence
  Description of Artificial Sequence: Synthetic oligonucleotide
uucucugagccugaaaagu

SEQ ID NO: 3273974 - RNA, 19 nt, Artificial Sequence
  Description of Artificial Sequence: Synthetic oligonucleotide
agaguguucagagaucuga

SEQ ID NO: 3273975 - RNA, 19 nt, Artificial Sequence
  Description of Artificial Sequence: Synthetic oligonucleotide
ugggcauuccagauacaag

SEQ ID NO: 3273976 - RNA, 19 nt, Artificial Sequence
  Description of Artificial Sequence: Synthetic oligonucleotide
cucuugcccaccucaaucc

SEQ ID NO: 3273977 - RNA, 19 nt, Artificial Sequence
  Description of Artificial Sequence: Synthetic oligonucleotide
auacaagacugggaaaguc

SEQ ID NO: 3273978 - RNA, 19 nt, Artificial Sequence
  Description of Artificial Sequence: Synthetic oligonucleotide
aagugcaaucuaucggaga

SEQ ID NO: 3273979 - RNA, 19 nt, Artificial Sequence
  Description of Artificial Sequence: Synthetic oligonucleotide
cucugagccugaaaagugc

SEQ ID NO: 3273980 - RNA, 19 nt, Artificial Sequence
  Description of Artificial Sequence: Synthetic oligonucleotide
uaugguacccuuucuuaaa

SEQ ID NO: 3273981 - RNA, 19 nt, Artificial Sequence
  Description of Artificial Sequence: Synthetic oligonucleotide
aaucuaucggagaggaggu

SEQ ID NO: 3273982 - RNA, 19 nt, Artificial Sequence
  Description of Artificial Sequence: Synthetic oligonucleotide
aaagugcaaucuaucggag

SEQ ID NO: 3273983 - RNA, 19 nt, Artificial Sequence
  Description of Artificial Sequence: Synthetic oligonucleotide
uaaacacagaguguucaga

SEQ ID NO: 3273984 - RNA, 19 nt, Artificial Sequence
  Description of Artificial Sequence: Synthetic oligonucleotide
ugcucuaugguacccuuuc

SEQ ID NO: 3273985 - RNA, 19 nt, Artificial Sequence
  Description of Artificial Sequence: Synthetic oligonucleotide
ugaggagccagauggggac

SEQ ID NO: 3273986 - RNA, 19 nt, Artificial Sequence
  Description of Artificial Sequence: Synthetic oligonucleotide
agugcuuuggugugugcug

SEQ ID NO: 3273987 - RNA, 19 nt, Artificial Sequence
  Description of Artificial Sequence: Synthetic oligonucleotide
auagcuagcucuugggcaa

SEQ ID NO: 3273988 - RNA, 19 nt, Artificial Sequence
  Description of Artificial Sequence: Synthetic oligonucleotide
aaacuuucucagugcuuug

SEQ ID NO: 3273989 - RNA, 19 nt, Artificial Sequence
  Description of Artificial Sequence: Synthetic oligonucleotide
cagaagacagcucuuccug

SEQ ID NO: 3273990 - RNA, 19 nt, Artificial Sequence
  Description of Artificial Sequence: Synthetic oligonucleotide
cuuucuuaaauaagcuaga

SEQ ID NO: 3273991 - RNA, 19 nt, Artificial Sequence
  Description of Artificial Sequence: Synthetic oligonucleotide
acagaguguucagagaucu

SEQ ID NO: 3273992 - RNA, 19 nt, Artificial Sequence
  Description of Artificial Sequence: Synthetic oligonucleotide
agcucuuccuguuuucucu

SEQ ID NO: 3273993 - RNA, 19 nt, Artificial Sequence
  Description of Artificial Sequence: Synthetic oligonucleotide
ggagaggagguuucggugg

SEQ ID NO: 3273994 - RNA, 19 nt, Artificial Sequence
  Description of Artificial Sequence: Synthetic oligonucleotide
ucaauccccaggaccuagg

SEQ ID NO: 3273995 - RNA, 19 nt, Artificial Sequence
  Description of Artificial Sequence: Synthetic oligonucleotide
ugggcaaagguuuaaucuu

SEQ ID NO: 3273996 - RNA, 19 nt, Artificial Sequence
  Description of Artificial Sequence: Synthetic oligonucleotide
aaaaccuccauucuccagc

SEQ ID NO: 3273997 - RNA, 19 nt, Artificial Sequence
  Description of Artificial Sequence: Synthetic oligonucleotide
cuaaauaaggggcaaaagg

SEQ ID NO: 3273998 - RNA, 19 nt, Artificial Sequence
  Description of Artificial Sequence: Synthetic oligonucleotide
caggguauuagcuacaugg

SEQ ID NO: 3273999 - RNA, 19 nt, Artificial Sequence
  Description of Artificial Sequence: Synthetic oligonucleotide
aaagguucuccauugcugg

SEQ ID NO: 3274000 - RNA, 19 nt, Artificial Sequence
  Description of Artificial Sequence: Synthetic oligonucleotide
uccuagaggaaccacaagg

SEQ ID NO: 3274001 - RNA, 19 nt, Artificial Sequence
  Description of Artificial Sequence: Synthetic oligonucleotide
aaaggggcaaaguagaggu

SEQ ID NO: 3274002 - RNA, 19 nt, Artificial Sequence
  Description of Artificial Sequence: Synthetic oligonucleotide
uugaucucaaucucaaagg

SEQ ID NO: 3274003 - RNA, 19 nt, Artificial Sequence
  Description of Artificial Sequence: Synthetic oligonucleotide
uacauggagcuaaauaagg

SEQ ID NO: 3274004 - RNA, 19 nt, Artificial Sequence
  Description of Artificial Sequence: Synthetic oligonucleotide
aaggaaaaccuccauucuc

SEQ ID NO: 3274005 - RNA, 19 nt, Artificial Sequence
  Description of Artificial Sequence: Synthetic oligonucleotide
aucucaaucucaaaggccc

SEQ ID NO: 3274006 - RNA, 19 nt, Artificial Sequence
  Description of Artificial Sequence: Synthetic oligonucleotide
gaaaccacaggguucacag

SEQ ID NO: 3274007 - RNA, 19 nt, Artificial Sequence
  Description of Artificial Sequence: Synthetic oligonucleotide
ggaaacaaagguuugaccc

SEQ ID NO: 3274008 - RNA, 19 nt, Artificial Sequence
  Description of Artificial Sequence: Synthetic oligonucleotide
uggugauuuucucuaaagg

SEQ ID NO: 3274009 - RNA, 19 nt, Artificial Sequence
  Description of Artificial Sequence: Synthetic oligonucleotide
uguuaucacaggaugacac

SEQ ID NO: 3274010 - RNA, 19 nt, Artificial Sequence
  Description of Artificial Sequence: Synthetic oligonucleotide
ucucguaaggaaaaccucc

SEQ ID NO: 3274011 - RNA, 19 nt, Artificial Sequence
  Description of Artificial Sequence: Synthetic oligonucleotide
cucgaugagaucuuucucg

SEQ ID NO: 3274012 - RNA, 19 nt, Artificial Sequence
  Description of Artificial Sequence: Synthetic oligonucleotide
uuucucguaaggaaaaccu

SEQ ID NO: 3274013 - RNA, 19 nt, Artificial Sequence
  Description of Artificial Sequence: Synthetic oligonucleotide
uguccauugaucucaaucu

SEQ ID NO: 3274014 - RNA, 19 nt, Artificial Sequence
  Description of Artificial Sequence: Synthetic oligonucleotide
aggggcaaaaggcagaggg

SEQ ID NO: 3274015 - RNA, 19 nt, Artificial Sequence
  Description of Artificial Sequence: Synthetic oligonucleotide
aaggaaacaaagguuugac

SEQ ID NO: 3274016 - RNA, 19 nt, Artificial Sequence
  Description of Artificial Sequence: Synthetic oligonucleotide
cauggagcuaaauaagggg

SEQ ID NO: 3274017 - RNA, 19 nt, Artificial Sequence
  Description of Artificial Sequence: Synthetic oligonucleotide
accacaaggaaacaaaggu

SEQ ID NO: 3274018 - RNA, 19 nt, Artificial Sequence
  Description of Artificial Sequence: Synthetic oligonucleotide
cacaggaugacacagggag

SEQ ID NO: 3274019 - RNA, 19 nt, Artificial Sequence
  Description of Artificial Sequence: Synthetic oligonucleotide
ugaucucaaucucaaaggc

SEQ ID NO: 3274020 - RNA, 19 nt, Artificial Sequence
  Description of Artificial Sequence: Synthetic oligonucleotide
aucucaaaggccccugucc

SEQ ID NO: 3274021 - RNA, 19 nt, Artificial Sequence
  Description of Artificial Sequence: Synthetic oligonucleotide
aacuccacugccugcuucc

SEQ ID NO: 3274022 - RNA, 19 nt, Artificial Sequence
  Description of Artificial Sequence: Synthetic oligonucleotide
uaaagguucuccauugcug

SEQ ID NO: 3274023 - RNA, 19 nt, Artificial Sequence
  Description of Artificial Sequence: Synthetic oligonucleotide
aggaaacaaagguuugacc

SEQ ID NO: 3274024 - RNA, 19 nt, Artificial Sequence
  Description of Artificial Sequence: Synthetic oligonucleotide
gaaacaaagguuugacccc

SEQ ID NO: 3274025 - RNA, 19 nt, Artificial Sequence
  Description of Artificial Sequence: Synthetic oligonucleotide
agaggaaccacaaggaaac

SEQ ID NO: 3274026 - RNA, 19 nt, Artificial Sequence
  Description of Artificial Sequence: Synthetic oligonucleotide
ugauuuucucuaaagguuc

SEQ ID NO: 3274027 - RNA, 19 nt, Artificial Sequence
  Description of Artificial Sequence: Synthetic oligonucleotide
guaaggaaaaccuccauuc

SEQ ID NO: 3274028 - RNA, 19 nt, Artificial Sequence
  Description of Artificial Sequence: Synthetic oligonucleotide
aauaaggggcaaaaggcag

SEQ ID NO: 3274029 - RNA, 19 nt, Artificial Sequence
  Description of Artificial Sequence: Synthetic oligonucleotide
aucacaggaugacacaggg

SEQ ID NO: 3274030 - RNA, 19 nt, Artificial Sequence
  Description of Artificial Sequence: Synthetic oligonucleotide
agguaggucgccucgaaac

SEQ ID NO: 3274031 - RNA, 19 nt, Artificial Sequence
  Description of Artificial Sequence: Synthetic oligonucleotide
auggagcuaaauaaggggc

SEQ ID NO: 3274032 - RNA, 19 nt, Artificial Sequence
  Description of Artificial Sequence: Synthetic oligonucleotide
aggaaaaccuccauucucc

SEQ ID NO: 3274033 - RNA, 19 nt, Artificial Sequence
  Description of Artificial Sequence: Synthetic oligonucleotide
acaggguucacaguacucc

SEQ ID NO: 3274034 - RNA, 19 nt, Artificial Sequence
  Description of Artificial Sequence: Synthetic oligonucleotide
ugagaucuuucucguaagg

SEQ ID NO: 3274035 - RNA, 19 nt, Artificial Sequence
  Description of Artificial Sequence: Synthetic oligonucleotide
uccagcuuggagaacacca

SEQ ID NO: 3274036 - RNA, 19 nt, Artificial Sequence
  Description of Artificial Sequence: Synthetic oligonucleotide
aaucucaaaggccccuguc

SEQ ID NO: 3274037 - RNA, 19 nt, Artificial Sequence
  Description of Artificial Sequence: Synthetic oligonucleotide
aggucaggguauuagcuac

SEQ ID NO: 3274038 - RNA, 19 nt, Artificial Sequence
  Description of Artificial Sequence: Synthetic oligonucleotide
aaauaaggggcaaaaggca

SEQ ID NO: 3274039 - RNA, 19 nt, Artificial Sequence
  Description of Artificial Sequence: Synthetic oligonucleotide
acgaugugaacuccacugc

SEQ ID NO: 3274040 - RNA, 19 nt, Artificial Sequence
  Description of Artificial Sequence: Synthetic oligonucleotide
aaucucgaugccgggauac

SEQ ID NO: 3274041 - RNA, 19 nt, Artificial Sequence
  Description of Artificial Sequence: Synthetic oligonucleotide
cuacauggagcuaaauaag

SEQ ID NO: 3274042 - RNA, 19 nt, Artificial Sequence
  Description of Artificial Sequence: Synthetic oligonucleotide
uaucacaggaugacacagg

SEQ ID NO: 3274043 - RNA, 19 nt, Artificial Sequence
  Description of Artificial Sequence: Synthetic oligonucleotide
gaugacacagggaggacgg

SEQ ID NO: 3274044 - RNA, 19 nt, Artificial Sequence
  Description of Artificial Sequence: Synthetic oligonucleotide
aagguucuccauugcuggc

SEQ ID NO: 3274045 - RNA, 19 nt, Artificial Sequence
  Description of Artificial Sequence: Synthetic oligonucleotide
ucucaaaggccccuguccc

SEQ ID NO: 3274046 - RNA, 19 nt, Artificial Sequence
  Description of Artificial Sequence: Synthetic oligonucleotide
ucgccucgaaaccacaggg

SEQ ID NO: 3274047 - RNA, 19 nt, Artificial Sequence
  Description of Artificial Sequence: Synthetic oligonucleotide
aaccacaaggaaacaaagg

SEQ ID NO: 3274048 - RNA, 19 nt, Artificial Sequence
  Description of Artificial Sequence: Synthetic oligonucleotide
cacgaugugaacuccacug

SEQ ID NO: 3274049 - RNA, 19 nt, Artificial Sequence
  Description of Artificial Sequence: Synthetic oligonucleotide
uccauugaucucaaucuca

SEQ ID NO: 3274050 - RNA, 19 nt, Artificial Sequence
  Description of Artificial Sequence: Synthetic oligonucleotide
gaugagaucuuucucguaa

SEQ ID NO: 3274051 - RNA, 19 nt, Artificial Sequence
  Description of Artificial Sequence: Synthetic oligonucleotide
gacucaaucucgaugccgg

SEQ ID NO: 3274052 - RNA, 19 nt, Artificial Sequence
  Description of Artificial Sequence: Synthetic oligonucleotide
acuacggacaccugucccg

SEQ ID NO: 3274053 - RNA, 19 nt, Artificial Sequence
  Description of Artificial Sequence: Synthetic oligonucleotide
uuuucucuaaagguucucc

SEQ ID NO: 3274054 - RNA, 19 nt, Artificial Sequence
  Description of Artificial Sequence: Synthetic oligonucleotide
acucauugcugcccgcucc

SEQ ID NO: 3274055 - RNA, 19 nt, Artificial Sequence
  Description of Artificial Sequence: Synthetic oligonucleotide
ggauacuccuccuucacgg

SEQ ID NO: 3274056 - RNA, 19 nt, Artificial Sequence
  Description of Artificial Sequence: Synthetic oligonucleotide
uaaggaaaaccuccauucu

SEQ ID NO: 3274057 - RNA, 19 nt, Artificial Sequence
  Description of Artificial Sequence: Synthetic oligonucleotide
uuucucuaaagguucucca

SEQ ID NO: 3274058 - RNA, 19 nt, Artificial Sequence
  Description of Artificial Sequence: Synthetic oligonucleotide
agaucuuucucguaaggaa

SEQ ID NO: 3274059 - RNA, 19 nt, Artificial Sequence
  Description of Artificial Sequence: Synthetic oligonucleotide
uacuccaccacgaugugaa

SEQ ID NO: 3274060 - RNA, 19 nt, Artificial Sequence
  Description of Artificial Sequence: Synthetic oligonucleotide
aaccacaggguucacagua

SEQ ID NO: 3274061 - RNA, 19 nt, Artificial Sequence
  Description of Artificial Sequence: Synthetic oligonucleotide
gaugccgggauacuccucc

SEQ ID NO: 3274062 - RNA, 19 nt, Artificial Sequence
  Description of Artificial Sequence: Synthetic oligonucleotide
uguguuaucacaggaugac

SEQ ID NO: 3274063 - RNA, 19 nt, Artificial Sequence
  Description of Artificial Sequence: Synthetic oligonucleotide
gucaaguccuccuugugcc

SEQ ID NO: 3274064 - RNA, 19 nt, Artificial Sequence
  Description of Artificial Sequence: Synthetic oligonucleotide
agaaccguguguuaucaca

SEQ ID NO: 3274065 - RNA, 19 nt, Artificial Sequence
  Description of Artificial Sequence: Synthetic oligonucleotide
agauaugucaaguccuccu

SEQ ID NO: 3274066 - RNA, 19 nt, Artificial Sequence
  Description of Artificial Sequence: Synthetic oligonucleotide
uggagcuaaauaaggggca

SEQ ID NO: 3274067 - RNA, 19 nt, Artificial Sequence
  Description of Artificial Sequence: Synthetic oligonucleotide
aaccguguguuaucacagg

SEQ ID NO: 3274068 - RNA, 19 nt, Artificial Sequence
  Description of Artificial Sequence: Synthetic oligonucleotide
cuccuugugcccaaagggg

SEQ ID NO: 3274069 - RNA, 19 nt, Artificial Sequence
  Description of Artificial Sequence: Synthetic oligonucleotide
cucuaaagguucuccauug

SEQ ID NO: 3274070 - RNA, 19 nt, Artificial Sequence
  Description of Artificial Sequence: Synthetic oligonucleotide
gaaccaagcuuccaagaac

SEQ ID NO: 3274071 - RNA, 19 nt, Artificial Sequence
  Description of Artificial Sequence: Synthetic oligonucleotide
uccuugugcccaaaggggc

SEQ ID NO: 3274072 - RNA, 19 nt, Artificial Sequence
  Description of Artificial Sequence: Synthetic oligonucleotide
aagaaccguguguuaucac

SEQ ID NO: 3274073 - RNA, 19 nt, Artificial Sequence
  Description of Artificial Sequence: Synthetic oligonucleotide
auugcuggcucuucggaug

SEQ ID NO: 3274074 - RNA, 19 nt, Artificial Sequence
  Description of Artificial Sequence: Synthetic oligonucleotide
gaucucaaucucaaaggcc

SEQ ID NO: 3274075 - RNA, 19 nt, Artificial Sequence
  Description of Artificial Sequence: Synthetic oligonucleotide
gguauuagcuacauggagc

SEQ ID NO: 3274076 - RNA, 19 nt, Artificial Sequence
  Description of Artificial Sequence: Synthetic oligonucleotide
gaaccacaaggaaacaaag

SEQ ID NO: 3274077 - RNA, 19 nt, Artificial Sequence
  Description of Artificial Sequence: Synthetic oligonucleotide
uaugucaaguccuccuugu

SEQ ID NO: 3274078 - RNA, 19 nt, Artificial Sequence
  Description of Artificial Sequence: Synthetic oligonucleotide
gcuacauggagcuaaauaa

SEQ ID NO: 3274079 - RNA, 19 nt, Artificial Sequence
  Description of Artificial Sequence: Synthetic oligonucleotide
cuguccauugaucucaauc

SEQ ID NO: 3274080 - RNA, 19 nt, Artificial Sequence
  Description of Artificial Sequence: Synthetic oligonucleotide
acggcuauuggugauuuuc

SEQ ID NO: 3274081 - RNA, 19 nt, Artificial Sequence
  Description of Artificial Sequence: Synthetic oligonucleotide
auagauaugucaaguccuc

SEQ ID NO: 3274082 - RNA, 19 nt, Artificial Sequence
  Description of Artificial Sequence: Synthetic oligonucleotide
auacuccuccuucacggcg

SEQ ID NO: 3274083 - RNA, 19 nt, Artificial Sequence
  Description of Artificial Sequence: Synthetic oligonucleotide
accuccauucuccagcuug

SEQ ID NO: 3274084 - RNA, 19 nt, Artificial Sequence
  Description of Artificial Sequence: Synthetic oligonucleotide
aaaccuccauucuccagcu

SEQ ID NO: 3274085 - RNA, 19 nt, Artificial Sequence
  Description of Artificial Sequence: Synthetic oligonucleotide
cuucggauggccucgauga

SEQ ID NO: 3274086 - RNA, 19 nt, Artificial Sequence
  Description of Artificial Sequence: Synthetic oligonucleotide
accagcuguccauugaucu

SEQ ID NO: 3274087 - RNA, 19 nt, Artificial Sequence
  Description of Artificial Sequence: Synthetic oligonucleotide
auuagcuacauggagcuaa

SEQ ID NO: 3274088 - RNA, 19 nt, Artificial Sequence
  Description of Artificial Sequence: Synthetic oligonucleotide
uagaggucaggguauuagc

SEQ ID NO: 3274089 - RNA, 19 nt, Artificial Sequence
  Description of Artificial Sequence: Synthetic oligonucleotide
auaugucaaguccuccuug

SEQ ID NO: 3274090 - RNA, 19 nt, Artificial Sequence
  Description of Artificial Sequence: Synthetic oligonucleotide
gaaaaccuccauucuccag

SEQ ID NO: 3274091 - RNA, 19 nt, Artificial Sequence
  Description of Artificial Sequence: Synthetic oligonucleotide
ucaaucucgaugccgggau

SEQ ID NO: 3274092 - RNA, 19 nt, Artificial Sequence
  Description of Artificial Sequence: Synthetic oligonucleotide
cuuucucguaaggaaaacc

SEQ ID NO: 3274093 - RNA, 19 nt, Artificial Sequence
  Description of Artificial Sequence: Synthetic oligonucleotide
uccauugcuggcucuucgg

SEQ ID NO: 3274094 - RNA, 19 nt, Artificial Sequence
  Description of Artificial Sequence: Synthetic oligonucleotide
gaaccguguguuaucacag

SEQ ID NO: 3274095 - RNA, 19 nt, Artificial Sequence
  Description of Artificial Sequence: Synthetic oligonucleotide
augagaucuuucucguaag

SEQ ID NO: 3274096 - RNA, 19 nt, Artificial Sequence
  Description of Artificial Sequence: Synthetic oligonucleotide
aauggcuacaauuuaauca

SEQ ID NO: 3274097 - RNA, 19 nt, Artificial Sequence
  Description of Artificial Sequence: Synthetic oligonucleotide
aauuuaaucacaaagaauu

SEQ ID NO: 3274098 - RNA, 19 nt, Artificial Sequence
  Description of Artificial Sequence: Synthetic oligonucleotide
ucaaguuuggccaacagug

SEQ ID NO: 3274099 - RNA, 19 nt, Artificial Sequence
  Description of Artificial Sequence: Synthetic oligonucleotide
uuuaaaagcacaacguugu

SEQ ID NO: 3274100 - RNA, 19 nt, Artificial Sequence
  Description of Artificial Sequence: Synthetic oligonucleotide
gacaacugaaaucacaaag

SEQ ID NO: 3274101 - RNA, 19 nt, Artificial Sequence
  Description of Artificial Sequence: Synthetic oligonucleotide
uaugauaauaaaaccaagu

SEQ ID NO: 3274102 - RNA, 19 nt, Artificial Sequence
  Description of Artificial Sequence: Synthetic oligonucleotide
cauuauacaaaacaauagc

SEQ ID NO: 3274103 - RNA, 19 nt, Artificial Sequence
  Description of Artificial Sequence: Synthetic oligonucleotide
uugauuauuacuuacggau

SEQ ID NO: 3274104 - RNA, 19 nt, Artificial Sequence
  Description of Artificial Sequence: Synthetic oligonucleotide
uuuaaucacaaagaauugg

SEQ ID NO: 3274105 - RNA, 19 nt, Artificial Sequence
  Description of Artificial Sequence: Synthetic oligonucleotide
auaaaaugcaguucugagg

SEQ ID NO: 3274106 - RNA, 19 nt, Artificial Sequence
  Description of Artificial Sequence: Synthetic oligonucleotide
uuaacuuagaacauucuau

SEQ ID NO: 3274107 - RNA, 19 nt, Artificial Sequence
  Description of Artificial Sequence: Synthetic oligonucleotide
uuacucaacaaauucagcu

SEQ ID NO: 3274108 - RNA, 19 nt, Artificial Sequence
  Description of Artificial Sequence: Synthetic oligonucleotide
acuuagaacauucuauauc

SEQ ID NO: 3274109 - RNA, 19 nt, Artificial Sequence
  Description of Artificial Sequence: Synthetic oligonucleotide
acuugauuauuacuuacgg

SEQ ID NO: 3274110 - RNA, 19 nt, Artificial Sequence
  Description of Artificial Sequence: Synthetic oligonucleotide
ugaauaauuucaaccauac

SEQ ID NO: 3274111 - RNA, 19 nt, Artificial Sequence
  Description of Artificial Sequence: Synthetic oligonucleotide
gaagucuccaucaugacag

SEQ ID NO: 3274112 - RNA, 19 nt, Artificial Sequence
  Description of Artificial Sequence: Synthetic oligonucleotide
ugaguuucuauguaggcug

SEQ ID NO: 3274113 - RNA, 19 nt, Artificial Sequence
  Description of Artificial Sequence: Synthetic oligonucleotide
aaauggcuacaauuuaauc

SEQ ID NO: 3274114 - RNA, 19 nt, Artificial Sequence
  Description of Artificial Sequence: Synthetic oligonucleotide
cuuuacucaacaaauucag

SEQ ID NO: 3274115 - RNA, 19 nt, Artificial Sequence
  Description of Artificial Sequence: Synthetic oligonucleotide
uuaaaugcugucuggaaac

SEQ ID NO: 3274116 - RNA, 19 nt, Artificial Sequence
  Description of Artificial Sequence: Synthetic oligonucleotide
aguguaaugcaucagugca

SEQ ID NO: 3274117 - RNA, 19 nt, Artificial Sequence
  Description of Artificial Sequence: Synthetic oligonucleotide
gaugcaagugcuuucagca

SEQ ID NO: 3274118 - RNA, 19 nt, Artificial Sequence
  Description of Artificial Sequence: Synthetic oligonucleotide
aagaaacuugauuauuacu

SEQ ID NO: 3274119 - RNA, 19 nt, Artificial Sequence
  Description of Artificial Sequence: Synthetic oligonucleotide
uggacaagaguacagauuu

SEQ ID NO: 3274120 - RNA, 19 nt, Artificial Sequence
  Description of Artificial Sequence: Synthetic oligonucleotide
ugauuauuacuuacggaug

SEQ ID NO: 3274121 - RNA, 19 nt, Artificial Sequence
  Description of Artificial Sequence: Synthetic oligonucleotide
aguuugaggcugcaagugc

SEQ ID NO: 3274122 - RNA, 19 nt, Artificial Sequence
  Description of Artificial Sequence: Synthetic oligonucleotide
agugccaaucuucagagca

SEQ ID NO: 3274123 - RNA, 19 nt, Artificial Sequence
  Description of Artificial Sequence: Synthetic oligonucleotide
aauucagcuuugcucagug

SEQ ID NO: 3274124 - RNA, 19 nt, Artificial Sequence
  Description of Artificial Sequence: Synthetic oligonucleotide
uccgaagcucugaagacgg

SEQ ID NO: 3274125 - RNA, 19 nt, Artificial Sequence
  Description of Artificial Sequence: Synthetic oligonucleotide
ugggguuugauagugagug

SEQ ID NO: 3274126 - RNA, 19 nt, Artificial Sequence
  Description of Artificial Sequence: Synthetic oligonucleotide
ucuugcugcauguaccccg

SEQ ID NO: 3274127 - RNA, 19 nt, Artificial Sequence
  Description of Artificial Sequence: Synthetic oligonucleotide
uggcuaacaaugcauauaa

SEQ ID NO: 3274128 - RNA, 19 nt, Artificial Sequence
  Description of Artificial Sequence: Synthetic oligonucleotide
uuacggaugaauauucaaa

SEQ ID NO: 3274129 - RNA, 19 nt, Artificial Sequence
  Description of Artificial Sequence: Synthetic oligonucleotide
uuuacucaacaaauucagc

SEQ ID NO: 3274130 - RNA, 19 nt, Artificial Sequence
  Description of Artificial Sequence: Synthetic oligonucleotide
caacguuguguuuuaaacc

SEQ ID NO: 3274131 - RNA, 19 nt, Artificial Sequence
  Description of Artificial Sequence: Synthetic oligonucleotide
agaacauucuauaucccac

SEQ ID NO: 3274132 - RNA, 19 nt, Artificial Sequence
  Description of Artificial Sequence: Synthetic oligonucleotide
aacauucuauaucccacca

SEQ ID NO: 3274133 - RNA, 19 nt, Artificial Sequence
  Description of Artificial Sequence: Synthetic oligonucleotide
ucagugcugguucaucagg

SEQ ID NO: 3274134 - RNA, 19 nt, Artificial Sequence
  Description of Artificial Sequence: Synthetic oligonucleotide
aucagugcagaacuuaacu

SEQ ID NO: 3274135 - RNA, 19 nt, Artificial Sequence
  Description of Artificial Sequence: Synthetic oligonucleotide
ugaggguucaacugccagg

SEQ ID NO: 3274136 - RNA, 19 nt, Artificial Sequence
  Description of Artificial Sequence: Synthetic oligonucleotide
aaagguggcuaacaaugca

SEQ ID NO: 3274137 - RNA, 19 nt, Artificial Sequence
  Description of Artificial Sequence: Synthetic oligonucleotide
gaacauucuauaucccacc

SEQ ID NO: 3274138 - RNA, 19 nt, Artificial Sequence
  Description of Artificial Sequence: Synthetic oligonucleotide
agcauucucaaagucgccc

SEQ ID NO: 3274139 - RNA, 19 nt, Artificial Sequence
  Description of Artificial Sequence: Synthetic oligonucleotide
uaacuuagaacauucuaua

SEQ ID NO: 3274140 - RNA, 19 nt, Artificial Sequence
  Description of Artificial Sequence: Synthetic oligonucleotide
gacagagccucucaguuug

SEQ ID NO: 3274141 - RNA, 19 nt, Artificial Sequence
  Description of Artificial Sequence: Synthetic oligonucleotide
uucaaguuuggccaacagu

SEQ ID NO: 3274142 - RNA, 19 nt, Artificial Sequence
  Description of Artificial Sequence: Synthetic oligonucleotide
aaaggggccaaagcgcccc

SEQ ID NO: 3274143 - RNA, 19 nt, Artificial Sequence
  Description of Artificial Sequence: Synthetic oligonucleotide
caagugccaaucuucagag

SEQ ID NO: 3274144 - RNA, 19 nt, Artificial Sequence
  Description of Artificial Sequence: Synthetic oligonucleotide
uacggaugaauauucaaau

SEQ ID NO: 3274145 - RNA, 19 nt, Artificial Sequence
  Description of Artificial Sequence: Synthetic oligonucleotide
ucgcuugcuccccagaucc

SEQ ID NO: 3274146 - RNA, 19 nt, Artificial Sequence
  Description of Artificial Sequence: Synthetic oligonucleotide
ugcaagugcuuucagcaug

SEQ ID NO: 3274147 - RNA, 19 nt, Artificial Sequence
  Description of Artificial Sequence: Synthetic oligonucleotide
cuaguguaaugcaucagug

SEQ ID NO: 3274148 - RNA, 19 nt, Artificial Sequence
  Description of Artificial Sequence: Synthetic oligonucleotide
uaggacauggccuugucaa

SEQ ID NO: 3274149 - RNA, 19 nt, Artificial Sequence
  Description of Artificial Sequence: Synthetic oligonucleotide
uaguguaaugcaucagugc

SEQ ID NO: 3274150 - RNA, 19 nt, Artificial Sequence
  Description of Artificial Sequence: Synthetic oligonucleotide
caagaaacuugauuauuac

SEQ ID NO: 3274151 - RNA, 19 nt, Artificial Sequence
  Description of Artificial Sequence: Synthetic oligonucleotide
ccgguauccaccaaaaugg

SEQ ID NO: 3274152 - RNA, 19 nt, Artificial Sequence
  Description of Artificial Sequence: Synthetic oligonucleotide
uuucuauguaggcugcaga

SEQ ID NO: 3274153 - RNA, 19 nt, Artificial Sequence
  Description of Artificial Sequence: Synthetic oligonucleotide
aagacagagccucucaguu

SEQ ID NO: 3274154 - RNA, 19 nt, Artificial Sequence
  Description of Artificial Sequence: Synthetic oligonucleotide
gaggguucaacugccaggg

SEQ ID NO: 3274155 - RNA, 19 nt, Artificial Sequence
  Description of Artificial Sequence: Synthetic oligonucleotide
aguuucuagucugucuacc

SEQ ID NO: 3274156 - RNA, 19 nt, Artificial Sequence
  Description of Artificial Sequence: Synthetic oligonucleotide
uguuacggccaggugaugg

SEQ ID NO: 3274157 - RNA, 19 nt, Artificial Sequence
  Description of Artificial Sequence: Synthetic oligonucleotide
acaccaaagagaggaaucg

SEQ ID NO: 3274158 - RNA, 19 nt, Artificial Sequence
  Description of Artificial Sequence: Synthetic oligonucleotide
uauaaggagugugaaugcc

SEQ ID NO: 3274159 - RNA, 19 nt, Artificial Sequence
  Description of Artificial Sequence: Synthetic oligonucleotide
uuaaaagcacaacguugug

SEQ ID NO: 3274160 - RNA, 19 nt, Artificial Sequence
  Description of Artificial Sequence: Synthetic oligonucleotide
aagugccaaucuucagagc

SEQ ID NO: 3274161 - RNA, 19 nt, Artificial Sequence
  Description of Artificial Sequence: Synthetic oligonucleotide
ucggcauucuccugugugg

SEQ ID NO: 3274162 - RNA, 19 nt, Artificial Sequence
  Description of Artificial Sequence: Synthetic oligonucleotide
ugaggaagcuucccgugag

SEQ ID NO: 3274163 - RNA, 19 nt, Artificial Sequence
  Description of Artificial Sequence: Synthetic oligonucleotide
caaagcacuaugauaauaa

SEQ ID NO: 3274164 - RNA, 19 nt, Artificial Sequence
  Description of Artificial Sequence: Synthetic oligonucleotide
uaacggucccgccagcuag

SEQ ID NO: 3274165 - RNA, 19 nt, Artificial Sequence
  Description of Artificial Sequence: Synthetic oligonucleotide
cacaauugcauaguucuag

SEQ ID NO: 3274166 - RNA, 19 nt, Artificial Sequence
  Description of Artificial Sequence: Synthetic oligonucleotide
guaggcugcagaucuauug

SEQ ID NO: 3274167 - RNA, 19 nt, Artificial Sequence
  Description of Artificial Sequence: Synthetic oligonucleotide
gcuuugauugcuaucaucc

SEQ ID NO: 3274168 - RNA, 19 nt, Artificial Sequence
  Description of Artificial Sequence: Synthetic oligonucleotide
gucaaaguuccuccgguag

SEQ ID NO: 3274169 - RNA, 19 nt, Artificial Sequence
  Description of Artificial Sequence: Synthetic oligonucleotide
cuggagaccucugaggugg

SEQ ID NO: 3274170 - RNA, 19 nt, Artificial Sequence
  Description of Artificial Sequence: Synthetic oligonucleotide
caaguuuggccaacagugg

SEQ ID NO: 3274171 - RNA, 19 nt, Artificial Sequence
  Description of Artificial Sequence: Synthetic oligonucleotide
uaaaagcacaacguugugu

SEQ ID NO: 3274172 - RNA, 19 nt, Artificial Sequence
  Description of Artificial Sequence: Synthetic oligonucleotide
ucaguuugaggcugcaagu

SEQ ID NO: 3274173 - RNA, 19 nt, Artificial Sequence
  Description of Artificial Sequence: Synthetic oligonucleotide
gagaggacaggcuugcuga

SEQ ID NO: 3274174 - RNA, 19 nt, Artificial Sequence
  Description of Artificial Sequence: Synthetic oligonucleotide
uucuauguaggcugcagau

SEQ ID NO: 3274175 - RNA, 19 nt, Artificial Sequence
  Description of Artificial Sequence: Synthetic oligonucleotide
aacgcacuguuugugacug

SEQ ID NO: 3274176 - RNA, 19 nt, Artificial Sequence
  Description of Artificial Sequence: Synthetic oligonucleotide
acuuuacucaacaaauuca

SEQ ID NO: 3274177 - RNA, 19 nt, Artificial Sequence
  Description of Artificial Sequence: Synthetic oligonucleotide
uuugguccgauuugggagu

SEQ ID NO: 3274178 - RNA, 19 nt, Artificial Sequence
  Description of Artificial Sequence: Synthetic oligonucleotide
uaggcccgcaucucaaugg

SEQ ID NO: 3274179 - RNA, 19 nt, Artificial Sequence
  Description of Artificial Sequence: Synthetic oligonucleotide
ucuaccccgcccuugccgg

SEQ ID NO: 3274180 - RNA, 19 nt, Artificial Sequence
  Description of Artificial Sequence: Synthetic oligonucleotide
uggguggcaccucaucacg

SEQ ID NO: 3274181 - RNA, 19 nt, Artificial Sequence
  Description of Artificial Sequence: Synthetic oligonucleotide
auuugggaguuguaggagu

SEQ ID NO: 3274182 - RNA, 19 nt, Artificial Sequence
  Description of Artificial Sequence: Synthetic oligonucleotide
ccauguaggccaaaggugg

SEQ ID NO: 3274183 - RNA, 19 nt, Artificial Sequence
  Description of Artificial Sequence: Synthetic oligonucleotide
ucccauguugccgaguucc

SEQ ID NO: 3274184 - RNA, 19 nt, Artificial Sequence
  Description of Artificial Sequence: Synthetic oligonucleotide
acauucuauaucccaccag

SEQ ID NO: 3274185 - RNA, 19 nt, Artificial Sequence
  Description of Artificial Sequence: Synthetic oligonucleotide
agcaugaguuauugcauug

SEQ ID NO: 3274186 - RNA, 19 nt, Artificial Sequence
  Description of Artificial Sequence: Synthetic oligonucleotide
cuuuaauagacaacugaaa

SEQ ID NO: 3274187 - RNA, 19 nt, Artificial Sequence
  Description of Artificial Sequence: Synthetic oligonucleotide
auagugaguggugacagcu

SEQ ID NO: 3274188 - RNA, 19 nt, Artificial Sequence
  Description of Artificial Sequence: Synthetic oligonucleotide
ugauugcuaucauccaaug

SEQ ID NO: 3274189 - RNA, 19 nt, Artificial Sequence
  Description of Artificial Sequence: Synthetic oligonucleotide
agugaguggugacagcuga

SEQ ID NO: 3274190 - RNA, 19 nt, Artificial Sequence
  Description of Artificial Sequence: Synthetic oligonucleotide
uuggcuauccgcaggugcu

SEQ ID NO: 3274191 - RNA, 19 nt, Artificial Sequence
  Description of Artificial Sequence: Synthetic oligonucleotide
acucaacaaauucagcuuu

SEQ ID NO: 3274192 - RNA, 19 nt, Artificial Sequence
  Description of Artificial Sequence: Synthetic oligonucleotide
uacguccaagucuugcugc

SEQ ID NO: 3274193 - RNA, 19 nt, Artificial Sequence
  Description of Artificial Sequence: Synthetic oligonucleotide
uccgccuagagcuaacggu

SEQ ID NO: 3274194 - RNA, 19 nt, Artificial Sequence
  Description of Artificial Sequence: Synthetic oligonucleotide
guaccauguaggccaaagg

SEQ ID NO: 3274195 - RNA, 19 nt, Artificial Sequence
  Description of Artificial Sequence: Synthetic oligonucleotide
agagcuaacggucccgcca

SEQ ID NO: 3274196 - RNA, 19 nt, Artificial Sequence
  Description of Artificial Sequence: Synthetic oligonucleotide
ucuucuaaaauacaaagca

SEQ ID NO: 3274197 - RNA, 19 nt, Artificial Sequence
  Description of Artificial Sequence: Synthetic oligonucleotide
uucuaaaauacaaagcaag

SEQ ID NO: 3274198 - RNA, 19 nt, Artificial Sequence
  Description of Artificial Sequence: Synthetic oligonucleotide
uaaaauacaaagcaagacu

SEQ ID NO: 3274199 - RNA, 19 nt, Artificial Sequence
  Description of Artificial Sequence: Synthetic oligonucleotide
aauacaaagcaagacuagc

SEQ ID NO: 3274200 - RNA, 19 nt, Artificial Sequence
  Description of Artificial Sequence: Synthetic oligonucleotide
agucuucuaaaauacaaag

SEQ ID NO: 3274201 - RNA, 19 nt, Artificial Sequence
  Description of Artificial Sequence: Synthetic oligonucleotide
ucuaaaauacaaagcaaga

SEQ ID NO: 3274202 - RNA, 19 nt, Artificial Sequence
  Description of Artificial Sequence: Synthetic oligonucleotide
agaguuugcaguuacggag

SEQ ID NO: 3274203 - RNA, 19 nt, Artificial Sequence
  Description of Artificial Sequence: Synthetic oligonucleotide
agugacaucauuccauuuc

SEQ ID NO: 3274204 - RNA, 19 nt, Artificial Sequence
  Description of Artificial Sequence: Synthetic oligonucleotide
uuucacauagucuuccaag

SEQ ID NO: 3274205 - RNA, 19 nt, Artificial Sequence
  Description of Artificial Sequence: Synthetic oligonucleotide
uacaaagcaagacuagcag

SEQ ID NO: 3274206 - RNA, 19 nt, Artificial Sequence
  Description of Artificial Sequence: Synthetic oligonucleotide
aaaacagaccugcaguucu

SEQ ID NO: 3274207 - RNA, 19 nt, Artificial Sequence
  Description of Artificial Sequence: Synthetic oligonucleotide
  modified_base (19)..(19): a, c, u, g, unknown or other
uuugcaguuacggagaggn

SEQ ID NO: 3274208 - RNA, 19 nt, Artificial Sequence
  Description of Artificial Sequence: Synthetic oligonucleotide
aguuguuucacauagucuu

SEQ ID NO: 3274209 - RNA, 19 nt, Artificial Sequence
  Description of Artificial Sequence: Synthetic oligonucleotide
uagcaguuguuucacauag

SEQ ID NO: 3274210 - RNA, 19 nt, Artificial Sequence
  Description of Artificial Sequence: Synthetic oligonucleotide
aagacuagcaguuguuuca

SEQ ID NO: 3274211 - RNA, 19 nt, Artificial Sequence
  Description of Artificial Sequence: Synthetic oligonucleotide
aaaauacaaagcaagacua

SEQ ID NO: 3274212 - RNA, 19 nt, Artificial Sequence
  Description of Artificial Sequence: Synthetic oligonucleotide
uaucugugcaaccuuacca

SEQ ID NO: 3274213 - RNA, 19 nt, Artificial Sequence
  Description of Artificial Sequence: Synthetic oligonucleotide
ugagaguuugcaguuacgg

SEQ ID NO: 3274214 - RNA, 19 nt, Artificial Sequence
  Description of Artificial Sequence: Synthetic oligonucleotide
uguauccuagccaagcaca

SEQ ID NO: 3274215 - RNA, 19 nt, Artificial Sequence
  Description of Artificial Sequence: Synthetic oligonucleotide
uuuccugagaguuugcagu

SEQ ID NO: 3274216 - RNA, 19 nt, Artificial Sequence
  Description of Artificial Sequence: Synthetic oligonucleotide
  modified_base (17)..(17): a, c, u, g, unknown or other
ugcaguuacggagaggngg

SEQ ID NO: 3274217 - RNA, 19 nt, Artificial Sequence
  Description of Artificial Sequence: Synthetic oligonucleotide
cuaaaauacaaagcaagac

SEQ ID NO: 3274218 - RNA, 19 nt, Artificial Sequence
  Description of Artificial Sequence: Synthetic oligonucleotide
aaccuuaccagucuucuaa

SEQ ID NO: 3274219 - RNA, 19 nt, Artificial Sequence
  Description of Artificial Sequence: Synthetic oligonucleotide
cacauagucuuccaagucc

SEQ ID NO: 3274220 - RNA, 19 nt, Artificial Sequence
  Description of Artificial Sequence: Synthetic oligonucleotide
aaauacaaagcaagacuag

SEQ ID NO: 3274221 - RNA, 19 nt, Artificial Sequence
  Description of Artificial Sequence: Synthetic oligonucleotide
aucugugcaaccuuaccag

SEQ ID NO: 3274222 - RNA, 19 nt, Artificial Sequence
  Description of Artificial Sequence: Synthetic oligonucleotide
uuaccagucuucuaaaaua

SEQ ID NO: 3274223 - RNA, 19 nt, Artificial Sequence
  Description of Artificial Sequence: Synthetic oligonucleotide
ucauuccauuuccugagag

SEQ ID NO: 3274224 - RNA, 19 nt, Artificial Sequence
  Description of Artificial Sequence: Synthetic oligonucleotide
acauagucuuccaaguccc

SEQ ID NO: 3274225 - RNA, 19 nt, Artificial Sequence
  Description of Artificial Sequence: Synthetic oligonucleotide
uucacauagucuuccaagu

SEQ ID NO: 3274226 - RNA, 19 nt, Artificial Sequence
  Description of Artificial Sequence: Synthetic oligonucleotide
uaccagucuucuaaaauac

SEQ ID NO: 3274227 - RNA, 19 nt, Artificial Sequence
  Description of Artificial Sequence: Synthetic oligonucleotide
caucauuccauuuccugag

SEQ ID NO: 3274228 - RNA, 19 nt, Artificial Sequence
  Description of Artificial Sequence: Synthetic oligonucleotide
gacaucauuccauuuccug

SEQ ID NO: 3274229 - RNA, 19 nt, Artificial Sequence
  Description of Artificial Sequence: Synthetic oligonucleotide
acaucauuccauuuccuga

SEQ ID NO: 3274230 - RNA, 19 nt, Artificial Sequence
  Description of Artificial Sequence: Synthetic oligonucleotide
ucuuccaagucccacuggu

SEQ ID NO: 3274231 - RNA, 19 nt, Artificial Sequence
  Description of Artificial Sequence: Synthetic oligonucleotide
auuuccugagaguuugcag

SEQ ID NO: 3274232 - RNA, 19 nt, Artificial Sequence
  Description of Artificial Sequence: Synthetic oligonucleotide
gugacaucauuccauuucc

SEQ ID NO: 3274233 - RNA, 19 nt, Artificial Sequence
  Description of Artificial Sequence: Synthetic oligonucleotide
ucccacugguuuaagaaac

SEQ ID NO: 3274234 - RNA, 19 nt, Artificial Sequence
  Description of Artificial Sequence: Synthetic oligonucleotide
acaaagcaagacuagcagu

SEQ ID NO: 3274235 - RNA, 19 nt, Artificial Sequence
  Description of Artificial Sequence: Synthetic oligonucleotide
uagccaagcacacugccac

SEQ ID NO: 3274236 - RNA, 19 nt, Artificial Sequence
  Description of Artificial Sequence: Synthetic oligonucleotide
auccuagccaagcacacug

SEQ ID NO: 3274237 - RNA, 19 nt, Artificial Sequence
  Description of Artificial Sequence: Synthetic oligonucleotide
aagcaagacuagcaguugu

SEQ ID NO: 3274238 - RNA, 19 nt, Artificial Sequence
  Description of Artificial Sequence: Synthetic oligonucleotide
uguguauccuagccaagca

SEQ ID NO: 3274239 - RNA, 19 nt, Artificial Sequence
  Description of Artificial Sequence: Synthetic oligonucleotide
ugugcaaccuuaccagucu

SEQ ID NO: 3274240 - RNA, 19 nt, Artificial Sequence
  Description of Artificial Sequence: Synthetic oligonucleotide
uccauuuccugagaguuug

SEQ ID NO: 3274241 - RNA, 19 nt, Artificial Sequence
  Description of Artificial Sequence: Synthetic oligonucleotide
cacugagugacaucauucc

SEQ ID NO: 3274242 - RNA, 19 nt, Artificial Sequence
  Description of Artificial Sequence: Synthetic oligonucleotide
agcacacugccacugagug

SEQ ID NO: 3274243 - RNA, 19 nt, Artificial Sequence
  Description of Artificial Sequence: Synthetic oligonucleotide
gucuucuaaaauacaaagc

SEQ ID NO: 3274244 - RNA, 19 nt, Artificial Sequence
  Description of Artificial Sequence: Synthetic oligonucleotide
cacacugccacugagugac

SEQ ID NO: 3274245 - RNA, 19 nt, Artificial Sequence
  Description of Artificial Sequence: Synthetic oligonucleotide
acuagcaguuguuucacau

SEQ ID NO: 3274246 - RNA, 19 nt, Artificial Sequence
  Description of Artificial Sequence: Synthetic oligonucleotide
aguucuaucugugcaaccu

SEQ ID NO: 3274247 - RNA, 19 nt, Artificial Sequence
  Description of Artificial Sequence: Synthetic oligonucleotide
agucccacugguuuaagaa

SEQ ID NO: 3274248 - RNA, 19 nt, Artificial Sequence
  Description of Artificial Sequence: Synthetic oligonucleotide
aaagcaagacuagcaguug

SEQ ID NO: 3274249 - RNA, 19 nt, Artificial Sequence
  Description of Artificial Sequence: Synthetic oligonucleotide
ucuaucugugcaaccuuac

SEQ ID NO: 3274250 - RNA, 19 nt, Artificial Sequence
  Description of Artificial Sequence: Synthetic oligonucleotide
uuguuucacauagucuucc

SEQ ID NO: 3274251 - RNA, 19 nt, Artificial Sequence
  Description of Artificial Sequence: Synthetic oligonucleotide
auagucuuccaagucccac

SEQ ID NO: 3274252 - RNA, 19 nt, Artificial Sequence
  Description of Artificial Sequence: Synthetic oligonucleotide
ucacauagucuuccaaguc

SEQ ID NO: 3274253 - RNA, 19 nt, Artificial Sequence
  Description of Artificial Sequence: Synthetic oligonucleotide
cuucuaaaauacaaagcaa

SEQ ID NO: 3274254 - RNA, 19 nt, Artificial Sequence
  Description of Artificial Sequence: Synthetic oligonucleotide
auacaaagcaagacuagca

SEQ ID NO: 3274255 - RNA, 19 nt, Artificial Sequence
  Description of Artificial Sequence: Synthetic oligonucleotide
acugagugacaucauucca

SEQ ID NO: 3274256 - RNA, 19 nt, Artificial Sequence
  Description of Artificial Sequence: Synthetic oligonucleotide
caagacuagcaguuguuuc

SEQ ID NO: 3274257 - RNA, 19 nt, Artificial Sequence
  Description of Artificial Sequence: Synthetic oligonucleotide
agaccugcaguucuaucug

SEQ ID NO: 3274258 - RNA, 19 nt, Artificial Sequence
  Description of Artificial Sequence: Synthetic oligonucleotide
agucuuccaagucccacug

SEQ ID NO: 3274259 - RNA, 19 nt, Artificial Sequence
  Description of Artificial Sequence: Synthetic oligonucleotide
auuccauuuccugagaguu

SEQ ID NO: 3274260 - RNA, 19 nt, Artificial Sequence
  Description of Artificial Sequence: Synthetic oligonucleotide
cuaucugugcaaccuuacc

SEQ ID NO: 3274261 - RNA, 19 nt, Artificial Sequence
  Description of Artificial Sequence: Synthetic oligonucleotide
uuccaagucccacugguuu

SEQ ID NO: 3274262 - RNA, 19 nt, Artificial Sequence
  Description of Artificial Sequence: Synthetic oligonucleotide
gagaguuugcaguuacgga

SEQ ID NO: 3274263 - RNA, 19 nt, Artificial Sequence
  Description of Artificial Sequence: Synthetic oligonucleotide
agacuagcaguuguuucac

SEQ ID NO: 3274264 - RNA, 19 nt, Artificial Sequence
  Description of Artificial Sequence: Synthetic oligonucleotide
uguuucacauagucuucca

SEQ ID NO: 3274265 - RNA, 19 nt, Artificial Sequence
  Description of Artificial Sequence: Synthetic oligonucleotide
uucuaucugugcaaccuua

SEQ ID NO: 3274266 - RNA, 19 nt, Artificial Sequence
  Description of Artificial Sequence: Synthetic oligonucleotide
ugcaguucuaucugugcaa

SEQ ID NO: 3274267 - RNA, 19 nt, Artificial Sequence
  Description of Artificial Sequence: Synthetic oligonucleotide
aguuugcaguuacggagag

SEQ ID NO: 3274268 - RNA, 19 nt, Artificial Sequence
  Description of Artificial Sequence: Synthetic oligonucleotide
uagucuuccaagucccacu

SEQ ID NO: 3274269 - RNA, 19 nt, Artificial Sequence
  Description of Artificial Sequence: Synthetic oligonucleotide
aagucccacugguuuaaga

SEQ ID NO: 3274270 - RNA, 19 nt, Artificial Sequence
  Description of Artificial Sequence: Synthetic oligonucleotide
ugagugacaucauuccauu

SEQ ID NO: 3274271 - RNA, 19 nt, Artificial Sequence
  Description of Artificial Sequence: Synthetic oligonucleotide
  modified_base (16)..(16): a, c, u, g, unknown or other
gcaguuacggagaggnggg

SEQ ID NO: 3274272 - RNA, 19 nt, Artificial Sequence
  Description of Artificial Sequence: Synthetic oligonucleotide
cuguguauccuagccaagc

SEQ ID NO: 3274273 - RNA, 19 nt, Artificial Sequence
  Description of Artificial Sequence: Synthetic oligonucleotide
ucugugcaaccuuaccagu

SEQ ID NO: 3274274 - RNA, 19 nt, Artificial Sequence
  Description of Artificial Sequence: Synthetic oligonucleotide
ugacaucauuccauuuccu

SEQ ID NO: 3274275 - RNA, 19 nt, Artificial Sequence
  Description of Artificial Sequence: Synthetic oligonucleotide
cugagaguuugcaguuacg

SEQ ID NO: 3274276 - RNA, 19 nt, Artificial Sequence
  Description of Artificial Sequence: Synthetic oligonucleotide
gcaguuguuucacauaguc

SEQ ID NO: 3274277 - RNA, 19 nt, Artificial Sequence
  Description of Artificial Sequence: Synthetic oligonucleotide
acagaccugcaguucuauc

SEQ ID NO: 3274278 - RNA, 19 nt, Artificial Sequence
  Description of Artificial Sequence: Synthetic oligonucleotide
acugccacugagugacauc

SEQ ID NO: 3274279 - RNA, 19 nt, Artificial Sequence
  Description of Artificial Sequence: Synthetic oligonucleotide
guguauccuagccaagcac

SEQ ID NO: 3274280 - RNA, 19 nt, Artificial Sequence
  Description of Artificial Sequence: Synthetic oligonucleotide
uccuagccaagcacacugc

SEQ ID NO: 3274281 - RNA, 19 nt, Artificial Sequence
  Description of Artificial Sequence: Synthetic oligonucleotide
cugugcaaccuuaccaguc

SEQ ID NO: 3274282 - RNA, 19 nt, Artificial Sequence
  Description of Artificial Sequence: Synthetic oligonucleotide
ugcaaccuuaccagucuuc

SEQ ID NO: 3274283 - RNA, 19 nt, Artificial Sequence
  Description of Artificial Sequence: Synthetic oligonucleotide
  modified_base (18)..(18): a, c, u, g, unknown or other
uugcaguuacggagaggng

SEQ ID NO: 3274284 - RNA, 19 nt, Artificial Sequence
  Description of Artificial Sequence: Synthetic oligonucleotide
gaguuugcaguuacggaga

SEQ ID NO: 3274285 - RNA, 19 nt, Artificial Sequence
  Description of Artificial Sequence: Synthetic oligonucleotide
caagcacacugccacugag

SEQ ID NO: 3274286 - RNA, 19 nt, Artificial Sequence
  Description of Artificial Sequence: Synthetic oligonucleotide
aacucagggcccuguguau

SEQ ID NO: 3274287 - RNA, 19 nt, Artificial Sequence
  Description of Artificial Sequence: Synthetic oligonucleotide
cucagggcccuguguaucc

SEQ ID NO: 3274288 - RNA, 19 nt, Artificial Sequence
  Description of Artificial Sequence: Synthetic oligonucleotide
cagucuucuaaaauacaaa

SEQ ID NO: 3274289 - RNA, 19 nt, Artificial Sequence
  Description of Artificial Sequence: Synthetic oligonucleotide
aucauuccauuuccugaga

SEQ ID NO: 3274290 - RNA, 19 nt, Artificial Sequence
  Description of Artificial Sequence: Synthetic oligonucleotide
caguucuaucugugcaacc

SEQ ID NO: 3274291 - RNA, 19 nt, Artificial Sequence
  Description of Artificial Sequence: Synthetic oligonucleotide
uccaagucccacugguuua

SEQ ID NO: 3274292 - RNA, 19 nt, Artificial Sequence
  Description of Artificial Sequence: Synthetic oligonucleotide
uuccugagaguuugcaguu

SEQ ID NO: 3274293 - RNA, 19 nt, Artificial Sequence
  Description of Artificial Sequence: Synthetic oligonucleotide
  modified_base (12)..(12): a, c, u, g, unknown or other
uuacggagaggngggaaaa

SEQ ID NO: 3274294 - RNA, 19 nt, Artificial Sequence
  Description of Artificial Sequence: Synthetic oligonucleotide
caaagcaagacuagcaguu

SEQ ID NO: 3274295 - RNA, 19 nt, Artificial Sequence
  Description of Artificial Sequence: Synthetic oligonucleotide
  modified_base (14)..(14): a, c, u, g, unknown or other
aguuacggagaggngggaa

SEQ ID NO: 3274296 - RNA, 19 nt, Artificial Sequence
  Description of Artificial Sequence: Synthetic oligonucleotide
uuuaucaccaaaaugagug

SEQ ID NO: 3274297 - RNA, 19 nt, Artificial Sequence
  Description of Artificial Sequence: Synthetic oligonucleotide
ucuaaaacuaauaacagca

SEQ ID NO: 3274298 - RNA, 19 nt, Artificial Sequence
  Description of Artificial Sequence: Synthetic oligonucleotide
uguucuaugauugagaucc

SEQ ID NO: 3274299 - RNA, 19 nt, Artificial Sequence
  Description of Artificial Sequence: Synthetic oligonucleotide
aaaucagucuaucacagac

SEQ ID NO: 3274300 - RNA, 19 nt, Artificial Sequence
  Description of Artificial Sequence: Synthetic oligonucleotide
gagauaaucauauaaauuc

SEQ ID NO: 3274301 - RNA, 19 nt, Artificial Sequence
  Description of Artificial Sequence: Synthetic oligonucleotide
aauauucugggauauguuc

SEQ ID NO: 3274302 - RNA, 19 nt, Artificial Sequence
  Description of Artificial Sequence: Synthetic oligonucleotide
aacacagcaauacagugac

SEQ ID NO: 3274303 - RNA, 19 nt, Artificial Sequence
  Description of Artificial Sequence: Synthetic oligonucleotide
aaauucaacauucuguucu

SEQ ID NO: 3274304 - RNA, 19 nt, Artificial Sequence
  Description of Artificial Sequence: Synthetic oligonucleotide
ucuaucuugacucagagau

SEQ ID NO: 3274305 - RNA, 19 nt, Artificial Sequence
  Description of Artificial Sequence: Synthetic oligonucleotide
agaauguucacugugaugg

SEQ ID NO: 3274306 - RNA, 19 nt, Artificial Sequence
  Description of Artificial Sequence: Synthetic oligonucleotide
uucuaaauaacacucaguc

SEQ ID NO: 3274307 - RNA, 19 nt, Artificial Sequence
  Description of Artificial Sequence: Synthetic oligonucleotide
aauuccaacacagcaauac

SEQ ID NO: 3274308 - RNA, 19 nt, Artificial Sequence
  Description of Artificial Sequence: Synthetic oligonucleotide
uccuauaugaggaacacug

SEQ ID NO: 3274309 - RNA, 19 nt, Artificial Sequence
  Description of Artificial Sequence: Synthetic oligonucleotide
ucauguaaaccuaauacug

SEQ ID NO: 3274310 - RNA, 19 nt, Artificial Sequence
  Description of Artificial Sequence: Synthetic oligonucleotide
acuaauaacagcaacaucu

SEQ ID NO: 3274311 - RNA, 19 nt, Artificial Sequence
  Description of Artificial Sequence: Synthetic oligonucleotide
aaugagauuggguuguaag

SEQ ID NO: 3274312 - RNA, 19 nt, Artificial Sequence
  Description of Artificial Sequence: Synthetic oligonucleotide
uuauguguaaucuacaaau

SEQ ID NO: 3274313 - RNA, 19 nt, Artificial Sequence
  Description of Artificial Sequence: Synthetic oligonucleotide
uuucuaaaacuaauaacag

SEQ ID NO: 3274314 - RNA, 19 nt, Artificial Sequence
  Description of Artificial Sequence: Synthetic oligonucleotide
agcuaguaaacacauauuc

SEQ ID NO: 3274315 - RNA, 19 nt, Artificial Sequence
  Description of Artificial Sequence: Synthetic oligonucleotide
uauguucuaaauaacacuc

SEQ ID NO: 3274316 - RNA, 19 nt, Artificial Sequence
  Description of Artificial Sequence: Synthetic oligonucleotide
uguguaaucuacaaauuca

SEQ ID NO: 3274317 - RNA, 19 nt, Artificial Sequence
  Description of Artificial Sequence: Synthetic oligonucleotide
uaaucauauaaauucacac

SEQ ID NO: 3274318 - RNA, 19 nt, Artificial Sequence
  Description of Artificial Sequence: Synthetic oligonucleotide
uauuccucgacuauuaagu

SEQ ID NO: 3274319 - RNA, 19 nt, Artificial Sequence
  Description of Artificial Sequence: Synthetic oligonucleotide
aacaucugcucacuggucg

SEQ ID NO: 3274320 - RNA, 19 nt, Artificial Sequence
  Description of Artificial Sequence: Synthetic oligonucleotide
auauggaaguuuuacaaag

SEQ ID NO: 3274321 - RNA, 19 nt, Artificial Sequence
  Description of Artificial Sequence: Synthetic oligonucleotide
uguaagaaaaugugggucc

SEQ ID NO: 3274322 - RNA, 19 nt, Artificial Sequence
  Description of Artificial Sequence: Synthetic oligonucleotide
aauuagcugagcuaaauuu

SEQ ID NO: 3274323 - RNA, 19 nt, Artificial Sequence
  Description of Artificial Sequence: Synthetic oligonucleotide
uguucuaaauaacacucag

SEQ ID NO: 3274324 - RNA, 19 nt, Artificial Sequence
  Description of Artificial Sequence: Synthetic oligonucleotide
uaccuugcaaacuaaacag

SEQ ID NO: 3274325 - RNA, 19 nt, Artificial Sequence
  Description of Artificial Sequence: Synthetic oligonucleotide
aaggucauauuacagagau

SEQ ID NO: 3274326 - RNA, 19 nt, Artificial Sequence
  Description of Artificial Sequence: Synthetic oligonucleotide
uaucagaucauauauggaa

SEQ ID NO: 3274327 - RNA, 19 nt, Artificial Sequence
  Description of Artificial Sequence: Synthetic oligonucleotide
aauacugaaaauguagaga

SEQ ID NO: 3274328 - RNA, 19 nt, Artificial Sequence
  Description of Artificial Sequence: Synthetic oligonucleotide
uucuaugcuagacuaaggc

SEQ ID NO: 3274329 - RNA, 19 nt, Artificial Sequence
  Description of Artificial Sequence: Synthetic oligonucleotide
aaaugugggucccuuuucg

SEQ ID NO: 3274330 - RNA, 19 nt, Artificial Sequence
  Description of Artificial Sequence: Synthetic oligonucleotide
auaugaggaacacuguuuc

SEQ ID NO: 3274331 - RNA, 19 nt, Artificial Sequence
  Description of Artificial Sequence: Synthetic oligonucleotide
guaaucuacaaauucaaca

SEQ ID NO: 3274332 - RNA, 19 nt, Artificial Sequence
  Description of Artificial Sequence: Synthetic oligonucleotide
aacccuuugaauauucugg

SEQ ID NO: 3274333 - RNA, 19 nt, Artificial Sequence
  Description of Artificial Sequence: Synthetic oligonucleotide
uggaaagaaacauccaacc

SEQ ID NO: 3274334 - RNA, 19 nt, Artificial Sequence
  Description of Artificial Sequence: Synthetic oligonucleotide
gacucagagaucuuguucc

SEQ ID NO: 3274335 - RNA, 19 nt, Artificial Sequence
  Description of Artificial Sequence: Synthetic oligonucleotide
guaaacacauauucuaugc

SEQ ID NO: 3274336 - RNA, 19 nt, Artificial Sequence
  Description of Artificial Sequence: Synthetic oligonucleotide
uuuucugaaauuagcugag

SEQ ID NO: 3274337 - RNA, 19 nt, Artificial Sequence
  Description of Artificial Sequence: Synthetic oligonucleotide
auauauggaaguuuuacaa

SEQ ID NO: 3274338 - RNA, 19 nt, Artificial Sequence
  Description of Artificial Sequence: Synthetic oligonucleotide
uucuaaaacuaauaacagc

SEQ ID NO: 3274339 - RNA, 19 nt, Artificial Sequence
  Description of Artificial Sequence: Synthetic oligonucleotide
aauaacagcaacaucugcu

SEQ ID NO: 3274340 - RNA, 19 nt, Artificial Sequence
  Description of Artificial Sequence: Synthetic oligonucleotide
ucaacauucuguucuauga

SEQ ID NO: 3274341 - RNA, 19 nt, Artificial Sequence
  Description of Artificial Sequence: Synthetic oligonucleotide
ucgacuauuaagugaauug

SEQ ID NO: 3274342 - RNA, 19 nt, Artificial Sequence
  Description of Artificial Sequence: Synthetic oligonucleotide
cacacaagcaauucaaagc

SEQ ID NO: 3274343 - RNA, 19 nt, Artificial Sequence
  Description of Artificial Sequence: Synthetic oligonucleotide
aaguacaucagguaccuaa

SEQ ID NO: 3274344 - RNA, 19 nt, Artificial Sequence
  Description of Artificial Sequence: Synthetic oligonucleotide
uacagugacaaacacuucu

SEQ ID NO: 3274345 - RNA, 19 nt, Artificial Sequence
  Description of Artificial Sequence: Synthetic oligonucleotide
ucuaucacagacuuuucug

SEQ ID NO: 3274346 - RNA, 19 nt, Artificial Sequence
  Description of Artificial Sequence: Synthetic oligonucleotide
aagugaauugcucucuucu

SEQ ID NO: 3274347 - RNA, 19 nt, Artificial Sequence
  Description of Artificial Sequence: Synthetic oligonucleotide
aauucaaagcuaguaaaca

SEQ ID NO: 3274348 - RNA, 19 nt, Artificial Sequence
  Description of Artificial Sequence: Synthetic oligonucleotide
auauguucuaaauaacacu

SEQ ID NO: 3274349 - RNA, 19 nt, Artificial Sequence
  Description of Artificial Sequence: Synthetic oligonucleotide
acacaagcaauucaaagcu

SEQ ID NO: 3274350 - RNA, 19 nt, Artificial Sequence
  Description of Artificial Sequence: Synthetic oligonucleotide
aauaacacucaguccagca

SEQ ID NO: 3274351 - RNA, 19 nt, Artificial Sequence
  Description of Artificial Sequence: Synthetic oligonucleotide
uuugguuuggggaggaggc

SEQ ID NO: 3274352 - RNA, 19 nt, Artificial Sequence
  Description of Artificial Sequence: Synthetic oligonucleotide
aaaaugugggucccuuuuc

SEQ ID NO: 3274353 - RNA, 19 nt, Artificial Sequence
  Description of Artificial Sequence: Synthetic oligonucleotide
gacaacaagccuaagagac

SEQ ID NO: 3274354 - RNA, 19 nt, Artificial Sequence
  Description of Artificial Sequence: Synthetic oligonucleotide
ucuaugauugagauccuca

SEQ ID NO: 3274355 - RNA, 19 nt, Artificial Sequence
  Description of Artificial Sequence: Synthetic oligonucleotide
uuccaacacagcaauacag

SEQ ID NO: 3274356 - RNA, 19 nt, Artificial Sequence
  Description of Artificial Sequence: Synthetic oligonucleotide
uucuaucuccuauaugagg

SEQ ID NO: 3274357 - RNA, 19 nt, Artificial Sequence
  Description of Artificial Sequence: Synthetic oligonucleotide
gauauguucuaaauaacac

SEQ ID NO: 3274358 - RNA, 19 nt, Artificial Sequence
  Description of Artificial Sequence: Synthetic oligonucleotide
uugaaaugucuauuccucg

SEQ ID NO: 3274359 - RNA, 19 nt, Artificial Sequence
  Description of Artificial Sequence: Synthetic oligonucleotide
uauucuaugcuagacuaag

SEQ ID NO: 3274360 - RNA, 19 nt, Artificial Sequence
  Description of Artificial Sequence: Synthetic oligonucleotide
aguaaacacauauucuaug

SEQ ID NO: 3274361 - RNA, 19 nt, Artificial Sequence
  Description of Artificial Sequence: Synthetic oligonucleotide
ugaaaauguagagaaugag

SEQ ID NO: 3274362 - RNA, 19 nt, Artificial Sequence
  Description of Artificial Sequence: Synthetic oligonucleotide
agugacaaacacuucuauc

SEQ ID NO: 3274363 - RNA, 19 nt, Artificial Sequence
  Description of Artificial Sequence: Synthetic oligonucleotide
uuaucaccaaaaugagugg

SEQ ID NO: 3274364 - RNA, 19 nt, Artificial Sequence
  Description of Artificial Sequence: Synthetic oligonucleotide
acaaaguacaucagguacc

SEQ ID NO: 3274365 - RNA, 19 nt, Artificial Sequence
  Description of Artificial Sequence: Synthetic oligonucleotide
uuuuauguguaaucuacaa

SEQ ID NO: 3274366 - RNA, 19 nt, Artificial Sequence
  Description of Artificial Sequence: Synthetic oligonucleotide
uuuauguguaaucuacaaa

SEQ ID NO: 3274367 - RNA, 19 nt, Artificial Sequence
  Description of Artificial Sequence: Synthetic oligonucleotide
ucauauauggaaguuuuac

SEQ ID NO: 3274368 - RNA, 19 nt, Artificial Sequence
  Description of Artificial Sequence: Synthetic oligonucleotide
acaaauucaacauucuguu

SEQ ID NO: 3274369 - RNA, 19 nt, Artificial Sequence
  Description of Artificial Sequence: Synthetic oligonucleotide
gguuguaagaaaauguggg

SEQ ID NO: 3274370 - RNA, 19 nt, Artificial Sequence
  Description of Artificial Sequence: Synthetic oligonucleotide
ucugcuuguccuuagcuca

SEQ ID NO: 3274371 - RNA, 19 nt, Artificial Sequence
  Description of Artificial Sequence: Synthetic oligonucleotide
ucuaugcuagacuaaggca

SEQ ID NO: 3274372 - RNA, 19 nt, Artificial Sequence
  Description of Artificial Sequence: Synthetic oligonucleotide
uaucuugacucagagaucu

SEQ ID NO: 3274373 - RNA, 19 nt, Artificial Sequence
  Description of Artificial Sequence: Synthetic oligonucleotide
uauuacagagauaaucaua

SEQ ID NO: 3274374 - RNA, 19 nt, Artificial Sequence
  Description of Artificial Sequence: Synthetic oligonucleotide
agaucuuguucccauugcg

SEQ ID NO: 3274375 - RNA, 19 nt, Artificial Sequence
  Description of Artificial Sequence: Synthetic oligonucleotide
augauugagauccucauuu

SEQ ID NO: 3274376 - RNA, 19 nt, Artificial Sequence
  Description of Artificial Sequence: Synthetic oligonucleotide
auuacagagauaaucauau

SEQ ID NO: 3274377 - RNA, 19 nt, Artificial Sequence
  Description of Artificial Sequence: Synthetic oligonucleotide
ucauauaaauucacacaca

SEQ ID NO: 3274378 - RNA, 19 nt, Artificial Sequence
  Description of Artificial Sequence: Synthetic oligonucleotide
aaauaacacucaguccagc

SEQ ID NO: 3274379 - RNA, 19 nt, Artificial Sequence
  Description of Artificial Sequence: Synthetic oligonucleotide
gauggaaagaaacauccaa

SEQ ID NO: 3274380 - RNA, 19 nt, Artificial Sequence
  Description of Artificial Sequence: Synthetic oligonucleotide
uacaucagguaccuaauaa

SEQ ID NO: 3274381 - RNA, 19 nt, Artificial Sequence
  Description of Artificial Sequence: Synthetic oligonucleotide
acuauuaagugaauugcuc

SEQ ID NO: 3274382 - RNA, 19 nt, Artificial Sequence
  Description of Artificial Sequence: Synthetic oligonucleotide
uuggugggagacaacaagc

SEQ ID NO: 3274383 - RNA, 19 nt, Artificial Sequence
  Description of Artificial Sequence: Synthetic oligonucleotide
ccuaauacugaaaauguag

SEQ ID NO: 3274384 - RNA, 19 nt, Artificial Sequence
  Description of Artificial Sequence: Synthetic oligonucleotide
uccucgacuauuaagugaa

SEQ ID NO: 3274385 - RNA, 19 nt, Artificial Sequence
  Description of Artificial Sequence: Synthetic oligonucleotide
uauauggaaguuuuacaaa

SEQ ID NO: 3274386 - RNA, 19 nt, Artificial Sequence
  Description of Artificial Sequence: Synthetic oligonucleotide
uauuaagugaauugcucuc

SEQ ID NO: 3274387 - RNA, 19 nt, Artificial Sequence
  Description of Artificial Sequence: Synthetic oligonucleotide
uugcaaacuaaacagucau

SEQ ID NO: 3274388 - RNA, 19 nt, Artificial Sequence
  Description of Artificial Sequence: Synthetic oligonucleotide
gacaaacacuucuaucucc

SEQ ID NO: 3274389 - RNA, 19 nt, Artificial Sequence
  Description of Artificial Sequence: Synthetic oligonucleotide
aaccuaauacugaaaaugu

SEQ ID NO: 3274390 - RNA, 19 nt, Artificial Sequence
  Description of Artificial Sequence: Synthetic oligonucleotide
uauaugaggaacacuguuu

SEQ ID NO: 3274391 - RNA, 19 nt, Artificial Sequence
  Description of Artificial Sequence: Synthetic oligonucleotide
guaaaccuaauacugaaaa

SEQ ID NO: 3274392 - RNA, 19 nt, Artificial Sequence
  Description of Artificial Sequence: Synthetic oligonucleotide
ugaaaugucuauuccucga

SEQ ID NO: 3274393 - RNA, 19 nt, Artificial Sequence
  Description of Artificial Sequence: Synthetic oligonucleotide
auggaaagaaacauccaac

SEQ ID NO: 3274394 - RNA, 19 nt, Artificial Sequence
  Description of Artificial Sequence: Synthetic oligonucleotide
ucacacacaagcaauucaa

SEQ ID NO: 3274395 - RNA, 19 nt, Artificial Sequence
  Description of Artificial Sequence: Synthetic oligonucleotide
ucuguucuaugauugagau

SEQ ID NO: 3274396 - RNA, 19 nt, Artificial Sequence
  Description of Artificial Sequence: Synthetic oligonucleotide
aaaguauccacuauaaacc

SEQ ID NO: 3274397 - RNA, 19 nt, Artificial Sequence
  Description of Artificial Sequence: Synthetic oligonucleotide
ugaaaugcaucuaauaucc

SEQ ID NO: 3274398 - RNA, 19 nt, Artificial Sequence
  Description of Artificial Sequence: Synthetic oligonucleotide
cauaacaaaaucaaggaag

SEQ ID NO: 3274399 - RNA, 19 nt, Artificial Sequence
  Description of Artificial Sequence: Synthetic oligonucleotide
caugaugugacuuagcucc

SEQ ID NO: 3274400 - RNA, 19 nt, Artificial Sequence
  Description of Artificial Sequence: Synthetic oligonucleotide
gaaauuuccaaaucguacg

SEQ ID NO: 3274401 - RNA, 19 nt, Artificial Sequence
  Description of Artificial Sequence: Synthetic oligonucleotide
gaaaguauccacuauaaac

SEQ ID NO: 3274402 - RNA, 19 nt, Artificial Sequence
  Description of Artificial Sequence: Synthetic oligonucleotide
auuggaaauuuccaaaucg

SEQ ID NO: 3274403 - RNA, 19 nt, Artificial Sequence
  Description of Artificial Sequence: Synthetic oligonucleotide
aaaaucaaggaagagauga

SEQ ID NO: 3274404 - RNA, 19 nt, Artificial Sequence
  Description of Artificial Sequence: Synthetic oligonucleotide
uacgguaugaagaacuugg

SEQ ID NO: 3274405 - RNA, 19 nt, Artificial Sequence
  Description of Artificial Sequence: Synthetic oligonucleotide
uccacuauaaaccaccgcc

SEQ ID NO: 3274406 - RNA, 19 nt, Artificial Sequence
  Description of Artificial Sequence: Synthetic oligonucleotide
uugguucucacaaacaucc

SEQ ID NO: 3274407 - RNA, 19 nt, Artificial Sequence
  Description of Artificial Sequence: Synthetic oligonucleotide
uuugaaaugcaucuaauau

SEQ ID NO: 3274408 - RNA, 19 nt, Artificial Sequence
  Description of Artificial Sequence: Synthetic oligonucleotide
aaauuuccaaaucguacgg

SEQ ID NO: 3274409 - RNA, 19 nt, Artificial Sequence
  Description of Artificial Sequence: Synthetic oligonucleotide
uaaagcaccacugugauca

SEQ ID NO: 3274410 - RNA, 19 nt, Artificial Sequence
  Description of Artificial Sequence: Synthetic oligonucleotide
ucauugugcaaccugaggc

SEQ ID NO: 3274411 - RNA, 19 nt, Artificial Sequence
  Description of Artificial Sequence: Synthetic oligonucleotide
ugaggcaauacacauaaca

SEQ ID NO: 3274412 - RNA, 19 nt, Artificial Sequence
  Description of Artificial Sequence: Synthetic oligonucleotide
aauacacauaacaaaauca

SEQ ID NO: 3274413 - RNA, 19 nt, Artificial Sequence
  Description of Artificial Sequence: Synthetic oligonucleotide
ucuagaacuguccauacgu

SEQ ID NO: 3274414 - RNA, 19 nt, Artificial Sequence
  Description of Artificial Sequence: Synthetic oligonucleotide
aagaacuuggcuucuucac

SEQ ID NO: 3274415 - RNA, 19 nt, Artificial Sequence
  Description of Artificial Sequence: Synthetic oligonucleotide
aaggaagagaugaacaaac

SEQ ID NO: 3274416 - RNA, 19 nt, Artificial Sequence
  Description of Artificial Sequence: Synthetic oligonucleotide
acacauaacaaaaucaagg

SEQ ID NO: 3274417 - RNA, 19 nt, Artificial Sequence
  Description of Artificial Sequence: Synthetic oligonucleotide
caucuaauauccaagaguc

SEQ ID NO: 3274418 - RNA, 19 nt, Artificial Sequence
  Description of Artificial Sequence: Synthetic oligonucleotide
uccaguagaguuuagcugc

SEQ ID NO: 3274419 - RNA, 19 nt, Artificial Sequence
  Description of Artificial Sequence: Synthetic oligonucleotide
aacaaaaucaaggaagaga

SEQ ID NO: 3274420 - RNA, 19 nt, Artificial Sequence
  Description of Artificial Sequence: Synthetic oligonucleotide
gaagagaugaacaaacagc

SEQ ID NO: 3274421 - RNA, 19 nt, Artificial Sequence
  Description of Artificial Sequence: Synthetic oligonucleotide
aacagcagaguguaaagca

SEQ ID NO: 3274422 - RNA, 19 nt, Artificial Sequence
  Description of Artificial Sequence: Synthetic oligonucleotide
aaucaaggaagagaugaac

SEQ ID NO: 3274423 - RNA, 19 nt, Artificial Sequence
  Description of Artificial Sequence: Synthetic oligonucleotide
uaaaccaccgccaaugggu

SEQ ID NO: 3274424 - RNA, 19 nt, Artificial Sequence
  Description of Artificial Sequence: Synthetic oligonucleotide
aagagaugaacaaacagca

SEQ ID NO: 3274425 - RNA, 19 nt, Artificial Sequence
  Description of Artificial Sequence: Synthetic oligonucleotide
auauccaagagucauugug

SEQ ID NO: 3274426 - RNA, 19 nt, Artificial Sequence
  Description of Artificial Sequence: Synthetic oligonucleotide
aaacagcagaguguaaagc

SEQ ID NO: 3274427 - RNA, 19 nt, Artificial Sequence
  Description of Artificial Sequence: Synthetic oligonucleotide
uauccaagagucauugugc

SEQ ID NO: 3274428 - RNA, 19 nt, Artificial Sequence
  Description of Artificial Sequence: Synthetic oligonucleotide
uguggauucuuugaaaugc

SEQ ID NO: 3274429 - RNA, 19 nt, Artificial Sequence
  Description of Artificial Sequence: Synthetic oligonucleotide
aaugcaucuaauauccaag

SEQ ID NO: 3274430 - RNA, 19 nt, Artificial Sequence
  Description of Artificial Sequence: Synthetic oligonucleotide
uucaugaugugacuuagcu

SEQ ID NO: 3274431 - RNA, 19 nt, Artificial Sequence
  Description of Artificial Sequence: Synthetic oligonucleotide
agaguuuagcugcaucugc

SEQ ID NO: 3274432 - RNA, 19 nt, Artificial Sequence
  Description of Artificial Sequence: Synthetic oligonucleotide
ugaacaaacagcagagugu

SEQ ID NO: 3274433 - RNA, 19 nt, Artificial Sequence
  Description of Artificial Sequence: Synthetic oligonucleotide
uacacauaacaaaaucaag

SEQ ID NO: 3274434 - RNA, 19 nt, Artificial Sequence
  Description of Artificial Sequence: Synthetic oligonucleotide
augaacaaacagcagagug

SEQ ID NO: 3274435 - RNA, 19 nt, Artificial Sequence
  Description of Artificial Sequence: Synthetic oligonucleotide
aaaugcaucuaauauccaa

SEQ ID NO: 3274436 - RNA, 19 nt, Artificial Sequence
  Description of Artificial Sequence: Synthetic oligonucleotide
aaaucguacgguaugaaga

SEQ ID NO: 3274437 - RNA, 19 nt, Artificial Sequence
  Description of Artificial Sequence: Synthetic oligonucleotide
ugugaucacgacaccaagg

SEQ ID NO: 3274438 - RNA, 19 nt, Artificial Sequence
  Description of Artificial Sequence: Synthetic oligonucleotide
uugaaaugcaucuaauauc

SEQ ID NO: 3274439 - RNA, 19 nt, Artificial Sequence
  Description of Artificial Sequence: Synthetic oligonucleotide
auuaugugcaagcccgccc

SEQ ID NO: 3274440 - RNA, 19 nt, Artificial Sequence
  Description of Artificial Sequence: Synthetic oligonucleotide
acaaacauccaguagaguu

SEQ ID NO: 3274441 - RNA, 19 nt, Artificial Sequence
  Description of Artificial Sequence: Synthetic oligonucleotide
gagaugaacaaacagcaga

SEQ ID NO: 3274442 - RNA, 19 nt, Artificial Sequence
  Description of Artificial Sequence: Synthetic oligonucleotide
aaugggucuagaacugucc

SEQ ID NO: 3274443 - RNA, 19 nt, Artificial Sequence
  Description of Artificial Sequence: Synthetic oligonucleotide
uauaaaccaccgccaaugg

SEQ ID NO: 3274444 - RNA, 19 nt, Artificial Sequence
  Description of Artificial Sequence: Synthetic oligonucleotide
aaguauccacuauaaacca

SEQ ID NO: 3274445 - RNA, 19 nt, Artificial Sequence
  Description of Artificial Sequence: Synthetic oligonucleotide
ucacaaacauccaguagag

SEQ ID NO: 3274446 - RNA, 19 nt, Artificial Sequence
  Description of Artificial Sequence: Synthetic oligonucleotide
gauucuuugaaaugcaucu

SEQ ID NO: 3274447 - RNA, 19 nt, Artificial Sequence
  Description of Artificial Sequence: Synthetic oligonucleotide
ucuaauauccaagagucau

SEQ ID NO: 3274448 - RNA, 19 nt, Artificial Sequence
  Description of Artificial Sequence: Synthetic oligonucleotide
gugacuuagcuccugauug

SEQ ID NO: 3274449 - RNA, 19 nt, Artificial Sequence
  Description of Artificial Sequence: Synthetic oligonucleotide
uuggaaauuuccaaaucgu

SEQ ID NO: 3274450 - RNA, 19 nt, Artificial Sequence
  Description of Artificial Sequence: Synthetic oligonucleotide
uaauauccaagagucauug

SEQ ID NO: 3274451 - RNA, 19 nt, Artificial Sequence
  Description of Artificial Sequence: Synthetic oligonucleotide
accacugugaucacgacac

SEQ ID NO: 3274452 - RNA, 19 nt, Artificial Sequence
  Description of Artificial Sequence: Synthetic oligonucleotide
acaaaaucaaggaagagau

SEQ ID NO: 3274453 - RNA, 19 nt, Artificial Sequence
  Description of Artificial Sequence: Synthetic oligonucleotide
gaucacgacaccaaggaug

SEQ ID NO: 3274454 - RNA, 19 nt, Artificial Sequence
  Description of Artificial Sequence: Synthetic oligonucleotide
aguccuccccauuaugugc

SEQ ID NO: 3274455 - RNA, 19 nt, Artificial Sequence
  Description of Artificial Sequence: Synthetic oligonucleotide
aaucguacgguaugaagaa

SEQ ID NO: 3274456 - RNA, 19 nt, Artificial Sequence
  Description of Artificial Sequence: Synthetic oligonucleotide
auggcugaguguuugguuc

SEQ ID NO: 3274457 - RNA, 19 nt, Artificial Sequence
  Description of Artificial Sequence: Synthetic oligonucleotide
uuaugugcaagcccgcccc

SEQ ID NO: 3274458 - RNA, 19 nt, Artificial Sequence
  Description of Artificial Sequence: Synthetic oligonucleotide
ugcaauaggaguccucccc

SEQ ID NO: 3274459 - RNA, 19 nt, Artificial Sequence
  Description of Artificial Sequence: Synthetic oligonucleotide
ugcaucuaauauccaagag

SEQ ID NO: 3274460 - RNA, 19 nt, Artificial Sequence
  Description of Artificial Sequence: Synthetic oligonucleotide
caauacacauaacaaaauc

SEQ ID NO: 3274461 - RNA, 19 nt, Artificial Sequence
  Description of Artificial Sequence: Synthetic oligonucleotide
aguguaaagcaccacugug

SEQ ID NO: 3274462 - RNA, 19 nt, Artificial Sequence
  Description of Artificial Sequence: Synthetic oligonucleotide
uucuuugaaaugcaucuaa

SEQ ID NO: 3274463 - RNA, 19 nt, Artificial Sequence
  Description of Artificial Sequence: Synthetic oligonucleotide
uauccacuauaaaccaccg

SEQ ID NO: 3274464 - RNA, 19 nt, Artificial Sequence
  Description of Artificial Sequence: Synthetic oligonucleotide
cucacaaacauccaguaga

SEQ ID NO: 3274465 - RNA, 19 nt, Artificial Sequence
  Description of Artificial Sequence: Synthetic oligonucleotide
aaggaaaguauccacuaua

SEQ ID NO: 3274466 - RNA, 19 nt, Artificial Sequence
  Description of Artificial Sequence: Synthetic oligonucleotide
agaacuguccauacguccc

SEQ ID NO: 3274467 - RNA, 19 nt, Artificial Sequence
  Description of Artificial Sequence: Synthetic oligonucleotide
ucaaggaagagaugaacaa

SEQ ID NO: 3274468 - RNA, 19 nt, Artificial Sequence
  Description of Artificial Sequence: Synthetic oligonucleotide
ucagaccuuuucaugaugu

SEQ ID NO: 3274469 - RNA, 19 nt, Artificial Sequence
  Description of Artificial Sequence: Synthetic oligonucleotide
ucugcaauaggaguccucc

SEQ ID NO: 3274470 - RNA, 19 nt, Artificial Sequence
  Description of Artificial Sequence: Synthetic oligonucleotide
aguagaguuuagcugcauc

SEQ ID NO: 3274471 - RNA, 19 nt, Artificial Sequence
  Description of Artificial Sequence: Synthetic oligonucleotide
ucguacgguaugaagaacu

SEQ ID NO: 3274472 - RNA, 19 nt, Artificial Sequence
  Description of Artificial Sequence: Synthetic oligonucleotide
uucacuguggauucuuuga

SEQ ID NO: 3274473 - RNA, 19 nt, Artificial Sequence
  Description of Artificial Sequence: Synthetic oligonucleotide
cacauaacaaaaucaagga

SEQ ID NO: 3274474 - RNA, 19 nt, Artificial Sequence
  Description of Artificial Sequence: Synthetic oligonucleotide
cuauaaaccaccgccaaug

SEQ ID NO: 3274475 - RNA, 19 nt, Artificial Sequence
  Description of Artificial Sequence: Synthetic oligonucleotide
uagaacuguccauacgucc

SEQ ID NO: 3274476 - RNA, 19 nt, Artificial Sequence
  Description of Artificial Sequence: Synthetic oligonucleotide
uguaaagcaccacugugau

SEQ ID NO: 3274477 - RNA, 19 nt, Artificial Sequence
  Description of Artificial Sequence: Synthetic oligonucleotide
gaacuuggcuucuucacug

SEQ ID NO: 3274478 - RNA, 19 nt, Artificial Sequence
  Description of Artificial Sequence: Synthetic oligonucleotide
uuuucaugaugugacuuag

SEQ ID NO: 3274479 - RNA, 19 nt, Artificial Sequence
  Description of Artificial Sequence: Synthetic oligonucleotide
ugcaucugcaauaggaguc

SEQ ID NO: 3274480 - RNA, 19 nt, Artificial Sequence
  Description of Artificial Sequence: Synthetic oligonucleotide
ugcucagaccuuuucauga

SEQ ID NO: 3274481 - RNA, 19 nt, Artificial Sequence
  Description of Artificial Sequence: Synthetic oligonucleotide
agaugaacaaacagcagag

SEQ ID NO: 3274482 - RNA, 19 nt, Artificial Sequence
  Description of Artificial Sequence: Synthetic oligonucleotide
ugauuggaaauuuccaaau

SEQ ID NO: 3274483 - RNA, 19 nt, Artificial Sequence
  Description of Artificial Sequence: Synthetic oligonucleotide
auaacaaaaucaaggaaga

SEQ ID NO: 3274484 - RNA, 19 nt, Artificial Sequence
  Description of Artificial Sequence: Synthetic oligonucleotide
ucucacaaacauccaguag

SEQ ID NO: 3274485 - RNA, 19 nt, Artificial Sequence
  Description of Artificial Sequence: Synthetic oligonucleotide
ugacuuagcuccugauugg

SEQ ID NO: 3274486 - RNA, 19 nt, Artificial Sequence
  Description of Artificial Sequence: Synthetic oligonucleotide
uuagcugcaucugcaauag

SEQ ID NO: 3274487 - RNA, 19 nt, Artificial Sequence
  Description of Artificial Sequence: Synthetic oligonucleotide
uuccaaaucguacgguaug

SEQ ID NO: 3274488 - RNA, 19 nt, Artificial Sequence
  Description of Artificial Sequence: Synthetic oligonucleotide
ggaagagaugaacaaacag

SEQ ID NO: 3274489 - RNA, 19 nt, Artificial Sequence
  Description of Artificial Sequence: Synthetic oligonucleotide
caaaucguacgguaugaag

SEQ ID NO: 3274490 - RNA, 19 nt, Artificial Sequence
  Description of Artificial Sequence: Synthetic oligonucleotide
uccugauuggaaauuucca

SEQ ID NO: 3274491 - RNA, 19 nt, Artificial Sequence
  Description of Artificial Sequence: Synthetic oligonucleotide
auaaaccaccgccaauggg

SEQ ID NO: 3274492 - RNA, 19 nt, Artificial Sequence
  Description of Artificial Sequence: Synthetic oligonucleotide
acauaacaaaaucaaggaa

SEQ ID NO: 3274493 - RNA, 19 nt, Artificial Sequence
  Description of Artificial Sequence: Synthetic oligonucleotide
guauccacuauaaaccacc

SEQ ID NO: 3274494 - RNA, 19 nt, Artificial Sequence
  Description of Artificial Sequence: Synthetic oligonucleotide
uuuagcugcaucugcaaua

SEQ ID NO: 3274495 - RNA, 19 nt, Artificial Sequence
  Description of Artificial Sequence: Synthetic oligonucleotide
guaugaagaacuuggcuuc

SEQ ID NO: 3274496 - RNA, 19 nt, Artificial Sequence
  Description of Artificial Sequence: Synthetic oligonucleotide
ugucaugauacucaaaacg

SEQ ID NO: 3274497 - RNA, 19 nt, Artificial Sequence
  Description of Artificial Sequence: Synthetic oligonucleotide
uaaagugagggucaaaagg

SEQ ID NO: 3274498 - RNA, 19 nt, Artificial Sequence
  Description of Artificial Sequence: Synthetic oligonucleotide
aagauguccagcuucuucc

SEQ ID NO: 3274499 - RNA, 19 nt, Artificial Sequence
  Description of Artificial Sequence: Synthetic oligonucleotide
aaagugagggucaaaaggc

SEQ ID NO: 3274500 - RNA, 19 nt, Artificial Sequence
  Description of Artificial Sequence: Synthetic oligonucleotide
aaagugauggagcaaauga

SEQ ID NO: 3274501 - RNA, 19 nt, Artificial Sequence
  Description of Artificial Sequence: Synthetic oligonucleotide
aaauugucugucaugauac

SEQ ID NO: 3274502 - RNA, 19 nt, Artificial Sequence
  Description of Artificial Sequence: Synthetic oligonucleotide
agugucaucagggugaacc

SEQ ID NO: 3274503 - RNA, 19 nt, Artificial Sequence
  Description of Artificial Sequence: Synthetic oligonucleotide
uuuccuaauccaaaguucc

SEQ ID NO: 3274504 - RNA, 19 nt, Artificial Sequence
  Description of Artificial Sequence: Synthetic oligonucleotide
aauccaaaguuccucagug

SEQ ID NO: 3274505 - RNA, 19 nt, Artificial Sequence
  Description of Artificial Sequence: Synthetic oligonucleotide
ucugucaugauacucaaaa

SEQ ID NO: 3274506 - RNA, 19 nt, Artificial Sequence
  Description of Artificial Sequence: Synthetic oligonucleotide
uuguugaucuuaaagugag

SEQ ID NO: 3274507 - RNA, 19 nt, Artificial Sequence
  Description of Artificial Sequence: Synthetic oligonucleotide
aaugauauuggaaacggca

SEQ ID NO: 3274508 - RNA, 19 nt, Artificial Sequence
  Description of Artificial Sequence: Synthetic oligonucleotide
agcucuucuuuccuaaucc

SEQ ID NO: 3274509 - RNA, 19 nt, Artificial Sequence
  Description of Artificial Sequence: Synthetic oligonucleotide
gauggagcaaaugauauug

SEQ ID NO: 3274510 - RNA, 19 nt, Artificial Sequence
  Description of Artificial Sequence: Synthetic oligonucleotide
agcaaaugauauuggaaac

SEQ ID NO: 3274511 - RNA, 19 nt, Artificial Sequence
  Description of Artificial Sequence: Synthetic oligonucleotide
guugaucuuaaagugaggg

SEQ ID NO: 3274512 - RNA, 19 nt, Artificial Sequence
  Description of Artificial Sequence: Synthetic oligonucleotide
cauuguugaucuuaaagug

SEQ ID NO: 3274513 - RNA, 19 nt, Artificial Sequence
  Description of Artificial Sequence: Synthetic oligonucleotide
uuggaaacggcauuguuga

SEQ ID NO: 3274514 - RNA, 19 nt, Artificial Sequence
  Description of Artificial Sequence: Synthetic oligonucleotide
aaaaggcuguccucccucc

SEQ ID NO: 3274515 - RNA, 19 nt, Artificial Sequence
  Description of Artificial Sequence: Synthetic oligonucleotide
aaaacgcucgccaaaagug

SEQ ID NO: 3274516 - RNA, 19 nt, Artificial Sequence
  Description of Artificial Sequence: Synthetic oligonucleotide
uccagcuucuuccugaaug

SEQ ID NO: 3274517 - RNA, 19 nt, Artificial Sequence
  Description of Artificial Sequence: Synthetic oligonucleotide
caaaugauauuggaaacgg

SEQ ID NO: 3274518 - RNA, 19 nt, Artificial Sequence
  Description of Artificial Sequence: Synthetic oligonucleotide
aaugcgcugcucuaagcuc

SEQ ID NO: 3274519 - RNA, 19 nt, Artificial Sequence
  Description of Artificial Sequence: Synthetic oligonucleotide
uuaaagugagggucaaaag

SEQ ID NO: 3274520 - RNA, 19 nt, Artificial Sequence
  Description of Artificial Sequence: Synthetic oligonucleotide
aaaugauauuggaaacggc

SEQ ID NO: 3274521 - RNA, 19 nt, Artificial Sequence
  Description of Artificial Sequence: Synthetic oligonucleotide
uuccucagugucaucaggg

SEQ ID NO: 3274522 - RNA, 19 nt, Artificial Sequence
  Description of Artificial Sequence: Synthetic oligonucleotide
uugucugucaugauacuca

SEQ ID NO: 3274523 - RNA, 19 nt, Artificial Sequence
  Description of Artificial Sequence: Synthetic oligonucleotide
ugaucuuaaagugaggguc

SEQ ID NO: 3274524 - RNA, 19 nt, Artificial Sequence
  Description of Artificial Sequence: Synthetic oligonucleotide
ucugcuauggccuccacaa

SEQ ID NO: 3274525 - RNA, 19 nt, Artificial Sequence
  Description of Artificial Sequence: Synthetic oligonucleotide
uauggccuccacaagaugu

SEQ ID NO: 3274526 - RNA, 19 nt, Artificial Sequence
  Description of Artificial Sequence: Synthetic oligonucleotide
gagcaaaugauauuggaaa

SEQ ID NO: 3274527 - RNA, 19 nt, Artificial Sequence
  Description of Artificial Sequence: Synthetic oligonucleotide
gauauuggaaacggcauug

SEQ ID NO: 3274528 - RNA, 19 nt, Artificial Sequence
  Description of Artificial Sequence: Synthetic oligonucleotide
aagcucuucuuuccuaauc

SEQ ID NO: 3274529 - RNA, 19 nt, Artificial Sequence
  Description of Artificial Sequence: Synthetic oligonucleotide
gucaugauacucaaaacgc

SEQ ID NO: 3274530 - RNA, 19 nt, Artificial Sequence
  Description of Artificial Sequence: Synthetic oligonucleotide
ucuuuccuaauccaaaguu

SEQ ID NO: 3274531 - RNA, 19 nt, Artificial Sequence
  Description of Artificial Sequence: Synthetic oligonucleotide
ucaugauacucaaaacgcu

SEQ ID NO: 3274532 - RNA, 19 nt, Artificial Sequence
  Description of Artificial Sequence: Synthetic oligonucleotide
ucagggugaaccuucuuug

SEQ ID NO: 3274533 - RNA, 19 nt, Artificial Sequence
  Description of Artificial Sequence: Synthetic oligonucleotide
uccaaaguuccucaguguc

SEQ ID NO: 3274534 - RNA, 19 nt, Artificial Sequence
  Description of Artificial Sequence: Synthetic oligonucleotide
aaccuucuuuguuccuucc

SEQ ID NO: 3274535 - RNA, 19 nt, Artificial Sequence
  Description of Artificial Sequence: Synthetic oligonucleotide
cuuuccuaauccaaaguuc

SEQ ID NO: 3274536 - RNA, 19 nt, Artificial Sequence
  Description of Artificial Sequence: Synthetic oligonucleotide
ucuucuuuccuaauccaaa

SEQ ID NO: 3274537 - RNA, 19 nt, Artificial Sequence
  Description of Artificial Sequence: Synthetic oligonucleotide
caugauacucaaaacgcuc

SEQ ID NO: 3274538 - RNA, 19 nt, Artificial Sequence
  Description of Artificial Sequence: Synthetic oligonucleotide
aaaagugauggagcaaaug

SEQ ID NO: 3274539 - RNA, 19 nt, Artificial Sequence
  Description of Artificial Sequence: Synthetic oligonucleotide
ggcauuguugaucuuaaag

SEQ ID NO: 3274540 - RNA, 19 nt, Artificial Sequence
  Description of Artificial Sequence: Synthetic oligonucleotide
cuucuuuccuaauccaaag

SEQ ID NO: 3274541 - RNA, 19 nt, Artificial Sequence
  Description of Artificial Sequence: Synthetic oligonucleotide
uucuuuguuccuuccaugu

SEQ ID NO: 3274542 - RNA, 19 nt, Artificial Sequence
  Description of Artificial Sequence: Synthetic oligonucleotide
uguugaucuuaaagugagg

SEQ ID NO: 3274543 - RNA, 19 nt, Artificial Sequence
  Description of Artificial Sequence: Synthetic oligonucleotide
gaaauugucugucaugaua

SEQ ID NO: 3274544 - RNA, 19 nt, Artificial Sequence
  Description of Artificial Sequence: Synthetic oligonucleotide
ugcuauggccuccacaaga

SEQ ID NO: 3274545 - RNA, 19 nt, Artificial Sequence
  Description of Artificial Sequence: Synthetic oligonucleotide
uuuguuccuuccaugucug

SEQ ID NO: 3274546 - RNA, 19 nt, Artificial Sequence
  Description of Artificial Sequence: Synthetic oligonucleotide
ugauacucaaaacgcucgc

SEQ ID NO: 3274547 - RNA, 19 nt, Artificial Sequence
  Description of Artificial Sequence: Synthetic oligonucleotide
ucgccaaaagugauggagc

SEQ ID NO: 3274548 - RNA, 19 nt, Artificial Sequence
  Description of Artificial Sequence: Synthetic oligonucleotide
auuggaaacggcauuguug

SEQ ID NO: 3274549 - RNA, 19 nt, Artificial Sequence
  Description of Artificial Sequence: Synthetic oligonucleotide
auacucaaaacgcucgcca

SEQ ID NO: 3274550 - RNA, 19 nt, Artificial Sequence
  Description of Artificial Sequence: Synthetic oligonucleotide
aaguuccucagugucauca

SEQ ID NO: 3274551 - RNA, 19 nt, Artificial Sequence
  Description of Artificial Sequence: Synthetic oligonucleotide
augauacucaaaacgcucg

SEQ ID NO: 3274552 - RNA, 19 nt, Artificial Sequence
  Description of Artificial Sequence: Synthetic oligonucleotide
uaauccaaaguuccucagu

SEQ ID NO: 3274553 - RNA, 19 nt, Artificial Sequence
  Description of Artificial Sequence: Synthetic oligonucleotide
auugucugucaugauacuc

SEQ ID NO: 3274554 - RNA, 19 nt, Artificial Sequence
  Description of Artificial Sequence: Synthetic oligonucleotide
ucagcagcuccugaaauug

SEQ ID NO: 3274555 - RNA, 19 nt, Artificial Sequence
  Description of Artificial Sequence: Synthetic oligonucleotide
uugaucuuaaagugagggu

SEQ ID NO: 3274556 - RNA, 19 nt, Artificial Sequence
  Description of Artificial Sequence: Synthetic oligonucleotide
uggagcaaaugauauugga

SEQ ID NO: 3274557 - RNA, 19 nt, Artificial Sequence
  Description of Artificial Sequence: Synthetic oligonucleotide
uucuuuccuaauccaaagu

SEQ ID NO: 3274558 - RNA, 19 nt, Artificial Sequence
  Description of Artificial Sequence: Synthetic oligonucleotide
gaaacggcauuguugaucu

SEQ ID NO: 3274559 - RNA, 19 nt, Artificial Sequence
  Description of Artificial Sequence: Synthetic oligonucleotide
aauugucugucaugauacu

SEQ ID NO: 3274560 - RNA, 19 nt, Artificial Sequence
  Description of Artificial Sequence: Synthetic oligonucleotide
aaggcuguccucccuccuc

SEQ ID NO: 3274561 - RNA, 19 nt, Artificial Sequence
  Description of Artificial Sequence: Synthetic oligonucleotide
ugcucuaagcucuucuuuc

SEQ ID NO: 3274562 - RNA, 19 nt, Artificial Sequence
  Description of Artificial Sequence: Synthetic oligonucleotide
ucaaaacgcucgccaaaag

SEQ ID NO: 3274563 - RNA, 19 nt, Artificial Sequence
  Description of Artificial Sequence: Synthetic oligonucleotide
cucgccaaaagugauggag

SEQ ID NO: 3274564 - RNA, 19 nt, Artificial Sequence
  Description of Artificial Sequence: Synthetic oligonucleotide
ugauauuggaaacggcauu

SEQ ID NO: 3274565 - RNA, 19 nt, Artificial Sequence
  Description of Artificial Sequence: Synthetic oligonucleotide
gcaaaugauauuggaaacg

SEQ ID NO: 3274566 - RNA, 19 nt, Artificial Sequence
  Description of Artificial Sequence: Synthetic oligonucleotide
auuguugaucuuaaaguga

SEQ ID NO: 3274567 - RNA, 19 nt, Artificial Sequence
  Description of Artificial Sequence: Synthetic oligonucleotide
cucagugucaucaggguga

SEQ ID NO: 3274568 - RNA, 19 nt, Artificial Sequence
  Description of Artificial Sequence: Synthetic oligonucleotide
cuaauccaaaguuccucag

SEQ ID NO: 3274569 - RNA, 19 nt, Artificial Sequence
  Description of Artificial Sequence: Synthetic oligonucleotide
gauacucaaaacgcucgcc

SEQ ID NO: 3274570 - RNA, 19 nt, Artificial Sequence
  Description of Artificial Sequence: Synthetic oligonucleotide
cugaaauugucugucauga

SEQ ID NO: 3274571 - RNA, 19 nt, Artificial Sequence
  Description of Artificial Sequence: Synthetic oligonucleotide
agggucaaaaggcuguccu

SEQ ID NO: 3274572 - RNA, 19 nt, Artificial Sequence
  Description of Artificial Sequence: Synthetic oligonucleotide
cuuaaagugagggucaaaa

SEQ ID NO: 3274573 - RNA, 19 nt, Artificial Sequence
  Description of Artificial Sequence: Synthetic oligonucleotide
uuccugaaugcgcugcucu

SEQ ID NO: 3274574 - RNA, 19 nt, Artificial Sequence
  Description of Artificial Sequence: Synthetic oligonucleotide
agcuucuuccugaaugcgc

SEQ ID NO: 3274575 - RNA, 19 nt, Artificial Sequence
  Description of Artificial Sequence: Synthetic oligonucleotide
gaucuuaaagugaggguca

SEQ ID NO: 3274576 - RNA, 19 nt, Artificial Sequence
  Description of Artificial Sequence: Synthetic oligonucleotide
aagugauggagcaaaugau

SEQ ID NO: 3274577 - RNA, 19 nt, Artificial Sequence
  Description of Artificial Sequence: Synthetic oligonucleotide
cuucuuuguuccuuccaug

SEQ ID NO: 3274578 - RNA, 19 nt, Artificial Sequence
  Description of Artificial Sequence: Synthetic oligonucleotide
cugucaugauacucaaaac

SEQ ID NO: 3274579 - RNA, 19 nt, Artificial Sequence
  Description of Artificial Sequence: Synthetic oligonucleotide
aucagggugaaccuucuuu

SEQ ID NO: 3274580 - RNA, 19 nt, Artificial Sequence
  Description of Artificial Sequence: Synthetic oligonucleotide
uccugaaauugucugucau

SEQ ID NO: 3274581 - RNA, 19 nt, Artificial Sequence
  Description of Artificial Sequence: Synthetic oligonucleotide
aaaguuccucagugucauc

SEQ ID NO: 3274582 - RNA, 19 nt, Artificial Sequence
  Description of Artificial Sequence: Synthetic oligonucleotide
ucuuuguuccuuccauguc

SEQ ID NO: 3274583 - RNA, 19 nt, Artificial Sequence
  Description of Artificial Sequence: Synthetic oligonucleotide
guuccucagugucaucagg

SEQ ID NO: 3274584 - RNA, 19 nt, Artificial Sequence
  Description of Artificial Sequence: Synthetic oligonucleotide
aaacgcucgccaaaaguga

SEQ ID NO: 3274585 - RNA, 19 nt, Artificial Sequence
  Description of Artificial Sequence: Synthetic oligonucleotide
ucaaaaggcuguccucccu

SEQ ID NO: 3274586 - RNA, 19 nt, Artificial Sequence
  Description of Artificial Sequence: Synthetic oligonucleotide
aguuccucagugucaucag

SEQ ID NO: 3274587 - RNA, 19 nt, Artificial Sequence
  Description of Artificial Sequence: Synthetic oligonucleotide
ugaaugcgcugcucuaagc

SEQ ID NO: 3274588 - RNA, 19 nt, Artificial Sequence
  Description of Artificial Sequence: Synthetic oligonucleotide
uuccuaauccaaaguuccu

SEQ ID NO: 3274589 - RNA, 19 nt, Artificial Sequence
  Description of Artificial Sequence: Synthetic oligonucleotide
caagauguccagcuucuuc

SEQ ID NO: 3274590 - RNA, 19 nt, Artificial Sequence
  Description of Artificial Sequence: Synthetic oligonucleotide
aacggcauuguugaucuua

SEQ ID NO: 3274591 - RNA, 19 nt, Artificial Sequence
  Description of Artificial Sequence: Synthetic oligonucleotide
uauuggaaacggcauuguu

SEQ ID NO: 3274592 - RNA, 19 nt, Artificial Sequence
  Description of Artificial Sequence: Synthetic oligonucleotide
uacucaaaacgcucgccaa

SEQ ID NO: 3274593 - RNA, 19 nt, Artificial Sequence
  Description of Artificial Sequence: Synthetic oligonucleotide
ggugaaccuucuuuguucc

SEQ ID NO: 3274594 - RNA, 19 nt, Artificial Sequence
  Description of Artificial Sequence: Synthetic oligonucleotide
uccuaauccaaaguuccuc

SEQ ID NO: 3274595 - RNA, 19 nt, Artificial Sequence
  Description of Artificial Sequence: Synthetic oligonucleotide
ucuaagcucuucuuuccua

SEQ ID NO: 3274596 - RNA, 19 nt, Artificial Sequence
  Description of Artificial Sequence: Synthetic oligonucleotide
aaugaaaaggacugugagc

SEQ ID NO: 3274597 - RNA, 19 nt, Artificial Sequence
  Description of Artificial Sequence: Synthetic oligonucleotide
augaaaaggacugugagcc

SEQ ID NO: 3274598 - RNA, 19 nt, Artificial Sequence
  Description of Artificial Sequence: Synthetic oligonucleotide
aucugcagaacccagaggc

SEQ ID NO: 3274599 - RNA, 19 nt, Artificial Sequence
  Description of Artificial Sequence: Synthetic oligonucleotide
aaucagacugcucaucacc

SEQ ID NO: 3274600 - RNA, 19 nt, Artificial Sequence
  Description of Artificial Sequence: Synthetic oligonucleotide
aaaugaaaaggacugugag

SEQ ID NO: 3274601 - RNA, 19 nt, Artificial Sequence
  Description of Artificial Sequence: Synthetic oligonucleotide
uacgaaaucagacugcuca

SEQ ID NO: 3274602 - RNA, 19 nt, Artificial Sequence
  Description of Artificial Sequence: Synthetic oligonucleotide
gaugggaaaggccucaucg

SEQ ID NO: 3274603 - RNA, 19 nt, Artificial Sequence
  Description of Artificial Sequence: Synthetic oligonucleotide
aggacugugagccaaacuc

SEQ ID NO: 3274604 - RNA, 19 nt, Artificial Sequence
  Description of Artificial Sequence: Synthetic oligonucleotide
gaugcggaaaaugaaaagg

SEQ ID NO: 3274605 - RNA, 19 nt, Artificial Sequence
  Description of Artificial Sequence: Synthetic oligonucleotide
ugcauacgaaaucagacug

SEQ ID NO: 3274606 - RNA, 19 nt, Artificial Sequence
  Description of Artificial Sequence: Synthetic oligonucleotide
ugagagaugggaaaggccu

SEQ ID NO: 3274607 - RNA, 19 nt, Artificial Sequence
  Description of Artificial Sequence: Synthetic oligonucleotide
gaagaugaucugcagaacc

SEQ ID NO: 3274608 - RNA, 19 nt, Artificial Sequence
  Description of Artificial Sequence: Synthetic oligonucleotide
aagaugaucugcagaaccc

SEQ ID NO: 3274609 - RNA, 19 nt, Artificial Sequence
  Description of Artificial Sequence: Synthetic oligonucleotide
aaaucagacugcucaucac

SEQ ID NO: 3274610 - RNA, 19 nt, Artificial Sequence
  Description of Artificial Sequence: Synthetic oligonucleotide
auucucgcaaccuggcugc

SEQ ID NO: 3274611 - RNA, 19 nt, Artificial Sequence
  Description of Artificial Sequence: Synthetic oligonucleotide
gaaaaugaaaaggacugug

SEQ ID NO: 3274612 - RNA, 19 nt, Artificial Sequence
  Description of Artificial Sequence: Synthetic oligonucleotide
ugaucugcagaacccagag

SEQ ID NO: 3274613 - RNA, 19 nt, Artificial Sequence
  Description of Artificial Sequence: Synthetic oligonucleotide
uguugcauacgaaaucaga

SEQ ID NO: 3274614 - RNA, 19 nt, Artificial Sequence
  Description of Artificial Sequence: Synthetic oligonucleotide
aaaaugaaaaggacuguga

SEQ ID NO: 3274615 - RNA, 19 nt, Artificial Sequence
  Description of Artificial Sequence: Synthetic oligonucleotide
gaaaucagacugcucauca

SEQ ID NO: 3274616 - RNA, 19 nt, Artificial Sequence
  Description of Artificial Sequence: Synthetic oligonucleotide
gaugugagagaugggaaag

SEQ ID NO: 3274617 - RNA, 19 nt, Artificial Sequence
  Description of Artificial Sequence: Synthetic oligonucleotide
acaaacucggccgcggugc

SEQ ID NO: 3274618 - RNA, 19 nt, Artificial Sequence
  Description of Artificial Sequence: Synthetic oligonucleotide
cucaucaccccacacaaac

SEQ ID NO: 3274619 - RNA, 19 nt, Artificial Sequence
  Description of Artificial Sequence: Synthetic oligonucleotide
acgaagaugaucugcagaa

SEQ ID NO: 3274620 - RNA, 19 nt, Artificial Sequence
  Description of Artificial Sequence: Synthetic oligonucleotide
uugcauacgaaaucagacu

SEQ ID NO: 3274621 - RNA, 19 nt, Artificial Sequence
  Description of Artificial Sequence: Synthetic oligonucleotide
guugcauacgaaaucagac

SEQ ID NO: 3274622 - RNA, 19 nt, Artificial Sequence
  Description of Artificial Sequence: Synthetic oligonucleotide
ucaccccacacaaacucgg

SEQ ID NO: 3274623 - RNA, 19 nt, Artificial Sequence
  Description of Artificial Sequence: Synthetic oligonucleotide
ugcggaaaaugaaaaggac

SEQ ID NO: 3274624 - RNA, 19 nt, Artificial Sequence
  Description of Artificial Sequence: Synthetic oligonucleotide
ucugcagaacccagaggcg

SEQ ID NO: 3274625 - RNA, 19 nt, Artificial Sequence
  Description of Artificial Sequence: Synthetic oligonucleotide
aaaggccucaucguagcag

SEQ ID NO: 3274626 - RNA, 19 nt, Artificial Sequence
  Description of Artificial Sequence: Synthetic oligonucleotide
aucagacugcucaucaccc

SEQ ID NO: 3274627 - RNA, 19 nt, Artificial Sequence
  Description of Artificial Sequence: Synthetic oligonucleotide
ugcucaucaccccacacaa

SEQ ID NO: 3274628 - RNA, 19 nt, Artificial Sequence
  Description of Artificial Sequence: Synthetic oligonucleotide
aaggccucaucguagcaga

SEQ ID NO: 3274629 - RNA, 19 nt, Artificial Sequence
  Description of Artificial Sequence: Synthetic oligonucleotide
ugugagagaugggaaaggc

SEQ ID NO: 3274630 - RNA, 19 nt, Artificial Sequence
  Description of Artificial Sequence: Synthetic oligonucleotide
gaugaggaugcggaaaaug

SEQ ID NO: 3274631 - RNA, 19 nt, Artificial Sequence
  Description of Artificial Sequence: Synthetic oligonucleotide
ugaggaugcggaaaaugaa

SEQ ID NO: 3274632 - RNA, 19 nt, Artificial Sequence
  Description of Artificial Sequence: Synthetic oligonucleotide
aaaggacugugagccaaac

SEQ ID NO: 3274633 - RNA, 19 nt, Artificial Sequence
  Description of Artificial Sequence: Synthetic oligonucleotide
aguggagacgaagaugauc

SEQ ID NO: 3274634 - RNA, 19 nt, Artificial Sequence
  Description of Artificial Sequence: Synthetic oligonucleotide
aggcggaugugagagaugg

SEQ ID NO: 3274635 - RNA, 19 nt, Artificial Sequence
  Description of Artificial Sequence: Synthetic oligonucleotide
accccacacaaacucggcc

SEQ ID NO: 3274636 - RNA, 19 nt, Artificial Sequence
  Description of Artificial Sequence: Synthetic oligonucleotide
cucaucguagcagacauuc

SEQ ID NO: 3274637 - RNA, 19 nt, Artificial Sequence
  Description of Artificial Sequence: Synthetic oligonucleotide
cauucucgcaaccuggcug

SEQ ID NO: 3274638 - RNA, 19 nt, Artificial Sequence
  Description of Artificial Sequence: Synthetic oligonucleotide
aucguagcagacauucucg

SEQ ID NO: 3274639 - RNA, 19 nt, Artificial Sequence
  Description of Artificial Sequence: Synthetic oligonucleotide
agcagacauucucgcaacc

SEQ ID NO: 3274640 - RNA, 19 nt, Artificial Sequence
  Description of Artificial Sequence: Synthetic oligonucleotide
caucguagcagacauucuc

SEQ ID NO: 3274641 - RNA, 19 nt, Artificial Sequence
  Description of Artificial Sequence: Synthetic oligonucleotide
cugugagccaaacucugcc

SEQ ID NO: 3274642 - RNA, 19 nt, Artificial Sequence
  Description of Artificial Sequence: Synthetic oligonucleotide
gacgaagaugaucugcaga

SEQ ID NO: 3274643 - RNA, 19 nt, Artificial Sequence
  Description of Artificial Sequence: Synthetic oligonucleotide
gaucugcagaacccagagg

SEQ ID NO: 3274644 - RNA, 19 nt, Artificial Sequence
  Description of Artificial Sequence: Synthetic oligonucleotide
cucgcaaccuggcugcugg

SEQ ID NO: 3274645 - RNA, 19 nt, Artificial Sequence
  Description of Artificial Sequence: Synthetic oligonucleotide
uggguguugcauacgaaau

SEQ ID NO: 3274646 - RNA, 19 nt, Artificial Sequence
  Description of Artificial Sequence: Synthetic oligonucleotide
ugcuggguguugcauacga

SEQ ID NO: 3274647 - RNA, 19 nt, Artificial Sequence
  Description of Artificial Sequence: Synthetic oligonucleotide
gaugaucugcagaacccag

SEQ ID NO: 3274648 - RNA, 19 nt, Artificial Sequence
  Description of Artificial Sequence: Synthetic oligonucleotide
agacauucucgcaaccugg

SEQ ID NO: 3274649 - RNA, 19 nt, Artificial Sequence
  Description of Artificial Sequence: Synthetic oligonucleotide
ugugagccaaacucugcca

SEQ ID NO: 3274650 - RNA, 19 nt, Artificial Sequence
  Description of Artificial Sequence: Synthetic oligonucleotide
guagcagacauucucgcaa

SEQ ID NO: 3274651 - RNA, 19 nt, Artificial Sequence
  Description of Artificial Sequence: Synthetic oligonucleotide
caucaccccacacaaacuc

SEQ ID NO: 3274652 - RNA, 19 nt, Artificial Sequence
  Description of Artificial Sequence: Synthetic oligonucleotide
ucguagcagacauucucgc

SEQ ID NO: 3274653 - RNA, 19 nt, Artificial Sequence
  Description of Artificial Sequence: Synthetic oligonucleotide
aaggacugugagccaaacu

SEQ ID NO: 3274654 - RNA, 19 nt, Artificial Sequence
  Description of Artificial Sequence: Synthetic oligonucleotide
gauggaguggagacgaaga

SEQ ID NO: 3274655 - RNA, 19 nt, Artificial Sequence
  Description of Artificial Sequence: Synthetic oligonucleotide
acugcucaucaccccacac

SEQ ID NO: 3274656 - RNA, 19 nt, Artificial Sequence
  Description of Artificial Sequence: Synthetic oligonucleotide
augaggaugcggaaaauga

SEQ ID NO: 3274657 - RNA, 19 nt, Artificial Sequence
  Description of Artificial Sequence: Synthetic oligonucleotide
cggaaaaugaaaaggacug

SEQ ID NO: 3274658 - RNA, 19 nt, Artificial Sequence
  Description of Artificial Sequence: Synthetic oligonucleotide
gagacgaagaugaucugca

SEQ ID NO: 3274659 - RNA, 19 nt, Artificial Sequence
  Description of Artificial Sequence: Synthetic oligonucleotide
aggaugaggaugcggaaaa

SEQ ID NO: 3274660 - RNA, 19 nt, Artificial Sequence
  Description of Artificial Sequence: Synthetic oligonucleotide
cagacauucucgcaaccug

SEQ ID NO: 3274661 - RNA, 19 nt, Artificial Sequence
  Description of Artificial Sequence: Synthetic oligonucleotide
uggaguggagacgaagaug

SEQ ID NO: 3274662 - RNA, 19 nt, Artificial Sequence
  Description of Artificial Sequence: Synthetic oligonucleotide
agaacccagaggcggaugu

SEQ ID NO: 3274663 - RNA, 19 nt, Artificial Sequence
  Description of Artificial Sequence: Synthetic oligonucleotide
augcggaaaaugaaaagga

SEQ ID NO: 3274664 - RNA, 19 nt, Artificial Sequence
  Description of Artificial Sequence: Synthetic oligonucleotide
ucaucaccccacacaaacu

SEQ ID NO: 3274665 - RNA, 19 nt, Artificial Sequence
  Description of Artificial Sequence: Synthetic oligonucleotide
ugggaaaggccucaucgua

SEQ ID NO: 3274666 - RNA, 19 nt, Artificial Sequence
  Description of Artificial Sequence: Synthetic oligonucleotide
ucagacugcucaucacccc

SEQ ID NO: 3274667 - RNA, 19 nt, Artificial Sequence
  Description of Artificial Sequence: Synthetic oligonucleotide
acugugagccaaacucugc

SEQ ID NO: 3274668 - RNA, 19 nt, Artificial Sequence
  Description of Artificial Sequence: Synthetic oligonucleotide
ggaguggagacgaagauga

SEQ ID NO: 3274669 - RNA, 19 nt, Artificial Sequence
  Description of Artificial Sequence: Synthetic oligonucleotide
agacgaagaugaucugcag

SEQ ID NO: 3274670 - RNA, 19 nt, Artificial Sequence
  Description of Artificial Sequence: Synthetic oligonucleotide
ugaaaaggacugugagcca

SEQ ID NO: 3274671 - RNA, 19 nt, Artificial Sequence
  Description of Artificial Sequence: Synthetic oligonucleotide
ggaugcggaaaaugaaaag

SEQ ID NO: 3274672 - RNA, 19 nt, Artificial Sequence
  Description of Artificial Sequence: Synthetic oligonucleotide
ggugccaaggaugaggaug

SEQ ID NO: 3274673 - RNA, 19 nt, Artificial Sequence
  Description of Artificial Sequence: Synthetic oligonucleotide
augugagagaugggaaagg

SEQ ID NO: 3274674 - RNA, 19 nt, Artificial Sequence
  Description of Artificial Sequence: Synthetic oligonucleotide
cugcagaacccagaggcgg

SEQ ID NO: 3274675 - RNA, 19 nt, Artificial Sequence
  Description of Artificial Sequence: Synthetic oligonucleotide
agaugggaaaggccucauc

SEQ ID NO: 3274676 - RNA, 19 nt, Artificial Sequence
  Description of Artificial Sequence: Synthetic oligonucleotide
augggaaaggccucaucgu

SEQ ID NO: 3274677 - RNA, 19 nt, Artificial Sequence
  Description of Artificial Sequence: Synthetic oligonucleotide
aaggaugaggaugcggaaa

SEQ ID NO: 3274678 - RNA, 19 nt, Artificial Sequence
  Description of Artificial Sequence: Synthetic oligonucleotide
gaaaaggacugugagccaa

SEQ ID NO: 3274679 - RNA, 19 nt, Artificial Sequence
  Description of Artificial Sequence: Synthetic oligonucleotide
guggagacgaagaugaucu

SEQ ID NO: 3274680 - RNA, 19 nt, Artificial Sequence
  Description of Artificial Sequence: Synthetic oligonucleotide
gacugugagccaaacucug

SEQ ID NO: 3274681 - RNA, 19 nt, Artificial Sequence
  Description of Artificial Sequence: Synthetic oligonucleotide
gugccaaggaugaggaugc

SEQ ID NO: 3274682 - RNA, 19 nt, Artificial Sequence
  Description of Artificial Sequence: Synthetic oligonucleotide
ugcagaacccagaggcgga

SEQ ID NO: 3274683 - RNA, 19 nt, Artificial Sequence
  Description of Artificial Sequence: Synthetic oligonucleotide
gacauucucgcaaccuggc

SEQ ID NO: 3274684 - RNA, 19 nt, Artificial Sequence
  Description of Artificial Sequence: Synthetic oligonucleotide
uagcagacauucucgcaac

SEQ ID NO: 3274685 - RNA, 19 nt, Artificial Sequence
  Description of Artificial Sequence: Synthetic oligonucleotide
ucaucguagcagacauucu

SEQ ID NO: 3274686 - RNA, 19 nt, Artificial Sequence
  Description of Artificial Sequence: Synthetic oligonucleotide
gguguugcauacgaaauca

SEQ ID NO: 3274687 - RNA, 19 nt, Artificial Sequence
  Description of Artificial Sequence: Synthetic oligonucleotide
gaggaugcggaaaaugaaa

SEQ ID NO: 3274688 - RNA, 19 nt, Artificial Sequence
  Description of Artificial Sequence: Synthetic oligonucleotide
agaugaucugcagaaccca

SEQ ID NO: 3274689 - RNA, 19 nt, Artificial Sequence
  Description of Artificial Sequence: Synthetic oligonucleotide
aacccagaggcggauguga

SEQ ID NO: 3274690 - RNA, 19 nt, Artificial Sequence
  Description of Artificial Sequence: Synthetic oligonucleotide
gagccaaacucugccaaug

SEQ ID NO: 3274691 - RNA, 19 nt, Artificial Sequence
  Description of Artificial Sequence: Synthetic oligonucleotide
aucaccccacacaaacucg

SEQ ID NO: 3274692 - RNA, 19 nt, Artificial Sequence
  Description of Artificial Sequence: Synthetic oligonucleotide
ggaaaggccucaucguagc

SEQ ID NO: 3274693 - RNA, 19 nt, Artificial Sequence
  Description of Artificial Sequence: Synthetic oligonucleotide
auggaguggagacgaagau

SEQ ID NO: 3274694 - RNA, 19 nt, Artificial Sequence
  Description of Artificial Sequence: Synthetic oligonucleotide
gugagagaugggaaaggcc

SEQ ID NO: 3274695 - RNA, 19 nt, Artificial Sequence
  Description of Artificial Sequence: Synthetic oligonucleotide
acgaaaucagacugcucau

SEQ ID NO: 3274696 - RNA, 19 nt, Artificial Sequence
  Description of Artificial Sequence: Synthetic oligonucleotide
auaauauucacauacagca

SEQ ID NO: 3274697 - RNA, 19 nt, Artificial Sequence
  Description of Artificial Sequence: Synthetic oligonucleotide
uaaacaaaggaguucaugg

SEQ ID NO: 3274698 - RNA, 19 nt, Artificial Sequence
  Description of Artificial Sequence: Synthetic oligonucleotide
aaacaaaggaguucauggc

SEQ ID NO: 3274699 - RNA, 19 nt, Artificial Sequence
  Description of Artificial Sequence: Synthetic oligonucleotide
aaaggacgcacuuugcacc

SEQ ID NO: 3274700 - RNA, 19 nt, Artificial Sequence
  Description of Artificial Sequence: Synthetic oligonucleotide
auccuuucuacccauaugc

SEQ ID NO: 3274701 - RNA, 19 nt, Artificial Sequence
  Description of Artificial Sequence: Synthetic oligonucleotide
aaaccuuccagagaaaugg

SEQ ID NO: 3274702 - RNA, 19 nt, Artificial Sequence
  Description of Artificial Sequence: Synthetic oligonucleotide
aacaaaggaguucauggcg

SEQ ID NO: 3274703 - RNA, 19 nt, Artificial Sequence
  Description of Artificial Sequence: Synthetic oligonucleotide
aaaggagccauccucauug

SEQ ID NO: 3274704 - RNA, 19 nt, Artificial Sequence
  Description of Artificial Sequence: Synthetic oligonucleotide
aauauucacauacagcaga

SEQ ID NO: 3274705 - RNA, 19 nt, Artificial Sequence
  Description of Artificial Sequence: Synthetic oligonucleotide
aaaaggacgcacuuugcac

SEQ ID NO: 3274706 - RNA, 19 nt, Artificial Sequence
  Description of Artificial Sequence: Synthetic oligonucleotide
cauacagcagaaaacaucc

SEQ ID NO: 3274707 - RNA, 19 nt, Artificial Sequence
  Description of Artificial Sequence: Synthetic oligonucleotide
agaaaugggacauugacga

SEQ ID NO: 3274708 - RNA, 19 nt, Artificial Sequence
  Description of Artificial Sequence: Synthetic oligonucleotide
agagaaaugggacauugac

SEQ ID NO: 3274709 - RNA, 19 nt, Artificial Sequence
  Description of Artificial Sequence: Synthetic oligonucleotide
uguauuguccgauaaagga

SEQ ID NO: 3274710 - RNA, 19 nt, Artificial Sequence
  Description of Artificial Sequence: Synthetic oligonucleotide
gaaaacauccuuucuaccc

SEQ ID NO: 3274711 - RNA, 19 nt, Artificial Sequence
  Description of Artificial Sequence: Synthetic oligonucleotide
ucccauaauauucacauac

SEQ ID NO: 3274712 - RNA, 19 nt, Artificial Sequence
  Description of Artificial Sequence: Synthetic oligonucleotide
uuaacgacuuaaacaaagg

SEQ ID NO: 3274713 - RNA, 19 nt, Artificial Sequence
  Description of Artificial Sequence: Synthetic oligonucleotide
cauaauauucacauacagc

SEQ ID NO: 3274714 - RNA, 19 nt, Artificial Sequence
  Description of Artificial Sequence: Synthetic oligonucleotide
aaugagagggaugagaagu

SEQ ID NO: 3274715 - RNA, 19 nt, Artificial Sequence
  Description of Artificial Sequence: Synthetic oligonucleotide
uuugacugaguuaaguucu

SEQ ID NO: 3274716 - RNA, 19 nt, Artificial Sequence
  Description of Artificial Sequence: Synthetic oligonucleotide
uauuguccgauaaaggagc

SEQ ID NO: 3274717 - RNA, 19 nt, Artificial Sequence
  Description of Artificial Sequence: Synthetic oligonucleotide
uugacgaagagcuuaacga

SEQ ID NO: 3274718 - RNA, 19 nt, Artificial Sequence
  Description of Artificial Sequence: Synthetic oligonucleotide
cuuaacgacuuaaacaaag

SEQ ID NO: 3274719 - RNA, 19 nt, Artificial Sequence
  Description of Artificial Sequence: Synthetic oligonucleotide
cuuaccacuguauuguccg

SEQ ID NO: 3274720 - RNA, 19 nt, Artificial Sequence
  Description of Artificial Sequence: Synthetic oligonucleotide
aacgacuuaaacaaaggag

SEQ ID NO: 3274721 - RNA, 19 nt, Artificial Sequence
  Description of Artificial Sequence: Synthetic oligonucleotide
auugaauuggccauucacc

SEQ ID NO: 3274722 - RNA, 19 nt, Artificial Sequence
  Description of Artificial Sequence: Synthetic oligonucleotide
gaguucauggcguugacag

SEQ ID NO: 3274723 - RNA, 19 nt, Artificial Sequence
  Description of Artificial Sequence: Synthetic oligonucleotide
agagcuuaacgacuuaaac

SEQ ID NO: 3274724 - RNA, 19 nt, Artificial Sequence
  Description of Artificial Sequence: Synthetic oligonucleotide
agaagugcucagcagaaac

SEQ ID NO: 3274725 - RNA, 19 nt, Artificial Sequence
  Description of Artificial Sequence: Synthetic oligonucleotide
auugacgaagagcuuaacg

SEQ ID NO: 3274726 - RNA, 19 nt, Artificial Sequence
  Description of Artificial Sequence: Synthetic oligonucleotide
agcuuaacgacuuaaacaa

SEQ ID NO: 3274727 - RNA, 19 nt, Artificial Sequence
  Description of Artificial Sequence: Synthetic oligonucleotide
uaaguucuugcuuuguucc

SEQ ID NO: 3274728 - RNA, 19 nt, Artificial Sequence
  Description of Artificial Sequence: Synthetic oligonucleotide
uugaauuggccauucaccc

SEQ ID NO: 3274729 - RNA, 19 nt, Artificial Sequence
  Description of Artificial Sequence: Synthetic oligonucleotide
aaaacauccuuucuaccca

SEQ ID NO: 3274730 - RNA, 19 nt, Artificial Sequence
  Description of Artificial Sequence: Synthetic oligonucleotide
cuuuguucccauaauauuc

SEQ ID NO: 3274731 - RNA, 19 nt, Artificial Sequence
  Description of Artificial Sequence: Synthetic oligonucleotide
ucaacguaucguuugacug

SEQ ID NO: 3274732 - RNA, 19 nt, Artificial Sequence
  Description of Artificial Sequence: Synthetic oligonucleotide
uuuguucccauaauauuca

SEQ ID NO: 3274733 - RNA, 19 nt, Artificial Sequence
  Description of Artificial Sequence: Synthetic oligonucleotide
agaaaacauccuuucuacc

SEQ ID NO: 3274734 - RNA, 19 nt, Artificial Sequence
  Description of Artificial Sequence: Synthetic oligonucleotide
uaauauucacauacagcag

SEQ ID NO: 3274735 - RNA, 19 nt, Artificial Sequence
  Description of Artificial Sequence: Synthetic oligonucleotide
uucacauacagcagaaaac

SEQ ID NO: 3274736 - RNA, 19 nt, Artificial Sequence
  Description of Artificial Sequence: Synthetic oligonucleotide
aaguucuugcuuuguuccc

SEQ ID NO: 3274737 - RNA, 19 nt, Artificial Sequence
  Description of Artificial Sequence: Synthetic oligonucleotide
aaaugggacauugacgaag

SEQ ID NO: 3274738 - RNA, 19 nt, Artificial Sequence
  Description of Artificial Sequence: Synthetic oligonucleotide
uccauagucaaccaggcua

SEQ ID NO: 3274739 - RNA, 19 nt, Artificial Sequence
  Description of Artificial Sequence: Synthetic oligonucleotide
aaggacgcacuuugcaccc

SEQ ID NO: 3274740 - RNA, 19 nt, Artificial Sequence
  Description of Artificial Sequence: Synthetic oligonucleotide
ucucauuucccucggcugg

SEQ ID NO: 3274741 - RNA, 19 nt, Artificial Sequence
  Description of Artificial Sequence: Synthetic oligonucleotide
ucacauacagcagaaaaca

SEQ ID NO: 3274742 - RNA, 19 nt, Artificial Sequence
  Description of Artificial Sequence: Synthetic oligonucleotide
ugagcucucauuucccucg

SEQ ID NO: 3274743 - RNA, 19 nt, Artificial Sequence
  Description of Artificial Sequence: Synthetic oligonucleotide
uaacgacuuaaacaaagga

SEQ ID NO: 3274744 - RNA, 19 nt, Artificial Sequence
  Description of Artificial Sequence: Synthetic oligonucleotide
ugcccauggaaugagaggg

SEQ ID NO: 3274745 - RNA, 19 nt, Artificial Sequence
  Description of Artificial Sequence: Synthetic oligonucleotide
uaucguuugacugaguuaa

SEQ ID NO: 3274746 - RNA, 19 nt, Artificial Sequence
  Description of Artificial Sequence: Synthetic oligonucleotide
cucuccauagucaaccagg

SEQ ID NO: 3274747 - RNA, 19 nt, Artificial Sequence
  Description of Artificial Sequence: Synthetic oligonucleotide
aguucauaucaacguaucg

SEQ ID NO: 3274748 - RNA, 19 nt, Artificial Sequence
  Description of Artificial Sequence: Synthetic oligonucleotide
acuguauuguccgauaaag

SEQ ID NO: 3274749 - RNA, 19 nt, Artificial Sequence
  Description of Artificial Sequence: Synthetic oligonucleotide
uuucuuaccacuguauugu

SEQ ID NO: 3274750 - RNA, 19 nt, Artificial Sequence
  Description of Artificial Sequence: Synthetic oligonucleotide
acuuaaacaaaggaguuca

SEQ ID NO: 3274751 - RNA, 19 nt, Artificial Sequence
  Description of Artificial Sequence: Synthetic oligonucleotide
cauaucaacguaucguuug

SEQ ID NO: 3274752 - RNA, 19 nt, Artificial Sequence
  Description of Artificial Sequence: Synthetic oligonucleotide
uaugcccauggaaugagag

SEQ ID NO: 3274753 - RNA, 19 nt, Artificial Sequence
  Description of Artificial Sequence: Synthetic oligonucleotide
gagaaaugggacauugacg

SEQ ID NO: 3274754 - RNA, 19 nt, Artificial Sequence
  Description of Artificial Sequence: Synthetic oligonucleotide
gagcuuaacgacuuaaaca

SEQ ID NO: 3274755 - RNA, 19 nt, Artificial Sequence
  Description of Artificial Sequence: Synthetic oligonucleotide
ucagcagaaaccuuccaga

SEQ ID NO: 3274756 - RNA, 19 nt, Artificial Sequence
  Description of Artificial Sequence: Synthetic oligonucleotide
auucacauacagcagaaaa

SEQ ID NO: 3274757 - RNA, 19 nt, Artificial Sequence
  Description of Artificial Sequence: Synthetic oligonucleotide
uucuuucucuuucuuacca

SEQ ID NO: 3274758 - RNA, 19 nt, Artificial Sequence
  Description of Artificial Sequence: Synthetic oligonucleotide
ucuacccauaugcccaugg

SEQ ID NO: 3274759 - RNA, 19 nt, Artificial Sequence
  Description of Artificial Sequence: Synthetic oligonucleotide
uuaaacaaaggaguucaug

SEQ ID NO: 3274760 - RNA, 19 nt, Artificial Sequence
  Description of Artificial Sequence: Synthetic oligonucleotide
uuaaguucuugcuuuguuc

SEQ ID NO: 3274761 - RNA, 19 nt, Artificial Sequence
  Description of Artificial Sequence: Synthetic oligonucleotide
cuuucuuaccacuguauug

SEQ ID NO: 3274762 - RNA, 19 nt, Artificial Sequence
  Description of Artificial Sequence: Synthetic oligonucleotide
ugaguuaaguucuugcuuu

SEQ ID NO: 3274763 - RNA, 19 nt, Artificial Sequence
  Description of Artificial Sequence: Synthetic oligonucleotide
cagaaaacauccuuucuac

SEQ ID NO: 3274764 - RNA, 19 nt, Artificial Sequence
  Description of Artificial Sequence: Synthetic oligonucleotide
gacugaguuaaguucuugc

SEQ ID NO: 3274765 - RNA, 19 nt, Artificial Sequence
  Description of Artificial Sequence: Synthetic oligonucleotide
acgacuuaaacaaaggagu

SEQ ID NO: 3274766 - RNA, 19 nt, Artificial Sequence
  Description of Artificial Sequence: Synthetic oligonucleotide
guuugacugaguuaaguuc

SEQ ID NO: 3274767 - RNA, 19 nt, Artificial Sequence
  Description of Artificial Sequence: Synthetic oligonucleotide
uucauaucaacguaucguu

SEQ ID NO: 3274768 - RNA, 19 nt, Artificial Sequence
  Description of Artificial Sequence: Synthetic oligonucleotide
cauugaauuggccauucac

SEQ ID NO: 3274769 - RNA, 19 nt, Artificial Sequence
  Description of Artificial Sequence: Synthetic oligonucleotide
gcuaucaucacuaucuucc

SEQ ID NO: 3274770 - RNA, 19 nt, Artificial Sequence
  Description of Artificial Sequence: Synthetic oligonucleotide
gaugagaagugcucagcag

SEQ ID NO: 3274771 - RNA, 19 nt, Artificial Sequence
  Description of Artificial Sequence: Synthetic oligonucleotide
acugaguuaaguucuugcu

SEQ ID NO: 3274772 - RNA, 19 nt, Artificial Sequence
  Description of Artificial Sequence: Synthetic oligonucleotide
ugcaccccaguucauauca

SEQ ID NO: 3274773 - RNA, 19 nt, Artificial Sequence
  Description of Artificial Sequence: Synthetic oligonucleotide
ugcuuuguucccauaauau

SEQ ID NO: 3274774 - RNA, 19 nt, Artificial Sequence
  Description of Artificial Sequence: Synthetic oligonucleotide
acauacagcagaaaacauc

SEQ ID NO: 3274775 - RNA, 19 nt, Artificial Sequence
  Description of Artificial Sequence: Synthetic oligonucleotide
augagaagugcucagcaga

SEQ ID NO: 3274776 - RNA, 19 nt, Artificial Sequence
  Description of Artificial Sequence: Synthetic oligonucleotide
uuucucuuucuuaccacug

SEQ ID NO: 3274777 - RNA, 19 nt, Artificial Sequence
  Description of Artificial Sequence: Synthetic oligonucleotide
cuguauuguccgauaaagg

SEQ ID NO: 3274778 - RNA, 19 nt, Artificial Sequence
  Description of Artificial Sequence: Synthetic oligonucleotide
ugacgaagagcuuaacgac

SEQ ID NO: 3274779 - RNA, 19 nt, Artificial Sequence
  Description of Artificial Sequence: Synthetic oligonucleotide
ucuccauagucaaccaggc

SEQ ID NO: 3274780 - RNA, 19 nt, Artificial Sequence
  Description of Artificial Sequence: Synthetic oligonucleotide
guauuguccgauaaaggag

SEQ ID NO: 3274781 - RNA, 19 nt, Artificial Sequence
  Description of Artificial Sequence: Synthetic oligonucleotide
ucuuaccacuguauugucc

SEQ ID NO: 3274782 - RNA, 19 nt, Artificial Sequence
  Description of Artificial Sequence: Synthetic oligonucleotide
ucuugcuuuguucccauaa

SEQ ID NO: 3274783 - RNA, 19 nt, Artificial Sequence
  Description of Artificial Sequence: Synthetic oligonucleotide
cuuucuacccauaugccca

SEQ ID NO: 3274784 - RNA, 19 nt, Artificial Sequence
  Description of Artificial Sequence: Synthetic oligonucleotide
aacguaucguuugacugag

SEQ ID NO: 3274785 - RNA, 19 nt, Artificial Sequence
  Description of Artificial Sequence: Synthetic oligonucleotide
uccgauaaaggagccaucc

SEQ ID NO: 3274786 - RNA, 19 nt, Artificial Sequence
  Description of Artificial Sequence: Synthetic oligonucleotide
auccucauugaauuggcca

SEQ ID NO: 3274787 - RNA, 19 nt, Artificial Sequence
  Description of Artificial Sequence: Synthetic oligonucleotide
uguucccauaauauucaca

SEQ ID NO: 3274788 - RNA, 19 nt, Artificial Sequence
  Description of Artificial Sequence: Synthetic oligonucleotide
gauaaaggagccauccuca

SEQ ID NO: 3274789 - RNA, 19 nt, Artificial Sequence
  Description of Artificial Sequence: Synthetic oligonucleotide
aucaucacuaucuuccuuu

SEQ ID NO: 3274790 - RNA, 19 nt, Artificial Sequence
  Description of Artificial Sequence: Synthetic oligonucleotide
aagugcucagcagaaaccu

SEQ ID NO: 3274791 - RNA, 19 nt, Artificial Sequence
  Description of Artificial Sequence: Synthetic oligonucleotide
gguucuuucucuuucuuac

SEQ ID NO: 3274792 - RNA, 19 nt, Artificial Sequence
  Description of Artificial Sequence: Synthetic oligonucleotide
ucuuucuuaccacuguauu

SEQ ID NO: 3274793 - RNA, 19 nt, Artificial Sequence
  Description of Artificial Sequence: Synthetic oligonucleotide
ugaauuggccauucacccc

SEQ ID NO: 3274794 - RNA, 19 nt, Artificial Sequence
  Description of Artificial Sequence: Synthetic oligonucleotide
cucagcagaaaccuuccag

SEQ ID NO: 3274795 - RNA, 19 nt, Artificial Sequence
  Description of Artificial Sequence: Synthetic oligonucleotide
gaaugagagggaugagaag

SEQ ID NO: 3274796 - RNA, 19 nt, Artificial Sequence
  Description of Artificial Sequence: Synthetic oligonucleotide
aaguccuugggauucagcc

SEQ ID NO: 3274797 - RNA, 19 nt, Artificial Sequence
  Description of Artificial Sequence: Synthetic oligonucleotide
gaguacaucucauacaugg

SEQ ID NO: 3274798 - RNA, 19 nt, Artificial Sequence
  Description of Artificial Sequence: Synthetic oligonucleotide
uccaagaucaugaaaugcg

SEQ ID NO: 3274799 - RNA, 19 nt, Artificial Sequence
  Description of Artificial Sequence: Synthetic oligonucleotide
uuuuccaagaucaugaaau

SEQ ID NO: 3274800 - RNA, 19 nt, Artificial Sequence
  Description of Artificial Sequence: Synthetic oligonucleotide
ugugcaucggauaucauag

SEQ ID NO: 3274801 - RNA, 19 nt, Artificial Sequence
  Description of Artificial Sequence: Synthetic oligonucleotide
cuuaacauggccuuggcac

SEQ ID NO: 3274802 - RNA, 19 nt, Artificial Sequence
  Description of Artificial Sequence: Synthetic oligonucleotide
gauaucauaggacaccgag

SEQ ID NO: 3274803 - RNA, 19 nt, Artificial Sequence
  Description of Artificial Sequence: Synthetic oligonucleotide
auaggacacaaaucgaagc

SEQ ID NO: 3274804 - RNA, 19 nt, Artificial Sequence
  Description of Artificial Sequence: Synthetic oligonucleotide
uacaucucauacauggugg

SEQ ID NO: 3274805 - RNA, 19 nt, Artificial Sequence
  Description of Artificial Sequence: Synthetic oligonucleotide
ugggauucagccuauacag

SEQ ID NO: 3274806 - RNA, 19 nt, Artificial Sequence
  Description of Artificial Sequence: Synthetic oligonucleotide
cagcauaggacacaaaucg

SEQ ID NO: 3274807 - RNA, 19 nt, Artificial Sequence
  Description of Artificial Sequence: Synthetic oligonucleotide
augaaaugcguguuguccc

SEQ ID NO: 3274808 - RNA, 19 nt, Artificial Sequence
  Description of Artificial Sequence: Synthetic oligonucleotide
aagaucaugaaaugcgugu

SEQ ID NO: 3274809 - RNA, 19 nt, Artificial Sequence
  Description of Artificial Sequence: Synthetic oligonucleotide
uacaugguggccuugaugu

SEQ ID NO: 3274810 - RNA, 19 nt, Artificial Sequence
  Description of Artificial Sequence: Synthetic oligonucleotide
ugucccuuuuccaagauca

SEQ ID NO: 3274811 - RNA, 19 nt, Artificial Sequence
  Description of Artificial Sequence: Synthetic oligonucleotide
uuugguugcuuguagacug

SEQ ID NO: 3274812 - RNA, 19 nt, Artificial Sequence
  Description of Artificial Sequence: Synthetic oligonucleotide
ugaccuguuuacaugaacc

SEQ ID NO: 3274813 - RNA, 19 nt, Artificial Sequence
  Description of Artificial Sequence: Synthetic oligonucleotide
acucggagcauguaugugc

SEQ ID NO: 3274814 - RNA, 19 nt, Artificial Sequence
  Description of Artificial Sequence: Synthetic oligonucleotide
acugggacauacuuacugc

SEQ ID NO: 3274815 - RNA, 19 nt, Artificial Sequence
  Description of Artificial Sequence: Synthetic oligonucleotide
uaucauaggacaccgagua

SEQ ID NO: 3274816 - RNA, 19 nt, Artificial Sequence
  Description of Artificial Sequence: Synthetic oligonucleotide
auggccuuggcacuugugc

SEQ ID NO: 3274817 - RNA, 19 nt, Artificial Sequence
  Description of Artificial Sequence: Synthetic oligonucleotide
acaugaaccagcccuuggc

SEQ ID NO: 3274818 - RNA, 19 nt, Artificial Sequence
  Description of Artificial Sequence: Synthetic oligonucleotide
auucagccuauacaggucg

SEQ ID NO: 3274819 - RNA, 19 nt, Artificial Sequence
  Description of Artificial Sequence: Synthetic oligonucleotide
cacaaaucgaagcagacuc

SEQ ID NO: 3274820 - RNA, 19 nt, Artificial Sequence
  Description of Artificial Sequence: Synthetic oligonucleotide
uugauguugaggcagccga

SEQ ID NO: 3274821 - RNA, 19 nt, Artificial Sequence
  Description of Artificial Sequence: Synthetic oligonucleotide
uagacugggacauacuuac

SEQ ID NO: 3274822 - RNA, 19 nt, Artificial Sequence
  Description of Artificial Sequence: Synthetic oligonucleotide
uaggacacaaaucgaagca

SEQ ID NO: 3274823 - RNA, 19 nt, Artificial Sequence
  Description of Artificial Sequence: Synthetic oligonucleotide
uaggacaccgaguacaucu

SEQ ID NO: 3274824 - RNA, 19 nt, Artificial Sequence
  Description of Artificial Sequence: Synthetic oligonucleotide
uuggcguuaggcuugggag

SEQ ID NO: 3274825 - RNA, 19 nt, Artificial Sequence
  Description of Artificial Sequence: Synthetic oligonucleotide
guggccuugauguugaggc

SEQ ID NO: 3274826 - RNA, 19 nt, Artificial Sequence
  Description of Artificial Sequence: Synthetic oligonucleotide
uugggauucagccuauaca

SEQ ID NO: 3274827 - RNA, 19 nt, Artificial Sequence
  Description of Artificial Sequence: Synthetic oligonucleotide
acaucucauacaugguggc

SEQ ID NO: 3274828 - RNA, 19 nt, Artificial Sequence
  Description of Artificial Sequence: Synthetic oligonucleotide
uuccguaucggccaguacu

SEQ ID NO: 3274829 - RNA, 19 nt, Artificial Sequence
  Description of Artificial Sequence: Synthetic oligonucleotide
agccuauacaggucgaagg

SEQ ID NO: 3274830 - RNA, 19 nt, Artificial Sequence
  Description of Artificial Sequence: Synthetic oligonucleotide
uucccgauuucuuugguug

SEQ ID NO: 3274831 - RNA, 19 nt, Artificial Sequence
  Description of Artificial Sequence: Synthetic oligonucleotide
uuucuuugguugcuuguag

SEQ ID NO: 3274832 - RNA, 19 nt, Artificial Sequence
  Description of Artificial Sequence: Synthetic oligonucleotide
gaacuguccugcuaccugg

SEQ ID NO: 3274833 - RNA, 19 nt, Artificial Sequence
  Description of Artificial Sequence: Synthetic oligonucleotide
caugaaaugcguguugucc

SEQ ID NO: 3274834 - RNA, 19 nt, Artificial Sequence
  Description of Artificial Sequence: Synthetic oligonucleotide
ucauaggacaccgaguaca

SEQ ID NO: 3274835 - RNA, 19 nt, Artificial Sequence
  Description of Artificial Sequence: Synthetic oligonucleotide
cauaggacacaaaucgaag

SEQ ID NO: 3274836 - RNA, 19 nt, Artificial Sequence
  Description of Artificial Sequence: Synthetic oligonucleotide
guugaggcagccgagaaag

SEQ ID NO: 3274837 - RNA, 19 nt, Artificial Sequence
  Description of Artificial Sequence: Synthetic oligonucleotide
guuuacaugaaccagcccu

SEQ ID NO: 3274838 - RNA, 19 nt, Artificial Sequence
  Description of Artificial Sequence: Synthetic oligonucleotide
uuuccaagaucaugaaaug

SEQ ID NO: 3274839 - RNA, 19 nt, Artificial Sequence
  Description of Artificial Sequence: Synthetic oligonucleotide
ugcaucggauaucauagga

SEQ ID NO: 3274840 - RNA, 19 nt, Artificial Sequence
  Description of Artificial Sequence: Synthetic oligonucleotide
gacugggacauacuuacug

SEQ ID NO: 3274841 - RNA, 19 nt, Artificial Sequence
  Description of Artificial Sequence: Synthetic oligonucleotide
ucgaagguaacccuggcua

SEQ ID NO: 3274842 - RNA, 19 nt, Artificial Sequence
  Description of Artificial Sequence: Synthetic oligonucleotide
guacaucucauacauggug

SEQ ID NO: 3274843 - RNA, 19 nt, Artificial Sequence
  Description of Artificial Sequence: Synthetic oligonucleotide
ugugcuuccguaucggcca

SEQ ID NO: 3274844 - RNA, 19 nt, Artificial Sequence
  Description of Artificial Sequence: Synthetic oligonucleotide
cuguuuacaugaaccagcc

SEQ ID NO: 3274845 - RNA, 19 nt, Artificial Sequence
  Description of Artificial Sequence: Synthetic oligonucleotide
aagcagacuccuuaacaug

SEQ ID NO: 3274846 - RNA, 19 nt, Artificial Sequence
  Description of Artificial Sequence: Synthetic oligonucleotide
aaucgaagcagacuccuua

SEQ ID NO: 3274847 - RNA, 19 nt, Artificial Sequence
  Description of Artificial Sequence: Synthetic oligonucleotide
guugcuuguagacugggac

SEQ ID NO: 3274848 - RNA, 19 nt, Artificial Sequence
  Description of Artificial Sequence: Synthetic oligonucleotide
uaugugccugcguagacca

SEQ ID NO: 3274849 - RNA, 19 nt, Artificial Sequence
  Description of Artificial Sequence: Synthetic oligonucleotide
auacuuacugcccgguguc

SEQ ID NO: 3274850 - RNA, 19 nt, Artificial Sequence
  Description of Artificial Sequence: Synthetic oligonucleotide
ucuuugguugcuuguagac

SEQ ID NO: 3274851 - RNA, 19 nt, Artificial Sequence
  Description of Artificial Sequence: Synthetic oligonucleotide
uuucugucccuuuuccaag

SEQ ID NO: 3274852 - RNA, 19 nt, Artificial Sequence
  Description of Artificial Sequence: Synthetic oligonucleotide
uguagacugggacauacuu

SEQ ID NO: 3274853 - RNA, 19 nt, Artificial Sequence
  Description of Artificial Sequence: Synthetic oligonucleotide
uguccugcuaccugggcag

SEQ ID NO: 3274854 - RNA, 19 nt, Artificial Sequence
  Description of Artificial Sequence: Synthetic oligonucleotide
auuucugucccuuuuccaa

SEQ ID NO: 3274855 - RNA, 19 nt, Artificial Sequence
  Description of Artificial Sequence: Synthetic oligonucleotide
gaucaugaaaugcguguug

SEQ ID NO: 3274856 - RNA, 19 nt, Artificial Sequence
  Description of Artificial Sequence: Synthetic oligonucleotide
uacaugaaccagcccuugg

SEQ ID NO: 3274857 - RNA, 19 nt, Artificial Sequence
  Description of Artificial Sequence: Synthetic oligonucleotide
auacaggucgaagguaacc

SEQ ID NO: 3274858 - RNA, 19 nt, Artificial Sequence
  Description of Artificial Sequence: Synthetic oligonucleotide
agaccaggaacuguccugc

SEQ ID NO: 3274859 - RNA, 19 nt, Artificial Sequence
  Description of Artificial Sequence: Synthetic oligonucleotide
agcagacuccuuaacaugg

SEQ ID NO: 3274860 - RNA, 19 nt, Artificial Sequence
  Description of Artificial Sequence: Synthetic oligonucleotide
uuaacauggccuuggcacu

SEQ ID NO: 3274861 - RNA, 19 nt, Artificial Sequence
  Description of Artificial Sequence: Synthetic oligonucleotide
uacaggucgaagguaaccc

SEQ ID NO: 3274862 - RNA, 19 nt, Artificial Sequence
  Description of Artificial Sequence: Synthetic oligonucleotide
caugaaccagcccuuggcg

SEQ ID NO: 3274863 - RNA, 19 nt, Artificial Sequence
  Description of Artificial Sequence: Synthetic oligonucleotide
uaggcuugggagauggcug

SEQ ID NO: 3274864 - RNA, 19 nt, Artificial Sequence
  Description of Artificial Sequence: Synthetic oligonucleotide
aagguaacccuggcuauuc

SEQ ID NO: 3274865 - RNA, 19 nt, Artificial Sequence
  Description of Artificial Sequence: Synthetic oligonucleotide
ucggccaguacucggagca

SEQ ID NO: 3274866 - RNA, 19 nt, Artificial Sequence
  Description of Artificial Sequence: Synthetic oligonucleotide
cuauucccgauuucuuugg

SEQ ID NO: 3274867 - RNA, 19 nt, Artificial Sequence
  Description of Artificial Sequence: Synthetic oligonucleotide
ugggacauacuuacugccc

SEQ ID NO: 3274868 - RNA, 19 nt, Artificial Sequence
  Description of Artificial Sequence: Synthetic oligonucleotide
uuccaagaucaugaaaugc

SEQ ID NO: 3274869 - RNA, 19 nt, Artificial Sequence
  Description of Artificial Sequence: Synthetic oligonucleotide
uuuacaugaaccagcccuu

SEQ ID NO: 3274870 - RNA, 19 nt, Artificial Sequence
  Description of Artificial Sequence: Synthetic oligonucleotide
caucggauaucauaggaca

SEQ ID NO: 3274871 - RNA, 19 nt, Artificial Sequence
  Description of Artificial Sequence: Synthetic oligonucleotide
aaaguccuugggauucagc

SEQ ID NO: 3274872 - RNA, 19 nt, Artificial Sequence
  Description of Artificial Sequence: Synthetic oligonucleotide
acaaaucgaagcagacucc

SEQ ID NO: 3274873 - RNA, 19 nt, Artificial Sequence
  Description of Artificial Sequence: Synthetic oligonucleotide
ucggauaucauaggacacc

SEQ ID NO: 3274874 - RNA, 19 nt, Artificial Sequence
  Description of Artificial Sequence: Synthetic oligonucleotide
caagaucaugaaaugcgug

SEQ ID NO: 3274875 - RNA, 19 nt, Artificial Sequence
  Description of Artificial Sequence: Synthetic oligonucleotide
uugcuuguagacugggaca

SEQ ID NO: 3274876 - RNA, 19 nt, Artificial Sequence
  Description of Artificial Sequence: Synthetic oligonucleotide
cugggacauacuuacugcc

SEQ ID NO: 3274877 - RNA, 19 nt, Artificial Sequence
  Description of Artificial Sequence: Synthetic oligonucleotide
aucauaggacaccgaguac

SEQ ID NO: 3274878 - RNA, 19 nt, Artificial Sequence
  Description of Artificial Sequence: Synthetic oligonucleotide
uucuuugguugcuuguaga

SEQ ID NO: 3274879 - RNA, 19 nt, Artificial Sequence
  Description of Artificial Sequence: Synthetic oligonucleotide
uugugcaucggauaucaua

SEQ ID NO: 3274880 - RNA, 19 nt, Artificial Sequence
  Description of Artificial Sequence: Synthetic oligonucleotide
uagaccaggaacuguccug

SEQ ID NO: 3274881 - RNA, 19 nt, Artificial Sequence
  Description of Artificial Sequence: Synthetic oligonucleotide
uugguugcuuguagacugg

SEQ ID NO: 3274882 - RNA, 19 nt, Artificial Sequence
  Description of Artificial Sequence: Synthetic oligonucleotide
ugauguugaggcagccgag

SEQ ID NO: 3274883 - RNA, 19 nt, Artificial Sequence
  Description of Artificial Sequence: Synthetic oligonucleotide
ugugccugcguagaccagg

SEQ ID NO: 3274884 - RNA, 19 nt, Artificial Sequence
  Description of Artificial Sequence: Synthetic oligonucleotide
cauguaugugccugcguag

SEQ ID NO: 3274885 - RNA, 19 nt, Artificial Sequence
  Description of Artificial Sequence: Synthetic oligonucleotide
uuaggcuugggagauggcu

SEQ ID NO: 3274886 - RNA, 19 nt, Artificial Sequence
  Description of Artificial Sequence: Synthetic oligonucleotide
ccuguuuacaugaaccagc

SEQ ID NO: 3274887 - RNA, 19 nt, Artificial Sequence
  Description of Artificial Sequence: Synthetic oligonucleotide
guaacccuggcuauucccg

SEQ ID NO: 3274888 - RNA, 19 nt, Artificial Sequence
  Description of Artificial Sequence: Synthetic oligonucleotide
auggcugugcuuccguauc

SEQ ID NO: 3274889 - RNA, 19 nt, Artificial Sequence
  Description of Artificial Sequence: Synthetic oligonucleotide
cucggagcauguaugugcc

SEQ ID NO: 3274890 - RNA, 19 nt, Artificial Sequence
  Description of Artificial Sequence: Synthetic oligonucleotide
auacaugguggccuugaug

SEQ ID NO: 3274891 - RNA, 19 nt, Artificial Sequence
  Description of Artificial Sequence: Synthetic oligonucleotide
gaccuguuuacaugaacca

SEQ ID NO: 3274892 - RNA, 19 nt, Artificial Sequence
  Description of Artificial Sequence: Synthetic oligonucleotide
cuuguagacugggacauac

SEQ ID NO: 3274893 - RNA, 19 nt, Artificial Sequence
  Description of Artificial Sequence: Synthetic oligonucleotide
uguuuacaugaaccagccc

SEQ ID NO: 3274894 - RNA, 19 nt, Artificial Sequence
  Description of Artificial Sequence: Synthetic oligonucleotide
ugaaaugcguguugucccu

SEQ ID NO: 3274895 - RNA, 19 nt, Artificial Sequence
  Description of Artificial Sequence: Synthetic oligonucleotide
gggacauacuuacugcccg

SEQ ID NO: 3274896 - RNA, 19 nt, Artificial Sequence
  Description of Artificial Sequence: Synthetic oligonucleotide
uccugcagcgccaugacgg

SEQ ID NO: 3274897 - RNA, 19 nt, Artificial Sequence
  Description of Artificial Sequence: Synthetic oligonucleotide
gauggugacgcgcuuggcg

SEQ ID NO: 3274898 - RNA, 19 nt, Artificial Sequence
  Description of Artificial Sequence: Synthetic oligonucleotide
agccuugguagccagcugc

SEQ ID NO: 3274899 - RNA, 19 nt, Artificial Sequence
  Description of Artificial Sequence: Synthetic oligonucleotide
auguccuugggcaugaugg

SEQ ID NO: 3274900 - RNA, 19 nt, Artificial Sequence
  Description of Artificial Sequence: Synthetic oligonucleotide
gaugcggcgggccagcugg

SEQ ID NO: 3274901 - RNA, 19 nt, Artificial Sequence
  Description of Artificial Sequence: Synthetic oligonucleotide
uugggcaugauggugacgc

SEQ ID NO: 3274902 - RNA, 19 nt, Artificial Sequence
  Description of Artificial Sequence: Synthetic oligonucleotide
ggucuuaaaguccugcgcg

SEQ ID NO: 3274903 - RNA, 19 nt, Artificial Sequence
  Description of Artificial Sequence: Synthetic oligonucleotide
uugguguccucgaacagcc

SEQ ID NO: 3274904 - RNA, 19 nt, Artificial Sequence
  Description of Artificial Sequence: Synthetic oligonucleotide
uggauuucugguagcgccg

SEQ ID NO: 3274905 - RNA, 19 nt, Artificial Sequence
  Description of Artificial Sequence: Synthetic oligonucleotide
guagccagcugcuugcgcg

SEQ ID NO: 3274906 - RNA, 19 nt, Artificial Sequence
  Description of Artificial Sequence: Synthetic oligonucleotide
guggauuucugguagcgcc

SEQ ID NO: 3274907 - RNA, 19 nt, Artificial Sequence
  Description of Artificial Sequence: Synthetic oligonucleotide
uuaaaguccugcgcgaucu

SEQ ID NO: 3274908 - RNA, 19 nt, Artificial Sequence
  Description of Artificial Sequence: Synthetic oligonucleotide
ucggucuuaaaguccugcg

SEQ ID NO: 3274909 - RNA, 19 nt, Artificial Sequence
  Description of Artificial Sequence: Synthetic oligonucleotide
uccucgaacagccccacca

SEQ ID NO: 3274910 - RNA, 19 nt, Artificial Sequence
  Description of Artificial Sequence: Synthetic oligonucleotide
accagguaggccucgcucg

SEQ ID NO: 3274911 - RNA, 19 nt, Artificial Sequence
  Description of Artificial Sequence: Synthetic oligonucleotide
uggaacggcagcuugcgga

SEQ ID NO: 3274912 - RNA, 19 nt, Artificial Sequence
  Description of Artificial Sequence: Synthetic oligonucleotide
ugcagcgccaugacggccg

SEQ ID NO: 3274913 - RNA, 19 nt, Artificial Sequence
  Description of Artificial Sequence: Synthetic oligonucleotide
guggauggcgcacagguug

SEQ ID NO: 3274914 - RNA, 19 nt, Artificial Sequence
  Description of Artificial Sequence: Synthetic oligonucleotide
agcuggauguccuugggca

SEQ ID NO: 3274915 - RNA, 19 nt, Artificial Sequence
  Description of Artificial Sequence: Synthetic oligonucleotide
aaaguccugcgcgaucucg

SEQ ID NO: 3274916 - RNA, 19 nt, Artificial Sequence
  Description of Artificial Sequence: Synthetic oligonucleotide
uccuugggcaugaugguga

SEQ ID NO: 3274917 - RNA, 19 nt, Artificial Sequence
  Description of Artificial Sequence: Synthetic oligonucleotide
augauggugacgcgcuugg

SEQ ID NO: 3274918 - RNA, 19 nt, Artificial Sequence
  Description of Artificial Sequence: Synthetic oligonucleotide
uugcggaucagcagcucgg

SEQ ID NO: 3274919 - RNA, 19 nt, Artificial Sequence
  Description of Artificial Sequence: Synthetic oligonucleotide
uugcgggcagccuugguag

SEQ ID NO: 3274920 - RNA, 19 nt, Artificial Sequence
  Description of Artificial Sequence: Synthetic oligonucleotide
cuugcggaucagcagcucg

SEQ ID NO: 3274921 - RNA, 19 nt, Artificial Sequence
  Description of Artificial Sequence: Synthetic oligonucleotide
gaacagccccaccagguag

SEQ ID NO: 3274922 - RNA, 19 nt, Artificial Sequence
  Description of Artificial Sequence: Synthetic oligonucleotide
gaucucgcgcaccaggcgc

SEQ ID NO: 3274923 - RNA, 19 nt, Artificial Sequence
  Description of Artificial Sequence: Synthetic oligonucleotide
uugguagccagcugcuugc

SEQ ID NO: 3274924 - RNA, 19 nt, Artificial Sequence
  Description of Artificial Sequence: Synthetic oligonucleotide
agcggugaggcuucuugac

SEQ ID NO: 3274925 - RNA, 19 nt, Artificial Sequence
  Description of Artificial Sequence: Synthetic oligonucleotide
acggccgagcucuggaagc

SEQ ID NO: 3274926 - RNA, 19 nt, Artificial Sequence
  Description of Artificial Sequence: Synthetic oligonucleotide
aaguccugcgcgaucucgc

SEQ ID NO: 3274927 - RNA, 19 nt, Artificial Sequence
  Description of Artificial Sequence: Synthetic oligonucleotide
uucuugacgccgcccgugg

SEQ ID NO: 3274928 - RNA, 19 nt, Artificial Sequence
  Description of Artificial Sequence: Synthetic oligonucleotide
cuugguagccagcugcuug

SEQ ID NO: 3274929 - RNA, 19 nt, Artificial Sequence
  Description of Artificial Sequence: Synthetic oligonucleotide
uggauggcgcacagguugg

SEQ ID NO: 3274930 - RNA, 19 nt, Artificial Sequence
  Description of Artificial Sequence: Synthetic oligonucleotide
aacggcagcuugcggauca

SEQ ID NO: 3274931 - RNA, 19 nt, Artificial Sequence
  Description of Artificial Sequence: Synthetic oligonucleotide
ucgaacagccccaccaggu

SEQ ID NO: 3274932 - RNA, 19 nt, Artificial Sequence
  Description of Artificial Sequence: Synthetic oligonucleotide
cucgguggauuucugguag

SEQ ID NO: 3274933 - RNA, 19 nt, Artificial Sequence
  Description of Artificial Sequence: Synthetic oligonucleotide
agguugguguccucgaaca

SEQ ID NO: 3274934 - RNA, 19 nt, Artificial Sequence
  Description of Artificial Sequence: Synthetic oligonucleotide
guagcggugaggcuucuug

SEQ ID NO: 3274935 - RNA, 19 nt, Artificial Sequence
  Description of Artificial Sequence: Synthetic oligonucleotide
agcgccacggugccgggcc

SEQ ID NO: 3274936 - RNA, 19 nt, Artificial Sequence
  Description of Artificial Sequence: Synthetic oligonucleotide
agccccaccagguaggccu

SEQ ID NO: 3274937 - RNA, 19 nt, Artificial Sequence
  Description of Artificial Sequence: Synthetic oligonucleotide
acgcgcuuggcguggaugg

SEQ ID NO: 3274938 - RNA, 19 nt, Artificial Sequence
  Description of Artificial Sequence: Synthetic oligonucleotide
cagcuugcggaucagcagc

SEQ ID NO: 3274939 - RNA, 19 nt, Artificial Sequence
  Description of Artificial Sequence: Synthetic oligonucleotide
uucugguagcgccggaucu

SEQ ID NO: 3274940 - RNA, 19 nt, Artificial Sequence
  Description of Artificial Sequence: Synthetic oligonucleotide
gauguccuugggcaugaug

SEQ ID NO: 3274941 - RNA, 19 nt, Artificial Sequence
  Description of Artificial Sequence: Synthetic oligonucleotide
ugaggcuucuugacgccgc

SEQ ID NO: 3274942 - RNA, 19 nt, Artificial Sequence
  Description of Artificial Sequence: Synthetic oligonucleotide
auggugacgcgcuuggcgu

SEQ ID NO: 3274943 - RNA, 19 nt, Artificial Sequence
  Description of Artificial Sequence: Synthetic oligonucleotide
aacagccccaccagguagg

SEQ ID NO: 3274944 - RNA, 19 nt, Artificial Sequence
  Description of Artificial Sequence: Synthetic oligonucleotide
agcucgguggauuucuggu

SEQ ID NO: 3274945 - RNA, 19 nt, Artificial Sequence
  Description of Artificial Sequence: Synthetic oligonucleotide
guugguguccucgaacagc

SEQ ID NO: 3274946 - RNA, 19 nt, Artificial Sequence
  Description of Artificial Sequence: Synthetic oligonucleotide
agcgccaugacggccgagc

SEQ ID NO: 3274947 - RNA, 19 nt, Artificial Sequence
  Description of Artificial Sequence: Synthetic oligonucleotide
uuucugguagcgccggauc

SEQ ID NO: 3274948 - RNA, 19 nt, Artificial Sequence
  Description of Artificial Sequence: Synthetic oligonucleotide
caggucggucuuaaagucc

SEQ ID NO: 3274949 - RNA, 19 nt, Artificial Sequence
  Description of Artificial Sequence: Synthetic oligonucleotide
gcucuggaagcgcaggucg

SEQ ID NO: 3274950 - RNA, 19 nt, Artificial Sequence
  Description of Artificial Sequence: Synthetic oligonucleotide
ugcuuggugcgagccaugg

SEQ ID NO: 3274951 - RNA, 19 nt, Artificial Sequence
  Description of Artificial Sequence: Synthetic oligonucleotide
aguccugcgcgaucucgcg

SEQ ID NO: 3274952 - RNA, 19 nt, Artificial Sequence
  Description of Artificial Sequence: Synthetic oligonucleotide
ugcgcgaucucgcgcacca

SEQ ID NO: 3274953 - RNA, 19 nt, Artificial Sequence
  Description of Artificial Sequence: Synthetic oligonucleotide
uggacuugcgggccgucug

SEQ ID NO: 3274954 - RNA, 19 nt, Artificial Sequence
  Description of Artificial Sequence: Synthetic oligonucleotide
auggcgcacagguuggugu

SEQ ID NO: 3274955 - RNA, 19 nt, Artificial Sequence
  Description of Artificial Sequence: Synthetic oligonucleotide
uccugcgcgaucucgcgca

SEQ ID NO: 3274956 - RNA, 19 nt, Artificial Sequence
  Description of Artificial Sequence: Synthetic oligonucleotide
cuugacgccgcccguggcc

SEQ ID NO: 3274957 - RNA, 19 nt, Artificial Sequence
  Description of Artificial Sequence: Synthetic oligonucleotide
uagccagcugcuugcgcgg

SEQ ID NO: 3274958 - RNA, 19 nt, Artificial Sequence
  Description of Artificial Sequence: Synthetic oligonucleotide
gacggccgagcucuggaag

SEQ ID NO: 3274959 - RNA, 19 nt, Artificial Sequence
  Description of Artificial Sequence: Synthetic oligonucleotide
ucgcucgccuccugcagcg

SEQ ID NO: 3274960 - RNA, 19 nt, Artificial Sequence
  Description of Artificial Sequence: Synthetic oligonucleotide
cuuaaaguccugcgcgauc

SEQ ID NO: 3274961 - RNA, 19 nt, Artificial Sequence
  Description of Artificial Sequence: Synthetic oligonucleotide
cucgaacagccccaccagg

SEQ ID NO: 3274962 - RNA, 19 nt, Artificial Sequence
  Description of Artificial Sequence: Synthetic oligonucleotide
uguccuugggcaugauggu

SEQ ID NO: 3274963 - RNA, 19 nt, Artificial Sequence
  Description of Artificial Sequence: Synthetic oligonucleotide
ucgcgcagcgccacggugc

SEQ ID NO: 3274964 - RNA, 19 nt, Artificial Sequence
  Description of Artificial Sequence: Synthetic oligonucleotide
gguguccucgaacagcccc

SEQ ID NO: 3274965 - RNA, 19 nt, Artificial Sequence
  Description of Artificial Sequence: Synthetic oligonucleotide
cucuggaagcgcaggucgg

SEQ ID NO: 3274966 - RNA, 19 nt, Artificial Sequence
  Description of Artificial Sequence: Synthetic oligonucleotide
cuugcgggccgucugcuug

SEQ ID NO: 3274967 - RNA, 19 nt, Artificial Sequence
  Description of Artificial Sequence: Synthetic oligonucleotide
ggcuucuugacgccgcccg

SEQ ID NO: 3274968 - RNA, 19 nt, Artificial Sequence
  Description of Artificial Sequence: Synthetic oligonucleotide
ucugcuuggugcgagccau

SEQ ID NO: 3274969 - RNA, 19 nt, Artificial Sequence
  Description of Artificial Sequence: Synthetic oligonucleotide
uugacgccgcccguggccg

SEQ ID NO: 3274970 - RNA, 19 nt, Artificial Sequence
  Description of Artificial Sequence: Synthetic oligonucleotide
uagcggugaggcuucuuga

SEQ ID NO: 3274971 - RNA, 19 nt, Artificial Sequence
  Description of Artificial Sequence: Synthetic oligonucleotide
ucuuaaaguccugcgcgau

SEQ ID NO: 3274972 - RNA, 19 nt, Artificial Sequence
  Description of Artificial Sequence: Synthetic oligonucleotide
uggaagcgcaggucggucu

SEQ ID NO: 3274973 - RNA, 19 nt, Artificial Sequence
  Description of Artificial Sequence: Synthetic oligonucleotide
gucuuaaaguccugcgcga

SEQ ID NO: 3274974 - RNA, 19 nt, Artificial Sequence
  Description of Artificial Sequence: Synthetic oligonucleotide
uugcgcggggccuugccgc

SEQ ID NO: 3274975 - RNA, 19 nt, Artificial Sequence
  Description of Artificial Sequence: Synthetic oligonucleotide
gguagcgccggaucucgcg

SEQ ID NO: 3274976 - RNA, 19 nt, Artificial Sequence
  Description of Artificial Sequence: Synthetic oligonucleotide
uugcgggccgucugcuugg

SEQ ID NO: 3274977 - RNA, 19 nt, Artificial Sequence
  Description of Artificial Sequence: Synthetic oligonucleotide
cuugcgcggggccuugccg

SEQ ID NO: 3274978 - RNA, 19 nt, Artificial Sequence
  Description of Artificial Sequence: Synthetic oligonucleotide
ugggcaugauggugacgcg

SEQ ID NO: 3274979 - RNA, 19 nt, Artificial Sequence
  Description of Artificial Sequence: Synthetic oligonucleotide
cagguugguguccucgaac

SEQ ID NO: 3274980 - RNA, 19 nt, Artificial Sequence
  Description of Artificial Sequence: Synthetic oligonucleotide
caugauggugacgcgcuug

SEQ ID NO: 3274981 - RNA, 19 nt, Artificial Sequence
  Description of Artificial Sequence: Synthetic oligonucleotide
guagcgccggaucucgcgc

SEQ ID NO: 3274982 - RNA, 19 nt, Artificial Sequence
  Description of Artificial Sequence: Synthetic oligonucleotide
gucggucuuaaaguccugc

SEQ ID NO: 3274983 - RNA, 19 nt, Artificial Sequence
  Description of Artificial Sequence: Synthetic oligonucleotide
agcucuggaagcgcagguc

SEQ ID NO: 3274984 - RNA, 19 nt, Artificial Sequence
  Description of Artificial Sequence: Synthetic oligonucleotide
uuaggcccgcuccccgcgg

SEQ ID NO: 3274985 - RNA, 19 nt, Artificial Sequence
  Description of Artificial Sequence: Synthetic oligonucleotide
cagcucgguggauuucugg

SEQ ID NO: 3274986 - RNA, 19 nt, Artificial Sequence
  Description of Artificial Sequence: Synthetic oligonucleotide
ucgguggauuucugguagc

SEQ ID NO: 3274987 - RNA, 19 nt, Artificial Sequence
  Description of Artificial Sequence: Synthetic oligonucleotide
augacggccgagcucugga

SEQ ID NO: 3274988 - RNA, 19 nt, Artificial Sequence
  Description of Artificial Sequence: Synthetic oligonucleotide
aggucggucuuaaaguccu

SEQ ID NO: 3274989 - RNA, 19 nt, Artificial Sequence
  Description of Artificial Sequence: Synthetic oligonucleotide
cggaucagcagcucggugg

SEQ ID NO: 3274990 - RNA, 19 nt, Artificial Sequence
  Description of Artificial Sequence: Synthetic oligonucleotide
ucagcagcucgguggauuu

SEQ ID NO: 3274991 - RNA, 19 nt, Artificial Sequence
  Description of Artificial Sequence: Synthetic oligonucleotide
cugguagcgccggaucucg

SEQ ID NO: 3274992 - RNA, 19 nt, Artificial Sequence
  Description of Artificial Sequence: Synthetic oligonucleotide
gcgcaggucggucuuaaag

SEQ ID NO: 3274993 - RNA, 19 nt, Artificial Sequence
  Description of Artificial Sequence: Synthetic oligonucleotide
ucuugacgccgcccguggc

SEQ ID NO: 3274994 - RNA, 19 nt, Artificial Sequence
  Description of Artificial Sequence: Synthetic oligonucleotide
cagcuggauguccuugggc

SEQ ID NO: 3274995 - RNA, 19 nt, Artificial Sequence
  Description of Artificial Sequence: Synthetic oligonucleotide
gaggcuucuugacgccgcc

SEQ ID NO: 3274996 - RNA, 19 nt, Artificial Sequence
  Description of Artificial Sequence: Synthetic oligonucleotide
auaugugugaucuuauucc

SEQ ID NO: 3274997 - RNA, 19 nt, Artificial Sequence
  Description of Artificial Sequence: Synthetic oligonucleotide
aaguuuccaagguagaguc

SEQ ID NO: 3274998 - RNA, 19 nt, Artificial Sequence
  Description of Artificial Sequence: Synthetic oligonucleotide
aaugaaguuuccaagguag

SEQ ID NO: 3274999 - RNA, 19 nt, Artificial Sequence
  Description of Artificial Sequence: Synthetic oligonucleotide
cuguggauaaaguugaugc

SEQ ID NO: 3275000 - RNA, 19 nt, Artificial Sequence
  Description of Artificial Sequence: Synthetic oligonucleotide
aucaaugaaguuuccaagg

SEQ ID NO: 3275001 - RNA, 19 nt, Artificial Sequence
  Description of Artificial Sequence: Synthetic oligonucleotide
aaaguugaugcauucuuug

SEQ ID NO: 3275002 - RNA, 19 nt, Artificial Sequence
  Description of Artificial Sequence: Synthetic oligonucleotide
uaugugugaucuuauuccg

SEQ ID NO: 3275003 - RNA, 19 nt, Artificial Sequence
  Description of Artificial Sequence: Synthetic oligonucleotide
auccgaagguacuugauac

SEQ ID NO: 3275004 - RNA, 19 nt, Artificial Sequence
  Description of Artificial Sequence: Synthetic oligonucleotide
ucauggauagagaugauau

SEQ ID NO: 3275005 - RNA, 19 nt, Artificial Sequence
  Description of Artificial Sequence: Synthetic oligonucleotide
uuuugauggguacuucagg

SEQ ID NO: 3275006 - RNA, 19 nt, Artificial Sequence
  Description of Artificial Sequence: Synthetic oligonucleotide
gauucauggauagagauga

SEQ ID NO: 3275007 - RNA, 19 nt, Artificial Sequence
  Description of Artificial Sequence: Synthetic oligonucleotide
uuccccaugaucacgaggc

SEQ ID NO: 3275008 - RNA, 19 nt, Artificial Sequence
  Description of Artificial Sequence: Synthetic oligonucleotide
uuugauggguacuucagga

SEQ ID NO: 3275009 - RNA, 19 nt, Artificial Sequence
  Description of Artificial Sequence: Synthetic oligonucleotide
gauaugugugaucuuauuc

SEQ ID NO: 3275010 - RNA, 19 nt, Artificial Sequence
  Description of Artificial Sequence: Synthetic oligonucleotide
auagagaugauauguguga

SEQ ID NO: 3275011 - RNA, 19 nt, Artificial Sequence
  Description of Artificial Sequence: Synthetic oligonucleotide
acugaucugggucuuuggc

SEQ ID NO: 3275012 - RNA, 19 nt, Artificial Sequence
  Description of Artificial Sequence: Synthetic oligonucleotide
ucuuauuccggcccaacug

SEQ ID NO: 3275013 - RNA, 19 nt, Artificial Sequence
  Description of Artificial Sequence: Synthetic oligonucleotide
ugugaucuuauuccggccc

SEQ ID NO: 3275014 - RNA, 19 nt, Artificial Sequence
  Description of Artificial Sequence: Synthetic oligonucleotide
ucuuuggcaucaaugaagu

SEQ ID NO: 3275015 - RNA, 19 nt, Artificial Sequence
  Description of Artificial Sequence: Synthetic oligonucleotide
gaugcauucuuugaagugc

SEQ ID NO: 3275016 - RNA, 19 nt, Artificial Sequence
  Description of Artificial Sequence: Synthetic oligonucleotide
caagguagaguccaggaag

SEQ ID NO: 3275017 - RNA, 19 nt, Artificial Sequence
  Description of Artificial Sequence: Synthetic oligonucleotide
ugauggguacuucaggagc

SEQ ID NO: 3275018 - RNA, 19 nt, Artificial Sequence
  Description of Artificial Sequence: Synthetic oligonucleotide
ugugugaucuuauuccggc

SEQ ID NO: 3275019 - RNA, 19 nt, Artificial Sequence
  Description of Artificial Sequence: Synthetic oligonucleotide
guacaaggcaguuaccccg

SEQ ID NO: 3275020 - RNA, 19 nt, Artificial Sequence
  Description of Artificial Sequence: Synthetic oligonucleotide
uuggcaucaaugaaguuuc

SEQ ID NO: 3275021 - RNA, 19 nt, Artificial Sequence
  Description of Artificial Sequence: Synthetic oligonucleotide
ucaaugaaguuuccaaggu

SEQ ID NO: 3275022 - RNA, 19 nt, Artificial Sequence
  Description of Artificial Sequence: Synthetic oligonucleotide
uacuucaggagcaucggcc

SEQ ID NO: 3275023 - RNA, 19 nt, Artificial Sequence
  Description of Artificial Sequence: Synthetic oligonucleotide
ugaggugauucauggauag

SEQ ID NO: 3275024 - RNA, 19 nt, Artificial Sequence
  Description of Artificial Sequence: Synthetic oligonucleotide
guugaugcauucuuugaag

SEQ ID NO: 3275025 - RNA, 19 nt, Artificial Sequence
  Description of Artificial Sequence: Synthetic oligonucleotide
ugauucauggauagagaug

SEQ ID NO: 3275026 - RNA, 19 nt, Artificial Sequence
  Description of Artificial Sequence: Synthetic oligonucleotide
agguugaggugauucaugg

SEQ ID NO: 3275027 - RNA, 19 nt, Artificial Sequence
  Description of Artificial Sequence: Synthetic oligonucleotide
gauagagaugauaugugug

SEQ ID NO: 3275028 - RNA, 19 nt, Artificial Sequence
  Description of Artificial Sequence: Synthetic oligonucleotide
caucaaugaaguuuccaag

SEQ ID NO: 3275029 - RNA, 19 nt, Artificial Sequence
  Description of Artificial Sequence: Synthetic oligonucleotide
uuuggcaucaaugaaguuu

SEQ ID NO: 3275030 - RNA, 19 nt, Artificial Sequence
  Description of Artificial Sequence: Synthetic oligonucleotide
uggauagagaugauaugug

SEQ ID NO: 3275031 - RNA, 19 nt, Artificial Sequence
  Description of Artificial Sequence: Synthetic oligonucleotide
aaggcaguuaccccguuga

SEQ ID NO: 3275032 - RNA, 19 nt, Artificial Sequence
  Description of Artificial Sequence: Synthetic oligonucleotide
auggauagagaugauaugu

SEQ ID NO: 3275033 - RNA, 19 nt, Artificial Sequence
  Description of Artificial Sequence: Synthetic oligonucleotide
gaagguacuugauacccug

SEQ ID NO: 3275034 - RNA, 19 nt, Artificial Sequence
  Description of Artificial Sequence: Synthetic oligonucleotide
auaaaguugaugcauucuu

SEQ ID NO: 3275035 - RNA, 19 nt, Artificial Sequence
  Description of Artificial Sequence: Synthetic oligonucleotide
uguacaaggcaguuacccc

SEQ ID NO: 3275036 - RNA, 19 nt, Artificial Sequence
  Description of Artificial Sequence: Synthetic oligonucleotide
ugggucuuuggcaucaaug

SEQ ID NO: 3275037 - RNA, 19 nt, Artificial Sequence
  Description of Artificial Sequence: Synthetic oligonucleotide
aaguugaugcauucuuuga

SEQ ID NO: 3275038 - RNA, 19 nt, Artificial Sequence
  Description of Artificial Sequence: Synthetic oligonucleotide
ugaugcauucuuugaagug

SEQ ID NO: 3275039 - RNA, 19 nt, Artificial Sequence
  Description of Artificial Sequence: Synthetic oligonucleotide
aggugauucauggauagag

SEQ ID NO: 3275040 - RNA, 19 nt, Artificial Sequence
  Description of Artificial Sequence: Synthetic oligonucleotide
uguggauaaaguugaugca

SEQ ID NO: 3275041 - RNA, 19 nt, Artificial Sequence
  Description of Artificial Sequence: Synthetic oligonucleotide
agagaugauaugugugauc

SEQ ID NO: 3275042 - RNA, 19 nt, Artificial Sequence
  Description of Artificial Sequence: Synthetic oligonucleotide
ugaaguuuccaagguagag

SEQ ID NO: 3275043 - RNA, 19 nt, Artificial Sequence
  Description of Artificial Sequence: Synthetic oligonucleotide
caguguacaaggcaguuac

SEQ ID NO: 3275044 - RNA, 19 nt, Artificial Sequence
  Description of Artificial Sequence: Synthetic oligonucleotide
gaguccaggaaguaccuug

SEQ ID NO: 3275045 - RNA, 19 nt, Artificial Sequence
  Description of Artificial Sequence: Synthetic oligonucleotide
aacugaucugggucuuugg

SEQ ID NO: 3275046 - RNA, 19 nt, Artificial Sequence
  Description of Artificial Sequence: Synthetic oligonucleotide
aggagcaucggccacugag

SEQ ID NO: 3275047 - RNA, 19 nt, Artificial Sequence
  Description of Artificial Sequence: Synthetic oligonucleotide
uugauggguacuucaggag

SEQ ID NO: 3275048 - RNA, 19 nt, Artificial Sequence
  Description of Artificial Sequence: Synthetic oligonucleotide
uugaugcauucuuugaagu

SEQ ID NO: 3275049 - RNA, 19 nt, Artificial Sequence
  Description of Artificial Sequence: Synthetic oligonucleotide
accuuggucaugccauucc

SEQ ID NO: 3275050 - RNA, 19 nt, Artificial Sequence
  Description of Artificial Sequence: Synthetic oligonucleotide
guagaguccaggaaguacc

SEQ ID NO: 3275051 - RNA, 19 nt, Artificial Sequence
  Description of Artificial Sequence: Synthetic oligonucleotide
gucuuuggcaucaaugaag

SEQ ID NO: 3275052 - RNA, 19 nt, Artificial Sequence
  Description of Artificial Sequence: Synthetic oligonucleotide
aguugaugcauucuuugaa

SEQ ID NO: 3275053 - RNA, 19 nt, Artificial Sequence
  Description of Artificial Sequence: Synthetic oligonucleotide
augaucacgaggccgguug

SEQ ID NO: 3275054 - RNA, 19 nt, Artificial Sequence
  Description of Artificial Sequence: Synthetic oligonucleotide
uaaaguugaugcauucuuu

SEQ ID NO: 3275055 - RNA, 19 nt, Artificial Sequence
  Description of Artificial Sequence: Synthetic oligonucleotide
auuccggcccaacugaucu

SEQ ID NO: 3275056 - RNA, 19 nt, Artificial Sequence
  Description of Artificial Sequence: Synthetic oligonucleotide
cuugauacccugcaguuga

SEQ ID NO: 3275057 - RNA, 19 nt, Artificial Sequence
  Description of Artificial Sequence: Synthetic oligonucleotide
aaguaccuuggucaugcca

SEQ ID NO: 3275058 - RNA, 19 nt, Artificial Sequence
  Description of Artificial Sequence: Synthetic oligonucleotide
gcaguuaccccguugaggc

SEQ ID NO: 3275059 - RNA, 19 nt, Artificial Sequence
  Description of Artificial Sequence: Synthetic oligonucleotide
uuggucaugccauucccca

SEQ ID NO: 3275060 - RNA, 19 nt, Artificial Sequence
  Description of Artificial Sequence: Synthetic oligonucleotide
ugaucugggucuuuggcau

SEQ ID NO: 3275061 - RNA, 19 nt, Artificial Sequence
  Description of Artificial Sequence: Synthetic oligonucleotide
uccaagguagaguccagga

SEQ ID NO: 3275062 - RNA, 19 nt, Artificial Sequence
  Description of Artificial Sequence: Synthetic oligonucleotide
gaugauaugugugaucuua

SEQ ID NO: 3275063 - RNA, 19 nt, Artificial Sequence
  Description of Artificial Sequence: Synthetic oligonucleotide
aagguacuugauacccugc

SEQ ID NO: 3275064 - RNA, 19 nt, Artificial Sequence
  Description of Artificial Sequence: Synthetic oligonucleotide
guguacaaggcaguuaccc

SEQ ID NO: 3275065 - RNA, 19 nt, Artificial Sequence
  Description of Artificial Sequence: Synthetic oligonucleotide
gagaugauaugugugaucu

SEQ ID NO: 3275066 - RNA, 19 nt, Artificial Sequence
  Description of Artificial Sequence: Synthetic oligonucleotide
auuccccaugaucacgagg

SEQ ID NO: 3275067 - RNA, 19 nt, Artificial Sequence
  Description of Artificial Sequence: Synthetic oligonucleotide
uacccugcaguugagguug

SEQ ID NO: 3275068 - RNA, 19 nt, Artificial Sequence
  Description of Artificial Sequence: Synthetic oligonucleotide
gcaacuguggauaaaguug

SEQ ID NO: 3275069 - RNA, 19 nt, Artificial Sequence
  Description of Artificial Sequence: Synthetic oligonucleotide
caacuguggauaaaguuga

SEQ ID NO: 3275070 - RNA, 19 nt, Artificial Sequence
  Description of Artificial Sequence: Synthetic oligonucleotide
cauggauagagaugauaug

SEQ ID NO: 3275071 - RNA, 19 nt, Artificial Sequence
  Description of Artificial Sequence: Synthetic oligonucleotide
aguuaccccguugaggcgg

SEQ ID NO: 3275072 - RNA, 19 nt, Artificial Sequence
  Description of Artificial Sequence: Synthetic oligonucleotide
uggauaaaguugaugcauu

SEQ ID NO: 3275073 - RNA, 19 nt, Artificial Sequence
  Description of Artificial Sequence: Synthetic oligonucleotide
uugagguugaggugauuca

SEQ ID NO: 3275074 - RNA, 19 nt, Artificial Sequence
  Description of Artificial Sequence: Synthetic oligonucleotide
caugccauuccccaugauc

SEQ ID NO: 3275075 - RNA, 19 nt, Artificial Sequence
  Description of Artificial Sequence: Synthetic oligonucleotide
gcaucggccacugagaucc

SEQ ID NO: 3275076 - RNA, 19 nt, Artificial Sequence
  Description of Artificial Sequence: Synthetic oligonucleotide
augccauuccccaugauca

SEQ ID NO: 3275077 - RNA, 19 nt, Artificial Sequence
  Description of Artificial Sequence: Synthetic oligonucleotide
ugaucacgaggccgguugg

SEQ ID NO: 3275078 - RNA, 19 nt, Artificial Sequence
  Description of Artificial Sequence: Synthetic oligonucleotide
cuuggucaugccauucccc

SEQ ID NO: 3275079 - RNA, 19 nt, Artificial Sequence
  Description of Artificial Sequence: Synthetic oligonucleotide
uccgaagguacuugauacc

SEQ ID NO: 3275080 - RNA, 19 nt, Artificial Sequence
  Description of Artificial Sequence: Synthetic oligonucleotide
acuucaggagcaucggcca

SEQ ID NO: 3275081 - RNA, 19 nt, Artificial Sequence
  Description of Artificial Sequence: Synthetic oligonucleotide
uccaggaaguaccuugguc

SEQ ID NO: 3275082 - RNA, 19 nt, Artificial Sequence
  Description of Artificial Sequence: Synthetic oligonucleotide
ugcaguugagguugaggug

SEQ ID NO: 3275083 - RNA, 19 nt, Artificial Sequence
  Description of Artificial Sequence: Synthetic oligonucleotide
uugaggugauucauggaua

SEQ ID NO: 3275084 - RNA, 19 nt, Artificial Sequence
  Description of Artificial Sequence: Synthetic oligonucleotide
guuuccaagguagagucca

SEQ ID NO: 3275085 - RNA, 19 nt, Artificial Sequence
  Description of Artificial Sequence: Synthetic oligonucleotide
guugagguugaggugauuc

SEQ ID NO: 3275086 - RNA, 19 nt, Artificial Sequence
  Description of Artificial Sequence: Synthetic oligonucleotide
aagguagaguccaggaagu

SEQ ID NO: 3275087 - RNA, 19 nt, Artificial Sequence
  Description of Artificial Sequence: Synthetic oligonucleotide
ucacgaggccgguuggccg

SEQ ID NO: 3275088 - RNA, 19 nt, Artificial Sequence
  Description of Artificial Sequence: Synthetic oligonucleotide
ggaaguaccuuggucaugc

SEQ ID NO: 3275089 - RNA, 19 nt, Artificial Sequence
  Description of Artificial Sequence: Synthetic oligonucleotide
cuuauuccggcccaacuga

SEQ ID NO: 3275090 - RNA, 19 nt, Artificial Sequence
  Description of Artificial Sequence: Synthetic oligonucleotide
uacuugauacccugcaguu

SEQ ID NO: 3275091 - RNA, 19 nt, Artificial Sequence
  Description of Artificial Sequence: Synthetic oligonucleotide
agguacuugauacccugca

SEQ ID NO: 3275092 - RNA, 19 nt, Artificial Sequence
  Description of Artificial Sequence: Synthetic oligonucleotide
aguaccuuggucaugccau

SEQ ID NO: 3275093 - RNA, 19 nt, Artificial Sequence
  Description of Artificial Sequence: Synthetic oligonucleotide
uuuccaagguagaguccag

SEQ ID NO: 3275094 - RNA, 19 nt, Artificial Sequence
  Description of Artificial Sequence: Synthetic oligonucleotide
guugaggcggcaacugugg

SEQ ID NO: 3275095 - RNA, 19 nt, Artificial Sequence
  Description of Artificial Sequence: Synthetic oligonucleotide
guugaggugauucauggau

SEQ ID NO: 3275096 - RNA, 19 nt, Artificial Sequence
  Description of Artificial Sequence: Synthetic oligonucleotide
aaaauugucaucuugguuc

SEQ ID NO: 3275097 - RNA, 19 nt, Artificial Sequence
  Description of Artificial Sequence: Synthetic oligonucleotide
uguaaaauugucaucuugg

SEQ ID NO: 3275098 - RNA, 19 nt, Artificial Sequence
  Description of Artificial Sequence: Synthetic oligonucleotide
agaacuugcucucagauac

SEQ ID NO: 3275099 - RNA, 19 nt, Artificial Sequence
  Description of Artificial Sequence: Synthetic oligonucleotide
uaaguuauuauugauaggc

SEQ ID NO: 3275100 - RNA, 19 nt, Artificial Sequence
  Description of Artificial Sequence: Synthetic oligonucleotide
auuugugaauaucagaaac

SEQ ID NO: 3275101 - RNA, 19 nt, Artificial Sequence
  Description of Artificial Sequence: Synthetic oligonucleotide
guuaaguuauuauugauag

SEQ ID NO: 3275102 - RNA, 19 nt, Artificial Sequence
  Description of Artificial Sequence: Synthetic oligonucleotide
uauaauauugcuuauuuuc

SEQ ID NO: 3275103 - RNA, 19 nt, Artificial Sequence
  Description of Artificial Sequence: Synthetic oligonucleotide
uauuucuuagaacauaagc

SEQ ID NO: 3275104 - RNA, 19 nt, Artificial Sequence
  Description of Artificial Sequence: Synthetic oligonucleotide
uugaccaucuauaauauug

SEQ ID NO: 3275105 - RNA, 19 nt, Artificial Sequence
  Description of Artificial Sequence: Synthetic oligonucleotide
uguauuauuuggacuaugg

SEQ ID NO: 3275106 - RNA, 19 nt, Artificial Sequence
  Description of Artificial Sequence: Synthetic oligonucleotide
uuuagcaacaucaucaaaa

SEQ ID NO: 3275107 - RNA, 19 nt, Artificial Sequence
  Description of Artificial Sequence: Synthetic oligonucleotide
uggacuauggcaaagaguc

SEQ ID NO: 3275108 - RNA, 19 nt, Artificial Sequence
  Description of Artificial Sequence: Synthetic oligonucleotide
uacuguauuucuuagaaca

SEQ ID NO: 3275109 - RNA, 19 nt, Artificial Sequence
  Description of Artificial Sequence: Synthetic oligonucleotide
aaacaaauaagccaugaau

SEQ ID NO: 3275110 - RNA, 19 nt, Artificial Sequence
  Description of Artificial Sequence: Synthetic oligonucleotide
uucuucaucuauaggaugg

SEQ ID NO: 3275111 - RNA, 19 nt, Artificial Sequence
  Description of Artificial Sequence: Synthetic oligonucleotide
uuauugauaggccugugag

SEQ ID NO: 3275112 - RNA, 19 nt, Artificial Sequence
  Description of Artificial Sequence: Synthetic oligonucleotide
uauuguaaaauugucaucu

SEQ ID NO: 3275113 - RNA, 19 nt, Artificial Sequence
  Description of Artificial Sequence: Synthetic oligonucleotide
ucuaauuugugaauaucag

SEQ ID NO: 3275114 - RNA, 19 nt, Artificial Sequence
  Description of Artificial Sequence: Synthetic oligonucleotide
acaaauaagccaugaauuc

SEQ ID NO: 3275115 - RNA, 19 nt, Artificial Sequence
  Description of Artificial Sequence: Synthetic oligonucleotide
uucaaaaucacauucugaa

SEQ ID NO: 3275116 - RNA, 19 nt, Artificial Sequence
  Description of Artificial Sequence: Synthetic oligonucleotide
uuggcuuucuucaaaauca

SEQ ID NO: 3275117 - RNA, 19 nt, Artificial Sequence
  Description of Artificial Sequence: Synthetic oligonucleotide
uuguguuaaguuauuauug

SEQ ID NO: 3275118 - RNA, 19 nt, Artificial Sequence
  Description of Artificial Sequence: Synthetic oligonucleotide
ugugagguaauucuuuugc

SEQ ID NO: 3275119 - RNA, 19 nt, Artificial Sequence
  Description of Artificial Sequence: Synthetic oligonucleotide
uguauuuguauuauuugga

SEQ ID NO: 3275120 - RNA, 19 nt, Artificial Sequence
  Description of Artificial Sequence: Synthetic oligonucleotide
auuguagcuaccuucauga

SEQ ID NO: 3275121 - RNA, 19 nt, Artificial Sequence
  Description of Artificial Sequence: Synthetic oligonucleotide
cuguauuuguauuauuugg

SEQ ID NO: 3275122 - RNA, 19 nt, Artificial Sequence
  Description of Artificial Sequence: Synthetic oligonucleotide
uauaggaugguuuucugug

SEQ ID NO: 3275123 - RNA, 19 nt, Artificial Sequence
  Description of Artificial Sequence: Synthetic oligonucleotide
ucaauuuuccuuuuguuuc

SEQ ID NO: 3275124 - RNA, 19 nt, Artificial Sequence
  Description of Artificial Sequence: Synthetic oligonucleotide
guugcuauguuuugcaagg

SEQ ID NO: 3275125 - RNA, 19 nt, Artificial Sequence
  Description of Artificial Sequence: Synthetic oligonucleotide
uaaaggauacguaaguuuc

SEQ ID NO: 3275126 - RNA, 19 nt, Artificial Sequence
  Description of Artificial Sequence: Synthetic oligonucleotide
ugcaagaugcuucccaugg

SEQ ID NO: 3275127 - RNA, 19 nt, Artificial Sequence
  Description of Artificial Sequence: Synthetic oligonucleotide
uaacaaaauauccuguggu

SEQ ID NO: 3275128 - RNA, 19 nt, Artificial Sequence
  Description of Artificial Sequence: Synthetic oligonucleotide
uuugugaauaucagaaaca

SEQ ID NO: 3275129 - RNA, 19 nt, Artificial Sequence
  Description of Artificial Sequence: Synthetic oligonucleotide
uuccuuuuguuucugaaug

SEQ ID NO: 3275130 - RNA, 19 nt, Artificial Sequence
  Description of Artificial Sequence: Synthetic oligonucleotide
uagaacauaagcuugucaa

SEQ ID NO: 3275131 - RNA, 19 nt, Artificial Sequence
  Description of Artificial Sequence: Synthetic oligonucleotide
ucagauaccuugauguugc

SEQ ID NO: 3275132 - RNA, 19 nt, Artificial Sequence
  Description of Artificial Sequence: Synthetic oligonucleotide
uuuugguaauuucuguucc

SEQ ID NO: 3275133 - RNA, 19 nt, Artificial Sequence
  Description of Artificial Sequence: Synthetic oligonucleotide
ucuauaauauugcuuauuu

SEQ ID NO: 3275134 - RNA, 19 nt, Artificial Sequence
  Description of Artificial Sequence: Synthetic oligonucleotide
uuuuguuucugaaugugac

SEQ ID NO: 3275135 - RNA, 19 nt, Artificial Sequence
  Description of Artificial Sequence: Synthetic oligonucleotide
auuacuguauuucuuagaa

SEQ ID NO: 3275136 - RNA, 19 nt, Artificial Sequence
  Description of Artificial Sequence: Synthetic oligonucleotide
uuuugugaaggcuuggcug

SEQ ID NO: 3275137 - RNA, 19 nt, Artificial Sequence
  Description of Artificial Sequence: Synthetic oligonucleotide
aaguuauuauugauaggcc

SEQ ID NO: 3275138 - RNA, 19 nt, Artificial Sequence
  Description of Artificial Sequence: Synthetic oligonucleotide
guaacaaaauauccugugg

SEQ ID NO: 3275139 - RNA, 19 nt, Artificial Sequence
  Description of Artificial Sequence: Synthetic oligonucleotide
uaugucgggagaaacaaac

SEQ ID NO: 3275140 - RNA, 19 nt, Artificial Sequence
  Description of Artificial Sequence: Synthetic oligonucleotide
gagaaacaaacaaauaagc

SEQ ID NO: 3275141 - RNA, 19 nt, Artificial Sequence
  Description of Artificial Sequence: Synthetic oligonucleotide
auuucuuagaacauaagcu

SEQ ID NO: 3275142 - RNA, 19 nt, Artificial Sequence
  Description of Artificial Sequence: Synthetic oligonucleotide
uguguuaaguuauuauuga

SEQ ID NO: 3275143 - RNA, 19 nt, Artificial Sequence
  Description of Artificial Sequence: Synthetic oligonucleotide
uucuuagaacauaagcuug

SEQ ID NO: 3275144 - RNA, 19 nt, Artificial Sequence
  Description of Artificial Sequence: Synthetic oligonucleotide
uguuaaguuauuauugaua

SEQ ID NO: 3275145 - RNA, 19 nt, Artificial Sequence
  Description of Artificial Sequence: Synthetic oligonucleotide
aguuauuauugauaggccu

SEQ ID NO: 3275146 - RNA, 19 nt, Artificial Sequence
  Description of Artificial Sequence: Synthetic oligonucleotide
uucugaaucugacugagaa

SEQ ID NO: 3275147 - RNA, 19 nt, Artificial Sequence
  Description of Artificial Sequence: Synthetic oligonucleotide
aaucugacugagaacuugc

SEQ ID NO: 3275148 - RNA, 19 nt, Artificial Sequence
  Description of Artificial Sequence: Synthetic oligonucleotide
uuaaguuauuauugauagg

SEQ ID NO: 3275149 - RNA, 19 nt, Artificial Sequence
  Description of Artificial Sequence: Synthetic oligonucleotide
uucucuacauccauuaaaa

SEQ ID NO: 3275150 - RNA, 19 nt, Artificial Sequence
  Description of Artificial Sequence: Synthetic oligonucleotide
aacaaauaagccaugaauu

SEQ ID NO: 3275151 - RNA, 19 nt, Artificial Sequence
  Description of Artificial Sequence: Synthetic oligonucleotide
auaagcuugucaauuuucc

SEQ ID NO: 3275152 - RNA, 19 nt, Artificial Sequence
  Description of Artificial Sequence: Synthetic oligonucleotide
ucucuaaaggauacguaag

SEQ ID NO: 3275153 - RNA, 19 nt, Artificial Sequence
  Description of Artificial Sequence: Synthetic oligonucleotide
agcagaauaacuuuguguu

SEQ ID NO: 3275154 - RNA, 19 nt, Artificial Sequence
  Description of Artificial Sequence: Synthetic oligonucleotide
aaaggauacguaaguuucc

SEQ ID NO: 3275155 - RNA, 19 nt, Artificial Sequence
  Description of Artificial Sequence: Synthetic oligonucleotide
ugguauuuugguaauuucu

SEQ ID NO: 3275156 - RNA, 19 nt, Artificial Sequence
  Description of Artificial Sequence: Synthetic oligonucleotide
uuguaaaauugucaucuug

SEQ ID NO: 3275157 - RNA, 19 nt, Artificial Sequence
  Description of Artificial Sequence: Synthetic oligonucleotide
uuuguguuaaguuauuauu

SEQ ID NO: 3275158 - RNA, 19 nt, Artificial Sequence
  Description of Artificial Sequence: Synthetic oligonucleotide
cacauucugaaucugacug

SEQ ID NO: 3275159 - RNA, 19 nt, Artificial Sequence
  Description of Artificial Sequence: Synthetic oligonucleotide
cuuauuuucuaauuuguga

SEQ ID NO: 3275160 - RNA, 19 nt, Artificial Sequence
  Description of Artificial Sequence: Synthetic oligonucleotide
uauugauaggccugugagg

SEQ ID NO: 3275161 - RNA, 19 nt, Artificial Sequence
  Description of Artificial Sequence: Synthetic oligonucleotide
auauuguaaaauugucauc

SEQ ID NO: 3275162 - RNA, 19 nt, Artificial Sequence
  Description of Artificial Sequence: Synthetic oligonucleotide
uaaguuuccggcauauugu

SEQ ID NO: 3275163 - RNA, 19 nt, Artificial Sequence
  Description of Artificial Sequence: Synthetic oligonucleotide
ugaccaucuauaauauugc

SEQ ID NO: 3275164 - RNA, 19 nt, Artificial Sequence
  Description of Artificial Sequence: Synthetic oligonucleotide
ucagcagaagcauuguagc

SEQ ID NO: 3275165 - RNA, 19 nt, Artificial Sequence
  Description of Artificial Sequence: Synthetic oligonucleotide
uauuuguauuauuuggacu

SEQ ID NO: 3275166 - RNA, 19 nt, Artificial Sequence
  Description of Artificial Sequence: Synthetic oligonucleotide
auaggaugguuuucugugc

SEQ ID NO: 3275167 - RNA, 19 nt, Artificial Sequence
  Description of Artificial Sequence: Synthetic oligonucleotide
aauauccugugguauuuug

SEQ ID NO: 3275168 - RNA, 19 nt, Artificial Sequence
  Description of Artificial Sequence: Synthetic oligonucleotide
uugcuuauuuucuaauuug

SEQ ID NO: 3275169 - RNA, 19 nt, Artificial Sequence
  Description of Artificial Sequence: Synthetic oligonucleotide
uuuggacuauggcaaagag

SEQ ID NO: 3275170 - RNA, 19 nt, Artificial Sequence
  Description of Artificial Sequence: Synthetic oligonucleotide
uuugguggaagccugcaac

SEQ ID NO: 3275171 - RNA, 19 nt, Artificial Sequence
  Description of Artificial Sequence: Synthetic oligonucleotide
aaggauacguaaguuuccg

SEQ ID NO: 3275172 - RNA, 19 nt, Artificial Sequence
  Description of Artificial Sequence: Synthetic oligonucleotide
cuauguuuugcaaggguag

SEQ ID NO: 3275173 - RNA, 19 nt, Artificial Sequence
  Description of Artificial Sequence: Synthetic oligonucleotide
ucuuagaacauaagcuugu

SEQ ID NO: 3275174 - RNA, 19 nt, Artificial Sequence
  Description of Artificial Sequence: Synthetic oligonucleotide
aauuugugaauaucagaaa

SEQ ID NO: 3275175 - RNA, 19 nt, Artificial Sequence
  Description of Artificial Sequence: Synthetic oligonucleotide
uuucucuacauccauuaaa

SEQ ID NO: 3275176 - RNA, 19 nt, Artificial Sequence
  Description of Artificial Sequence: Synthetic oligonucleotide
ugcuuauuuucuaauuugu

SEQ ID NO: 3275177 - RNA, 19 nt, Artificial Sequence
  Description of Artificial Sequence: Synthetic oligonucleotide
aagagucucuaaaggauac

SEQ ID NO: 3275178 - RNA, 19 nt, Artificial Sequence
  Description of Artificial Sequence: Synthetic oligonucleotide
ucaucuugguucuuugacc

SEQ ID NO: 3275179 - RNA, 19 nt, Artificial Sequence
  Description of Artificial Sequence: Synthetic oligonucleotide
aacaaaauauccuguggua

SEQ ID NO: 3275180 - RNA, 19 nt, Artificial Sequence
  Description of Artificial Sequence: Synthetic oligonucleotide
uuagaacauaagcuuguca

SEQ ID NO: 3275181 - RNA, 19 nt, Artificial Sequence
  Description of Artificial Sequence: Synthetic oligonucleotide
uguuccaauguccuuauuu

SEQ ID NO: 3275182 - RNA, 19 nt, Artificial Sequence
  Description of Artificial Sequence: Synthetic oligonucleotide
auugauaggccugugaggu

SEQ ID NO: 3275183 - RNA, 19 nt, Artificial Sequence
  Description of Artificial Sequence: Synthetic oligonucleotide
ucgggagaaacaaacaaau

SEQ ID NO: 3275184 - RNA, 19 nt, Artificial Sequence
  Description of Artificial Sequence: Synthetic oligonucleotide
guauuuguauuauuuggac

SEQ ID NO: 3275185 - RNA, 19 nt, Artificial Sequence
  Description of Artificial Sequence: Synthetic oligonucleotide
guagcuaccuucaugauca

SEQ ID NO: 3275186 - RNA, 19 nt, Artificial Sequence
  Description of Artificial Sequence: Synthetic oligonucleotide
gguaauuucuguuccaaug

SEQ ID NO: 3275187 - RNA, 19 nt, Artificial Sequence
  Description of Artificial Sequence: Synthetic oligonucleotide
aaaagaucagcagaagcau

SEQ ID NO: 3275188 - RNA, 19 nt, Artificial Sequence
  Description of Artificial Sequence: Synthetic oligonucleotide
acuggaguugacugggaac

SEQ ID NO: 3275189 - RNA, 19 nt, Artificial Sequence
  Description of Artificial Sequence: Synthetic oligonucleotide
ggagaaacaaacaaauaag

SEQ ID NO: 3275190 - RNA, 19 nt, Artificial Sequence
  Description of Artificial Sequence: Synthetic oligonucleotide
uugucaauuuuccuuuugu

SEQ ID NO: 3275191 - RNA, 19 nt, Artificial Sequence
  Description of Artificial Sequence: Synthetic oligonucleotide
aagaucagcagaagcauug

SEQ ID NO: 3275192 - RNA, 19 nt, Artificial Sequence
  Description of Artificial Sequence: Synthetic oligonucleotide
ucccaugguaacaaaauau

SEQ ID NO: 3275193 - RNA, 19 nt, Artificial Sequence
  Description of Artificial Sequence: Synthetic oligonucleotide
guuauuauugauaggccug

SEQ ID NO: 3275194 - RNA, 19 nt, Artificial Sequence
  Description of Artificial Sequence: Synthetic oligonucleotide
ugcuguauuuguauuauuu

SEQ ID NO: 3275195 - RNA, 19 nt, Artificial Sequence
  Description of Artificial Sequence: Synthetic oligonucleotide
guauuauuuggacuauggc

SEQ ID NO: 3275196 - RNA, 19 nt, Artificial Sequence
  Description of Artificial Sequence: Synthetic oligonucleotide
agggcaguauuuuagaucc

SEQ ID NO: 3275197 - RNA, 19 nt, Artificial Sequence
  Description of Artificial Sequence: Synthetic oligonucleotide
auacagaacagcuucaugg

SEQ ID NO: 3275198 - RNA, 19 nt, Artificial Sequence
  Description of Artificial Sequence: Synthetic oligonucleotide
guauuuuagauccugacag

SEQ ID NO: 3275199 - RNA, 19 nt, Artificial Sequence
  Description of Artificial Sequence: Synthetic oligonucleotide
aagguugagaggcagagag

SEQ ID NO: 3275200 - RNA, 19 nt, Artificial Sequence
  Description of Artificial Sequence: Synthetic oligonucleotide
agcgcuuuuacccucaggc

SEQ ID NO: 3275201 - RNA, 19 nt, Artificial Sequence
  Description of Artificial Sequence: Synthetic oligonucleotide
aaauuuggggaccucuugg

SEQ ID NO: 3275202 - RNA, 19 nt, Artificial Sequence
  Description of Artificial Sequence: Synthetic oligonucleotide
uucaugguaguaaagggca

SEQ ID NO: 3275203 - RNA, 19 nt, Artificial Sequence
  Description of Artificial Sequence: Synthetic oligonucleotide
auuuuagauccugacagcc

SEQ ID NO: 3275204 - RNA, 19 nt, Artificial Sequence
  Description of Artificial Sequence: Synthetic oligonucleotide
cauguuggcagaaauuugg

SEQ ID NO: 3275205 - RNA, 19 nt, Artificial Sequence
  Description of Artificial Sequence: Synthetic oligonucleotide
aagggcaguauuuuagauc

SEQ ID NO: 3275206 - RNA, 19 nt, Artificial Sequence
  Description of Artificial Sequence: Synthetic oligonucleotide
aauuuggggaccucuuggg

SEQ ID NO: 3275207 - RNA, 19 nt, Artificial Sequence
  Description of Artificial Sequence: Synthetic oligonucleotide
caugccaauagcuaaggcc

SEQ ID NO: 3275208 - RNA, 19 nt, Artificial Sequence
  Description of Artificial Sequence: Synthetic oligonucleotide
cugaacgucuagcagaucg

SEQ ID NO: 3275209 - RNA, 19 nt, Artificial Sequence
  Description of Artificial Sequence: Synthetic oligonucleotide
aguauuuuagauccugaca

SEQ ID NO: 3275210 - RNA, 19 nt, Artificial Sequence
  Description of Artificial Sequence: Synthetic oligonucleotide
gaaggguucgggcaggagg

SEQ ID NO: 3275211 - RNA, 19 nt, Artificial Sequence
  Description of Artificial Sequence: Synthetic oligonucleotide
cuucaugguaguaaagggc

SEQ ID NO: 3275212 - RNA, 19 nt, Artificial Sequence
  Description of Artificial Sequence: Synthetic oligonucleotide
cauuauugcaugccaauag

SEQ ID NO: 3275213 - RNA, 19 nt, Artificial Sequence
  Description of Artificial Sequence: Synthetic oligonucleotide
gaggauacagaacagcuuc

SEQ ID NO: 3275214 - RNA, 19 nt, Artificial Sequence
  Description of Artificial Sequence: Synthetic oligonucleotide
uguuggcagaaauuugggg

SEQ ID NO: 3275215 - RNA, 19 nt, Artificial Sequence
  Description of Artificial Sequence: Synthetic oligonucleotide
uuauugcaugccaauagcu

SEQ ID NO: 3275216 - RNA, 19 nt, Artificial Sequence
  Description of Artificial Sequence: Synthetic oligonucleotide
uuuacccucaggcacacau

SEQ ID NO: 3275217 - RNA, 19 nt, Artificial Sequence
  Description of Artificial Sequence: Synthetic oligonucleotide
guuggcagaaauuugggga

SEQ ID NO: 3275218 - RNA, 19 nt, Artificial Sequence
  Description of Artificial Sequence: Synthetic oligonucleotide
uaaccuaggauuucacaug

SEQ ID NO: 3275219 - RNA, 19 nt, Artificial Sequence
  Description of Artificial Sequence: Synthetic oligonucleotide
gagcugaggauacagaaca

SEQ ID NO: 3275220 - RNA, 19 nt, Artificial Sequence
  Description of Artificial Sequence: Synthetic oligonucleotide
uauuuuagauccugacagc

SEQ ID NO: 3275221 - RNA, 19 nt, Artificial Sequence
  Description of Artificial Sequence: Synthetic oligonucleotide
agagucaggggagaggggc

SEQ ID NO: 3275222 - RNA, 19 nt, Artificial Sequence
  Description of Artificial Sequence: Synthetic oligonucleotide
ucggacaggcaccaguggg

SEQ ID NO: 3275223 - RNA, 19 nt, Artificial Sequence
  Description of Artificial Sequence: Synthetic oligonucleotide
cucgcugaggcagagaagg

SEQ ID NO: 3275224 - RNA, 19 nt, Artificial Sequence
  Description of Artificial Sequence: Synthetic oligonucleotide
ucaggcacacauuauugca

SEQ ID NO: 3275225 - RNA, 19 nt, Artificial Sequence
  Description of Artificial Sequence: Synthetic oligonucleotide
caggcguucacuuccagag

SEQ ID NO: 3275226 - RNA, 19 nt, Artificial Sequence
  Description of Artificial Sequence: Synthetic oligonucleotide
uggccaggagcgcagaggg

SEQ ID NO: 3275227 - RNA, 19 nt, Artificial Sequence
  Description of Artificial Sequence: Synthetic oligonucleotide
gacagccuuccccaaagcg

SEQ ID NO: 3275228 - RNA, 19 nt, Artificial Sequence
  Description of Artificial Sequence: Synthetic oligonucleotide
gagacgucgaugcccaggg

SEQ ID NO: 3275229 - RNA, 19 nt, Artificial Sequence
  Description of Artificial Sequence: Synthetic oligonucleotide
uuuagauccugacagccuu

SEQ ID NO: 3275230 - RNA, 19 nt, Artificial Sequence
  Description of Artificial Sequence: Synthetic oligonucleotide
uaaagggcaguauuuuaga

SEQ ID NO: 3275231 - RNA, 19 nt, Artificial Sequence
  Description of Artificial Sequence: Synthetic oligonucleotide
auugcaugccaauagcuaa

SEQ ID NO: 3275232 - RNA, 19 nt, Artificial Sequence
  Description of Artificial Sequence: Synthetic oligonucleotide
cuggcucaggcacugaugg

SEQ ID NO: 3275233 - RNA, 19 nt, Artificial Sequence
  Description of Artificial Sequence: Synthetic oligonucleotide
uguaaccuaggauuucaca

SEQ ID NO: 3275234 - RNA, 19 nt, Artificial Sequence
  Description of Artificial Sequence: Synthetic oligonucleotide
ggauagacuggcaugaagg

SEQ ID NO: 3275235 - RNA, 19 nt, Artificial Sequence
  Description of Artificial Sequence: Synthetic oligonucleotide
gaaauuuggggaccucuug

SEQ ID NO: 3275236 - RNA, 19 nt, Artificial Sequence
  Description of Artificial Sequence: Synthetic oligonucleotide
aacgucuagcagaucgugc

SEQ ID NO: 3275237 - RNA, 19 nt, Artificial Sequence
  Description of Artificial Sequence: Synthetic oligonucleotide
uuuuagauccugacagccu

SEQ ID NO: 3275238 - RNA, 19 nt, Artificial Sequence
  Description of Artificial Sequence: Synthetic oligonucleotide
gaccucuugggguaacugg

SEQ ID NO: 3275239 - RNA, 19 nt, Artificial Sequence
  Description of Artificial Sequence: Synthetic oligonucleotide
uagacuggcaugaaggguu

SEQ ID NO: 3275240 - RNA, 19 nt, Artificial Sequence
  Description of Artificial Sequence: Synthetic oligonucleotide
uauugcaugccaauagcua

SEQ ID NO: 3275241 - RNA, 19 nt, Artificial Sequence
  Description of Artificial Sequence: Synthetic oligonucleotide
acagccuuccccaaagcgc

SEQ ID NO: 3275242 - RNA, 19 nt, Artificial Sequence
  Description of Artificial Sequence: Synthetic oligonucleotide
ugggguaacuggcucaggc

SEQ ID NO: 3275243 - RNA, 19 nt, Artificial Sequence
  Description of Artificial Sequence: Synthetic oligonucleotide
gcuauggccacguuggagg

SEQ ID NO: 3275244 - RNA, 19 nt, Artificial Sequence
  Description of Artificial Sequence: Synthetic oligonucleotide
uacagaacagcuucauggu

SEQ ID NO: 3275245 - RNA, 19 nt, Artificial Sequence
  Description of Artificial Sequence: Synthetic oligonucleotide
auuuggggaccucuugggg

SEQ ID NO: 3275246 - RNA, 19 nt, Artificial Sequence
  Description of Artificial Sequence: Synthetic oligonucleotide
uugcaugccaauagcuaag

SEQ ID NO: 3275247 - RNA, 19 nt, Artificial Sequence
  Description of Artificial Sequence: Synthetic oligonucleotide
agagccuuugcgcccaggg

SEQ ID NO: 3275248 - RNA, 19 nt, Artificial Sequence
  Description of Artificial Sequence: Synthetic oligonucleotide
ugagcugaggauacagaac

SEQ ID NO: 3275249 - RNA, 19 nt, Artificial Sequence
  Description of Artificial Sequence: Synthetic oligonucleotide
uuuggggaccucuuggggu

SEQ ID NO: 3275250 - RNA, 19 nt, Artificial Sequence
  Description of Artificial Sequence: Synthetic oligonucleotide
augccaauagcuaaggcca

SEQ ID NO: 3275251 - RNA, 19 nt, Artificial Sequence
  Description of Artificial Sequence: Synthetic oligonucleotide
agacgagacgucgaugccc

SEQ ID NO: 3275252 - RNA, 19 nt, Artificial Sequence
  Description of Artificial Sequence: Synthetic oligonucleotide
caguauuuuagauccugac

SEQ ID NO: 3275253 - RNA, 19 nt, Artificial Sequence
  Description of Artificial Sequence: Synthetic oligonucleotide
agcagaucgugcaaggagg

SEQ ID NO: 3275254 - RNA, 19 nt, Artificial Sequence
  Description of Artificial Sequence: Synthetic oligonucleotide
agggcuauggccacguugg

SEQ ID NO: 3275255 - RNA, 19 nt, Artificial Sequence
  Description of Artificial Sequence: Synthetic oligonucleotide
cuagccuccuaccaccucc

SEQ ID NO: 3275256 - RNA, 19 nt, Artificial Sequence
  Description of Artificial Sequence: Synthetic oligonucleotide
aaggagggccaccggagag

SEQ ID NO: 3275257 - RNA, 19 nt, Artificial Sequence
  Description of Artificial Sequence: Synthetic oligonucleotide
uaaggccaguguaaccuag

SEQ ID NO: 3275258 - RNA, 19 nt, Artificial Sequence
  Description of Artificial Sequence: Synthetic oligonucleotide
ggauuucacauguuggcag

SEQ ID NO: 3275259 - RNA, 19 nt, Artificial Sequence
  Description of Artificial Sequence: Synthetic oligonucleotide
uggugagucagggcuaugg

SEQ ID NO: 3275260 - RNA, 19 nt, Artificial Sequence
  Description of Artificial Sequence: Synthetic oligonucleotide
uggaggucacagcagcugc

SEQ ID NO: 3275261 - RNA, 19 nt, Artificial Sequence
  Description of Artificial Sequence: Synthetic oligonucleotide
ugcucgcugaggcagagaa

SEQ ID NO: 3275262 - RNA, 19 nt, Artificial Sequence
  Description of Artificial Sequence: Synthetic oligonucleotide
gauuucacauguuggcaga

SEQ ID NO: 3275263 - RNA, 19 nt, Artificial Sequence
  Description of Artificial Sequence: Synthetic oligonucleotide
agaggcagagagugggcgg

SEQ ID NO: 3275264 - RNA, 19 nt, Artificial Sequence
  Description of Artificial Sequence: Synthetic oligonucleotide
ugcaaggagggccaccgga

SEQ ID NO: 3275265 - RNA, 19 nt, Artificial Sequence
  Description of Artificial Sequence: Synthetic oligonucleotide
ugucccuggaggcuuggcc

SEQ ID NO: 3275266 - RNA, 19 nt, Artificial Sequence
  Description of Artificial Sequence: Synthetic oligonucleotide
ugaacgucuagcagaucgu

SEQ ID NO: 3275267 - RNA, 19 nt, Artificial Sequence
  Description of Artificial Sequence: Synthetic oligonucleotide
accagugguucccacagca

SEQ ID NO: 3275268 - RNA, 19 nt, Artificial Sequence
  Description of Artificial Sequence: Synthetic oligonucleotide
ugcaugccaauagcuaagg

SEQ ID NO: 3275269 - RNA, 19 nt, Artificial Sequence
  Description of Artificial Sequence: Synthetic oligonucleotide
ucaccuguugcucgcugag

SEQ ID NO: 3275270 - RNA, 19 nt, Artificial Sequence
  Description of Artificial Sequence: Synthetic oligonucleotide
aggaccugcucggacaggc

SEQ ID NO: 3275271 - RNA, 19 nt, Artificial Sequence
  Description of Artificial Sequence: Synthetic oligonucleotide
gugagucagggcuauggcc

SEQ ID NO: 3275272 - RNA, 19 nt, Artificial Sequence
  Description of Artificial Sequence: Synthetic oligonucleotide
ucuugggguaacuggcuca

SEQ ID NO: 3275273 - RNA, 19 nt, Artificial Sequence
  Description of Artificial Sequence: Synthetic oligonucleotide
uccccaaagcgcuuuuacc

SEQ ID NO: 3275274 - RNA, 19 nt, Artificial Sequence
  Description of Artificial Sequence: Synthetic oligonucleotide
cuggggagccugcugaacg

SEQ ID NO: 3275275 - RNA, 19 nt, Artificial Sequence
  Description of Artificial Sequence: Synthetic oligonucleotide
ugaggauacagaacagcuu

SEQ ID NO: 3275276 - RNA, 19 nt, Artificial Sequence
  Description of Artificial Sequence: Synthetic oligonucleotide
agccuuugcgcccagggga

SEQ ID NO: 3275277 - RNA, 19 nt, Artificial Sequence
  Description of Artificial Sequence: Synthetic oligonucleotide
aguaaagggcaguauuuua

SEQ ID NO: 3275278 - RNA, 19 nt, Artificial Sequence
  Description of Artificial Sequence: Synthetic oligonucleotide
uuccccaaagcgcuuuuac

SEQ ID NO: 3275279 - RNA, 19 nt, Artificial Sequence
  Description of Artificial Sequence: Synthetic oligonucleotide
guaaccuaggauuucacau

SEQ ID NO: 3275280 - RNA, 19 nt, Artificial Sequence
  Description of Artificial Sequence: Synthetic oligonucleotide
ggagagucaggggagaggg

SEQ ID NO: 3275281 - RNA, 19 nt, Artificial Sequence
  Description of Artificial Sequence: Synthetic oligonucleotide
aguguaaccuaggauuuca

SEQ ID NO: 3275282 - RNA, 19 nt, Artificial Sequence
  Description of Artificial Sequence: Synthetic oligonucleotide
aagcgcuuuuacccucagg

SEQ ID NO: 3275283 - RNA, 19 nt, Artificial Sequence
  Description of Artificial Sequence: Synthetic oligonucleotide
acgucgaugcccagggucc

SEQ ID NO: 3275284 - RNA, 19 nt, Artificial Sequence
  Description of Artificial Sequence: Synthetic oligonucleotide
aggggagaggggcagagga

SEQ ID NO: 3275285 - RNA, 19 nt, Artificial Sequence
  Description of Artificial Sequence: Synthetic oligonucleotide
uacccucaggcacacauua

SEQ ID NO: 3275286 - RNA, 19 nt, Artificial Sequence
  Description of Artificial Sequence: Synthetic oligonucleotide
ugcugaacgucuagcagau

SEQ ID NO: 3275287 - RNA, 19 nt, Artificial Sequence
  Description of Artificial Sequence: Synthetic oligonucleotide
gacgucgaugcccaggguc

SEQ ID NO: 3275288 - RNA, 19 nt, Artificial Sequence
  Description of Artificial Sequence: Synthetic oligonucleotide
agccaucaccuguugcucg

SEQ ID NO: 3275289 - RNA, 19 nt, Artificial Sequence
  Description of Artificial Sequence: Synthetic oligonucleotide
aaggguucgggcaggagga

SEQ ID NO: 3275290 - RNA, 19 nt, Artificial Sequence
  Description of Artificial Sequence: Synthetic oligonucleotide
agaacagcuucaugguagu

SEQ ID NO: 3275291 - RNA, 19 nt, Artificial Sequence
  Description of Artificial Sequence: Synthetic oligonucleotide
uggcaugaaggguucgggc

SEQ ID NO: 3275292 - RNA, 19 nt, Artificial Sequence
  Description of Artificial Sequence: Synthetic oligonucleotide
aggcguucacuuccagagc

SEQ ID NO: 3275293 - RNA, 19 nt, Artificial Sequence
  Description of Artificial Sequence: Synthetic oligonucleotide
ugggaggcuggacuguccc

SEQ ID NO: 3275294 - RNA, 19 nt, Artificial Sequence
  Description of Artificial Sequence: Synthetic oligonucleotide
agauccugacagccuuccc

SEQ ID NO: 3275295 - RNA, 19 nt, Artificial Sequence
  Description of Artificial Sequence: Synthetic oligonucleotide
ugccaauagcuaaggccag

SEQ ID NO: 3275296 - RNA, 19 nt, Artificial Sequence
  Description of Artificial Sequence: Synthetic oligonucleotide
auauucauaguuuaaacac

SEQ ID NO: 3275297 - RNA, 19 nt, Artificial Sequence
  Description of Artificial Sequence: Synthetic oligonucleotide
aauccauugauucagcuuc

SEQ ID NO: 3275298 - RNA, 19 nt, Artificial Sequence
  Description of Artificial Sequence: Synthetic oligonucleotide
uuuaguaauauucucauac

SEQ ID NO: 3275299 - RNA, 19 nt, Artificial Sequence
  Description of Artificial Sequence: Synthetic oligonucleotide
auaguuuaaacacucuucc

SEQ ID NO: 3275300 - RNA, 19 nt, Artificial Sequence
  Description of Artificial Sequence: Synthetic oligonucleotide
uucaaaugcagaaacauag

SEQ ID NO: 3275301 - RNA, 19 nt, Artificial Sequence
  Description of Artificial Sequence: Synthetic oligonucleotide
aagauaaagaccccaauag

SEQ ID NO: 3275302 - RNA, 19 nt, Artificial Sequence
  Description of Artificial Sequence: Synthetic oligonucleotide
uuacacaucaacuugcagg

SEQ ID NO: 3275303 - RNA, 19 nt, Artificial Sequence
  Description of Artificial Sequence: Synthetic oligonucleotide
uauggaaggaauuuggaag

SEQ ID NO: 3275304 - RNA, 19 nt, Artificial Sequence
  Description of Artificial Sequence: Synthetic oligonucleotide
ugacuaaucauauacuuag

SEQ ID NO: 3275305 - RNA, 19 nt, Artificial Sequence
  Description of Artificial Sequence: Synthetic oligonucleotide
uuuccuacaacauaguuac

SEQ ID NO: 3275306 - RNA, 19 nt, Artificial Sequence
  Description of Artificial Sequence: Synthetic oligonucleotide
aacuacauaggaaaagugc

SEQ ID NO: 3275307 - RNA, 19 nt, Artificial Sequence
  Description of Artificial Sequence: Synthetic oligonucleotide
uaaaucaucacuaucuagu

SEQ ID NO: 3275308 - RNA, 19 nt, Artificial Sequence
  Description of Artificial Sequence: Synthetic oligonucleotide
auugauucagcuucaacac

SEQ ID NO: 3275309 - RNA, 19 nt, Artificial Sequence
  Description of Artificial Sequence: Synthetic oligonucleotide
aucaacuuaacgcuuacac

SEQ ID NO: 3275310 - RNA, 19 nt, Artificial Sequence
  Description of Artificial Sequence: Synthetic oligonucleotide
auauauucauaguuuaaac

SEQ ID NO: 3275311 - RNA, 19 nt, Artificial Sequence
  Description of Artificial Sequence: Synthetic oligonucleotide
uaaaaguggcaaaauaucc

SEQ ID NO: 3275312 - RNA, 19 nt, Artificial Sequence
  Description of Artificial Sequence: Synthetic oligonucleotide
aaaacguauacauuuggca

SEQ ID NO: 3275313 - RNA, 19 nt, Artificial Sequence
  Description of Artificial Sequence: Synthetic oligonucleotide
aauuuuguggauccaaaug

SEQ ID NO: 3275314 - RNA, 19 nt, Artificial Sequence
  Description of Artificial Sequence: Synthetic oligonucleotide
uaauauguuuccuaggacc

SEQ ID NO: 3275315 - RNA, 19 nt, Artificial Sequence
  Description of Artificial Sequence: Synthetic oligonucleotide
caaaugacuaaucauauac

SEQ ID NO: 3275316 - RNA, 19 nt, Artificial Sequence
  Description of Artificial Sequence: Synthetic oligonucleotide
gucagaauaacucuagagg

SEQ ID NO: 3275317 - RNA, 19 nt, Artificial Sequence
  Description of Artificial Sequence: Synthetic oligonucleotide
agaaacauaguuaaagugg

SEQ ID NO: 3275318 - RNA, 19 nt, Artificial Sequence
  Description of Artificial Sequence: Synthetic oligonucleotide
acguacauucuucaaaugc

SEQ ID NO: 3275319 - RNA, 19 nt, Artificial Sequence
  Description of Artificial Sequence: Synthetic oligonucleotide
auugguguuugauaguccc

SEQ ID NO: 3275320 - RNA, 19 nt, Artificial Sequence
  Description of Artificial Sequence: Synthetic oligonucleotide
uaauucaauacuaaaucca

SEQ ID NO: 3275321 - RNA, 19 nt, Artificial Sequence
  Description of Artificial Sequence: Synthetic oligonucleotide
aaacauaugaucauuucag

SEQ ID NO: 3275322 - RNA, 19 nt, Artificial Sequence
  Description of Artificial Sequence: Synthetic oligonucleotide
aauauauauucauaguuua

SEQ ID NO: 3275323 - RNA, 19 nt, Artificial Sequence
  Description of Artificial Sequence: Synthetic oligonucleotide
aauaggggcugauugcagc

SEQ ID NO: 3275324 - RNA, 19 nt, Artificial Sequence
  Description of Artificial Sequence: Synthetic oligonucleotide
ucuaguaugcuuaugaguu

SEQ ID NO: 3275325 - RNA, 19 nt, Artificial Sequence
  Description of Artificial Sequence: Synthetic oligonucleotide
ucagaauaacucuagaggu

SEQ ID NO: 3275326 - RNA, 19 nt, Artificial Sequence
  Description of Artificial Sequence: Synthetic oligonucleotide
uuauaaugcuuucauaaac

SEQ ID NO: 3275327 - RNA, 19 nt, Artificial Sequence
  Description of Artificial Sequence: Synthetic oligonucleotide
uuccugaugaccauaauga

SEQ ID NO: 3275328 - RNA, 19 nt, Artificial Sequence
  Description of Artificial Sequence: Synthetic oligonucleotide
cuagcuguagugaacaagg

SEQ ID NO: 3275329 - RNA, 19 nt, Artificial Sequence
  Description of Artificial Sequence: Synthetic oligonucleotide
ucagcuucaacaccgauga

SEQ ID NO: 3275330 - RNA, 19 nt, Artificial Sequence
  Description of Artificial Sequence: Synthetic oligonucleotide
cauaugaucauuucagaag

SEQ ID NO: 3275331 - RNA, 19 nt, Artificial Sequence
  Description of Artificial Sequence: Synthetic oligonucleotide
aguuuaaacacucuuccug

SEQ ID NO: 3275332 - RNA, 19 nt, Artificial Sequence
  Description of Artificial Sequence: Synthetic oligonucleotide
augaaaucaacuuaacgcu

SEQ ID NO: 3275333 - RNA, 19 nt, Artificial Sequence
  Description of Artificial Sequence: Synthetic oligonucleotide
aaauaucccagcuauguaa

SEQ ID NO: 3275334 - RNA, 19 nt, Artificial Sequence
  Description of Artificial Sequence: Synthetic oligonucleotide
aucaucacuaucuaguaug

SEQ ID NO: 3275335 - RNA, 19 nt, Artificial Sequence
  Description of Artificial Sequence: Synthetic oligonucleotide
aauauucucauacuaugaa

SEQ ID NO: 3275336 - RNA, 19 nt, Artificial Sequence
  Description of Artificial Sequence: Synthetic oligonucleotide
aaacguauacauuuggcaa

SEQ ID NO: 3275337 - RNA, 19 nt, Artificial Sequence
  Description of Artificial Sequence: Synthetic oligonucleotide
gaugauucgaacuucuuuc

SEQ ID NO: 3275338 - RNA, 19 nt, Artificial Sequence
  Description of Artificial Sequence: Synthetic oligonucleotide
aaaacuacauaggaaaagu

SEQ ID NO: 3275339 - RNA, 19 nt, Artificial Sequence
  Description of Artificial Sequence: Synthetic oligonucleotide
auacuuagcacacuggucu

SEQ ID NO: 3275340 - RNA, 19 nt, Artificial Sequence
  Description of Artificial Sequence: Synthetic oligonucleotide
auaggcauaauucaauacu

SEQ ID NO: 3275341 - RNA, 19 nt, Artificial Sequence
  Description of Artificial Sequence: Synthetic oligonucleotide
agagguauaggcauaauuc

SEQ ID NO: 3275342 - RNA, 19 nt, Artificial Sequence
  Description of Artificial Sequence: Synthetic oligonucleotide
ugucagaauaacucuagag

SEQ ID NO: 3275343 - RNA, 19 nt, Artificial Sequence
  Description of Artificial Sequence: Synthetic oligonucleotide
gaaggaauuuggaagaugc

SEQ ID NO: 3275344 - RNA, 19 nt, Artificial Sequence
  Description of Artificial Sequence: Synthetic oligonucleotide
uaacucuagagguauaggc

SEQ ID NO: 3275345 - RNA, 19 nt, Artificial Sequence
  Description of Artificial Sequence: Synthetic oligonucleotide
ucuuuuguaucgaucuccg

SEQ ID NO: 3275346 - RNA, 19 nt, Artificial Sequence
  Description of Artificial Sequence: Synthetic oligonucleotide
aaaucaacuuaacgcuuac

SEQ ID NO: 3275347 - RNA, 19 nt, Artificial Sequence
  Description of Artificial Sequence: Synthetic oligonucleotide
cauaguuacaccuagccca

SEQ ID NO: 3275348 - RNA, 19 nt, Artificial Sequence
  Description of Artificial Sequence: Synthetic oligonucleotide
cugaugaccauaaugauca

SEQ ID NO: 3275349 - RNA, 19 nt, Artificial Sequence
  Description of Artificial Sequence: Synthetic oligonucleotide
ucuuuggugacacacagua

SEQ ID NO: 3275350 - RNA, 19 nt, Artificial Sequence
  Description of Artificial Sequence: Synthetic oligonucleotide
ucacuaauauguuuccuag

SEQ ID NO: 3275351 - RNA, 19 nt, Artificial Sequence
  Description of Artificial Sequence: Synthetic oligonucleotide
uacguuuaaaucaucacua

SEQ ID NO: 3275352 - RNA, 19 nt, Artificial Sequence
  Description of Artificial Sequence: Synthetic oligonucleotide
acuaaucauauacuuagca

SEQ ID NO: 3275353 - RNA, 19 nt, Artificial Sequence
  Description of Artificial Sequence: Synthetic oligonucleotide
acuauaucuagacaaggca

SEQ ID NO: 3275354 - RNA, 19 nt, Artificial Sequence
  Description of Artificial Sequence: Synthetic oligonucleotide
uuugugugcagcaucaaaa

SEQ ID NO: 3275355 - RNA, 19 nt, Artificial Sequence
  Description of Artificial Sequence: Synthetic oligonucleotide
uauucauaguuuaaacacu

SEQ ID NO: 3275356 - RNA, 19 nt, Artificial Sequence
  Description of Artificial Sequence: Synthetic oligonucleotide
uacacaucaacuugcagga

SEQ ID NO: 3275357 - RNA, 19 nt, Artificial Sequence
  Description of Artificial Sequence: Synthetic oligonucleotide
aaacucuuguucuuuggug

SEQ ID NO: 3275358 - RNA, 19 nt, Artificial Sequence
  Description of Artificial Sequence: Synthetic oligonucleotide
aaacaaauaguucuucaua

SEQ ID NO: 3275359 - RNA, 19 nt, Artificial Sequence
  Description of Artificial Sequence: Synthetic oligonucleotide
agaagcagucauuccaagc

SEQ ID NO: 3275360 - RNA, 19 nt, Artificial Sequence
  Description of Artificial Sequence: Synthetic oligonucleotide
auaguuaaaguggaauugg

SEQ ID NO: 3275361 - RNA, 19 nt, Artificial Sequence
  Description of Artificial Sequence: Synthetic oligonucleotide
augaucagcaaagauaaag

SEQ ID NO: 3275362 - RNA, 19 nt, Artificial Sequence
  Description of Artificial Sequence: Synthetic oligonucleotide
auuucagaagcagucauuc

SEQ ID NO: 3275363 - RNA, 19 nt, Artificial Sequence
  Description of Artificial Sequence: Synthetic oligonucleotide
aacaccgaugauucgaacu

SEQ ID NO: 3275364 - RNA, 19 nt, Artificial Sequence
  Description of Artificial Sequence: Synthetic oligonucleotide
gaagaugcuagcuguagug

SEQ ID NO: 3275365 - RNA, 19 nt, Artificial Sequence
  Description of Artificial Sequence: Synthetic oligonucleotide
cucgauaaauguaucuucc

SEQ ID NO: 3275366 - RNA, 19 nt, Artificial Sequence
  Description of Artificial Sequence: Synthetic oligonucleotide
uuggcuucuuuccugagug

SEQ ID NO: 3275367 - RNA, 19 nt, Artificial Sequence
  Description of Artificial Sequence: Synthetic oligonucleotide
aacgcuuacacaucaacuu

SEQ ID NO: 3275368 - RNA, 19 nt, Artificial Sequence
  Description of Artificial Sequence: Synthetic oligonucleotide
auauacuuagcacacuggu

SEQ ID NO: 3275369 - RNA, 19 nt, Artificial Sequence
  Description of Artificial Sequence: Synthetic oligonucleotide
auugcagcaagaacguucc

SEQ ID NO: 3275370 - RNA, 19 nt, Artificial Sequence
  Description of Artificial Sequence: Synthetic oligonucleotide
cagaaacauaguuaaagug

SEQ ID NO: 3275371 - RNA, 19 nt, Artificial Sequence
  Description of Artificial Sequence: Synthetic oligonucleotide
ucuucauacaaaauccaau

SEQ ID NO: 3275372 - RNA, 19 nt, Artificial Sequence
  Description of Artificial Sequence: Synthetic oligonucleotide
uuaaguaucuacacauaaa

SEQ ID NO: 3275373 - RNA, 19 nt, Artificial Sequence
  Description of Artificial Sequence: Synthetic oligonucleotide
ucauguucaaaccaccuua

SEQ ID NO: 3275374 - RNA, 19 nt, Artificial Sequence
  Description of Artificial Sequence: Synthetic oligonucleotide
aacauguucuucccggucu

SEQ ID NO: 3275375 - RNA, 19 nt, Artificial Sequence
  Description of Artificial Sequence: Synthetic oligonucleotide
aauauguuuccuaggaccu

SEQ ID NO: 3275376 - RNA, 19 nt, Artificial Sequence
  Description of Artificial Sequence: Synthetic oligonucleotide
aaacauguucuucccgguc

SEQ ID NO: 3275377 - RNA, 19 nt, Artificial Sequence
  Description of Artificial Sequence: Synthetic oligonucleotide
uuaguaauauucucauacu

SEQ ID NO: 3275378 - RNA, 19 nt, Artificial Sequence
  Description of Artificial Sequence: Synthetic oligonucleotide
ucgaacuucuuucugagua

SEQ ID NO: 3275379 - RNA, 19 nt, Artificial Sequence
  Description of Artificial Sequence: Synthetic oligonucleotide
uaucuaguaugcuuaugag

SEQ ID NO: 3275380 - RNA, 19 nt, Artificial Sequence
  Description of Artificial Sequence: Synthetic oligonucleotide
ucaacuuaacgcuuacaca

SEQ ID NO: 3275381 - RNA, 19 nt, Artificial Sequence
  Description of Artificial Sequence: Synthetic oligonucleotide
cugaaauaggggcugauug

SEQ ID NO: 3275382 - RNA, 19 nt, Artificial Sequence
  Description of Artificial Sequence: Synthetic oligonucleotide
auucauaguuuaaacacuc

SEQ ID NO: 3275383 - RNA, 19 nt, Artificial Sequence
  Description of Artificial Sequence: Synthetic oligonucleotide
acgaacauaaauaauuucu

SEQ ID NO: 3275384 - RNA, 19 nt, Artificial Sequence
  Description of Artificial Sequence: Synthetic oligonucleotide
aacguauacauuuggcaaa

SEQ ID NO: 3275385 - RNA, 19 nt, Artificial Sequence
  Description of Artificial Sequence: Synthetic oligonucleotide
cuagacaaggcacuguuug

SEQ ID NO: 3275386 - RNA, 19 nt, Artificial Sequence
  Description of Artificial Sequence: Synthetic oligonucleotide
uguucauguucaaaccacc

SEQ ID NO: 3275387 - RNA, 19 nt, Artificial Sequence
  Description of Artificial Sequence: Synthetic oligonucleotide
uauaggcauaauucaauac

SEQ ID NO: 3275388 - RNA, 19 nt, Artificial Sequence
  Description of Artificial Sequence: Synthetic oligonucleotide
uuaaacacucuuccuguga

SEQ ID NO: 3275389 - RNA, 19 nt, Artificial Sequence
  Description of Artificial Sequence: Synthetic oligonucleotide
cauauacuuagcacacugg

SEQ ID NO: 3275390 - RNA, 19 nt, Artificial Sequence
  Description of Artificial Sequence: Synthetic oligonucleotide
aaauguaccuuaaguaucu

SEQ ID NO: 3275391 - RNA, 19 nt, Artificial Sequence
  Description of Artificial Sequence: Synthetic oligonucleotide
ucugcguacagccauuggu

SEQ ID NO: 3275392 - RNA, 19 nt, Artificial Sequence
  Description of Artificial Sequence: Synthetic oligonucleotide
ucauaaacauguucuuccc

SEQ ID NO: 3275393 - RNA, 19 nt, Artificial Sequence
  Description of Artificial Sequence: Synthetic oligonucleotide
gauaaagaccccaauagaa

SEQ ID NO: 3275394 - RNA, 19 nt, Artificial Sequence
  Description of Artificial Sequence: Synthetic oligonucleotide
uaaacacucuuccugugac

SEQ ID NO: 3275395 - RNA, 19 nt, Artificial Sequence
  Description of Artificial Sequence: Synthetic oligonucleotide
uaguaauauucucauacua

SEQ ID NO: 3275396 - RNA, 19 nt, Artificial Sequence
  Description of Artificial Sequence: Synthetic oligonucleotide
aaugagaagacaaauaugg

SEQ ID NO: 3275397 - RNA, 19 nt, Artificial Sequence
  Description of Artificial Sequence: Synthetic oligonucleotide
  modified_base (7)..(7): a, c, u, g, unknown or other
ucuauunuaaauucuaaca

SEQ ID NO: 3275398 - RNA, 19 nt, Artificial Sequence
  Description of Artificial Sequence: Synthetic oligonucleotide
uaaauucuaacacuccugg

SEQ ID NO: 3275399 - RNA, 19 nt, Artificial Sequence
  Description of Artificial Sequence: Synthetic oligonucleotide
uuauuuuguacccaaagga

SEQ ID NO: 3275400 - RNA, 19 nt, Artificial Sequence
  Description of Artificial Sequence: Synthetic oligonucleotide
uaagugcuuagcaagaagg

SEQ ID NO: 3275401 - RNA, 19 nt, Artificial Sequence
  Description of Artificial Sequence: Synthetic oligonucleotide
ucaaucuuuaaagaaaccg

SEQ ID NO: 3275402 - RNA, 19 nt, Artificial Sequence
  Description of Artificial Sequence: Synthetic oligonucleotide
uaugcauuggcauaccugg

SEQ ID NO: 3275403 - RNA, 19 nt, Artificial Sequence
  Description of Artificial Sequence: Synthetic oligonucleotide
uaaaauuucaaucuuuaaa

SEQ ID NO: 3275404 - RNA, 19 nt, Artificial Sequence
  Description of Artificial Sequence: Synthetic oligonucleotide
aagauuuauccuugguucc

SEQ ID NO: 3275405 - RNA, 19 nt, Artificial Sequence
  Description of Artificial Sequence: Synthetic oligonucleotide
aauagauuacauuggaagu

SEQ ID NO: 3275406 - RNA, 19 nt, Artificial Sequence
  Description of Artificial Sequence: Synthetic oligonucleotide
gguaauaagaacuugacac

SEQ ID NO: 3275407 - RNA, 19 nt, Artificial Sequence
  Description of Artificial Sequence: Synthetic oligonucleotide
ugaucaauaaaccugugcu

SEQ ID NO: 3275408 - RNA, 19 nt, Artificial Sequence
  Description of Artificial Sequence: Synthetic oligonucleotide
ugcaauuaggucaagaccu

SEQ ID NO: 3275409 - RNA, 19 nt, Artificial Sequence
  Description of Artificial Sequence: Synthetic oligonucleotide
gaauuaauaagaucugugc

SEQ ID NO: 3275410 - RNA, 19 nt, Artificial Sequence
  Description of Artificial Sequence: Synthetic oligonucleotide
auaggaauuaauaagaucu

SEQ ID NO: 3275411 - RNA, 19 nt, Artificial Sequence
  Description of Artificial Sequence: Synthetic oligonucleotide
uacauaguuagccagucag

SEQ ID NO: 3275412 - RNA, 19 nt, Artificial Sequence
  Description of Artificial Sequence: Synthetic oligonucleotide
  modified_base (6)..(6): a, c, u, g, unknown or other
cuauunuaaauucuaacac

SEQ ID NO: 3275413 - RNA, 19 nt, Artificial Sequence
  Description of Artificial Sequence: Synthetic oligonucleotide
  modified_base (2)..(2): a, c, u, g, unknown or other
unuaaauucuaacacuccu

SEQ ID NO: 3275414 - RNA, 19 nt, Artificial Sequence
  Description of Artificial Sequence: Synthetic oligonucleotide
aauauugcacuaaaagggg

SEQ ID NO: 3275415 - RNA, 19 nt, Artificial Sequence
  Description of Artificial Sequence: Synthetic oligonucleotide
ugaacugcaacuuaaaauu

SEQ ID NO: 3275416 - RNA, 19 nt, Artificial Sequence
  Description of Artificial Sequence: Synthetic oligonucleotide
aaaugaaagguuucuuaag

SEQ ID NO: 3275417 - RNA, 19 nt, Artificial Sequence
  Description of Artificial Sequence: Synthetic oligonucleotide
ucaaccaggacuaugggac

SEQ ID NO: 3275418 - RNA, 19 nt, Artificial Sequence
  Description of Artificial Sequence: Synthetic oligonucleotide
uuucaaucuuuaaagaaac

SEQ ID NO: 3275419 - RNA, 19 nt, Artificial Sequence
  Description of Artificial Sequence: Synthetic oligonucleotide
uacaaaaggagcuuguugu

SEQ ID NO: 3275420 - RNA, 19 nt, Artificial Sequence
  Description of Artificial Sequence: Synthetic oligonucleotide
uauuaauauucuuaagcug

SEQ ID NO: 3275421 - RNA, 19 nt, Artificial Sequence
  Description of Artificial Sequence: Synthetic oligonucleotide
aaauauaaagggcauggaa

SEQ ID NO: 3275422 - RNA, 19 nt, Artificial Sequence
  Description of Artificial Sequence: Synthetic oligonucleotide
uggagaacaagcuugagaa

SEQ ID NO: 3275423 - RNA, 19 nt, Artificial Sequence
  Description of Artificial Sequence: Synthetic oligonucleotide
uagcacuugaucaauaaac

SEQ ID NO: 3275424 - RNA, 19 nt, Artificial Sequence
  Description of Artificial Sequence: Synthetic oligonucleotide
uuccuuacauuccaugccg

SEQ ID NO: 3275425 - RNA, 19 nt, Artificial Sequence
  Description of Artificial Sequence: Synthetic oligonucleotide
uaguuagccagucaguuca

SEQ ID NO: 3275426 - RNA, 19 nt, Artificial Sequence
  Description of Artificial Sequence: Synthetic oligonucleotide
aguucaugcaacuauggca

SEQ ID NO: 3275427 - RNA, 19 nt, Artificial Sequence
  Description of Artificial Sequence: Synthetic oligonucleotide
caucucuaggccuacaggg

SEQ ID NO: 3275428 - RNA, 19 nt, Artificial Sequence
  Description of Artificial Sequence: Synthetic oligonucleotide
uaagacuaagugcuuagca

SEQ ID NO: 3275429 - RNA, 19 nt, Artificial Sequence
  Description of Artificial Sequence: Synthetic oligonucleotide
uugcaauuaggucaagacc

SEQ ID NO: 3275430 - RNA, 19 nt, Artificial Sequence
  Description of Artificial Sequence: Synthetic oligonucleotide
aagacaaauauggaaauau

SEQ ID NO: 3275431 - RNA, 19 nt, Artificial Sequence
  Description of Artificial Sequence: Synthetic oligonucleotide
auagauuacauuggaaguc

SEQ ID NO: 3275432 - RNA, 19 nt, Artificial Sequence
  Description of Artificial Sequence: Synthetic oligonucleotide
ucuuuguuuagccauugcu

SEQ ID NO: 3275433 - RNA, 19 nt, Artificial Sequence
  Description of Artificial Sequence: Synthetic oligonucleotide
ugcaagucauucaaagugc

SEQ ID NO: 3275434 - RNA, 19 nt, Artificial Sequence
  Description of Artificial Sequence: Synthetic oligonucleotide
aaagcaauauugcacuaaa

SEQ ID NO: 3275435 - RNA, 19 nt, Artificial Sequence
  Description of Artificial Sequence: Synthetic oligonucleotide
acaagcuugagaaagaagu

SEQ ID NO: 3275436 - RNA, 19 nt, Artificial Sequence
  Description of Artificial Sequence: Synthetic oligonucleotide
gugcaagucauucaaagug

SEQ ID NO: 3275437 - RNA, 19 nt, Artificial Sequence
  Description of Artificial Sequence: Synthetic oligonucleotide
aaaaggagcuuguugugga

SEQ ID NO: 3275438 - RNA, 19 nt, Artificial Sequence
  Description of Artificial Sequence: Synthetic oligonucleotide
aagacuaagugcuuagcaa

SEQ ID NO: 3275439 - RNA, 19 nt, Artificial Sequence
  Description of Artificial Sequence: Synthetic oligonucleotide
aagaaaccguuuauguagc

SEQ ID NO: 3275440 - RNA, 19 nt, Artificial Sequence
  Description of Artificial Sequence: Synthetic oligonucleotide
ugugcugcaguacaguaac

SEQ ID NO: 3275441 - RNA, 19 nt, Artificial Sequence
  Description of Artificial Sequence: Synthetic oligonucleotide
cuuaggaugaauccacccc

SEQ ID NO: 3275442 - RNA, 19 nt, Artificial Sequence
  Description of Artificial Sequence: Synthetic oligonucleotide
aggugugugaaccaaucuc

SEQ ID NO: 3275443 - RNA, 19 nt, Artificial Sequence
  Description of Artificial Sequence: Synthetic oligonucleotide
ucucuuagucaguaacugg

SEQ ID NO: 3275444 - RNA, 19 nt, Artificial Sequence
  Description of Artificial Sequence: Synthetic oligonucleotide
uaagcuauagaugaagaau

SEQ ID NO: 3275445 - RNA, 19 nt, Artificial Sequence
  Description of Artificial Sequence: Synthetic oligonucleotide
agaaguggcuuacauuuuc

SEQ ID NO: 3275446 - RNA, 19 nt, Artificial Sequence
  Description of Artificial Sequence: Synthetic oligonucleotide
aaaugagaagacaaauaug

SEQ ID NO: 3275447 - RNA, 19 nt, Artificial Sequence
  Description of Artificial Sequence: Synthetic oligonucleotide
uaggucaagaccuucugca

SEQ ID NO: 3275448 - RNA, 19 nt, Artificial Sequence
  Description of Artificial Sequence: Synthetic oligonucleotide
ugccauuuaagugauguug

SEQ ID NO: 3275449 - RNA, 19 nt, Artificial Sequence
  Description of Artificial Sequence: Synthetic oligonucleotide
uaggaauuaauaagaucug

SEQ ID NO: 3275450 - RNA, 19 nt, Artificial Sequence
  Description of Artificial Sequence: Synthetic oligonucleotide
guauuaauauucuuaagcu

SEQ ID NO: 3275451 - RNA, 19 nt, Artificial Sequence
  Description of Artificial Sequence: Synthetic oligonucleotide
ucuggguugagaagcagca

SEQ ID NO: 3275452 - RNA, 19 nt, Artificial Sequence
  Description of Artificial Sequence: Synthetic oligonucleotide
guacaauuauuuuguaccc

SEQ ID NO: 3275453 - RNA, 19 nt, Artificial Sequence
  Description of Artificial Sequence: Synthetic oligonucleotide
cuuaagacuaagugcuuag

SEQ ID NO: 3275454 - RNA, 19 nt, Artificial Sequence
  Description of Artificial Sequence: Synthetic oligonucleotide
ucuuaagcugaacugcaac

SEQ ID NO: 3275455 - RNA, 19 nt, Artificial Sequence
  Description of Artificial Sequence: Synthetic oligonucleotide
aacugcaacuuaaaauuuc

SEQ ID NO: 3275456 - RNA, 19 nt, Artificial Sequence
  Description of Artificial Sequence: Synthetic oligonucleotide
ucaagcgcugguuuccugg

SEQ ID NO: 3275457 - RNA, 19 nt, Artificial Sequence
  Description of Artificial Sequence: Synthetic oligonucleotide
uuaagcuauagaugaagaa

SEQ ID NO: 3275458 - RNA, 19 nt, Artificial Sequence
  Description of Artificial Sequence: Synthetic oligonucleotide
aacugaggugaguaaaggu

SEQ ID NO: 3275459 - RNA, 19 nt, Artificial Sequence
  Description of Artificial Sequence: Synthetic oligonucleotide
uauggcauugagaaaggaa

SEQ ID NO: 3275460 - RNA, 19 nt, Artificial Sequence
  Description of Artificial Sequence: Synthetic oligonucleotide
cuuccauugccugagacag

SEQ ID NO: 3275461 - RNA, 19 nt, Artificial Sequence
  Description of Artificial Sequence: Synthetic oligonucleotide
uucaaucuuuaaagaaacc

SEQ ID NO: 3275462 - RNA, 19 nt, Artificial Sequence
  Description of Artificial Sequence: Synthetic oligonucleotide
ucucaagaaccaaaugaga

SEQ ID NO: 3275463 - RNA, 19 nt, Artificial Sequence
  Description of Artificial Sequence: Synthetic oligonucleotide
gacuaugggacuccgguug

SEQ ID NO: 3275464 - RNA, 19 nt, Artificial Sequence
  Description of Artificial Sequence: Synthetic oligonucleotide
uucacauauccaucuaucu

SEQ ID NO: 3275465 - RNA, 19 nt, Artificial Sequence
  Description of Artificial Sequence: Synthetic oligonucleotide
aaaauugcaauuaggucaa

SEQ ID NO: 3275466 - RNA, 19 nt, Artificial Sequence
  Description of Artificial Sequence: Synthetic oligonucleotide
cucuuacugacucaaaguc

SEQ ID NO: 3275467 - RNA, 19 nt, Artificial Sequence
  Description of Artificial Sequence: Synthetic oligonucleotide
ucaggugcaagucauucaa

SEQ ID NO: 3275468 - RNA, 19 nt, Artificial Sequence
  Description of Artificial Sequence: Synthetic oligonucleotide
aggugcaagucauucaaag

SEQ ID NO: 3275469 - RNA, 19 nt, Artificial Sequence
  Description of Artificial Sequence: Synthetic oligonucleotide
augguaauaagaacuugac

SEQ ID NO: 3275470 - RNA, 19 nt, Artificial Sequence
  Description of Artificial Sequence: Synthetic oligonucleotide
ugcaguacaguaacugcug

SEQ ID NO: 3275471 - RNA, 19 nt, Artificial Sequence
  Description of Artificial Sequence: Synthetic oligonucleotide
acucuuaggaacuuaguua

SEQ ID NO: 3275472 - RNA, 19 nt, Artificial Sequence
  Description of Artificial Sequence: Synthetic oligonucleotide
gaucaauaaaccugugcuc

SEQ ID NO: 3275473 - RNA, 19 nt, Artificial Sequence
  Description of Artificial Sequence: Synthetic oligonucleotide
ugugaaccaaucucaagaa

SEQ ID NO: 3275474 - RNA, 19 nt, Artificial Sequence
  Description of Artificial Sequence: Synthetic oligonucleotide
augaauccaccccucuuac

SEQ ID NO: 3275475 - RNA, 19 nt, Artificial Sequence
  Description of Artificial Sequence: Synthetic oligonucleotide
aaagaguugugcugcagua

SEQ ID NO: 3275476 - RNA, 19 nt, Artificial Sequence
  Description of Artificial Sequence: Synthetic oligonucleotide
acaaauauggaaauauaaa

SEQ ID NO: 3275477 - RNA, 19 nt, Artificial Sequence
  Description of Artificial Sequence: Synthetic oligonucleotide
agaagacaaauauggaaau

SEQ ID NO: 3275478 - RNA, 19 nt, Artificial Sequence
  Description of Artificial Sequence: Synthetic oligonucleotide
aagcuauagaugaagaaua

SEQ ID NO: 3275479 - RNA, 19 nt, Artificial Sequence
  Description of Artificial Sequence: Synthetic oligonucleotide
aggugcgucacguugggag

SEQ ID NO: 3275480 - RNA, 19 nt, Artificial Sequence
  Description of Artificial Sequence: Synthetic oligonucleotide
ucuaugugcggguuccugc

SEQ ID NO: 3275481 - RNA, 19 nt, Artificial Sequence
  Description of Artificial Sequence: Synthetic oligonucleotide
aagguuucuuaagcuauag

SEQ ID NO: 3275482 - RNA, 19 nt, Artificial Sequence
  Description of Artificial Sequence: Synthetic oligonucleotide
aucuuuguuuagccauugc

SEQ ID NO: 3275483 - RNA, 19 nt, Artificial Sequence
  Description of Artificial Sequence: Synthetic oligonucleotide
uagauuacauuggaagucu

SEQ ID NO: 3275484 - RNA, 19 nt, Artificial Sequence
  Description of Artificial Sequence: Synthetic oligonucleotide
cuuaaagugccagaaagga

SEQ ID NO: 3275485 - RNA, 19 nt, Artificial Sequence
  Description of Artificial Sequence: Synthetic oligonucleotide
auaaaccugugcuccaucu

SEQ ID NO: 3275486 - RNA, 19 nt, Artificial Sequence
  Description of Artificial Sequence: Synthetic oligonucleotide
gaacugaggugaguaaagg

SEQ ID NO: 3275487 - RNA, 19 nt, Artificial Sequence
  Description of Artificial Sequence: Synthetic oligonucleotide
acuugaucaauaaaccugu

SEQ ID NO: 3275488 - RNA, 19 nt, Artificial Sequence
  Description of Artificial Sequence: Synthetic oligonucleotide
gaaagcaugccgccuauga

SEQ ID NO: 3275489 - RNA, 19 nt, Artificial Sequence
  Description of Artificial Sequence: Synthetic oligonucleotide
uccgguuguaucuugcuuc

SEQ ID NO: 3275490 - RNA, 19 nt, Artificial Sequence
  Description of Artificial Sequence: Synthetic oligonucleotide
uauaaagggcauggaauca

SEQ ID NO: 3275491 - RNA, 19 nt, Artificial Sequence
  Description of Artificial Sequence: Synthetic oligonucleotide
cucuuaggaacuuaguuaa

SEQ ID NO: 3275492 - RNA, 19 nt, Artificial Sequence
  Description of Artificial Sequence: Synthetic oligonucleotide
ucaucuaugugcggguucc

SEQ ID NO: 3275493 - RNA, 19 nt, Artificial Sequence
  Description of Artificial Sequence: Synthetic oligonucleotide
ucuaucuagccauuuuaau

SEQ ID NO: 3275494 - RNA, 19 nt, Artificial Sequence
  Description of Artificial Sequence: Synthetic oligonucleotide
agaagcagcagggugcagg

SEQ ID NO: 3275495 - RNA, 19 nt, Artificial Sequence
  Description of Artificial Sequence: Synthetic oligonucleotide
caaguuuguucucaaccag

SEQ ID NO: 3275496 - RNA, 19 nt, Artificial Sequence
  Description of Artificial Sequence: Synthetic oligonucleotide
uuuuagacaaugaagaaag

SEQ ID NO: 3275497 - RNA, 19 nt, Artificial Sequence
  Description of Artificial Sequence: Synthetic oligonucleotide
aauaaaacaaaauaauuua

SEQ ID NO: 3275498 - RNA, 19 nt, Artificial Sequence
  Description of Artificial Sequence: Synthetic oligonucleotide
uaauaaaacaaaauaauuu

SEQ ID NO: 3275499 - RNA, 19 nt, Artificial Sequence
  Description of Artificial Sequence: Synthetic oligonucleotide
auuauuucccuaauaaaac

SEQ ID NO: 3275500 - RNA, 19 nt, Artificial Sequence
  Description of Artificial Sequence: Synthetic oligonucleotide
aauuguucuagguauguaa

SEQ ID NO: 3275501 - RNA, 19 nt, Artificial Sequence
  Description of Artificial Sequence: Synthetic oligonucleotide
caucugaucaccaaacgag

SEQ ID NO: 3275502 - RNA, 19 nt, Artificial Sequence
  Description of Artificial Sequence: Synthetic oligonucleotide
ucccuaauaaaacaaaaua

SEQ ID NO: 3275503 - RNA, 19 nt, Artificial Sequence
  Description of Artificial Sequence: Synthetic oligonucleotide
uuauuucccuaauaaaaca

SEQ ID NO: 3275504 - RNA, 19 nt, Artificial Sequence
  Description of Artificial Sequence: Synthetic oligonucleotide
ucugaucaccaaacgaggg

SEQ ID NO: 3275505 - RNA, 19 nt, Artificial Sequence
  Description of Artificial Sequence: Synthetic oligonucleotide
aacgaggggccucaucacc

SEQ ID NO: 3275506 - RNA, 19 nt, Artificial Sequence
  Description of Artificial Sequence: Synthetic oligonucleotide
uauuucccuaauaaaacaa

SEQ ID NO: 3275507 - RNA, 19 nt, Artificial Sequence
  Description of Artificial Sequence: Synthetic oligonucleotide
uuucccuaauaaaacaaaa

SEQ ID NO: 3275508 - RNA, 19 nt, Artificial Sequence
  Description of Artificial Sequence: Synthetic oligonucleotide
uccaucugaucaccaaacg

SEQ ID NO: 3275509 - RNA, 19 nt, Artificial Sequence
  Description of Artificial Sequence: Synthetic oligonucleotide
aaaauuguucuagguaugu

SEQ ID NO: 3275510 - RNA, 19 nt, Artificial Sequence
  Description of Artificial Sequence: Synthetic oligonucleotide
uucccuaauaaaacaaaau

SEQ ID NO: 3275511 - RNA, 19 nt, Artificial Sequence
  Description of Artificial Sequence: Synthetic oligonucleotide
aaacgaggggccucaucac

SEQ ID NO: 3275512 - RNA, 19 nt, Artificial Sequence
  Description of Artificial Sequence: Synthetic oligonucleotide
ugaucaccaaacgaggggc

SEQ ID NO: 3275513 - RNA, 19 nt, Artificial Sequence
  Description of Artificial Sequence: Synthetic oligonucleotide
auaaaacaaaauaauuuaa

SEQ ID NO: 3275514 - RNA, 19 nt, Artificial Sequence
  Description of Artificial Sequence: Synthetic oligonucleotide
cugaucaccaaacgagggg

SEQ ID NO: 3275515 - RNA, 19 nt, Artificial Sequence
  Description of Artificial Sequence: Synthetic oligonucleotide
uuuagacaaugaagaaaga

SEQ ID NO: 3275516 - RNA, 19 nt, Artificial Sequence
  Description of Artificial Sequence: Synthetic oligonucleotide
cuaauaaaacaaaauaauu

SEQ ID NO: 3275517 - RNA, 19 nt, Artificial Sequence
  Description of Artificial Sequence: Synthetic oligonucleotide
caaacgaggggccucauca

SEQ ID NO: 3275518 - RNA, 19 nt, Artificial Sequence
  Description of Artificial Sequence: Synthetic oligonucleotide
aucugaucaccaaacgagg

SEQ ID NO: 3275519 - RNA, 19 nt, Artificial Sequence
  Description of Artificial Sequence: Synthetic oligonucleotide
cccuaauaaaacaaaauaa

SEQ ID NO: 3275520 - RNA, 19 nt, Artificial Sequence
  Description of Artificial Sequence: Synthetic oligonucleotide
auuguucuagguauguaau

SEQ ID NO: 3275521 - RNA, 19 nt, Artificial Sequence
  Description of Artificial Sequence: Synthetic oligonucleotide
uuggguguggccagucuaa

SEQ ID NO: 3275522 - RNA, 19 nt, Artificial Sequence
  Description of Artificial Sequence: Synthetic oligonucleotide
auuucccuaauaaaacaaa

SEQ ID NO: 3275523 - RNA, 19 nt, Artificial Sequence
  Description of Artificial Sequence: Synthetic oligonucleotide
aaauuguucuagguaugua

SEQ ID NO: 3275524 - RNA, 19 nt, Artificial Sequence
  Description of Artificial Sequence: Synthetic oligonucleotide
ccuaauaaaacaaaauaau

SEQ ID NO: 3275525 - RNA, 19 nt, Artificial Sequence
  Description of Artificial Sequence: Synthetic oligonucleotide
gaucaccaaacgaggggcc

SEQ ID NO: 3275526 - RNA, 19 nt, Artificial Sequence
  Description of Artificial Sequence: Synthetic oligonucleotide
uguuggguguggccagucu

SEQ ID NO: 3275527 - RNA, 19 nt, Artificial Sequence
  Description of Artificial Sequence: Synthetic oligonucleotide
aggggccucaucaccauug

SEQ ID NO: 3275528 - RNA, 19 nt, Artificial Sequence
  Description of Artificial Sequence: Synthetic oligonucleotide
aucaccaaacgaggggccu

SEQ ID NO: 3275529 - RNA, 19 nt, Artificial Sequence
  Description of Artificial Sequence: Synthetic oligonucleotide
guuggguguggccagucua

SEQ ID NO: 3275530 - RNA, 19 nt, Artificial Sequence
  Description of Artificial Sequence: Synthetic oligonucleotide
gguguggccagucuaauuu

SEQ ID NO: 3275531 - RNA, 19 nt, Artificial Sequence
  Description of Artificial Sequence: Synthetic oligonucleotide
ucaccaaacgaggggccuc

SEQ ID NO: 3275532 - RNA, 19 nt, Artificial Sequence
  Description of Artificial Sequence: Synthetic oligonucleotide
ccaucugaucaccaaacga

SEQ ID NO: 3275533 - RNA, 19 nt, Artificial Sequence
  Description of Artificial Sequence: Synthetic oligonucleotide
ccucaucaccauuggaaug

SEQ ID NO: 3275534 - RNA, 19 nt, Artificial Sequence
  Description of Artificial Sequence: Synthetic oligonucleotide
ggccucaucaccauuggaa

SEQ ID NO: 3275535 - RNA, 19 nt, Artificial Sequence
  Description of Artificial Sequence: Synthetic oligonucleotide
ggggccucaucaccauugg

SEQ ID NO: 3275536 - RNA, 19 nt, Artificial Sequence
  Description of Artificial Sequence: Synthetic oligonucleotide
acgaggggccucaucacca

SEQ ID NO: 3275537 - RNA, 19 nt, Artificial Sequence
  Description of Artificial Sequence: Synthetic oligonucleotide
uggguguggccagucuaau

SEQ ID NO: 3275538 - RNA, 19 nt, Artificial Sequence
  Description of Artificial Sequence: Synthetic oligonucleotide
gccucaucaccauuggaau

SEQ ID NO: 3275539 - RNA, 19 nt, Artificial Sequence
  Description of Artificial Sequence: Synthetic oligonucleotide
caccaaacgaggggccuca

SEQ ID NO: 3275540 - RNA, 19 nt, Artificial Sequence
  Description of Artificial Sequence: Synthetic oligonucleotide
cuguuggguguggccaguc

SEQ ID NO: 3275541 - RNA, 19 nt, Artificial Sequence
  Description of Artificial Sequence: Synthetic oligonucleotide
guguggccagucuaauuuu

SEQ ID NO: 3275542 - RNA, 19 nt, Artificial Sequence
  Description of Artificial Sequence: Synthetic oligonucleotide
ccaaacgaggggccucauc

SEQ ID NO: 3275543 - RNA, 19 nt, Artificial Sequence
  Description of Artificial Sequence: Synthetic oligonucleotide
gggccucaucaccauugga

SEQ ID NO: 3275544 - RNA, 19 nt, Artificial Sequence
  Description of Artificial Sequence: Synthetic oligonucleotide
accaaacgaggggccucau

SEQ ID NO: 3275545 - RNA, 19 nt, Artificial Sequence
  Description of Artificial Sequence: Synthetic oligonucleotide
gaggggccucaucaccauu

SEQ ID NO: 3275546 - RNA, 19 nt, Artificial Sequence
  Description of Artificial Sequence: Synthetic oligonucleotide
ggguguggccagucuaauu

SEQ ID NO: 3275547 - RNA, 19 nt, Artificial Sequence
  Description of Artificial Sequence: Synthetic oligonucleotide
gccauaggcacagcauuuu

SEQ ID NO: 3275548 - RNA, 19 nt, Artificial Sequence
  Description of Artificial Sequence: Synthetic oligonucleotide
ccuguuggguguggccagu

SEQ ID NO: 3275549 - RNA, 19 nt, Artificial Sequence
  Description of Artificial Sequence: Synthetic oligonucleotide
aucucugugaguucgaggc

SEQ ID NO: 3275550 - RNA, 19 nt, Artificial Sequence
  Description of Artificial Sequence: Synthetic oligonucleotide
uccaaagcuacacagagaa

SEQ ID NO: 3275551 - RNA, 19 nt, Artificial Sequence
  Description of Artificial Sequence: Synthetic oligonucleotide
aaucccagcacucgggagg

SEQ ID NO: 3275552 - RNA, 19 nt, Artificial Sequence
  Description of Artificial Sequence: Synthetic oligonucleotide
uuuaaucccagcacucggg

SEQ ID NO: 3275553 - RNA, 19 nt, Artificial Sequence
  Description of Artificial Sequence: Synthetic oligonucleotide
aaagcuacacagagaaacc

SEQ ID NO: 3275554 - RNA, 19 nt, Artificial Sequence
  Description of Artificial Sequence: Synthetic oligonucleotide
aagcuacacagagaaaccc

SEQ ID NO: 3275555 - RNA, 19 nt, Artificial Sequence
  Description of Artificial Sequence: Synthetic oligonucleotide
caaagcuacacagagaaac

SEQ ID NO: 3275556 - RNA, 19 nt, Artificial Sequence
  Description of Artificial Sequence: Synthetic oligonucleotide
uggcacacgccuuuaaucc

SEQ ID NO: 3275557 - RNA, 19 nt, Artificial Sequence
  Description of Artificial Sequence: Synthetic oligonucleotide
uucgaggccagccuggucu

SEQ ID NO: 3275558 - RNA, 19 nt, Artificial Sequence
  Description of Artificial Sequence: Synthetic oligonucleotide
cuuuaaucccagcacucgg

SEQ ID NO: 3275559 - RNA, 19 nt, Artificial Sequence
  Description of Artificial Sequence: Synthetic oligonucleotide
acagagaaacccugucucg

SEQ ID NO: 3275560 - RNA, 19 nt, Artificial Sequence
  Description of Artificial Sequence: Synthetic oligonucleotide
auaggcuccaaagcuacac

SEQ ID NO: 3275561 - RNA, 19 nt, Artificial Sequence
  Description of Artificial Sequence: Synthetic oligonucleotide
acgccuuuaaucccagcac

SEQ ID NO: 3275562 - RNA, 19 nt, Artificial Sequence
  Description of Artificial Sequence: Synthetic oligonucleotide
uuaaucccagcacucggga

SEQ ID NO: 3275563 - RNA, 19 nt, Artificial Sequence
  Description of Artificial Sequence: Synthetic oligonucleotide
gaucucugugaguucgagg

SEQ ID NO: 3275564 - RNA, 19 nt, Artificial Sequence
  Description of Artificial Sequence: Synthetic oligonucleotide
ugaguucgaggccagccug

SEQ ID NO: 3275565 - RNA, 19 nt, Artificial Sequence
  Description of Artificial Sequence: Synthetic oligonucleotide
cacagagaaacccugucuc

SEQ ID NO: 3275566 - RNA, 19 nt, Artificial Sequence
  Description of Artificial Sequence: Synthetic oligonucleotide
aggcuccaaagcuacacag

SEQ ID NO: 3275567 - RNA, 19 nt, Artificial Sequence
  Description of Artificial Sequence: Synthetic oligonucleotide
ugugaguucgaggccagcc

SEQ ID NO: 3275568 - RNA, 19 nt, Artificial Sequence
  Description of Artificial Sequence: Synthetic oligonucleotide
uacacagagaaacccuguc

SEQ ID NO: 3275569 - RNA, 19 nt, Artificial Sequence
  Description of Artificial Sequence: Synthetic oligonucleotide
acacagagaaacccugucu

SEQ ID NO: 3275570 - RNA, 19 nt, Artificial Sequence
  Description of Artificial Sequence: Synthetic oligonucleotide
gcuccaaagcuacacagag

SEQ ID NO: 3275571 - RNA, 19 nt, Artificial Sequence
  Description of Artificial Sequence: Synthetic oligonucleotide
cagccuggucuccagagcg

SEQ ID NO: 3275572 - RNA, 19 nt, Artificial Sequence
  Description of Artificial Sequence: Synthetic oligonucleotide
agagcgagugccaggauag

SEQ ID NO: 3275573 - RNA, 19 nt, Artificial Sequence
  Description of Artificial Sequence: Synthetic oligonucleotide
agcgagugccaggauaggc

SEQ ID NO: 3275574 - RNA, 19 nt, Artificial Sequence
  Description of Artificial Sequence: Synthetic oligonucleotide
agaaacccugucucgaaaa

SEQ ID NO: 3275575 - RNA, 19 nt, Artificial Sequence
  Description of Artificial Sequence: Synthetic oligonucleotide
uaaucccagcacucgggag

SEQ ID NO: 3275576 - RNA, 19 nt, Artificial Sequence
  Description of Artificial Sequence: Synthetic oligonucleotide
uaggcuccaaagcuacaca

SEQ ID NO: 3275577 - RNA, 19 nt, Artificial Sequence
  Description of Artificial Sequence: Synthetic oligonucleotide
ucucugugaguucgaggcc

SEQ ID NO: 3275578 - RNA, 19 nt, Artificial Sequence
  Description of Artificial Sequence: Synthetic oligonucleotide
ucugugaguucgaggccag

SEQ ID NO: 3275579 - RNA, 19 nt, Artificial Sequence
  Description of Artificial Sequence: Synthetic oligonucleotide
uccagagcgagugccagga

SEQ ID NO: 3275580 - RNA, 19 nt, Artificial Sequence
  Description of Artificial Sequence: Synthetic oligonucleotide
gccaggauaggcuccaaag

SEQ ID NO: 3275581 - RNA, 19 nt, Artificial Sequence
  Description of Artificial Sequence: Synthetic oligonucleotide
guggcacacgccuuuaauc

SEQ ID NO: 3275582 - RNA, 19 nt, Artificial Sequence
  Description of Artificial Sequence: Synthetic oligonucleotide
aucccagcacucgggaggc

SEQ ID NO: 3275583 - RNA, 19 nt, Artificial Sequence
  Description of Artificial Sequence: Synthetic oligonucleotide
cacgccuuuaaucccagca

SEQ ID NO: 3275584 - RNA, 19 nt, Artificial Sequence
  Description of Artificial Sequence: Synthetic oligonucleotide
cuggucuccagagcgagug

SEQ ID NO: 3275585 - RNA, 19 nt, Artificial Sequence
  Description of Artificial Sequence: Synthetic oligonucleotide
ucuccagagcgagugccag

SEQ ID NO: 3275586 - RNA, 19 nt, Artificial Sequence
  Description of Artificial Sequence: Synthetic oligonucleotide
agagaaacccugucucgaa

SEQ ID NO: 3275587 - RNA, 19 nt, Artificial Sequence
  Description of Artificial Sequence: Synthetic oligonucleotide
acucgggaggcagaggcag

SEQ ID NO: 3275588 - RNA, 19 nt, Artificial Sequence
  Description of Artificial Sequence: Synthetic oligonucleotide
gaguucgaggccagccugg

SEQ ID NO: 3275589 - RNA, 19 nt, Artificial Sequence
  Description of Artificial Sequence: Synthetic oligonucleotide
agcuacacagagaaacccu

SEQ ID NO: 3275590 - RNA, 19 nt, Artificial Sequence
  Description of Artificial Sequence: Synthetic oligonucleotide
ccaggauaggcuccaaagc

SEQ ID NO: 3275591 - RNA, 19 nt, Artificial Sequence
  Description of Artificial Sequence: Synthetic oligonucleotide
gcacucgggaggcagaggc

SEQ ID NO: 3275592 - RNA, 19 nt, Artificial Sequence
  Description of Artificial Sequence: Synthetic oligonucleotide
caggauaggcuccaaagcu

SEQ ID NO: 3275593 - RNA, 19 nt, Artificial Sequence
  Description of Artificial Sequence: Synthetic oligonucleotide
acacgccuuuaaucccagc

SEQ ID NO: 3275594 - RNA, 19 nt, Artificial Sequence
  Description of Artificial Sequence: Synthetic oligonucleotide
gagaaacccugucucgaaa

SEQ ID NO: 3275595 - RNA, 19 nt, Artificial Sequence
  Description of Artificial Sequence: Synthetic oligonucleotide
aggcaggcggaucucugug

SEQ ID NO: 3275596 - RNA, 19 nt, Artificial Sequence
  Description of Artificial Sequence: Synthetic oligonucleotide
ccuuuaaucccagcacucg

SEQ ID NO: 3275597 - RNA, 19 nt, Artificial Sequence
  Description of Artificial Sequence: Synthetic oligonucleotide
gggaggcagaggcaggcgg

SEQ ID NO: 3275598 - RNA, 19 nt, Artificial Sequence
  Description of Artificial Sequence: Synthetic oligonucleotide
gcuacacagagaaacccug

SEQ ID NO: 3275599 - RNA, 19 nt, Artificial Sequence
  Description of Artificial Sequence: Synthetic oligonucleotide
uggucuccagagcgagugc

SEQ ID NO: 3275600 - RNA, 19 nt, Artificial Sequence
  Description of Artificial Sequence: Synthetic oligonucleotide
gcggaucucugugaguucg

SEQ ID NO: 3275601 - RNA, 19 nt, Artificial Sequence
  Description of Artificial Sequence: Synthetic oligonucleotide
cuccagagcgagugccagg

SEQ ID NO: 3275602 - RNA, 19 nt, Artificial Sequence
  Description of Artificial Sequence: Synthetic oligonucleotide
ucgggaggcagaggcaggc

SEQ ID NO: 3275603 - RNA, 19 nt, Artificial Sequence
  Description of Artificial Sequence: Synthetic oligonucleotide
ggauaggcuccaaagcuac

SEQ ID NO: 3275604 - RNA, 19 nt, Artificial Sequence
  Description of Artificial Sequence: Synthetic oligonucleotide
aggcggaucucugugaguu

SEQ ID NO: 3275605 - RNA, 19 nt, Artificial Sequence
  Description of Artificial Sequence: Synthetic oligonucleotide
ugccaggauaggcuccaaa

SEQ ID NO: 3275606 - RNA, 19 nt, Artificial Sequence
  Description of Artificial Sequence: Synthetic oligonucleotide
ggcacacgccuuuaauccc

SEQ ID NO: 3275607 - RNA, 19 nt, Artificial Sequence
  Description of Artificial Sequence: Synthetic oligonucleotide
cucugugaguucgaggcca

SEQ ID NO: 3275608 - RNA, 19 nt, Artificial Sequence
  Description of Artificial Sequence: Synthetic oligonucleotide
agugccaggauaggcucca

SEQ ID NO: 3275609 - RNA, 19 nt, Artificial Sequence
  Description of Artificial Sequence: Synthetic oligonucleotide
cacacgccuuuaaucccag

SEQ ID NO: 3275610 - RNA, 19 nt, Artificial Sequence
  Description of Artificial Sequence: Synthetic oligonucleotide
cucgggaggcagaggcagg

SEQ ID NO: 3275611 - RNA, 19 nt, Artificial Sequence
  Description of Artificial Sequence: Synthetic oligonucleotide
cuccaaagcuacacagaga

SEQ ID NO: 3275612 - RNA, 19 nt, Artificial Sequence
  Description of Artificial Sequence: Synthetic oligonucleotide
gcaggcggaucucugugag

SEQ ID NO: 3275613 - RNA, 19 nt, Artificial Sequence
  Description of Artificial Sequence: Synthetic oligonucleotide
cagagaaacccugucucga

SEQ ID NO: 3275614 - RNA, 19 nt, Artificial Sequence
  Description of Artificial Sequence: Synthetic oligonucleotide
gagugccaggauaggcucc

SEQ ID NO: 3275615 - RNA, 19 nt, Artificial Sequence
  Description of Artificial Sequence: Synthetic oligonucleotide
aggauaggcuccaaagcua

SEQ ID NO: 3275616 - RNA, 19 nt, Artificial Sequence
  Description of Artificial Sequence: Synthetic oligonucleotide
ggucuccagagcgagugcc

SEQ ID NO: 3275617 - RNA, 19 nt, Artificial Sequence
  Description of Artificial Sequence: Synthetic oligonucleotide
gccagccuggucuccagag

SEQ ID NO: 3275618 - RNA, 19 nt, Artificial Sequence
  Description of Artificial Sequence: Synthetic oligonucleotide
gagcgagugccaggauagg

SEQ ID NO: 3275619 - RNA, 19 nt, Artificial Sequence
  Description of Artificial Sequence: Synthetic oligonucleotide
gauaggcuccaaagcuaca

SEQ ID NO: 3275620 - RNA, 19 nt, Artificial Sequence
  Description of Artificial Sequence: Synthetic oligonucleotide
ugguggcacacgccuuuaa

SEQ ID NO: 3275621 - RNA, 19 nt, Artificial Sequence
  Description of Artificial Sequence: Synthetic oligonucleotide
ggaucucugugaguucgag

SEQ ID NO: 3275622 - RNA, 19 nt, Artificial Sequence
  Description of Artificial Sequence: Synthetic oligonucleotide
cuacacagagaaacccugu

SEQ ID NO: 3275623 - RNA, 19 nt, Artificial Sequence
  Description of Artificial Sequence: Synthetic oligonucleotide
gugaguucgaggccagccu

SEQ ID NO: 3275624 - RNA, 19 nt, Artificial Sequence
  Description of Artificial Sequence: Synthetic oligonucleotide
ucgaggccagccuggucuc

SEQ ID NO: 3275625 - RNA, 19 nt, Artificial Sequence
  Description of Artificial Sequence: Synthetic oligonucleotide
agcacucgggaggcagagg

SEQ ID NO: 3275626 - RNA, 19 nt, Artificial Sequence
  Description of Artificial Sequence: Synthetic oligonucleotide
cagagcgagugccaggaua

SEQ ID NO: 3275627 - RNA, 19 nt, Artificial Sequence
  Description of Artificial Sequence: Synthetic oligonucleotide
agaggcaggcggaucucug

SEQ ID NO: 3275628 - RNA, 19 nt, Artificial Sequence
  Description of Artificial Sequence: Synthetic oligonucleotide
aguucgaggccagccuggu

SEQ ID NO: 3275629 - RNA, 19 nt, Artificial Sequence
  Description of Artificial Sequence: Synthetic oligonucleotide
cagcacucgggaggcagag

SEQ ID NO: 3275630 - RNA, 19 nt, Artificial Sequence
  Description of Artificial Sequence: Synthetic oligonucleotide
aggccagccuggucuccag

SEQ ID NO: 3275631 - RNA, 19 nt, Artificial Sequence
  Description of Artificial Sequence: Synthetic oligonucleotide
gaggcaggcggaucucugu

SEQ ID NO: 3275632 - RNA, 19 nt, Artificial Sequence
  Description of Artificial Sequence: Synthetic oligonucleotide
aggcagaggcaggcggauc

SEQ ID NO: 3275633 - RNA, 19 nt, Artificial Sequence
  Description of Artificial Sequence: Synthetic oligonucleotide
gccuuuaaucccagcacuc

SEQ ID NO: 3275634 - RNA, 19 nt, Artificial Sequence
  Description of Artificial Sequence: Synthetic oligonucleotide
ggcagaggcaggcggaucu

SEQ ID NO: 3275635 - RNA, 19 nt, Artificial Sequence
  Description of Artificial Sequence: Synthetic oligonucleotide
ggcuccaaagcuacacaga

SEQ ID NO: 3275636 - RNA, 19 nt, Artificial Sequence
  Description of Artificial Sequence: Synthetic oligonucleotide
cugugaguucgaggccagc

SEQ ID NO: 3275637 - RNA, 19 nt, Artificial Sequence
  Description of Artificial Sequence: Synthetic oligonucleotide
gaggccagccuggucucca

SEQ ID NO: 3275638 - RNA, 19 nt, Artificial Sequence
  Description of Artificial Sequence: Synthetic oligonucleotide
gucuccagagcgagugcca

SEQ ID NO: 3275639 - RNA, 19 nt, Artificial Sequence
  Description of Artificial Sequence: Synthetic oligonucleotide
ccagccuggucuccagagc

SEQ ID NO: 3275640 - RNA, 19 nt, Artificial Sequence
  Description of Artificial Sequence: Synthetic oligonucleotide
ggcgugguggcacacgccu

SEQ ID NO: 3275641 - RNA, 19 nt, Artificial Sequence
  Description of Artificial Sequence: Synthetic oligonucleotide
cacucgggaggcagaggca

SEQ ID NO: 3275642 - RNA, 19 nt, Artificial Sequence
  Description of Artificial Sequence: Synthetic oligonucleotide
cgagugccaggauaggcuc

SEQ ID NO: 3275643 - RNA, 19 nt, Artificial Sequence
  Description of Artificial Sequence: Synthetic oligonucleotide
ggcaggcggaucucuguga

SEQ ID NO: 3275644 - RNA, 19 nt, Artificial Sequence
  Description of Artificial Sequence: Synthetic oligonucleotide
guucgaggccagccugguc

SEQ ID NO: 3275645 - RNA, 19 nt, Artificial Sequence
  Description of Artificial Sequence: Synthetic oligonucleotide
gccuggucuccagagcgag

SEQ ID NO: 3275646 - RNA, 19 nt, Artificial Sequence
  Description of Artificial Sequence: Synthetic oligonucleotide
gcacacgccuuuaauccca

SEQ ID NO: 3275647 - RNA, 19 nt, Artificial Sequence
  Description of Artificial Sequence: Synthetic oligonucleotide
agccuggucuccagagcga

SEQ ID NO: 3275648 - RNA, 19 nt, Artificial Sequence
  Description of Artificial Sequence: Synthetic oligonucleotide
ggaggcagaggcaggcgga

SEQ ID NO: 3275649 - RNA, 19 nt, Artificial Sequence
  Description of Artificial Sequence: Synthetic oligonucleotide
ugaaauaagacacagggcg

SEQ ID NO: 3275650 - RNA, 19 nt, Artificial Sequence
  Description of Artificial Sequence: Synthetic oligonucleotide
ucugaaauaagacacaggg

SEQ ID NO: 3275651 - RNA, 19 nt, Artificial Sequence
  Description of Artificial Sequence: Synthetic oligonucleotide
uuuaaagacagaaaggggu

SEQ ID NO: 3275652 - RNA, 19 nt, Artificial Sequence
  Description of Artificial Sequence: Synthetic oligonucleotide
uuauuuccaaucuacaacc

SEQ ID NO: 3275653 - RNA, 19 nt, Artificial Sequence
  Description of Artificial Sequence: Synthetic oligonucleotide
uuuauuuccaaucuacaac

SEQ ID NO: 3275654 - RNA, 19 nt, Artificial Sequence
  Description of Artificial Sequence: Synthetic oligonucleotide
uaugacauacuuuauuucc

SEQ ID NO: 3275655 - RNA, 19 nt, Artificial Sequence
  Description of Artificial Sequence: Synthetic oligonucleotide
uguaaguuuacacuguaca

SEQ ID NO: 3275656 - RNA, 19 nt, Artificial Sequence
  Description of Artificial Sequence: Synthetic oligonucleotide
caugucugaaauaagacac

SEQ ID NO: 3275657 - RNA, 19 nt, Artificial Sequence
  Description of Artificial Sequence: Synthetic oligonucleotide
acauacuuuauuuccaauc

SEQ ID NO: 3275658 - RNA, 19 nt, Artificial Sequence
  Description of Artificial Sequence: Synthetic oligonucleotide
agccuuuaaagacagaaag

SEQ ID NO: 3275659 - RNA, 19 nt, Artificial Sequence
  Description of Artificial Sequence: Synthetic oligonucleotide
acuuuguaaguuuacacug

SEQ ID NO: 3275660 - RNA, 19 nt, Artificial Sequence
  Description of Artificial Sequence: Synthetic oligonucleotide
cacaguauuggccaggugg

SEQ ID NO: 3275661 - RNA, 19 nt, Artificial Sequence
  Description of Artificial Sequence: Synthetic oligonucleotide
aggaaaggcaguuucuagc

SEQ ID NO: 3275662 - RNA, 19 nt, Artificial Sequence
  Description of Artificial Sequence: Synthetic oligonucleotide
uuaaagacagaaaggggug

SEQ ID NO: 3275663 - RNA, 19 nt, Artificial Sequence
  Description of Artificial Sequence: Synthetic oligonucleotide
guuuauaugacauacuuua

SEQ ID NO: 3275664 - RNA, 19 nt, Artificial Sequence
  Description of Artificial Sequence: Synthetic oligonucleotide
acacuuuguaaguuuacac

SEQ ID NO: 3275665 - RNA, 19 nt, Artificial Sequence
  Description of Artificial Sequence: Synthetic oligonucleotide
ucucaugucugaaauaaga

SEQ ID NO: 3275666 - RNA, 19 nt, Artificial Sequence
  Description of Artificial Sequence: Synthetic oligonucleotide
uauaugacauacuuuauuu

SEQ ID NO: 3275667 - RNA, 19 nt, Artificial Sequence
  Description of Artificial Sequence: Synthetic oligonucleotide
gagcugguggacuagacgg

SEQ ID NO: 3275668 - RNA, 19 nt, Artificial Sequence
  Description of Artificial Sequence: Synthetic oligonucleotide
cuuuaaagacagaaagggg

SEQ ID NO: 3275669 - RNA, 19 nt, Artificial Sequence
  Description of Artificial Sequence: Synthetic oligonucleotide
uacuuuauuuccaaucuac

SEQ ID NO: 3275670 - RNA, 19 nt, Artificial Sequence
  Description of Artificial Sequence: Synthetic oligonucleotide
gaaagggguggauaguugg

SEQ ID NO: 3275671 - RNA, 19 nt, Artificial Sequence
  Description of Artificial Sequence: Synthetic oligonucleotide
aaaggcaguuucuagcucu

SEQ ID NO: 3275672 - RNA, 19 nt, Artificial Sequence
  Description of Artificial Sequence: Synthetic oligonucleotide
ucaugucugaaauaagaca

SEQ ID NO: 3275673 - RNA, 19 nt, Artificial Sequence
  Description of Artificial Sequence: Synthetic oligonucleotide
auaugacauacuuuauuuc

SEQ ID NO: 3275674 - RNA, 19 nt, Artificial Sequence
  Description of Artificial Sequence: Synthetic oligonucleotide
gacagaaagggguggauag

SEQ ID NO: 3275675 - RNA, 19 nt, Artificial Sequence
  Description of Artificial Sequence: Synthetic oligonucleotide
guaaguuuacacuguacag

SEQ ID NO: 3275676 - RNA, 19 nt, Artificial Sequence
  Description of Artificial Sequence: Synthetic oligonucleotide
caaucuacaaccauuaaaa

SEQ ID NO: 3275677 - RNA, 19 nt, Artificial Sequence
  Description of Artificial Sequence: Synthetic oligonucleotide
caauccauccccaggaagg

SEQ ID NO: 3275678 - RNA, 19 nt, Artificial Sequence
  Description of Artificial Sequence: Synthetic oligonucleotide
gauaaggaggugcagggug

SEQ ID NO: 3275679 - RNA, 19 nt, Artificial Sequence
  Description of Artificial Sequence: Synthetic oligonucleotide
aaguuuacacuguacaguu

SEQ ID NO: 3275680 - RNA, 19 nt, Artificial Sequence
  Description of Artificial Sequence: Synthetic oligonucleotide
aaauaagacacagggcgag

SEQ ID NO: 3275681 - RNA, 19 nt, Artificial Sequence
  Description of Artificial Sequence: Synthetic oligonucleotide
ucuggcaggaggaugaggu

SEQ ID NO: 3275682 - RNA, 19 nt, Artificial Sequence
  Description of Artificial Sequence: Synthetic oligonucleotide
uuauaugacauacuuuauu

SEQ ID NO: 3275683 - RNA, 19 nt, Artificial Sequence
  Description of Artificial Sequence: Synthetic oligonucleotide
gucucuucccuccugaggg

SEQ ID NO: 3275684 - RNA, 19 nt, Artificial Sequence
  Description of Artificial Sequence: Synthetic oligonucleotide
aggauaaggaggugcaggg

SEQ ID NO: 3275685 - RNA, 19 nt, Artificial Sequence
  Description of Artificial Sequence: Synthetic oligonucleotide
gauaguuggcccaaggaug

SEQ ID NO: 3275686 - RNA, 19 nt, Artificial Sequence
  Description of Artificial Sequence: Synthetic oligonucleotide
aguuucuagcucuuucccg

SEQ ID NO: 3275687 - RNA, 19 nt, Artificial Sequence
  Description of Artificial Sequence: Synthetic oligonucleotide
uaaguuuacacuguacagu

SEQ ID NO: 3275688 - RNA, 19 nt, Artificial Sequence
  Description of Artificial Sequence: Synthetic oligonucleotide
cucgcaacagguuucuucc

SEQ ID NO: 3275689 - RNA, 19 nt, Artificial Sequence
  Description of Artificial Sequence: Synthetic oligonucleotide
aagggguggauaguuggcc

SEQ ID NO: 3275690 - RNA, 19 nt, Artificial Sequence
  Description of Artificial Sequence: Synthetic oligonucleotide
gaggaugaggucuucuugc

SEQ ID NO: 3275691 - RNA, 19 nt, Artificial Sequence
  Description of Artificial Sequence: Synthetic oligonucleotide
uuuggcacugucuacgggu

SEQ ID NO: 3275692 - RNA, 19 nt, Artificial Sequence
  Description of Artificial Sequence: Synthetic oligonucleotide
ccuuuaaagacagaaaggg

SEQ ID NO: 3275693 - RNA, 19 nt, Artificial Sequence
  Description of Artificial Sequence: Synthetic oligonucleotide
ugucugaaauaagacacag

SEQ ID NO: 3275694 - RNA, 19 nt, Artificial Sequence
  Description of Artificial Sequence: Synthetic oligonucleotide
guuucuagcucuuucccgc

SEQ ID NO: 3275695 - RNA, 19 nt, Artificial Sequence
  Description of Artificial Sequence: Synthetic oligonucleotide
auaguuggcccaaggaugc

SEQ ID NO: 3275696 - RNA, 19 nt, Artificial Sequence
  Description of Artificial Sequence: Synthetic oligonucleotide
cugaaauaagacacagggc

SEQ ID NO: 3275697 - RNA, 19 nt, Artificial Sequence
  Description of Artificial Sequence: Synthetic oligonucleotide
cucaugucugaaauaagac

SEQ ID NO: 3275698 - RNA, 19 nt, Artificial Sequence
  Description of Artificial Sequence: Synthetic oligonucleotide
uggaguuuggaacugguuu

SEQ ID NO: 3275699 - RNA, 19 nt, Artificial Sequence
  Description of Artificial Sequence: Synthetic oligonucleotide
ucuagcucuuucccgcugg

SEQ ID NO: 3275700 - RNA, 19 nt, Artificial Sequence
  Description of Artificial Sequence: Synthetic oligonucleotide
uaaagacagaaaggggugg

SEQ ID NO: 3275701 - RNA, 19 nt, Artificial Sequence
  Description of Artificial Sequence: Synthetic oligonucleotide
uuuccaaucuacaaccauu

SEQ ID NO: 3275702 - RNA, 19 nt, Artificial Sequence
  Description of Artificial Sequence: Synthetic oligonucleotide
caggaaggagccuuuaaag

SEQ ID NO: 3275703 - RNA, 19 nt, Artificial Sequence
  Description of Artificial Sequence: Synthetic oligonucleotide
ugggauugggaggauaagg

SEQ ID NO: 3275704 - RNA, 19 nt, Artificial Sequence
  Description of Artificial Sequence: Synthetic oligonucleotide
gaggauaaggaggugcagg

SEQ ID NO: 3275705 - RNA, 19 nt, Artificial Sequence
  Description of Artificial Sequence: Synthetic oligonucleotide
aacacuuuguaaguuuaca

SEQ ID NO: 3275706 - RNA, 19 nt, Artificial Sequence
  Description of Artificial Sequence: Synthetic oligonucleotide
aaagggguggauaguuggc

SEQ ID NO: 3275707 - RNA, 19 nt, Artificial Sequence
  Description of Artificial Sequence: Synthetic oligonucleotide
aaccgggcugagcagaaag

SEQ ID NO: 3275708 - RNA, 19 nt, Artificial Sequence
  Description of Artificial Sequence: Synthetic oligonucleotide
uuuauaugacauacuuuau

SEQ ID NO: 3275709 - RNA, 19 nt, Artificial Sequence
  Description of Artificial Sequence: Synthetic oligonucleotide
aaacacuuuguaaguuuac

SEQ ID NO: 3275710 - RNA, 19 nt, Artificial Sequence
  Description of Artificial Sequence: Synthetic oligonucleotide
aaagggacuucacaguauu

SEQ ID NO: 3275711 - RNA, 19 nt, Artificial Sequence
  Description of Artificial Sequence: Synthetic oligonucleotide
acagguuucuucccucugg

SEQ ID NO: 3275712 - RNA, 19 nt, Artificial Sequence
  Description of Artificial Sequence: Synthetic oligonucleotide
ucuucccucuggcaggagg

SEQ ID NO: 3275713 - RNA, 19 nt, Artificial Sequence
  Description of Artificial Sequence: Synthetic oligonucleotide
aauaagacacagggcgagg

SEQ ID NO: 3275714 - RNA, 19 nt, Artificial Sequence
  Description of Artificial Sequence: Synthetic oligonucleotide
gcagaaagggacuucacag

SEQ ID NO: 3275715 - RNA, 19 nt, Artificial Sequence
  Description of Artificial Sequence: Synthetic oligonucleotide
agggacuucacaguauugg

SEQ ID NO: 3275716 - RNA, 19 nt, Artificial Sequence
  Description of Artificial Sequence: Synthetic oligonucleotide
guuucuucccucuggcagg

SEQ ID NO: 3275717 - RNA, 19 nt, Artificial Sequence
  Description of Artificial Sequence: Synthetic oligonucleotide
uggauuuucuucucgcaac

SEQ ID NO: 3275718 - RNA, 19 nt, Artificial Sequence
  Description of Artificial Sequence: Synthetic oligonucleotide
agagcugguggacuagacg

SEQ ID NO: 3275719 - RNA, 19 nt, Artificial Sequence
  Description of Artificial Sequence: Synthetic oligonucleotide
uuuguaaguuuacacugua

SEQ ID NO: 3275720 - RNA, 19 nt, Artificial Sequence
  Description of Artificial Sequence: Synthetic oligonucleotide
uggauaguuggcccaagga

SEQ ID NO: 3275721 - RNA, 19 nt, Artificial Sequence
  Description of Artificial Sequence: Synthetic oligonucleotide
agggugggagugcugaugg

SEQ ID NO: 3275722 - RNA, 19 nt, Artificial Sequence
  Description of Artificial Sequence: Synthetic oligonucleotide
uuggauuuucuucucgcaa

SEQ ID NO: 3275723 - RNA, 19 nt, Artificial Sequence
  Description of Artificial Sequence: Synthetic oligonucleotide
agggguggauaguuggccc

SEQ ID NO: 3275724 - RNA, 19 nt, Artificial Sequence
  Description of Artificial Sequence: Synthetic oligonucleotide
uauuuccaaucuacaacca

SEQ ID NO: 3275725 - RNA, 19 nt, Artificial Sequence
  Description of Artificial Sequence: Synthetic oligonucleotide
uuccaaucuacaaccauua

SEQ ID NO: 3275726 - RNA, 19 nt, Artificial Sequence
  Description of Artificial Sequence: Synthetic oligonucleotide
acggcuguccuccugucac

SEQ ID NO: 3275727 - RNA, 19 nt, Artificial Sequence
  Description of Artificial Sequence: Synthetic oligonucleotide
uccauccccaggaaggagc

SEQ ID NO: 3275728 - RNA, 19 nt, Artificial Sequence
  Description of Artificial Sequence: Synthetic oligonucleotide
uuuuggcacugucuacggg

SEQ ID NO: 3275729 - RNA, 19 nt, Artificial Sequence
  Description of Artificial Sequence: Synthetic oligonucleotide
cuuuauuuccaaucuacaa

SEQ ID NO: 3275730 - RNA, 19 nt, Artificial Sequence
  Description of Artificial Sequence: Synthetic oligonucleotide
uaagacacagggcgaggag

SEQ ID NO: 3275731 - RNA, 19 nt, Artificial Sequence
  Description of Artificial Sequence: Synthetic oligonucleotide
ggaaggagccuuuaaagac

SEQ ID NO: 3275732 - RNA, 19 nt, Artificial Sequence
  Description of Artificial Sequence: Synthetic oligonucleotide
uuguaaguuuacacuguac

SEQ ID NO: 3275733 - RNA, 19 nt, Artificial Sequence
  Description of Artificial Sequence: Synthetic oligonucleotide
uucucaugucugaaauaag

SEQ ID NO: 3275734 - RNA, 19 nt, Artificial Sequence
  Description of Artificial Sequence: Synthetic oligonucleotide
ucucccugggauugggagg

SEQ ID NO: 3275735 - RNA, 19 nt, Artificial Sequence
  Description of Artificial Sequence: Synthetic oligonucleotide
gguuucuucccucuggcag

SEQ ID NO: 3275736 - RNA, 19 nt, Artificial Sequence
  Description of Artificial Sequence: Synthetic oligonucleotide
aaaacacuuuguaaguuua

SEQ ID NO: 3275737 - RNA, 19 nt, Artificial Sequence
  Description of Artificial Sequence: Synthetic oligonucleotide
acaguauuggccagguggg

SEQ ID NO: 3275738 - RNA, 19 nt, Artificial Sequence
  Description of Artificial Sequence: Synthetic oligonucleotide
ugacauacuuuauuuccaa

SEQ ID NO: 3275739 - RNA, 19 nt, Artificial Sequence
  Description of Artificial Sequence: Synthetic oligonucleotide
aaggagccuuuaaagacag

SEQ ID NO: 3275740 - RNA, 19 nt, Artificial Sequence
  Description of Artificial Sequence: Synthetic oligonucleotide
augcccuuggucucuuccc

SEQ ID NO: 3275741 - RNA, 19 nt, Artificial Sequence
  Description of Artificial Sequence: Synthetic oligonucleotide
ugagcagaaagggacuuca

SEQ ID NO: 3275742 - RNA, 19 nt, Artificial Sequence
  Description of Artificial Sequence: Synthetic oligonucleotide
agaaagggacuucacagua

SEQ ID NO: 3275743 - RNA, 19 nt, Artificial Sequence
  Description of Artificial Sequence: Synthetic oligonucleotide
guuuacacuguacaguucu

SEQ ID NO: 3275744 - RNA, 19 nt, Artificial Sequence
  Description of Artificial Sequence: Synthetic oligonucleotide
aaagacagaaaggggugga

SEQ ID NO: 3275745 - RNA, 19 nt, Artificial Sequence
  Description of Artificial Sequence: Synthetic oligonucleotide
gacuagacggcuguccucc

SEQ ID NO: 3275746 - RNA, 19 nt, Artificial Sequence
  Description of Artificial Sequence: Synthetic oligonucleotide
uucuucucgcaacagguuu

SEQ ID NO: 3275747 - RNA, 19 nt, Artificial Sequence
  Description of Artificial Sequence: Synthetic oligonucleotide
gaugcccuuggucucuucc

SEQ ID NO: 3275748 - RNA, 19 nt, Artificial Sequence
  Description of Artificial Sequence: Synthetic oligonucleotide
ucucgcaacagguuucuuc

SEQ ID NO: 3275749 - RNA, 19 nt, Artificial Sequence
  Description of Artificial Sequence: Synthetic oligonucleotide
aauucugguagccagcagc

SEQ ID NO: 3275750 - RNA, 19 nt, Artificial Sequence
  Description of Artificial Sequence: Synthetic oligonucleotide
uauacugcugguaugcugg

SEQ ID NO: 3275751 - RNA, 19 nt, Artificial Sequence
  Description of Artificial Sequence: Synthetic oligonucleotide
gaugaggaaauucugguag

SEQ ID NO: 3275752 - RNA, 19 nt, Artificial Sequence
  Description of Artificial Sequence: Synthetic oligonucleotide
aagugaggcaaauagcauc

SEQ ID NO: 3275753 - RNA, 19 nt, Artificial Sequence
  Description of Artificial Sequence: Synthetic oligonucleotide
ucuacagguccucugaggg

SEQ ID NO: 3275754 - RNA, 19 nt, Artificial Sequence
  Description of Artificial Sequence: Synthetic oligonucleotide
agaaguuauggauagcauc

SEQ ID NO: 3275755 - RNA, 19 nt, Artificial Sequence
  Description of Artificial Sequence: Synthetic oligonucleotide
gaaguuauggauagcaucc

SEQ ID NO: 3275756 - RNA, 19 nt, Artificial Sequence
  Description of Artificial Sequence: Synthetic oligonucleotide
ucugaguacaccuggcugg

SEQ ID NO: 3275757 - RNA, 19 nt, Artificial Sequence
  Description of Artificial Sequence: Synthetic oligonucleotide
auaugcuuugcaugggugc

SEQ ID NO: 3275758 - RNA, 19 nt, Artificial Sequence
  Description of Artificial Sequence: Synthetic oligonucleotide
aaugcagaugaggaaauuc

SEQ ID NO: 3275759 - RNA, 19 nt, Artificial Sequence
  Description of Artificial Sequence: Synthetic oligonucleotide
uuugcaugggugcuggcgg

SEQ ID NO: 3275760 - RNA, 19 nt, Artificial Sequence
  Description of Artificial Sequence: Synthetic oligonucleotide
agcaucucaaugcagauga

SEQ ID NO: 3275761 - RNA, 19 nt, Artificial Sequence
  Description of Artificial Sequence: Synthetic oligonucleotide
cuggauaugcuuugcaugg

SEQ ID NO: 3275762 - RNA, 19 nt, Artificial Sequence
  Description of Artificial Sequence: Synthetic oligonucleotide
auggauagcauccuggaca

SEQ ID NO: 3275763 - RNA, 19 nt, Artificial Sequence
  Description of Artificial Sequence: Synthetic oligonucleotide
gcaaauagcaucucaaugc

SEQ ID NO: 3275764 - RNA, 19 nt, Artificial Sequence
  Description of Artificial Sequence: Synthetic oligonucleotide
aauagcaucucaaugcaga

SEQ ID NO: 3275765 - RNA, 19 nt, Artificial Sequence
  Description of Artificial Sequence: Synthetic oligonucleotide
ugagaaguuauggauagca

SEQ ID NO: 3275766 - RNA, 19 nt, Artificial Sequence
  Description of Artificial Sequence: Synthetic oligonucleotide
aggaaauucugguagccag

SEQ ID NO: 3275767 - RNA, 19 nt, Artificial Sequence
  Description of Artificial Sequence: Synthetic oligonucleotide
ucugagggaaucagcaugc

SEQ ID NO: 3275768 - RNA, 19 nt, Artificial Sequence
  Description of Artificial Sequence: Synthetic oligonucleotide
ucuccuucaagccacugga

SEQ ID NO: 3275769 - RNA, 19 nt, Artificial Sequence
  Description of Artificial Sequence: Synthetic oligonucleotide
augaggaaauucugguagc

SEQ ID NO: 3275770 - RNA, 19 nt, Artificial Sequence
  Description of Artificial Sequence: Synthetic oligonucleotide
cugauggucuccuucaagc

SEQ ID NO: 3275771 - RNA, 19 nt, Artificial Sequence
  Description of Artificial Sequence: Synthetic oligonucleotide
acuggauaugcuuugcaug

SEQ ID NO: 3275772 - RNA, 19 nt, Artificial Sequence
  Description of Artificial Sequence: Synthetic oligonucleotide
gauagcauccuggacaaug

SEQ ID NO: 3275773 - RNA, 19 nt, Artificial Sequence
  Description of Artificial Sequence: Synthetic oligonucleotide
ucugguagccagcagccag

SEQ ID NO: 3275774 - RNA, 19 nt, Artificial Sequence
  Description of Artificial Sequence: Synthetic oligonucleotide
agcuaggcuccacacaccc

SEQ ID NO: 3275775 - RNA, 19 nt, Artificial Sequence
  Description of Artificial Sequence: Synthetic oligonucleotide
guuauggauagcauccugg

SEQ ID NO: 3275776 - RNA, 19 nt, Artificial Sequence
  Description of Artificial Sequence: Synthetic oligonucleotide
uggacugcuguguauacug

SEQ ID NO: 3275777 - RNA, 19 nt, Artificial Sequence
  Description of Artificial Sequence: Synthetic oligonucleotide
uccucugagggaaucagca

SEQ ID NO: 3275778 - RNA, 19 nt, Artificial Sequence
  Description of Artificial Sequence: Synthetic oligonucleotide
uuauggauagcauccugga

SEQ ID NO: 3275779 - RNA, 19 nt, Artificial Sequence
  Description of Artificial Sequence: Synthetic oligonucleotide
aguucuucuucucugagua

SEQ ID NO: 3275780 - RNA, 19 nt, Artificial Sequence
  Description of Artificial Sequence: Synthetic oligonucleotide
ugcagaugaggaaauucug

SEQ ID NO: 3275781 - RNA, 19 nt, Artificial Sequence
  Description of Artificial Sequence: Synthetic oligonucleotide
gaaggcauagcgcagcgca

SEQ ID NO: 3275782 - RNA, 19 nt, Artificial Sequence
  Description of Artificial Sequence: Synthetic oligonucleotide
auguccugugggcugaugg

SEQ ID NO: 3275783 - RNA, 19 nt, Artificial Sequence
  Description of Artificial Sequence: Synthetic oligonucleotide
uucuucucugaguacaccu

SEQ ID NO: 3275784 - RNA, 19 nt, Artificial Sequence
  Description of Artificial Sequence: Synthetic oligonucleotide
ugaggcaaauagcaucuca

SEQ ID NO: 3275785 - RNA, 19 nt, Artificial Sequence
  Description of Artificial Sequence: Synthetic oligonucleotide
ggugagaaguuauggauag

SEQ ID NO: 3275786 - RNA, 19 nt, Artificial Sequence
  Description of Artificial Sequence: Synthetic oligonucleotide
cuggacaauguccuguggg

SEQ ID NO: 3275787 - RNA, 19 nt, Artificial Sequence
  Description of Artificial Sequence: Synthetic oligonucleotide
uaugcuggugagaaguuau

SEQ ID NO: 3275788 - RNA, 19 nt, Artificial Sequence
  Description of Artificial Sequence: Synthetic oligonucleotide
uggacaauguccugugggc

SEQ ID NO: 3275789 - RNA, 19 nt, Artificial Sequence
  Description of Artificial Sequence: Synthetic oligonucleotide
agcauccuggacaaugucc

SEQ ID NO: 3275790 - RNA, 19 nt, Artificial Sequence
  Description of Artificial Sequence: Synthetic oligonucleotide
auucugguagccagcagcc

SEQ ID NO: 3275791 - RNA, 19 nt, Artificial Sequence
  Description of Artificial Sequence: Synthetic oligonucleotide
ucuucucugaguacaccug

SEQ ID NO: 3275792 - RNA, 19 nt, Artificial Sequence
  Description of Artificial Sequence: Synthetic oligonucleotide
uucucuauguugcggacuc

SEQ ID NO: 3275793 - RNA, 19 nt, Artificial Sequence
  Description of Artificial Sequence: Synthetic oligonucleotide
ugaguucuucuucucugag

SEQ ID NO: 3275794 - RNA, 19 nt, Artificial Sequence
  Description of Artificial Sequence: Synthetic oligonucleotide
uguguauacugcugguaug

SEQ ID NO: 3275795 - RNA, 19 nt, Artificial Sequence
  Description of Artificial Sequence: Synthetic oligonucleotide
uucuucuucucugaguaca

SEQ ID NO: 3275796 - RNA, 19 nt, Artificial Sequence
  Description of Artificial Sequence: Synthetic oligonucleotide
cuucucugaguacaccugg

SEQ ID NO: 3275797 - RNA, 19 nt, Artificial Sequence
  Description of Artificial Sequence: Synthetic oligonucleotide
ugcuggugagaaguuaugg

SEQ ID NO: 3275798 - RNA, 19 nt, Artificial Sequence
  Description of Artificial Sequence: Synthetic oligonucleotide
acugcugguaugcugguga

SEQ ID NO: 3275799 - RNA, 19 nt, Artificial Sequence
  Description of Artificial Sequence: Synthetic oligonucleotide
ugauggucuccuucaagcc

SEQ ID NO: 3275800 - RNA, 19 nt, Artificial Sequence
  Description of Artificial Sequence: Synthetic oligonucleotide
ugguaugcuggugagaagu

SEQ ID NO: 3275801 - RNA, 19 nt, Artificial Sequence
  Description of Artificial Sequence: Synthetic oligonucleotide
agagccacuggcugggccg

SEQ ID NO: 3275802 - RNA, 19 nt, Artificial Sequence
  Description of Artificial Sequence: Synthetic oligonucleotide
aaauucugguagccagcag

SEQ ID NO: 3275803 - RNA, 19 nt, Artificial Sequence
  Description of Artificial Sequence: Synthetic oligonucleotide
ugagggaaucagcaugcgc

SEQ ID NO: 3275804 - RNA, 19 nt, Artificial Sequence
  Description of Artificial Sequence: Synthetic oligonucleotide
gacaauguccugugggcug

SEQ ID NO: 3275805 - RNA, 19 nt, Artificial Sequence
  Description of Artificial Sequence: Synthetic oligonucleotide
uugcggacucuucuuaccc

SEQ ID NO: 3275806 - RNA, 19 nt, Artificial Sequence
  Description of Artificial Sequence: Synthetic oligonucleotide
augcgcuucucuauguugc

SEQ ID NO: 3275807 - RNA, 19 nt, Artificial Sequence
  Description of Artificial Sequence: Synthetic oligonucleotide
agcgcagcgcaagugaggc

SEQ ID NO: 3275808 - RNA, 19 nt, Artificial Sequence
  Description of Artificial Sequence: Synthetic oligonucleotide
uauggauagcauccuggac

SEQ ID NO: 3275809 - RNA, 19 nt, Artificial Sequence
  Description of Artificial Sequence: Synthetic oligonucleotide
aucucaaugcagaugagga

SEQ ID NO: 3275810 - RNA, 19 nt, Artificial Sequence
  Description of Artificial Sequence: Synthetic oligonucleotide
cucugagggaaucagcaug

SEQ ID NO: 3275811 - RNA, 19 nt, Artificial Sequence
  Description of Artificial Sequence: Synthetic oligonucleotide
aguuauggauagcauccug

SEQ ID NO: 3275812 - RNA, 19 nt, Artificial Sequence
  Description of Artificial Sequence: Synthetic oligonucleotide
caucucaaugcagaugagg

SEQ ID NO: 3275813 - RNA, 19 nt, Artificial Sequence
  Description of Artificial Sequence: Synthetic oligonucleotide
ugaugggugcucacccugg

SEQ ID NO: 3275814 - RNA, 19 nt, Artificial Sequence
  Description of Artificial Sequence: Synthetic oligonucleotide
ugaggaaauucugguagcc

SEQ ID NO: 3275815 - RNA, 19 nt, Artificial Sequence
  Description of Artificial Sequence: Synthetic oligonucleotide
ggcaaauagcaucucaaug

SEQ ID NO: 3275816 - RNA, 19 nt, Artificial Sequence
  Description of Artificial Sequence: Synthetic oligonucleotide
aaauagcaucucaaugcag

SEQ ID NO: 3275817 - RNA, 19 nt, Artificial Sequence
  Description of Artificial Sequence: Synthetic oligonucleotide
ugggugcucacccuggcca

SEQ ID NO: 3275818 - RNA, 19 nt, Artificial Sequence
  Description of Artificial Sequence: Synthetic oligonucleotide
uggugagaaguuauggaua

SEQ ID NO: 3275819 - RNA, 19 nt, Artificial Sequence
  Description of Artificial Sequence: Synthetic oligonucleotide
ucaaugcagaugaggaaau

SEQ ID NO: 3275820 - RNA, 19 nt, Artificial Sequence
  Description of Artificial Sequence: Synthetic oligonucleotide
gauaugcuuugcaugggug

SEQ ID NO: 3275821 - RNA, 19 nt, Artificial Sequence
  Description of Artificial Sequence: Synthetic oligonucleotide
uggauagcauccuggacaa

SEQ ID NO: 3275822 - RNA, 19 nt, Artificial Sequence
  Description of Artificial Sequence: Synthetic oligonucleotide
caaauagcaucucaaugca

SEQ ID NO: 3275823 - RNA, 19 nt, Artificial Sequence
  Description of Artificial Sequence: Synthetic oligonucleotide
gauggucuccuucaagcca

SEQ ID NO: 3275824 - RNA, 19 nt, Artificial Sequence
  Description of Artificial Sequence: Synthetic oligonucleotide
cugcuguguauacugcugg

SEQ ID NO: 3275825 - RNA, 19 nt, Artificial Sequence
  Description of Artificial Sequence: Synthetic oligonucleotide
gucuccuucaagccacugg

SEQ ID NO: 3275826 - RNA, 19 nt, Artificial Sequence
  Description of Artificial Sequence: Synthetic oligonucleotide
ucuucuucucugaguacac

SEQ ID NO: 3275827 - RNA, 19 nt, Artificial Sequence
  Description of Artificial Sequence: Synthetic oligonucleotide
agugaggcaaauagcaucu

SEQ ID NO: 3275828 - RNA, 19 nt, Artificial Sequence
  Description of Artificial Sequence: Synthetic oligonucleotide
ucucugaguacaccuggcu

SEQ ID NO: 3275829 - RNA, 19 nt, Artificial Sequence
  Description of Artificial Sequence: Synthetic oligonucleotide
cuuugcaugggugcuggcg

SEQ ID NO: 3275830 - RNA, 19 nt, Artificial Sequence
  Description of Artificial Sequence: Synthetic oligonucleotide
guguauacugcugguaugc

SEQ ID NO: 3275831 - RNA, 19 nt, Artificial Sequence
  Description of Artificial Sequence: Synthetic oligonucleotide
aggagcuucguguguggac

SEQ ID NO: 3275832 - RNA, 19 nt, Artificial Sequence
  Description of Artificial Sequence: Synthetic oligonucleotide
cucuacagguccucugagg

SEQ ID NO: 3275833 - RNA, 19 nt, Artificial Sequence
  Description of Artificial Sequence: Synthetic oligonucleotide
guauacugcugguaugcug

SEQ ID NO: 3275834 - RNA, 19 nt, Artificial Sequence
  Description of Artificial Sequence: Synthetic oligonucleotide
uucucugaguacaccuggc

SEQ ID NO: 3275835 - RNA, 19 nt, Artificial Sequence
  Description of Artificial Sequence: Synthetic oligonucleotide
auggucuccuucaagccac

SEQ ID NO: 3275836 - RNA, 19 nt, Artificial Sequence
  Description of Artificial Sequence: Synthetic oligonucleotide
uucguguguggacugcugu

SEQ ID NO: 3275837 - RNA, 19 nt, Artificial Sequence
  Description of Artificial Sequence: Synthetic oligonucleotide
uccuucaagccacuggaua

SEQ ID NO: 3275838 - RNA, 19 nt, Artificial Sequence
  Description of Artificial Sequence: Synthetic oligonucleotide
ucucaaugcagaugaggaa

SEQ ID NO: 3275839 - RNA, 19 nt, Artificial Sequence
  Description of Artificial Sequence: Synthetic oligonucleotide
uaugcuuugcaugggugcu

SEQ ID NO: 3275840 - RNA, 19 nt, Artificial Sequence
  Description of Artificial Sequence: Synthetic oligonucleotide
gaaauucugguagccagca

SEQ ID NO: 3275841 - RNA, 19 nt, Artificial Sequence
  Description of Artificial Sequence: Synthetic oligonucleotide
uggugaguucuucuucucu

SEQ ID NO: 3275842 - RNA, 19 nt, Artificial Sequence
  Description of Artificial Sequence: Synthetic oligonucleotide
guagccagcagccagggua

SEQ ID NO: 3275843 - RNA, 19 nt, Artificial Sequence
  Description of Artificial Sequence: Synthetic oligonucleotide
gagggugggguguugggug

SEQ ID NO: 3275844 - RNA, 19 nt, Artificial Sequence
  Description of Artificial Sequence: Synthetic oligonucleotide
ugcuuugcaugggugcugg

SEQ ID NO: 3275845 - RNA, 19 nt, Artificial Sequence
  Description of Artificial Sequence: Synthetic oligonucleotide
cucugaguacaccuggcug

SEQ ID NO: 3275846 - RNA, 19 nt, Artificial Sequence
  Description of Artificial Sequence: Synthetic oligonucleotide
ugcgcuucucuauguugcg

SEQ ID NO: 3275847 - RNA, 19 nt, Artificial Sequence
  Description of Artificial Sequence: Synthetic oligonucleotide
aaucagcaugcgcuucucu

SEQ ID NO: 3275848 - RNA, 19 nt, Artificial Sequence
  Description of Artificial Sequence: Synthetic oligonucleotide
gcgcaagugaggcaaauag

SEQ ID NO: 3275849 - RNA, 19 nt, Artificial Sequence
  Description of Artificial Sequence: Synthetic oligonucleotide
cuaauuucaaacuucaccc

SEQ ID NO: 3275850 - RNA, 19 nt, Artificial Sequence
  Description of Artificial Sequence: Synthetic oligonucleotide
auuuaguuuauccacugcc

SEQ ID NO: 3275851 - RNA, 19 nt, Artificial Sequence
  Description of Artificial Sequence: Synthetic oligonucleotide
uuuaauuuccuucauguca

SEQ ID NO: 3275852 - RNA, 19 nt, Artificial Sequence
  Description of Artificial Sequence: Synthetic oligonucleotide
aauaacuuggccaucauca

SEQ ID NO: 3275853 - RNA, 19 nt, Artificial Sequence
  Description of Artificial Sequence: Synthetic oligonucleotide
cauuauuugcagcagagcc

SEQ ID NO: 3275854 - RNA, 19 nt, Artificial Sequence
  Description of Artificial Sequence: Synthetic oligonucleotide
aacuuggccaucaucaggc

SEQ ID NO: 3275855 - RNA, 19 nt, Artificial Sequence
  Description of Artificial Sequence: Synthetic oligonucleotide
uuaauuuccuucaugucac

SEQ ID NO: 3275856 - RNA, 19 nt, Artificial Sequence
  Description of Artificial Sequence: Synthetic oligonucleotide
ugucaaagcacucaggguc

SEQ ID NO: 3275857 - RNA, 19 nt, Artificial Sequence
  Description of Artificial Sequence: Synthetic oligonucleotide
caaaguaucauuuaguuua

SEQ ID NO: 3275858 - RNA, 19 nt, Artificial Sequence
  Description of Artificial Sequence: Synthetic oligonucleotide
aacccucugguucugggcc

SEQ ID NO: 3275859 - RNA, 19 nt, Artificial Sequence
  Description of Artificial Sequence: Synthetic oligonucleotide
uuuauuggcccacaaugag

SEQ ID NO: 3275860 - RNA, 19 nt, Artificial Sequence
  Description of Artificial Sequence: Synthetic oligonucleotide
uuccaucacaauaacuugg

SEQ ID NO: 3275861 - RNA, 19 nt, Artificial Sequence
  Description of Artificial Sequence: Synthetic oligonucleotide
aauuucaaacuucaccccu

SEQ ID NO: 3275862 - RNA, 19 nt, Artificial Sequence
  Description of Artificial Sequence: Synthetic oligonucleotide
gaaagaaacccucugguuc

SEQ ID NO: 3275863 - RNA, 19 nt, Artificial Sequence
  Description of Artificial Sequence: Synthetic oligonucleotide
aaagaaacccucugguucu

SEQ ID NO: 3275864 - RNA, 19 nt, Artificial Sequence
  Description of Artificial Sequence: Synthetic oligonucleotide
ucuucgugcuccuuuauag

SEQ ID NO: 3275865 - RNA, 19 nt, Artificial Sequence
  Description of Artificial Sequence: Synthetic oligonucleotide
ucaaacuucaccccucucu

SEQ ID NO: 3275866 - RNA, 19 nt, Artificial Sequence
  Description of Artificial Sequence: Synthetic oligonucleotide
ucuaguaucccacugccuc

SEQ ID NO: 3275867 - RNA, 19 nt, Artificial Sequence
  Description of Artificial Sequence: Synthetic oligonucleotide
uuuaguuuauccacugccu

SEQ ID NO: 3275868 - RNA, 19 nt, Artificial Sequence
  Description of Artificial Sequence: Synthetic oligonucleotide
uauuggcccacaaugagcu

SEQ ID NO: 3275869 - RNA, 19 nt, Artificial Sequence
  Description of Artificial Sequence: Synthetic oligonucleotide
cuagcuguuuccaauauuc

SEQ ID NO: 3275870 - RNA, 19 nt, Artificial Sequence
  Description of Artificial Sequence: Synthetic oligonucleotide
uguguaaucuucgugcucc

SEQ ID NO: 3275871 - RNA, 19 nt, Artificial Sequence
  Description of Artificial Sequence: Synthetic oligonucleotide
aaacccucugguucugggc

SEQ ID NO: 3275872 - RNA, 19 nt, Artificial Sequence
  Description of Artificial Sequence: Synthetic oligonucleotide
cucgggaauacacuuaucc

SEQ ID NO: 3275873 - RNA, 19 nt, Artificial Sequence
  Description of Artificial Sequence: Synthetic oligonucleotide
ucuucaaagcucaaaguau

SEQ ID NO: 3275874 - RNA, 19 nt, Artificial Sequence
  Description of Artificial Sequence: Synthetic oligonucleotide
gcuaauuucaaacuucacc

SEQ ID NO: 3275875 - RNA, 19 nt, Artificial Sequence
  Description of Artificial Sequence: Synthetic oligonucleotide
acuuauccaggcuaauuuc

SEQ ID NO: 3275876 - RNA, 19 nt, Artificial Sequence
  Description of Artificial Sequence: Synthetic oligonucleotide
auuguugccggauuuccuc

SEQ ID NO: 3275877 - RNA, 19 nt, Artificial Sequence
  Description of Artificial Sequence: Synthetic oligonucleotide
uuuauaggucuacacuccc

SEQ ID NO: 3275878 - RNA, 19 nt, Artificial Sequence
  Description of Artificial Sequence: Synthetic oligonucleotide
uccucaaaggcucugucug

SEQ ID NO: 3275879 - RNA, 19 nt, Artificial Sequence
  Description of Artificial Sequence: Synthetic oligonucleotide
uccuuuauaggucuacacu

SEQ ID NO: 3275880 - RNA, 19 nt, Artificial Sequence
  Description of Artificial Sequence: Synthetic oligonucleotide
uuauaggucuacacucccg

SEQ ID NO: 3275881 - RNA, 19 nt, Artificial Sequence
  Description of Artificial Sequence: Synthetic oligonucleotide
cuuuauaggucuacacucc

SEQ ID NO: 3275882 - RNA, 19 nt, Artificial Sequence
  Description of Artificial Sequence: Synthetic oligonucleotide
agcucaaaguaucauuuag

SEQ ID NO: 3275883 - RNA, 19 nt, Artificial Sequence
  Description of Artificial Sequence: Synthetic oligonucleotide
uaacuuggccaucaucagg

SEQ ID NO: 3275884 - RNA, 19 nt, Artificial Sequence
  Description of Artificial Sequence: Synthetic oligonucleotide
aucacaauaacuuggccau

SEQ ID NO: 3275885 - RNA, 19 nt, Artificial Sequence
  Description of Artificial Sequence: Synthetic oligonucleotide
uuauuggcccacaaugagc

SEQ ID NO: 3275886 - RNA, 19 nt, Artificial Sequence
  Description of Artificial Sequence: Synthetic oligonucleotide
uauaggucuacacucccga

SEQ ID NO: 3275887 - RNA, 19 nt, Artificial Sequence
  Description of Artificial Sequence: Synthetic oligonucleotide
uaauuucaaacuucacccc

SEQ ID NO: 3275888 - RNA, 19 nt, Artificial Sequence
  Description of Artificial Sequence: Synthetic oligonucleotide
uuggacgacgucuuccucg

SEQ ID NO: 3275889 - RNA, 19 nt, Artificial Sequence
  Description of Artificial Sequence: Synthetic oligonucleotide
uuuccuucaugucacugug

SEQ ID NO: 3275890 - RNA, 19 nt, Artificial Sequence
  Description of Artificial Sequence: Synthetic oligonucleotide
aaugagcuacugcaggugu

SEQ ID NO: 3275891 - RNA, 19 nt, Artificial Sequence
  Description of Artificial Sequence: Synthetic oligonucleotide
uccaucacaauaacuuggc

SEQ ID NO: 3275892 - RNA, 19 nt, Artificial Sequence
  Description of Artificial Sequence: Synthetic oligonucleotide
ucauuuaguuuauccacug

SEQ ID NO: 3275893 - RNA, 19 nt, Artificial Sequence
  Description of Artificial Sequence: Synthetic oligonucleotide
ucuggaaagaaacccucug

SEQ ID NO: 3275894 - RNA, 19 nt, Artificial Sequence
  Description of Artificial Sequence: Synthetic oligonucleotide
uuauuugcagcagagccug

SEQ ID NO: 3275895 - RNA, 19 nt, Artificial Sequence
  Description of Artificial Sequence: Synthetic oligonucleotide
uuggccaucaucaggcaug

SEQ ID NO: 3275896 - RNA, 19 nt, Artificial Sequence
  Description of Artificial Sequence: Synthetic oligonucleotide
aacuucaccccucucuuca

SEQ ID NO: 3275897 - RNA, 19 nt, Artificial Sequence
  Description of Artificial Sequence: Synthetic oligonucleotide
aggucuacacucccgaauc

SEQ ID NO: 3275898 - RNA, 19 nt, Artificial Sequence
  Description of Artificial Sequence: Synthetic oligonucleotide
guugccauuauuugcagca

SEQ ID NO: 3275899 - RNA, 19 nt, Artificial Sequence
  Description of Artificial Sequence: Synthetic oligonucleotide
cacagaguuccucaaaggc

SEQ ID NO: 3275900 - RNA, 19 nt, Artificial Sequence
  Description of Artificial Sequence: Synthetic oligonucleotide
auuuucuggacugccuucc

SEQ ID NO: 3275901 - RNA, 19 nt, Artificial Sequence
  Description of Artificial Sequence: Synthetic oligonucleotide
agcaacgguaucuggaaag

SEQ ID NO: 3275902 - RNA, 19 nt, Artificial Sequence
  Description of Artificial Sequence: Synthetic oligonucleotide
cuucaaagcucaaaguauc

SEQ ID NO: 3275903 - RNA, 19 nt, Artificial Sequence
  Description of Artificial Sequence: Synthetic oligonucleotide
uuaguuuauccacugccuc

SEQ ID NO: 3275904 - RNA, 19 nt, Artificial Sequence
  Description of Artificial Sequence: Synthetic oligonucleotide
acgguaucuggaaagaaac

SEQ ID NO: 3275905 - RNA, 19 nt, Artificial Sequence
  Description of Artificial Sequence: Synthetic oligonucleotide
cuucaucccgucuucaaag

SEQ ID NO: 3275906 - RNA, 19 nt, Artificial Sequence
  Description of Artificial Sequence: Synthetic oligonucleotide
acugugguauuguugccgg

SEQ ID NO: 3275907 - RNA, 19 nt, Artificial Sequence
  Description of Artificial Sequence: Synthetic oligonucleotide
uuugcagcagagccugagg

SEQ ID NO: 3275908 - RNA, 19 nt, Artificial Sequence
  Description of Artificial Sequence: Synthetic oligonucleotide
aaagcucaaaguaucauuu

SEQ ID NO: 3275909 - RNA, 19 nt, Artificial Sequence
  Description of Artificial Sequence: Synthetic oligonucleotide
uucaaagcucaaaguauca

SEQ ID NO: 3275910 - RNA, 19 nt, Artificial Sequence
  Description of Artificial Sequence: Synthetic oligonucleotide
gcugucaaagcacucaggg

SEQ ID NO: 3275911 - RNA, 19 nt, Artificial Sequence
  Description of Artificial Sequence: Synthetic oligonucleotide
caucacaauaacuuggcca

SEQ ID NO: 3275912 - RNA, 19 nt, Artificial Sequence
  Description of Artificial Sequence: Synthetic oligonucleotide
cacaaugagcuacugcagg

SEQ ID NO: 3275913 - RNA, 19 nt, Artificial Sequence
  Description of Artificial Sequence: Synthetic oligonucleotide
cauccucucuuuaauuucc

SEQ ID NO: 3275914 - RNA, 19 nt, Artificial Sequence
  Description of Artificial Sequence: Synthetic oligonucleotide
auuuccuucaugucacugu

SEQ ID NO: 3275915 - RNA, 19 nt, Artificial Sequence
  Description of Artificial Sequence: Synthetic oligonucleotide
uccuucaugucacuguggu

SEQ ID NO: 3275916 - RNA, 19 nt, Artificial Sequence
  Description of Artificial Sequence: Synthetic oligonucleotide
auaacuuggccaucaucag

SEQ ID NO: 3275917 - RNA, 19 nt, Artificial Sequence
  Description of Artificial Sequence: Synthetic oligonucleotide
ugcucuaguaucccacugc

SEQ ID NO: 3275918 - RNA, 19 nt, Artificial Sequence
  Description of Artificial Sequence: Synthetic oligonucleotide
uguguguugcugucaaagc

SEQ ID NO: 3275919 - RNA, 19 nt, Artificial Sequence
  Description of Artificial Sequence: Synthetic oligonucleotide
aaacuucaccccucucuuc

SEQ ID NO: 3275920 - RNA, 19 nt, Artificial Sequence
  Description of Artificial Sequence: Synthetic oligonucleotide
uaucuggaaagaaacccuc

SEQ ID NO: 3275921 - RNA, 19 nt, Artificial Sequence
  Description of Artificial Sequence: Synthetic oligonucleotide
cuuccaucacaauaacuug

SEQ ID NO: 3275922 - RNA, 19 nt, Artificial Sequence
  Description of Artificial Sequence: Synthetic oligonucleotide
uuauccacugccucuuucu

SEQ ID NO: 3275923 - RNA, 19 nt, Artificial Sequence
  Description of Artificial Sequence: Synthetic oligonucleotide
gguaucuggaaagaaaccc

SEQ ID NO: 3275924 - RNA, 19 nt, Artificial Sequence
  Description of Artificial Sequence: Synthetic oligonucleotide
ucaaaguaucauuuaguuu

SEQ ID NO: 3275925 - RNA, 19 nt, Artificial Sequence
  Description of Artificial Sequence: Synthetic oligonucleotide
uucugggccacagaguucc

SEQ ID NO: 3275926 - RNA, 19 nt, Artificial Sequence
  Description of Artificial Sequence: Synthetic oligonucleotide
uuucucuuggacgacgucu

SEQ ID NO: 3275927 - RNA, 19 nt, Artificial Sequence
  Description of Artificial Sequence: Synthetic oligonucleotide
ucgggaauacacuuaucca

SEQ ID NO: 3275928 - RNA, 19 nt, Artificial Sequence
  Description of Artificial Sequence: Synthetic oligonucleotide
agguggaggugacaucugc

SEQ ID NO: 3275929 - RNA, 19 nt, Artificial Sequence
  Description of Artificial Sequence: Synthetic oligonucleotide
cacucccgaaucuucaucc

SEQ ID NO: 3275930 - RNA, 19 nt, Artificial Sequence
  Description of Artificial Sequence: Synthetic oligonucleotide
aauuuccuucaugucacug

SEQ ID NO: 3275931 - RNA, 19 nt, Artificial Sequence
  Description of Artificial Sequence: Synthetic oligonucleotide
uucgugcuccuuuauaggu

SEQ ID NO: 3275932 - RNA, 19 nt, Artificial Sequence
  Description of Artificial Sequence: Synthetic oligonucleotide
uggacugccuuccaucaca

SEQ ID NO: 3275933 - RNA, 19 nt, Artificial Sequence
  Description of Artificial Sequence: Synthetic oligonucleotide
cuucccauuuucuggacug

SEQ ID NO: 3275934 - RNA, 19 nt, Artificial Sequence
  Description of Artificial Sequence: Synthetic oligonucleotide
uccaggcuaauuucaaacu

SEQ ID NO: 3275935 - RNA, 19 nt, Artificial Sequence
  Description of Artificial Sequence: Synthetic oligonucleotide
ggcauggugggacaggugg

SEQ ID NO: 3275936 - RNA, 19 nt, Artificial Sequence
  Description of Artificial Sequence: Synthetic oligonucleotide
uaguuuauccacugccucu

SEQ ID NO: 3275937 - RNA, 19 nt, Artificial Sequence
  Description of Artificial Sequence: Synthetic oligonucleotide
cuuuaauuuccuucauguc

SEQ ID NO: 3275938 - RNA, 19 nt, Artificial Sequence
  Description of Artificial Sequence: Synthetic oligonucleotide
ucuuccucgggaauacacu

SEQ ID NO: 3275939 - RNA, 19 nt, Artificial Sequence
  Description of Artificial Sequence: Synthetic oligonucleotide
uucagcucucuccccaucc

SEQ ID NO: 3275940 - RNA, 19 nt, Artificial Sequence
  Description of Artificial Sequence: Synthetic oligonucleotide
uuucaaacuucaccccucu

SEQ ID NO: 3275941 - RNA, 19 nt, Artificial Sequence
  Description of Artificial Sequence: Synthetic oligonucleotide
acaaugagcuacugcaggu

SEQ ID NO: 3275942 - RNA, 19 nt, Artificial Sequence
  Description of Artificial Sequence: Synthetic oligonucleotide
aucacaccaccacugcuuc

SEQ ID NO: 3275943 - RNA, 19 nt, Artificial Sequence
  Description of Artificial Sequence: Synthetic oligonucleotide
ccuuuauuggcccacaaug

SEQ ID NO: 3275944 - RNA, 19 nt, Artificial Sequence
  Description of Artificial Sequence: Synthetic oligonucleotide
cuucgugcuccuuuauagg

SEQ ID NO: 3275945 - RNA, 19 nt, Artificial Sequence
  Description of Artificial Sequence: Synthetic oligonucleotide
uucuccacagcaacgguau

SEQ ID NO: 3275946 - RNA, 19 nt, Artificial Sequence
  Description of Artificial Sequence: Synthetic oligonucleotide
uagcuguuuccaauauucc

SEQ ID NO: 3275947 - RNA, 19 nt, Artificial Sequence
  Description of Artificial Sequence: Synthetic oligonucleotide
cuuuauuggcccacaauga

SEQ ID NO: 3275948 - RNA, 19 nt, Artificial Sequence
  Description of Artificial Sequence: Synthetic oligonucleotide
ucuggacugccuuccauca

SEQ ID NO: 3275949 - RNA, 19 nt, Artificial Sequence
  Description of Artificial Sequence: Synthetic oligonucleotide
aagacauagucuaauaucc

SEQ ID NO: 3275950 - RNA, 19 nt, Artificial Sequence
  Description of Artificial Sequence: Synthetic oligonucleotide
uguuaaaagaacaagaauu

SEQ ID NO: 3275951 - RNA, 19 nt, Artificial Sequence
  Description of Artificial Sequence: Synthetic oligonucleotide
aaaagaacaagaauuggac

SEQ ID NO: 3275952 - RNA, 19 nt, Artificial Sequence
  Description of Artificial Sequence: Synthetic oligonucleotide
aauaucuucgaguuccagg

SEQ ID NO: 3275953 - RNA, 19 nt, Artificial Sequence
  Description of Artificial Sequence: Synthetic oligonucleotide
agucuaauauccuugcacc

SEQ ID NO: 3275954 - RNA, 19 nt, Artificial Sequence
  Description of Artificial Sequence: Synthetic oligonucleotide
uguuguuaaaagaacaaga

SEQ ID NO: 3275955 - RNA, 19 nt, Artificial Sequence
  Description of Artificial Sequence: Synthetic oligonucleotide
uaaaagaacaagaauugga

SEQ ID NO: 3275956 - RNA, 19 nt, Artificial Sequence
  Description of Artificial Sequence: Synthetic oligonucleotide
aagcagaugaucuucagca

SEQ ID NO: 3275957 - RNA, 19 nt, Artificial Sequence
  Description of Artificial Sequence: Synthetic oligonucleotide
agcaguuugucugagagcc

SEQ ID NO: 3275958 - RNA, 19 nt, Artificial Sequence
  Description of Artificial Sequence: Synthetic oligonucleotide
acauguugaagacauaguc

SEQ ID NO: 3275959 - RNA, 19 nt, Artificial Sequence
  Description of Artificial Sequence: Synthetic oligonucleotide
aagaacaagaauuggacau

SEQ ID NO: 3275960 - RNA, 19 nt, Artificial Sequence
  Description of Artificial Sequence: Synthetic oligonucleotide
aagaacaccugucuccagc

SEQ ID NO: 3275961 - RNA, 19 nt, Artificial Sequence
  Description of Artificial Sequence: Synthetic oligonucleotide
acaagaauuggacaugagg

SEQ ID NO: 3275962 - RNA, 19 nt, Artificial Sequence
  Description of Artificial Sequence: Synthetic oligonucleotide
aaagaacaagaauuggaca

SEQ ID NO: 3275963 - RNA, 19 nt, Artificial Sequence
  Description of Artificial Sequence: Synthetic oligonucleotide
ugcagcugaaucuuguugg

SEQ ID NO: 3275964 - RNA, 19 nt, Artificial Sequence
  Description of Artificial Sequence: Synthetic oligonucleotide
uuaaaagaacaagaauugg

SEQ ID NO: 3275965 - RNA, 19 nt, Artificial Sequence
  Description of Artificial Sequence: Synthetic oligonucleotide
aaucuuguuggugaagaac

SEQ ID NO: 3275966 - RNA, 19 nt, Artificial Sequence
  Description of Artificial Sequence: Synthetic oligonucleotide
auauuucuuguccuucugc

SEQ ID NO: 3275967 - RNA, 19 nt, Artificial Sequence
  Description of Artificial Sequence: Synthetic oligonucleotide
cuaagcauauuucuugucc

SEQ ID NO: 3275968 - RNA, 19 nt, Artificial Sequence
  Description of Artificial Sequence: Synthetic oligonucleotide
guuaaaagaacaagaauug

SEQ ID NO: 3275969 - RNA, 19 nt, Artificial Sequence
  Description of Artificial Sequence: Synthetic oligonucleotide
aaugagucacacuugcaca

SEQ ID NO: 3275970 - RNA, 19 nt, Artificial Sequence
  Description of Artificial Sequence: Synthetic oligonucleotide
gaagacauagucuaauauc

SEQ ID NO: 3275971 - RNA, 19 nt, Artificial Sequence
  Description of Artificial Sequence: Synthetic oligonucleotide
ucaaauuucccuucgcaca

SEQ ID NO: 3275972 - RNA, 19 nt, Artificial Sequence
  Description of Artificial Sequence: Synthetic oligonucleotide
cuugaugucugagagagcc

SEQ ID NO: 3275973 - RNA, 19 nt, Artificial Sequence
  Description of Artificial Sequence: Synthetic oligonucleotide
uuucccuucgcacauguug

SEQ ID NO: 3275974 - RNA, 19 nt, Artificial Sequence
  Description of Artificial Sequence: Synthetic oligonucleotide
caagaauuggacaugagga

SEQ ID NO: 3275975 - RNA, 19 nt, Artificial Sequence
  Description of Artificial Sequence: Synthetic oligonucleotide
agugauuccaggaaucagc

SEQ ID NO: 3275976 - RNA, 19 nt, Artificial Sequence
  Description of Artificial Sequence: Synthetic oligonucleotide
auaucuucgaguuccagga

SEQ ID NO: 3275977 - RNA, 19 nt, Artificial Sequence
  Description of Artificial Sequence: Synthetic oligonucleotide
ugcuugaugucugagagag

SEQ ID NO: 3275978 - RNA, 19 nt, Artificial Sequence
  Description of Artificial Sequence: Synthetic oligonucleotide
uuuucaagugauuccagga

SEQ ID NO: 3275979 - RNA, 19 nt, Artificial Sequence
  Description of Artificial Sequence: Synthetic oligonucleotide
uauuucuuguccuucugcc

SEQ ID NO: 3275980 - RNA, 19 nt, Artificial Sequence
  Description of Artificial Sequence: Synthetic oligonucleotide
uucagcagcaguuugucug

SEQ ID NO: 3275981 - RNA, 19 nt, Artificial Sequence
  Description of Artificial Sequence: Synthetic oligonucleotide
uagucuaauauccuugcac

SEQ ID NO: 3275982 - RNA, 19 nt, Artificial Sequence
  Description of Artificial Sequence: Synthetic oligonucleotide
ucugcucccacaaugaguc

SEQ ID NO: 3275983 - RNA, 19 nt, Artificial Sequence
  Description of Artificial Sequence: Synthetic oligonucleotide
uuguuggugaagaacaccu

SEQ ID NO: 3275984 - RNA, 19 nt, Artificial Sequence
  Description of Artificial Sequence: Synthetic oligonucleotide
uugcaaaccugcuugaugu

SEQ ID NO: 3275985 - RNA, 19 nt, Artificial Sequence
  Description of Artificial Sequence: Synthetic oligonucleotide
gagacggugucacaggccg

SEQ ID NO: 3275986 - RNA, 19 nt, Artificial Sequence
  Description of Artificial Sequence: Synthetic oligonucleotide
agaacaccugucuccagcc

SEQ ID NO: 3275987 - RNA, 19 nt, Artificial Sequence
  Description of Artificial Sequence: Synthetic oligonucleotide
uuguuaaaagaacaagaau

SEQ ID NO: 3275988 - RNA, 19 nt, Artificial Sequence
  Description of Artificial Sequence: Synthetic oligonucleotide
acuaucugcucccacaaug

SEQ ID NO: 3275989 - RNA, 19 nt, Artificial Sequence
  Description of Artificial Sequence: Synthetic oligonucleotide
uuugcaaaccugcuugaug

SEQ ID NO: 3275990 - RNA, 19 nt, Artificial Sequence
  Description of Artificial Sequence: Synthetic oligonucleotide
agaagcacgucuguggccc

SEQ ID NO: 3275991 - RNA, 19 nt, Artificial Sequence
  Description of Artificial Sequence: Synthetic oligonucleotide
ucuguggccccucuggagg

SEQ ID NO: 3275992 - RNA, 19 nt, Artificial Sequence
  Description of Artificial Sequence: Synthetic oligonucleotide
ugaagacauagucuaauau

SEQ ID NO: 3275993 - RNA, 19 nt, Artificial Sequence
  Description of Artificial Sequence: Synthetic oligonucleotide
ucgaguuccaggaagcaga

SEQ ID NO: 3275994 - RNA, 19 nt, Artificial Sequence
  Description of Artificial Sequence: Synthetic oligonucleotide
agcuuugcaaaccugcuug

SEQ ID NO: 3275995 - RNA, 19 nt, Artificial Sequence
  Description of Artificial Sequence: Synthetic oligonucleotide
cauagucuaauauccuugc

SEQ ID NO: 3275996 - RNA, 19 nt, Artificial Sequence
  Description of Artificial Sequence: Synthetic oligonucleotide
uccaggaagcagaugaucu

SEQ ID NO: 3275997 - RNA, 19 nt, Artificial Sequence
  Description of Artificial Sequence: Synthetic oligonucleotide
uuggacaugaggagaagca

SEQ ID NO: 3275998 - RNA, 19 nt, Artificial Sequence
  Description of Artificial Sequence: Synthetic oligonucleotide
ugaacuaucugcucccaca

SEQ ID NO: 3275999 - RNA, 19 nt, Artificial Sequence
  Description of Artificial Sequence: Synthetic oligonucleotide
uaagcauauuucuuguccu

SEQ ID NO: 3276000 - RNA, 19 nt, Artificial Sequence
  Description of Artificial Sequence: Synthetic oligonucleotide
aggagaagcacgucugugg

SEQ ID NO: 3276001 - RNA, 19 nt, Artificial Sequence
  Description of Artificial Sequence: Synthetic oligonucleotide
uuucaagugauuccaggaa

SEQ ID NO: 3276002 - RNA, 19 nt, Artificial Sequence
  Description of Artificial Sequence: Synthetic oligonucleotide
auuggacaugaggagaagc

SEQ ID NO: 3276003 - RNA, 19 nt, Artificial Sequence
  Description of Artificial Sequence: Synthetic oligonucleotide
uccagguagucaaauuucc

SEQ ID NO: 3276004 - RNA, 19 nt, Artificial Sequence
  Description of Artificial Sequence: Synthetic oligonucleotide
caaugagucacacuugcac

SEQ ID NO: 3276005 - RNA, 19 nt, Artificial Sequence
  Description of Artificial Sequence: Synthetic oligonucleotide
ugaaucuuguuggugaaga

SEQ ID NO: 3276006 - RNA, 19 nt, Artificial Sequence
  Description of Artificial Sequence: Synthetic oligonucleotide
ucuucgaguuccaggaagc

SEQ ID NO: 3276007 - RNA, 19 nt, Artificial Sequence
  Description of Artificial Sequence: Synthetic oligonucleotide
auguugaagacauagucua

SEQ ID NO: 3276008 - RNA, 19 nt, Artificial Sequence
  Description of Artificial Sequence: Synthetic oligonucleotide
gugaagaacaccugucucc

SEQ ID NO: 3276009 - RNA, 19 nt, Artificial Sequence
  Description of Artificial Sequence: Synthetic oligonucleotide
augagucacacuugcacag

SEQ ID NO: 3276010 - RNA, 19 nt, Artificial Sequence
  Description of Artificial Sequence: Synthetic oligonucleotide
gaagcagaugaucuucagc

SEQ ID NO: 3276011 - RNA, 19 nt, Artificial Sequence
  Description of Artificial Sequence: Synthetic oligonucleotide
auuccaggaaucagcaacc

SEQ ID NO: 3276012 - RNA, 19 nt, Artificial Sequence
  Description of Artificial Sequence: Synthetic oligonucleotide
cacaaugagucacacuugc

SEQ ID NO: 3276013 - RNA, 19 nt, Artificial Sequence
  Description of Artificial Sequence: Synthetic oligonucleotide
aauuucccuucgcacaugu

SEQ ID NO: 3276014 - RNA, 19 nt, Artificial Sequence
  Description of Artificial Sequence: Synthetic oligonucleotide
guagucaaauuucccuucg

SEQ ID NO: 3276015 - RNA, 19 nt, Artificial Sequence
  Description of Artificial Sequence: Synthetic oligonucleotide
cacagcuuugcaaaccugc

SEQ ID NO: 3276016 - RNA, 19 nt, Artificial Sequence
  Description of Artificial Sequence: Synthetic oligonucleotide
uucaagugauuccaggaau

SEQ ID NO: 3276017 - RNA, 19 nt, Artificial Sequence
  Description of Artificial Sequence: Synthetic oligonucleotide
agcugaaucuuguugguga

SEQ ID NO: 3276018 - RNA, 19 nt, Artificial Sequence
  Description of Artificial Sequence: Synthetic oligonucleotide
ucaagugauuccaggaauc

SEQ ID NO: 3276019 - RNA, 19 nt, Artificial Sequence
  Description of Artificial Sequence: Synthetic oligonucleotide
aucuucgaguuccaggaag

SEQ ID NO: 3276020 - RNA, 19 nt, Artificial Sequence
  Description of Artificial Sequence: Synthetic oligonucleotide
agagccuggcaauaucuuc

SEQ ID NO: 3276021 - RNA, 19 nt, Artificial Sequence
  Description of Artificial Sequence: Synthetic oligonucleotide
agucaaauuucccuucgca

SEQ ID NO: 3276022 - RNA, 19 nt, Artificial Sequence
  Description of Artificial Sequence: Synthetic oligonucleotide
ugagagccgcuccagguag

SEQ ID NO: 3276023 - RNA, 19 nt, Artificial Sequence
  Description of Artificial Sequence: Synthetic oligonucleotide
acuugcacagcuuugcaaa

SEQ ID NO: 3276024 - RNA, 19 nt, Artificial Sequence
  Description of Artificial Sequence: Synthetic oligonucleotide
ggcaauaucuucgaguucc

SEQ ID NO: 3276025 - RNA, 19 nt, Artificial Sequence
  Description of Artificial Sequence: Synthetic oligonucleotide
uuugucugagagccgcucc

SEQ ID NO: 3276026 - RNA, 19 nt, Artificial Sequence
  Description of Artificial Sequence: Synthetic oligonucleotide
gagccuggcaauaucuucg

SEQ ID NO: 3276027 - RNA, 19 nt, Artificial Sequence
  Description of Artificial Sequence: Synthetic oligonucleotide
gucaaauuucccuucgcac

SEQ ID NO: 3276028 - RNA, 19 nt, Artificial Sequence
  Description of Artificial Sequence: Synthetic oligonucleotide
aacaccugucuccagccca

SEQ ID NO: 3276029 - RNA, 19 nt, Artificial Sequence
  Description of Artificial Sequence: Synthetic oligonucleotide
guuguuaaaagaacaagaa

SEQ ID NO: 3276030 - RNA, 19 nt, Artificial Sequence
  Description of Artificial Sequence: Synthetic oligonucleotide
uggugaagaacaccugucu

SEQ ID NO: 3276031 - RNA, 19 nt, Artificial Sequence
  Description of Artificial Sequence: Synthetic oligonucleotide
ucgcacauguugaagacau

SEQ ID NO: 3276032 - RNA, 19 nt, Artificial Sequence
  Description of Artificial Sequence: Synthetic oligonucleotide
uucccuucgcacauguuga

SEQ ID NO: 3276033 - RNA, 19 nt, Artificial Sequence
  Description of Artificial Sequence: Synthetic oligonucleotide
aucuuguuggugaagaaca

SEQ ID NO: 3276034 - RNA, 19 nt, Artificial Sequence
  Description of Artificial Sequence: Synthetic oligonucleotide
ugucucagcuucuuccugc

SEQ ID NO: 3276035 - RNA, 19 nt, Artificial Sequence
  Description of Artificial Sequence: Synthetic oligonucleotide
aaccgcuguuguuaaaaga

SEQ ID NO: 3276036 - RNA, 19 nt, Artificial Sequence
  Description of Artificial Sequence: Synthetic oligonucleotide
ugaugucugagagagccug

SEQ ID NO: 3276037 - RNA, 19 nt, Artificial Sequence
  Description of Artificial Sequence: Synthetic oligonucleotide
uguccuucugccuucccug

SEQ ID NO: 3276038 - RNA, 19 nt, Artificial Sequence
  Description of Artificial Sequence: Synthetic oligonucleotide
cuguuguuaaaagaacaag

SEQ ID NO: 3276039 - RNA, 19 nt, Artificial Sequence
  Description of Artificial Sequence: Synthetic oligonucleotide
ugcacagcuuugcaaaccu

SEQ ID NO: 3276040 - RNA, 19 nt, Artificial Sequence
  Description of Artificial Sequence: Synthetic oligonucleotide
uuucuuguccuucugccuu

SEQ ID NO: 3276041 - RNA, 19 nt, Artificial Sequence
  Description of Artificial Sequence: Synthetic oligonucleotide
ugaagaacaccugucucca

SEQ ID NO: 3276042 - RNA, 19 nt, Artificial Sequence
  Description of Artificial Sequence: Synthetic oligonucleotide
uaucugcucccacaaugag

SEQ ID NO: 3276043 - RNA, 19 nt, Artificial Sequence
  Description of Artificial Sequence: Synthetic oligonucleotide
agaauuggacaugaggaga

SEQ ID NO: 3276044 - RNA, 19 nt, Artificial Sequence
  Description of Artificial Sequence: Synthetic oligonucleotide
gaaucagcaaccgcuguug

SEQ ID NO: 3276045 - RNA, 19 nt, Artificial Sequence
  Description of Artificial Sequence: Synthetic oligonucleotide
acauagucuaauauccuug

SEQ ID NO: 3276046 - RNA, 19 nt, Artificial Sequence
  Description of Artificial Sequence: Synthetic oligonucleotide
ucuuccugcggauuugccu

SEQ ID NO: 3276047 - RNA, 19 nt, Artificial Sequence
  Description of Artificial Sequence: Synthetic oligonucleotide
aagugauuccaggaaucag

SEQ ID NO: 3276048 - RNA, 19 nt, Artificial Sequence
  Description of Artificial Sequence: Synthetic oligonucleotide
ucuaauauccuugcaccaa

SEQ ID NO: 3276049 - RNA, 19 nt, Artificial Sequence
  Description of Artificial Sequence: Synthetic oligonucleotide
aaugccgcccaucagcucc

SEQ ID NO: 3276050 - RNA, 19 nt, Artificial Sequence
  Description of Artificial Sequence: Synthetic oligonucleotide
caugguuuuaccaaugccg

SEQ ID NO: 3276051 - RNA, 19 nt, Artificial Sequence
  Description of Artificial Sequence: Synthetic oligonucleotide
acaaagcccaucuucacac

SEQ ID NO: 3276052 - RNA, 19 nt, Artificial Sequence
  Description of Artificial Sequence: Synthetic oligonucleotide
agggcuacgacagugaggc

SEQ ID NO: 3276053 - RNA, 19 nt, Artificial Sequence
  Description of Artificial Sequence: Synthetic oligonucleotide
ugagagagggcuacgacag

SEQ ID NO: 3276054 - RNA, 19 nt, Artificial Sequence
  Description of Artificial Sequence: Synthetic oligonucleotide
accaaugccgcccaucagc

SEQ ID NO: 3276055 - RNA, 19 nt, Artificial Sequence
  Description of Artificial Sequence: Synthetic oligonucleotide
aaagcccaucuucacacgg

SEQ ID NO: 3276056 - RNA, 19 nt, Artificial Sequence
  Description of Artificial Sequence: Synthetic oligonucleotide
auuccaauggccaugaaug

SEQ ID NO: 3276057 - RNA, 19 nt, Artificial Sequence
  Description of Artificial Sequence: Synthetic oligonucleotide
aucaugguuuuaccaaugc

SEQ ID NO: 3276058 - RNA, 19 nt, Artificial Sequence
  Description of Artificial Sequence: Synthetic oligonucleotide
aaagguuccgccacucugc

SEQ ID NO: 3276059 - RNA, 19 nt, Artificial Sequence
  Description of Artificial Sequence: Synthetic oligonucleotide
augaaugugccaaagguuc

SEQ ID NO: 3276060 - RNA, 19 nt, Artificial Sequence
  Description of Artificial Sequence: Synthetic oligonucleotide
aucuucacacggucgaagc

SEQ ID NO: 3276061 - RNA, 19 nt, Artificial Sequence
  Description of Artificial Sequence: Synthetic oligonucleotide
gaaggugccgaacagcgcc

SEQ ID NO: 3276062 - RNA, 19 nt, Artificial Sequence
  Description of Artificial Sequence: Synthetic oligonucleotide
gacagugaggccuggaggc

SEQ ID NO: 3276063 - RNA, 19 nt, Artificial Sequence
  Description of Artificial Sequence: Synthetic oligonucleotide
augguuuuaccaaugccgc

SEQ ID NO: 3276064 - RNA, 19 nt, Artificial Sequence
  Description of Artificial Sequence: Synthetic oligonucleotide
ugagacaggagaaggugcc

SEQ ID NO: 3276065 - RNA, 19 nt, Artificial Sequence
  Description of Artificial Sequence: Synthetic oligonucleotide
ugauuagcaucguaugccc

SEQ ID NO: 3276066 - RNA, 19 nt, Artificial Sequence
  Description of Artificial Sequence: Synthetic oligonucleotide
gagaaggugccgaacagcg

SEQ ID NO: 3276067 - RNA, 19 nt, Artificial Sequence
  Description of Artificial Sequence: Synthetic oligonucleotide
ucaugguuuuaccaaugcc

SEQ ID NO: 3276068 - RNA, 19 nt, Artificial Sequence
  Description of Artificial Sequence: Synthetic oligonucleotide
uuaccaaugccgcccauca

SEQ ID NO: 3276069 - RNA, 19 nt, Artificial Sequence
  Description of Artificial Sequence: Synthetic oligonucleotide
caugacaaagcccaucuuc

SEQ ID NO: 3276070 - RNA, 19 nt, Artificial Sequence
  Description of Artificial Sequence: Synthetic oligonucleotide
cugauuagcaucguaugcc

SEQ ID NO: 3276071 - RNA, 19 nt, Artificial Sequence
  Description of Artificial Sequence: Synthetic oligonucleotide
ugcaucaugguuuuaccaa

SEQ ID NO: 3276072 - RNA, 19 nt, Artificial Sequence
  Description of Artificial Sequence: Synthetic oligonucleotide
acacggucgaagcagcugg

SEQ ID NO: 3276073 - RNA, 19 nt, Artificial Sequence
  Description of Artificial Sequence: Synthetic oligonucleotide
aaugugccaaagguuccgc

SEQ ID NO: 3276074 - RNA, 19 nt, Artificial Sequence
  Description of Artificial Sequence: Synthetic oligonucleotide
caacccaugacaaagccca

SEQ ID NO: 3276075 - RNA, 19 nt, Artificial Sequence
  Description of Artificial Sequence: Synthetic oligonucleotide
agaaggcuuccgcaggccc

SEQ ID NO: 3276076 - RNA, 19 nt, Artificial Sequence
  Description of Artificial Sequence: Synthetic oligonucleotide
ugaaugugccaaagguucc

SEQ ID NO: 3276077 - RNA, 19 nt, Artificial Sequence
  Description of Artificial Sequence: Synthetic oligonucleotide
agcaucguaugcccauucc

SEQ ID NO: 3276078 - RNA, 19 nt, Artificial Sequence
  Description of Artificial Sequence: Synthetic oligonucleotide
ucugcaucaugguuuuacc

SEQ ID NO: 3276079 - RNA, 19 nt, Artificial Sequence
  Description of Artificial Sequence: Synthetic oligonucleotide
uaugcccauuccaauggcc

SEQ ID NO: 3276080 - RNA, 19 nt, Artificial Sequence
  Description of Artificial Sequence: Synthetic oligonucleotide
ugugccaaagguuccgcca

SEQ ID NO: 3276081 - RNA, 19 nt, Artificial Sequence
  Description of Artificial Sequence: Synthetic oligonucleotide
cugagacaggagaaggugc

SEQ ID NO: 3276082 - RNA, 19 nt, Artificial Sequence
  Description of Artificial Sequence: Synthetic oligonucleotide
ucuggggugagagagggcu

SEQ ID NO: 3276083 - RNA, 19 nt, Artificial Sequence
  Description of Artificial Sequence: Synthetic oligonucleotide
ucguaugcccauuccaaug

SEQ ID NO: 3276084 - RNA, 19 nt, Artificial Sequence
  Description of Artificial Sequence: Synthetic oligonucleotide
gaaugugccaaagguuccg

SEQ ID NO: 3276085 - RNA, 19 nt, Artificial Sequence
  Description of Artificial Sequence: Synthetic oligonucleotide
gcugggacugcccauaggg

SEQ ID NO: 3276086 - RNA, 19 nt, Artificial Sequence
  Description of Artificial Sequence: Synthetic oligonucleotide
ugcccauagggacccacgg

SEQ ID NO: 3276087 - RNA, 19 nt, Artificial Sequence
  Description of Artificial Sequence: Synthetic oligonucleotide
cauuccgauccugagacag

SEQ ID NO: 3276088 - RNA, 19 nt, Artificial Sequence
  Description of Artificial Sequence: Synthetic oligonucleotide
augugccaaagguuccgcc

SEQ ID NO: 3276089 - RNA, 19 nt, Artificial Sequence
  Description of Artificial Sequence: Synthetic oligonucleotide
ucuucacacggucgaagca

SEQ ID NO: 3276090 - RNA, 19 nt, Artificial Sequence
  Description of Artificial Sequence: Synthetic oligonucleotide
auuagcaucguaugcccau

SEQ ID NO: 3276091 - RNA, 19 nt, Artificial Sequence
  Description of Artificial Sequence: Synthetic oligonucleotide
aggccuggaggccuggcgc

SEQ ID NO: 3276092 - RNA, 19 nt, Artificial Sequence
  Description of Artificial Sequence: Synthetic oligonucleotide
ugggacugcccauagggac

SEQ ID NO: 3276093 - RNA, 19 nt, Artificial Sequence
  Description of Artificial Sequence: Synthetic oligonucleotide
uucacacggucgaagcagc

SEQ ID NO: 3276094 - RNA, 19 nt, Artificial Sequence
  Description of Artificial Sequence: Synthetic oligonucleotide
gacaaagcccaucuucaca

SEQ ID NO: 3276095 - RNA, 19 nt, Artificial Sequence
  Description of Artificial Sequence: Synthetic oligonucleotide
cuucacacggucgaagcag

SEQ ID NO: 3276096 - RNA, 19 nt, Artificial Sequence
  Description of Artificial Sequence: Synthetic oligonucleotide
auccugagacaggagaagg

SEQ ID NO: 3276097 - RNA, 19 nt, Artificial Sequence
  Description of Artificial Sequence: Synthetic oligonucleotide
caaagguuccgccacucug

SEQ ID NO: 3276098 - RNA, 19 nt, Artificial Sequence
  Description of Artificial Sequence: Synthetic oligonucleotide
ccaauggccaugaaugugc

SEQ ID NO: 3276099 - RNA, 19 nt, Artificial Sequence
  Description of Artificial Sequence: Synthetic oligonucleotide
gaagcagcugggcugggac

SEQ ID NO: 3276100 - RNA, 19 nt, Artificial Sequence
  Description of Artificial Sequence: Synthetic oligonucleotide
acgacagugaggccuggag

SEQ ID NO: 3276101 - RNA, 19 nt, Artificial Sequence
  Description of Artificial Sequence: Synthetic oligonucleotide
gauccugagacaggagaag

SEQ ID NO: 3276102 - RNA, 19 nt, Artificial Sequence
  Description of Artificial Sequence: Synthetic oligonucleotide
aggagaaggugccgaacag

SEQ ID NO: 3276103 - RNA, 19 nt, Artificial Sequence
  Description of Artificial Sequence: Synthetic oligonucleotide
uccaauggccaugaaugug

SEQ ID NO: 3276104 - RNA, 19 nt, Artificial Sequence
  Description of Artificial Sequence: Synthetic oligonucleotide
augacaaagcccaucuuca

SEQ ID NO: 3276105 - RNA, 19 nt, Artificial Sequence
  Description of Artificial Sequence: Synthetic oligonucleotide
caucaugguuuuaccaaug

SEQ ID NO: 3276106 - RNA, 19 nt, Artificial Sequence
  Description of Artificial Sequence: Synthetic oligonucleotide
agcccaucuucacacgguc

SEQ ID NO: 3276107 - RNA, 19 nt, Artificial Sequence
  Description of Artificial Sequence: Synthetic oligonucleotide
uccugagacaggagaaggu

SEQ ID NO: 3276108 - RNA, 19 nt, Artificial Sequence
  Description of Artificial Sequence: Synthetic oligonucleotide
agagggcuacgacagugag

SEQ ID NO: 3276109 - RNA, 19 nt, Artificial Sequence
  Description of Artificial Sequence: Synthetic oligonucleotide
gguuuuaccaaugccgccc

SEQ ID NO: 3276110 - RNA, 19 nt, Artificial Sequence
  Description of Artificial Sequence: Synthetic oligonucleotide
uuccaauggccaugaaugu

SEQ ID NO: 3276111 - RNA, 19 nt, Artificial Sequence
  Description of Artificial Sequence: Synthetic oligonucleotide
ugguuuuaccaaugccgcc

SEQ ID NO: 3276112 - RNA, 19 nt, Artificial Sequence
  Description of Artificial Sequence: Synthetic oligonucleotide
gugagagagggcuacgaca

SEQ ID NO: 3276113 - RNA, 19 nt, Artificial Sequence
  Description of Artificial Sequence: Synthetic oligonucleotide
caucuggggugagagaggg

SEQ ID NO: 3276114 - RNA, 19 nt, Artificial Sequence
  Description of Artificial Sequence: Synthetic oligonucleotide
auggccaugaaugugccaa

SEQ ID NO: 3276115 - RNA, 19 nt, Artificial Sequence
  Description of Artificial Sequence: Synthetic oligonucleotide
ugacaaagcccaucuucac

SEQ ID NO: 3276116 - RNA, 19 nt, Artificial Sequence
  Description of Artificial Sequence: Synthetic oligonucleotide
cucugcaucaugguuuuac

SEQ ID NO: 3276117 - RNA, 19 nt, Artificial Sequence
  Description of Artificial Sequence: Synthetic oligonucleotide
aaggcuuccgcaggccccg

SEQ ID NO: 3276118 - RNA, 19 nt, Artificial Sequence
  Description of Artificial Sequence: Synthetic oligonucleotide
aaggugccgaacagcgccc

SEQ ID NO: 3276119 - RNA, 19 nt, Artificial Sequence
  Description of Artificial Sequence: Synthetic oligonucleotide
agagagggcuacgacagug

SEQ ID NO: 3276120 - RNA, 19 nt, Artificial Sequence
  Description of Artificial Sequence: Synthetic oligonucleotide
gccagcggcgcccagaagg

SEQ ID NO: 3276121 - RNA, 19 nt, Artificial Sequence
  Description of Artificial Sequence: Synthetic oligonucleotide
aagguuccgccacucugca

SEQ ID NO: 3276122 - RNA, 19 nt, Artificial Sequence
  Description of Artificial Sequence: Synthetic oligonucleotide
aauggccaugaaugugcca

SEQ ID NO: 3276123 - RNA, 19 nt, Artificial Sequence
  Description of Artificial Sequence: Synthetic oligonucleotide
ggcaucuggggugagagag

SEQ ID NO: 3276124 - RNA, 19 nt, Artificial Sequence
  Description of Artificial Sequence: Synthetic oligonucleotide
caauggccaugaaugugcc

SEQ ID NO: 3276125 - RNA, 19 nt, Artificial Sequence
  Description of Artificial Sequence: Synthetic oligonucleotide
caaagcccaucuucacacg

SEQ ID NO: 3276126 - RNA, 19 nt, Artificial Sequence
  Description of Artificial Sequence: Synthetic oligonucleotide
uuccgauccugagacagga

SEQ ID NO: 3276127 - RNA, 19 nt, Artificial Sequence
  Description of Artificial Sequence: Synthetic oligonucleotide
ccugauuagcaucguaugc

SEQ ID NO: 3276128 - RNA, 19 nt, Artificial Sequence
  Description of Artificial Sequence: Synthetic oligonucleotide
uuuaccaaugccgcccauc

SEQ ID NO: 3276129 - RNA, 19 nt, Artificial Sequence
  Description of Artificial Sequence: Synthetic oligonucleotide
acagugaggccuggaggcc

SEQ ID NO: 3276130 - RNA, 19 nt, Artificial Sequence
  Description of Artificial Sequence: Synthetic oligonucleotide
gacgccagcccggagcacg

SEQ ID NO: 3276131 - RNA, 19 nt, Artificial Sequence
  Description of Artificial Sequence: Synthetic oligonucleotide
gaggccuggaggccuggcg

SEQ ID NO: 3276132 - RNA, 19 nt, Artificial Sequence
  Description of Artificial Sequence: Synthetic oligonucleotide
ggcgcaacccaugacaaag

SEQ ID NO: 3276133 - RNA, 19 nt, Artificial Sequence
  Description of Artificial Sequence: Synthetic oligonucleotide
uuccgcaggccccggggcg

SEQ ID NO: 3276134 - RNA, 19 nt, Artificial Sequence
  Description of Artificial Sequence: Synthetic oligonucleotide
gagacaggagaaggugccg

SEQ ID NO: 3276135 - RNA, 19 nt, Artificial Sequence
  Description of Artificial Sequence: Synthetic oligonucleotide
acaggagaaggugccgaac

SEQ ID NO: 3276136 - RNA, 19 nt, Artificial Sequence
  Description of Artificial Sequence: Synthetic oligonucleotide
uccgccacucugcaucaug

SEQ ID NO: 3276137 - RNA, 19 nt, Artificial Sequence
  Description of Artificial Sequence: Synthetic oligonucleotide
gguuccgccacucugcauc

SEQ ID NO: 3276138 - RNA, 19 nt, Artificial Sequence
  Description of Artificial Sequence: Synthetic oligonucleotide
gucgaagcagcugggcugg

SEQ ID NO: 3276139 - RNA, 19 nt, Artificial Sequence
  Description of Artificial Sequence: Synthetic oligonucleotide
aucguaugcccauuccaau

SEQ ID NO: 3276140 - RNA, 19 nt, Artificial Sequence
  Description of Artificial Sequence: Synthetic oligonucleotide
auagggacccacggccacc

SEQ ID NO: 3276141 - RNA, 19 nt, Artificial Sequence
  Description of Artificial Sequence: Synthetic oligonucleotide
agaaggugccgaacagcgc

SEQ ID NO: 3276142 - RNA, 19 nt, Artificial Sequence
  Description of Artificial Sequence: Synthetic oligonucleotide
aagcagcugggcugggacu

SEQ ID NO: 3276143 - RNA, 19 nt, Artificial Sequence
  Description of Artificial Sequence: Synthetic oligonucleotide
gccaugaaugugccaaagg

SEQ ID NO: 3276144 - RNA, 19 nt, Artificial Sequence
  Description of Artificial Sequence: Synthetic oligonucleotide
caucguaugcccauuccaa

SEQ ID NO: 3276145 - RNA, 19 nt, Artificial Sequence
  Description of Artificial Sequence: Synthetic oligonucleotide
gagggcuacgacagugagg

SEQ ID NO: 3276146 - RNA, 19 nt, Artificial Sequence
  Description of Artificial Sequence: Synthetic oligonucleotide
guaugcccauuccaauggc

SEQ ID NO: 3276147 - RNA, 19 nt, Artificial Sequence
  Description of Artificial Sequence: Synthetic oligonucleotide
ggucgaagcagcugggcug

SEQ ID NO: 3276148 - RNA, 19 nt, Artificial Sequence
  Description of Artificial Sequence: Synthetic oligonucleotide
cccauagggacccacggcc

SEQ ID NO: 3276149 - RNA, 19 nt, Artificial Sequence
  Description of Artificial Sequence: Synthetic oligonucleotide
aauguuagaagaccaaccc

SEQ ID NO: 3276150 - RNA, 19 nt, Artificial Sequence
  Description of Artificial Sequence: Synthetic oligonucleotide
aagcucaucaauaagaugc

SEQ ID NO: 3276151 - RNA, 19 nt, Artificial Sequence
  Description of Artificial Sequence: Synthetic oligonucleotide
ucuagaagaagcaagaaga

SEQ ID NO: 3276152 - RNA, 19 nt, Artificial Sequence
  Description of Artificial Sequence: Synthetic oligonucleotide
aucaauaagaugcugagag

SEQ ID NO: 3276153 - RNA, 19 nt, Artificial Sequence
  Description of Artificial Sequence: Synthetic oligonucleotide
uucagugguacucagauca

SEQ ID NO: 3276154 - RNA, 19 nt, Artificial Sequence
  Description of Artificial Sequence: Synthetic oligonucleotide
aagaagagacucuaggcuc

SEQ ID NO: 3276155 - RNA, 19 nt, Artificial Sequence
  Description of Artificial Sequence: Synthetic oligonucleotide
aaauguuagaagaccaacc

SEQ ID NO: 3276156 - RNA, 19 nt, Artificial Sequence
  Description of Artificial Sequence: Synthetic oligonucleotide
cuuuaguucaucaucuucc

SEQ ID NO: 3276157 - RNA, 19 nt, Artificial Sequence
  Description of Artificial Sequence: Synthetic oligonucleotide
aaaacagggcuuuaguuca

SEQ ID NO: 3276158 - RNA, 19 nt, Artificial Sequence
  Description of Artificial Sequence: Synthetic oligonucleotide
uuuuguagaaaguaaggcu

SEQ ID NO: 3276159 - RNA, 19 nt, Artificial Sequence
  Description of Artificial Sequence: Synthetic oligonucleotide
gaucagucaguuuugcagg

SEQ ID NO: 3276160 - RNA, 19 nt, Artificial Sequence
  Description of Artificial Sequence: Synthetic oligonucleotide
aaugagcucucucuguguc

SEQ ID NO: 3276161 - RNA, 19 nt, Artificial Sequence
  Description of Artificial Sequence: Synthetic oligonucleotide
cauggguagaauuugcugc

SEQ ID NO: 3276162 - RNA, 19 nt, Artificial Sequence
  Description of Artificial Sequence: Synthetic oligonucleotide
cuaucuuugcuacuguugg

SEQ ID NO: 3276163 - RNA, 19 nt, Artificial Sequence
  Description of Artificial Sequence: Synthetic oligonucleotide
ucaucaauaagaugcugag

SEQ ID NO: 3276164 - RNA, 19 nt, Artificial Sequence
  Description of Artificial Sequence: Synthetic oligonucleotide
uggaagcucaucaauaaga

SEQ ID NO: 3276165 - RNA, 19 nt, Artificial Sequence
  Description of Artificial Sequence: Synthetic oligonucleotide
uggcugaugucacagaugc

SEQ ID NO: 3276166 - RNA, 19 nt, Artificial Sequence
  Description of Artificial Sequence: Synthetic oligonucleotide
auguuagaagaccaacccc

SEQ ID NO: 3276167 - RNA, 19 nt, Artificial Sequence
  Description of Artificial Sequence: Synthetic oligonucleotide
uagaaauguuagaagacca

SEQ ID NO: 3276168 - RNA, 19 nt, Artificial Sequence
  Description of Artificial Sequence: Synthetic oligonucleotide
uagaagaccaaccccacug

SEQ ID NO: 3276169 - RNA, 19 nt, Artificial Sequence
  Description of Artificial Sequence: Synthetic oligonucleotide
uuuucagugguacucagau

SEQ ID NO: 3276170 - RNA, 19 nt, Artificial Sequence
  Description of Artificial Sequence: Synthetic oligonucleotide
uccugaauuucuuuuguag

SEQ ID NO: 3276171 - RNA, 19 nt, Artificial Sequence
  Description of Artificial Sequence: Synthetic oligonucleotide
agaagaaugagcucucucu

SEQ ID NO: 3276172 - RNA, 19 nt, Artificial Sequence
  Description of Artificial Sequence: Synthetic oligonucleotide
cuuguagagcccuuggagg

SEQ ID NO: 3276173 - RNA, 19 nt, Artificial Sequence
  Description of Artificial Sequence: Synthetic oligonucleotide
aagaagcaagaagagacuc

SEQ ID NO: 3276174 - RNA, 19 nt, Artificial Sequence
  Description of Artificial Sequence: Synthetic oligonucleotide
aucaagaagcuccugagcu

SEQ ID NO: 3276175 - RNA, 19 nt, Artificial Sequence
  Description of Artificial Sequence: Synthetic oligonucleotide
cuuuuguagaaaguaaggc

SEQ ID NO: 3276176 - RNA, 19 nt, Artificial Sequence
  Description of Artificial Sequence: Synthetic oligonucleotide
aguucaucaucuuccaaag

SEQ ID NO: 3276177 - RNA, 19 nt, Artificial Sequence
  Description of Artificial Sequence: Synthetic oligonucleotide
uucaucaagaagcuccuga

SEQ ID NO: 3276178 - RNA, 19 nt, Artificial Sequence
  Description of Artificial Sequence: Synthetic oligonucleotide
uuguagagcccuuggaggg

SEQ ID NO: 3276179 - RNA, 19 nt, Artificial Sequence
  Description of Artificial Sequence: Synthetic oligonucleotide
ucaugugacaccaugggua

SEQ ID NO: 3276180 - RNA, 19 nt, Artificial Sequence
  Description of Artificial Sequence: Synthetic oligonucleotide
agggcuuuaguucaucauc

SEQ ID NO: 3276181 - RNA, 19 nt, Artificial Sequence
  Description of Artificial Sequence: Synthetic oligonucleotide
aucauuuucagugguacuc

SEQ ID NO: 3276182 - RNA, 19 nt, Artificial Sequence
  Description of Artificial Sequence: Synthetic oligonucleotide
uuucuuuuguagaaaguaa

SEQ ID NO: 3276183 - RNA, 19 nt, Artificial Sequence
  Description of Artificial Sequence: Synthetic oligonucleotide
ugguacucagaucaugugc

SEQ ID NO: 3276184 - RNA, 19 nt, Artificial Sequence
  Description of Artificial Sequence: Synthetic oligonucleotide
caucaagagaagaaugagc

SEQ ID NO: 3276185 - RNA, 19 nt, Artificial Sequence
  Description of Artificial Sequence: Synthetic oligonucleotide
uagaaaguaaggcugcuau

SEQ ID NO: 3276186 - RNA, 19 nt, Artificial Sequence
  Description of Artificial Sequence: Synthetic oligonucleotide
aucaagagaagaaugagcu

SEQ ID NO: 3276187 - RNA, 19 nt, Artificial Sequence
  Description of Artificial Sequence: Synthetic oligonucleotide
ucaucaagaagcuccugag

SEQ ID NO: 3276188 - RNA, 19 nt, Artificial Sequence
  Description of Artificial Sequence: Synthetic oligonucleotide
uucucuucuguucaacagc

SEQ ID NO: 3276189 - RNA, 19 nt, Artificial Sequence
  Description of Artificial Sequence: Synthetic oligonucleotide
gaugccguagaaauguuag

SEQ ID NO: 3276190 - RNA, 19 nt, Artificial Sequence
  Description of Artificial Sequence: Synthetic oligonucleotide
uuuuaucauuuucaguggu

SEQ ID NO: 3276191 - RNA, 19 nt, Artificial Sequence
  Description of Artificial Sequence: Synthetic oligonucleotide
uucagaccaacccagccgc

SEQ ID NO: 3276192 - RNA, 19 nt, Artificial Sequence
  Description of Artificial Sequence: Synthetic oligonucleotide
ucucuucuguucaacagca

SEQ ID NO: 3276193 - RNA, 19 nt, Artificial Sequence
  Description of Artificial Sequence: Synthetic oligonucleotide
cuagaagaagcaagaagag

SEQ ID NO: 3276194 - RNA, 19 nt, Artificial Sequence
  Description of Artificial Sequence: Synthetic oligonucleotide
agaccaaccccacuguacg

SEQ ID NO: 3276195 - RNA, 19 nt, Artificial Sequence
  Description of Artificial Sequence: Synthetic oligonucleotide
gaagaaugagcucucucug

SEQ ID NO: 3276196 - RNA, 19 nt, Artificial Sequence
  Description of Artificial Sequence: Synthetic oligonucleotide
uaguucaucaucuuccaaa

SEQ ID NO: 3276197 - RNA, 19 nt, Artificial Sequence
  Description of Artificial Sequence: Synthetic oligonucleotide
gucuagaagaagcaagaag

SEQ ID NO: 3276198 - RNA, 19 nt, Artificial Sequence
  Description of Artificial Sequence: Synthetic oligonucleotide
ucacagaugccguagaaau

SEQ ID NO: 3276199 - RNA, 19 nt, Artificial Sequence
  Description of Artificial Sequence: Synthetic oligonucleotide
guagaaauguuagaagacc

SEQ ID NO: 3276200 - RNA, 19 nt, Artificial Sequence
  Description of Artificial Sequence: Synthetic oligonucleotide
uuaucauuuucagugguac

SEQ ID NO: 3276201 - RNA, 19 nt, Artificial Sequence
  Description of Artificial Sequence: Synthetic oligonucleotide
uuuaguucaucaucuucca

SEQ ID NO: 3276202 - RNA, 19 nt, Artificial Sequence
  Description of Artificial Sequence: Synthetic oligonucleotide
ucaucaagagaagaaugag

SEQ ID NO: 3276203 - RNA, 19 nt, Artificial Sequence
  Description of Artificial Sequence: Synthetic oligonucleotide
cuuuggguagcauuggcug

SEQ ID NO: 3276204 - RNA, 19 nt, Artificial Sequence
  Description of Artificial Sequence: Synthetic oligonucleotide
ggaucagucaguuuugcag

SEQ ID NO: 3276205 - RNA, 19 nt, Artificial Sequence
  Description of Artificial Sequence: Synthetic oligonucleotide
aaccccacuguacguagac

SEQ ID NO: 3276206 - RNA, 19 nt, Artificial Sequence
  Description of Artificial Sequence: Synthetic oligonucleotide
aucagucaguuuugcaggc

SEQ ID NO: 3276207 - RNA, 19 nt, Artificial Sequence
  Description of Artificial Sequence: Synthetic oligonucleotide
ucuucuguucaacagcauc

SEQ ID NO: 3276208 - RNA, 19 nt, Artificial Sequence
  Description of Artificial Sequence: Synthetic oligonucleotide
ucuuccaaagucccuaaaa

SEQ ID NO: 3276209 - RNA, 19 nt, Artificial Sequence
  Description of Artificial Sequence: Synthetic oligonucleotide
ucuuuccagguccucauca

SEQ ID NO: 3276210 - RNA, 19 nt, Artificial Sequence
  Description of Artificial Sequence: Synthetic oligonucleotide
uuuucucuucuguucaaca

SEQ ID NO: 3276211 - RNA, 19 nt, Artificial Sequence
  Description of Artificial Sequence: Synthetic oligonucleotide
gaaauguuagaagaccaac

SEQ ID NO: 3276212 - RNA, 19 nt, Artificial Sequence
  Description of Artificial Sequence: Synthetic oligonucleotide
cuuccuuuggguagcauug

SEQ ID NO: 3276213 - RNA, 19 nt, Artificial Sequence
  Description of Artificial Sequence: Synthetic oligonucleotide
guucagaccaacccagccg

SEQ ID NO: 3276214 - RNA, 19 nt, Artificial Sequence
  Description of Artificial Sequence: Synthetic oligonucleotide
aagaaugagcucucucugu

SEQ ID NO: 3276215 - RNA, 19 nt, Artificial Sequence
  Description of Artificial Sequence: Synthetic oligonucleotide
aagaccaaccccacuguac

SEQ ID NO: 3276216 - RNA, 19 nt, Artificial Sequence
  Description of Artificial Sequence: Synthetic oligonucleotide
cuucucucuggcuuggugc

SEQ ID NO: 3276217 - RNA, 19 nt, Artificial Sequence
  Description of Artificial Sequence: Synthetic oligonucleotide
gaagcuccugagcuggugg

SEQ ID NO: 3276218 - RNA, 19 nt, Artificial Sequence
  Description of Artificial Sequence: Synthetic oligonucleotide
agaaaguaaggcugcuauc

SEQ ID NO: 3276219 - RNA, 19 nt, Artificial Sequence
  Description of Artificial Sequence: Synthetic oligonucleotide
guugguuucugguucuucc

SEQ ID NO: 3276220 - RNA, 19 nt, Artificial Sequence
  Description of Artificial Sequence: Synthetic oligonucleotide
uuugcugcugcuucagaug

SEQ ID NO: 3276221 - RNA, 19 nt, Artificial Sequence
  Description of Artificial Sequence: Synthetic oligonucleotide
aaagcugucugauuuccuu

SEQ ID NO: 3276222 - RNA, 19 nt, Artificial Sequence
  Description of Artificial Sequence: Synthetic oligonucleotide
agaaugagcucucucugug

SEQ ID NO: 3276223 - RNA, 19 nt, Artificial Sequence
  Description of Artificial Sequence: Synthetic oligonucleotide
cugauuuccuucucucugg

SEQ ID NO: 3276224 - RNA, 19 nt, Artificial Sequence
  Description of Artificial Sequence: Synthetic oligonucleotide
agauccugaauuucuuuug

SEQ ID NO: 3276225 - RNA, 19 nt, Artificial Sequence
  Description of Artificial Sequence: Synthetic oligonucleotide
auuucuuuuguagaaagua

SEQ ID NO: 3276226 - RNA, 19 nt, Artificial Sequence
  Description of Artificial Sequence: Synthetic oligonucleotide
acagaugccguagaaaugu

SEQ ID NO: 3276227 - RNA, 19 nt, Artificial Sequence
  Description of Artificial Sequence: Synthetic oligonucleotide
gaggucuagaagaagcaag

SEQ ID NO: 3276228 - RNA, 19 nt, Artificial Sequence
  Description of Artificial Sequence: Synthetic oligonucleotide
gcugaugucacagaugccg

SEQ ID NO: 3276229 - RNA, 19 nt, Artificial Sequence
  Description of Artificial Sequence: Synthetic oligonucleotide
aaggcugcuaucuuugcua

SEQ ID NO: 3276230 - RNA, 19 nt, Artificial Sequence
  Description of Artificial Sequence: Synthetic oligonucleotide
uuuaucauuuucaguggua

SEQ ID NO: 3276231 - RNA, 19 nt, Artificial Sequence
  Description of Artificial Sequence: Synthetic oligonucleotide
caugugacaccauggguag

SEQ ID NO: 3276232 - RNA, 19 nt, Artificial Sequence
  Description of Artificial Sequence: Synthetic oligonucleotide
uuuccagguccucaucaag

SEQ ID NO: 3276233 - RNA, 19 nt, Artificial Sequence
  Description of Artificial Sequence: Synthetic oligonucleotide
ugugucuuccagauccuga

SEQ ID NO: 3276234 - RNA, 19 nt, Artificial Sequence
  Description of Artificial Sequence: Synthetic oligonucleotide
gaagcucaucaauaagaug

SEQ ID NO: 3276235 - RNA, 19 nt, Artificial Sequence
  Description of Artificial Sequence: Synthetic oligonucleotide
uuccagauccugaauuucu

SEQ ID NO: 3276236 - RNA, 19 nt, Artificial Sequence
  Description of Artificial Sequence: Synthetic oligonucleotide
uggugguggaagcucauca

SEQ ID NO: 3276237 - RNA, 19 nt, Artificial Sequence
  Description of Artificial Sequence: Synthetic oligonucleotide
uaagaugcugagagguggc

SEQ ID NO: 3276238 - RNA, 19 nt, Artificial Sequence
  Description of Artificial Sequence: Synthetic oligonucleotide
ugcucaauuucaucaagaa

SEQ ID NO: 3276239 - RNA, 19 nt, Artificial Sequence
  Description of Artificial Sequence: Synthetic oligonucleotide
auuuccuucucucuggcuu

SEQ ID NO: 3276240 - RNA, 19 nt, Artificial Sequence
  Description of Artificial Sequence: Synthetic oligonucleotide
uccacuaguucucugggua

SEQ ID NO: 3276241 - RNA, 19 nt, Artificial Sequence
  Description of Artificial Sequence: Synthetic oligonucleotide
ucaagaagcuccugagcug

SEQ ID NO: 3276242 - RNA, 19 nt, Artificial Sequence
  Description of Artificial Sequence: Synthetic oligonucleotide
aaucuuuccagguccucau

SEQ ID NO: 3276243 - RNA, 19 nt, Artificial Sequence
  Description of Artificial Sequence: Synthetic oligonucleotide
caagaagcuccugagcugg

SEQ ID NO: 3276244 - RNA, 19 nt, Artificial Sequence
  Description of Artificial Sequence: Synthetic oligonucleotide
ugugcuguguucucaugug

SEQ ID NO: 3276245 - RNA, 19 nt, Artificial Sequence
  Description of Artificial Sequence: Synthetic oligonucleotide
uguucaacagcaucuugau

SEQ ID NO: 3276246 - RNA, 19 nt, Artificial Sequence
  Description of Artificial Sequence: Synthetic oligonucleotide
cuucagaugcucaauuuca

SEQ ID NO: 3276247 - RNA, 19 nt, Artificial Sequence
  Description of Artificial Sequence: Synthetic oligonucleotide
agugccauguucuccucag

SEQ ID NO: 3276248 - RNA, 19 nt, Artificial Sequence
  Description of Artificial Sequence: Synthetic oligonucleotide
guagcauuggcugauguca

SEQ ID NO: 3276249 - RNA, 19 nt, Artificial Sequence
  Description of Artificial Sequence: Synthetic oligonucleotide
uaaagugccacuaagaagg

SEQ ID NO: 3276250 - RNA, 19 nt, Artificial Sequence
  Description of Artificial Sequence: Synthetic oligonucleotide
uuuaccaucacaguuauug

SEQ ID NO: 3276251 - RNA, 19 nt, Artificial Sequence
  Description of Artificial Sequence: Synthetic oligonucleotide
uguuuguaaacccaaguag

SEQ ID NO: 3276252 - RNA, 19 nt, Artificial Sequence
  Description of Artificial Sequence: Synthetic oligonucleotide
cauguauuuauaaagugcc

SEQ ID NO: 3276253 - RNA, 19 nt, Artificial Sequence
  Description of Artificial Sequence: Synthetic oligonucleotide
cuuucauguauuuauaaag

SEQ ID NO: 3276254 - RNA, 19 nt, Artificial Sequence
  Description of Artificial Sequence: Synthetic oligonucleotide
uuuauaaagugccacuaag

SEQ ID NO: 3276255 - RNA, 19 nt, Artificial Sequence
  Description of Artificial Sequence: Synthetic oligonucleotide
ucauguauuuauaaagugc

SEQ ID NO: 3276256 - RNA, 19 nt, Artificial Sequence
  Description of Artificial Sequence: Synthetic oligonucleotide
uuuguaaacccaaguaggg

SEQ ID NO: 3276257 - RNA, 19 nt, Artificial Sequence
  Description of Artificial Sequence: Synthetic oligonucleotide
aaacccuuuacucuguuug

SEQ ID NO: 3276258 - RNA, 19 nt, Artificial Sequence
  Description of Artificial Sequence: Synthetic oligonucleotide
uuauucuucggcuugguca

SEQ ID NO: 3276259 - RNA, 19 nt, Artificial Sequence
  Description of Artificial Sequence: Synthetic oligonucleotide
uuucauguauuuauaaagu

SEQ ID NO: 3276260 - RNA, 19 nt, Artificial Sequence
  Description of Artificial Sequence: Synthetic oligonucleotide
uauaaagugccacuaagaa

SEQ ID NO: 3276261 - RNA, 19 nt, Artificial Sequence
  Description of Artificial Sequence: Synthetic oligonucleotide
uuuacaguugcuaugguua

SEQ ID NO: 3276262 - RNA, 19 nt, Artificial Sequence
  Description of Artificial Sequence: Synthetic oligonucleotide
acagcuuuggcuuuucuuc

SEQ ID NO: 3276263 - RNA, 19 nt, Artificial Sequence
  Description of Artificial Sequence: Synthetic oligonucleotide
uuuucuuucuuucauguau

SEQ ID NO: 3276264 - RNA, 19 nt, Artificial Sequence
  Description of Artificial Sequence: Synthetic oligonucleotide
uuauaaagugccacuaaga

SEQ ID NO: 3276265 - RNA, 19 nt, Artificial Sequence
  Description of Artificial Sequence: Synthetic oligonucleotide
uucauguauuuauaaagug

SEQ ID NO: 3276266 - RNA, 19 nt, Artificial Sequence
  Description of Artificial Sequence: Synthetic oligonucleotide
guuuguaaacccaaguagg

SEQ ID NO: 3276267 - RNA, 19 nt, Artificial Sequence
  Description of Artificial Sequence: Synthetic oligonucleotide
auaaagugccacuaagaag

SEQ ID NO: 3276268 - RNA, 19 nt, Artificial Sequence
  Description of Artificial Sequence: Synthetic oligonucleotide
uauuguuggaaguccuucg

SEQ ID NO: 3276269 - RNA, 19 nt, Artificial Sequence
  Description of Artificial Sequence: Synthetic oligonucleotide
cugccuuuaagauuuggcg

SEQ ID NO: 3276270 - RNA, 19 nt, Artificial Sequence
  Description of Artificial Sequence: Synthetic oligonucleotide
uguauuuauaaagugccac

SEQ ID NO: 3276271 - RNA, 19 nt, Artificial Sequence
  Description of Artificial Sequence: Synthetic oligonucleotide
uuuacucuguuuguaaacc

SEQ ID NO: 3276272 - RNA, 19 nt, Artificial Sequence
  Description of Artificial Sequence: Synthetic oligonucleotide
uguaaacccaaguagggaa

SEQ ID NO: 3276273 - RNA, 19 nt, Artificial Sequence
  Description of Artificial Sequence: Synthetic oligonucleotide
agggaauucgcucuauggg

SEQ ID NO: 3276274 - RNA, 19 nt, Artificial Sequence
  Description of Artificial Sequence: Synthetic oligonucleotide
ucgccuuucaccuuguuga

SEQ ID NO: 3276275 - RNA, 19 nt, Artificial Sequence
  Description of Artificial Sequence: Synthetic oligonucleotide
uagggaauucgcucuaugg

SEQ ID NO: 3276276 - RNA, 19 nt, Artificial Sequence
  Description of Artificial Sequence: Synthetic oligonucleotide
gaucgcuuuaccaucacag

SEQ ID NO: 3276277 - RNA, 19 nt, Artificial Sequence
  Description of Artificial Sequence: Synthetic oligonucleotide
gaaggaaucucgucucugg

SEQ ID NO: 3276278 - RNA, 19 nt, Artificial Sequence
  Description of Artificial Sequence: Synthetic oligonucleotide
ucugccuuuaagauuuggc

SEQ ID NO: 3276279 - RNA, 19 nt, Artificial Sequence
  Description of Artificial Sequence: Synthetic oligonucleotide
uuuggcuuuucuucauugg

SEQ ID NO: 3276280 - RNA, 19 nt, Artificial Sequence
  Description of Artificial Sequence: Synthetic oligonucleotide
uucggcuuggucaaggcug

SEQ ID NO: 3276281 - RNA, 19 nt, Artificial Sequence
  Description of Artificial Sequence: Synthetic oligonucleotide
ugccuuuaagauuuggcgc

SEQ ID NO: 3276282 - RNA, 19 nt, Artificial Sequence
  Description of Artificial Sequence: Synthetic oligonucleotide
ucuguuuguaaacccaagu

SEQ ID NO: 3276283 - RNA, 19 nt, Artificial Sequence
  Description of Artificial Sequence: Synthetic oligonucleotide
aaggaaucucgucucuggg

SEQ ID NO: 3276284 - RNA, 19 nt, Artificial Sequence
  Description of Artificial Sequence: Synthetic oligonucleotide
acauucuucgccaauggac

SEQ ID NO: 3276285 - RNA, 19 nt, Artificial Sequence
  Description of Artificial Sequence: Synthetic oligonucleotide
ucacaguuauuguuggaag

SEQ ID NO: 3276286 - RNA, 19 nt, Artificial Sequence
  Description of Artificial Sequence: Synthetic oligonucleotide
uguuggaaguccuucgagc

SEQ ID NO: 3276287 - RNA, 19 nt, Artificial Sequence
  Description of Artificial Sequence: Synthetic oligonucleotide
ucuuucauguauuuauaaa

SEQ ID NO: 3276288 - RNA, 19 nt, Artificial Sequence
  Description of Artificial Sequence: Synthetic oligonucleotide
uggcuuuucuucauuggag

SEQ ID NO: 3276289 - RNA, 19 nt, Artificial Sequence
  Description of Artificial Sequence: Synthetic oligonucleotide
guuggaaguccuucgagcc

SEQ ID NO: 3276290 - RNA, 19 nt, Artificial Sequence
  Description of Artificial Sequence: Synthetic oligonucleotide
agaaggccuguucaucugc

SEQ ID NO: 3276291 - RNA, 19 nt, Artificial Sequence
  Description of Artificial Sequence: Synthetic oligonucleotide
uuggucaaggcugaccugg

SEQ ID NO: 3276292 - RNA, 19 nt, Artificial Sequence
  Description of Artificial Sequence: Synthetic oligonucleotide
uaagaaggccuguucaucu

SEQ ID NO: 3276293 - RNA, 19 nt, Artificial Sequence
  Description of Artificial Sequence: Synthetic oligonucleotide
acaguuauuguuggaaguc

SEQ ID NO: 3276294 - RNA, 19 nt, Artificial Sequence
  Description of Artificial Sequence: Synthetic oligonucleotide
uggucugccuuuaagauuu

SEQ ID NO: 3276295 - RNA, 19 nt, Artificial Sequence
  Description of Artificial Sequence: Synthetic oligonucleotide
acaguugcuaugguuauuc

SEQ ID NO: 3276296 - RNA, 19 nt, Artificial Sequence
  Description of Artificial Sequence: Synthetic oligonucleotide
uuggcuuuucuucauugga

SEQ ID NO: 3276297 - RNA, 19 nt, Artificial Sequence
  Description of Artificial Sequence: Synthetic oligonucleotide
uccuucgagccgcugaagg

SEQ ID NO: 3276298 - RNA, 19 nt, Artificial Sequence
  Description of Artificial Sequence: Synthetic oligonucleotide
aacccaaguagggaauucg

SEQ ID NO: 3276299 - RNA, 19 nt, Artificial Sequence
  Description of Artificial Sequence: Synthetic oligonucleotide
uuacucuguuuguaaaccc

SEQ ID NO: 3276300 - RNA, 19 nt, Artificial Sequence
  Description of Artificial Sequence: Synthetic oligonucleotide
uugcuaugguuauucuucg

SEQ ID NO: 3276301 - RNA, 19 nt, Artificial Sequence
  Description of Artificial Sequence: Synthetic oligonucleotide
cuuuacucuguuuguaaac

SEQ ID NO: 3276302 - RNA, 19 nt, Artificial Sequence
  Description of Artificial Sequence: Synthetic oligonucleotide
uacucuguuuguaaaccca

SEQ ID NO: 3276303 - RNA, 19 nt, Artificial Sequence
  Description of Artificial Sequence: Synthetic oligonucleotide
aaggccuguucaucugccc

SEQ ID NO: 3276304 - RNA, 19 nt, Artificial Sequence
  Description of Artificial Sequence: Synthetic oligonucleotide
guugcuaugguuauucuuc

SEQ ID NO: 3276305 - RNA, 19 nt, Artificial Sequence
  Description of Artificial Sequence: Synthetic oligonucleotide
uuggaaguccuucgagccg

SEQ ID NO: 3276306 - RNA, 19 nt, Artificial Sequence
  Description of Artificial Sequence: Synthetic oligonucleotide
ccuuucaccuuguugaucg

SEQ ID NO: 3276307 - RNA, 19 nt, Artificial Sequence
  Description of Artificial Sequence: Synthetic oligonucleotide
uucuuucauguauuuauaa

SEQ ID NO: 3276308 - RNA, 19 nt, Artificial Sequence
  Description of Artificial Sequence: Synthetic oligonucleotide
uauucuucggcuuggucaa

SEQ ID NO: 3276309 - RNA, 19 nt, Artificial Sequence
  Description of Artificial Sequence: Synthetic oligonucleotide
uuguugaucgcuuuaccau

SEQ ID NO: 3276310 - RNA, 19 nt, Artificial Sequence
  Description of Artificial Sequence: Synthetic oligonucleotide
aggaaucucgucucugggg

SEQ ID NO: 3276311 - RNA, 19 nt, Artificial Sequence
  Description of Artificial Sequence: Synthetic oligonucleotide
uuguuggaaguccuucgag

SEQ ID NO: 3276312 - RNA, 19 nt, Artificial Sequence
  Description of Artificial Sequence: Synthetic oligonucleotide
uauuuauaaagugccacua

SEQ ID NO: 3276313 - RNA, 19 nt, Artificial Sequence
  Description of Artificial Sequence: Synthetic oligonucleotide
guucaucugcccuacauuc

SEQ ID NO: 3276314 - RNA, 19 nt, Artificial Sequence
  Description of Artificial Sequence: Synthetic oligonucleotide
auuuauaaagugccacuaa

SEQ ID NO: 3276315 - RNA, 19 nt, Artificial Sequence
  Description of Artificial Sequence: Synthetic oligonucleotide
uuuuacaguugcuaugguu

SEQ ID NO: 3276316 - RNA, 19 nt, Artificial Sequence
  Description of Artificial Sequence: Synthetic oligonucleotide
uguugaucgcuuuaccauc

SEQ ID NO: 3276317 - RNA, 19 nt, Artificial Sequence
  Description of Artificial Sequence: Synthetic oligonucleotide
cuacauucuucgccaaugg

SEQ ID NO: 3276318 - RNA, 19 nt, Artificial Sequence
  Description of Artificial Sequence: Synthetic oligonucleotide
uuucuuucauguauuuaua

SEQ ID NO: 3276319 - RNA, 19 nt, Artificial Sequence
  Description of Artificial Sequence: Synthetic oligonucleotide
aaagugccacuaagaaggc

SEQ ID NO: 3276320 - RNA, 19 nt, Artificial Sequence
  Description of Artificial Sequence: Synthetic oligonucleotide
augguuauucuucggcuug

SEQ ID NO: 3276321 - RNA, 19 nt, Artificial Sequence
  Description of Artificial Sequence: Synthetic oligonucleotide
uuucuuucuuucauguauu

SEQ ID NO: 3276322 - RNA, 19 nt, Artificial Sequence
  Description of Artificial Sequence: Synthetic oligonucleotide
aucugcccuacauucuucg

SEQ ID NO: 3276323 - RNA, 19 nt, Artificial Sequence
  Description of Artificial Sequence: Synthetic oligonucleotide
ggcuuuucuucauuggagg

SEQ ID NO: 3276324 - RNA, 19 nt, Artificial Sequence
  Description of Artificial Sequence: Synthetic oligonucleotide
cuuuggcuuuucuucauug

SEQ ID NO: 3276325 - RNA, 19 nt, Artificial Sequence
  Description of Artificial Sequence: Synthetic oligonucleotide
cauucuucgccaauggaca

SEQ ID NO: 3276326 - RNA, 19 nt, Artificial Sequence
  Description of Artificial Sequence: Synthetic oligonucleotide
cuuguugaucgcuuuacca

SEQ ID NO: 3276327 - RNA, 19 nt, Artificial Sequence
  Description of Artificial Sequence: Synthetic oligonucleotide
aaacccaaguagggaauuc

SEQ ID NO: 3276328 - RNA, 19 nt, Artificial Sequence
  Description of Artificial Sequence: Synthetic oligonucleotide
aacccuuuacucuguuugu

SEQ ID NO: 3276329 - RNA, 19 nt, Artificial Sequence
  Description of Artificial Sequence: Synthetic oligonucleotide
auuguuggaaguccuucga

SEQ ID NO: 3276330 - RNA, 19 nt, Artificial Sequence
  Description of Artificial Sequence: Synthetic oligonucleotide
uacauucuucgccaaugga

SEQ ID NO: 3276331 - RNA, 19 nt, Artificial Sequence
  Description of Artificial Sequence: Synthetic oligonucleotide
aagaaggccuguucaucug

SEQ ID NO: 3276332 - RNA, 19 nt, Artificial Sequence
  Description of Artificial Sequence: Synthetic oligonucleotide
aagugccacuaagaaggcc

SEQ ID NO: 3276333 - RNA, 19 nt, Artificial Sequence
  Description of Artificial Sequence: Synthetic oligonucleotide
agugccacuaagaaggccu

SEQ ID NO: 3276334 - RNA, 19 nt, Artificial Sequence
  Description of Artificial Sequence: Synthetic oligonucleotide
cuuucuuucauguauuuau

SEQ ID NO: 3276335 - RNA, 19 nt, Artificial Sequence
  Description of Artificial Sequence: Synthetic oligonucleotide
uuauuguuggaaguccuuc

SEQ ID NO: 3276336 - RNA, 19 nt, Artificial Sequence
  Description of Artificial Sequence: Synthetic oligonucleotide
aaguccuucgagccgcuga

SEQ ID NO: 3276337 - RNA, 19 nt, Artificial Sequence
  Description of Artificial Sequence: Synthetic oligonucleotide
accaucacaguuauuguug

SEQ ID NO: 3276338 - RNA, 19 nt, Artificial Sequence
  Description of Artificial Sequence: Synthetic oligonucleotide
ugcccuacauucuucgcca

SEQ ID NO: 3276339 - RNA, 19 nt, Artificial Sequence
  Description of Artificial Sequence: Synthetic oligonucleotide
uuaccaucacaguuauugu

SEQ ID NO: 3276340 - RNA, 19 nt, Artificial Sequence
  Description of Artificial Sequence: Synthetic oligonucleotide
uucgccaauggacagcuuu

SEQ ID NO: 3276341 - RNA, 19 nt, Artificial Sequence
  Description of Artificial Sequence: Synthetic oligonucleotide
ugcuaugguuauucuucgg

SEQ ID NO: 3276342 - RNA, 19 nt, Artificial Sequence
  Description of Artificial Sequence: Synthetic oligonucleotide
uuguaaacccaaguaggga

SEQ ID NO: 3276343 - RNA, 19 nt, Artificial Sequence
  Description of Artificial Sequence: Synthetic oligonucleotide
gcuaugguuauucuucggc

SEQ ID NO: 3276344 - RNA, 19 nt, Artificial Sequence
  Description of Artificial Sequence: Synthetic oligonucleotide
ucgcuuuaccaucacaguu

SEQ ID NO: 3276345 - RNA, 19 nt, Artificial Sequence
  Description of Artificial Sequence: Synthetic oligonucleotide
acuaagaaggccuguucau

SEQ ID NO: 3276346 - RNA, 19 nt, Artificial Sequence
  Description of Artificial Sequence: Synthetic oligonucleotide
uaugguuauucuucggcuu

SEQ ID NO: 3276347 - RNA, 19 nt, Artificial Sequence
  Description of Artificial Sequence: Synthetic oligonucleotide
ugcguggucugccuuuaag

SEQ ID NO: 3276348 - RNA, 19 nt, Artificial Sequence
  Description of Artificial Sequence: Synthetic oligonucleotide
uguucaucugcccuacauu

SEQ ID NO: 3276349 - RNA, 19 nt, Artificial Sequence
  Description of Artificial Sequence: Synthetic oligonucleotide
uuaaaugucggccucugag

SEQ ID NO: 3276350 - RNA, 19 nt, Artificial Sequence
  Description of Artificial Sequence: Synthetic oligonucleotide
uucagagacagccagcagg

SEQ ID NO: 3276351 - RNA, 19 nt, Artificial Sequence
  Description of Artificial Sequence: Synthetic oligonucleotide
aguucuuccacugggaugc

SEQ ID NO: 3276352 - RNA, 19 nt, Artificial Sequence
  Description of Artificial Sequence: Synthetic oligonucleotide
uauacacggucaaacaagg

SEQ ID NO: 3276353 - RNA, 19 nt, Artificial Sequence
  Description of Artificial Sequence: Synthetic oligonucleotide
uacacggucaaacaaggcc

SEQ ID NO: 3276354 - RNA, 19 nt, Artificial Sequence
  Description of Artificial Sequence: Synthetic oligonucleotide
aaaugucggccucugagag

SEQ ID NO: 3276355 - RNA, 19 nt, Artificial Sequence
  Description of Artificial Sequence: Synthetic oligonucleotide
ucugguguguguauacacg

SEQ ID NO: 3276356 - RNA, 19 nt, Artificial Sequence
  Description of Artificial Sequence: Synthetic oligonucleotide
agagacagccagcaggacc

SEQ ID NO: 3276357 - RNA, 19 nt, Artificial Sequence
  Description of Artificial Sequence: Synthetic oligonucleotide
ucaggagccauccacuucc

SEQ ID NO: 3276358 - RNA, 19 nt, Artificial Sequence
  Description of Artificial Sequence: Synthetic oligonucleotide
ucaaacaaggccucaggag

SEQ ID NO: 3276359 - RNA, 19 nt, Artificial Sequence
  Description of Artificial Sequence: Synthetic oligonucleotide
caaacaaggccucaggagc

SEQ ID NO: 3276360 - RNA, 19 nt, Artificial Sequence
  Description of Artificial Sequence: Synthetic oligonucleotide
ucucgaagcagugagaaca

SEQ ID NO: 3276361 - RNA, 19 nt, Artificial Sequence
  Description of Artificial Sequence: Synthetic oligonucleotide
caagguacucuucagagac

SEQ ID NO: 3276362 - RNA, 19 nt, Artificial Sequence
  Description of Artificial Sequence: Synthetic oligonucleotide
uguauacacggucaaacaa

SEQ ID NO: 3276363 - RNA, 19 nt, Artificial Sequence
  Description of Artificial Sequence: Synthetic oligonucleotide
gaacaguucuuccacuggg

SEQ ID NO: 3276364 - RNA, 19 nt, Artificial Sequence
  Description of Artificial Sequence: Synthetic oligonucleotide
aacacucccucaucagccc

SEQ ID NO: 3276365 - RNA, 19 nt, Artificial Sequence
  Description of Artificial Sequence: Synthetic oligonucleotide
aaacaaggccucaggagcc

SEQ ID NO: 3276366 - RNA, 19 nt, Artificial Sequence
  Description of Artificial Sequence: Synthetic oligonucleotide
acugcaugccaacacuccc

SEQ ID NO: 3276367 - RNA, 19 nt, Artificial Sequence
  Description of Artificial Sequence: Synthetic oligonucleotide
ucugagagggcacugcaug

SEQ ID NO: 3276368 - RNA, 19 nt, Artificial Sequence
  Description of Artificial Sequence: Synthetic oligonucleotide
gucaagguacucuucagag

SEQ ID NO: 3276369 - RNA, 19 nt, Artificial Sequence
  Description of Artificial Sequence: Synthetic oligonucleotide
uguguauacacggucaaac

SEQ ID NO: 3276370 - RNA, 19 nt, Artificial Sequence
  Description of Artificial Sequence: Synthetic oligonucleotide
aaggucaagguacucuuca

SEQ ID NO: 3276371 - RNA, 19 nt, Artificial Sequence
  Description of Artificial Sequence: Synthetic oligonucleotide
gauacugcaugccucgggc

SEQ ID NO: 3276372 - RNA, 19 nt, Artificial Sequence
  Description of Artificial Sequence: Synthetic oligonucleotide
ugaagauuucccacagcag

SEQ ID NO: 3276373 - RNA, 19 nt, Artificial Sequence
  Description of Artificial Sequence: Synthetic oligonucleotide
gagaccaggaacugggaag

SEQ ID NO: 3276374 - RNA, 19 nt, Artificial Sequence
  Description of Artificial Sequence: Synthetic oligonucleotide
agcugcuuaaaugucggcc

SEQ ID NO: 3276375 - RNA, 19 nt, Artificial Sequence
  Description of Artificial Sequence: Synthetic oligonucleotide
auuucccacagcaggaucc

SEQ ID NO: 3276376 - RNA, 19 nt, Artificial Sequence
  Description of Artificial Sequence: Synthetic oligonucleotide
ucagagacagccagcagga

SEQ ID NO: 3276377 - RNA, 19 nt, Artificial Sequence
  Description of Artificial Sequence: Synthetic oligonucleotide
aacugggaaggagagcggc

SEQ ID NO: 3276378 - RNA, 19 nt, Artificial Sequence
  Description of Artificial Sequence: Synthetic oligonucleotide
aagcagugagaacaguucu

SEQ ID NO: 3276379 - RNA, 19 nt, Artificial Sequence
  Description of Artificial Sequence: Synthetic oligonucleotide
ggaacugggaaggagagcg

SEQ ID NO: 3276380 - RNA, 19 nt, Artificial Sequence
  Description of Artificial Sequence: Synthetic oligonucleotide
guacucuucagagacagcc

SEQ ID NO: 3276381 - RNA, 19 nt, Artificial Sequence
  Description of Artificial Sequence: Synthetic oligonucleotide
gcagguuucccuuaggcgg

SEQ ID NO: 3276382 - RNA, 19 nt, Artificial Sequence
  Description of Artificial Sequence: Synthetic oligonucleotide
agugagaacaguucuucca

SEQ ID NO: 3276383 - RNA, 19 nt, Artificial Sequence
  Description of Artificial Sequence: Synthetic oligonucleotide
uccaccagcugcuuaaaug

SEQ ID NO: 3276384 - RNA, 19 nt, Artificial Sequence
  Description of Artificial Sequence: Synthetic oligonucleotide
uugucuagcgccuccacca

SEQ ID NO: 3276385 - RNA, 19 nt, Artificial Sequence
  Description of Artificial Sequence: Synthetic oligonucleotide
cugguguguguauacacgg

SEQ ID NO: 3276386 - RNA, 19 nt, Artificial Sequence
  Description of Artificial Sequence: Synthetic oligonucleotide
ucuuccacugggaugccag

SEQ ID NO: 3276387 - RNA, 19 nt, Artificial Sequence
  Description of Artificial Sequence: Synthetic oligonucleotide
gugaagauuucccacagca

SEQ ID NO: 3276388 - RNA, 19 nt, Artificial Sequence
  Description of Artificial Sequence: Synthetic oligonucleotide
agaacaguucuuccacugg

SEQ ID NO: 3276389 - RNA, 19 nt, Artificial Sequence
  Description of Artificial Sequence: Synthetic oligonucleotide
aaggccucaggagccaucc

SEQ ID NO: 3276390 - RNA, 19 nt, Artificial Sequence
  Description of Artificial Sequence: Synthetic oligonucleotide
uaaaugucggccucugaga

SEQ ID NO: 3276391 - RNA, 19 nt, Artificial Sequence
  Description of Artificial Sequence: Synthetic oligonucleotide
aaugucggccucugagagg

SEQ ID NO: 3276392 - RNA, 19 nt, Artificial Sequence
  Description of Artificial Sequence: Synthetic oligonucleotide
gaugccaggguauggggag

SEQ ID NO: 3276393 - RNA, 19 nt, Artificial Sequence
  Description of Artificial Sequence: Synthetic oligonucleotide
guauacacggucaaacaag

SEQ ID NO: 3276394 - RNA, 19 nt, Artificial Sequence
  Description of Artificial Sequence: Synthetic oligonucleotide
caggcgaaggucaagguac

SEQ ID NO: 3276395 - RNA, 19 nt, Artificial Sequence
  Description of Artificial Sequence: Synthetic oligonucleotide
agugaagauuucccacagc

SEQ ID NO: 3276396 - RNA, 19 nt, Artificial Sequence
  Description of Artificial Sequence: Synthetic oligonucleotide
cacagcaggaucccaaagg

SEQ ID NO: 3276397 - RNA, 19 nt, Artificial Sequence
  Description of Artificial Sequence: Synthetic oligonucleotide
caacacucccucaucagcc

SEQ ID NO: 3276398 - RNA, 19 nt, Artificial Sequence
  Description of Artificial Sequence: Synthetic oligonucleotide
acucuucagagacagccag

SEQ ID NO: 3276399 - RNA, 19 nt, Artificial Sequence
  Description of Artificial Sequence: Synthetic oligonucleotide
gagaacaguucuuccacug

SEQ ID NO: 3276400 - RNA, 19 nt, Artificial Sequence
  Description of Artificial Sequence: Synthetic oligonucleotide
agcaggaccuugucuagcg

SEQ ID NO: 3276401 - RNA, 19 nt, Artificial Sequence
  Description of Artificial Sequence: Synthetic oligonucleotide
ucuucagagacagccagca

SEQ ID NO: 3276402 - RNA, 19 nt, Artificial Sequence
  Description of Artificial Sequence: Synthetic oligonucleotide
aaggagagcggccccucac

SEQ ID NO: 3276403 - RNA, 19 nt, Artificial Sequence
  Description of Artificial Sequence: Synthetic oligonucleotide
gagugaagauuucccacag

SEQ ID NO: 3276404 - RNA, 19 nt, Artificial Sequence
  Description of Artificial Sequence: Synthetic oligonucleotide
aaaggucaggcgaagguca

SEQ ID NO: 3276405 - RNA, 19 nt, Artificial Sequence
  Description of Artificial Sequence: Synthetic oligonucleotide
gacuccagauacugcaugc

SEQ ID NO: 3276406 - RNA, 19 nt, Artificial Sequence
  Description of Artificial Sequence: Synthetic oligonucleotide
augucggccucugagaggg

SEQ ID NO: 3276407 - RNA, 19 nt, Artificial Sequence
  Description of Artificial Sequence: Synthetic oligonucleotide
auacugcaugccucgggcc

SEQ ID NO: 3276408 - RNA, 19 nt, Artificial Sequence
  Description of Artificial Sequence: Synthetic oligonucleotide
caugccucgggccaccugg

SEQ ID NO: 3276409 - RNA, 19 nt, Artificial Sequence
  Description of Artificial Sequence: Synthetic oligonucleotide
agauacugcaugccucggg

SEQ ID NO: 3276410 - RNA, 19 nt, Artificial Sequence
  Description of Artificial Sequence: Synthetic oligonucleotide
guuucccuuaggcggaacg

SEQ ID NO: 3276411 - RNA, 19 nt, Artificial Sequence
  Description of Artificial Sequence: Synthetic oligonucleotide
ucaagguacucuucagaga

SEQ ID NO: 3276412 - RNA, 19 nt, Artificial Sequence
  Description of Artificial Sequence: Synthetic oligonucleotide
agaccaggaacugggaagg

SEQ ID NO: 3276413 - RNA, 19 nt, Artificial Sequence
  Description of Artificial Sequence: Synthetic oligonucleotide
uuaggcggaacgcacccca

SEQ ID NO: 3276414 - RNA, 19 nt, Artificial Sequence
  Description of Artificial Sequence: Synthetic oligonucleotide
ucccucaucagcccguaca

SEQ ID NO: 3276415 - RNA, 19 nt, Artificial Sequence
  Description of Artificial Sequence: Synthetic oligonucleotide
uguguguauacacggucaa

SEQ ID NO: 3276416 - RNA, 19 nt, Artificial Sequence
  Description of Artificial Sequence: Synthetic oligonucleotide
ucuagcgccuccaccagcu

SEQ ID NO: 3276417 - RNA, 19 nt, Artificial Sequence
  Description of Artificial Sequence: Synthetic oligonucleotide
cuuccgggacuccagauac

SEQ ID NO: 3276418 - RNA, 19 nt, Artificial Sequence
  Description of Artificial Sequence: Synthetic oligonucleotide
gugagaacaguucuuccac

SEQ ID NO: 3276419 - RNA, 19 nt, Artificial Sequence
  Description of Artificial Sequence: Synthetic oligonucleotide
uccugugccccucucgaag

SEQ ID NO: 3276420 - RNA, 19 nt, Artificial Sequence
  Description of Artificial Sequence: Synthetic oligonucleotide
aagauuucccacagcagga

SEQ ID NO: 3276421 - RNA, 19 nt, Artificial Sequence
  Description of Artificial Sequence: Synthetic oligonucleotide
uccagauacugcaugccuc

SEQ ID NO: 3276422 - RNA, 19 nt, Artificial Sequence
  Description of Artificial Sequence: Synthetic oligonucleotide
cucacugcuccgaggaccg

SEQ ID NO: 3276423 - RNA, 19 nt, Artificial Sequence
  Description of Artificial Sequence: Synthetic oligonucleotide
agguacucuucagagacag

SEQ ID NO: 3276424 - RNA, 19 nt, Artificial Sequence
  Description of Artificial Sequence: Synthetic oligonucleotide
gaagcagugagaacaguuc

SEQ ID NO: 3276425 - RNA, 19 nt, Artificial Sequence
  Description of Artificial Sequence: Synthetic oligonucleotide
agcccguacaacucugggg

SEQ ID NO: 3276426 - RNA, 19 nt, Artificial Sequence
  Description of Artificial Sequence: Synthetic oligonucleotide
ggagccauccacuuccggg

SEQ ID NO: 3276427 - RNA, 19 nt, Artificial Sequence
  Description of Artificial Sequence: Synthetic oligonucleotide
acuccagauacugcaugcc

SEQ ID NO: 3276428 - RNA, 19 nt, Artificial Sequence
  Description of Artificial Sequence: Synthetic oligonucleotide
uacucuucagagacagcca

SEQ ID NO: 3276429 - RNA, 19 nt, Artificial Sequence
  Description of Artificial Sequence: Synthetic oligonucleotide
ugccaacacucccucauca

SEQ ID NO: 3276430 - RNA, 19 nt, Artificial Sequence
  Description of Artificial Sequence: Synthetic oligonucleotide
uacugcaugccucgggcca

SEQ ID NO: 3276431 - RNA, 19 nt, Artificial Sequence
  Description of Artificial Sequence: Synthetic oligonucleotide
ugggaugccaggguauggg

SEQ ID NO: 3276432 - RNA, 19 nt, Artificial Sequence
  Description of Artificial Sequence: Synthetic oligonucleotide
caggaccuugucuagcgcc

SEQ ID NO: 3276433 - RNA, 19 nt, Artificial Sequence
  Description of Artificial Sequence: Synthetic oligonucleotide
ucagcccguacaacucugg

SEQ ID NO: 3276434 - RNA, 19 nt, Artificial Sequence
  Description of Artificial Sequence: Synthetic oligonucleotide
ucaucagcccguacaacuc

SEQ ID NO: 3276435 - RNA, 19 nt, Artificial Sequence
  Description of Artificial Sequence: Synthetic oligonucleotide
ugagaacaguucuuccacu

SEQ ID NO: 3276436 - RNA, 19 nt, Artificial Sequence
  Description of Artificial Sequence: Synthetic oligonucleotide
cuugucuagcgccuccacc

SEQ ID NO: 3276437 - RNA, 19 nt, Artificial Sequence
  Description of Artificial Sequence: Synthetic oligonucleotide
uccacuuccgggacuccag

SEQ ID NO: 3276438 - RNA, 19 nt, Artificial Sequence
  Description of Artificial Sequence: Synthetic oligonucleotide
accagcugcuuaaaugucg

SEQ ID NO: 3276439 - RNA, 19 nt, Artificial Sequence
  Description of Artificial Sequence: Synthetic oligonucleotide
ucaggcgaaggucaaggua

SEQ ID NO: 3276440 - RNA, 19 nt, Artificial Sequence
  Description of Artificial Sequence: Synthetic oligonucleotide
caggaacugggaaggagag

SEQ ID NO: 3276441 - RNA, 19 nt, Artificial Sequence
  Description of Artificial Sequence: Synthetic oligonucleotide
cucugguguguguauacac

SEQ ID NO: 3276442 - RNA, 19 nt, Artificial Sequence
  Description of Artificial Sequence: Synthetic oligonucleotide
uuucccuuaggcggaacgc

SEQ ID NO: 3276443 - RNA, 19 nt, Artificial Sequence
  Description of Artificial Sequence: Synthetic oligonucleotide
acacggucaaacaaggccu

SEQ ID NO: 3276444 - RNA, 19 nt, Artificial Sequence
  Description of Artificial Sequence: Synthetic oligonucleotide
cugagagggcacugcaugc

SEQ ID NO: 3276445 - RNA, 19 nt, Artificial Sequence
  Description of Artificial Sequence: Synthetic oligonucleotide
accgucggggcugaggucg

SEQ ID NO: 3276446 - RNA, 19 nt, Artificial Sequence
  Description of Artificial Sequence: Synthetic oligonucleotide
uccaaaggucaggcgaagg

SEQ ID NO: 3276447 - RNA, 19 nt, Artificial Sequence
  Description of Artificial Sequence: Synthetic oligonucleotide
aacgcaccccacgaucacg

SEQ ID NO: 3276448 - RNA, 19 nt, Artificial Sequence
  Description of Artificial Sequence: Synthetic oligonucleotide
cacugcaugccaacacucc

SEQ ID NO: 3276449 - RNA, 19 nt, Artificial Sequence
  Description of Artificial Sequence: Synthetic oligonucleotide
aauacagaguuauaucugc

SEQ ID NO: 3276450 - RNA, 19 nt, Artificial Sequence
  Description of Artificial Sequence: Synthetic oligonucleotide
aaaccuauaucauauuugg

SEQ ID NO: 3276451 - RNA, 19 nt, Artificial Sequence
  Description of Artificial Sequence: Synthetic oligonucleotide
uagacuaugaaaauauugg

SEQ ID NO: 3276452 - RNA, 19 nt, Artificial Sequence
  Description of Artificial Sequence: Synthetic oligonucleotide
aaaauacagaguuauaucu

SEQ ID NO: 3276453 - RNA, 19 nt, Artificial Sequence
  Description of Artificial Sequence: Synthetic oligonucleotide
agauaagacauauucuugc

SEQ ID NO: 3276454 - RNA, 19 nt, Artificial Sequence
  Description of Artificial Sequence: Synthetic oligonucleotide
uauaucacauauuugaaga

SEQ ID NO: 3276455 - RNA, 19 nt, Artificial Sequence
  Description of Artificial Sequence: Synthetic oligonucleotide
uaagaauucacuauauuac

SEQ ID NO: 3276456 - RNA, 19 nt, Artificial Sequence
  Description of Artificial Sequence: Synthetic oligonucleotide
uguuaaagagacaaugucc

SEQ ID NO: 3276457 - RNA, 19 nt, Artificial Sequence
  Description of Artificial Sequence: Synthetic oligonucleotide
acuacugucuuaaauaucc

SEQ ID NO: 3276458 - RNA, 19 nt, Artificial Sequence
  Description of Artificial Sequence: Synthetic oligonucleotide
aaacaugcagguuugaaca

SEQ ID NO: 3276459 - RNA, 19 nt, Artificial Sequence
  Description of Artificial Sequence: Synthetic oligonucleotide
uuauguguauucuauauca

SEQ ID NO: 3276460 - RNA, 19 nt, Artificial Sequence
  Description of Artificial Sequence: Synthetic oligonucleotide
aguuaaaacacauuaagau

SEQ ID NO: 3276461 - RNA, 19 nt, Artificial Sequence
  Description of Artificial Sequence: Synthetic oligonucleotide
aaaaugggaaaacugaaau

SEQ ID NO: 3276462 - RNA, 19 nt, Artificial Sequence
  Description of Artificial Sequence: Synthetic oligonucleotide
uauucuauaucacauauuu

SEQ ID NO: 3276463 - RNA, 19 nt, Artificial Sequence
  Description of Artificial Sequence: Synthetic oligonucleotide
accuauaucauauuuggag

SEQ ID NO: 3276464 - RNA, 19 nt, Artificial Sequence
  Description of Artificial Sequence: Synthetic oligonucleotide
auaucugcagcuuacggac

SEQ ID NO: 3276465 - RNA, 19 nt, Artificial Sequence
  Description of Artificial Sequence: Synthetic oligonucleotide
agaaccacaacuuuuauau

SEQ ID NO: 3276466 - RNA, 19 nt, Artificial Sequence
  Description of Artificial Sequence: Synthetic oligonucleotide
uuauauuauuuuauacuag

SEQ ID NO: 3276467 - RNA, 19 nt, Artificial Sequence
  Description of Artificial Sequence: Synthetic oligonucleotide
uucacuucuucacaggagg

SEQ ID NO: 3276468 - RNA, 19 nt, Artificial Sequence
  Description of Artificial Sequence: Synthetic oligonucleotide
agaggagagaguucaagcc

SEQ ID NO: 3276469 - RNA, 19 nt, Artificial Sequence
  Description of Artificial Sequence: Synthetic oligonucleotide
acuaguaugcuuuuaggag

SEQ ID NO: 3276470 - RNA, 19 nt, Artificial Sequence
  Description of Artificial Sequence: Synthetic oligonucleotide
ugaagaaucaugugacugg

SEQ ID NO: 3276471 - RNA, 19 nt, Artificial Sequence
  Description of Artificial Sequence: Synthetic oligonucleotide
uuucucuuccuaaacaugc

SEQ ID NO: 3276472 - RNA, 19 nt, Artificial Sequence
  Description of Artificial Sequence: Synthetic oligonucleotide
ugagagaauaaucagccga

SEQ ID NO: 3276473 - RNA, 19 nt, Artificial Sequence
  Description of Artificial Sequence: Synthetic oligonucleotide
accucauaaaccuauauca

SEQ ID NO: 3276474 - RNA, 19 nt, Artificial Sequence
  Description of Artificial Sequence: Synthetic oligonucleotide
ucauauuuggaguggaaag

SEQ ID NO: 3276475 - RNA, 19 nt, Artificial Sequence
  Description of Artificial Sequence: Synthetic oligonucleotide
uuuagcaagaagaaccaca

SEQ ID NO: 3276476 - RNA, 19 nt, Artificial Sequence
  Description of Artificial Sequence: Synthetic oligonucleotide
gaauucacuauauuacugc

SEQ ID NO: 3276477 - RNA, 19 nt, Artificial Sequence
  Description of Artificial Sequence: Synthetic oligonucleotide
uguagaguauccuccaggg

SEQ ID NO: 3276478 - RNA, 19 nt, Artificial Sequence
  Description of Artificial Sequence: Synthetic oligonucleotide
ucauuuauuuagcaagaag

SEQ ID NO: 3276479 - RNA, 19 nt, Artificial Sequence
  Description of Artificial Sequence: Synthetic oligonucleotide
augaacuucuuucauauug

SEQ ID NO: 3276480 - RNA, 19 nt, Artificial Sequence
  Description of Artificial Sequence: Synthetic oligonucleotide
cuauucagcaagcugauag

SEQ ID NO: 3276481 - RNA, 19 nt, Artificial Sequence
  Description of Artificial Sequence: Synthetic oligonucleotide
auguuaaagagacaauguc

SEQ ID NO: 3276482 - RNA, 19 nt, Artificial Sequence
  Description of Artificial Sequence: Synthetic oligonucleotide
uuuuauacuagacuaugaa

SEQ ID NO: 3276483 - RNA, 19 nt, Artificial Sequence
  Description of Artificial Sequence: Synthetic oligonucleotide
uuguacugcacacucagag

SEQ ID NO: 3276484 - RNA, 19 nt, Artificial Sequence
  Description of Artificial Sequence: Synthetic oligonucleotide
ucugaugauccuauugagg

SEQ ID NO: 3276485 - RNA, 19 nt, Artificial Sequence
  Description of Artificial Sequence: Synthetic oligonucleotide
gacauauucuugcaagacg

SEQ ID NO: 3276486 - RNA, 19 nt, Artificial Sequence
  Description of Artificial Sequence: Synthetic oligonucleotide
uuauaucugcagcuuacgg

SEQ ID NO: 3276487 - RNA, 19 nt, Artificial Sequence
  Description of Artificial Sequence: Synthetic oligonucleotide
uuuaguaagaauucacuau

SEQ ID NO: 3276488 - RNA, 19 nt, Artificial Sequence
  Description of Artificial Sequence: Synthetic oligonucleotide
uguauucuauaucacauau

SEQ ID NO: 3276489 - RNA, 19 nt, Artificial Sequence
  Description of Artificial Sequence: Synthetic oligonucleotide
uguuguacugcacacucag

SEQ ID NO: 3276490 - RNA, 19 nt, Artificial Sequence
  Description of Artificial Sequence: Synthetic oligonucleotide
cuuuuaggaguuaaaacac

SEQ ID NO: 3276491 - RNA, 19 nt, Artificial Sequence
  Description of Artificial Sequence: Synthetic oligonucleotide
uauguuagacagaaugagc

SEQ ID NO: 3276492 - RNA, 19 nt, Artificial Sequence
  Description of Artificial Sequence: Synthetic oligonucleotide
uauugggaagauaagacau

SEQ ID NO: 3276493 - RNA, 19 nt, Artificial Sequence
  Description of Artificial Sequence: Synthetic oligonucleotide
uuaguaagaauucacuaua

SEQ ID NO: 3276494 - RNA, 19 nt, Artificial Sequence
  Description of Artificial Sequence: Synthetic oligonucleotide
ugauuacagacauaguaug

SEQ ID NO: 3276495 - RNA, 19 nt, Artificial Sequence
  Description of Artificial Sequence: Synthetic oligonucleotide
aauucacuauauuacugcu

SEQ ID NO: 3276496 - RNA, 19 nt, Artificial Sequence
  Description of Artificial Sequence: Synthetic oligonucleotide
ucacauuucaugacuacug

SEQ ID NO: 3276497 - RNA, 19 nt, Artificial Sequence
  Description of Artificial Sequence: Synthetic oligonucleotide
uauuugaagaauaaucauu

SEQ ID NO: 3276498 - RNA, 19 nt, Artificial Sequence
  Description of Artificial Sequence: Synthetic oligonucleotide
uguguauucuauaucacau

SEQ ID NO: 3276499 - RNA, 19 nt, Artificial Sequence
  Description of Artificial Sequence: Synthetic oligonucleotide
uaguaugccaauguuaaag

SEQ ID NO: 3276500 - RNA, 19 nt, Artificial Sequence
  Description of Artificial Sequence: Synthetic oligonucleotide
uggaaugacgcuaccauug

SEQ ID NO: 3276501 - RNA, 19 nt, Artificial Sequence
  Description of Artificial Sequence: Synthetic oligonucleotide
ucuuaaaauacagaguuau

SEQ ID NO: 3276502 - RNA, 19 nt, Artificial Sequence
  Description of Artificial Sequence: Synthetic oligonucleotide
gucuuaaauauccuuuagg

SEQ ID NO: 3276503 - RNA, 19 nt, Artificial Sequence
  Description of Artificial Sequence: Synthetic oligonucleotide
cuauaucacauauuugaag

SEQ ID NO: 3276504 - RNA, 19 nt, Artificial Sequence
  Description of Artificial Sequence: Synthetic oligonucleotide
guuauauuauuuuauacua

SEQ ID NO: 3276505 - RNA, 19 nt, Artificial Sequence
  Description of Artificial Sequence: Synthetic oligonucleotide
ggaguuaaaacacauuaag

SEQ ID NO: 3276506 - RNA, 19 nt, Artificial Sequence
  Description of Artificial Sequence: Synthetic oligonucleotide
cuacugauuacagacauag

SEQ ID NO: 3276507 - RNA, 19 nt, Artificial Sequence
  Description of Artificial Sequence: Synthetic oligonucleotide
uauaucugcagcuuacgga

SEQ ID NO: 3276508 - RNA, 19 nt, Artificial Sequence
  Description of Artificial Sequence: Synthetic oligonucleotide
aacaucggcaauuuuguaa

SEQ ID NO: 3276509 - RNA, 19 nt, Artificial Sequence
  Description of Artificial Sequence: Synthetic oligonucleotide
uauuuuauacuagacuaug

SEQ ID NO: 3276510 - RNA, 19 nt, Artificial Sequence
  Description of Artificial Sequence: Synthetic oligonucleotide
ucuugcaagacguaugaac

SEQ ID NO: 3276511 - RNA, 19 nt, Artificial Sequence
  Description of Artificial Sequence: Synthetic oligonucleotide
ugcgcuaucuuccagggcu

SEQ ID NO: 3276512 - RNA, 19 nt, Artificial Sequence
  Description of Artificial Sequence: Synthetic oligonucleotide
aaaaucucaacaguucacu

SEQ ID NO: 3276513 - RNA, 19 nt, Artificial Sequence
  Description of Artificial Sequence: Synthetic oligonucleotide
auacacauggcauaaaaua

SEQ ID NO: 3276514 - RNA, 19 nt, Artificial Sequence
  Description of Artificial Sequence: Synthetic oligonucleotide
ucugguuauauuauuuuau

SEQ ID NO: 3276515 - RNA, 19 nt, Artificial Sequence
  Description of Artificial Sequence: Synthetic oligonucleotide
uauucuugcaagacguaug

SEQ ID NO: 3276516 - RNA, 19 nt, Artificial Sequence
  Description of Artificial Sequence: Synthetic oligonucleotide
ucuaguuucuagccuagca

SEQ ID NO: 3276517 - RNA, 19 nt, Artificial Sequence
  Description of Artificial Sequence: Synthetic oligonucleotide
aaaacaucggcaauuuugu

SEQ ID NO: 3276518 - RNA, 19 nt, Artificial Sequence
  Description of Artificial Sequence: Synthetic oligonucleotide
guaagaauucacuauauua

SEQ ID NO: 3276519 - RNA, 19 nt, Artificial Sequence
  Description of Artificial Sequence: Synthetic oligonucleotide
aagaguacaugcuacugau

SEQ ID NO: 3276520 - RNA, 19 nt, Artificial Sequence
  Description of Artificial Sequence: Synthetic oligonucleotide
aaaacauugccuggaauga

SEQ ID NO: 3276521 - RNA, 19 nt, Artificial Sequence
  Description of Artificial Sequence: Synthetic oligonucleotide
ugguuauauuauuuuauac

SEQ ID NO: 3276522 - RNA, 19 nt, Artificial Sequence
  Description of Artificial Sequence: Synthetic oligonucleotide
uguacugcacacucagagg

SEQ ID NO: 3276523 - RNA, 19 nt, Artificial Sequence
  Description of Artificial Sequence: Synthetic oligonucleotide
uuuuccaauccuuccaucu

SEQ ID NO: 3276524 - RNA, 19 nt, Artificial Sequence
  Description of Artificial Sequence: Synthetic oligonucleotide
aagacauauucuugcaaga

SEQ ID NO: 3276525 - RNA, 19 nt, Artificial Sequence
  Description of Artificial Sequence: Synthetic oligonucleotide
ugaacuucuuucauauugu

SEQ ID NO: 3276526 - RNA, 19 nt, Artificial Sequence
  Description of Artificial Sequence: Synthetic oligonucleotide
uccuauuuuacuacuguaa

SEQ ID NO: 3276527 - RNA, 19 nt, Artificial Sequence
  Description of Artificial Sequence: Synthetic oligonucleotide
uugucuuucucucauuuuc

SEQ ID NO: 3276528 - RNA, 19 nt, Artificial Sequence
  Description of Artificial Sequence: Synthetic oligonucleotide
uuauuuuauacuagacuau

SEQ ID NO: 3276529 - RNA, 19 nt, Artificial Sequence
  Description of Artificial Sequence: Synthetic oligonucleotide
cauauuuggaguggaaagg

SEQ ID NO: 3276530 - RNA, 19 nt, Artificial Sequence
  Description of Artificial Sequence: Synthetic oligonucleotide
auauugggaagauaagaca

SEQ ID NO: 3276531 - RNA, 19 nt, Artificial Sequence
  Description of Artificial Sequence: Synthetic oligonucleotide
ucuuccuaaacaugcaggu

SEQ ID NO: 3276532 - RNA, 19 nt, Artificial Sequence
  Description of Artificial Sequence: Synthetic oligonucleotide
agccuagcaucccucaugc

SEQ ID NO: 3276533 - RNA, 19 nt, Artificial Sequence
  Description of Artificial Sequence: Synthetic oligonucleotide
gcuuuuaggaguuaaaaca

SEQ ID NO: 3276534 - RNA, 19 nt, Artificial Sequence
  Description of Artificial Sequence: Synthetic oligonucleotide
aacauugccuggaaugacg

SEQ ID NO: 3276535 - RNA, 19 nt, Artificial Sequence
  Description of Artificial Sequence: Synthetic oligonucleotide
auaccguaccaccuucucc

SEQ ID NO: 3276536 - RNA, 19 nt, Artificial Sequence
  Description of Artificial Sequence: Synthetic oligonucleotide
uauacuagacuaugaaaau

SEQ ID NO: 3276537 - RNA, 19 nt, Artificial Sequence
  Description of Artificial Sequence: Synthetic oligonucleotide
aaucagccgagaauucugc

SEQ ID NO: 3276538 - RNA, 19 nt, Artificial Sequence
  Description of Artificial Sequence: Synthetic oligonucleotide
guauguuagacagaaugag

SEQ ID NO: 3276539 - RNA, 19 nt, Artificial Sequence
  Description of Artificial Sequence: Synthetic oligonucleotide
augacuacugucuuaaaua

SEQ ID NO: 3276540 - RNA, 19 nt, Artificial Sequence
  Description of Artificial Sequence: Synthetic oligonucleotide
uucauagacuuuaguaaga

SEQ ID NO: 3276541 - RNA, 19 nt, Artificial Sequence
  Description of Artificial Sequence: Synthetic oligonucleotide
uucugaugauccuauugag

SEQ ID NO: 3276542 - RNA, 19 nt, Artificial Sequence
  Description of Artificial Sequence: Synthetic oligonucleotide
uuucacuucuucacaggag

SEQ ID NO: 3276543 - RNA, 19 nt, Artificial Sequence
  Description of Artificial Sequence: Synthetic oligonucleotide
aaucucaacaguucacuuu

SEQ ID NO: 3276544 - RNA, 19 nt, Artificial Sequence
  Description of Artificial Sequence: Synthetic oligonucleotide
uugaggauaccguaccacc

SEQ ID NO: 3276545 - RNA, 19 nt, Artificial Sequence
  Description of Artificial Sequence: Synthetic oligonucleotide
accaucauagccuuuuagu

SEQ ID NO: 3276546 - RNA, 19 nt, Artificial Sequence
  Description of Artificial Sequence: Synthetic oligonucleotide
cauaguaugccaauguuaa

SEQ ID NO: 3276547 - RNA, 19 nt, Artificial Sequence
  Description of Artificial Sequence: Synthetic oligonucleotide
ucuccuauuuuacuacugu

SEQ ID NO: 3276548 - RNA, 19 nt, Artificial Sequence
  Description of Artificial Sequence: Synthetic oligonucleotide
ucugucauuuauuuagcaa

SEQ ID NO: 3276549 - RNA, 19 nt, Artificial Sequence
  Description of Artificial Sequence: Synthetic oligonucleotide
aaaauucugaaauagcagc

SEQ ID NO: 3276550 - RNA, 19 nt, Artificial Sequence
  Description of Artificial Sequence: Synthetic oligonucleotide
uuugagaaaaguaucauca

SEQ ID NO: 3276551 - RNA, 19 nt, Artificial Sequence
  Description of Artificial Sequence: Synthetic oligonucleotide
aaaauggaaaauuugagaa

SEQ ID NO: 3276552 - RNA, 19 nt, Artificial Sequence
  Description of Artificial Sequence: Synthetic oligonucleotide
aaagcggaaacacaaugcc

SEQ ID NO: 3276553 - RNA, 19 nt, Artificial Sequence
  Description of Artificial Sequence: Synthetic oligonucleotide
aaggauaccgguauuagcc

SEQ ID NO: 3276554 - RNA, 19 nt, Artificial Sequence
  Description of Artificial Sequence: Synthetic oligonucleotide
gauaaaauaauccugggaa

SEQ ID NO: 3276555 - RNA, 19 nt, Artificial Sequence
  Description of Artificial Sequence: Synthetic oligonucleotide
uccaaugccuuccagaacg

SEQ ID NO: 3276556 - RNA, 19 nt, Artificial Sequence
  Description of Artificial Sequence: Synthetic oligonucleotide
aucauuaaggcuuuucugg

SEQ ID NO: 3276557 - RNA, 19 nt, Artificial Sequence
  Description of Artificial Sequence: Synthetic oligonucleotide
uauucuuuguaauagaaaa

SEQ ID NO: 3276558 - RNA, 19 nt, Artificial Sequence
  Description of Artificial Sequence: Synthetic oligonucleotide
aauguggucagagaaugcc

SEQ ID NO: 3276559 - RNA, 19 nt, Artificial Sequence
  Description of Artificial Sequence: Synthetic oligonucleotide
uucaucacauuaaagacug

SEQ ID NO: 3276560 - RNA, 19 nt, Artificial Sequence
  Description of Artificial Sequence: Synthetic oligonucleotide
gguaagaugacauagcucc

SEQ ID NO: 3276561 - RNA, 19 nt, Artificial Sequence
  Description of Artificial Sequence: Synthetic oligonucleotide
ugucuguccaucaagauac

SEQ ID NO: 3276562 - RNA, 19 nt, Artificial Sequence
  Description of Artificial Sequence: Synthetic oligonucleotide
uaaagcaggaagcuuaaag

SEQ ID NO: 3276563 - RNA, 19 nt, Artificial Sequence
  Description of Artificial Sequence: Synthetic oligonucleotide
auuacuuuauuuguugacc

SEQ ID NO: 3276564 - RNA, 19 nt, Artificial Sequence
  Description of Artificial Sequence: Synthetic oligonucleotide
aaagcaauugcuguauugg

SEQ ID NO: 3276565 - RNA, 19 nt, Artificial Sequence
  Description of Artificial Sequence: Synthetic oligonucleotide
uguagcauuugaaaucugg

SEQ ID NO: 3276566 - RNA, 19 nt, Artificial Sequence
  Description of Artificial Sequence: Synthetic oligonucleotide
uaugcauagcuucacagcc

SEQ ID NO: 3276567 - RNA, 19 nt, Artificial Sequence
  Description of Artificial Sequence: Synthetic oligonucleotide
ucugaaugcacauacuaag

SEQ ID NO: 3276568 - RNA, 19 nt, Artificial Sequence
  Description of Artificial Sequence: Synthetic oligonucleotide
acuaaauccaaggauaccg

SEQ ID NO: 3276569 - RNA, 19 nt, Artificial Sequence
  Description of Artificial Sequence: Synthetic oligonucleotide
caagaaacuaaauccaagg

SEQ ID NO: 3276570 - RNA, 19 nt, Artificial Sequence
  Description of Artificial Sequence: Synthetic oligonucleotide
aacaacaucauguggcaag

SEQ ID NO: 3276571 - RNA, 19 nt, Artificial Sequence
  Description of Artificial Sequence: Synthetic oligonucleotide
uauugcaaguaaaacaaug

SEQ ID NO: 3276572 - RNA, 19 nt, Artificial Sequence
  Description of Artificial Sequence: Synthetic oligonucleotide
uuccagguaauccaaaugc

SEQ ID NO: 3276573 - RNA, 19 nt, Artificial Sequence
  Description of Artificial Sequence: Synthetic oligonucleotide
uuugaaaucuggaacacuc

SEQ ID NO: 3276574 - RNA, 19 nt, Artificial Sequence
  Description of Artificial Sequence: Synthetic oligonucleotide
uaagcaggaacaaagcccc

SEQ ID NO: 3276575 - RNA, 19 nt, Artificial Sequence
  Description of Artificial Sequence: Synthetic oligonucleotide
aaugauaaacugcuugugu

SEQ ID NO: 3276576 - RNA, 19 nt, Artificial Sequence
  Description of Artificial Sequence: Synthetic oligonucleotide
cauacuaagcaggagaugg

SEQ ID NO: 3276577 - RNA, 19 nt, Artificial Sequence
  Description of Artificial Sequence: Synthetic oligonucleotide
caguaaaugggcaauauug

SEQ ID NO: 3276578 - RNA, 19 nt, Artificial Sequence
  Description of Artificial Sequence: Synthetic oligonucleotide
uuaaaagguaagaugacau

SEQ ID NO: 3276579 - RNA, 19 nt, Artificial Sequence
  Description of Artificial Sequence: Synthetic oligonucleotide
aguaagaagccaguaaagc

SEQ ID NO: 3276580 - RNA, 19 nt, Artificial Sequence
  Description of Artificial Sequence: Synthetic oligonucleotide
uguaauagaaaauuacuuu

SEQ ID NO: 3276581 - RNA, 19 nt, Artificial Sequence
  Description of Artificial Sequence: Synthetic oligonucleotide
acaaaguaaagcaggaagc

SEQ ID NO: 3276582 - RNA, 19 nt, Artificial Sequence
  Description of Artificial Sequence: Synthetic oligonucleotide
auuugagaaaaguaucauc

SEQ ID NO: 3276583 - RNA, 19 nt, Artificial Sequence
  Description of Artificial Sequence: Synthetic oligonucleotide
aaagguaagaugacauagc

SEQ ID NO: 3276584 - RNA, 19 nt, Artificial Sequence
  Description of Artificial Sequence: Synthetic oligonucleotide
aagaaacuaaauccaagga

SEQ ID NO: 3276585 - RNA, 19 nt, Artificial Sequence
  Description of Artificial Sequence: Synthetic oligonucleotide
aaucuggaacacuccaucg

SEQ ID NO: 3276586 - RNA, 19 nt, Artificial Sequence
  Description of Artificial Sequence: Synthetic oligonucleotide
aaacacaaugccaacacag

SEQ ID NO: 3276587 - RNA, 19 nt, Artificial Sequence
  Description of Artificial Sequence: Synthetic oligonucleotide
aagacugagagaccaaaug

SEQ ID NO: 3276588 - RNA, 19 nt, Artificial Sequence
  Description of Artificial Sequence: Synthetic oligonucleotide
gauaagcaggaacaaagcc

SEQ ID NO: 3276589 - RNA, 19 nt, Artificial Sequence
  Description of Artificial Sequence: Synthetic oligonucleotide
aaagaguccaagaucuucg

SEQ ID NO: 3276590 - RNA, 19 nt, Artificial Sequence
  Description of Artificial Sequence: Synthetic oligonucleotide
ugaguaagaagccaguaaa

SEQ ID NO: 3276591 - RNA, 19 nt, Artificial Sequence
  Description of Artificial Sequence: Synthetic oligonucleotide
uuacuuuauuuguugaccc

SEQ ID NO: 3276592 - RNA, 19 nt, Artificial Sequence
  Description of Artificial Sequence: Synthetic oligonucleotide
aauauugagguauggcaga

SEQ ID NO: 3276593 - RNA, 19 nt, Artificial Sequence
  Description of Artificial Sequence: Synthetic oligonucleotide
aagguaagaugacauagcu

SEQ ID NO: 3276594 - RNA, 19 nt, Artificial Sequence
  Description of Artificial Sequence: Synthetic oligonucleotide
gacaacaacaucauguggc

SEQ ID NO: 3276595 - RNA, 19 nt, Artificial Sequence
  Description of Artificial Sequence: Synthetic oligonucleotide
uuucugguaauaauuuccc

SEQ ID NO: 3276596 - RNA, 19 nt, Artificial Sequence
  Description of Artificial Sequence: Synthetic oligonucleotide
aauaauuucccugaguaua

SEQ ID NO: 3276597 - RNA, 19 nt, Artificial Sequence
  Description of Artificial Sequence: Synthetic oligonucleotide
caagguaccagugauaagc

SEQ ID NO: 3276598 - RNA, 19 nt, Artificial Sequence
  Description of Artificial Sequence: Synthetic oligonucleotide
aauccaugaaaauggaaaa

SEQ ID NO: 3276599 - RNA, 19 nt, Artificial Sequence
  Description of Artificial Sequence: Synthetic oligonucleotide
cuaaguuucagauaaaaua

SEQ ID NO: 3276600 - RNA, 19 nt, Artificial Sequence
  Description of Artificial Sequence: Synthetic oligonucleotide
agcaaagaacaccauaaag

SEQ ID NO: 3276601 - RNA, 19 nt, Artificial Sequence
  Description of Artificial Sequence: Synthetic oligonucleotide
uuuuaauaauuaaaaggua

SEQ ID NO: 3276602 - RNA, 19 nt, Artificial Sequence
  Description of Artificial Sequence: Synthetic oligonucleotide
aagaaagccuauuuuggga

SEQ ID NO: 3276603 - RNA, 19 nt, Artificial Sequence
  Description of Artificial Sequence: Synthetic oligonucleotide
aaagccuauuuugggaagc

SEQ ID NO: 3276604 - RNA, 19 nt, Artificial Sequence
  Description of Artificial Sequence: Synthetic oligonucleotide
aauagcagcaggaagcucu

SEQ ID NO: 3276605 - RNA, 19 nt, Artificial Sequence
  Description of Artificial Sequence: Synthetic oligonucleotide
uaauguugagcgcuaaugu

SEQ ID NO: 3276606 - RNA, 19 nt, Artificial Sequence
  Description of Artificial Sequence: Synthetic oligonucleotide
uuauuauugugccugccac

SEQ ID NO: 3276607 - RNA, 19 nt, Artificial Sequence
  Description of Artificial Sequence: Synthetic oligonucleotide
ugagguauggcagagaaau

SEQ ID NO: 3276608 - RNA, 19 nt, Artificial Sequence
  Description of Artificial Sequence: Synthetic oligonucleotide
aguaugcauagcuucacag

SEQ ID NO: 3276609 - RNA, 19 nt, Artificial Sequence
  Description of Artificial Sequence: Synthetic oligonucleotide
uaaccuuguaguaauucug

SEQ ID NO: 3276610 - RNA, 19 nt, Artificial Sequence
  Description of Artificial Sequence: Synthetic oligonucleotide
ugcacuuuaaggucacagg

SEQ ID NO: 3276611 - RNA, 19 nt, Artificial Sequence
  Description of Artificial Sequence: Synthetic oligonucleotide
uuuugggaagcagugaaag

SEQ ID NO: 3276612 - RNA, 19 nt, Artificial Sequence
  Description of Artificial Sequence: Synthetic oligonucleotide
ugauaagcaggaacaaagc

SEQ ID NO: 3276613 - RNA, 19 nt, Artificial Sequence
  Description of Artificial Sequence: Synthetic oligonucleotide
agguucguugcuuagcaac

SEQ ID NO: 3276614 - RNA, 19 nt, Artificial Sequence
  Description of Artificial Sequence: Synthetic oligonucleotide
auuaaagacugagagacca

SEQ ID NO: 3276615 - RNA, 19 nt, Artificial Sequence
  Description of Artificial Sequence: Synthetic oligonucleotide
aacuaaauccaaggauacc

SEQ ID NO: 3276616 - RNA, 19 nt, Artificial Sequence
  Description of Artificial Sequence: Synthetic oligonucleotide
aauucugaaauagcagcag

SEQ ID NO: 3276617 - RNA, 19 nt, Artificial Sequence
  Description of Artificial Sequence: Synthetic oligonucleotide
ugcaaguaaaacaaugaua

SEQ ID NO: 3276618 - RNA, 19 nt, Artificial Sequence
  Description of Artificial Sequence: Synthetic oligonucleotide
caagaaagccuauuuuggg

SEQ ID NO: 3276619 - RNA, 19 nt, Artificial Sequence
  Description of Artificial Sequence: Synthetic oligonucleotide
guaaaugggcaauauugag

SEQ ID NO: 3276620 - RNA, 19 nt, Artificial Sequence
  Description of Artificial Sequence: Synthetic oligonucleotide
guaauaauuucccugagua

SEQ ID NO: 3276621 - RNA, 19 nt, Artificial Sequence
  Description of Artificial Sequence: Synthetic oligonucleotide
acuuuaaggucacaggaca

SEQ ID NO: 3276622 - RNA, 19 nt, Artificial Sequence
  Description of Artificial Sequence: Synthetic oligonucleotide
cuucgaggggcuuugaagc

SEQ ID NO: 3276623 - RNA, 19 nt, Artificial Sequence
  Description of Artificial Sequence: Synthetic oligonucleotide
gugauaagcaggaacaaag

SEQ ID NO: 3276624 - RNA, 19 nt, Artificial Sequence
  Description of Artificial Sequence: Synthetic oligonucleotide
auaaccuuguaguaauucu

SEQ ID NO: 3276625 - RNA, 19 nt, Artificial Sequence
  Description of Artificial Sequence: Synthetic oligonucleotide
uuaaggucacaggacaagg

SEQ ID NO: 3276626 - RNA, 19 nt, Artificial Sequence
  Description of Artificial Sequence: Synthetic oligonucleotide
uaaagcaauugcuguauug

SEQ ID NO: 3276627 - RNA, 19 nt, Artificial Sequence
  Description of Artificial Sequence: Synthetic oligonucleotide
guaauagaaaauuacuuua

SEQ ID NO: 3276628 - RNA, 19 nt, Artificial Sequence
  Description of Artificial Sequence: Synthetic oligonucleotide
cuaagcaggagauggacug

SEQ ID NO: 3276629 - RNA, 19 nt, Artificial Sequence
  Description of Artificial Sequence: Synthetic oligonucleotide
ucauuaaggcuuuucuggc

SEQ ID NO: 3276630 - RNA, 19 nt, Artificial Sequence
  Description of Artificial Sequence: Synthetic oligonucleotide
cagaugaugaguaguagug

SEQ ID NO: 3276631 - RNA, 19 nt, Artificial Sequence
  Description of Artificial Sequence: Synthetic oligonucleotide
gagaccaaaugaaacaccc

SEQ ID NO: 3276632 - RNA, 19 nt, Artificial Sequence
  Description of Artificial Sequence: Synthetic oligonucleotide
aacgauuccuucuugcuua

SEQ ID NO: 3276633 - RNA, 19 nt, Artificial Sequence
  Description of Artificial Sequence: Synthetic oligonucleotide
ucuucgaggggcuuugaag

SEQ ID NO: 3276634 - RNA, 19 nt, Artificial Sequence
  Description of Artificial Sequence: Synthetic oligonucleotide
aaaugauaaacugcuugug

SEQ ID NO: 3276635 - RNA, 19 nt, Artificial Sequence
  Description of Artificial Sequence: Synthetic oligonucleotide
augcaaagaguccaagauc

SEQ ID NO: 3276636 - RNA, 19 nt, Artificial Sequence
  Description of Artificial Sequence: Synthetic oligonucleotide
agaaaugaaagagcuuugg

SEQ ID NO: 3276637 - RNA, 19 nt, Artificial Sequence
  Description of Artificial Sequence: Synthetic oligonucleotide
agcauguugaagugcuggc

SEQ ID NO: 3276638 - RNA, 19 nt, Artificial Sequence
  Description of Artificial Sequence: Synthetic oligonucleotide
gaugaugaguaguaguguc

SEQ ID NO: 3276639 - RNA, 19 nt, Artificial Sequence
  Description of Artificial Sequence: Synthetic oligonucleotide
acuauaccaaauacauucc

SEQ ID NO: 3276640 - RNA, 19 nt, Artificial Sequence
  Description of Artificial Sequence: Synthetic oligonucleotide
agacacaaaguaaagcagg

SEQ ID NO: 3276641 - RNA, 19 nt, Artificial Sequence
  Description of Artificial Sequence: Synthetic oligonucleotide
gagagaaaaucuucucugc

SEQ ID NO: 3276642 - RNA, 19 nt, Artificial Sequence
  Description of Artificial Sequence: Synthetic oligonucleotide
uucuuuguaauagaaaauu

SEQ ID NO: 3276643 - RNA, 19 nt, Artificial Sequence
  Description of Artificial Sequence: Synthetic oligonucleotide
gaaagcggaaacacaaugc

SEQ ID NO: 3276644 - RNA, 19 nt, Artificial Sequence
  Description of Artificial Sequence: Synthetic oligonucleotide
uucguaagaggucacugcu

SEQ ID NO: 3276645 - RNA, 19 nt, Artificial Sequence
  Description of Artificial Sequence: Synthetic oligonucleotide
auaauguugagcgcuaaug

SEQ ID NO: 3276646 - RNA, 19 nt, Artificial Sequence
  Description of Artificial Sequence: Synthetic oligonucleotide
aaggccaugguugguaggg

SEQ ID NO: 3276647 - RNA, 19 nt, Artificial Sequence
  Description of Artificial Sequence: Synthetic oligonucleotide
ugagguucguugcuuagca

SEQ ID NO: 3276648 - RNA, 19 nt, Artificial Sequence
  Description of Artificial Sequence: Synthetic oligonucleotide
uauccaaugccuuccagaa

SEQ ID NO: 3276649 - RNA, 19 nt, Artificial Sequence
  Description of Artificial Sequence: Synthetic oligonucleotide
aaugaggaagguuacuucc

SEQ ID NO: 3276650 - RNA, 19 nt, Artificial Sequence
  Description of Artificial Sequence: Synthetic oligonucleotide
auaguaauucuucucaucc

SEQ ID NO: 3276651 - RNA, 19 nt, Artificial Sequence
  Description of Artificial Sequence: Synthetic oligonucleotide
aacauauucaaugaggaag

SEQ ID NO: 3276652 - RNA, 19 nt, Artificial Sequence
  Description of Artificial Sequence: Synthetic oligonucleotide
guaaugaacauauucaaug

SEQ ID NO: 3276653 - RNA, 19 nt, Artificial Sequence
  Description of Artificial Sequence: Synthetic oligonucleotide
ucuuauucugcaaagaauc

SEQ ID NO: 3276654 - RNA, 19 nt, Artificial Sequence
  Description of Artificial Sequence: Synthetic oligonucleotide
uauucaaugaggaagguua

SEQ ID NO: 3276655 - RNA, 19 nt, Artificial Sequence
  Description of Artificial Sequence: Synthetic oligonucleotide
aaugaacauauucaaugag

SEQ ID NO: 3276656 - RNA, 19 nt, Artificial Sequence
  Description of Artificial Sequence: Synthetic oligonucleotide
ugaacauauucaaugagga

SEQ ID NO: 3276657 - RNA, 19 nt, Artificial Sequence
  Description of Artificial Sequence: Synthetic oligonucleotide
uugauaguaauucuucuca

SEQ ID NO: 3276658 - RNA, 19 nt, Artificial Sequence
  Description of Artificial Sequence: Synthetic oligonucleotide
aguaauucuucucaucccg

SEQ ID NO: 3276659 - RNA, 19 nt, Artificial Sequence
  Description of Artificial Sequence: Synthetic oligonucleotide
cuuugguguaucuugauag

SEQ ID NO: 3276660 - RNA, 19 nt, Artificial Sequence
  Description of Artificial Sequence: Synthetic oligonucleotide
aauucuucucaucccgggc

SEQ ID NO: 3276661 - RNA, 19 nt, Artificial Sequence
  Description of Artificial Sequence: Synthetic oligonucleotide
gaaucuuugguguaucuug

SEQ ID NO: 3276662 - RNA, 19 nt, Artificial Sequence
  Description of Artificial Sequence: Synthetic oligonucleotide
ucugcaaagaaucuuuggu

SEQ ID NO: 3276663 - RNA, 19 nt, Artificial Sequence
  Description of Artificial Sequence: Synthetic oligonucleotide
auucuucucaucccgggcc

SEQ ID NO: 3276664 - RNA, 19 nt, Artificial Sequence
  Description of Artificial Sequence: Synthetic oligonucleotide
uguaucuugauaguaauuc

SEQ ID NO: 3276665 - RNA, 19 nt, Artificial Sequence
  Description of Artificial Sequence: Synthetic oligonucleotide
uaaugaacauauucaauga

SEQ ID NO: 3276666 - RNA, 19 nt, Artificial Sequence
  Description of Artificial Sequence: Synthetic oligonucleotide
cauguaaugaacauauuca

SEQ ID NO: 3276667 - RNA, 19 nt, Artificial Sequence
  Description of Artificial Sequence: Synthetic oligonucleotide
cuuauaguccuccccaugg

SEQ ID NO: 3276668 - RNA, 19 nt, Artificial Sequence
  Description of Artificial Sequence: Synthetic oligonucleotide
ugcaaagaaucuuuggugu

SEQ ID NO: 3276669 - RNA, 19 nt, Artificial Sequence
  Description of Artificial Sequence: Synthetic oligonucleotide
aagguuacuuccuucuucu

SEQ ID NO: 3276670 - RNA, 19 nt, Artificial Sequence
  Description of Artificial Sequence: Synthetic oligonucleotide
augaacauauucaaugagg

SEQ ID NO: 3276671 - RNA, 19 nt, Artificial Sequence
  Description of Artificial Sequence: Synthetic oligonucleotide
acauauucaaugaggaagg

SEQ ID NO: 3276672 - RNA, 19 nt, Artificial Sequence
  Description of Artificial Sequence: Synthetic oligonucleotide
uaauucuucucaucccggg

SEQ ID NO: 3276673 - RNA, 19 nt, Artificial Sequence
  Description of Artificial Sequence: Synthetic oligonucleotide
uguaaugaacauauucaau

SEQ ID NO: 3276674 - RNA, 19 nt, Artificial Sequence
  Description of Artificial Sequence: Synthetic oligonucleotide
uauucugcaaagaaucuuu

SEQ ID NO: 3276675 - RNA, 19 nt, Artificial Sequence
  Description of Artificial Sequence: Synthetic oligonucleotide
uucugcaaagaaucuuugg

SEQ ID NO: 3276676 - RNA, 19 nt, Artificial Sequence
  Description of Artificial Sequence: Synthetic oligonucleotide
ucaaccuccaucuucuuau

SEQ ID NO: 3276677 - RNA, 19 nt, Artificial Sequence
  Description of Artificial Sequence: Synthetic oligonucleotide
aaagaaucuuugguguauc

SEQ ID NO: 3276678 - RNA, 19 nt, Artificial Sequence
  Description of Artificial Sequence: Synthetic oligonucleotide
uucuuauucugcaaagaau

SEQ ID NO: 3276679 - RNA, 19 nt, Artificial Sequence
  Description of Artificial Sequence: Synthetic oligonucleotide
ucuugauaguaauucuucu

SEQ ID NO: 3276680 - RNA, 19 nt, Artificial Sequence
  Description of Artificial Sequence: Synthetic oligonucleotide
cuugauaguaauucuucuc

SEQ ID NO: 3276681 - RNA, 19 nt, Artificial Sequence
  Description of Artificial Sequence: Synthetic oligonucleotide
auagccuuauaguccuccc

SEQ ID NO: 3276682 - RNA, 19 nt, Artificial Sequence
  Description of Artificial Sequence: Synthetic oligonucleotide
auguaaugaacauauucaa

SEQ ID NO: 3276683 - RNA, 19 nt, Artificial Sequence
  Description of Artificial Sequence: Synthetic oligonucleotide
cugcaaagaaucuuuggug

SEQ ID NO: 3276684 - RNA, 19 nt, Artificial Sequence
  Description of Artificial Sequence: Synthetic oligonucleotide
gauaguaauucuucucauc

SEQ ID NO: 3276685 - RNA, 19 nt, Artificial Sequence
  Description of Artificial Sequence: Synthetic oligonucleotide
uaucuugauaguaauucuu

SEQ ID NO: 3276686 - RNA, 19 nt, Artificial Sequence
  Description of Artificial Sequence: Synthetic oligonucleotide
aucuucuuauucugcaaag

SEQ ID NO: 3276687 - RNA, 19 nt, Artificial Sequence
  Description of Artificial Sequence: Synthetic oligonucleotide
aucuugauaguaauucuuc

SEQ ID NO: 3276688 - RNA, 19 nt, Artificial Sequence
  Description of Artificial Sequence: Synthetic oligonucleotide
uaguaauucuucucauccc

SEQ ID NO: 3276689 - RNA, 19 nt, Artificial Sequence
  Description of Artificial Sequence: Synthetic oligonucleotide
ucagucaaccuccaucuuc

SEQ ID NO: 3276690 - RNA, 19 nt, Artificial Sequence
  Description of Artificial Sequence: Synthetic oligonucleotide
gguuacuuccuucuucucg

SEQ ID NO: 3276691 - RNA, 19 nt, Artificial Sequence
  Description of Artificial Sequence: Synthetic oligonucleotide
uccaucuucuuauucugca

SEQ ID NO: 3276692 - RNA, 19 nt, Artificial Sequence
  Description of Artificial Sequence: Synthetic oligonucleotide
ugguuuguccaccauguaa

SEQ ID NO: 3276693 - RNA, 19 nt, Artificial Sequence
  Description of Artificial Sequence: Synthetic oligonucleotide
aagaaucuuugguguaucu

SEQ ID NO: 3276694 - RNA, 19 nt, Artificial Sequence
  Description of Artificial Sequence: Synthetic oligonucleotide
aaccuccaucuucuuauuc

SEQ ID NO: 3276695 - RNA, 19 nt, Artificial Sequence
  Description of Artificial Sequence: Synthetic oligonucleotide
uuguccaccauguaaugaa

SEQ ID NO: 3276696 - RNA, 19 nt, Artificial Sequence
  Description of Artificial Sequence: Synthetic oligonucleotide
ugguguaucuugauaguaa

SEQ ID NO: 3276697 - RNA, 19 nt, Artificial Sequence
  Description of Artificial Sequence: Synthetic oligonucleotide
gaagguuacuuccuucuuc

SEQ ID NO: 3276698 - RNA, 19 nt, Artificial Sequence
  Description of Artificial Sequence: Synthetic oligonucleotide
uacuuccuucuucucgugg

SEQ ID NO: 3276699 - RNA, 19 nt, Artificial Sequence
  Description of Artificial Sequence: Synthetic oligonucleotide
uuugguguaucuugauagu

SEQ ID NO: 3276700 - RNA, 19 nt, Artificial Sequence
  Description of Artificial Sequence: Synthetic oligonucleotide
aggaagguuacuuccuucu

SEQ ID NO: 3276701 - RNA, 19 nt, Artificial Sequence
  Description of Artificial Sequence: Synthetic oligonucleotide
accuccaucuucuuauucu

SEQ ID NO: 3276702 - RNA, 19 nt, Artificial Sequence
  Description of Artificial Sequence: Synthetic oligonucleotide
uccuucuucucguggaggc

SEQ ID NO: 3276703 - RNA, 19 nt, Artificial Sequence
  Description of Artificial Sequence: Synthetic oligonucleotide
ucuucuuauucugcaaaga

SEQ ID NO: 3276704 - RNA, 19 nt, Artificial Sequence
  Description of Artificial Sequence: Synthetic oligonucleotide
ucuuugguguaucuugaua

SEQ ID NO: 3276705 - RNA, 19 nt, Artificial Sequence
  Description of Artificial Sequence: Synthetic oligonucleotide
ugauaguaauucuucucau

SEQ ID NO: 3276706 - RNA, 19 nt, Artificial Sequence
  Description of Artificial Sequence: Synthetic oligonucleotide
aaucuuugguguaucuuga

SEQ ID NO: 3276707 - RNA, 19 nt, Artificial Sequence
  Description of Artificial Sequence: Synthetic oligonucleotide
agccuuauaguccucccca

SEQ ID NO: 3276708 - RNA, 19 nt, Artificial Sequence
  Description of Artificial Sequence: Synthetic oligonucleotide
ucaaugaggaagguuacuu

SEQ ID NO: 3276709 - RNA, 19 nt, Artificial Sequence
  Description of Artificial Sequence: Synthetic oligonucleotide
auucaaugaggaagguuac

SEQ ID NO: 3276710 - RNA, 19 nt, Artificial Sequence
  Description of Artificial Sequence: Synthetic oligonucleotide
guaauucuucucaucccgg

SEQ ID NO: 3276711 - RNA, 19 nt, Artificial Sequence
  Description of Artificial Sequence: Synthetic oligonucleotide
uuauaguccuccccauggu

SEQ ID NO: 3276712 - RNA, 19 nt, Artificial Sequence
  Description of Artificial Sequence: Synthetic oligonucleotide
acuuccuucuucucgugga

SEQ ID NO: 3276713 - RNA, 19 nt, Artificial Sequence
  Description of Artificial Sequence: Synthetic oligonucleotide
uagccuuauaguccucccc

SEQ ID NO: 3276714 - RNA, 19 nt, Artificial Sequence
  Description of Artificial Sequence: Synthetic oligonucleotide
uccaccauguaaugaacau

SEQ ID NO: 3276715 - RNA, 19 nt, Artificial Sequence
  Description of Artificial Sequence: Synthetic oligonucleotide
cucaucccgggccauagcc

SEQ ID NO: 3276716 - RNA, 19 nt, Artificial Sequence
  Description of Artificial Sequence: Synthetic oligonucleotide
uuuguccaccauguaauga

SEQ ID NO: 3276717 - RNA, 19 nt, Artificial Sequence
  Description of Artificial Sequence: Synthetic oligonucleotide
ccauguaaugaacauauuc

SEQ ID NO: 3276718 - RNA, 19 nt, Artificial Sequence
  Description of Artificial Sequence: Synthetic oligonucleotide
cuucuuauucugcaaagaa

SEQ ID NO: 3276719 - RNA, 19 nt, Artificial Sequence
  Description of Artificial Sequence: Synthetic oligonucleotide
uucuucucguggaggcugg

SEQ ID NO: 3276720 - RNA, 19 nt, Artificial Sequence
  Description of Artificial Sequence: Synthetic oligonucleotide
caaugaggaagguuacuuc

SEQ ID NO: 3276721 - RNA, 19 nt, Artificial Sequence
  Description of Artificial Sequence: Synthetic oligonucleotide
gaacauauucaaugaggaa

SEQ ID NO: 3276722 - RNA, 19 nt, Artificial Sequence
  Description of Artificial Sequence: Synthetic oligonucleotide
uuauucugcaaagaaucuu

SEQ ID NO: 3276723 - RNA, 19 nt, Artificial Sequence
  Description of Artificial Sequence: Synthetic oligonucleotide
uguccaccauguaaugaac

SEQ ID NO: 3276724 - RNA, 19 nt, Artificial Sequence
  Description of Artificial Sequence: Synthetic oligonucleotide
cauagccuuauaguccucc

SEQ ID NO: 3276725 - RNA, 19 nt, Artificial Sequence
  Description of Artificial Sequence: Synthetic oligonucleotide
uucuucucaucccgggcca

SEQ ID NO: 3276726 - RNA, 19 nt, Artificial Sequence
  Description of Artificial Sequence: Synthetic oligonucleotide
uauaguccuccccaugguu

SEQ ID NO: 3276727 - RNA, 19 nt, Artificial Sequence
  Description of Artificial Sequence: Synthetic oligonucleotide
uuccuucuucucguggagg

SEQ ID NO: 3276728 - RNA, 19 nt, Artificial Sequence
  Description of Artificial Sequence: Synthetic oligonucleotide
cuccaucuucuuauucugc

SEQ ID NO: 3276729 - RNA, 19 nt, Artificial Sequence
  Description of Artificial Sequence: Synthetic oligonucleotide
guuacuuccuucuucucgu

SEQ ID NO: 3276730 - RNA, 19 nt, Artificial Sequence
  Description of Artificial Sequence: Synthetic oligonucleotide
guuuguccaccauguaaug

SEQ ID NO: 3276731 - RNA, 19 nt, Artificial Sequence
  Description of Artificial Sequence: Synthetic oligonucleotide
uaguccuccccaugguuug

SEQ ID NO: 3276732 - RNA, 19 nt, Artificial Sequence
  Description of Artificial Sequence: Synthetic oligonucleotide
ugaggaagguuacuuccuu

SEQ ID NO: 3276733 - RNA, 19 nt, Artificial Sequence
  Description of Artificial Sequence: Synthetic oligonucleotide
caccauguaaugaacauau

SEQ ID NO: 3276734 - RNA, 19 nt, Artificial Sequence
  Description of Artificial Sequence: Synthetic oligonucleotide
gaggaagguuacuuccuuc

SEQ ID NO: 3276735 - RNA, 19 nt, Artificial Sequence
  Description of Artificial Sequence: Synthetic oligonucleotide
guaucuugauaguaauucu

SEQ ID NO: 3276736 - RNA, 19 nt, Artificial Sequence
  Description of Artificial Sequence: Synthetic oligonucleotide
uucaaugaggaagguuacu

SEQ ID NO: 3276737 - RNA, 19 nt, Artificial Sequence
  Description of Artificial Sequence: Synthetic oligonucleotide
uucucguggaggcuggcuu

SEQ ID NO: 3276738 - RNA, 19 nt, Artificial Sequence
  Description of Artificial Sequence: Synthetic oligonucleotide
cuuccuucuucucguggag

SEQ ID NO: 3276739 - RNA, 19 nt, Artificial Sequence
  Description of Artificial Sequence: Synthetic oligonucleotide
uugguguaucuugauagua

SEQ ID NO: 3276740 - RNA, 19 nt, Artificial Sequence
  Description of Artificial Sequence: Synthetic oligonucleotide
ucaucccgggccauagccu

SEQ ID NO: 3276741 - RNA, 19 nt, Artificial Sequence
  Description of Artificial Sequence: Synthetic oligonucleotide
uucucaucccgggccauag

SEQ ID NO: 3276742 - RNA, 19 nt, Artificial Sequence
  Description of Artificial Sequence: Synthetic oligonucleotide
caugguuuguccaccaugu

SEQ ID NO: 3276743 - RNA, 19 nt, Artificial Sequence
  Description of Artificial Sequence: Synthetic oligonucleotide
uuacuuccuucuucucgug

SEQ ID NO: 3276744 - RNA, 19 nt, Artificial Sequence
  Description of Artificial Sequence: Synthetic oligonucleotide
caucuucuuauucugcaaa

SEQ ID NO: 3276745 - RNA, 19 nt, Artificial Sequence
  Description of Artificial Sequence: Synthetic oligonucleotide
cuucuucucguggaggcug

SEQ ID NO: 3276746 - RNA, 19 nt, Artificial Sequence
  Description of Artificial Sequence: Synthetic oligonucleotide
auucugcaaagaaucuuug

SEQ ID NO: 3276747 - RNA, 19 nt, Artificial Sequence
  Description of Artificial Sequence: Synthetic oligonucleotide
cuuauucugcaaagaaucu

SEQ ID NO: 3276748 - RNA, 19 nt, Artificial Sequence
  Description of Artificial Sequence: Synthetic oligonucleotide
agguuacuuccuucuucuc

SEQ ID NO: 3276749 - RNA, 19 nt, Artificial Sequence
  Description of Artificial Sequence: Synthetic oligonucleotide
ugauacuuaaccaagaagg

SEQ ID NO: 3276750 - RNA, 19 nt, Artificial Sequence
  Description of Artificial Sequence: Synthetic oligonucleotide
aacugaauugaauagguca

SEQ ID NO: 3276751 - RNA, 19 nt, Artificial Sequence
  Description of Artificial Sequence: Synthetic oligonucleotide
gaauacagaauuuucacug

SEQ ID NO: 3276752 - RNA, 19 nt, Artificial Sequence
  Description of Artificial Sequence: Synthetic oligonucleotide
aauguaaggauuuccacga

SEQ ID NO: 3276753 - RNA, 19 nt, Artificial Sequence
  Description of Artificial Sequence: Synthetic oligonucleotide
gaauguaaggauuuccacg

SEQ ID NO: 3276754 - RNA, 19 nt, Artificial Sequence
  Description of Artificial Sequence: Synthetic oligonucleotide
acagaauuuucacugaccg

SEQ ID NO: 3276755 - RNA, 19 nt, Artificial Sequence
  Description of Artificial Sequence: Synthetic oligonucleotide
aucccaaauucacagaugc

SEQ ID NO: 3276756 - RNA, 19 nt, Artificial Sequence
  Description of Artificial Sequence: Synthetic oligonucleotide
uacuuaaccaagaaggacc

SEQ ID NO: 3276757 - RNA, 19 nt, Artificial Sequence
  Description of Artificial Sequence: Synthetic oligonucleotide
ucugcuggaacauagaacu

SEQ ID NO: 3276758 - RNA, 19 nt, Artificial Sequence
  Description of Artificial Sequence: Synthetic oligonucleotide
aauuuucacugaccgauac

SEQ ID NO: 3276759 - RNA, 19 nt, Artificial Sequence
  Description of Artificial Sequence: Synthetic oligonucleotide
aauugaauaggucacgaaa

SEQ ID NO: 3276760 - RNA, 19 nt, Artificial Sequence
  Description of Artificial Sequence: Synthetic oligonucleotide
gaauaggucacgaaaaugc

SEQ ID NO: 3276761 - RNA, 19 nt, Artificial Sequence
  Description of Artificial Sequence: Synthetic oligonucleotide
aggaauacagaauuuucac

SEQ ID NO: 3276762 - RNA, 19 nt, Artificial Sequence
  Description of Artificial Sequence: Synthetic oligonucleotide
auagaacugaauugaauag

SEQ ID NO: 3276763 - RNA, 19 nt, Artificial Sequence
  Description of Artificial Sequence: Synthetic oligonucleotide
aacaaaggagaucacgaug

SEQ ID NO: 3276764 - RNA, 19 nt, Artificial Sequence
  Description of Artificial Sequence: Synthetic oligonucleotide
aauaggucacgaaaaugcc

SEQ ID NO: 3276765 - RNA, 19 nt, Artificial Sequence
  Description of Artificial Sequence: Synthetic oligonucleotide
accaagaaggaccguaucc

SEQ ID NO: 3276766 - RNA, 19 nt, Artificial Sequence
  Description of Artificial Sequence: Synthetic oligonucleotide
uucacugaccgauacaacc

SEQ ID NO: 3276767 - RNA, 19 nt, Artificial Sequence
  Description of Artificial Sequence: Synthetic oligonucleotide
aaugagaacugcuccagca

SEQ ID NO: 3276768 - RNA, 19 nt, Artificial Sequence
  Description of Artificial Sequence: Synthetic oligonucleotide
aaaggaauacagaauuuuc

SEQ ID NO: 3276769 - RNA, 19 nt, Artificial Sequence
  Description of Artificial Sequence: Synthetic oligonucleotide
aaaggagaucacgaugucc

SEQ ID NO: 3276770 - RNA, 19 nt, Artificial Sequence
  Description of Artificial Sequence: Synthetic oligonucleotide
agaauguaaggauuuccac

SEQ ID NO: 3276771 - RNA, 19 nt, Artificial Sequence
  Description of Artificial Sequence: Synthetic oligonucleotide
gauacaaccacauguccug

SEQ ID NO: 3276772 - RNA, 19 nt, Artificial Sequence
  Description of Artificial Sequence: Synthetic oligonucleotide
aauucacagaugcgcuucc

SEQ ID NO: 3276773 - RNA, 19 nt, Artificial Sequence
  Description of Artificial Sequence: Synthetic oligonucleotide
uuggcaugaagucuggcag

SEQ ID NO: 3276774 - RNA, 19 nt, Artificial Sequence
  Description of Artificial Sequence: Synthetic oligonucleotide
uggaacauagaacugaauu

SEQ ID NO: 3276775 - RNA, 19 nt, Artificial Sequence
  Description of Artificial Sequence: Synthetic oligonucleotide
aaugaucucugcuggaaca

SEQ ID NO: 3276776 - RNA, 19 nt, Artificial Sequence
  Description of Artificial Sequence: Synthetic oligonucleotide
aauacagaauuuucacuga

SEQ ID NO: 3276777 - RNA, 19 nt, Artificial Sequence
  Description of Artificial Sequence: Synthetic oligonucleotide
aggaccguaucccaaauuc

SEQ ID NO: 3276778 - RNA, 19 nt, Artificial Sequence
  Description of Artificial Sequence: Synthetic oligonucleotide
aaggauuuccacgauuggg

SEQ ID NO: 3276779 - RNA, 19 nt, Artificial Sequence
  Description of Artificial Sequence: Synthetic oligonucleotide
aaauucacagaugcgcuuc

SEQ ID NO: 3276780 - RNA, 19 nt, Artificial Sequence
  Description of Artificial Sequence: Synthetic oligonucleotide
uagaacugaauugaauagg

SEQ ID NO: 3276781 - RNA, 19 nt, Artificial Sequence
  Description of Artificial Sequence: Synthetic oligonucleotide
uucaguguaaugcugcccu

SEQ ID NO: 3276782 - RNA, 19 nt, Artificial Sequence
  Description of Artificial Sequence: Synthetic oligonucleotide
agagaauguaaggauuucc

SEQ ID NO: 3276783 - RNA, 19 nt, Artificial Sequence
  Description of Artificial Sequence: Synthetic oligonucleotide
auacagaauuuucacugac

SEQ ID NO: 3276784 - RNA, 19 nt, Artificial Sequence
  Description of Artificial Sequence: Synthetic oligonucleotide
ucacgaaaaugccaaagga

SEQ ID NO: 3276785 - RNA, 19 nt, Artificial Sequence
  Description of Artificial Sequence: Synthetic oligonucleotide
aucacgauguccuaggcga

SEQ ID NO: 3276786 - RNA, 19 nt, Artificial Sequence
  Description of Artificial Sequence: Synthetic oligonucleotide
acugaauugaauaggucac

SEQ ID NO: 3276787 - RNA, 19 nt, Artificial Sequence
  Description of Artificial Sequence: Synthetic oligonucleotide
gaaaaugccaaaggaauac

SEQ ID NO: 3276788 - RNA, 19 nt, Artificial Sequence
  Description of Artificial Sequence: Synthetic oligonucleotide
gucacgaaaaugccaaagg

SEQ ID NO: 3276789 - RNA, 19 nt, Artificial Sequence
  Description of Artificial Sequence: Synthetic oligonucleotide
agauucaguguaaugcugc

SEQ ID NO: 3276790 - RNA, 19 nt, Artificial Sequence
  Description of Artificial Sequence: Synthetic oligonucleotide
uuuggcaugaagucuggca

SEQ ID NO: 3276791 - RNA, 19 nt, Artificial Sequence
  Description of Artificial Sequence: Synthetic oligonucleotide
ggaagauucaguguaaugc

SEQ ID NO: 3276792 - RNA, 19 nt, Artificial Sequence
  Description of Artificial Sequence: Synthetic oligonucleotide
auacuuaaccaagaaggac

SEQ ID NO: 3276793 - RNA, 19 nt, Artificial Sequence
  Description of Artificial Sequence: Synthetic oligonucleotide
uacagaauuuucacugacc

SEQ ID NO: 3276794 - RNA, 19 nt, Artificial Sequence
  Description of Artificial Sequence: Synthetic oligonucleotide
uuagagaauguaaggauuu

SEQ ID NO: 3276795 - RNA, 19 nt, Artificial Sequence
  Description of Artificial Sequence: Synthetic oligonucleotide
gaggaaugagaacugcucc

SEQ ID NO: 3276796 - RNA, 19 nt, Artificial Sequence
  Description of Artificial Sequence: Synthetic oligonucleotide
ggaacauagaacugaauug

SEQ ID NO: 3276797 - RNA, 19 nt, Artificial Sequence
  Description of Artificial Sequence: Synthetic oligonucleotide
aaggaauacagaauuuuca

SEQ ID NO: 3276798 - RNA, 19 nt, Artificial Sequence
  Description of Artificial Sequence: Synthetic oligonucleotide
agaauuuucacugaccgau

SEQ ID NO: 3276799 - RNA, 19 nt, Artificial Sequence
  Description of Artificial Sequence: Synthetic oligonucleotide
uuuucacugaccgauacaa

SEQ ID NO: 3276800 - RNA, 19 nt, Artificial Sequence
  Description of Artificial Sequence: Synthetic oligonucleotide
uaggcgaggaaugagaacu

SEQ ID NO: 3276801 - RNA, 19 nt, Artificial Sequence
  Description of Artificial Sequence: Synthetic oligonucleotide
aaggagaucacgauguccu

SEQ ID NO: 3276802 - RNA, 19 nt, Artificial Sequence
  Description of Artificial Sequence: Synthetic oligonucleotide
ucuggcagugacuccaggg

SEQ ID NO: 3276803 - RNA, 19 nt, Artificial Sequence
  Description of Artificial Sequence: Synthetic oligonucleotide
gaacauagaacugaauuga

SEQ ID NO: 3276804 - RNA, 19 nt, Artificial Sequence
  Description of Artificial Sequence: Synthetic oligonucleotide
aaaugccaaaggaauacag

SEQ ID NO: 3276805 - RNA, 19 nt, Artificial Sequence
  Description of Artificial Sequence: Synthetic oligonucleotide
gagaucacgauguccuagg

SEQ ID NO: 3276806 - RNA, 19 nt, Artificial Sequence
  Description of Artificial Sequence: Synthetic oligonucleotide
uaaggauuuccacgauugg

SEQ ID NO: 3276807 - RNA, 19 nt, Artificial Sequence
  Description of Artificial Sequence: Synthetic oligonucleotide
gaucacgauguccuaggcg

SEQ ID NO: 3276808 - RNA, 19 nt, Artificial Sequence
  Description of Artificial Sequence: Synthetic oligonucleotide
gugauacuuaaccaagaag

SEQ ID NO: 3276809 - RNA, 19 nt, Artificial Sequence
  Description of Artificial Sequence: Synthetic oligonucleotide
cauagaacugaauugaaua

SEQ ID NO: 3276810 - RNA, 19 nt, Artificial Sequence
  Description of Artificial Sequence: Synthetic oligonucleotide
uaggucacgaaaaugccaa

SEQ ID NO: 3276811 - RNA, 19 nt, Artificial Sequence
  Description of Artificial Sequence: Synthetic oligonucleotide
augagaacugcuccagcac

SEQ ID NO: 3276812 - RNA, 19 nt, Artificial Sequence
  Description of Artificial Sequence: Synthetic oligonucleotide
ggauaaugaucucugcugg

SEQ ID NO: 3276813 - RNA, 19 nt, Artificial Sequence
  Description of Artificial Sequence: Synthetic oligonucleotide
guaaggauuuccacgauug

SEQ ID NO: 3276814 - RNA, 19 nt, Artificial Sequence
  Description of Artificial Sequence: Synthetic oligonucleotide
ucacugaccgauacaacca

SEQ ID NO: 3276815 - RNA, 19 nt, Artificial Sequence
  Description of Artificial Sequence: Synthetic oligonucleotide
aggauuuccacgauugggg

SEQ ID NO: 3276816 - RNA, 19 nt, Artificial Sequence
  Description of Artificial Sequence: Synthetic oligonucleotide
aaccaagaaggaccguauc

SEQ ID NO: 3276817 - RNA, 19 nt, Artificial Sequence
  Description of Artificial Sequence: Synthetic oligonucleotide
augccaaaggaauacagaa

SEQ ID NO: 3276818 - RNA, 19 nt, Artificial Sequence
  Description of Artificial Sequence: Synthetic oligonucleotide
ugcccuugauuucaucacg

SEQ ID NO: 3276819 - RNA, 19 nt, Artificial Sequence
  Description of Artificial Sequence: Synthetic oligonucleotide
ugagaacugcuccagcaca

SEQ ID NO: 3276820 - RNA, 19 nt, Artificial Sequence
  Description of Artificial Sequence: Synthetic oligonucleotide
aaugcugcccuugauuuca

SEQ ID NO: 3276821 - RNA, 19 nt, Artificial Sequence
  Description of Artificial Sequence: Synthetic oligonucleotide
uguaaugcugcccuugauu

SEQ ID NO: 3276822 - RNA, 19 nt, Artificial Sequence
  Description of Artificial Sequence: Synthetic oligonucleotide
ugaauaggucacgaaaaug

SEQ ID NO: 3276823 - RNA, 19 nt, Artificial Sequence
  Description of Artificial Sequence: Synthetic oligonucleotide
acaaaggagaucacgaugu

SEQ ID NO: 3276824 - RNA, 19 nt, Artificial Sequence
  Description of Artificial Sequence: Synthetic oligonucleotide
acaaccacauguccugggg

SEQ ID NO: 3276825 - RNA, 19 nt, Artificial Sequence
  Description of Artificial Sequence: Synthetic oligonucleotide
aaugccaaaggaauacaga

SEQ ID NO: 3276826 - RNA, 19 nt, Artificial Sequence
  Description of Artificial Sequence: Synthetic oligonucleotide
aucagggccagcgugcugc

SEQ ID NO: 3276827 - RNA, 19 nt, Artificial Sequence
  Description of Artificial Sequence: Synthetic oligonucleotide
acaggugauacuuaaccaa

SEQ ID NO: 3276828 - RNA, 19 nt, Artificial Sequence
  Description of Artificial Sequence: Synthetic oligonucleotide
ugcgcuuccauuuggcaug

SEQ ID NO: 3276829 - RNA, 19 nt, Artificial Sequence
  Description of Artificial Sequence: Synthetic oligonucleotide
acuuaaccaagaaggaccg

SEQ ID NO: 3276830 - RNA, 19 nt, Artificial Sequence
  Description of Artificial Sequence: Synthetic oligonucleotide
ugaauugaauaggucacga

SEQ ID NO: 3276831 - RNA, 19 nt, Artificial Sequence
  Description of Artificial Sequence: Synthetic oligonucleotide
uugaauaggucacgaaaau

SEQ ID NO: 3276832 - RNA, 19 nt, Artificial Sequence
  Description of Artificial Sequence: Synthetic oligonucleotide
gauucaguguaaugcugcc

SEQ ID NO: 3276833 - RNA, 19 nt, Artificial Sequence
  Description of Artificial Sequence: Synthetic oligonucleotide
agugacuccagggauaaug

SEQ ID NO: 3276834 - RNA, 19 nt, Artificial Sequence
  Description of Artificial Sequence: Synthetic oligonucleotide
caggugauacuuaaccaag

SEQ ID NO: 3276835 - RNA, 19 nt, Artificial Sequence
  Description of Artificial Sequence: Synthetic oligonucleotide
uuccauuuggcaugaaguc

SEQ ID NO: 3276836 - RNA, 19 nt, Artificial Sequence
  Description of Artificial Sequence: Synthetic oligonucleotide
cucacagccccaacaaagg

SEQ ID NO: 3276837 - RNA, 19 nt, Artificial Sequence
  Description of Artificial Sequence: Synthetic oligonucleotide
agggauaaugaucucugcu

SEQ ID NO: 3276838 - RNA, 19 nt, Artificial Sequence
  Description of Artificial Sequence: Synthetic oligonucleotide
uccuggggaagauucagug

SEQ ID NO: 3276839 - RNA, 19 nt, Artificial Sequence
  Description of Artificial Sequence: Synthetic oligonucleotide
gauacuuaaccaagaagga

SEQ ID NO: 3276840 - RNA, 19 nt, Artificial Sequence
  Description of Artificial Sequence: Synthetic oligonucleotide
agaucacgauguccuaggc

SEQ ID NO: 3276841 - RNA, 19 nt, Artificial Sequence
  Description of Artificial Sequence: Synthetic oligonucleotide
uaaugaucucugcuggaac

SEQ ID NO: 3276842 - RNA, 19 nt, Artificial Sequence
  Description of Artificial Sequence: Synthetic oligonucleotide
acugcuccagcacagguga

SEQ ID NO: 3276843 - RNA, 19 nt, Artificial Sequence
  Description of Artificial Sequence: Synthetic oligonucleotide
cauguccuggggaagauuc

SEQ ID NO: 3276844 - RNA, 19 nt, Artificial Sequence
  Description of Artificial Sequence: Synthetic oligonucleotide
agggccagcgugcugcugc

SEQ ID NO: 3276845 - RNA, 19 nt, Artificial Sequence
  Description of Artificial Sequence: Synthetic oligonucleotide
ucccaaauucacagaugcg

SEQ ID NO: 3276846 - RNA, 19 nt, Artificial Sequence
  Description of Artificial Sequence: Synthetic oligonucleotide
agaacugaauugaauaggu

SEQ ID NO: 3276847 - RNA, 19 nt, Artificial Sequence
  Description of Artificial Sequence: Synthetic oligonucleotide
ugaagucuggcagugacuc

SEQ ID NO: 3276848 - RNA, 19 nt, Artificial Sequence
  Description of Artificial Sequence: Synthetic oligonucleotide
uaucccaaauucacagaug

SEQ ID NO: 3276849 - RNA, 19 nt, Artificial Sequence
  Description of Artificial Sequence: Synthetic oligonucleotide
ucauuaaucuccuugauca

SEQ ID NO: 3276850 - RNA, 19 nt, Artificial Sequence
  Description of Artificial Sequence: Synthetic oligonucleotide
aaucuccuugaucagagag

SEQ ID NO: 3276851 - RNA, 19 nt, Artificial Sequence
  Description of Artificial Sequence: Synthetic oligonucleotide
ugaaggucugucuugaacc

SEQ ID NO: 3276852 - RNA, 19 nt, Artificial Sequence
  Description of Artificial Sequence: Synthetic oligonucleotide
aucacuuuugaucucguuc

SEQ ID NO: 3276853 - RNA, 19 nt, Artificial Sequence
  Description of Artificial Sequence: Synthetic oligonucleotide
ucuauuugcuucuucagcu

SEQ ID NO: 3276854 - RNA, 19 nt, Artificial Sequence
  Description of Artificial Sequence: Synthetic oligonucleotide
ucucaugguaguacuaacg

SEQ ID NO: 3276855 - RNA, 19 nt, Artificial Sequence
  Description of Artificial Sequence: Synthetic oligonucleotide
auggaaacgcuccaguucg

SEQ ID NO: 3276856 - RNA, 19 nt, Artificial Sequence
  Description of Artificial Sequence: Synthetic oligonucleotide
uuucucuaguucuuggagg

SEQ ID NO: 3276857 - RNA, 19 nt, Artificial Sequence
  Description of Artificial Sequence: Synthetic oligonucleotide
uauuuuguagucgaggaca

SEQ ID NO: 3276858 - RNA, 19 nt, Artificial Sequence
  Description of Artificial Sequence: Synthetic oligonucleotide
caaacuugaauuucucuag

SEQ ID NO: 3276859 - RNA, 19 nt, Artificial Sequence
  Description of Artificial Sequence: Synthetic oligonucleotide
caugguaguacuaacgcug

SEQ ID NO: 3276860 - RNA, 19 nt, Artificial Sequence
  Description of Artificial Sequence: Synthetic oligonucleotide
gaucugaucucugaggcgg

SEQ ID NO: 3276861 - RNA, 19 nt, Artificial Sequence
  Description of Artificial Sequence: Synthetic oligonucleotide
ucaaagagaucacggaucu

SEQ ID NO: 3276862 - RNA, 19 nt, Artificial Sequence
  Description of Artificial Sequence: Synthetic oligonucleotide
auuucucuaguucuuggag

SEQ ID NO: 3276863 - RNA, 19 nt, Artificial Sequence
  Description of Artificial Sequence: Synthetic oligonucleotide
uucaaggucguagauuugg

SEQ ID NO: 3276864 - RNA, 19 nt, Artificial Sequence
  Description of Artificial Sequence: Synthetic oligonucleotide
gaauuucucuaguucuugg

SEQ ID NO: 3276865 - RNA, 19 nt, Artificial Sequence
  Description of Artificial Sequence: Synthetic oligonucleotide
aauuucucuaguucuugga

SEQ ID NO: 3276866 - RNA, 19 nt, Artificial Sequence
  Description of Artificial Sequence: Synthetic oligonucleotide
ucgaggacaaacuugaauu

SEQ ID NO: 3276867 - RNA, 19 nt, Artificial Sequence
  Description of Artificial Sequence: Synthetic oligonucleotide
uuuuccugcaugaugcgga

SEQ ID NO: 3276868 - RNA, 19 nt, Artificial Sequence
  Description of Artificial Sequence: Synthetic oligonucleotide
aguucaacccugcaauuuc

SEQ ID NO: 3276869 - RNA, 19 nt, Artificial Sequence
  Description of Artificial Sequence: Synthetic oligonucleotide
aaggucguagauuugggau

SEQ ID NO: 3276870 - RNA, 19 nt, Artificial Sequence
  Description of Artificial Sequence: Synthetic oligonucleotide
gagaucacggaucuucucc

SEQ ID NO: 3276871 - RNA, 19 nt, Artificial Sequence
  Description of Artificial Sequence: Synthetic oligonucleotide
uauuugcuucuucagcucc

SEQ ID NO: 3276872 - RNA, 19 nt, Artificial Sequence
  Description of Artificial Sequence: Synthetic oligonucleotide
cuuuugaucucguucuccc

SEQ ID NO: 3276873 - RNA, 19 nt, Artificial Sequence
  Description of Artificial Sequence: Synthetic oligonucleotide
uuuguagucgaggacaaac

SEQ ID NO: 3276874 - RNA, 19 nt, Artificial Sequence
  Description of Artificial Sequence: Synthetic oligonucleotide
acaaacuugaauuucucua

SEQ ID NO: 3276875 - RNA, 19 nt, Artificial Sequence
  Description of Artificial Sequence: Synthetic oligonucleotide
uuugaucucguucucccga

SEQ ID NO: 3276876 - RNA, 19 nt, Artificial Sequence
  Description of Artificial Sequence: Synthetic oligonucleotide
cuugcuuguaccuacuguc

SEQ ID NO: 3276877 - RNA, 19 nt, Artificial Sequence
  Description of Artificial Sequence: Synthetic oligonucleotide
aguuccgagauguucagcu

SEQ ID NO: 3276878 - RNA, 19 nt, Artificial Sequence
  Description of Artificial Sequence: Synthetic oligonucleotide
cuugagaguggcaagguuc

SEQ ID NO: 3276879 - RNA, 19 nt, Artificial Sequence
  Description of Artificial Sequence: Synthetic oligonucleotide
augaugcggacauagccgg

SEQ ID NO: 3276880 - RNA, 19 nt, Artificial Sequence
  Description of Artificial Sequence: Synthetic oligonucleotide
uucggcuuccaucuccugg

SEQ ID NO: 3276881 - RNA, 19 nt, Artificial Sequence
  Description of Artificial Sequence: Synthetic oligonucleotide
aucggguuaacuucagcuc

SEQ ID NO: 3276882 - RNA, 19 nt, Artificial Sequence
  Description of Artificial Sequence: Synthetic oligonucleotide
ucaaggucguagauuuggg

SEQ ID NO: 3276883 - RNA, 19 nt, Artificial Sequence
  Description of Artificial Sequence: Synthetic oligonucleotide
uuauuuuguagucgaggac

SEQ ID NO: 3276884 - RNA, 19 nt, Artificial Sequence
  Description of Artificial Sequence: Synthetic oligonucleotide
uggaucugcuccuucauca

SEQ ID NO: 3276885 - RNA, 19 nt, Artificial Sequence
  Description of Artificial Sequence: Synthetic oligonucleotide
uccaguucggcuuccaucu

SEQ ID NO: 3276886 - RNA, 19 nt, Artificial Sequence
  Description of Artificial Sequence: Synthetic oligonucleotide
uugcguguucugcuuaugg

SEQ ID NO: 3276887 - RNA, 19 nt, Artificial Sequence
  Description of Artificial Sequence: Synthetic oligonucleotide
ucugcuuauggaaacgcuc

SEQ ID NO: 3276888 - RNA, 19 nt, Artificial Sequence
  Description of Artificial Sequence: Synthetic oligonucleotide
uccuuuuauuuuguagucg

SEQ ID NO: 3276889 - RNA, 19 nt, Artificial Sequence
  Description of Artificial Sequence: Synthetic oligonucleotide
uuccgagauguucagcucc

SEQ ID NO: 3276890 - RNA, 19 nt, Artificial Sequence
  Description of Artificial Sequence: Synthetic oligonucleotide
cugcuuauggaaacgcucc

SEQ ID NO: 3276891 - RNA, 19 nt, Artificial Sequence
  Description of Artificial Sequence: Synthetic oligonucleotide
gaagccugggaccugcucc

SEQ ID NO: 3276892 - RNA, 19 nt, Artificial Sequence
  Description of Artificial Sequence: Synthetic oligonucleotide
uuuugaucucguucucccg

SEQ ID NO: 3276893 - RNA, 19 nt, Artificial Sequence
  Description of Artificial Sequence: Synthetic oligonucleotide
agcuccuuuuauuuuguag

SEQ ID NO: 3276894 - RNA, 19 nt, Artificial Sequence
  Description of Artificial Sequence: Synthetic oligonucleotide
uuugggaucggguuaacuu

SEQ ID NO: 3276895 - RNA, 19 nt, Artificial Sequence
  Description of Artificial Sequence: Synthetic oligonucleotide
aacaguuccgagauguuca

SEQ ID NO: 3276896 - RNA, 19 nt, Artificial Sequence
  Description of Artificial Sequence: Synthetic oligonucleotide
cucuauuugcuucuucagc

SEQ ID NO: 3276897 - RNA, 19 nt, Artificial Sequence
  Description of Artificial Sequence: Synthetic oligonucleotide
cucaaagagaucacggauc

SEQ ID NO: 3276898 - RNA, 19 nt, Artificial Sequence
  Description of Artificial Sequence: Synthetic oligonucleotide
aggucguagauuugggauc

SEQ ID NO: 3276899 - RNA, 19 nt, Artificial Sequence
  Description of Artificial Sequence: Synthetic oligonucleotide
ucuugugcucguaauuucu

SEQ ID NO: 3276900 - RNA, 19 nt, Artificial Sequence
  Description of Artificial Sequence: Synthetic oligonucleotide
acuaacgcuggggaugucc

SEQ ID NO: 3276901 - RNA, 19 nt, Artificial Sequence
  Description of Artificial Sequence: Synthetic oligonucleotide
acauacuucucaaagagau

SEQ ID NO: 3276902 - RNA, 19 nt, Artificial Sequence
  Description of Artificial Sequence: Synthetic oligonucleotide
aguacuaacgcuggggaug

SEQ ID NO: 3276903 - RNA, 19 nt, Artificial Sequence
  Description of Artificial Sequence: Synthetic oligonucleotide
cuuggagggaugcagugag

SEQ ID NO: 3276904 - RNA, 19 nt, Artificial Sequence
  Description of Artificial Sequence: Synthetic oligonucleotide
agcucauuaaucuccuuga

SEQ ID NO: 3276905 - RNA, 19 nt, Artificial Sequence
  Description of Artificial Sequence: Synthetic oligonucleotide
ucuccuugaucagagagac

SEQ ID NO: 3276906 - RNA, 19 nt, Artificial Sequence
  Description of Artificial Sequence: Synthetic oligonucleotide
ucugucuugaaccgucgga

SEQ ID NO: 3276907 - RNA, 19 nt, Artificial Sequence
  Description of Artificial Sequence: Synthetic oligonucleotide
ugauccguggcucucaguu

SEQ ID NO: 3276908 - RNA, 19 nt, Artificial Sequence
  Description of Artificial Sequence: Synthetic oligonucleotide
gcacauacuucucaaagag

SEQ ID NO: 3276909 - RNA, 19 nt, Artificial Sequence
  Description of Artificial Sequence: Synthetic oligonucleotide
cagggcugauucaaggucg

SEQ ID NO: 3276910 - RNA, 19 nt, Artificial Sequence
  Description of Artificial Sequence: Synthetic oligonucleotide
ugccacgcaguugugaagg

SEQ ID NO: 3276911 - RNA, 19 nt, Artificial Sequence
  Description of Artificial Sequence: Synthetic oligonucleotide
aucuugugcucguaauuuc

SEQ ID NO: 3276912 - RNA, 19 nt, Artificial Sequence
  Description of Artificial Sequence: Synthetic oligonucleotide
ugaauuucucuaguucuug

SEQ ID NO: 3276913 - RNA, 19 nt, Artificial Sequence
  Description of Artificial Sequence: Synthetic oligonucleotide
cuuggaucugaucucugag

SEQ ID NO: 3276914 - RNA, 19 nt, Artificial Sequence
  Description of Artificial Sequence: Synthetic oligonucleotide
ucaugguaguacuaacgcu

SEQ ID NO: 3276915 - RNA, 19 nt, Artificial Sequence
  Description of Artificial Sequence: Synthetic oligonucleotide
cuccuuuucguucagucuc

SEQ ID NO: 3276916 - RNA, 19 nt, Artificial Sequence
  Description of Artificial Sequence: Synthetic oligonucleotide
ucagucucaugguaguacu

SEQ ID NO: 3276917 - RNA, 19 nt, Artificial Sequence
  Description of Artificial Sequence: Synthetic oligonucleotide
ucagggcugauucaagguc

SEQ ID NO: 3276918 - RNA, 19 nt, Artificial Sequence
  Description of Artificial Sequence: Synthetic oligonucleotide
ugaaccgucggaccagcgc

SEQ ID NO: 3276919 - RNA, 19 nt, Artificial Sequence
  Description of Artificial Sequence: Synthetic oligonucleotide
ucucccgaggcucuauuug

SEQ ID NO: 3276920 - RNA, 19 nt, Artificial Sequence
  Description of Artificial Sequence: Synthetic oligonucleotide
cuugaauuucucuaguucu

SEQ ID NO: 3276921 - RNA, 19 nt, Artificial Sequence
  Description of Artificial Sequence: Synthetic oligonucleotide
cuggggauguccuugcuug

SEQ ID NO: 3276922 - RNA, 19 nt, Artificial Sequence
  Description of Artificial Sequence: Synthetic oligonucleotide
cauuucgaugauucucccg

SEQ ID NO: 3276923 - RNA, 19 nt, Artificial Sequence
  Description of Artificial Sequence: Synthetic oligonucleotide
gcaauuuccaccaugucug

SEQ ID NO: 3276924 - RNA, 19 nt, Artificial Sequence
  Description of Artificial Sequence: Synthetic oligonucleotide
uguagucgaggacaaacuu

SEQ ID NO: 3276925 - RNA, 19 nt, Artificial Sequence
  Description of Artificial Sequence: Synthetic oligonucleotide
cuggauguaugccacgcag

SEQ ID NO: 3276926 - RNA, 19 nt, Artificial Sequence
  Description of Artificial Sequence: Synthetic oligonucleotide
  modified_base (11)..(11): a, c, u, g, unknown or other
uccuucagcanccggggcu

SEQ ID NO: 3276927 - RNA, 19 nt, Artificial Sequence
  Description of Artificial Sequence: Synthetic oligonucleotide
uugggaucggguuaacuuc

SEQ ID NO: 3276928 - RNA, 19 nt, Artificial Sequence
  Description of Artificial Sequence: Synthetic oligonucleotide
ucuuggaucugaucucuga

SEQ ID NO: 3276929 - RNA, 19 nt, Artificial Sequence
  Description of Artificial Sequence: Synthetic oligonucleotide
gacauagccggcgcgaugc

SEQ ID NO: 3276930 - RNA, 19 nt, Artificial Sequence
  Description of Artificial Sequence: Synthetic oligonucleotide
cucauuaaucuccuugauc

SEQ ID NO: 3276931 - RNA, 19 nt, Artificial Sequence
  Description of Artificial Sequence: Synthetic oligonucleotide
aaacgcuccaguucggcuu

SEQ ID NO: 3276932 - RNA, 19 nt, Artificial Sequence
  Description of Artificial Sequence: Synthetic oligonucleotide
aguucgcccuccuugacca

SEQ ID NO: 3276933 - RNA, 19 nt, Artificial Sequence
  Description of Artificial Sequence: Synthetic oligonucleotide
gaucggguuaacuucagcu

SEQ ID NO: 3276934 - RNA, 19 nt, Artificial Sequence
  Description of Artificial Sequence: Synthetic oligonucleotide
gaugcggacauagccggcg

SEQ ID NO: 3276935 - RNA, 19 nt, Artificial Sequence
  Description of Artificial Sequence: Synthetic oligonucleotide
ugcucuuugcgcaucuccu

SEQ ID NO: 3276936 - RNA, 19 nt, Artificial Sequence
  Description of Artificial Sequence: Synthetic oligonucleotide
uugaauuucucuaguucuu

SEQ ID NO: 3276937 - RNA, 19 nt, Artificial Sequence
  Description of Artificial Sequence: Synthetic oligonucleotide
ugggaucggguuaacuuca

SEQ ID NO: 3276938 - RNA, 19 nt, Artificial Sequence
  Description of Artificial Sequence: Synthetic oligonucleotide
ugucuugaaccgucggacc

SEQ ID NO: 3276939 - RNA, 19 nt, Artificial Sequence
  Description of Artificial Sequence: Synthetic oligonucleotide
ugcucguaauuucuuggac

SEQ ID NO: 3276940 - RNA, 19 nt, Artificial Sequence
  Description of Artificial Sequence: Synthetic oligonucleotide
agaguggcaagguuccucu

SEQ ID NO: 3276941 - RNA, 19 nt, Artificial Sequence
  Description of Artificial Sequence: Synthetic oligonucleotide
uugcuuguaccuacugucu

SEQ ID NO: 3276942 - RNA, 19 nt, Artificial Sequence
  Description of Artificial Sequence: Synthetic oligonucleotide
auaacuccuguugcaaguc

SEQ ID NO: 3276943 - RNA, 19 nt, Artificial Sequence
  Description of Artificial Sequence: Synthetic oligonucleotide
gcaagucugaguucaaccc

SEQ ID NO: 3276944 - RNA, 19 nt, Artificial Sequence
  Description of Artificial Sequence: Synthetic oligonucleotide
uucagggcugauucaaggu

SEQ ID NO: 3276945 - RNA, 19 nt, Artificial Sequence
  Description of Artificial Sequence: Synthetic oligonucleotide
agagaucacggaucuucuc

SEQ ID NO: 3276946 - RNA, 19 nt, Artificial Sequence
  Description of Artificial Sequence: Synthetic oligonucleotide
uugaucucguucucccgag

SEQ ID NO: 3276947 - RNA, 19 nt, Artificial Sequence
  Description of Artificial Sequence: Synthetic oligonucleotide
ugcguguucugcuuaugga

SEQ ID NO: 3276948 - RNA, 19 nt, Artificial Sequence
  Description of Artificial Sequence: Synthetic oligonucleotide
uuauggaaacgcuccaguu

SEQ ID NO: 3276949 - RNA, 19 nt, Artificial Sequence
  Description of Artificial Sequence: Synthetic oligonucleotide
uauaguugaacacacagga

SEQ ID NO: 3276950 - RNA, 19 nt, Artificial Sequence
  Description of Artificial Sequence: Synthetic oligonucleotide
uuuugugacauacucagag

SEQ ID NO: 3276951 - RNA, 19 nt, Artificial Sequence
  Description of Artificial Sequence: Synthetic oligonucleotide
uucauuauggaaugcaagg

SEQ ID NO: 3276952 - RNA, 19 nt, Artificial Sequence
  Description of Artificial Sequence: Synthetic oligonucleotide
ugaaaguccauuuuagcag

SEQ ID NO: 3276953 - RNA, 19 nt, Artificial Sequence
  Description of Artificial Sequence: Synthetic oligonucleotide
gagaaguuggccuggaugg

SEQ ID NO: 3276954 - RNA, 19 nt, Artificial Sequence
  Description of Artificial Sequence: Synthetic oligonucleotide
ucugucuuugcccugagug

SEQ ID NO: 3276955 - RNA, 19 nt, Artificial Sequence
  Description of Artificial Sequence: Synthetic oligonucleotide
uugaaaguccauuuuagca

SEQ ID NO: 3276956 - RNA, 19 nt, Artificial Sequence
  Description of Artificial Sequence: Synthetic oligonucleotide
aaauggcuggcuucuaugg

SEQ ID NO: 3276957 - RNA, 19 nt, Artificial Sequence
  Description of Artificial Sequence: Synthetic oligonucleotide
agcagaacacuccacgucc

SEQ ID NO: 3276958 - RNA, 19 nt, Artificial Sequence
  Description of Artificial Sequence: Synthetic oligonucleotide
cuauccaagguucuaaggg

SEQ ID NO: 3276959 - RNA, 19 nt, Artificial Sequence
  Description of Artificial Sequence: Synthetic oligonucleotide
gugguauggauucaaaggg

SEQ ID NO: 3276960 - RNA, 19 nt, Artificial Sequence
  Description of Artificial Sequence: Synthetic oligonucleotide
ucuaugguauaguugaaca

SEQ ID NO: 3276961 - RNA, 19 nt, Artificial Sequence
  Description of Artificial Sequence: Synthetic oligonucleotide
gaaaaugggccccaguucc

SEQ ID NO: 3276962 - RNA, 19 nt, Artificial Sequence
  Description of Artificial Sequence: Synthetic oligonucleotide
aaaguucucuuuccacacc

SEQ ID NO: 3276963 - RNA, 19 nt, Artificial Sequence
  Description of Artificial Sequence: Synthetic oligonucleotide
cacuccagaacuuugggcg

SEQ ID NO: 3276964 - RNA, 19 nt, Artificial Sequence
  Description of Artificial Sequence: Synthetic oligonucleotide
cuguguauugucuaccugg

SEQ ID NO: 3276965 - RNA, 19 nt, Artificial Sequence
  Description of Artificial Sequence: Synthetic oligonucleotide
uguuucuggaguacugugg

SEQ ID NO: 3276966 - RNA, 19 nt, Artificial Sequence
  Description of Artificial Sequence: Synthetic oligonucleotide
ugaguuccagagaaguugg

SEQ ID NO: 3276967 - RNA, 19 nt, Artificial Sequence
  Description of Artificial Sequence: Synthetic oligonucleotide
uguauugucuaccuggaau

SEQ ID NO: 3276968 - RNA, 19 nt, Artificial Sequence
  Description of Artificial Sequence: Synthetic oligonucleotide
uaugcuguaccugaaaaug

SEQ ID NO: 3276969 - RNA, 19 nt, Artificial Sequence
  Description of Artificial Sequence: Synthetic oligonucleotide
aucugugugcuuccuaugc

SEQ ID NO: 3276970 - RNA, 19 nt, Artificial Sequence
  Description of Artificial Sequence: Synthetic oligonucleotide
uaugguauaguugaacaca

SEQ ID NO: 3276971 - RNA, 19 nt, Artificial Sequence
  Description of Artificial Sequence: Synthetic oligonucleotide
gauaugaccacuccagaac

SEQ ID NO: 3276972 - RNA, 19 nt, Artificial Sequence
  Description of Artificial Sequence: Synthetic oligonucleotide
aucacugacauauuuugug

SEQ ID NO: 3276973 - RNA, 19 nt, Artificial Sequence
  Description of Artificial Sequence: Synthetic oligonucleotide
aaaacaugagcuguggggu

SEQ ID NO: 3276974 - RNA, 19 nt, Artificial Sequence
  Description of Artificial Sequence: Synthetic oligonucleotide
ugcuguaccugaaaauggg

SEQ ID NO: 3276975 - RNA, 19 nt, Artificial Sequence
  Description of Artificial Sequence: Synthetic oligonucleotide
aacacuccacgucccaggc

SEQ ID NO: 3276976 - RNA, 19 nt, Artificial Sequence
  Description of Artificial Sequence: Synthetic oligonucleotide
gguauaguugaacacacag

SEQ ID NO: 3276977 - RNA, 19 nt, Artificial Sequence
  Description of Artificial Sequence: Synthetic oligonucleotide
gauugaaaguccauuuuag

SEQ ID NO: 3276978 - RNA, 19 nt, Artificial Sequence
  Description of Artificial Sequence: Synthetic oligonucleotide
uauccaagguucuaagggc

SEQ ID NO: 3276979 - RNA, 19 nt, Artificial Sequence
  Description of Artificial Sequence: Synthetic oligonucleotide
aaagaacaaaauggcuggc

SEQ ID NO: 3276980 - RNA, 19 nt, Artificial Sequence
  Description of Artificial Sequence: Synthetic oligonucleotide
uauggaaugcaaggcaugg

SEQ ID NO: 3276981 - RNA, 19 nt, Artificial Sequence
  Description of Artificial Sequence: Synthetic oligonucleotide
uaguugaacacacaggauu

SEQ ID NO: 3276982 - RNA, 19 nt, Artificial Sequence
  Description of Artificial Sequence: Synthetic oligonucleotide
cuugauacacaucacugac

SEQ ID NO: 3276983 - RNA, 19 nt, Artificial Sequence
  Description of Artificial Sequence: Synthetic oligonucleotide
auuaccacgggccuugaug

SEQ ID NO: 3276984 - RNA, 19 nt, Artificial Sequence
  Description of Artificial Sequence: Synthetic oligonucleotide
cuucauuauggaaugcaag

SEQ ID NO: 3276985 - RNA, 19 nt, Artificial Sequence
  Description of Artificial Sequence: Synthetic oligonucleotide
ucucuugauacacaucacu

SEQ ID NO: 3276986 - RNA, 19 nt, Artificial Sequence
  Description of Artificial Sequence: Synthetic oligonucleotide
gauaucccaggacucaaag

SEQ ID NO: 3276987 - RNA, 19 nt, Artificial Sequence
  Description of Artificial Sequence: Synthetic oligonucleotide
uguaucaucuucagccacc

SEQ ID NO: 3276988 - RNA, 19 nt, Artificial Sequence
  Description of Artificial Sequence: Synthetic oligonucleotide
gacauauuuugugacauac

SEQ ID NO: 3276989 - RNA, 19 nt, Artificial Sequence
  Description of Artificial Sequence: Synthetic oligonucleotide
uguggcaacaucacagaca

SEQ ID NO: 3276990 - RNA, 19 nt, Artificial Sequence
  Description of Artificial Sequence: Synthetic oligonucleotide
agagaaguuggccuggaug

SEQ ID NO: 3276991 - RNA, 19 nt, Artificial Sequence
  Description of Artificial Sequence: Synthetic oligonucleotide
aacaucacagacacaaucu

SEQ ID NO: 3276992 - RNA, 19 nt, Artificial Sequence
  Description of Artificial Sequence: Synthetic oligonucleotide
ucaggucauagccaaggag

SEQ ID NO: 3276993 - RNA, 19 nt, Artificial Sequence
  Description of Artificial Sequence: Synthetic oligonucleotide
aagcgagucaguauacugg

SEQ ID NO: 3276994 - RNA, 19 nt, Artificial Sequence
  Description of Artificial Sequence: Synthetic oligonucleotide
aguccauuuuagcagaaca

SEQ ID NO: 3276995 - RNA, 19 nt, Artificial Sequence
  Description of Artificial Sequence: Synthetic oligonucleotide
ucugcuaucagcucugaua

SEQ ID NO: 3276996 - RNA, 19 nt, Artificial Sequence
  Description of Artificial Sequence: Synthetic oligonucleotide
ucauuauggaaugcaaggc

SEQ ID NO: 3276997 - RNA, 19 nt, Artificial Sequence
  Description of Artificial Sequence: Synthetic oligonucleotide
cucuugauacacaucacug

SEQ ID NO: 3276998 - RNA, 19 nt, Artificial Sequence
  Description of Artificial Sequence: Synthetic oligonucleotide
aguuccagagaaguuggcc

SEQ ID NO: 3276999 - RNA, 19 nt, Artificial Sequence
  Description of Artificial Sequence: Synthetic oligonucleotide
ucuaagggcaugcggcagg

SEQ ID NO: 3277000 - RNA, 19 nt, Artificial Sequence
  Description of Artificial Sequence: Synthetic oligonucleotide
ugucaagcgagucaguaua

SEQ ID NO: 3277001 - RNA, 19 nt, Artificial Sequence
  Description of Artificial Sequence: Synthetic oligonucleotide
ugguauggauucaaagggc

SEQ ID NO: 3277002 - RNA, 19 nt, Artificial Sequence
  Description of Artificial Sequence: Synthetic oligonucleotide
ugugcaggcacugccaggg

SEQ ID NO: 3277003 - RNA, 19 nt, Artificial Sequence
  Description of Artificial Sequence: Synthetic oligonucleotide
guauaguugaacacacagg

SEQ ID NO: 3277004 - RNA, 19 nt, Artificial Sequence
  Description of Artificial Sequence: Synthetic oligonucleotide
aucuucagccaccuguuuc

SEQ ID NO: 3277005 - RNA, 19 nt, Artificial Sequence
  Description of Artificial Sequence: Synthetic oligonucleotide
cacacaucugucuuugccc

SEQ ID NO: 3277006 - RNA, 19 nt, Artificial Sequence
  Description of Artificial Sequence: Synthetic oligonucleotide
gcuucuaugguauaguuga

SEQ ID NO: 3277007 - RNA, 19 nt, Artificial Sequence
  Description of Artificial Sequence: Synthetic oligonucleotide
uuauggaaugcaaggcaug

SEQ ID NO: 3277008 - RNA, 19 nt, Artificial Sequence
  Description of Artificial Sequence: Synthetic oligonucleotide
uccauuuuagcagaacacu

SEQ ID NO: 3277009 - RNA, 19 nt, Artificial Sequence
  Description of Artificial Sequence: Synthetic oligonucleotide
gacucaaaguucucuuucc

SEQ ID NO: 3277010 - RNA, 19 nt, Artificial Sequence
  Description of Artificial Sequence: Synthetic oligonucleotide
uggaaugcaaggcauggau

SEQ ID NO: 3277011 - RNA, 19 nt, Artificial Sequence
  Description of Artificial Sequence: Synthetic oligonucleotide
ugaaaaugggccccaguuc

SEQ ID NO: 3277012 - RNA, 19 nt, Artificial Sequence
  Description of Artificial Sequence: Synthetic oligonucleotide
accuggaauaucuucucag

SEQ ID NO: 3277013 - RNA, 19 nt, Artificial Sequence
  Description of Artificial Sequence: Synthetic oligonucleotide
ugauaugaccacuccagaa

SEQ ID NO: 3277014 - RNA, 19 nt, Artificial Sequence
  Description of Artificial Sequence: Synthetic oligonucleotide
uugauacacaucacugaca

SEQ ID NO: 3277015 - RNA, 19 nt, Artificial Sequence
  Description of Artificial Sequence: Synthetic oligonucleotide
caaaguucucuuuccacac

SEQ ID NO: 3277016 - RNA, 19 nt, Artificial Sequence
  Description of Artificial Sequence: Synthetic oligonucleotide
ugaugcaucuccaggugca

SEQ ID NO: 3277017 - RNA, 19 nt, Artificial Sequence
  Description of Artificial Sequence: Synthetic oligonucleotide
ucuucaucucuugauacac

SEQ ID NO: 3277018 - RNA, 19 nt, Artificial Sequence
  Description of Artificial Sequence: Synthetic oligonucleotide
uucaucucuugauacacau

SEQ ID NO: 3277019 - RNA, 19 nt, Artificial Sequence
  Description of Artificial Sequence: Synthetic oligonucleotide
gaacacuccacgucccagg

SEQ ID NO: 3277020 - RNA, 19 nt, Artificial Sequence
  Description of Artificial Sequence: Synthetic oligonucleotide
acugacauauuuugugaca

SEQ ID NO: 3277021 - RNA, 19 nt, Artificial Sequence
  Description of Artificial Sequence: Synthetic oligonucleotide
aagggcaugcggcagggcu

SEQ ID NO: 3277022 - RNA, 19 nt, Artificial Sequence
  Description of Artificial Sequence: Synthetic oligonucleotide
uaucagcucugauaugacc

SEQ ID NO: 3277023 - RNA, 19 nt, Artificial Sequence
  Description of Artificial Sequence: Synthetic oligonucleotide
ucucugugggcuauccaag

SEQ ID NO: 3277024 - RNA, 19 nt, Artificial Sequence
  Description of Artificial Sequence: Synthetic oligonucleotide
gagaugauaucccaggacu

SEQ ID NO: 3277025 - RNA, 19 nt, Artificial Sequence
  Description of Artificial Sequence: Synthetic oligonucleotide
gaaggccugaugcaucucc

SEQ ID NO: 3277026 - RNA, 19 nt, Artificial Sequence
  Description of Artificial Sequence: Synthetic oligonucleotide
acacaaucugugugcuucc

SEQ ID NO: 3277027 - RNA, 19 nt, Artificial Sequence
  Description of Artificial Sequence: Synthetic oligonucleotide
aagaacaaaauggcuggcu

SEQ ID NO: 3277028 - RNA, 19 nt, Artificial Sequence
  Description of Artificial Sequence: Synthetic oligonucleotide
gacacaaucugugugcuuc

SEQ ID NO: 3277029 - RNA, 19 nt, Artificial Sequence
  Description of Artificial Sequence: Synthetic oligonucleotide
ugcuguugugcccagugac

SEQ ID NO: 3277030 - RNA, 19 nt, Artificial Sequence
  Description of Artificial Sequence: Synthetic oligonucleotide
aauggcuggcuucuauggu

SEQ ID NO: 3277031 - RNA, 19 nt, Artificial Sequence
  Description of Artificial Sequence: Synthetic oligonucleotide
ugugggcuauccaagguuc

SEQ ID NO: 3277032 - RNA, 19 nt, Artificial Sequence
  Description of Artificial Sequence: Synthetic oligonucleotide
aaucugugugcuuccuaug

SEQ ID NO: 3277033 - RNA, 19 nt, Artificial Sequence
  Description of Artificial Sequence: Synthetic oligonucleotide
aguugaacacacaggauug

SEQ ID NO: 3277034 - RNA, 19 nt, Artificial Sequence
  Description of Artificial Sequence: Synthetic oligonucleotide
aaugggccccaguuccugg

SEQ ID NO: 3277035 - RNA, 19 nt, Artificial Sequence
  Description of Artificial Sequence: Synthetic oligonucleotide
agguucuaagggcaugcgg

SEQ ID NO: 3277036 - RNA, 19 nt, Artificial Sequence
  Description of Artificial Sequence: Synthetic oligonucleotide
ucuugccagccacacaucu

SEQ ID NO: 3277037 - RNA, 19 nt, Artificial Sequence
  Description of Artificial Sequence: Synthetic oligonucleotide
aaguccauuuuagcagaac

SEQ ID NO: 3277038 - RNA, 19 nt, Artificial Sequence
  Description of Artificial Sequence: Synthetic oligonucleotide
cauuauggaaugcaaggca

SEQ ID NO: 3277039 - RNA, 19 nt, Artificial Sequence
  Description of Artificial Sequence: Synthetic oligonucleotide
ucccucaggaucuguauca

SEQ ID NO: 3277040 - RNA, 19 nt, Artificial Sequence
  Description of Artificial Sequence: Synthetic oligonucleotide
auaucuucucagcauccug

SEQ ID NO: 3277041 - RNA, 19 nt, Artificial Sequence
  Description of Artificial Sequence: Synthetic oligonucleotide
cucagagaugauaucccag

SEQ ID NO: 3277042 - RNA, 19 nt, Artificial Sequence
  Description of Artificial Sequence: Synthetic oligonucleotide
agaacuuugggcgaccccu

SEQ ID NO: 3277043 - RNA, 19 nt, Artificial Sequence
  Description of Artificial Sequence: Synthetic oligonucleotide
caagcgagucaguauacug

SEQ ID NO: 3277044 - RNA, 19 nt, Artificial Sequence
  Description of Artificial Sequence: Synthetic oligonucleotide
uuuuagcagaacacuccac

SEQ ID NO: 3277045 - RNA, 19 nt, Artificial Sequence
  Description of Artificial Sequence: Synthetic oligonucleotide
aggucauagccaaggaggc

SEQ ID NO: 3277046 - RNA, 19 nt, Artificial Sequence
  Description of Artificial Sequence: Synthetic oligonucleotide
ucuugugcaggcacugcca

SEQ ID NO: 3277047 - RNA, 19 nt, Artificial Sequence
  Description of Artificial Sequence: Synthetic oligonucleotide
aagggccccaguguguugg

SEQ ID NO: 3277048 - RNA, 19 nt, Artificial Sequence
  Description of Artificial Sequence: Synthetic oligonucleotide
ucccaggacucaaaguucu

SEQ ID NO: 3277049 - RNA, 19 nt, Artificial Sequence
  Description of Artificial Sequence: Synthetic oligonucleotide
aaagagguagccccgaagc

SEQ ID NO: 3277050 - RNA, 19 nt, Artificial Sequence
  Description of Artificial Sequence: Synthetic oligonucleotide
aguucuauagacauuaggc

SEQ ID NO: 3277051 - RNA, 19 nt, Artificial Sequence
  Description of Artificial Sequence: Synthetic oligonucleotide
ugagcuuggauuuggaugg

SEQ ID NO: 3277052 - RNA, 19 nt, Artificial Sequence
  Description of Artificial Sequence: Synthetic oligonucleotide
uucuauagacauuaggcgg

SEQ ID NO: 3277053 - RNA, 19 nt, Artificial Sequence
  Description of Artificial Sequence: Synthetic oligonucleotide
uuuucaaagagguagcccc

SEQ ID NO: 3277054 - RNA, 19 nt, Artificial Sequence
  Description of Artificial Sequence: Synthetic oligonucleotide
uaugaauugguucuucucc

SEQ ID NO: 3277055 - RNA, 19 nt, Artificial Sequence
  Description of Artificial Sequence: Synthetic oligonucleotide
gaugauuugggauuggcug

SEQ ID NO: 3277056 - RNA, 19 nt, Artificial Sequence
  Description of Artificial Sequence: Synthetic oligonucleotide
aucaaugacuucuugguuc

SEQ ID NO: 3277057 - RNA, 19 nt, Artificial Sequence
  Description of Artificial Sequence: Synthetic oligonucleotide
uccagauguucucugaugg

SEQ ID NO: 3277058 - RNA, 19 nt, Artificial Sequence
  Description of Artificial Sequence: Synthetic oligonucleotide
guucuauagacauuaggcg

SEQ ID NO: 3277059 - RNA, 19 nt, Artificial Sequence
  Description of Artificial Sequence: Synthetic oligonucleotide
uguauaguucuauagacau

SEQ ID NO: 3277060 - RNA, 19 nt, Artificial Sequence
  Description of Artificial Sequence: Synthetic oligonucleotide
uuauucuuuagcaccuccg

SEQ ID NO: 3277061 - RNA, 19 nt, Artificial Sequence
  Description of Artificial Sequence: Synthetic oligonucleotide
augaauugguucuucuccc

SEQ ID NO: 3277062 - RNA, 19 nt, Artificial Sequence
  Description of Artificial Sequence: Synthetic oligonucleotide
auagacauuaggcgguccc

SEQ ID NO: 3277063 - RNA, 19 nt, Artificial Sequence
  Description of Artificial Sequence: Synthetic oligonucleotide
uugagcuuggauuuggaug

SEQ ID NO: 3277064 - RNA, 19 nt, Artificial Sequence
  Description of Artificial Sequence: Synthetic oligonucleotide
gagcuuuucaaagagguag

SEQ ID NO: 3277065 - RNA, 19 nt, Artificial Sequence
  Description of Artificial Sequence: Synthetic oligonucleotide
ugaggagcuuuucaaagag

SEQ ID NO: 3277066 - RNA, 19 nt, Artificial Sequence
  Description of Artificial Sequence: Synthetic oligonucleotide
auucuuuagcaccuccgcc

SEQ ID NO: 3277067 - RNA, 19 nt, Artificial Sequence
  Description of Artificial Sequence: Synthetic oligonucleotide
agcaucaaugacuucuugg

SEQ ID NO: 3277068 - RNA, 19 nt, Artificial Sequence
  Description of Artificial Sequence: Synthetic oligonucleotide
uuuuguauggccucaucca

SEQ ID NO: 3277069 - RNA, 19 nt, Artificial Sequence
  Description of Artificial Sequence: Synthetic oligonucleotide
ucuauagacauuaggcggu

SEQ ID NO: 3277070 - RNA, 19 nt, Artificial Sequence
  Description of Artificial Sequence: Synthetic oligonucleotide
uauucuuuagcaccuccgc

SEQ ID NO: 3277071 - RNA, 19 nt, Artificial Sequence
  Description of Artificial Sequence: Synthetic oligonucleotide
uccuguaugaauugguucu

SEQ ID NO: 3277072 - RNA, 19 nt, Artificial Sequence
  Description of Artificial Sequence: Synthetic oligonucleotide
ucucccuuacuuccgauag

SEQ ID NO: 3277073 - RNA, 19 nt, Artificial Sequence
  Description of Artificial Sequence: Synthetic oligonucleotide
augauuugggauuggcugg

SEQ ID NO: 3277074 - RNA, 19 nt, Artificial Sequence
  Description of Artificial Sequence: Synthetic oligonucleotide
uaucagggccucaaggagg

SEQ ID NO: 3277075 - RNA, 19 nt, Artificial Sequence
  Description of Artificial Sequence: Synthetic oligonucleotide
cuccuuauucuuuagcacc

SEQ ID NO: 3277076 - RNA, 19 nt, Artificial Sequence
  Description of Artificial Sequence: Synthetic oligonucleotide
uuuuguuucuccugcaggu

SEQ ID NO: 3277077 - RNA, 19 nt, Artificial Sequence
  Description of Artificial Sequence: Synthetic oligonucleotide
aagucuucagggaacacuc

SEQ ID NO: 3277078 - RNA, 19 nt, Artificial Sequence
  Description of Artificial Sequence: Synthetic oligonucleotide
uccaggacugucaugauuc

SEQ ID NO: 3277079 - RNA, 19 nt, Artificial Sequence
  Description of Artificial Sequence: Synthetic oligonucleotide
ucugauggcccucaucaag

SEQ ID NO: 3277080 - RNA, 19 nt, Artificial Sequence
  Description of Artificial Sequence: Synthetic oligonucleotide
uuucaaagagguagccccg

SEQ ID NO: 3277081 - RNA, 19 nt, Artificial Sequence
  Description of Artificial Sequence: Synthetic oligonucleotide
guuccuuucauuccuccgg

SEQ ID NO: 3277082 - RNA, 19 nt, Artificial Sequence
  Description of Artificial Sequence: Synthetic oligonucleotide
uucuuuagcaccuccgcca

SEQ ID NO: 3277083 - RNA, 19 nt, Artificial Sequence
  Description of Artificial Sequence: Synthetic oligonucleotide
cuuacuuccgauagggcug

SEQ ID NO: 3277084 - RNA, 19 nt, Artificial Sequence
  Description of Artificial Sequence: Synthetic oligonucleotide
ugucaugauucucuuggcc

SEQ ID NO: 3277085 - RNA, 19 nt, Artificial Sequence
  Description of Artificial Sequence: Synthetic oligonucleotide
ucaucaagucuucagggaa

SEQ ID NO: 3277086 - RNA, 19 nt, Artificial Sequence
  Description of Artificial Sequence: Synthetic oligonucleotide
cuuucauuccuccgguucg

SEQ ID NO: 3277087 - RNA, 19 nt, Artificial Sequence
  Description of Artificial Sequence: Synthetic oligonucleotide
ugugccaguggccacaggu

SEQ ID NO: 3277088 - RNA, 19 nt, Artificial Sequence
  Description of Artificial Sequence: Synthetic oligonucleotide
ucccuuacuuccgauaggg

SEQ ID NO: 3277089 - RNA, 19 nt, Artificial Sequence
  Description of Artificial Sequence: Synthetic oligonucleotide
uuuggauggggucaagguc

SEQ ID NO: 3277090 - RNA, 19 nt, Artificial Sequence
  Description of Artificial Sequence: Synthetic oligonucleotide
gaacacucccuccagagca

SEQ ID NO: 3277091 - RNA, 19 nt, Artificial Sequence
  Description of Artificial Sequence: Synthetic oligonucleotide
agugugaugauuugggauu

SEQ ID NO: 3277092 - RNA, 19 nt, Artificial Sequence
  Description of Artificial Sequence: Synthetic oligonucleotide
cuccagaaagaccuggccg

SEQ ID NO: 3277093 - RNA, 19 nt, Artificial Sequence
  Description of Artificial Sequence: Synthetic oligonucleotide
ugaugauuugggauuggcu

SEQ ID NO: 3277094 - RNA, 19 nt, Artificial Sequence
  Description of Artificial Sequence: Synthetic oligonucleotide
cuugguggaaucucggaac

SEQ ID NO: 3277095 - RNA, 19 nt, Artificial Sequence
  Description of Artificial Sequence: Synthetic oligonucleotide
uuguuucuccugcagguug

SEQ ID NO: 3277096 - RNA, 19 nt, Artificial Sequence
  Description of Artificial Sequence: Synthetic oligonucleotide
agaaagaccuggccgaugu

SEQ ID NO: 3277097 - RNA, 19 nt, Artificial Sequence
  Description of Artificial Sequence: Synthetic oligonucleotide
uaggacaucagggucacca

SEQ ID NO: 3277098 - RNA, 19 nt, Artificial Sequence
  Description of Artificial Sequence: Synthetic oligonucleotide
auuuggauggggucaaggu

SEQ ID NO: 3277099 - RNA, 19 nt, Artificial Sequence
  Description of Artificial Sequence: Synthetic oligonucleotide
uccuuauucuuuagcaccu

SEQ ID NO: 3277100 - RNA, 19 nt, Artificial Sequence
  Description of Artificial Sequence: Synthetic oligonucleotide
acagguuggccuuguauag

SEQ ID NO: 3277101 - RNA, 19 nt, Artificial Sequence
  Description of Artificial Sequence: Synthetic oligonucleotide
ucuuuagcaccuccgccag

SEQ ID NO: 3277102 - RNA, 19 nt, Artificial Sequence
  Description of Artificial Sequence: Synthetic oligonucleotide
ucagggaacacucccucca

SEQ ID NO: 3277103 - RNA, 19 nt, Artificial Sequence
  Description of Artificial Sequence: Synthetic oligonucleotide
gacaggagccucaggaugg

SEQ ID NO: 3277104 - RNA, 19 nt, Artificial Sequence
  Description of Artificial Sequence: Synthetic oligonucleotide
gaacuggugugccaguggc

SEQ ID NO: 3277105 - RNA, 19 nt, Artificial Sequence
  Description of Artificial Sequence: Synthetic oligonucleotide
gauuuggauggggucaagg

SEQ ID NO: 3277106 - RNA, 19 nt, Artificial Sequence
  Description of Artificial Sequence: Synthetic oligonucleotide
agcagugugaugauuuggg

SEQ ID NO: 3277107 - RNA, 19 nt, Artificial Sequence
  Description of Artificial Sequence: Synthetic oligonucleotide
ucgauguccuguaugaauu

SEQ ID NO: 3277108 - RNA, 19 nt, Artificial Sequence
  Description of Artificial Sequence: Synthetic oligonucleotide
gauucucuuggccucgaug

SEQ ID NO: 3277109 - RNA, 19 nt, Artificial Sequence
  Description of Artificial Sequence: Synthetic oligonucleotide
uguuucuccugcagguugc

SEQ ID NO: 3277110 - RNA, 19 nt, Artificial Sequence
  Description of Artificial Sequence: Synthetic oligonucleotide
uuggauuuggaugggguca

SEQ ID NO: 3277111 - RNA, 19 nt, Artificial Sequence
  Description of Artificial Sequence: Synthetic oligonucleotide
augguguugagcuuggauu

SEQ ID NO: 3277112 - RNA, 19 nt, Artificial Sequence
  Description of Artificial Sequence: Synthetic oligonucleotide
agcuuuucaaagagguagc

SEQ ID NO: 3277113 - RNA, 19 nt, Artificial Sequence
  Description of Artificial Sequence: Synthetic oligonucleotide
gauagggcuggugaggagc

SEQ ID NO: 3277114 - RNA, 19 nt, Artificial Sequence
  Description of Artificial Sequence: Synthetic oligonucleotide
gaaucucggaacuggugug

SEQ ID NO: 3277115 - RNA, 19 nt, Artificial Sequence
  Description of Artificial Sequence: Synthetic oligonucleotide
cuaucagggccucaaggag

SEQ ID NO: 3277116 - RNA, 19 nt, Artificial Sequence
  Description of Artificial Sequence: Synthetic oligonucleotide
gacaucagggucaccagcc

SEQ ID NO: 3277117 - RNA, 19 nt, Artificial Sequence
  Description of Artificial Sequence: Synthetic oligonucleotide
ggugaggagcuuuucaaag

SEQ ID NO: 3277118 - RNA, 19 nt, Artificial Sequence
  Description of Artificial Sequence: Synthetic oligonucleotide
aagagguagccccgaagcu

SEQ ID NO: 3277119 - RNA, 19 nt, Artificial Sequence
  Description of Artificial Sequence: Synthetic oligonucleotide
ugcagcagugugaugauuu

SEQ ID NO: 3277120 - RNA, 19 nt, Artificial Sequence
  Description of Artificial Sequence: Synthetic oligonucleotide
gauguccagauguucucug

SEQ ID NO: 3277121 - RNA, 19 nt, Artificial Sequence
  Description of Artificial Sequence: Synthetic oligonucleotide
ucagcauccgccuucuuuu

SEQ ID NO: 3277122 - RNA, 19 nt, Artificial Sequence
  Description of Artificial Sequence: Synthetic oligonucleotide
uuuagcaccuccgccagcu

SEQ ID NO: 3277123 - RNA, 19 nt, Artificial Sequence
  Description of Artificial Sequence: Synthetic oligonucleotide
uugguggaaucucggaacu

SEQ ID NO: 3277124 - RNA, 19 nt, Artificial Sequence
  Description of Artificial Sequence: Synthetic oligonucleotide
ucaugauucucuuggccuc

SEQ ID NO: 3277125 - RNA, 19 nt, Artificial Sequence
  Description of Artificial Sequence: Synthetic oligonucleotide
uggaaucucggaacuggug

SEQ ID NO: 3277126 - RNA, 19 nt, Artificial Sequence
  Description of Artificial Sequence: Synthetic oligonucleotide
uggccuugguggaaucucg

SEQ ID NO: 3277127 - RNA, 19 nt, Artificial Sequence
  Description of Artificial Sequence: Synthetic oligonucleotide
ggggucaaggucuucauug

SEQ ID NO: 3277128 - RNA, 19 nt, Artificial Sequence
  Description of Artificial Sequence: Synthetic oligonucleotide
aucugggugggacuccacg

SEQ ID NO: 3277129 - RNA, 19 nt, Artificial Sequence
  Description of Artificial Sequence: Synthetic oligonucleotide
aggagcuuuucaaagaggu

SEQ ID NO: 3277130 - RNA, 19 nt, Artificial Sequence
  Description of Artificial Sequence: Synthetic oligonucleotide
agagguagccccgaagcuc

SEQ ID NO: 3277131 - RNA, 19 nt, Artificial Sequence
  Description of Artificial Sequence: Synthetic oligonucleotide
cuuggauuuggaugggguc

SEQ ID NO: 3277132 - RNA, 19 nt, Artificial Sequence
  Description of Artificial Sequence: Synthetic oligonucleotide
ugguucuucucccuuacuu

SEQ ID NO: 3277133 - RNA, 19 nt, Artificial Sequence
  Description of Artificial Sequence: Synthetic oligonucleotide
ugccaguggccacagguug

SEQ ID NO: 3277134 - RNA, 19 nt, Artificial Sequence
  Description of Artificial Sequence: Synthetic oligonucleotide
uuacuuccgauagggcugg

SEQ ID NO: 3277135 - RNA, 19 nt, Artificial Sequence
  Description of Artificial Sequence: Synthetic oligonucleotide
caucaagucuucagggaac

SEQ ID NO: 3277136 - RNA, 19 nt, Artificial Sequence
  Description of Artificial Sequence: Synthetic oligonucleotide
ugaauugguucuucucccu

SEQ ID NO: 3277137 - RNA, 19 nt, Artificial Sequence
  Description of Artificial Sequence: Synthetic oligonucleotide
ugguguugagcuuggauuu

SEQ ID NO: 3277138 - RNA, 19 nt, Artificial Sequence
  Description of Artificial Sequence: Synthetic oligonucleotide
aucagggccucaaggaggc

SEQ ID NO: 3277139 - RNA, 19 nt, Artificial Sequence
  Description of Artificial Sequence: Synthetic oligonucleotide
guaugaauugguucuucuc

SEQ ID NO: 3277140 - RNA, 19 nt, Artificial Sequence
  Description of Artificial Sequence: Synthetic oligonucleotide
gauuggcuggacaggagcc

SEQ ID NO: 3277141 - RNA, 19 nt, Artificial Sequence
  Description of Artificial Sequence: Synthetic oligonucleotide
cucaaggaggcgcugcgcc

SEQ ID NO: 3277142 - RNA, 19 nt, Artificial Sequence
  Description of Artificial Sequence: Synthetic oligonucleotide
cuccacguaggacaucagg

SEQ ID NO: 3277143 - RNA, 19 nt, Artificial Sequence
  Description of Artificial Sequence: Synthetic oligonucleotide
uccgauagggcuggugagg

SEQ ID NO: 3277144 - RNA, 19 nt, Artificial Sequence
  Description of Artificial Sequence: Synthetic oligonucleotide
ugggugggacuccacguag

SEQ ID NO: 3277145 - RNA, 19 nt, Artificial Sequence
  Description of Artificial Sequence: Synthetic oligonucleotide
uucuuuuccuccagcaguu

SEQ ID NO: 3277146 - RNA, 19 nt, Artificial Sequence
  Description of Artificial Sequence: Synthetic oligonucleotide
uguccuguaugaauugguu

SEQ ID NO: 3277147 - RNA, 19 nt, Artificial Sequence
  Description of Artificial Sequence: Synthetic oligonucleotide
aggacugucaugauucucu

SEQ ID NO: 3277148 - RNA, 19 nt, Artificial Sequence
  Description of Artificial Sequence: Synthetic oligonucleotide
uuccuuucauuccuccggu

SEQ ID NO: 3277149 - RNA, 19 nt, Artificial Sequence
  Description of Artificial Sequence: Synthetic oligonucleotide
aaugauaccaaucccaugg

SEQ ID NO: 3277150 - RNA, 19 nt, Artificial Sequence
  Description of Artificial Sequence: Synthetic oligonucleotide
aaucuguacauucauaagg

SEQ ID NO: 3277151 - RNA, 19 nt, Artificial Sequence
  Description of Artificial Sequence: Synthetic oligonucleotide
auuuauaaggcuuuucacc

SEQ ID NO: 3277152 - RNA, 19 nt, Artificial Sequence
  Description of Artificial Sequence: Synthetic oligonucleotide
aguuauuucaaguugcccc

SEQ ID NO: 3277153 - RNA, 19 nt, Artificial Sequence
  Description of Artificial Sequence: Synthetic oligonucleotide
aaugaacuauccuaugugc

SEQ ID NO: 3277154 - RNA, 19 nt, Artificial Sequence
  Description of Artificial Sequence: Synthetic oligonucleotide
aaaaccuuuauuucuucac

SEQ ID NO: 3277155 - RNA, 19 nt, Artificial Sequence
  Description of Artificial Sequence: Synthetic oligonucleotide
uuuauaaggcuuuucaccc

SEQ ID NO: 3277156 - RNA, 19 nt, Artificial Sequence
  Description of Artificial Sequence: Synthetic oligonucleotide
uauuucuucacauuuauaa

SEQ ID NO: 3277157 - RNA, 19 nt, Artificial Sequence
  Description of Artificial Sequence: Synthetic oligonucleotide
aaaauucucagaugaauga

SEQ ID NO: 3277158 - RNA, 19 nt, Artificial Sequence
  Description of Artificial Sequence: Synthetic oligonucleotide
aaauugaagaucaacuuag

SEQ ID NO: 3277159 - RNA, 19 nt, Artificial Sequence
  Description of Artificial Sequence: Synthetic oligonucleotide
acuuuaugaacauuugggg

SEQ ID NO: 3277160 - RNA, 19 nt, Artificial Sequence
  Description of Artificial Sequence: Synthetic oligonucleotide
uguuccaaauugaagauca

SEQ ID NO: 3277161 - RNA, 19 nt, Artificial Sequence
  Description of Artificial Sequence: Synthetic oligonucleotide
ucaaaugauaccaauccca

SEQ ID NO: 3277162 - RNA, 19 nt, Artificial Sequence
  Description of Artificial Sequence: Synthetic oligonucleotide
uauuacauucuuuacauuc

SEQ ID NO: 3277163 - RNA, 19 nt, Artificial Sequence
  Description of Artificial Sequence: Synthetic oligonucleotide
aucaacuuagguuugacug

SEQ ID NO: 3277164 - RNA, 19 nt, Artificial Sequence
  Description of Artificial Sequence: Synthetic oligonucleotide
cacuuuaugaacauuuggg

SEQ ID NO: 3277165 - RNA, 19 nt, Artificial Sequence
  Description of Artificial Sequence: Synthetic oligonucleotide
auucauaaggcuucucacc

SEQ ID NO: 3277166 - RNA, 19 nt, Artificial Sequence
  Description of Artificial Sequence: Synthetic oligonucleotide
uccaaauugaagaucaacu

SEQ ID NO: 3277167 - RNA, 19 nt, Artificial Sequence
  Description of Artificial Sequence: Synthetic oligonucleotide
ugaagaucaacuuagguuu

SEQ ID NO: 3277168 - RNA, 19 nt, Artificial Sequence
  Description of Artificial Sequence: Synthetic oligonucleotide
agugaguugugacuuaugg

SEQ ID NO: 3277169 - RNA, 19 nt, Artificial Sequence
  Description of Artificial Sequence: Synthetic oligonucleotide
auucuuuacauucauaaaa

SEQ ID NO: 3277170 - RNA, 19 nt, Artificial Sequence
  Description of Artificial Sequence: Synthetic oligonucleotide
uguauaucgagcuuugacu

SEQ ID NO: 3277171 - RNA, 19 nt, Artificial Sequence
  Description of Artificial Sequence: Synthetic oligonucleotide
aguggaaagauuuauuaca

SEQ ID NO: 3277172 - RNA, 19 nt, Artificial Sequence
  Description of Artificial Sequence: Synthetic oligonucleotide
ugugaguugacacuuccag

SEQ ID NO: 3277173 - RNA, 19 nt, Artificial Sequence
  Description of Artificial Sequence: Synthetic oligonucleotide
ucacuuuaugaacauuugg

SEQ ID NO: 3277174 - RNA, 19 nt, Artificial Sequence
  Description of Artificial Sequence: Synthetic oligonucleotide
ucaggauuuuccuugcugg

SEQ ID NO: 3277175 - RNA, 19 nt, Artificial Sequence
  Description of Artificial Sequence: Synthetic oligonucleotide
uguaugucuuuucugaugu

SEQ ID NO: 3277176 - RNA, 19 nt, Artificial Sequence
  Description of Artificial Sequence: Synthetic oligonucleotide
uucaaguugccccaaaugu

SEQ ID NO: 3277177 - RNA, 19 nt, Artificial Sequence
  Description of Artificial Sequence: Synthetic oligonucleotide
ugaguugacacuuccagug

SEQ ID NO: 3277178 - RNA, 19 nt, Artificial Sequence
  Description of Artificial Sequence: Synthetic oligonucleotide
gguuuucugauguauaucg

SEQ ID NO: 3277179 - RNA, 19 nt, Artificial Sequence
  Description of Artificial Sequence: Synthetic oligonucleotide
aaaagguuuucccgcaauc

SEQ ID NO: 3277180 - RNA, 19 nt, Artificial Sequence
  Description of Artificial Sequence: Synthetic oligonucleotide
auguauaucgagcuuugac

SEQ ID NO: 3277181 - RNA, 19 nt, Artificial Sequence
  Description of Artificial Sequence: Synthetic oligonucleotide
aauucucagaugaaugaac

SEQ ID NO: 3277182 - RNA, 19 nt, Artificial Sequence
  Description of Artificial Sequence: Synthetic oligonucleotide
aggcuuuucacccaaauga

SEQ ID NO: 3277183 - RNA, 19 nt, Artificial Sequence
  Description of Artificial Sequence: Synthetic oligonucleotide
gauaccaaucccauggccg

SEQ ID NO: 3277184 - RNA, 19 nt, Artificial Sequence
  Description of Artificial Sequence: Synthetic oligonucleotide
uuucugauguauaucgagc

SEQ ID NO: 3277185 - RNA, 19 nt, Artificial Sequence
  Description of Artificial Sequence: Synthetic oligonucleotide
aaagauuuauuacauucuu

SEQ ID NO: 3277186 - RNA, 19 nt, Artificial Sequence
  Description of Artificial Sequence: Synthetic oligonucleotide
auuucuucacauuuauaag

SEQ ID NO: 3277187 - RNA, 19 nt, Artificial Sequence
  Description of Artificial Sequence: Synthetic oligonucleotide
agauuuauuacauucuuua

SEQ ID NO: 3277188 - RNA, 19 nt, Artificial Sequence
  Description of Artificial Sequence: Synthetic oligonucleotide
gaaugaacuauccuaugug

SEQ ID NO: 3277189 - RNA, 19 nt, Artificial Sequence
  Description of Artificial Sequence: Synthetic oligonucleotide
ugaaugaacuauccuaugu

SEQ ID NO: 3277190 - RNA, 19 nt, Artificial Sequence
  Description of Artificial Sequence: Synthetic oligonucleotide
ucagaugaaugaacuaucc

SEQ ID NO: 3277191 - RNA, 19 nt, Artificial Sequence
  Description of Artificial Sequence: Synthetic oligonucleotide
aucuguacauucauaaggc

SEQ ID NO: 3277192 - RNA, 19 nt, Artificial Sequence
  Description of Artificial Sequence: Synthetic oligonucleotide
uuuauuucuucacauuuau

SEQ ID NO: 3277193 - RNA, 19 nt, Artificial Sequence
  Description of Artificial Sequence: Synthetic oligonucleotide
uuagguuugacugugcaga

SEQ ID NO: 3277194 - RNA, 19 nt, Artificial Sequence
  Description of Artificial Sequence: Synthetic oligonucleotide
ugaacuauccuaugugcag

SEQ ID NO: 3277195 - RNA, 19 nt, Artificial Sequence
  Description of Artificial Sequence: Synthetic oligonucleotide
aaaccuuuauuucuucaca

SEQ ID NO: 3277196 - RNA, 19 nt, Artificial Sequence
  Description of Artificial Sequence: Synthetic oligonucleotide
uuugguuaguuauuucaag

SEQ ID NO: 3277197 - RNA, 19 nt, Artificial Sequence
  Description of Artificial Sequence: Synthetic oligonucleotide
gaagaccacagcuaugucc

SEQ ID NO: 3277198 - RNA, 19 nt, Artificial Sequence
  Description of Artificial Sequence: Synthetic oligonucleotide
aaucaggucacucacuuua

SEQ ID NO: 3277199 - RNA, 19 nt, Artificial Sequence
  Description of Artificial Sequence: Synthetic oligonucleotide
uugaagaucaacuuagguu

SEQ ID NO: 3277200 - RNA, 19 nt, Artificial Sequence
  Description of Artificial Sequence: Synthetic oligonucleotide
uaucucaggauuuuccuug

SEQ ID NO: 3277201 - RNA, 19 nt, Artificial Sequence
  Description of Artificial Sequence: Synthetic oligonucleotide
uuaguuauuucaaguugcc

SEQ ID NO: 3277202 - RNA, 19 nt, Artificial Sequence
  Description of Artificial Sequence: Synthetic oligonucleotide
acagcuauguccucaaaug

SEQ ID NO: 3277203 - RNA, 19 nt, Artificial Sequence
  Description of Artificial Sequence: Synthetic oligonucleotide
agaugaaugaacuauccua

SEQ ID NO: 3277204 - RNA, 19 nt, Artificial Sequence
  Description of Artificial Sequence: Synthetic oligonucleotide
ucgagcuuugacuugcggg

SEQ ID NO: 3277205 - RNA, 19 nt, Artificial Sequence
  Description of Artificial Sequence: Synthetic oligonucleotide
uuucaaguugccccaaaug

SEQ ID NO: 3277206 - RNA, 19 nt, Artificial Sequence
  Description of Artificial Sequence: Synthetic oligonucleotide
ggaaagauuuauuacauuc

SEQ ID NO: 3277207 - RNA, 19 nt, Artificial Sequence
  Description of Artificial Sequence: Synthetic oligonucleotide
gauuuauuacauucuuuac

SEQ ID NO: 3277208 - RNA, 19 nt, Artificial Sequence
  Description of Artificial Sequence: Synthetic oligonucleotide
guuaguuauuucaaguugc

SEQ ID NO: 3277209 - RNA, 19 nt, Artificial Sequence
  Description of Artificial Sequence: Synthetic oligonucleotide
uucaucuggugucuuuugg

SEQ ID NO: 3277210 - RNA, 19 nt, Artificial Sequence
  Description of Artificial Sequence: Synthetic oligonucleotide
uugguuaguuauuucaagu

SEQ ID NO: 3277211 - RNA, 19 nt, Artificial Sequence
  Description of Artificial Sequence: Synthetic oligonucleotide
uuuugguuaguuauuucaa

SEQ ID NO: 3277212 - RNA, 19 nt, Artificial Sequence
  Description of Artificial Sequence: Synthetic oligonucleotide
auaucgagcuuugacuugc

SEQ ID NO: 3277213 - RNA, 19 nt, Artificial Sequence
  Description of Artificial Sequence: Synthetic oligonucleotide
aaggcuuuucacccaaaug

SEQ ID NO: 3277214 - RNA, 19 nt, Artificial Sequence
  Description of Artificial Sequence: Synthetic oligonucleotide
ucuggugucuuuugguuag

SEQ ID NO: 3277215 - RNA, 19 nt, Artificial Sequence
  Description of Artificial Sequence: Synthetic oligonucleotide
uucugauguauaucgagcu

SEQ ID NO: 3277216 - RNA, 19 nt, Artificial Sequence
  Description of Artificial Sequence: Synthetic oligonucleotide
uaugucuuuucugaugugc

SEQ ID NO: 3277217 - RNA, 19 nt, Artificial Sequence
  Description of Artificial Sequence: Synthetic oligonucleotide
ugaagcuucugcuaggcuc

SEQ ID NO: 3277218 - RNA, 19 nt, Artificial Sequence
  Description of Artificial Sequence: Synthetic oligonucleotide
auugaagaucaacuuaggu

SEQ ID NO: 3277219 - RNA, 19 nt, Artificial Sequence
  Description of Artificial Sequence: Synthetic oligonucleotide
cauuuauaaggcuuuucac

SEQ ID NO: 3277220 - RNA, 19 nt, Artificial Sequence
  Description of Artificial Sequence: Synthetic oligonucleotide
aauguaucucaggauuuuc

SEQ ID NO: 3277221 - RNA, 19 nt, Artificial Sequence
  Description of Artificial Sequence: Synthetic oligonucleotide
cuugcuggugucaaucagg

SEQ ID NO: 3277222 - RNA, 19 nt, Artificial Sequence
  Description of Artificial Sequence: Synthetic oligonucleotide
auaccaaucccauggccgg

SEQ ID NO: 3277223 - RNA, 19 nt, Artificial Sequence
  Description of Artificial Sequence: Synthetic oligonucleotide
aaaugauaccaaucccaug

SEQ ID NO: 3277224 - RNA, 19 nt, Artificial Sequence
  Description of Artificial Sequence: Synthetic oligonucleotide
cuuuugguuaguuauuuca

SEQ ID NO: 3277225 - RNA, 19 nt, Artificial Sequence
  Description of Artificial Sequence: Synthetic oligonucleotide
aauugaagaucaacuuagg

SEQ ID NO: 3277226 - RNA, 19 nt, Artificial Sequence
  Description of Artificial Sequence: Synthetic oligonucleotide
uguaucucaggauuuuccu

SEQ ID NO: 3277227 - RNA, 19 nt, Artificial Sequence
  Description of Artificial Sequence: Synthetic oligonucleotide
ugugcagagcuccaggaac

SEQ ID NO: 3277228 - RNA, 19 nt, Artificial Sequence
  Description of Artificial Sequence: Synthetic oligonucleotide
aaccuuuauuucuucacau

SEQ ID NO: 3277229 - RNA, 19 nt, Artificial Sequence
  Description of Artificial Sequence: Synthetic oligonucleotide
augugcugugaguugacac

SEQ ID NO: 3277230 - RNA, 19 nt, Artificial Sequence
  Description of Artificial Sequence: Synthetic oligonucleotide
aggaacaccagguugcugu

SEQ ID NO: 3277231 - RNA, 19 nt, Artificial Sequence
  Description of Artificial Sequence: Synthetic oligonucleotide
aagaccacagcuauguccu

SEQ ID NO: 3277232 - RNA, 19 nt, Artificial Sequence
  Description of Artificial Sequence: Synthetic oligonucleotide
ugucaaucaggucacucac

SEQ ID NO: 3277233 - RNA, 19 nt, Artificial Sequence
  Description of Artificial Sequence: Synthetic oligonucleotide
augauaccaaucccauggc

SEQ ID NO: 3277234 - RNA, 19 nt, Artificial Sequence
  Description of Artificial Sequence: Synthetic oligonucleotide
cucaaaugauaccaauccc

SEQ ID NO: 3277235 - RNA, 19 nt, Artificial Sequence
  Description of Artificial Sequence: Synthetic oligonucleotide
auguaucucaggauuuucc

SEQ ID NO: 3277236 - RNA, 19 nt, Artificial Sequence
  Description of Artificial Sequence: Synthetic oligonucleotide
cauucauaaggcuucucac

SEQ ID NO: 3277237 - RNA, 19 nt, Artificial Sequence
  Description of Artificial Sequence: Synthetic oligonucleotide
ugauguauaucgagcuuug

SEQ ID NO: 3277238 - RNA, 19 nt, Artificial Sequence
  Description of Artificial Sequence: Synthetic oligonucleotide
ugugcagugaguugugacu

SEQ ID NO: 3277239 - RNA, 19 nt, Artificial Sequence
  Description of Artificial Sequence: Synthetic oligonucleotide
uucacauuuauaaggcuuu

SEQ ID NO: 3277240 - RNA, 19 nt, Artificial Sequence
  Description of Artificial Sequence: Synthetic oligonucleotide
aacuauccuaugugcagug

SEQ ID NO: 3277241 - RNA, 19 nt, Artificial Sequence
  Description of Artificial Sequence: Synthetic oligonucleotide
ucucagaugaaugaacuau

SEQ ID NO: 3277242 - RNA, 19 nt, Artificial Sequence
  Description of Artificial Sequence: Synthetic oligonucleotide
cugggcagcauccagcucc

SEQ ID NO: 3277243 - RNA, 19 nt, Artificial Sequence
  Description of Artificial Sequence: Synthetic oligonucleotide
ugauaccaaucccauggcc

SEQ ID NO: 3277244 - RNA, 19 nt, Artificial Sequence
  Description of Artificial Sequence: Synthetic oligonucleotide
acacugaagcuucugcuag

SEQ ID NO: 3277245 - RNA, 19 nt, Artificial Sequence
  Description of Artificial Sequence: Synthetic oligonucleotide
ugacacuuccaguggaaag

SEQ ID NO: 3277246 - RNA, 19 nt, Artificial Sequence
  Description of Artificial Sequence: Synthetic oligonucleotide
ugugcugugaguugacacu

SEQ ID NO: 3277247 - RNA, 19 nt, Artificial Sequence
  Description of Artificial Sequence: Synthetic oligonucleotide
cuauguccucaaaugauac

SEQ ID NO: 3277248 - RNA, 19 nt, Artificial Sequence
  Description of Artificial Sequence: Synthetic oligonucleotide
gguuaguuauuucaaguug

SEQ ID NO: 3277249 - RNA, 19 nt, Artificial Sequence
  Description of Artificial Sequence: Synthetic oligonucleotide
aacuaagcaauucugaguc

SEQ ID NO: 3277250 - RNA, 19 nt, Artificial Sequence
  Description of Artificial Sequence: Synthetic oligonucleotide
uuaugaaguauccagauga

SEQ ID NO: 3277251 - RNA, 19 nt, Artificial Sequence
  Description of Artificial Sequence: Synthetic oligonucleotide
aacaggaaggauaagauuc

SEQ ID NO: 3277252 - RNA, 19 nt, Artificial Sequence
  Description of Artificial Sequence: Synthetic oligonucleotide
ugaaguauccagaugaaug

SEQ ID NO: 3277253 - RNA, 19 nt, Artificial Sequence
  Description of Artificial Sequence: Synthetic oligonucleotide
ucuuucuucacucacuucc

SEQ ID NO: 3277254 - RNA, 19 nt, Artificial Sequence
  Description of Artificial Sequence: Synthetic oligonucleotide
ugaguuaugaaguauccag

SEQ ID NO: 3277255 - RNA, 19 nt, Artificial Sequence
  Description of Artificial Sequence: Synthetic oligonucleotide
uuuuaugaaacuaagcaau

SEQ ID NO: 3277256 - RNA, 19 nt, Artificial Sequence
  Description of Artificial Sequence: Synthetic oligonucleotide
uucuccaaaauucucaaag

SEQ ID NO: 3277257 - RNA, 19 nt, Artificial Sequence
  Description of Artificial Sequence: Synthetic oligonucleotide
aaaauucucaaagucagag

SEQ ID NO: 3277258 - RNA, 19 nt, Artificial Sequence
  Description of Artificial Sequence: Synthetic oligonucleotide
aacgauaccgcuuccaaag

SEQ ID NO: 3277259 - RNA, 19 nt, Artificial Sequence
  Description of Artificial Sequence: Synthetic oligonucleotide
agagugaagagucaugugg

SEQ ID NO: 3277260 - RNA, 19 nt, Artificial Sequence
  Description of Artificial Sequence: Synthetic oligonucleotide
acuuucuucauucuggguc

SEQ ID NO: 3277261 - RNA, 19 nt, Artificial Sequence
  Description of Artificial Sequence: Synthetic oligonucleotide
uccaguucagccaaaauug

SEQ ID NO: 3277262 - RNA, 19 nt, Artificial Sequence
  Description of Artificial Sequence: Synthetic oligonucleotide
auuugauaguaugaggucc

SEQ ID NO: 3277263 - RNA, 19 nt, Artificial Sequence
  Description of Artificial Sequence: Synthetic oligonucleotide
ucagaguuuguacagagcu

SEQ ID NO: 3277264 - RNA, 19 nt, Artificial Sequence
  Description of Artificial Sequence: Synthetic oligonucleotide
uaugaaacuaagcaauucu

SEQ ID NO: 3277265 - RNA, 19 nt, Artificial Sequence
  Description of Artificial Sequence: Synthetic oligonucleotide
aaagucagaguuuguacag

SEQ ID NO: 3277266 - RNA, 19 nt, Artificial Sequence
  Description of Artificial Sequence: Synthetic oligonucleotide
gaaacuaagcaauucugag

SEQ ID NO: 3277267 - RNA, 19 nt, Artificial Sequence
  Description of Artificial Sequence: Synthetic oligonucleotide
uuugacauuugauaguaug

SEQ ID NO: 3277268 - RNA, 19 nt, Artificial Sequence
  Description of Artificial Sequence: Synthetic oligonucleotide
uaugaggucccuuuuauca

SEQ ID NO: 3277269 - RNA, 19 nt, Artificial Sequence
  Description of Artificial Sequence: Synthetic oligonucleotide
uccaaaauucucaaaguca

SEQ ID NO: 3277270 - RNA, 19 nt, Artificial Sequence
  Description of Artificial Sequence: Synthetic oligonucleotide
uucauucugggucaaggcg

SEQ ID NO: 3277271 - RNA, 19 nt, Artificial Sequence
  Description of Artificial Sequence: Synthetic oligonucleotide
agagggagaugcuagcucc

SEQ ID NO: 3277272 - RNA, 19 nt, Artificial Sequence
  Description of Artificial Sequence: Synthetic oligonucleotide
uuaagagaaggucuggaga

SEQ ID NO: 3277273 - RNA, 19 nt, Artificial Sequence
  Description of Artificial Sequence: Synthetic oligonucleotide
aaaguuagucacgaccagc

SEQ ID NO: 3277274 - RNA, 19 nt, Artificial Sequence
  Description of Artificial Sequence: Synthetic oligonucleotide
ucccuuuuaucacagauac

SEQ ID NO: 3277275 - RNA, 19 nt, Artificial Sequence
  Description of Artificial Sequence: Synthetic oligonucleotide
aaccccaccaacgauaccg

SEQ ID NO: 3277276 - RNA, 19 nt, Artificial Sequence
  Description of Artificial Sequence: Synthetic oligonucleotide
ugaaacuaagcaauucuga

SEQ ID NO: 3277277 - RNA, 19 nt, Artificial Sequence
  Description of Artificial Sequence: Synthetic oligonucleotide
cuuauuaagagaaggucug

SEQ ID NO: 3277278 - RNA, 19 nt, Artificial Sequence
  Description of Artificial Sequence: Synthetic oligonucleotide
acuugcugaagauugguuc

SEQ ID NO: 3277279 - RNA, 19 nt, Artificial Sequence
  Description of Artificial Sequence: Synthetic oligonucleotide
uaaaacaggaaggauaaga

SEQ ID NO: 3277280 - RNA, 19 nt, Artificial Sequence
  Description of Artificial Sequence: Synthetic oligonucleotide
gacauuugauaguaugagg

SEQ ID NO: 3277281 - RNA, 19 nt, Artificial Sequence
  Description of Artificial Sequence: Synthetic oligonucleotide
uuucucuuuguccaguuca

SEQ ID NO: 3277282 - RNA, 19 nt, Artificial Sequence
  Description of Artificial Sequence: Synthetic oligonucleotide
guuuguacagagcugagug

SEQ ID NO: 3277283 - RNA, 19 nt, Artificial Sequence
  Description of Artificial Sequence: Synthetic oligonucleotide
uucugcauaaguaauuuuc

SEQ ID NO: 3277284 - RNA, 19 nt, Artificial Sequence
  Description of Artificial Sequence: Synthetic oligonucleotide
auuuuaugaaacuaagcaa

SEQ ID NO: 3277285 - RNA, 19 nt, Artificial Sequence
  Description of Artificial Sequence: Synthetic oligonucleotide
gagcuuugacauuugauag

SEQ ID NO: 3277286 - RNA, 19 nt, Artificial Sequence
  Description of Artificial Sequence: Synthetic oligonucleotide
aaagcuaaguucuccaaaa

SEQ ID NO: 3277287 - RNA, 19 nt, Artificial Sequence
  Description of Artificial Sequence: Synthetic oligonucleotide
uuuaucacagauacuuucu

SEQ ID NO: 3277288 - RNA, 19 nt, Artificial Sequence
  Description of Artificial Sequence: Synthetic oligonucleotide
uuugauaguaugagguccc

SEQ ID NO: 3277289 - RNA, 19 nt, Artificial Sequence
  Description of Artificial Sequence: Synthetic oligonucleotide
uugacauuugauaguauga

SEQ ID NO: 3277290 - RNA, 19 nt, Artificial Sequence
  Description of Artificial Sequence: Synthetic oligonucleotide
uuuuaucacagauacuuuc

SEQ ID NO: 3277291 - RNA, 19 nt, Artificial Sequence
  Description of Artificial Sequence: Synthetic oligonucleotide
aagagcugccuucugcugg

SEQ ID NO: 3277292 - RNA, 19 nt, Artificial Sequence
  Description of Artificial Sequence: Synthetic oligonucleotide
auuaagagaaggucuggag

SEQ ID NO: 3277293 - RNA, 19 nt, Artificial Sequence
  Description of Artificial Sequence: Synthetic oligonucleotide
auuuucuuuucucuuuguc

SEQ ID NO: 3277294 - RNA, 19 nt, Artificial Sequence
  Description of Artificial Sequence: Synthetic oligonucleotide
uuccaaaguucucaggacc

SEQ ID NO: 3277295 - RNA, 19 nt, Artificial Sequence
  Description of Artificial Sequence: Synthetic oligonucleotide
aaaaguuagucacgaccag

SEQ ID NO: 3277296 - RNA, 19 nt, Artificial Sequence
  Description of Artificial Sequence: Synthetic oligonucleotide
ugugcugcugcucagcaug

SEQ ID NO: 3277297 - RNA, 19 nt, Artificial Sequence
  Description of Artificial Sequence: Synthetic oligonucleotide
ucuugaguuaugaaguauc

SEQ ID NO: 3277298 - RNA, 19 nt, Artificial Sequence
  Description of Artificial Sequence: Synthetic oligonucleotide
aaggauaagauucccgaau

SEQ ID NO: 3277299 - RNA, 19 nt, Artificial Sequence
  Description of Artificial Sequence: Synthetic oligonucleotide
cuugaguuaugaaguaucc

SEQ ID NO: 3277300 - RNA, 19 nt, Artificial Sequence
  Description of Artificial Sequence: Synthetic oligonucleotide
ugacauuugauaguaugag

SEQ ID NO: 3277301 - RNA, 19 nt, Artificial Sequence
  Description of Artificial Sequence: Synthetic oligonucleotide
gauaagauucccgaaugcc

SEQ ID NO: 3277302 - RNA, 19 nt, Artificial Sequence
  Description of Artificial Sequence: Synthetic oligonucleotide
ugaagauugguucugcaua

SEQ ID NO: 3277303 - RNA, 19 nt, Artificial Sequence
  Description of Artificial Sequence: Synthetic oligonucleotide
aaauucucaaagucagagu

SEQ ID NO: 3277304 - RNA, 19 nt, Artificial Sequence
  Description of Artificial Sequence: Synthetic oligonucleotide
uaagauucccgaaugccga

SEQ ID NO: 3277305 - RNA, 19 nt, Artificial Sequence
  Description of Artificial Sequence: Synthetic oligonucleotide
agucacgaccagcacaacc

SEQ ID NO: 3277306 - RNA, 19 nt, Artificial Sequence
  Description of Artificial Sequence: Synthetic oligonucleotide
aguccuuauuaagagaagg

SEQ ID NO: 3277307 - RNA, 19 nt, Artificial Sequence
  Description of Artificial Sequence: Synthetic oligonucleotide
uuagucacgaccagcacaa

SEQ ID NO: 3277308 - RNA, 19 nt, Artificial Sequence
  Description of Artificial Sequence: Synthetic oligonucleotide
aguucucaggaccccagcc

SEQ ID NO: 3277309 - RNA, 19 nt, Artificial Sequence
  Description of Artificial Sequence: Synthetic oligonucleotide
gcaauucugagucugagag

SEQ ID NO: 3277310 - RNA, 19 nt, Artificial Sequence
  Description of Artificial Sequence: Synthetic oligonucleotide
cagauuuuaugaaacuaag

SEQ ID NO: 3277311 - RNA, 19 nt, Artificial Sequence
  Description of Artificial Sequence: Synthetic oligonucleotide
ucauucugggucaaggcga

SEQ ID NO: 3277312 - RNA, 19 nt, Artificial Sequence
  Description of Artificial Sequence: Synthetic oligonucleotide
uugaagguggugcagauuu

SEQ ID NO: 3277313 - RNA, 19 nt, Artificial Sequence
  Description of Artificial Sequence: Synthetic oligonucleotide
ucuucauucugggucaagg

SEQ ID NO: 3277314 - RNA, 19 nt, Artificial Sequence
  Description of Artificial Sequence: Synthetic oligonucleotide
agagcuuugacauuugaua

SEQ ID NO: 3277315 - RNA, 19 nt, Artificial Sequence
  Description of Artificial Sequence: Synthetic oligonucleotide
uaaguaauuuucuuuucuc

SEQ ID NO: 3277316 - RNA, 19 nt, Artificial Sequence
  Description of Artificial Sequence: Synthetic oligonucleotide
auaagauucccgaaugccg

SEQ ID NO: 3277317 - RNA, 19 nt, Artificial Sequence
  Description of Artificial Sequence: Synthetic oligonucleotide
uccaaaguucucaggaccc

SEQ ID NO: 3277318 - RNA, 19 nt, Artificial Sequence
  Description of Artificial Sequence: Synthetic oligonucleotide
acauuugauaguaugaggu

SEQ ID NO: 3277319 - RNA, 19 nt, Artificial Sequence
  Description of Artificial Sequence: Synthetic oligonucleotide
aaaacaggaaggauaagau

SEQ ID NO: 3277320 - RNA, 19 nt, Artificial Sequence
  Description of Artificial Sequence: Synthetic oligonucleotide
cucuuuguccaguucagcc

SEQ ID NO: 3277321 - RNA, 19 nt, Artificial Sequence
  Description of Artificial Sequence: Synthetic oligonucleotide
agcacaaccaaccccacca

SEQ ID NO: 3277322 - RNA, 19 nt, Artificial Sequence
  Description of Artificial Sequence: Synthetic oligonucleotide
aaguucucaggaccccagc

SEQ ID NO: 3277323 - RNA, 19 nt, Artificial Sequence
  Description of Artificial Sequence: Synthetic oligonucleotide
agucagaguuuguacagag

SEQ ID NO: 3277324 - RNA, 19 nt, Artificial Sequence
  Description of Artificial Sequence: Synthetic oligonucleotide
ugcauaaguaauuuucuuu

SEQ ID NO: 3277325 - RNA, 19 nt, Artificial Sequence
  Description of Artificial Sequence: Synthetic oligonucleotide
uuauuaagagaaggucugg

SEQ ID NO: 3277326 - RNA, 19 nt, Artificial Sequence
  Description of Artificial Sequence: Synthetic oligonucleotide
aggauaagauucccgaaug

SEQ ID NO: 3277327 - RNA, 19 nt, Artificial Sequence
  Description of Artificial Sequence: Synthetic oligonucleotide
aguuaugaaguauccagau

SEQ ID NO: 3277328 - RNA, 19 nt, Artificial Sequence
  Description of Artificial Sequence: Synthetic oligonucleotide
acgaccagcacaaccaacc

SEQ ID NO: 3277329 - RNA, 19 nt, Artificial Sequence
  Description of Artificial Sequence: Synthetic oligonucleotide
uuuaugaaacuaagcaauu

SEQ ID NO: 3277330 - RNA, 19 nt, Artificial Sequence
  Description of Artificial Sequence: Synthetic oligonucleotide
ccaaaauucucaaagucag

SEQ ID NO: 3277331 - RNA, 19 nt, Artificial Sequence
  Description of Artificial Sequence: Synthetic oligonucleotide
agauacuuucuucauucug

SEQ ID NO: 3277332 - RNA, 19 nt, Artificial Sequence
  Description of Artificial Sequence: Synthetic oligonucleotide
uccagaugaaugugcgugg

SEQ ID NO: 3277333 - RNA, 19 nt, Artificial Sequence
  Description of Artificial Sequence: Synthetic oligonucleotide
agucugagagugaagaguc

SEQ ID NO: 3277334 - RNA, 19 nt, Artificial Sequence
  Description of Artificial Sequence: Synthetic oligonucleotide
augaggucccuuuuaucac

SEQ ID NO: 3277335 - RNA, 19 nt, Artificial Sequence
  Description of Artificial Sequence: Synthetic oligonucleotide
uucacucacuuccuuauuc

SEQ ID NO: 3277336 - RNA, 19 nt, Artificial Sequence
  Description of Artificial Sequence: Synthetic oligonucleotide
gaaguccuuauuaagagaa

SEQ ID NO: 3277337 - RNA, 19 nt, Artificial Sequence
  Description of Artificial Sequence: Synthetic oligonucleotide
aaacaggaaggauaagauu

SEQ ID NO: 3277338 - RNA, 19 nt, Artificial Sequence
  Description of Artificial Sequence: Synthetic oligonucleotide
acaggaaggauaagauucc

SEQ ID NO: 3277339 - RNA, 19 nt, Artificial Sequence
  Description of Artificial Sequence: Synthetic oligonucleotide
ggagaugcuagcuccaggg

SEQ ID NO: 3277340 - RNA, 19 nt, Artificial Sequence
  Description of Artificial Sequence: Synthetic oligonucleotide
ucacucacuuccuuauucc

SEQ ID NO: 3277341 - RNA, 19 nt, Artificial Sequence
  Description of Artificial Sequence: Synthetic oligonucleotide
aaguucuccaaaauucuca

SEQ ID NO: 3277342 - RNA, 19 nt, Artificial Sequence
  Description of Artificial Sequence: Synthetic oligonucleotide
agaguuuguacagagcuga

SEQ ID NO: 3277343 - RNA, 19 nt, Artificial Sequence
  Description of Artificial Sequence: Synthetic oligonucleotide
aaguuagucacgaccagca

SEQ ID NO: 3277344 - RNA, 19 nt, Artificial Sequence
  Description of Artificial Sequence: Synthetic oligonucleotide
aaugugcugcugcucagca

SEQ ID NO: 3277345 - RNA, 19 nt, Artificial Sequence
  Description of Artificial Sequence: Synthetic oligonucleotide
uauuaagagaaggucugga

SEQ ID NO: 3277346 - RNA, 19 nt, Artificial Sequence
  Description of Artificial Sequence: Synthetic oligonucleotide
ugaagagcugccuucugcu

SEQ ID NO: 3277347 - RNA, 19 nt, Artificial Sequence
  Description of Artificial Sequence: Synthetic oligonucleotide
cuccaaaauucucaaaguc

SEQ ID NO: 3277348 - RNA, 19 nt, Artificial Sequence
  Description of Artificial Sequence: Synthetic oligonucleotide
gucaaggcgagguaaaaca

SEQ ID NO: 3277349 - RNA, 19 nt, Artificial Sequence
  Description of Artificial Sequence: Synthetic oligonucleotide
aaauuuaacuuuuaaacug

SEQ ID NO: 3277350 - RNA, 19 nt, Artificial Sequence
  Description of Artificial Sequence: Synthetic oligonucleotide
aaaauuuaacuuuuaaacu

SEQ ID NO: 3277351 - RNA, 19 nt, Artificial Sequence
  Description of Artificial Sequence: Synthetic oligonucleotide
gaugaaaugaaguuaaaug

SEQ ID NO: 3277352 - RNA, 19 nt, Artificial Sequence
  Description of Artificial Sequence: Synthetic oligonucleotide
ucaaucacacuguagaugg

SEQ ID NO: 3277353 - RNA, 19 nt, Artificial Sequence
  Description of Artificial Sequence: Synthetic oligonucleotide
auucaacugaaguugaagc

SEQ ID NO: 3277354 - RNA, 19 nt, Artificial Sequence
  Description of Artificial Sequence: Synthetic oligonucleotide
aauuuaacuuuuaaacugc

SEQ ID NO: 3277355 - RNA, 19 nt, Artificial Sequence
  Description of Artificial Sequence: Synthetic oligonucleotide
aaugaaguuaaaugugagg

SEQ ID NO: 3277356 - RNA, 19 nt, Artificial Sequence
  Description of Artificial Sequence: Synthetic oligonucleotide
gagaauucgacacaaaggc

SEQ ID NO: 3277357 - RNA, 19 nt, Artificial Sequence
  Description of Artificial Sequence: Synthetic oligonucleotide
aaaucuggccaguaugucc

SEQ ID NO: 3277358 - RNA, 19 nt, Artificial Sequence
  Description of Artificial Sequence: Synthetic oligonucleotide
uuaacuuuuaaacugcagu

SEQ ID NO: 3277359 - RNA, 19 nt, Artificial Sequence
  Description of Artificial Sequence: Synthetic oligonucleotide
ucaucaaucacacuguaga

SEQ ID NO: 3277360 - RNA, 19 nt, Artificial Sequence
  Description of Artificial Sequence: Synthetic oligonucleotide
augaaaugaaguuaaaugu

SEQ ID NO: 3277361 - RNA, 19 nt, Artificial Sequence
  Description of Artificial Sequence: Synthetic oligonucleotide
augaaguuaaaugugaggg

SEQ ID NO: 3277362 - RNA, 19 nt, Artificial Sequence
  Description of Artificial Sequence: Synthetic oligonucleotide
ugaaaugaaguuaaaugug

SEQ ID NO: 3277363 - RNA, 19 nt, Artificial Sequence
  Description of Artificial Sequence: Synthetic oligonucleotide
uuuaagagaugaaaugaag

SEQ ID NO: 3277364 - RNA, 19 nt, Artificial Sequence
  Description of Artificial Sequence: Synthetic oligonucleotide
uuaagagaugaaaugaagu

SEQ ID NO: 3277365 - RNA, 19 nt, Artificial Sequence
  Description of Artificial Sequence: Synthetic oligonucleotide
acuuuuaaacugcaguugg

SEQ ID NO: 3277366 - RNA, 19 nt, Artificial Sequence
  Description of Artificial Sequence: Synthetic oligonucleotide
uuuaggacaaaagaguuug

SEQ ID NO: 3277367 - RNA, 19 nt, Artificial Sequence
  Description of Artificial Sequence: Synthetic oligonucleotide
aaugcuucucuuauuuucc

SEQ ID NO: 3277368 - RNA, 19 nt, Artificial Sequence
  Description of Artificial Sequence: Synthetic oligonucleotide
uauuucagugcaaauagcu

SEQ ID NO: 3277369 - RNA, 19 nt, Artificial Sequence
  Description of Artificial Sequence: Synthetic oligonucleotide
gauggcaucaaugucaaag

SEQ ID NO: 3277370 - RNA, 19 nt, Artificial Sequence
  Description of Artificial Sequence: Synthetic oligonucleotide
agugcaaauagcuuuaaga

SEQ ID NO: 3277371 - RNA, 19 nt, Artificial Sequence
  Description of Artificial Sequence: Synthetic oligonucleotide
aagaguuugggagaauucg

SEQ ID NO: 3277372 - RNA, 19 nt, Artificial Sequence
  Description of Artificial Sequence: Synthetic oligonucleotide
uuucauucaacugaaguug

SEQ ID NO: 3277373 - RNA, 19 nt, Artificial Sequence
  Description of Artificial Sequence: Synthetic oligonucleotide
gugcaaauagcuuuaagag

SEQ ID NO: 3277374 - RNA, 19 nt, Artificial Sequence
  Description of Artificial Sequence: Synthetic oligonucleotide
ucagucuccuuccagaagc

SEQ ID NO: 3277375 - RNA, 19 nt, Artificial Sequence
  Description of Artificial Sequence: Synthetic oligonucleotide
ugaaguuaaaugugagggg

SEQ ID NO: 3277376 - RNA, 19 nt, Artificial Sequence
  Description of Artificial Sequence: Synthetic oligonucleotide
uauuuucccguccaaaucu

SEQ ID NO: 3277377 - RNA, 19 nt, Artificial Sequence
  Description of Artificial Sequence: Synthetic oligonucleotide
auggcaucaaugucaaagc

SEQ ID NO: 3277378 - RNA, 19 nt, Artificial Sequence
  Description of Artificial Sequence: Synthetic oligonucleotide
uucucauugucauagacuc

SEQ ID NO: 3277379 - RNA, 19 nt, Artificial Sequence
  Description of Artificial Sequence: Synthetic oligonucleotide
ugaaguugaagcuucuucu

SEQ ID NO: 3277380 - RNA, 19 nt, Artificial Sequence
  Description of Artificial Sequence: Synthetic oligonucleotide
aauguacacguacugcuug

SEQ ID NO: 3277381 - RNA, 19 nt, Artificial Sequence
  Description of Artificial Sequence: Synthetic oligonucleotide
uuuaacuuuuaaacugcag

SEQ ID NO: 3277382 - RNA, 19 nt, Artificial Sequence
  Description of Artificial Sequence: Synthetic oligonucleotide
aaaacuaaugcuucucuua

SEQ ID NO: 3277383 - RNA, 19 nt, Artificial Sequence
  Description of Artificial Sequence: Synthetic oligonucleotide
ucagugacagcaauguaca

SEQ ID NO: 3277384 - RNA, 19 nt, Artificial Sequence
  Description of Artificial Sequence: Synthetic oligonucleotide
cuuccagaagcuaaugagg

SEQ ID NO: 3277385 - RNA, 19 nt, Artificial Sequence
  Description of Artificial Sequence: Synthetic oligonucleotide
uuuaacgcuucguaaaacu

SEQ ID NO: 3277386 - RNA, 19 nt, Artificial Sequence
  Description of Artificial Sequence: Synthetic oligonucleotide
ggcaucaucaaucacacug

SEQ ID NO: 3277387 - RNA, 19 nt, Artificial Sequence
  Description of Artificial Sequence: Synthetic oligonucleotide
ggacaaaagaguuugggag

SEQ ID NO: 3277388 - RNA, 19 nt, Artificial Sequence
  Description of Artificial Sequence: Synthetic oligonucleotide
ugguacuggagauaggcag

SEQ ID NO: 3277389 - RNA, 19 nt, Artificial Sequence
  Description of Artificial Sequence: Synthetic oligonucleotide
gagauaggcagguagucag

SEQ ID NO: 3277390 - RNA, 19 nt, Artificial Sequence
  Description of Artificial Sequence: Synthetic oligonucleotide
aaacuaaugcuucucuuau

SEQ ID NO: 3277391 - RNA, 19 nt, Artificial Sequence
  Description of Artificial Sequence: Synthetic oligonucleotide
agcuuuaagagaugaaaug

SEQ ID NO: 3277392 - RNA, 19 nt, Artificial Sequence
  Description of Artificial Sequence: Synthetic oligonucleotide
ugcaaauagcuuuaagaga

SEQ ID NO: 3277393 - RNA, 19 nt, Artificial Sequence
  Description of Artificial Sequence: Synthetic oligonucleotide
uaagagaugaaaugaaguu

SEQ ID NO: 3277394 - RNA, 19 nt, Artificial Sequence
  Description of Artificial Sequence: Synthetic oligonucleotide
uccaaaucuggccaguaug

SEQ ID NO: 3277395 - RNA, 19 nt, Artificial Sequence
  Description of Artificial Sequence: Synthetic oligonucleotide
aaugucaaagcuucuguuu

SEQ ID NO: 3277396 - RNA, 19 nt, Artificial Sequence
  Description of Artificial Sequence: Synthetic oligonucleotide
aacuuuuaaacugcaguug

SEQ ID NO: 3277397 - RNA, 19 nt, Artificial Sequence
  Description of Artificial Sequence: Synthetic oligonucleotide
aggagccggacuuuaacgc

SEQ ID NO: 3277398 - RNA, 19 nt, Artificial Sequence
  Description of Artificial Sequence: Synthetic oligonucleotide
aaaugaaguuaaaugugag

SEQ ID NO: 3277399 - RNA, 19 nt, Artificial Sequence
  Description of Artificial Sequence: Synthetic oligonucleotide
uuccagaagcuaaugagga

SEQ ID NO: 3277400 - RNA, 19 nt, Artificial Sequence
  Description of Artificial Sequence: Synthetic oligonucleotide
gaagcuaaugaggagccgg

SEQ ID NO: 3277401 - RNA, 19 nt, Artificial Sequence
  Description of Artificial Sequence: Synthetic oligonucleotide
acuggagauaggcagguag

SEQ ID NO: 3277402 - RNA, 19 nt, Artificial Sequence
  Description of Artificial Sequence: Synthetic oligonucleotide
ucaaugucaaagcuucugu

SEQ ID NO: 3277403 - RNA, 19 nt, Artificial Sequence
  Description of Artificial Sequence: Synthetic oligonucleotide
gcuauuucagugcaaauag

SEQ ID NO: 3277404 - RNA, 19 nt, Artificial Sequence
  Description of Artificial Sequence: Synthetic oligonucleotide
cuugguuucauucaacuga

SEQ ID NO: 3277405 - RNA, 19 nt, Artificial Sequence
  Description of Artificial Sequence: Synthetic oligonucleotide
aaauagcuuuaagagauga

SEQ ID NO: 3277406 - RNA, 19 nt, Artificial Sequence
  Description of Artificial Sequence: Synthetic oligonucleotide
uaaugcuucucuuauuuuc

SEQ ID NO: 3277407 - RNA, 19 nt, Artificial Sequence
  Description of Artificial Sequence: Synthetic oligonucleotide
uucaacugaaguugaagcu

SEQ ID NO: 3277408 - RNA, 19 nt, Artificial Sequence
  Description of Artificial Sequence: Synthetic oligonucleotide
uucguaaaacuaaugcuuc

SEQ ID NO: 3277409 - RNA, 19 nt, Artificial Sequence
  Description of Artificial Sequence: Synthetic oligonucleotide
agugacagcaauguacacg

SEQ ID NO: 3277410 - RNA, 19 nt, Artificial Sequence
  Description of Artificial Sequence: Synthetic oligonucleotide
uaacuuuuaaacugcaguu

SEQ ID NO: 3277411 - RNA, 19 nt, Artificial Sequence
  Description of Artificial Sequence: Synthetic oligonucleotide
uaggacaaaagaguuuggg

SEQ ID NO: 3277412 - RNA, 19 nt, Artificial Sequence
  Description of Artificial Sequence: Synthetic oligonucleotide
cuuggcaucaucaaucaca

SEQ ID NO: 3277413 - RNA, 19 nt, Artificial Sequence
  Description of Artificial Sequence: Synthetic oligonucleotide
uuucagugcaaauagcuuu

SEQ ID NO: 3277414 - RNA, 19 nt, Artificial Sequence
  Description of Artificial Sequence: Synthetic oligonucleotide
uuuuaaacugcaguuggcu

SEQ ID NO: 3277415 - RNA, 19 nt, Artificial Sequence
  Description of Artificial Sequence: Synthetic oligonucleotide
agcaauguacacguacugc

SEQ ID NO: 3277416 - RNA, 19 nt, Artificial Sequence
  Description of Artificial Sequence: Synthetic oligonucleotide
aaguugaagcuucuucuca

SEQ ID NO: 3277417 - RNA, 19 nt, Artificial Sequence
  Description of Artificial Sequence: Synthetic oligonucleotide
gaaaugaaguuaaauguga

SEQ ID NO: 3277418 - RNA, 19 nt, Artificial Sequence
  Description of Artificial Sequence: Synthetic oligonucleotide
ugugacuugguuucauuca

SEQ ID NO: 3277419 - RNA, 19 nt, Artificial Sequence
  Description of Artificial Sequence: Synthetic oligonucleotide
aaagaguuugggagaauuc

SEQ ID NO: 3277420 - RNA, 19 nt, Artificial Sequence
  Description of Artificial Sequence: Synthetic oligonucleotide
uuggcaucaucaaucacac

SEQ ID NO: 3277421 - RNA, 19 nt, Artificial Sequence
  Description of Artificial Sequence: Synthetic oligonucleotide
cuucuucucauugucauag

SEQ ID NO: 3277422 - RNA, 19 nt, Artificial Sequence
  Description of Artificial Sequence: Synthetic oligonucleotide
uuaaacugcaguuggcuau

SEQ ID NO: 3277423 - RNA, 19 nt, Artificial Sequence
  Description of Artificial Sequence: Synthetic oligonucleotide
guuugggagaauucgacac

SEQ ID NO: 3277424 - RNA, 19 nt, Artificial Sequence
  Description of Artificial Sequence: Synthetic oligonucleotide
acuaaugcuucucuuauuu

SEQ ID NO: 3277425 - RNA, 19 nt, Artificial Sequence
  Description of Artificial Sequence: Synthetic oligonucleotide
uuuugugcugguacuggag

SEQ ID NO: 3277426 - RNA, 19 nt, Artificial Sequence
  Description of Artificial Sequence: Synthetic oligonucleotide
uugaagcuucuucucauug

SEQ ID NO: 3277427 - RNA, 19 nt, Artificial Sequence
  Description of Artificial Sequence: Synthetic oligonucleotide
uuauuuucccguccaaauc

SEQ ID NO: 3277428 - RNA, 19 nt, Artificial Sequence
  Description of Artificial Sequence: Synthetic oligonucleotide
aggcuugugacuugguuuc

SEQ ID NO: 3277429 - RNA, 19 nt, Artificial Sequence
  Description of Artificial Sequence: Synthetic oligonucleotide
ucuucucauugucauagac

SEQ ID NO: 3277430 - RNA, 19 nt, Artificial Sequence
  Description of Artificial Sequence: Synthetic oligonucleotide
acugcaguuggcuauuuca

SEQ ID NO: 3277431 - RNA, 19 nt, Artificial Sequence
  Description of Artificial Sequence: Synthetic oligonucleotide
uuugugcugguacuggaga

SEQ ID NO: 3277432 - RNA, 19 nt, Artificial Sequence
  Description of Artificial Sequence: Synthetic oligonucleotide
gaggagccggacuuuaacg

SEQ ID NO: 3277433 - RNA, 19 nt, Artificial Sequence
  Description of Artificial Sequence: Synthetic oligonucleotide
gacagcaauguacacguac

SEQ ID NO: 3277434 - RNA, 19 nt, Artificial Sequence
  Description of Artificial Sequence: Synthetic oligonucleotide
uagcuuuaagagaugaaau

SEQ ID NO: 3277435 - RNA, 19 nt, Artificial Sequence
  Description of Artificial Sequence: Synthetic oligonucleotide
gacaaaagaguuugggaga

SEQ ID NO: 3277436 - RNA, 19 nt, Artificial Sequence
  Description of Artificial Sequence: Synthetic oligonucleotide
uuaggacaaaagaguuugg

SEQ ID NO: 3277437 - RNA, 19 nt, Artificial Sequence
  Description of Artificial Sequence: Synthetic oligonucleotide
aaggcuugugacuugguuu

SEQ ID NO: 3277438 - RNA, 19 nt, Artificial Sequence
  Description of Artificial Sequence: Synthetic oligonucleotide
uucauucaacugaaguuga

SEQ ID NO: 3277439 - RNA, 19 nt, Artificial Sequence
  Description of Artificial Sequence: Synthetic oligonucleotide
auagcuuuaagagaugaaa

SEQ ID NO: 3277440 - RNA, 19 nt, Artificial Sequence
  Description of Artificial Sequence: Synthetic oligonucleotide
ucucuuauuuucccgucca

SEQ ID NO: 3277441 - RNA, 19 nt, Artificial Sequence
  Description of Artificial Sequence: Synthetic oligonucleotide
aagagaugaaaugaaguua

SEQ ID NO: 3277442 - RNA, 19 nt, Artificial Sequence
  Description of Artificial Sequence: Synthetic oligonucleotide
uaacgcuucguaaaacuaa

SEQ ID NO: 3277443 - RNA, 19 nt, Artificial Sequence
  Description of Artificial Sequence: Synthetic oligonucleotide
aaucacacuguagauggca

SEQ ID NO: 3277444 - RNA, 19 nt, Artificial Sequence
  Description of Artificial Sequence: Synthetic oligonucleotide
aggacaaaagaguuuggga

SEQ ID NO: 3277445 - RNA, 19 nt, Artificial Sequence
  Description of Artificial Sequence: Synthetic oligonucleotide
uuugggagaauucgacaca

SEQ ID NO: 3277446 - RNA, 19 nt, Artificial Sequence
  Description of Artificial Sequence: Synthetic oligonucleotide
uguagauggcaucaauguc

SEQ ID NO: 3277447 - RNA, 19 nt, Artificial Sequence
  Description of Artificial Sequence: Synthetic oligonucleotide
cuuuuaaacugcaguuggc

SEQ ID NO: 3277448 - RNA, 19 nt, Artificial Sequence
  Description of Artificial Sequence: Synthetic oligonucleotide
aaaagaguuugggagaauu

SEQ ID NO: 3277449 - RNA, 19 nt, Artificial Sequence
  Description of Artificial Sequence: Synthetic oligonucleotide
aaguauuucucuuauacgg

SEQ ID NO: 3277450 - RNA, 19 nt, Artificial Sequence
  Description of Artificial Sequence: Synthetic oligonucleotide
ucugcaaaaguguagaggg

SEQ ID NO: 3277451 - RNA, 19 nt, Artificial Sequence
  Description of Artificial Sequence: Synthetic oligonucleotide
aaugucuagagacaggcag

SEQ ID NO: 3277452 - RNA, 19 nt, Artificial Sequence
  Description of Artificial Sequence: Synthetic oligonucleotide
acuaauaaaauccauuucu

SEQ ID NO: 3277453 - RNA, 19 nt, Artificial Sequence
  Description of Artificial Sequence: Synthetic oligonucleotide
ugaggcacuaauaaaaucc

SEQ ID NO: 3277454 - RNA, 19 nt, Artificial Sequence
  Description of Artificial Sequence: Synthetic oligonucleotide
aauaucuuaugugugaguc

SEQ ID NO: 3277455 - RNA, 19 nt, Artificial Sequence
  Description of Artificial Sequence: Synthetic oligonucleotide
ugagagacgacgaagaggc

SEQ ID NO: 3277456 - RNA, 19 nt, Artificial Sequence
  Description of Artificial Sequence: Synthetic oligonucleotide
acaucaaagauacuuaaag

SEQ ID NO: 3277457 - RNA, 19 nt, Artificial Sequence
  Description of Artificial Sequence: Synthetic oligonucleotide
uaaauugcaauucucagaa

SEQ ID NO: 3277458 - RNA, 19 nt, Artificial Sequence
  Description of Artificial Sequence: Synthetic oligonucleotide
agaaucauagccuucuuuc

SEQ ID NO: 3277459 - RNA, 19 nt, Artificial Sequence
  Description of Artificial Sequence: Synthetic oligonucleotide
uuuaaauugcaauucucag

SEQ ID NO: 3277460 - RNA, 19 nt, Artificial Sequence
  Description of Artificial Sequence: Synthetic oligonucleotide
aucaaagauacuuaaaggu

SEQ ID NO: 3277461 - RNA, 19 nt, Artificial Sequence
  Description of Artificial Sequence: Synthetic oligonucleotide
uuuaagguaaacacugacc

SEQ ID NO: 3277462 - RNA, 19 nt, Artificial Sequence
  Description of Artificial Sequence: Synthetic oligonucleotide
cacaaauuacauaaaauac

SEQ ID NO: 3277463 - RNA, 19 nt, Artificial Sequence
  Description of Artificial Sequence: Synthetic oligonucleotide
caaauaaugaucugauugc

SEQ ID NO: 3277464 - RNA, 19 nt, Artificial Sequence
  Description of Artificial Sequence: Synthetic oligonucleotide
auuaacuaugacuauguug

SEQ ID NO: 3277465 - RNA, 19 nt, Artificial Sequence
  Description of Artificial Sequence: Synthetic oligonucleotide
auuuaagguaaacacugac

SEQ ID NO: 3277466 - RNA, 19 nt, Artificial Sequence
  Description of Artificial Sequence: Synthetic oligonucleotide
guuuaguuaaugaaaaugc

SEQ ID NO: 3277467 - RNA, 19 nt, Artificial Sequence
  Description of Artificial Sequence: Synthetic oligonucleotide
aacaaaccaagcucaacuc

SEQ ID NO: 3277468 - RNA, 19 nt, Artificial Sequence
  Description of Artificial Sequence: Synthetic oligonucleotide
guaucaagguaguacaugg

SEQ ID NO: 3277469 - RNA, 19 nt, Artificial Sequence
  Description of Artificial Sequence: Synthetic oligonucleotide
ugugcaaauaucuuaugug

SEQ ID NO: 3277470 - RNA, 19 nt, Artificial Sequence
  Description of Artificial Sequence: Synthetic oligonucleotide
auucucagaauauauaagu

SEQ ID NO: 3277471 - RNA, 19 nt, Artificial Sequence
  Description of Artificial Sequence: Synthetic oligonucleotide
aauuagcucccauaaagga

SEQ ID NO: 3277472 - RNA, 19 nt, Artificial Sequence
  Description of Artificial Sequence: Synthetic oligonucleotide
caucaaagauacuuaaagg

SEQ ID NO: 3277473 - RNA, 19 nt, Artificial Sequence
  Description of Artificial Sequence: Synthetic oligonucleotide
ucaaagauacuuaaagguc

SEQ ID NO: 3277474 - RNA, 19 nt, Artificial Sequence
  Description of Artificial Sequence: Synthetic oligonucleotide
aauuuguuuacaucacugu

SEQ ID NO: 3277475 - RNA, 19 nt, Artificial Sequence
  Description of Artificial Sequence: Synthetic oligonucleotide
agaauauauaaguauuucu

SEQ ID NO: 3277476 - RNA, 19 nt, Artificial Sequence
  Description of Artificial Sequence: Synthetic oligonucleotide
uuuaguuaaugaaaaugcu

SEQ ID NO: 3277477 - RNA, 19 nt, Artificial Sequence
  Description of Artificial Sequence: Synthetic oligonucleotide
uuaaauugcaauucucaga

SEQ ID NO: 3277478 - RNA, 19 nt, Artificial Sequence
  Description of Artificial Sequence: Synthetic oligonucleotide
ucauucucagucuaaaugu

SEQ ID NO: 3277479 - RNA, 19 nt, Artificial Sequence
  Description of Artificial Sequence: Synthetic oligonucleotide
aaucauagccuucuuucag

SEQ ID NO: 3277480 - RNA, 19 nt, Artificial Sequence
  Description of Artificial Sequence: Synthetic oligonucleotide
uaaaauccauuucuuacug

SEQ ID NO: 3277481 - RNA, 19 nt, Artificial Sequence
  Description of Artificial Sequence: Synthetic oligonucleotide
aaugcugcgucuccgaucu

SEQ ID NO: 3277482 - RNA, 19 nt, Artificial Sequence
  Description of Artificial Sequence: Synthetic oligonucleotide
uguuuguccccuaucacag

SEQ ID NO: 3277483 - RNA, 19 nt, Artificial Sequence
  Description of Artificial Sequence: Synthetic oligonucleotide
acuguaucuacacagacau

SEQ ID NO: 3277484 - RNA, 19 nt, Artificial Sequence
  Description of Artificial Sequence: Synthetic oligonucleotide
guuaagaauaccaagaaaa

SEQ ID NO: 3277485 - RNA, 19 nt, Artificial Sequence
  Description of Artificial Sequence: Synthetic oligonucleotide
auuaaccaaccacaucugc

SEQ ID NO: 3277486 - RNA, 19 nt, Artificial Sequence
  Description of Artificial Sequence: Synthetic oligonucleotide
ucuaaaugucuagagacag

SEQ ID NO: 3277487 - RNA, 19 nt, Artificial Sequence
  Description of Artificial Sequence: Synthetic oligonucleotide
aaugaaaaugcugcgucuc

SEQ ID NO: 3277488 - RNA, 19 nt, Artificial Sequence
  Description of Artificial Sequence: Synthetic oligonucleotide
aaauuuguuuacaucacug

SEQ ID NO: 3277489 - RNA, 19 nt, Artificial Sequence
  Description of Artificial Sequence: Synthetic oligonucleotide
ucauuaacuaugacuaugu

SEQ ID NO: 3277490 - RNA, 19 nt, Artificial Sequence
  Description of Artificial Sequence: Synthetic oligonucleotide
ugaaacuagucuuugucca

SEQ ID NO: 3277491 - RNA, 19 nt, Artificial Sequence
  Description of Artificial Sequence: Synthetic oligonucleotide
uugaaacuagucuuugucc

SEQ ID NO: 3277492 - RNA, 19 nt, Artificial Sequence
  Description of Artificial Sequence: Synthetic oligonucleotide
caagccuucaguauucugc

SEQ ID NO: 3277493 - RNA, 19 nt, Artificial Sequence
  Description of Artificial Sequence: Synthetic oligonucleotide
aaaccaaauaaugaucuga

SEQ ID NO: 3277494 - RNA, 19 nt, Artificial Sequence
  Description of Artificial Sequence: Synthetic oligonucleotide
ugaccuaacagagaaagga

SEQ ID NO: 3277495 - RNA, 19 nt, Artificial Sequence
  Description of Artificial Sequence: Synthetic oligonucleotide
ggaauuagcucccauaaag

SEQ ID NO: 3277496 - RNA, 19 nt, Artificial Sequence
  Description of Artificial Sequence: Synthetic oligonucleotide
uuaaccaaccacaucugca

SEQ ID NO: 3277497 - RNA, 19 nt, Artificial Sequence
  Description of Artificial Sequence: Synthetic oligonucleotide
ucugauugcacugaggcac

SEQ ID NO: 3277498 - RNA, 19 nt, Artificial Sequence
  Description of Artificial Sequence: Synthetic oligonucleotide
aauucucagaauauauaag

SEQ ID NO: 3277499 - RNA, 19 nt, Artificial Sequence
  Description of Artificial Sequence: Synthetic oligonucleotide
caucacuguaucuacacag

SEQ ID NO: 3277500 - RNA, 19 nt, Artificial Sequence
  Description of Artificial Sequence: Synthetic oligonucleotide
aaguaaccgaacccacacc

SEQ ID NO: 3277501 - RNA, 19 nt, Artificial Sequence
  Description of Artificial Sequence: Synthetic oligonucleotide
ugcaaauaucuuaugugug

SEQ ID NO: 3277502 - RNA, 19 nt, Artificial Sequence
  Description of Artificial Sequence: Synthetic oligonucleotide
gaauuagcucccauaaagg

SEQ ID NO: 3277503 - RNA, 19 nt, Artificial Sequence
  Description of Artificial Sequence: Synthetic oligonucleotide
aaauuccucggggucagcc

SEQ ID NO: 3277504 - RNA, 19 nt, Artificial Sequence
  Description of Artificial Sequence: Synthetic oligonucleotide
acugaccuaacagagaaag

SEQ ID NO: 3277505 - RNA, 19 nt, Artificial Sequence
  Description of Artificial Sequence: Synthetic oligonucleotide
ccaaauaaugaucugauug

SEQ ID NO: 3277506 - RNA, 19 nt, Artificial Sequence
  Description of Artificial Sequence: Synthetic oligonucleotide
augaaaaugcugcgucucc

SEQ ID NO: 3277507 - RNA, 19 nt, Artificial Sequence
  Description of Artificial Sequence: Synthetic oligonucleotide
aauaaguaucucuuuggua

SEQ ID NO: 3277508 - RNA, 19 nt, Artificial Sequence
  Description of Artificial Sequence: Synthetic oligonucleotide
aacaaacaagccuucagua

SEQ ID NO: 3277509 - RNA, 19 nt, Artificial Sequence
  Description of Artificial Sequence: Synthetic oligonucleotide
auguuugugaucuuaacua

SEQ ID NO: 3277510 - RNA, 19 nt, Artificial Sequence
  Description of Artificial Sequence: Synthetic oligonucleotide
cucacuggcaugcugagag

SEQ ID NO: 3277511 - RNA, 19 nt, Artificial Sequence
  Description of Artificial Sequence: Synthetic oligonucleotide
agaaaggaaaacaaacaag

SEQ ID NO: 3277512 - RNA, 19 nt, Artificial Sequence
  Description of Artificial Sequence: Synthetic oligonucleotide
aucauagccuucuuucagg

SEQ ID NO: 3277513 - RNA, 19 nt, Artificial Sequence
  Description of Artificial Sequence: Synthetic oligonucleotide
aaacucagccaaccuuggc

SEQ ID NO: 3277514 - RNA, 19 nt, Artificial Sequence
  Description of Artificial Sequence: Synthetic oligonucleotide
aaaugcugcgucuccgauc

SEQ ID NO: 3277515 - RNA, 19 nt, Artificial Sequence
  Description of Artificial Sequence: Synthetic oligonucleotide
ggaauaaguaucucuuugg

SEQ ID NO: 3277516 - RNA, 19 nt, Artificial Sequence
  Description of Artificial Sequence: Synthetic oligonucleotide
aaauaaugaucugauugca

SEQ ID NO: 3277517 - RNA, 19 nt, Artificial Sequence
  Description of Artificial Sequence: Synthetic oligonucleotide
acuuaagagaaauuuguuu

SEQ ID NO: 3277518 - RNA, 19 nt, Artificial Sequence
  Description of Artificial Sequence: Synthetic oligonucleotide
acucacagaaaucugccug

SEQ ID NO: 3277519 - RNA, 19 nt, Artificial Sequence
  Description of Artificial Sequence: Synthetic oligonucleotide
uuguuuacaucacuguauc

SEQ ID NO: 3277520 - RNA, 19 nt, Artificial Sequence
  Description of Artificial Sequence: Synthetic oligonucleotide
aaauaucuuaugugugagu

SEQ ID NO: 3277521 - RNA, 19 nt, Artificial Sequence
  Description of Artificial Sequence: Synthetic oligonucleotide
augugcaaauaucuuaugu

SEQ ID NO: 3277522 - RNA, 19 nt, Artificial Sequence
  Description of Artificial Sequence: Synthetic oligonucleotide
aaaauccauuucuuacuga

SEQ ID NO: 3277523 - RNA, 19 nt, Artificial Sequence
  Description of Artificial Sequence: Synthetic oligonucleotide
aguauuucucuuauacggg

SEQ ID NO: 3277524 - RNA, 19 nt, Artificial Sequence
  Description of Artificial Sequence: Synthetic oligonucleotide
ucauauguaucaagguagu

SEQ ID NO: 3277525 - RNA, 19 nt, Artificial Sequence
  Description of Artificial Sequence: Synthetic oligonucleotide
aaacaagccuucaguauuc

SEQ ID NO: 3277526 - RNA, 19 nt, Artificial Sequence
  Description of Artificial Sequence: Synthetic oligonucleotide
uacaucacuguaucuacac

SEQ ID NO: 3277527 - RNA, 19 nt, Artificial Sequence
  Description of Artificial Sequence: Synthetic oligonucleotide
auacagcacagguaagggg

SEQ ID NO: 3277528 - RNA, 19 nt, Artificial Sequence
  Description of Artificial Sequence: Synthetic oligonucleotide
ugaaaaugcugcgucuccg

SEQ ID NO: 3277529 - RNA, 19 nt, Artificial Sequence
  Description of Artificial Sequence: Synthetic oligonucleotide
uucucagaauauauaagua

SEQ ID NO: 3277530 - RNA, 19 nt, Artificial Sequence
  Description of Artificial Sequence: Synthetic oligonucleotide
uuucagggcaagcucuucc

SEQ ID NO: 3277531 - RNA, 19 nt, Artificial Sequence
  Description of Artificial Sequence: Synthetic oligonucleotide
ugucggguuucaaagaauc

SEQ ID NO: 3277532 - RNA, 19 nt, Artificial Sequence
  Description of Artificial Sequence: Synthetic oligonucleotide
uucaaagaaucauagccuu

SEQ ID NO: 3277533 - RNA, 19 nt, Artificial Sequence
  Description of Artificial Sequence: Synthetic oligonucleotide
uaaggaagcgugcauuuuc

SEQ ID NO: 3277534 - RNA, 19 nt, Artificial Sequence
  Description of Artificial Sequence: Synthetic oligonucleotide
uacgggaauaaguaucucu

SEQ ID NO: 3277535 - RNA, 19 nt, Artificial Sequence
  Description of Artificial Sequence: Synthetic oligonucleotide
augacuauguugaaacuag

SEQ ID NO: 3277536 - RNA, 19 nt, Artificial Sequence
  Description of Artificial Sequence: Synthetic oligonucleotide
acaccauacauguuuguga

SEQ ID NO: 3277537 - RNA, 19 nt, Artificial Sequence
  Description of Artificial Sequence: Synthetic oligonucleotide
cuuaaaggucauauguauc

SEQ ID NO: 3277538 - RNA, 19 nt, Artificial Sequence
  Description of Artificial Sequence: Synthetic oligonucleotide
gaacaaaccaagcucaacu

SEQ ID NO: 3277539 - RNA, 19 nt, Artificial Sequence
  Description of Artificial Sequence: Synthetic oligonucleotide
uguuugugaucuuaacuaa

SEQ ID NO: 3277540 - RNA, 19 nt, Artificial Sequence
  Description of Artificial Sequence: Synthetic oligonucleotide
caagguaguacauggcuug

SEQ ID NO: 3277541 - RNA, 19 nt, Artificial Sequence
  Description of Artificial Sequence: Synthetic oligonucleotide
uacauuucagggcaagcuc

SEQ ID NO: 3277542 - RNA, 19 nt, Artificial Sequence
  Description of Artificial Sequence: Synthetic oligonucleotide
gaaaguauuuaagguaaac

SEQ ID NO: 3277543 - RNA, 19 nt, Artificial Sequence
  Description of Artificial Sequence: Synthetic oligonucleotide
ugcugagagacgacgaaga

SEQ ID NO: 3277544 - RNA, 19 nt, Artificial Sequence
  Description of Artificial Sequence: Synthetic oligonucleotide
uaaccaaccacaucugcaa

SEQ ID NO: 3277545 - RNA, 19 nt, Artificial Sequence
  Description of Artificial Sequence: Synthetic oligonucleotide
aaugaucugauugcacuga

SEQ ID NO: 3277546 - RNA, 19 nt, Artificial Sequence
  Description of Artificial Sequence: Synthetic oligonucleotide
cucacagaaaucugccugc

SEQ ID NO: 3277547 - RNA, 19 nt, Artificial Sequence
  Description of Artificial Sequence: Synthetic oligonucleotide
acugauggaauuagcuccc

SEQ ID NO: 3277548 - RNA, 19 nt, Artificial Sequence
  Description of Artificial Sequence: Synthetic oligonucleotide
aaucauuaacuaugacuau

SEQ ID NO: 3277549 - RNA, 19 nt, Artificial Sequence
  Description of Artificial Sequence: Synthetic oligonucleotide
aagagaaaagccuagguac

SEQ ID NO: 3277550 - RNA, 19 nt, Artificial Sequence
  Description of Artificial Sequence: Synthetic oligonucleotide
uccacaauccacuagacac

SEQ ID NO: 3277551 - RNA, 19 nt, Artificial Sequence
  Description of Artificial Sequence: Synthetic oligonucleotide
aaagccuagguacugccuc

SEQ ID NO: 3277552 - RNA, 19 nt, Artificial Sequence
  Description of Artificial Sequence: Synthetic oligonucleotide
aaucgggguuaccugaggc

SEQ ID NO: 3277553 - RNA, 19 nt, Artificial Sequence
  Description of Artificial Sequence: Synthetic oligonucleotide
ucguauauuacuauauuaa

SEQ ID NO: 3277554 - RNA, 19 nt, Artificial Sequence
  Description of Artificial Sequence: Synthetic oligonucleotide
aacacuggcagaugagugg

SEQ ID NO: 3277555 - RNA, 19 nt, Artificial Sequence
  Description of Artificial Sequence: Synthetic oligonucleotide
ucaucugccaggcacuugg

SEQ ID NO: 3277556 - RNA, 19 nt, Artificial Sequence
  Description of Artificial Sequence: Synthetic oligonucleotide
ugaaggagccucccgaugg

SEQ ID NO: 3277557 - RNA, 19 nt, Artificial Sequence
  Description of Artificial Sequence: Synthetic oligonucleotide
ugcacaagcccacaguggg

SEQ ID NO: 3277558 - RNA, 19 nt, Artificial Sequence
  Description of Artificial Sequence: Synthetic oligonucleotide
aaagagaaaagccuaggua

SEQ ID NO: 3277559 - RNA, 19 nt, Artificial Sequence
  Description of Artificial Sequence: Synthetic oligonucleotide
aaaggcucaggccagaaau

SEQ ID NO: 3277560 - RNA, 19 nt, Artificial Sequence
  Description of Artificial Sequence: Synthetic oligonucleotide
aaagaugcccagcccaacg

SEQ ID NO: 3277561 - RNA, 19 nt, Artificial Sequence
  Description of Artificial Sequence: Synthetic oligonucleotide
aauuccccaaaccuagcuc

SEQ ID NO: 3277562 - RNA, 19 nt, Artificial Sequence
  Description of Artificial Sequence: Synthetic oligonucleotide
caaggcaaagagaaaagcc

SEQ ID NO: 3277563 - RNA, 19 nt, Artificial Sequence
  Description of Artificial Sequence: Synthetic oligonucleotide
ugugcacaagcccacagug

SEQ ID NO: 3277564 - RNA, 19 nt, Artificial Sequence
  Description of Artificial Sequence: Synthetic oligonucleotide
ucccugaugagaaaggggu

SEQ ID NO: 3277565 - RNA, 19 nt, Artificial Sequence
  Description of Artificial Sequence: Synthetic oligonucleotide
ugaacucucguauauuacu

SEQ ID NO: 3277566 - RNA, 19 nt, Artificial Sequence
  Description of Artificial Sequence: Synthetic oligonucleotide
aaggcaaagagaaaagccu

SEQ ID NO: 3277567 - RNA, 19 nt, Artificial Sequence
  Description of Artificial Sequence: Synthetic oligonucleotide
uggguuagugugcacaagc

SEQ ID NO: 3277568 - RNA, 19 nt, Artificial Sequence
  Description of Artificial Sequence: Synthetic oligonucleotide
aagccuagguacugccucc

SEQ ID NO: 3277569 - RNA, 19 nt, Artificial Sequence
  Description of Artificial Sequence: Synthetic oligonucleotide
aaauuccccaaaccuagcu

SEQ ID NO: 3277570 - RNA, 19 nt, Artificial Sequence
  Description of Artificial Sequence: Synthetic oligonucleotide
ugcuauguccuccacaauc

SEQ ID NO: 3277571 - RNA, 19 nt, Artificial Sequence
  Description of Artificial Sequence: Synthetic oligonucleotide
agaugaguggcagagcugg

SEQ ID NO: 3277572 - RNA, 19 nt, Artificial Sequence
  Description of Artificial Sequence: Synthetic oligonucleotide
ugagggaaggagauuggag

SEQ ID NO: 3277573 - RNA, 19 nt, Artificial Sequence
  Description of Artificial Sequence: Synthetic oligonucleotide
uccuccacaauccacuaga

SEQ ID NO: 3277574 - RNA, 19 nt, Artificial Sequence
  Description of Artificial Sequence: Synthetic oligonucleotide
accuagcucagcccaagcc

SEQ ID NO: 3277575 - RNA, 19 nt, Artificial Sequence
  Description of Artificial Sequence: Synthetic oligonucleotide
gaaaagccuagguacugcc

SEQ ID NO: 3277576 - RNA, 19 nt, Artificial Sequence
  Description of Artificial Sequence: Synthetic oligonucleotide
agacaccccaggcaggacc

SEQ ID NO: 3277577 - RNA, 19 nt, Artificial Sequence
  Description of Artificial Sequence: Synthetic oligonucleotide
uccacuagacaccccaggc

SEQ ID NO: 3277578 - RNA, 19 nt, Artificial Sequence
  Description of Artificial Sequence: Synthetic oligonucleotide
uuaccugaggcacccauac

SEQ ID NO: 3277579 - RNA, 19 nt, Artificial Sequence
  Description of Artificial Sequence: Synthetic oligonucleotide
auuccccaaaccuagcuca

SEQ ID NO: 3277580 - RNA, 19 nt, Artificial Sequence
  Description of Artificial Sequence: Synthetic oligonucleotide
aaaauuccccaaaccuagc

SEQ ID NO: 3277581 - RNA, 19 nt, Artificial Sequence
  Description of Artificial Sequence: Synthetic oligonucleotide
accugaggcacccauacug

SEQ ID NO: 3277582 - RNA, 19 nt, Artificial Sequence
  Description of Artificial Sequence: Synthetic oligonucleotide
uugggcagggaccucaggc

SEQ ID NO: 3277583 - RNA, 19 nt, Artificial Sequence
  Description of Artificial Sequence: Synthetic oligonucleotide
agaaaagccuagguacugc

SEQ ID NO: 3277584 - RNA, 19 nt, Artificial Sequence
  Description of Artificial Sequence: Synthetic oligonucleotide
ugaguggcagagcuggacc

SEQ ID NO: 3277585 - RNA, 19 nt, Artificial Sequence
  Description of Artificial Sequence: Synthetic oligonucleotide
aaaucgggguuaccugagg

SEQ ID NO: 3277586 - RNA, 19 nt, Artificial Sequence
  Description of Artificial Sequence: Synthetic oligonucleotide
agaaaucgggguuaccuga

SEQ ID NO: 3277587 - RNA, 19 nt, Artificial Sequence
  Description of Artificial Sequence: Synthetic oligonucleotide
uguugguccuguaugccca

SEQ ID NO: 3277588 - RNA, 19 nt, Artificial Sequence
  Description of Artificial Sequence: Synthetic oligonucleotide
gacccaugggccaagaggc

SEQ ID NO: 3277589 - RNA, 19 nt, Artificial Sequence
  Description of Artificial Sequence: Synthetic oligonucleotide
uaugcccagagcuauccug

SEQ ID NO: 3277590 - RNA, 19 nt, Artificial Sequence
  Description of Artificial Sequence: Synthetic oligonucleotide
aaccuagcucagcccaagc

SEQ ID NO: 3277591 - RNA, 19 nt, Artificial Sequence
  Description of Artificial Sequence: Synthetic oligonucleotide
ugaggcacccauacugucc

SEQ ID NO: 3277592 - RNA, 19 nt, Artificial Sequence
  Description of Artificial Sequence: Synthetic oligonucleotide
aacgucuagucacccagcu

SEQ ID NO: 3277593 - RNA, 19 nt, Artificial Sequence
  Description of Artificial Sequence: Synthetic oligonucleotide
guauauuacuauauuaaaa

SEQ ID NO: 3277594 - RNA, 19 nt, Artificial Sequence
  Description of Artificial Sequence: Synthetic oligonucleotide
aaaagaugcccagcccaac

SEQ ID NO: 3277595 - RNA, 19 nt, Artificial Sequence
  Description of Artificial Sequence: Synthetic oligonucleotide
cacuagacaccccaggcag

SEQ ID NO: 3277596 - RNA, 19 nt, Artificial Sequence
  Description of Artificial Sequence: Synthetic oligonucleotide
agagcuauccugaacucuc

SEQ ID NO: 3277597 - RNA, 19 nt, Artificial Sequence
  Description of Artificial Sequence: Synthetic oligonucleotide
acacuggcagaugaguggc

SEQ ID NO: 3277598 - RNA, 19 nt, Artificial Sequence
  Description of Artificial Sequence: Synthetic oligonucleotide
ugucccugaugagaaaggg

SEQ ID NO: 3277599 - RNA, 19 nt, Artificial Sequence
  Description of Artificial Sequence: Synthetic oligonucleotide
augggucuggguuagugug

SEQ ID NO: 3277600 - RNA, 19 nt, Artificial Sequence
  Description of Artificial Sequence: Synthetic oligonucleotide
aacucucguauauuacuau

SEQ ID NO: 3277601 - RNA, 19 nt, Artificial Sequence
  Description of Artificial Sequence: Synthetic oligonucleotide
ucaacugcuauguccucca

SEQ ID NO: 3277602 - RNA, 19 nt, Artificial Sequence
  Description of Artificial Sequence: Synthetic oligonucleotide
aggagauuggagcaugggu

SEQ ID NO: 3277603 - RNA, 19 nt, Artificial Sequence
  Description of Artificial Sequence: Synthetic oligonucleotide
guggggaggacucaacugc

SEQ ID NO: 3277604 - RNA, 19 nt, Artificial Sequence
  Description of Artificial Sequence: Synthetic oligonucleotide
cccagcuuggguuugaagg

SEQ ID NO: 3277605 - RNA, 19 nt, Artificial Sequence
  Description of Artificial Sequence: Synthetic oligonucleotide
uggagcaugggucuggguu

SEQ ID NO: 3277606 - RNA, 19 nt, Artificial Sequence
  Description of Artificial Sequence: Synthetic oligonucleotide
aagaugcccagcccaacgu

SEQ ID NO: 3277607 - RNA, 19 nt, Artificial Sequence
  Description of Artificial Sequence: Synthetic oligonucleotide
aaggagauuggagcauggg

SEQ ID NO: 3277608 - RNA, 19 nt, Artificial Sequence
  Description of Artificial Sequence: Synthetic oligonucleotide
aacugcuauguccuccaca

SEQ ID NO: 3277609 - RNA, 19 nt, Artificial Sequence
  Description of Artificial Sequence: Synthetic oligonucleotide
uguaugcccagagcuaucc

SEQ ID NO: 3277610 - RNA, 19 nt, Artificial Sequence
  Description of Artificial Sequence: Synthetic oligonucleotide
augcccaccgugcuugggc

SEQ ID NO: 3277611 - RNA, 19 nt, Artificial Sequence
  Description of Artificial Sequence: Synthetic oligonucleotide
ucucguauauuacuauauu

SEQ ID NO: 3277612 - RNA, 19 nt, Artificial Sequence
  Description of Artificial Sequence: Synthetic oligonucleotide
uauguccuccacaauccac

SEQ ID NO: 3277613 - RNA, 19 nt, Artificial Sequence
  Description of Artificial Sequence: Synthetic oligonucleotide
guuagugugcacaagccca

SEQ ID NO: 3277614 - RNA, 19 nt, Artificial Sequence
  Description of Artificial Sequence: Synthetic oligonucleotide
gaggcacccauacuguccc

SEQ ID NO: 3277615 - RNA, 19 nt, Artificial Sequence
  Description of Artificial Sequence: Synthetic oligonucleotide
uuagugugcacaagcccac

SEQ ID NO: 3277616 - RNA, 19 nt, Artificial Sequence
  Description of Artificial Sequence: Synthetic oligonucleotide
agggaaggagauuggagca

SEQ ID NO: 3277617 - RNA, 19 nt, Artificial Sequence
  Description of Artificial Sequence: Synthetic oligonucleotide
aguggggaggacucaacug

SEQ ID NO: 3277618 - RNA, 19 nt, Artificial Sequence
  Description of Artificial Sequence: Synthetic oligonucleotide
auggccaaggcaaagagaa

SEQ ID NO: 3277619 - RNA, 19 nt, Artificial Sequence
  Description of Artificial Sequence: Synthetic oligonucleotide
auccacuagacaccccagg

SEQ ID NO: 3277620 - RNA, 19 nt, Artificial Sequence
  Description of Artificial Sequence: Synthetic oligonucleotide
ggacccaugggccaagagg

SEQ ID NO: 3277621 - RNA, 19 nt, Artificial Sequence
  Description of Artificial Sequence: Synthetic oligonucleotide
guuugaaggagccucccga

SEQ ID NO: 3277622 - RNA, 19 nt, Artificial Sequence
  Description of Artificial Sequence: Synthetic oligonucleotide
ggacucaacugcuaugucc

SEQ ID NO: 3277623 - RNA, 19 nt, Artificial Sequence
  Description of Artificial Sequence: Synthetic oligonucleotide
ugggaugagggaaggagau

SEQ ID NO: 3277624 - RNA, 19 nt, Artificial Sequence
  Description of Artificial Sequence: Synthetic oligonucleotide
cagcccaacgucuagucac

SEQ ID NO: 3277625 - RNA, 19 nt, Artificial Sequence
  Description of Artificial Sequence: Synthetic oligonucleotide
caacacuggcagaugagug

SEQ ID NO: 3277626 - RNA, 19 nt, Artificial Sequence
  Description of Artificial Sequence: Synthetic oligonucleotide
aagugccaugggcaggaag

SEQ ID NO: 3277627 - RNA, 19 nt, Artificial Sequence
  Description of Artificial Sequence: Synthetic oligonucleotide
cuguugguccuguaugccc

SEQ ID NO: 3277628 - RNA, 19 nt, Artificial Sequence
  Description of Artificial Sequence: Synthetic oligonucleotide
cugaacucucguauauuac

SEQ ID NO: 3277629 - RNA, 19 nt, Artificial Sequence
  Description of Artificial Sequence: Synthetic oligonucleotide
ugguccuguaugcccagag

SEQ ID NO: 3277630 - RNA, 19 nt, Artificial Sequence
  Description of Artificial Sequence: Synthetic oligonucleotide
gaugagggaaggagauugg

SEQ ID NO: 3277631 - RNA, 19 nt, Artificial Sequence
  Description of Artificial Sequence: Synthetic oligonucleotide
cucagcaaugcccaccgug

SEQ ID NO: 3277632 - RNA, 19 nt, Artificial Sequence
  Description of Artificial Sequence: Synthetic oligonucleotide
agugugcacaagcccacag

SEQ ID NO: 3277633 - RNA, 19 nt, Artificial Sequence
  Description of Artificial Sequence: Synthetic oligonucleotide
ucagcccaagcccagcccu

SEQ ID NO: 3277634 - RNA, 19 nt, Artificial Sequence
  Description of Artificial Sequence: Synthetic oligonucleotide
cucguauauuacuauauua

SEQ ID NO: 3277635 - RNA, 19 nt, Artificial Sequence
  Description of Artificial Sequence: Synthetic oligonucleotide
gauuggagcaugggucugg

SEQ ID NO: 3277636 - RNA, 19 nt, Artificial Sequence
  Description of Artificial Sequence: Synthetic oligonucleotide
aggcucaggccagaaaucg

SEQ ID NO: 3277637 - RNA, 19 nt, Artificial Sequence
  Description of Artificial Sequence: Synthetic oligonucleotide
aaaaggcucaggccagaaa

SEQ ID NO: 3277638 - RNA, 19 nt, Artificial Sequence
  Description of Artificial Sequence: Synthetic oligonucleotide
uugaaggagccucccgaug

SEQ ID NO: 3277639 - RNA, 19 nt, Artificial Sequence
  Description of Artificial Sequence: Synthetic oligonucleotide
cacaauccacuagacaccc

SEQ ID NO: 3277640 - RNA, 19 nt, Artificial Sequence
  Description of Artificial Sequence: Synthetic oligonucleotide
aaggcucaggccagaaauc

SEQ ID NO: 3277641 - RNA, 19 nt, Artificial Sequence
  Description of Artificial Sequence: Synthetic oligonucleotide
cagaaaucgggguuaccug

SEQ ID NO: 3277642 - RNA, 19 nt, Artificial Sequence
  Description of Artificial Sequence: Synthetic oligonucleotide
gaaggagauuggagcaugg

SEQ ID NO: 3277643 - RNA, 19 nt, Artificial Sequence
  Description of Artificial Sequence: Synthetic oligonucleotide
ggaugagggaaggagauug

SEQ ID NO: 3277644 - RNA, 19 nt, Artificial Sequence
  Description of Artificial Sequence: Synthetic oligonucleotide
ucuggguuagugugcacaa

SEQ ID NO: 3277645 - RNA, 19 nt, Artificial Sequence
  Description of Artificial Sequence: Synthetic oligonucleotide
agaugcccagcccaacguc

SEQ ID NO: 3277646 - RNA, 19 nt, Artificial Sequence
  Description of Artificial Sequence: Synthetic oligonucleotide
aaaccuagcucagcccaag

SEQ ID NO: 3277647 - RNA, 19 nt, Artificial Sequence
  Description of Artificial Sequence: Synthetic oligonucleotide
uuugaaggagccucccgau

SEQ ID NO: 3277648 - RNA, 19 nt, Artificial Sequence
  Description of Artificial Sequence: Synthetic oligonucleotide
ugggccaagaggccuguug

SEQ ID NO: 3277649 - RNA, 19 nt, Artificial Sequence
  Description of Artificial Sequence: Synthetic oligonucleotide
aauauaauccaguugaagg

SEQ ID NO: 3277650 - RNA, 19 nt, Artificial Sequence
  Description of Artificial Sequence: Synthetic oligonucleotide
aaaacaauguccuuugaca

SEQ ID NO: 3277651 - RNA, 19 nt, Artificial Sequence
  Description of Artificial Sequence: Synthetic oligonucleotide
auagaggucaauauaaucc

SEQ ID NO: 3277652 - RNA, 19 nt, Artificial Sequence
  Description of Artificial Sequence: Synthetic oligonucleotide
uguaaguucucuuuuaucu

SEQ ID NO: 3277653 - RNA, 19 nt, Artificial Sequence
  Description of Artificial Sequence: Synthetic oligonucleotide
auccuuuucuguuugauac

SEQ ID NO: 3277654 - RNA, 19 nt, Artificial Sequence
  Description of Artificial Sequence: Synthetic oligonucleotide
aacuggaucauuuaagaga

SEQ ID NO: 3277655 - RNA, 19 nt, Artificial Sequence
  Description of Artificial Sequence: Synthetic oligonucleotide
ucauuuaagagaacugggg

SEQ ID NO: 3277656 - RNA, 19 nt, Artificial Sequence
  Description of Artificial Sequence: Synthetic oligonucleotide
uucuuuguaacucugggca

SEQ ID NO: 3277657 - RNA, 19 nt, Artificial Sequence
  Description of Artificial Sequence: Synthetic oligonucleotide
uuugauacacauaagcagu

SEQ ID NO: 3277658 - RNA, 19 nt, Artificial Sequence
  Description of Artificial Sequence: Synthetic oligonucleotide
acuaaaauucaucagaaaa

SEQ ID NO: 3277659 - RNA, 19 nt, Artificial Sequence
  Description of Artificial Sequence: Synthetic oligonucleotide
uucuguuugauacacauaa

SEQ ID NO: 3277660 - RNA, 19 nt, Artificial Sequence
  Description of Artificial Sequence: Synthetic oligonucleotide
aagaugacauuccaccugg

SEQ ID NO: 3277661 - RNA, 19 nt, Artificial Sequence
  Description of Artificial Sequence: Synthetic oligonucleotide
ucgauagcuaaauuuauag

SEQ ID NO: 3277662 - RNA, 19 nt, Artificial Sequence
  Description of Artificial Sequence: Synthetic oligonucleotide
uguuugauacacauaagca

SEQ ID NO: 3277663 - RNA, 19 nt, Artificial Sequence
  Description of Artificial Sequence: Synthetic oligonucleotide
uuuauaugugccaaauccc

SEQ ID NO: 3277664 - RNA, 19 nt, Artificial Sequence
  Description of Artificial Sequence: Synthetic oligonucleotide
uuccaaguuagauugaacc

SEQ ID NO: 3277665 - RNA, 19 nt, Artificial Sequence
  Description of Artificial Sequence: Synthetic oligonucleotide
aauuccucguugaagaugg

SEQ ID NO: 3277666 - RNA, 19 nt, Artificial Sequence
  Description of Artificial Sequence: Synthetic oligonucleotide
guuugauacacauaagcag

SEQ ID NO: 3277667 - RNA, 19 nt, Artificial Sequence
  Description of Artificial Sequence: Synthetic oligonucleotide
auaagcaguaucgauaugg

SEQ ID NO: 3277668 - RNA, 19 nt, Artificial Sequence
  Description of Artificial Sequence: Synthetic oligonucleotide
uaaugcuuucccauguucg

SEQ ID NO: 3277669 - RNA, 19 nt, Artificial Sequence
  Description of Artificial Sequence: Synthetic oligonucleotide
aaacagauccucuccuggc

SEQ ID NO: 3277670 - RNA, 19 nt, Artificial Sequence
  Description of Artificial Sequence: Synthetic oligonucleotide
aauauagaggucaauauaa

SEQ ID NO: 3277671 - RNA, 19 nt, Artificial Sequence
  Description of Artificial Sequence: Synthetic oligonucleotide
gauccaagagcacaguagg

SEQ ID NO: 3277672 - RNA, 19 nt, Artificial Sequence
  Description of Artificial Sequence: Synthetic oligonucleotide
uguacuuaagcccagguuu

SEQ ID NO: 3277673 - RNA, 19 nt, Artificial Sequence
  Description of Artificial Sequence: Synthetic oligonucleotide
aaucuugcuucgaauagcc

SEQ ID NO: 3277674 - RNA, 19 nt, Artificial Sequence
  Description of Artificial Sequence: Synthetic oligonucleotide
aagaugguaacgaagagca

SEQ ID NO: 3277675 - RNA, 19 nt, Artificial Sequence
  Description of Artificial Sequence: Synthetic oligonucleotide
uaaauuuauagccuccagu

SEQ ID NO: 3277676 - RNA, 19 nt, Artificial Sequence
  Description of Artificial Sequence: Synthetic oligonucleotide
gguaaugaauaauauagag

SEQ ID NO: 3277677 - RNA, 19 nt, Artificial Sequence
  Description of Artificial Sequence: Synthetic oligonucleotide
uucuauucaggccaucuag

SEQ ID NO: 3277678 - RNA, 19 nt, Artificial Sequence
  Description of Artificial Sequence: Synthetic oligonucleotide
gucuacuggaaacagaucc

SEQ ID NO: 3277679 - RNA, 19 nt, Artificial Sequence
  Description of Artificial Sequence: Synthetic oligonucleotide
uuucauauccucugaaggc

SEQ ID NO: 3277680 - RNA, 19 nt, Artificial Sequence
  Description of Artificial Sequence: Synthetic oligonucleotide
uccacacuaaaauucauca

SEQ ID NO: 3277681 - RNA, 19 nt, Artificial Sequence
  Description of Artificial Sequence: Synthetic oligonucleotide
uuauaugugccaaauccca

SEQ ID NO: 3277682 - RNA, 19 nt, Artificial Sequence
  Description of Artificial Sequence: Synthetic oligonucleotide
augaauaauauagagguca

SEQ ID NO: 3277683 - RNA, 19 nt, Artificial Sequence
  Description of Artificial Sequence: Synthetic oligonucleotide
aauucaucagaaaaggggu

SEQ ID NO: 3277684 - RNA, 19 nt, Artificial Sequence
  Description of Artificial Sequence: Synthetic oligonucleotide
ucuauucaggccaucuagg

SEQ ID NO: 3277685 - RNA, 19 nt, Artificial Sequence
  Description of Artificial Sequence: Synthetic oligonucleotide
guaacgaagagcaaccugg

SEQ ID NO: 3277686 - RNA, 19 nt, Artificial Sequence
  Description of Artificial Sequence: Synthetic oligonucleotide
acaugcaguaguuuaacag

SEQ ID NO: 3277687 - RNA, 19 nt, Artificial Sequence
  Description of Artificial Sequence: Synthetic oligonucleotide
ucugguucagguaaagaug

SEQ ID NO: 3277688 - RNA, 19 nt, Artificial Sequence
  Description of Artificial Sequence: Synthetic oligonucleotide
ugcuauuaaaguuggacac

SEQ ID NO: 3277689 - RNA, 19 nt, Artificial Sequence
  Description of Artificial Sequence: Synthetic oligonucleotide
uaaaacaauguccuuugac

SEQ ID NO: 3277690 - RNA, 19 nt, Artificial Sequence
  Description of Artificial Sequence: Synthetic oligonucleotide
aaacaauguccuuugacau

SEQ ID NO: 3277691 - RNA, 19 nt, Artificial Sequence
  Description of Artificial Sequence: Synthetic oligonucleotide
caugcaguaguuuaacagc

SEQ ID NO: 3277692 - RNA, 19 nt, Artificial Sequence
  Description of Artificial Sequence: Synthetic oligonucleotide
agcaguaucgauauggcgg

SEQ ID NO: 3277693 - RNA, 19 nt, Artificial Sequence
  Description of Artificial Sequence: Synthetic oligonucleotide
auacacauaagcaguaucg

SEQ ID NO: 3277694 - RNA, 19 nt, Artificial Sequence
  Description of Artificial Sequence: Synthetic oligonucleotide
ucguugagauccaagagca

SEQ ID NO: 3277695 - RNA, 19 nt, Artificial Sequence
  Description of Artificial Sequence: Synthetic oligonucleotide
auuuucauauccucugaag

SEQ ID NO: 3277696 - RNA, 19 nt, Artificial Sequence
  Description of Artificial Sequence: Synthetic oligonucleotide
aaagaacuggaucauuuaa

SEQ ID NO: 3277697 - RNA, 19 nt, Artificial Sequence
  Description of Artificial Sequence: Synthetic oligonucleotide
ugacauuccaccugguugc

SEQ ID NO: 3277698 - RNA, 19 nt, Artificial Sequence
  Description of Artificial Sequence: Synthetic oligonucleotide
uaggcaacuaaaacaaugu

SEQ ID NO: 3277699 - RNA, 19 nt, Artificial Sequence
  Description of Artificial Sequence: Synthetic oligonucleotide
uuagauugaaccagcucug

SEQ ID NO: 3277700 - RNA, 19 nt, Artificial Sequence
  Description of Artificial Sequence: Synthetic oligonucleotide
uaaguucucuuuuaucuca

SEQ ID NO: 3277701 - RNA, 19 nt, Artificial Sequence
  Description of Artificial Sequence: Synthetic oligonucleotide
uuuagcuucacaagcugcu

SEQ ID NO: 3277702 - RNA, 19 nt, Artificial Sequence
  Description of Artificial Sequence: Synthetic oligonucleotide
aagcaguaucgauauggcg

SEQ ID NO: 3277703 - RNA, 19 nt, Artificial Sequence
  Description of Artificial Sequence: Synthetic oligonucleotide
guuagauugaaccagcucu

SEQ ID NO: 3277704 - RNA, 19 nt, Artificial Sequence
  Description of Artificial Sequence: Synthetic oligonucleotide
auaaugcuuucccauguuc

SEQ ID NO: 3277705 - RNA, 19 nt, Artificial Sequence
  Description of Artificial Sequence: Synthetic oligonucleotide
gugaccaucguuuagcuuc

SEQ ID NO: 3277706 - RNA, 19 nt, Artificial Sequence
  Description of Artificial Sequence: Synthetic oligonucleotide
uuucuuuguaacucugggc

SEQ ID NO: 3277707 - RNA, 19 nt, Artificial Sequence
  Description of Artificial Sequence: Synthetic oligonucleotide
aagggguauucuugguggc

SEQ ID NO: 3277708 - RNA, 19 nt, Artificial Sequence
  Description of Artificial Sequence: Synthetic oligonucleotide
aguuagauugaaccagcuc

SEQ ID NO: 3277709 - RNA, 19 nt, Artificial Sequence
  Description of Artificial Sequence: Synthetic oligonucleotide
aggauuuucauauccucug

SEQ ID NO: 3277710 - RNA, 19 nt, Artificial Sequence
  Description of Artificial Sequence: Synthetic oligonucleotide
uucaggaaccucuucaggu

SEQ ID NO: 3277711 - RNA, 19 nt, Artificial Sequence
  Description of Artificial Sequence: Synthetic oligonucleotide
gaugguaacgaagagcaac

SEQ ID NO: 3277712 - RNA, 19 nt, Artificial Sequence
  Description of Artificial Sequence: Synthetic oligonucleotide
uggaucauuuaagagaacu

SEQ ID NO: 3277713 - RNA, 19 nt, Artificial Sequence
  Description of Artificial Sequence: Synthetic oligonucleotide
cuauuaaaguuggacaccc

SEQ ID NO: 3277714 - RNA, 19 nt, Artificial Sequence
  Description of Artificial Sequence: Synthetic oligonucleotide
uaagcaguaucgauauggc

SEQ ID NO: 3277715 - RNA, 19 nt, Artificial Sequence
  Description of Artificial Sequence: Synthetic oligonucleotide
ugaagaugguaacgaagag

SEQ ID NO: 3277716 - RNA, 19 nt, Artificial Sequence
  Description of Artificial Sequence: Synthetic oligonucleotide
uccuuugacaugcaguagu

SEQ ID NO: 3277717 - RNA, 19 nt, Artificial Sequence
  Description of Artificial Sequence: Synthetic oligonucleotide
auugaaccagcucuggucu

SEQ ID NO: 3277718 - RNA, 19 nt, Artificial Sequence
  Description of Artificial Sequence: Synthetic oligonucleotide
uucaaauaccuguaaguuc

SEQ ID NO: 3277719 - RNA, 19 nt, Artificial Sequence
  Description of Artificial Sequence: Synthetic oligonucleotide
auuuaagagaacuggggaa

SEQ ID NO: 3277720 - RNA, 19 nt, Artificial Sequence
  Description of Artificial Sequence: Synthetic oligonucleotide
uggucuauggaaaguacac

SEQ ID NO: 3277721 - RNA, 19 nt, Artificial Sequence
  Description of Artificial Sequence: Synthetic oligonucleotide
gaagaugguaacgaagagc

SEQ ID NO: 3277722 - RNA, 19 nt, Artificial Sequence
  Description of Artificial Sequence: Synthetic oligonucleotide
uaggauuuucauauccucu

SEQ ID NO: 3277723 - RNA, 19 nt, Artificial Sequence
  Description of Artificial Sequence: Synthetic oligonucleotide
aaauggagcaggugcauau

SEQ ID NO: 3277724 - RNA, 19 nt, Artificial Sequence
  Description of Artificial Sequence: Synthetic oligonucleotide
gauauggcgguacccagcc

SEQ ID NO: 3277725 - RNA, 19 nt, Artificial Sequence
  Description of Artificial Sequence: Synthetic oligonucleotide
gauugaaccagcucugguc

SEQ ID NO: 3277726 - RNA, 19 nt, Artificial Sequence
  Description of Artificial Sequence: Synthetic oligonucleotide
uggaacucauugcuuauca

SEQ ID NO: 3277727 - RNA, 19 nt, Artificial Sequence
  Description of Artificial Sequence: Synthetic oligonucleotide
ucuuggaaugaagugacca

SEQ ID NO: 3277728 - RNA, 19 nt, Artificial Sequence
  Description of Artificial Sequence: Synthetic oligonucleotide
uccaccugguugcagacag

SEQ ID NO: 3277729 - RNA, 19 nt, Artificial Sequence
  Description of Artificial Sequence: Synthetic oligonucleotide
aucauuuaagagaacuggg

SEQ ID NO: 3277730 - RNA, 19 nt, Artificial Sequence
  Description of Artificial Sequence: Synthetic oligonucleotide
acauaagcaguaucgauau

SEQ ID NO: 3277731 - RNA, 19 nt, Artificial Sequence
  Description of Artificial Sequence: Synthetic oligonucleotide
gucguugagauccaagagc

SEQ ID NO: 3277732 - RNA, 19 nt, Artificial Sequence
  Description of Artificial Sequence: Synthetic oligonucleotide
augguaacgaagagcaacc

SEQ ID NO: 3277733 - RNA, 19 nt, Artificial Sequence
  Description of Artificial Sequence: Synthetic oligonucleotide
ucgucuacuggaaacagau

SEQ ID NO: 3277734 - RNA, 19 nt, Artificial Sequence
  Description of Artificial Sequence: Synthetic oligonucleotide
uaacgaagagcaaccuggg

SEQ ID NO: 3277735 - RNA, 19 nt, Artificial Sequence
  Description of Artificial Sequence: Synthetic oligonucleotide
uccaauaaugcuuucccau

SEQ ID NO: 3277736 - RNA, 19 nt, Artificial Sequence
  Description of Artificial Sequence: Synthetic oligonucleotide
ugacgaauaugucuucucu

SEQ ID NO: 3277737 - RNA, 19 nt, Artificial Sequence
  Description of Artificial Sequence: Synthetic oligonucleotide
uccucguugaagaugguaa

SEQ ID NO: 3277738 - RNA, 19 nt, Artificial Sequence
  Description of Artificial Sequence: Synthetic oligonucleotide
ugaauaauauagaggucaa

SEQ ID NO: 3277739 - RNA, 19 nt, Artificial Sequence
  Description of Artificial Sequence: Synthetic oligonucleotide
gaagugaccaucguuuagc

SEQ ID NO: 3277740 - RNA, 19 nt, Artificial Sequence
  Description of Artificial Sequence: Synthetic oligonucleotide
cugaaggcagcucaaauuc

SEQ ID NO: 3277741 - RNA, 19 nt, Artificial Sequence
  Description of Artificial Sequence: Synthetic oligonucleotide
ucucucuucaaaagaccag

SEQ ID NO: 3277742 - RNA, 19 nt, Artificial Sequence
  Description of Artificial Sequence: Synthetic oligonucleotide
uuuaacagcuugcucuggu

SEQ ID NO: 3277743 - RNA, 19 nt, Artificial Sequence
  Description of Artificial Sequence: Synthetic oligonucleotide
agucuuggaaugaagugac

SEQ ID NO: 3277744 - RNA, 19 nt, Artificial Sequence
  Description of Artificial Sequence: Synthetic oligonucleotide
gucuauggaaaguacacca

SEQ ID NO: 3277745 - RNA, 19 nt, Artificial Sequence
  Description of Artificial Sequence: Synthetic oligonucleotide
ucuacuggaaacagauccu

SEQ ID NO: 3277746 - RNA, 19 nt, Artificial Sequence
  Description of Artificial Sequence: Synthetic oligonucleotide
aggugcauaucuuaaauuu

SEQ ID NO: 3277747 - RNA, 19 nt, Artificial Sequence
  Description of Artificial Sequence: Synthetic oligonucleotide
cuuauuuucaggaaccucu

SEQ ID NO: 3277748 - RNA, 19 nt, Artificial Sequence
  Description of Artificial Sequence: Synthetic oligonucleotide
agucaugucacaggccucc

SEQ ID NO: 3277749 - RNA, 19 nt, Artificial Sequence
  Description of Artificial Sequence: Synthetic oligonucleotide
aaaugaacaaauuaucagc

SEQ ID NO: 3277750 - RNA, 19 nt, Artificial Sequence
  Description of Artificial Sequence: Synthetic oligonucleotide
aauuuauuagcuuucuugg

SEQ ID NO: 3277751 - RNA, 19 nt, Artificial Sequence
  Description of Artificial Sequence: Synthetic oligonucleotide
aaaauaacaaauuauuuaa

SEQ ID NO: 3277752 - RNA, 19 nt, Artificial Sequence
  Description of Artificial Sequence: Synthetic oligonucleotide
auauuaugguaccauaugc

SEQ ID NO: 3277753 - RNA, 19 nt, Artificial Sequence
  Description of Artificial Sequence: Synthetic oligonucleotide
aauaagacaagaaauuauc

SEQ ID NO: 3277754 - RNA, 19 nt, Artificial Sequence
  Description of Artificial Sequence: Synthetic oligonucleotide
acuaacaauaauuuuccac

SEQ ID NO: 3277755 - RNA, 19 nt, Artificial Sequence
  Description of Artificial Sequence: Synthetic oligonucleotide
uacacuauugccuuuauca

SEQ ID NO: 3277756 - RNA, 19 nt, Artificial Sequence
  Description of Artificial Sequence: Synthetic oligonucleotide
uaaaugaacaaauuaucag

SEQ ID NO: 3277757 - RNA, 19 nt, Artificial Sequence
  Description of Artificial Sequence: Synthetic oligonucleotide
ugagacaucauauuaauaa

SEQ ID NO: 3277758 - RNA, 19 nt, Artificial Sequence
  Description of Artificial Sequence: Synthetic oligonucleotide
uuagaaaaccauuuuaaca

SEQ ID NO: 3277759 - RNA, 19 nt, Artificial Sequence
  Description of Artificial Sequence: Synthetic oligonucleotide
gacuccaucaguuuuaaag

SEQ ID NO: 3277760 - RNA, 19 nt, Artificial Sequence
  Description of Artificial Sequence: Synthetic oligonucleotide
aauauuaugguaccauaug

SEQ ID NO: 3277761 - RNA, 19 nt, Artificial Sequence
  Description of Artificial Sequence: Synthetic oligonucleotide
aaaacuggagcacagauuu

SEQ ID NO: 3277762 - RNA, 19 nt, Artificial Sequence
  Description of Artificial Sequence: Synthetic oligonucleotide
uuguuaaauauuaugguac

SEQ ID NO: 3277763 - RNA, 19 nt, Artificial Sequence
  Description of Artificial Sequence: Synthetic oligonucleotide
aacuguaagggguugaucu

SEQ ID NO: 3277764 - RNA, 19 nt, Artificial Sequence
  Description of Artificial Sequence: Synthetic oligonucleotide
aaugcugaaacuguuaaug

SEQ ID NO: 3277765 - RNA, 19 nt, Artificial Sequence
  Description of Artificial Sequence: Synthetic oligonucleotide
cauggaaaaugucagaagg

SEQ ID NO: 3277766 - RNA, 19 nt, Artificial Sequence
  Description of Artificial Sequence: Synthetic oligonucleotide
auacaugcagguuugugcc

SEQ ID NO: 3277767 - RNA, 19 nt, Artificial Sequence
  Description of Artificial Sequence: Synthetic oligonucleotide
uauugaaauaagaaagaca

SEQ ID NO: 3277768 - RNA, 19 nt, Artificial Sequence
  Description of Artificial Sequence: Synthetic oligonucleotide
aagaacaccuauucuuagc

SEQ ID NO: 3277769 - RNA, 19 nt, Artificial Sequence
  Description of Artificial Sequence: Synthetic oligonucleotide
gugaacaaccuucagaggg

SEQ ID NO: 3277770 - RNA, 19 nt, Artificial Sequence
  Description of Artificial Sequence: Synthetic oligonucleotide
uauucuuagcauuuuacug

SEQ ID NO: 3277771 - RNA, 19 nt, Artificial Sequence
  Description of Artificial Sequence: Synthetic oligonucleotide
gaaucaaaacuguaagggg

SEQ ID NO: 3277772 - RNA, 19 nt, Artificial Sequence
  Description of Artificial Sequence: Synthetic oligonucleotide
uuuaacaugagacaucaua

SEQ ID NO: 3277773 - RNA, 19 nt, Artificial Sequence
  Description of Artificial Sequence: Synthetic oligonucleotide
ucuacuauuuauuuccuca

SEQ ID NO: 3277774 - RNA, 19 nt, Artificial Sequence
  Description of Artificial Sequence: Synthetic oligonucleotide
uucauauauuaucacugcg

SEQ ID NO: 3277775 - RNA, 19 nt, Artificial Sequence
  Description of Artificial Sequence: Synthetic oligonucleotide
uaaauugaagacuccauca

SEQ ID NO: 3277776 - RNA, 19 nt, Artificial Sequence
  Description of Artificial Sequence: Synthetic oligonucleotide
gaaaauaacaaauuauuua

SEQ ID NO: 3277777 - RNA, 19 nt, Artificial Sequence
  Description of Artificial Sequence: Synthetic oligonucleotide
aagacaagaaauuaucuua

SEQ ID NO: 3277778 - RNA, 19 nt, Artificial Sequence
  Description of Artificial Sequence: Synthetic oligonucleotide
auauaaucuguucuuuugg

SEQ ID NO: 3277779 - RNA, 19 nt, Artificial Sequence
  Description of Artificial Sequence: Synthetic oligonucleotide
ugugaaauacgacugcgcc

SEQ ID NO: 3277780 - RNA, 19 nt, Artificial Sequence
  Description of Artificial Sequence: Synthetic oligonucleotide
uuaacaugagacaucauau

SEQ ID NO: 3277781 - RNA, 19 nt, Artificial Sequence
  Description of Artificial Sequence: Synthetic oligonucleotide
uaagcuuaggucuucagga

SEQ ID NO: 3277782 - RNA, 19 nt, Artificial Sequence
  Description of Artificial Sequence: Synthetic oligonucleotide
uuguauauugcacaugcga

SEQ ID NO: 3277783 - RNA, 19 nt, Artificial Sequence
  Description of Artificial Sequence: Synthetic oligonucleotide
aaauaaccugguuuccugg

SEQ ID NO: 3277784 - RNA, 19 nt, Artificial Sequence
  Description of Artificial Sequence: Synthetic oligonucleotide
uauuguuaaauauuauggu

SEQ ID NO: 3277785 - RNA, 19 nt, Artificial Sequence
  Description of Artificial Sequence: Synthetic oligonucleotide
auauccgucucauauauug

SEQ ID NO: 3277786 - RNA, 19 nt, Artificial Sequence
  Description of Artificial Sequence: Synthetic oligonucleotide
acaacuuuggaagaacacc

SEQ ID NO: 3277787 - RNA, 19 nt, Artificial Sequence
  Description of Artificial Sequence: Synthetic oligonucleotide
aucuuugguauguuggagc

SEQ ID NO: 3277788 - RNA, 19 nt, Artificial Sequence
  Description of Artificial Sequence: Synthetic oligonucleotide
aauaaccugguuuccuggg

SEQ ID NO: 3277789 - RNA, 19 nt, Artificial Sequence
  Description of Artificial Sequence: Synthetic oligonucleotide
uaaguuugcgucuuguuca

SEQ ID NO: 3277790 - RNA, 19 nt, Artificial Sequence
  Description of Artificial Sequence: Synthetic oligonucleotide
uauuaugguaccauaugca

SEQ ID NO: 3277791 - RNA, 19 nt, Artificial Sequence
  Description of Artificial Sequence: Synthetic oligonucleotide
acuucgcuacaauagaaac

SEQ ID NO: 3277792 - RNA, 19 nt, Artificial Sequence
  Description of Artificial Sequence: Synthetic oligonucleotide
aaugaacaaauuaucagcu

SEQ ID NO: 3277793 - RNA, 19 nt, Artificial Sequence
  Description of Artificial Sequence: Synthetic oligonucleotide
aagaaaagacagucaauug

SEQ ID NO: 3277794 - RNA, 19 nt, Artificial Sequence
  Description of Artificial Sequence: Synthetic oligonucleotide
acuauuuauuuccucaucu

SEQ ID NO: 3277795 - RNA, 19 nt, Artificial Sequence
  Description of Artificial Sequence: Synthetic oligonucleotide
ucuuaaguaccauacacaa

SEQ ID NO: 3277796 - RNA, 19 nt, Artificial Sequence
  Description of Artificial Sequence: Synthetic oligonucleotide
ucuuucuugagauuuugug

SEQ ID NO: 3277797 - RNA, 19 nt, Artificial Sequence
  Description of Artificial Sequence: Synthetic oligonucleotide
aagguccacaguuugucac

SEQ ID NO: 3277798 - RNA, 19 nt, Artificial Sequence
  Description of Artificial Sequence: Synthetic oligonucleotide
acuguuuagcagcaaaauc

SEQ ID NO: 3277799 - RNA, 19 nt, Artificial Sequence
  Description of Artificial Sequence: Synthetic oligonucleotide
uacucaaccagcuauacua

SEQ ID NO: 3277800 - RNA, 19 nt, Artificial Sequence
  Description of Artificial Sequence: Synthetic oligonucleotide
ucaccuuugucaaaugcag

SEQ ID NO: 3277801 - RNA, 19 nt, Artificial Sequence
  Description of Artificial Sequence: Synthetic oligonucleotide
aaaagucuggaguaaccug

SEQ ID NO: 3277802 - RNA, 19 nt, Artificial Sequence
  Description of Artificial Sequence: Synthetic oligonucleotide
cuaucuaaaggcuuauuug

SEQ ID NO: 3277803 - RNA, 19 nt, Artificial Sequence
  Description of Artificial Sequence: Synthetic oligonucleotide
gaaauuccugaauaaauga

SEQ ID NO: 3277804 - RNA, 19 nt, Artificial Sequence
  Description of Artificial Sequence: Synthetic oligonucleotide
gaugacacggucuuucuug

SEQ ID NO: 3277805 - RNA, 19 nt, Artificial Sequence
  Description of Artificial Sequence: Synthetic oligonucleotide
uccuugugcacugacaugg

SEQ ID NO: 3277806 - RNA, 19 nt, Artificial Sequence
  Description of Artificial Sequence: Synthetic oligonucleotide
uauuuauuuccucaucuuc

SEQ ID NO: 3277807 - RNA, 19 nt, Artificial Sequence
  Description of Artificial Sequence: Synthetic oligonucleotide
aauacgacugcgccuuuuc

SEQ ID NO: 3277808 - RNA, 19 nt, Artificial Sequence
  Description of Artificial Sequence: Synthetic oligonucleotide
aagacagucuguaucuggc

SEQ ID NO: 3277809 - RNA, 19 nt, Artificial Sequence
  Description of Artificial Sequence: Synthetic oligonucleotide
uucuuaaguaccauacaca

SEQ ID NO: 3277810 - RNA, 19 nt, Artificial Sequence
  Description of Artificial Sequence: Synthetic oligonucleotide
cuguuuagcagcaaaauca

SEQ ID NO: 3277811 - RNA, 19 nt, Artificial Sequence
  Description of Artificial Sequence: Synthetic oligonucleotide
agaaacaccauggaaaaug

SEQ ID NO: 3277812 - RNA, 19 nt, Artificial Sequence
  Description of Artificial Sequence: Synthetic oligonucleotide
ucaaccagcuauacuauug

SEQ ID NO: 3277813 - RNA, 19 nt, Artificial Sequence
  Description of Artificial Sequence: Synthetic oligonucleotide
ugcuauauccgucucauau

SEQ ID NO: 3277814 - RNA, 19 nt, Artificial Sequence
  Description of Artificial Sequence: Synthetic oligonucleotide
uacaguagcaucuucacuu

SEQ ID NO: 3277815 - RNA, 19 nt, Artificial Sequence
  Description of Artificial Sequence: Synthetic oligonucleotide
gaaugugugacauuuaagu

SEQ ID NO: 3277816 - RNA, 19 nt, Artificial Sequence
  Description of Artificial Sequence: Synthetic oligonucleotide
uuucccuugaccuuccuga

SEQ ID NO: 3277817 - RNA, 19 nt, Artificial Sequence
  Description of Artificial Sequence: Synthetic oligonucleotide
uaccucaguaaauugaaga

SEQ ID NO: 3277818 - RNA, 19 nt, Artificial Sequence
  Description of Artificial Sequence: Synthetic oligonucleotide
uuauugaaauaagaaagac

SEQ ID NO: 3277819 - RNA, 19 nt, Artificial Sequence
  Description of Artificial Sequence: Synthetic oligonucleotide
aagucuucgaucaucaccu

SEQ ID NO: 3277820 - RNA, 19 nt, Artificial Sequence
  Description of Artificial Sequence: Synthetic oligonucleotide
uggcggacagcauagaaag

SEQ ID NO: 3277821 - RNA, 19 nt, Artificial Sequence
  Description of Artificial Sequence: Synthetic oligonucleotide
aauguacaguagcaucuuc

SEQ ID NO: 3277822 - RNA, 19 nt, Artificial Sequence
  Description of Artificial Sequence: Synthetic oligonucleotide
ucuacuucgcuacaauaga

SEQ ID NO: 3277823 - RNA, 19 nt, Artificial Sequence
  Description of Artificial Sequence: Synthetic oligonucleotide
ugauuaaauacugugcuaa

SEQ ID NO: 3277824 - RNA, 19 nt, Artificial Sequence
  Description of Artificial Sequence: Synthetic oligonucleotide
aacuggagcacagauuuuc

SEQ ID NO: 3277825 - RNA, 19 nt, Artificial Sequence
  Description of Artificial Sequence: Synthetic oligonucleotide
cauauuaauaaauaagcua

SEQ ID NO: 3277826 - RNA, 19 nt, Artificial Sequence
  Description of Artificial Sequence: Synthetic oligonucleotide
uauauuuaccucaguaaau

SEQ ID NO: 3277827 - RNA, 19 nt, Artificial Sequence
  Description of Artificial Sequence: Synthetic oligonucleotide
uucgcuacaauagaaacuc

SEQ ID NO: 3277828 - RNA, 19 nt, Artificial Sequence
  Description of Artificial Sequence: Synthetic oligonucleotide
agauuuugugucaccaucc

SEQ ID NO: 3277829 - RNA, 19 nt, Artificial Sequence
  Description of Artificial Sequence: Synthetic oligonucleotide
ugucacuuguccaggaacc

SEQ ID NO: 3277830 - RNA, 19 nt, Artificial Sequence
  Description of Artificial Sequence: Synthetic oligonucleotide
agggauuucugauaaauau

SEQ ID NO: 3277831 - RNA, 19 nt, Artificial Sequence
  Description of Artificial Sequence: Synthetic oligonucleotide
gucuuucuaacaguuaugg

SEQ ID NO: 3277832 - RNA, 19 nt, Artificial Sequence
  Description of Artificial Sequence: Synthetic oligonucleotide
acaucauauuaauaaauaa

SEQ ID NO: 3277833 - RNA, 19 nt, Artificial Sequence
  Description of Artificial Sequence: Synthetic oligonucleotide
uaucacugcgucuaaauau

SEQ ID NO: 3277834 - RNA, 19 nt, Artificial Sequence
  Description of Artificial Sequence: Synthetic oligonucleotide
uagucuuucuaacaguuau

SEQ ID NO: 3277835 - RNA, 19 nt, Artificial Sequence
  Description of Artificial Sequence: Synthetic oligonucleotide
uugggugggacauauaauc

SEQ ID NO: 3277836 - RNA, 19 nt, Artificial Sequence
  Description of Artificial Sequence: Synthetic oligonucleotide
uagaaacucaaggaggaag

SEQ ID NO: 3277837 - RNA, 19 nt, Artificial Sequence
  Description of Artificial Sequence: Synthetic oligonucleotide
uuaugguaccauaugcaga

SEQ ID NO: 3277838 - RNA, 19 nt, Artificial Sequence
  Description of Artificial Sequence: Synthetic oligonucleotide
uauccgucucauauauugg

SEQ ID NO: 3277839 - RNA, 19 nt, Artificial Sequence
  Description of Artificial Sequence: Synthetic oligonucleotide
ucaccauccaagaacgugu

SEQ ID NO: 3277840 - RNA, 19 nt, Artificial Sequence
  Description of Artificial Sequence: Synthetic oligonucleotide
aucuuagcaugugaaauac

SEQ ID NO: 3277841 - RNA, 19 nt, Artificial Sequence
  Description of Artificial Sequence: Synthetic oligonucleotide
ucugaugaagcuccagaug

SEQ ID NO: 3277842 - RNA, 19 nt, Artificial Sequence
  Description of Artificial Sequence: Synthetic oligonucleotide
ucacuuucuuucaaaaguc

SEQ ID NO: 3277843 - RNA, 19 nt, Artificial Sequence
  Description of Artificial Sequence: Synthetic oligonucleotide
gaacguguugugcugcugg

SEQ ID NO: 3277844 - RNA, 19 nt, Artificial Sequence
  Description of Artificial Sequence: Synthetic oligonucleotide
acuauugccuuuaucauug

SEQ ID NO: 3277845 - RNA, 19 nt, Artificial Sequence
  Description of Artificial Sequence: Synthetic oligonucleotide
auuauugaaauaagaaaga

SEQ ID NO: 3277846 - RNA, 19 nt, Artificial Sequence
  Description of Artificial Sequence: Synthetic oligonucleotide
guaaccuguccuuccaugg

SEQ ID NO: 3277847 - RNA, 19 nt, Artificial Sequence
  Description of Artificial Sequence: Synthetic oligonucleotide
acauuuuaauuugaaaacu

SEQ ID NO: 3277848 - RNA, 19 nt, Artificial Sequence
  Description of Artificial Sequence: Synthetic oligonucleotide
aaagucuggaguaaccugu

SEQ ID NO: 3277849 - RNA, 19 nt, Artificial Sequence
  Description of Artificial Sequence: Synthetic oligonucleotide
aagauuauaugccagagac

SEQ ID NO: 3277850 - RNA, 19 nt, Artificial Sequence
  Description of Artificial Sequence: Synthetic oligonucleotide
auuuugacagauuugaugg

SEQ ID NO: 3277851 - RNA, 19 nt, Artificial Sequence
  Description of Artificial Sequence: Synthetic oligonucleotide
uacaauaugggaauaaaag

SEQ ID NO: 3277852 - RNA, 19 nt, Artificial Sequence
  Description of Artificial Sequence: Synthetic oligonucleotide
ugauccuuuauuuugacag

SEQ ID NO: 3277853 - RNA, 19 nt, Artificial Sequence
  Description of Artificial Sequence: Synthetic oligonucleotide
ucaggaaaagauuauaugc

SEQ ID NO: 3277854 - RNA, 19 nt, Artificial Sequence
  Description of Artificial Sequence: Synthetic oligonucleotide
aauaaaagucguucacugc

SEQ ID NO: 3277855 - RNA, 19 nt, Artificial Sequence
  Description of Artificial Sequence: Synthetic oligonucleotide
aauaugggaauaaaagucg

SEQ ID NO: 3277856 - RNA, 19 nt, Artificial Sequence
  Description of Artificial Sequence: Synthetic oligonucleotide
aaaacuuccacacuccugu

SEQ ID NO: 3277857 - RNA, 19 nt, Artificial Sequence
  Description of Artificial Sequence: Synthetic oligonucleotide
uuuauuuugacagauuuga

SEQ ID NO: 3277858 - RNA, 19 nt, Artificial Sequence
  Description of Artificial Sequence: Synthetic oligonucleotide
gauuauaugccagagacug

SEQ ID NO: 3277859 - RNA, 19 nt, Artificial Sequence
  Description of Artificial Sequence: Synthetic oligonucleotide
uauuuugacagauuugaug

SEQ ID NO: 3277860 - RNA, 19 nt, Artificial Sequence
  Description of Artificial Sequence: Synthetic oligonucleotide
gaauaaaagucguucacug

SEQ ID NO: 3277861 - RNA, 19 nt, Artificial Sequence
  Description of Artificial Sequence: Synthetic oligonucleotide
caauaugggaauaaaaguc

SEQ ID NO: 3277862 - RNA, 19 nt, Artificial Sequence
  Description of Artificial Sequence: Synthetic oligonucleotide
ugugaguacaauaugggaa

SEQ ID NO: 3277863 - RNA, 19 nt, Artificial Sequence
  Description of Artificial Sequence: Synthetic oligonucleotide
acaauaugggaauaaaagu

SEQ ID NO: 3277864 - RNA, 19 nt, Artificial Sequence
  Description of Artificial Sequence: Synthetic oligonucleotide
auaaaagucguucacugca

SEQ ID NO: 3277865 - RNA, 19 nt, Artificial Sequence
  Description of Artificial Sequence: Synthetic oligonucleotide
uggacuucagcuaucacug

SEQ ID NO: 3277866 - RNA, 19 nt, Artificial Sequence
  Description of Artificial Sequence: Synthetic oligonucleotide
aaaagauuauaugccagag

SEQ ID NO: 3277867 - RNA, 19 nt, Artificial Sequence
  Description of Artificial Sequence: Synthetic oligonucleotide
uucacugcagacacggugg

SEQ ID NO: 3277868 - RNA, 19 nt, Artificial Sequence
  Description of Artificial Sequence: Synthetic oligonucleotide
aaagucguucacugcagac

SEQ ID NO: 3277869 - RNA, 19 nt, Artificial Sequence
  Description of Artificial Sequence: Synthetic oligonucleotide
uguugagugguaaaugaug

SEQ ID NO: 3277870 - RNA, 19 nt, Artificial Sequence
  Description of Artificial Sequence: Synthetic oligonucleotide
caggaaaagauuauaugcc

SEQ ID NO: 3277871 - RNA, 19 nt, Artificial Sequence
  Description of Artificial Sequence: Synthetic oligonucleotide
aacuuccacacuccugucc

SEQ ID NO: 3277872 - RNA, 19 nt, Artificial Sequence
  Description of Artificial Sequence: Synthetic oligonucleotide
uaaaugaugauccuuuauu

SEQ ID NO: 3277873 - RNA, 19 nt, Artificial Sequence
  Description of Artificial Sequence: Synthetic oligonucleotide
aaaugaugauccuuuauuu

SEQ ID NO: 3277874 - RNA, 19 nt, Artificial Sequence
  Description of Artificial Sequence: Synthetic oligonucleotide
augaugauccuuuauuuug

SEQ ID NO: 3277875 - RNA, 19 nt, Artificial Sequence
  Description of Artificial Sequence: Synthetic oligonucleotide
acuuccacacuccuguccc

SEQ ID NO: 3277876 - RNA, 19 nt, Artificial Sequence
  Description of Artificial Sequence: Synthetic oligonucleotide
aucacugcagcgcuguggc

SEQ ID NO: 3277877 - RNA, 19 nt, Artificial Sequence
  Description of Artificial Sequence: Synthetic oligonucleotide
agucguucacugcagacac

SEQ ID NO: 3277878 - RNA, 19 nt, Artificial Sequence
  Description of Artificial Sequence: Synthetic oligonucleotide
aaccccaucaccaacagcu

SEQ ID NO: 3277879 - RNA, 19 nt, Artificial Sequence
  Description of Artificial Sequence: Synthetic oligonucleotide
aaagauuauaugccagaga

SEQ ID NO: 3277880 - RNA, 19 nt, Artificial Sequence
  Description of Artificial Sequence: Synthetic oligonucleotide
agauuugaugggcaggccg

SEQ ID NO: 3277881 - RNA, 19 nt, Artificial Sequence
  Description of Artificial Sequence: Synthetic oligonucleotide
acagauuugaugggcaggc

SEQ ID NO: 3277882 - RNA, 19 nt, Artificial Sequence
  Description of Artificial Sequence: Synthetic oligonucleotide
gagugguaaaugaugaucc

SEQ ID NO: 3277883 - RNA, 19 nt, Artificial Sequence
  Description of Artificial Sequence: Synthetic oligonucleotide
aaugaugauccuuuauuuu

SEQ ID NO: 3277884 - RNA, 19 nt, Artificial Sequence
  Description of Artificial Sequence: Synthetic oligonucleotide
augggaauaaaagucguuc

SEQ ID NO: 3277885 - RNA, 19 nt, Artificial Sequence
  Description of Artificial Sequence: Synthetic oligonucleotide
uguggucaggaaaagauua

SEQ ID NO: 3277886 - RNA, 19 nt, Artificial Sequence
  Description of Artificial Sequence: Synthetic oligonucleotide
gaaaagauuauaugccaga

SEQ ID NO: 3277887 - RNA, 19 nt, Artificial Sequence
  Description of Artificial Sequence: Synthetic oligonucleotide
uuuugacagauuugauggg

SEQ ID NO: 3277888 - RNA, 19 nt, Artificial Sequence
  Description of Artificial Sequence: Synthetic oligonucleotide
uaaaagucguucacugcag

SEQ ID NO: 3277889 - RNA, 19 nt, Artificial Sequence
  Description of Artificial Sequence: Synthetic oligonucleotide
auggacuucagcuaucacu

SEQ ID NO: 3277890 - RNA, 19 nt, Artificial Sequence
  Description of Artificial Sequence: Synthetic oligonucleotide
ugaugauccuuuauuuuga

SEQ ID NO: 3277891 - RNA, 19 nt, Artificial Sequence
  Description of Artificial Sequence: Synthetic oligonucleotide
aucaccaacagcugugguc

SEQ ID NO: 3277892 - RNA, 19 nt, Artificial Sequence
  Description of Artificial Sequence: Synthetic oligonucleotide
ucagcuaucacugcagcgc

SEQ ID NO: 3277893 - RNA, 19 nt, Artificial Sequence
  Description of Artificial Sequence: Synthetic oligonucleotide
acagucgaaccccaucacc

SEQ ID NO: 3277894 - RNA, 19 nt, Artificial Sequence
  Description of Artificial Sequence: Synthetic oligonucleotide
aggaaaagauuauaugcca

SEQ ID NO: 3277895 - RNA, 19 nt, Artificial Sequence
  Description of Artificial Sequence: Synthetic oligonucleotide
acuguugagugguaaauga

SEQ ID NO: 3277896 - RNA, 19 nt, Artificial Sequence
  Description of Artificial Sequence: Synthetic oligonucleotide
cuuuauuuugacagauuug

SEQ ID NO: 3277897 - RNA, 19 nt, Artificial Sequence
  Description of Artificial Sequence: Synthetic oligonucleotide
uuugacagauuugaugggc

SEQ ID NO: 3277898 - RNA, 19 nt, Artificial Sequence
  Description of Artificial Sequence: Synthetic oligonucleotide
gucaggaaaagauuauaug

SEQ ID NO: 3277899 - RNA, 19 nt, Artificial Sequence
  Description of Artificial Sequence: Synthetic oligonucleotide
ugggaauaaaagucguuca

SEQ ID NO: 3277900 - RNA, 19 nt, Artificial Sequence
  Description of Artificial Sequence: Synthetic oligonucleotide
aauggacuucagcuaucac

SEQ ID NO: 3277901 - RNA, 19 nt, Artificial Sequence
  Description of Artificial Sequence: Synthetic oligonucleotide
ucguucacugcagacacgg

SEQ ID NO: 3277902 - RNA, 19 nt, Artificial Sequence
  Description of Artificial Sequence: Synthetic oligonucleotide
ugguaaaugaugauccuuu

SEQ ID NO: 3277903 - RNA, 19 nt, Artificial Sequence
  Description of Artificial Sequence: Synthetic oligonucleotide
uucagcuaucacugcagcg

SEQ ID NO: 3277904 - RNA, 19 nt, Artificial Sequence
  Description of Artificial Sequence: Synthetic oligonucleotide
agcugugaguacaauaugg

SEQ ID NO: 3277905 - RNA, 19 nt, Artificial Sequence
  Description of Artificial Sequence: Synthetic oligonucleotide
ucaccaacagcugugguca

SEQ ID NO: 3277906 - RNA, 19 nt, Artificial Sequence
  Description of Artificial Sequence: Synthetic oligonucleotide
uugacagauuugaugggca

SEQ ID NO: 3277907 - RNA, 19 nt, Artificial Sequence
  Description of Artificial Sequence: Synthetic oligonucleotide
aacagcuguggucaggaaa

SEQ ID NO: 3277908 - RNA, 19 nt, Artificial Sequence
  Description of Artificial Sequence: Synthetic oligonucleotide
ugagugguaaaugaugauc

SEQ ID NO: 3277909 - RNA, 19 nt, Artificial Sequence
  Description of Artificial Sequence: Synthetic oligonucleotide
aaaagucguucacugcaga

SEQ ID NO: 3277910 - RNA, 19 nt, Artificial Sequence
  Description of Artificial Sequence: Synthetic oligonucleotide
uaugccagagacuguugag

SEQ ID NO: 3277911 - RNA, 19 nt, Artificial Sequence
  Description of Artificial Sequence: Synthetic oligonucleotide
guggccaacauuaagguca

SEQ ID NO: 3277912 - RNA, 19 nt, Artificial Sequence
  Description of Artificial Sequence: Synthetic oligonucleotide
ugacagauuugaugggcag

SEQ ID NO: 3277913 - RNA, 19 nt, Artificial Sequence
  Description of Artificial Sequence: Synthetic oligonucleotide
acacgguggucacaucugc

SEQ ID NO: 3277914 - RNA, 19 nt, Artificial Sequence
  Description of Artificial Sequence: Synthetic oligonucleotide
guucacugcagacacggug

SEQ ID NO: 3277915 - RNA, 19 nt, Artificial Sequence
  Description of Artificial Sequence: Synthetic oligonucleotide
uuauuuugacagauuugau

SEQ ID NO: 3277916 - RNA, 19 nt, Artificial Sequence
  Description of Artificial Sequence: Synthetic oligonucleotide
acaucugcuccacugguca

SEQ ID NO: 3277917 - RNA, 19 nt, Artificial Sequence
  Description of Artificial Sequence: Synthetic oligonucleotide
aaacuuccacacuccuguc

SEQ ID NO: 3277918 - RNA, 19 nt, Artificial Sequence
  Description of Artificial Sequence: Synthetic oligonucleotide
gacagauuugaugggcagg

SEQ ID NO: 3277919 - RNA, 19 nt, Artificial Sequence
  Description of Artificial Sequence: Synthetic oligonucleotide
ugccagagacuguugagug

SEQ ID NO: 3277920 - RNA, 19 nt, Artificial Sequence
  Description of Artificial Sequence: Synthetic oligonucleotide
uaucacugcagcgcugugg

SEQ ID NO: 3277921 - RNA, 19 nt, Artificial Sequence
  Description of Artificial Sequence: Synthetic oligonucleotide
gucacaucugcuccacugg

SEQ ID NO: 3277922 - RNA, 19 nt, Artificial Sequence
  Description of Artificial Sequence: Synthetic oligonucleotide
uuauaugccagagacuguu

SEQ ID NO: 3277923 - RNA, 19 nt, Artificial Sequence
  Description of Artificial Sequence: Synthetic oligonucleotide
ucgaaccccaucaccaaca

SEQ ID NO: 3277924 - RNA, 19 nt, Artificial Sequence
  Description of Artificial Sequence: Synthetic oligonucleotide
acgguggucacaucugcuc

SEQ ID NO: 3277925 - RNA, 19 nt, Artificial Sequence
  Description of Artificial Sequence: Synthetic oligonucleotide
gaugauccuuuauuuugac

SEQ ID NO: 3277926 - RNA, 19 nt, Artificial Sequence
  Description of Artificial Sequence: Synthetic oligonucleotide
aagucguucacugcagaca

SEQ ID NO: 3277927 - RNA, 19 nt, Artificial Sequence
  Description of Artificial Sequence: Synthetic oligonucleotide
guugagugguaaaugauga

SEQ ID NO: 3277928 - RNA, 19 nt, Artificial Sequence
  Description of Artificial Sequence: Synthetic oligonucleotide
agacacgguggucacaucu

SEQ ID NO: 3277929 - RNA, 19 nt, Artificial Sequence
  Description of Artificial Sequence: Synthetic oligonucleotide
aggucccacagucgaaccc

SEQ ID NO: 3277930 - RNA, 19 nt, Artificial Sequence
  Description of Artificial Sequence: Synthetic oligonucleotide
auaugccagagacuguuga

SEQ ID NO: 3277931 - RNA, 19 nt, Artificial Sequence
  Description of Artificial Sequence: Synthetic oligonucleotide
gcuguggccaacauuaagg

SEQ ID NO: 3277932 - RNA, 19 nt, Artificial Sequence
  Description of Artificial Sequence: Synthetic oligonucleotide
uauaugccagagacuguug

SEQ ID NO: 3277933 - RNA, 19 nt, Artificial Sequence
  Description of Artificial Sequence: Synthetic oligonucleotide
acugcagacacggugguca

SEQ ID NO: 3277934 - RNA, 19 nt, Artificial Sequence
  Description of Artificial Sequence: Synthetic oligonucleotide
gaguccucaggucccacag

SEQ ID NO: 3277935 - RNA, 19 nt, Artificial Sequence
  Description of Artificial Sequence: Synthetic oligonucleotide
gauccuuuauuuugacaga

SEQ ID NO: 3277936 - RNA, 19 nt, Artificial Sequence
  Description of Artificial Sequence: Synthetic oligonucleotide
agugguaaaugaugauccu

SEQ ID NO: 3277937 - RNA, 19 nt, Artificial Sequence
  Description of Artificial Sequence: Synthetic oligonucleotide
ggaaaagauuauaugccag

SEQ ID NO: 3277938 - RNA, 19 nt, Artificial Sequence
  Description of Artificial Sequence: Synthetic oligonucleotide
gacuucagcuaucacugca

SEQ ID NO: 3277939 - RNA, 19 nt, Artificial Sequence
  Description of Artificial Sequence: Synthetic oligonucleotide
uaugggaauaaaagucguu

SEQ ID NO: 3277940 - RNA, 19 nt, Artificial Sequence
  Description of Artificial Sequence: Synthetic oligonucleotide
gacuguugagugguaaaug

SEQ ID NO: 3277941 - RNA, 19 nt, Artificial Sequence
  Description of Artificial Sequence: Synthetic oligonucleotide
aguacaauaugggaauaaa

SEQ ID NO: 3277942 - RNA, 19 nt, Artificial Sequence
  Description of Artificial Sequence: Synthetic oligonucleotide
uccucaggucccacagucg

SEQ ID NO: 3277943 - RNA, 19 nt, Artificial Sequence
  Description of Artificial Sequence: Synthetic oligonucleotide
cucagaguccucagguccc

SEQ ID NO: 3277944 - RNA, 19 nt, Artificial Sequence
  Description of Artificial Sequence: Synthetic oligonucleotide
uccugucccgaccagcugu

SEQ ID NO: 3277945 - RNA, 19 nt, Artificial Sequence
  Description of Artificial Sequence: Synthetic oligonucleotide
ucacaucugcuccacuggu

SEQ ID NO: 3277946 - RNA, 19 nt, Artificial Sequence
  Description of Artificial Sequence: Synthetic oligonucleotide
augauccuuuauuuugaca

SEQ ID NO: 3277947 - RNA, 19 nt, Artificial Sequence
  Description of Artificial Sequence: Synthetic oligonucleotide
gaugggcaggccgugaaug

SEQ ID NO: 3277948 - RNA, 19 nt, Artificial Sequence
  Description of Artificial Sequence: Synthetic oligonucleotide
ugucccgaccagcugugag

SEQ ID NO: 3277949 - RNA, 19 nt, Artificial Sequence
  Description of Artificial Sequence: Synthetic oligonucleotide
aaaugcuuuauucaauauc

SEQ ID NO: 3277950 - RNA, 19 nt, Artificial Sequence
  Description of Artificial Sequence: Synthetic oligonucleotide
auauccaggacccagcagc

SEQ ID NO: 3277951 - RNA, 19 nt, Artificial Sequence
  Description of Artificial Sequence: Synthetic oligonucleotide
aaugcuuuauucaauaucu

SEQ ID NO: 3277952 - RNA, 19 nt, Artificial Sequence
  Description of Artificial Sequence: Synthetic oligonucleotide
uuuauucaauaucugcagg

SEQ ID NO: 3277953 - RNA, 19 nt, Artificial Sequence
  Description of Artificial Sequence: Synthetic oligonucleotide
ucauccauaaauuccacgc

SEQ ID NO: 3277954 - RNA, 19 nt, Artificial Sequence
  Description of Artificial Sequence: Synthetic oligonucleotide
cuuucugacuccaacaggg

SEQ ID NO: 3277955 - RNA, 19 nt, Artificial Sequence
  Description of Artificial Sequence: Synthetic oligonucleotide
uugacguuucgaaugauag

SEQ ID NO: 3277956 - RNA, 19 nt, Artificial Sequence
  Description of Artificial Sequence: Synthetic oligonucleotide
auccauaaauuccacgcgc

SEQ ID NO: 3277957 - RNA, 19 nt, Artificial Sequence
  Description of Artificial Sequence: Synthetic oligonucleotide
gacguuucgaaugauagag

SEQ ID NO: 3277958 - RNA, 19 nt, Artificial Sequence
  Description of Artificial Sequence: Synthetic oligonucleotide
uuucgaaugauagagcggc

SEQ ID NO: 3277959 - RNA, 19 nt, Artificial Sequence
  Description of Artificial Sequence: Synthetic oligonucleotide
aaauuccacgcgcaccugc

SEQ ID NO: 3277960 - RNA, 19 nt, Artificial Sequence
  Description of Artificial Sequence: Synthetic oligonucleotide
acccuagccagcuugaugg

SEQ ID NO: 3277961 - RNA, 19 nt, Artificial Sequence
  Description of Artificial Sequence: Synthetic oligonucleotide
cuuuauucaauaucugcag

SEQ ID NO: 3277962 - RNA, 19 nt, Artificial Sequence
  Description of Artificial Sequence: Synthetic oligonucleotide
gucaucaugggccaagugg

SEQ ID NO: 3277963 - RNA, 19 nt, Artificial Sequence
  Description of Artificial Sequence: Synthetic oligonucleotide
ugcuuuauucaauaucugc

SEQ ID NO: 3277964 - RNA, 19 nt, Artificial Sequence
  Description of Artificial Sequence: Synthetic oligonucleotide
uuauucaauaucugcaggu

SEQ ID NO: 3277965 - RNA, 19 nt, Artificial Sequence
  Description of Artificial Sequence: Synthetic oligonucleotide
uaucugcaggucaucaugg

SEQ ID NO: 3277966 - RNA, 19 nt, Artificial Sequence
  Description of Artificial Sequence: Synthetic oligonucleotide
auaaauuccacgcgcaccu

SEQ ID NO: 3277967 - RNA, 19 nt, Artificial Sequence
  Description of Artificial Sequence: Synthetic oligonucleotide
agcuugaugggcugcacgc

SEQ ID NO: 3277968 - RNA, 19 nt, Artificial Sequence
  Description of Artificial Sequence: Synthetic oligonucleotide
ucugacuccaacaggguga

SEQ ID NO: 3277969 - RNA, 19 nt, Artificial Sequence
  Description of Artificial Sequence: Synthetic oligonucleotide
ucaucaugggccaaguggu

SEQ ID NO: 3277970 - RNA, 19 nt, Artificial Sequence
  Description of Artificial Sequence: Synthetic oligonucleotide
ucuuucugacuccaacagg

SEQ ID NO: 3277971 - RNA, 19 nt, Artificial Sequence
  Description of Artificial Sequence: Synthetic oligonucleotide
ucagcguaaucuccgagcc

SEQ ID NO: 3277972 - RNA, 19 nt, Artificial Sequence
  Description of Artificial Sequence: Synthetic oligonucleotide
acagggugagcacaucacc

SEQ ID NO: 3277973 - RNA, 19 nt, Artificial Sequence
  Description of Artificial Sequence: Synthetic oligonucleotide
auaucugcaggucaucaug

SEQ ID NO: 3277974 - RNA, 19 nt, Artificial Sequence
  Description of Artificial Sequence: Synthetic oligonucleotide
caagugguggauauccagg

SEQ ID NO: 3277975 - RNA, 19 nt, Artificial Sequence
  Description of Artificial Sequence: Synthetic oligonucleotide
aucauccauaaauuccacg

SEQ ID NO: 3277976 - RNA, 19 nt, Artificial Sequence
  Description of Artificial Sequence: Synthetic oligonucleotide
cugcaggucaucaugggcc

SEQ ID NO: 3277977 - RNA, 19 nt, Artificial Sequence
  Description of Artificial Sequence: Synthetic oligonucleotide
ugguggauauccaggaccc

SEQ ID NO: 3277978 - RNA, 19 nt, Artificial Sequence
  Description of Artificial Sequence: Synthetic oligonucleotide
uucaauaucugcaggucau

SEQ ID NO: 3277979 - RNA, 19 nt, Artificial Sequence
  Description of Artificial Sequence: Synthetic oligonucleotide
aagugguggauauccagga

SEQ ID NO: 3277980 - RNA, 19 nt, Artificial Sequence
  Description of Artificial Sequence: Synthetic oligonucleotide
agagcggcugguaucaucc

SEQ ID NO: 3277981 - RNA, 19 nt, Artificial Sequence
  Description of Artificial Sequence: Synthetic oligonucleotide
auucaauaucugcagguca

SEQ ID NO: 3277982 - RNA, 19 nt, Artificial Sequence
  Description of Artificial Sequence: Synthetic oligonucleotide
ucucuuucugacuccaaca

SEQ ID NO: 3277983 - RNA, 19 nt, Artificial Sequence
  Description of Artificial Sequence: Synthetic oligonucleotide
cauccauaaauuccacgcg

SEQ ID NO: 3277984 - RNA, 19 nt, Artificial Sequence
  Description of Artificial Sequence: Synthetic oligonucleotide
cacaucacccucccgaacg

SEQ ID NO: 3277985 - RNA, 19 nt, Artificial Sequence
  Description of Artificial Sequence: Synthetic oligonucleotide
uccauaaauuccacgcgca

SEQ ID NO: 3277986 - RNA, 19 nt, Artificial Sequence
  Description of Artificial Sequence: Synthetic oligonucleotide
gguaucauccauaaauucc

SEQ ID NO: 3277987 - RNA, 19 nt, Artificial Sequence
  Description of Artificial Sequence: Synthetic oligonucleotide
aauaucugcaggucaucau

SEQ ID NO: 3277988 - RNA, 19 nt, Artificial Sequence
  Description of Artificial Sequence: Synthetic oligonucleotide
agcaaggucagcguaaucu

SEQ ID NO: 3277989 - RNA, 19 nt, Artificial Sequence
  Description of Artificial Sequence: Synthetic oligonucleotide
aaggucagcguaaucuccg

SEQ ID NO: 3277990 - RNA, 19 nt, Artificial Sequence
  Description of Artificial Sequence: Synthetic oligonucleotide
ucugcaggucaucaugggc

SEQ ID NO: 3277991 - RNA, 19 nt, Artificial Sequence
  Description of Artificial Sequence: Synthetic oligonucleotide
agcguaaucuccgagccuc

SEQ ID NO: 3277992 - RNA, 19 nt, Artificial Sequence
  Description of Artificial Sequence: Synthetic oligonucleotide
cucuuucugacuccaacag

SEQ ID NO: 3277993 - RNA, 19 nt, Artificial Sequence
  Description of Artificial Sequence: Synthetic oligonucleotide
uucugacuccaacagggug

SEQ ID NO: 3277994 - RNA, 19 nt, Artificial Sequence
  Description of Artificial Sequence: Synthetic oligonucleotide
aacagggugagcacaucac

SEQ ID NO: 3277995 - RNA, 19 nt, Artificial Sequence
  Description of Artificial Sequence: Synthetic oligonucleotide
gugguggauauccaggacc

SEQ ID NO: 3277996 - RNA, 19 nt, Artificial Sequence
  Description of Artificial Sequence: Synthetic oligonucleotide
uccaggacccagcagcaag

SEQ ID NO: 3277997 - RNA, 19 nt, Artificial Sequence
  Description of Artificial Sequence: Synthetic oligonucleotide
cauaaauuccacgcgcacc

SEQ ID NO: 3277998 - RNA, 19 nt, Artificial Sequence
  Description of Artificial Sequence: Synthetic oligonucleotide
guaucauccauaaauucca

SEQ ID NO: 3277999 - RNA, 19 nt, Artificial Sequence
  Description of Artificial Sequence: Synthetic oligonucleotide
uuugacguuucgaaugaua

SEQ ID NO: 3278000 - RNA, 19 nt, Artificial Sequence
  Description of Artificial Sequence: Synthetic oligonucleotide
ugguaucauccauaaauuc

SEQ ID NO: 3278001 - RNA, 19 nt, Artificial Sequence
  Description of Artificial Sequence: Synthetic oligonucleotide
agugguggauauccaggac

SEQ ID NO: 3278002 - RNA, 19 nt, Artificial Sequence
  Description of Artificial Sequence: Synthetic oligonucleotide
aauuccacgcgcaccugcg

SEQ ID NO: 3278003 - RNA, 19 nt, Artificial Sequence
  Description of Artificial Sequence: Synthetic oligonucleotide
uggauauccaggacccagc

SEQ ID NO: 3278004 - RNA, 19 nt, Artificial Sequence
  Description of Artificial Sequence: Synthetic oligonucleotide
uauucaauaucugcagguc

SEQ ID NO: 3278005 - RNA, 19 nt, Artificial Sequence
  Description of Artificial Sequence: Synthetic oligonucleotide
gacuccaacagggugagca

SEQ ID NO: 3278006 - RNA, 19 nt, Artificial Sequence
  Description of Artificial Sequence: Synthetic oligonucleotide
cagggugagcacaucaccc

SEQ ID NO: 3278007 - RNA, 19 nt, Artificial Sequence
  Description of Artificial Sequence: Synthetic oligonucleotide
accgguccugcccagcacc

SEQ ID NO: 3278008 - RNA, 19 nt, Artificial Sequence
  Description of Artificial Sequence: Synthetic oligonucleotide
gucagcguaaucuccgagc

SEQ ID NO: 3278009 - RNA, 19 nt, Artificial Sequence
  Description of Artificial Sequence: Synthetic oligonucleotide
caaggucagcguaaucucc

SEQ ID NO: 3278010 - RNA, 19 nt, Artificial Sequence
  Description of Artificial Sequence: Synthetic oligonucleotide
guuucgaaugauagagcgg

SEQ ID NO: 3278011 - RNA, 19 nt, Artificial Sequence
  Description of Artificial Sequence: Synthetic oligonucleotide
acuccaacagggugagcac

SEQ ID NO: 3278012 - RNA, 19 nt, Artificial Sequence
  Description of Artificial Sequence: Synthetic oligonucleotide
gagcacaucacccucccga

SEQ ID NO: 3278013 - RNA, 19 nt, Artificial Sequence
  Description of Artificial Sequence: Synthetic oligonucleotide
ugacguuucgaaugauaga

SEQ ID NO: 3278014 - RNA, 19 nt, Artificial Sequence
  Description of Artificial Sequence: Synthetic oligonucleotide
gauauccaggacccagcag

SEQ ID NO: 3278015 - RNA, 19 nt, Artificial Sequence
  Description of Artificial Sequence: Synthetic oligonucleotide
uaucauccauaaauuccac

SEQ ID NO: 3278016 - RNA, 19 nt, Artificial Sequence
  Description of Artificial Sequence: Synthetic oligonucleotide
cguuucgaaugauagagcg

SEQ ID NO: 3278017 - RNA, 19 nt, Artificial Sequence
  Description of Artificial Sequence: Synthetic oligonucleotide
accuugguuacccuagcca

SEQ ID NO: 3278018 - RNA, 19 nt, Artificial Sequence
  Description of Artificial Sequence: Synthetic oligonucleotide
cuugguuacccuagccagc

SEQ ID NO: 3278019 - RNA, 19 nt, Artificial Sequence
  Description of Artificial Sequence: Synthetic oligonucleotide
aucuccgagccucucuuuc

SEQ ID NO: 3278020 - RNA, 19 nt, Artificial Sequence
  Description of Artificial Sequence: Synthetic oligonucleotide
gauagagcggcugguauca

SEQ ID NO: 3278021 - RNA, 19 nt, Artificial Sequence
  Description of Artificial Sequence: Synthetic oligonucleotide
ucgaaugauagagcggcug

SEQ ID NO: 3278022 - RNA, 19 nt, Artificial Sequence
  Description of Artificial Sequence: Synthetic oligonucleotide
ugcacugccccugcgaacc

SEQ ID NO: 3278023 - RNA, 19 nt, Artificial Sequence
  Description of Artificial Sequence: Synthetic oligonucleotide
uauccaggacccagcagca

SEQ ID NO: 3278024 - RNA, 19 nt, Artificial Sequence
  Description of Artificial Sequence: Synthetic oligonucleotide
aucaugggccaaguggugg

SEQ ID NO: 3278025 - RNA, 19 nt, Artificial Sequence
  Description of Artificial Sequence: Synthetic oligonucleotide
ugauagagcggcugguauc

SEQ ID NO: 3278026 - RNA, 19 nt, Artificial Sequence
  Description of Artificial Sequence: Synthetic oligonucleotide
gcugguaucauccauaaau

SEQ ID NO: 3278027 - RNA, 19 nt, Artificial Sequence
  Description of Artificial Sequence: Synthetic oligonucleotide
cucucuuucugacuccaac

SEQ ID NO: 3278028 - RNA, 19 nt, Artificial Sequence
  Description of Artificial Sequence: Synthetic oligonucleotide
aucugcaggucaucauggg

SEQ ID NO: 3278029 - RNA, 19 nt, Artificial Sequence
  Description of Artificial Sequence: Synthetic oligonucleotide
uuucugacuccaacagggu

SEQ ID NO: 3278030 - RNA, 19 nt, Artificial Sequence
  Description of Artificial Sequence: Synthetic oligonucleotide
acaucacccucccgaacgg

SEQ ID NO: 3278031 - RNA, 19 nt, Artificial Sequence
  Description of Artificial Sequence: Synthetic oligonucleotide
gagccucucuuucugacuc

SEQ ID NO: 3278032 - RNA, 19 nt, Artificial Sequence
  Description of Artificial Sequence: Synthetic oligonucleotide
uacccuagccagcuugaug

SEQ ID NO: 3278033 - RNA, 19 nt, Artificial Sequence
  Description of Artificial Sequence: Synthetic oligonucleotide
gcuuuauucaauaucugca

SEQ ID NO: 3278034 - RNA, 19 nt, Artificial Sequence
  Description of Artificial Sequence: Synthetic oligonucleotide
acguuucgaaugauagagc

SEQ ID NO: 3278035 - RNA, 19 nt, Artificial Sequence
  Description of Artificial Sequence: Synthetic oligonucleotide
uaaucuccgagccucucuu

SEQ ID NO: 3278036 - RNA, 19 nt, Artificial Sequence
  Description of Artificial Sequence: Synthetic oligonucleotide
aaugauagagcggcuggua

SEQ ID NO: 3278037 - RNA, 19 nt, Artificial Sequence
  Description of Artificial Sequence: Synthetic oligonucleotide
uugguuacccuagccagcu

SEQ ID NO: 3278038 - RNA, 19 nt, Artificial Sequence
  Description of Artificial Sequence: Synthetic oligonucleotide
gccuuugacguuucgaaug

SEQ ID NO: 3278039 - RNA, 19 nt, Artificial Sequence
  Description of Artificial Sequence: Synthetic oligonucleotide
augauagagcggcugguau

SEQ ID NO: 3278040 - RNA, 19 nt, Artificial Sequence
  Description of Artificial Sequence: Synthetic oligonucleotide
ucaugggccaaguggugga

SEQ ID NO: 3278041 - RNA, 19 nt, Artificial Sequence
  Description of Artificial Sequence: Synthetic oligonucleotide
guggauauccaggacccag

SEQ ID NO: 3278042 - RNA, 19 nt, Artificial Sequence
  Description of Artificial Sequence: Synthetic oligonucleotide
ugcgaaccgguccugccca

SEQ ID NO: 3278043 - RNA, 19 nt, Artificial Sequence
  Description of Artificial Sequence: Synthetic oligonucleotide
aaccgguccugcccagcac

SEQ ID NO: 3278044 - RNA, 19 nt, Artificial Sequence
  Description of Artificial Sequence: Synthetic oligonucleotide
ugcaggucaucaugggcca

SEQ ID NO: 3278045 - RNA, 19 nt, Artificial Sequence
  Description of Artificial Sequence: Synthetic oligonucleotide
agccucucuuucugacucc

SEQ ID NO: 3278046 - RNA, 19 nt, Artificial Sequence
  Description of Artificial Sequence: Synthetic oligonucleotide
uccaacagggugagcacau

SEQ ID NO: 3278047 - RNA, 19 nt, Artificial Sequence
  Description of Artificial Sequence: Synthetic oligonucleotide
ccuugguuacccuagccag

SEQ ID NO: 3278048 - RNA, 19 nt, Artificial Sequence
  Description of Artificial Sequence: Synthetic oligonucleotide
gguuacccuagccagcuug

SEQ ID NO: 3278049 - RNA, 19 nt, Artificial Sequence
  Description of Artificial Sequence: Synthetic oligonucleotide
aauagcuucauagagcucc

SEQ ID NO: 3278050 - RNA, 19 nt, Artificial Sequence
  Description of Artificial Sequence: Synthetic oligonucleotide
uuuaaucccauuuagaugu

SEQ ID NO: 3278051 - RNA, 19 nt, Artificial Sequence
  Description of Artificial Sequence: Synthetic oligonucleotide
uagauaaccaauauaagcc

SEQ ID NO: 3278052 - RNA, 19 nt, Artificial Sequence
  Description of Artificial Sequence: Synthetic oligonucleotide
uuagguuuaaugaagagcu

SEQ ID NO: 3278053 - RNA, 19 nt, Artificial Sequence
  Description of Artificial Sequence: Synthetic oligonucleotide
acuaucaauagcuucauag

SEQ ID NO: 3278054 - RNA, 19 nt, Artificial Sequence
  Description of Artificial Sequence: Synthetic oligonucleotide
acuacugaagaauaucacc

SEQ ID NO: 3278055 - RNA, 19 nt, Artificial Sequence
  Description of Artificial Sequence: Synthetic oligonucleotide
aaugauguccuucacuauc

SEQ ID NO: 3278056 - RNA, 19 nt, Artificial Sequence
  Description of Artificial Sequence: Synthetic oligonucleotide
uuuacagcucgaaacaagg

SEQ ID NO: 3278057 - RNA, 19 nt, Artificial Sequence
  Description of Artificial Sequence: Synthetic oligonucleotide
auauaagccacacaaagug

SEQ ID NO: 3278058 - RNA, 19 nt, Artificial Sequence
  Description of Artificial Sequence: Synthetic oligonucleotide
uuuguuagguuuaaugaag

SEQ ID NO: 3278059 - RNA, 19 nt, Artificial Sequence
  Description of Artificial Sequence: Synthetic oligonucleotide
guagauaaccaauauaagc

SEQ ID NO: 3278060 - RNA, 19 nt, Artificial Sequence
  Description of Artificial Sequence: Synthetic oligonucleotide
uaucaauagcuucauagag

SEQ ID NO: 3278061 - RNA, 19 nt, Artificial Sequence
  Description of Artificial Sequence: Synthetic oligonucleotide
aauaaugcuccaucugagg

SEQ ID NO: 3278062 - RNA, 19 nt, Artificial Sequence
  Description of Artificial Sequence: Synthetic oligonucleotide
accaauauaagccacacaa

SEQ ID NO: 3278063 - RNA, 19 nt, Artificial Sequence
  Description of Artificial Sequence: Synthetic oligonucleotide
uucacuaucaauagcuuca

SEQ ID NO: 3278064 - RNA, 19 nt, Artificial Sequence
  Description of Artificial Sequence: Synthetic oligonucleotide
ucaauagcuucauagagcu

SEQ ID NO: 3278065 - RNA, 19 nt, Artificial Sequence
  Description of Artificial Sequence: Synthetic oligonucleotide
caauauaagccacacaaag

SEQ ID NO: 3278066 - RNA, 19 nt, Artificial Sequence
  Description of Artificial Sequence: Synthetic oligonucleotide
auaaugcuccaucugaggg

SEQ ID NO: 3278067 - RNA, 19 nt, Artificial Sequence
  Description of Artificial Sequence: Synthetic oligonucleotide
aagagcuccggauuuacag

SEQ ID NO: 3278068 - RNA, 19 nt, Artificial Sequence
  Description of Artificial Sequence: Synthetic oligonucleotide
ggaaccagcacuuuaaucc

SEQ ID NO: 3278069 - RNA, 19 nt, Artificial Sequence
  Description of Artificial Sequence: Synthetic oligonucleotide
caaaguuucucucuuuugg

SEQ ID NO: 3278070 - RNA, 19 nt, Artificial Sequence
  Description of Artificial Sequence: Synthetic oligonucleotide
uccuucacuaucaauagcu

SEQ ID NO: 3278071 - RNA, 19 nt, Artificial Sequence
  Description of Artificial Sequence: Synthetic oligonucleotide
aaagugaaaggguuaccag

SEQ ID NO: 3278072 - RNA, 19 nt, Artificial Sequence
  Description of Artificial Sequence: Synthetic oligonucleotide
uguagauaaccaauauaag

SEQ ID NO: 3278073 - RNA, 19 nt, Artificial Sequence
  Description of Artificial Sequence: Synthetic oligonucleotide
uuguguugcauguagauaa

SEQ ID NO: 3278074 - RNA, 19 nt, Artificial Sequence
  Description of Artificial Sequence: Synthetic oligonucleotide
aagguuguugugugagucc

SEQ ID NO: 3278075 - RNA, 19 nt, Artificial Sequence
  Description of Artificial Sequence: Synthetic oligonucleotide
uguaauaaugcuccaucug

SEQ ID NO: 3278076 - RNA, 19 nt, Artificial Sequence
  Description of Artificial Sequence: Synthetic oligonucleotide
aguuucucucuuuuggugg

SEQ ID NO: 3278077 - RNA, 19 nt, Artificial Sequence
  Description of Artificial Sequence: Synthetic oligonucleotide
uccaaaagccauuacaggu

SEQ ID NO: 3278078 - RNA, 19 nt, Artificial Sequence
  Description of Artificial Sequence: Synthetic oligonucleotide
acuuuaaucccauuuagau

SEQ ID NO: 3278079 - RNA, 19 nt, Artificial Sequence
  Description of Artificial Sequence: Synthetic oligonucleotide
agguuuaaugaagagcucc

SEQ ID NO: 3278080 - RNA, 19 nt, Artificial Sequence
  Description of Artificial Sequence: Synthetic oligonucleotide
ugacuacugaagaauauca

SEQ ID NO: 3278081 - RNA, 19 nt, Artificial Sequence
  Description of Artificial Sequence: Synthetic oligonucleotide
uaauaaugcuccaucugag

SEQ ID NO: 3278082 - RNA, 19 nt, Artificial Sequence
  Description of Artificial Sequence: Synthetic oligonucleotide
uuuaaugaagagcuccgga

SEQ ID NO: 3278083 - RNA, 19 nt, Artificial Sequence
  Description of Artificial Sequence: Synthetic oligonucleotide
uguugugugagucccucgg

SEQ ID NO: 3278084 - RNA, 19 nt, Artificial Sequence
  Description of Artificial Sequence: Synthetic oligonucleotide
aagugaaaggguuaccagu

SEQ ID NO: 3278085 - RNA, 19 nt, Artificial Sequence
  Description of Artificial Sequence: Synthetic oligonucleotide
aucaauagcuucauagagc

SEQ ID NO: 3278086 - RNA, 19 nt, Artificial Sequence
  Description of Artificial Sequence: Synthetic oligonucleotide
uguugcauguagauaacca

SEQ ID NO: 3278087 - RNA, 19 nt, Artificial Sequence
  Description of Artificial Sequence: Synthetic oligonucleotide
aaaguuucucucuuuuggu

SEQ ID NO: 3278088 - RNA, 19 nt, Artificial Sequence
  Description of Artificial Sequence: Synthetic oligonucleotide
gaaacaagguuguugugug

SEQ ID NO: 3278089 - RNA, 19 nt, Artificial Sequence
  Description of Artificial Sequence: Synthetic oligonucleotide
uguaaugauguccuucacu

SEQ ID NO: 3278090 - RNA, 19 nt, Artificial Sequence
  Description of Artificial Sequence: Synthetic oligonucleotide
auguagauaaccaauauaa

SEQ ID NO: 3278091 - RNA, 19 nt, Artificial Sequence
  Description of Artificial Sequence: Synthetic oligonucleotide
aggguuaccaguccaaaag

SEQ ID NO: 3278092 - RNA, 19 nt, Artificial Sequence
  Description of Artificial Sequence: Synthetic oligonucleotide
cuucuuaacugcuggaggc

SEQ ID NO: 3278093 - RNA, 19 nt, Artificial Sequence
  Description of Artificial Sequence: Synthetic oligonucleotide
aaguuucucucuuuuggug

SEQ ID NO: 3278094 - RNA, 19 nt, Artificial Sequence
  Description of Artificial Sequence: Synthetic oligonucleotide
ucucuuguguugcauguag

SEQ ID NO: 3278095 - RNA, 19 nt, Artificial Sequence
  Description of Artificial Sequence: Synthetic oligonucleotide
cuuuaaucccauuuagaug

SEQ ID NO: 3278096 - RNA, 19 nt, Artificial Sequence
  Description of Artificial Sequence: Synthetic oligonucleotide
aauauaagccacacaaagu

SEQ ID NO: 3278097 - RNA, 19 nt, Artificial Sequence
  Description of Artificial Sequence: Synthetic oligonucleotide
agguuuguuagguuuaaug

SEQ ID NO: 3278098 - RNA, 19 nt, Artificial Sequence
  Description of Artificial Sequence: Synthetic oligonucleotide
guaauaaugcuccaucuga

SEQ ID NO: 3278099 - RNA, 19 nt, Artificial Sequence
  Description of Artificial Sequence: Synthetic oligonucleotide
aacaagguuguugugugag

SEQ ID NO: 3278100 - RNA, 19 nt, Artificial Sequence
  Description of Artificial Sequence: Synthetic oligonucleotide
agauaaccaauauaagcca

SEQ ID NO: 3278101 - RNA, 19 nt, Artificial Sequence
  Description of Artificial Sequence: Synthetic oligonucleotide
guuagguuuaaugaagagc

SEQ ID NO: 3278102 - RNA, 19 nt, Artificial Sequence
  Description of Artificial Sequence: Synthetic oligonucleotide
uguccuucacuaucaauag

SEQ ID NO: 3278103 - RNA, 19 nt, Artificial Sequence
  Description of Artificial Sequence: Synthetic oligonucleotide
agagcuccggauuuacagc

SEQ ID NO: 3278104 - RNA, 19 nt, Artificial Sequence
  Description of Artificial Sequence: Synthetic oligonucleotide
uuaaugaagagcuccggau

SEQ ID NO: 3278105 - RNA, 19 nt, Artificial Sequence
  Description of Artificial Sequence: Synthetic oligonucleotide
uauaagccacacaaaguga

SEQ ID NO: 3278106 - RNA, 19 nt, Artificial Sequence
  Description of Artificial Sequence: Synthetic oligonucleotide
uguuagguuuaaugaagag

SEQ ID NO: 3278107 - RNA, 19 nt, Artificial Sequence
  Description of Artificial Sequence: Synthetic oligonucleotide
acaucuugacuacugaaga

SEQ ID NO: 3278108 - RNA, 19 nt, Artificial Sequence
  Description of Artificial Sequence: Synthetic oligonucleotide
aguccaaaagccauuacag

SEQ ID NO: 3278109 - RNA, 19 nt, Artificial Sequence
  Description of Artificial Sequence: Synthetic oligonucleotide
uuguuagguuuaaugaaga

SEQ ID NO: 3278110 - RNA, 19 nt, Artificial Sequence
  Description of Artificial Sequence: Synthetic oligonucleotide
aaugaagagcuccggauuu

SEQ ID NO: 3278111 - RNA, 19 nt, Artificial Sequence
  Description of Artificial Sequence: Synthetic oligonucleotide
gacaucuugacuacugaag

SEQ ID NO: 3278112 - RNA, 19 nt, Artificial Sequence
  Description of Artificial Sequence: Synthetic oligonucleotide
gagccuguaauaaugcucc

SEQ ID NO: 3278113 - RNA, 19 nt, Artificial Sequence
  Description of Artificial Sequence: Synthetic oligonucleotide
ucuccucauguaaugaugu

SEQ ID NO: 3278114 - RNA, 19 nt, Artificial Sequence
  Description of Artificial Sequence: Synthetic oligonucleotide
gaggccugggcuuucaaag

SEQ ID NO: 3278115 - RNA, 19 nt, Artificial Sequence
  Description of Artificial Sequence: Synthetic oligonucleotide
guuccuucuuaacugcugg

SEQ ID NO: 3278116 - RNA, 19 nt, Artificial Sequence
  Description of Artificial Sequence: Synthetic oligonucleotide
uuuuguucucuuguguugc

SEQ ID NO: 3278117 - RNA, 19 nt, Artificial Sequence
  Description of Artificial Sequence: Synthetic oligonucleotide
aagccacacaaagugaaag

SEQ ID NO: 3278118 - RNA, 19 nt, Artificial Sequence
  Description of Artificial Sequence: Synthetic oligonucleotide
ugaaaggguuaccagucca

SEQ ID NO: 3278119 - RNA, 19 nt, Artificial Sequence
  Description of Artificial Sequence: Synthetic oligonucleotide
agugaaaggguuaccaguc

SEQ ID NO: 3278120 - RNA, 19 nt, Artificial Sequence
  Description of Artificial Sequence: Synthetic oligonucleotide
gccauuacagguuuguuag

SEQ ID NO: 3278121 - RNA, 19 nt, Artificial Sequence
  Description of Artificial Sequence: Synthetic oligonucleotide
uucuccucauguaaugaug

SEQ ID NO: 3278122 - RNA, 19 nt, Artificial Sequence
  Description of Artificial Sequence: Synthetic oligonucleotide
ugugugagucccucggagg

SEQ ID NO: 3278123 - RNA, 19 nt, Artificial Sequence
  Description of Artificial Sequence: Synthetic oligonucleotide
guaaugauguccuucacua

SEQ ID NO: 3278124 - RNA, 19 nt, Artificial Sequence
  Description of Artificial Sequence: Synthetic oligonucleotide
ucaaaguuucucucuuuug

SEQ ID NO: 3278125 - RNA, 19 nt, Artificial Sequence
  Description of Artificial Sequence: Synthetic oligonucleotide
agccacacaaagugaaagg

SEQ ID NO: 3278126 - RNA, 19 nt, Artificial Sequence
  Description of Artificial Sequence: Synthetic oligonucleotide
gaaccagcacuuuaauccc

SEQ ID NO: 3278127 - RNA, 19 nt, Artificial Sequence
  Description of Artificial Sequence: Synthetic oligonucleotide
uccucauguaaugaugucc

SEQ ID NO: 3278128 - RNA, 19 nt, Artificial Sequence
  Description of Artificial Sequence: Synthetic oligonucleotide
gguuuguuagguuuaauga

SEQ ID NO: 3278129 - RNA, 19 nt, Artificial Sequence
  Description of Artificial Sequence: Synthetic oligonucleotide
uugcauguagauaaccaau

SEQ ID NO: 3278130 - RNA, 19 nt, Artificial Sequence
  Description of Artificial Sequence: Synthetic oligonucleotide
uugugugagucccucggag

SEQ ID NO: 3278131 - RNA, 19 nt, Artificial Sequence
  Description of Artificial Sequence: Synthetic oligonucleotide
guccaaaagccauuacagg

SEQ ID NO: 3278132 - RNA, 19 nt, Artificial Sequence
  Description of Artificial Sequence: Synthetic oligonucleotide
uuaccaguccaaaagccau

SEQ ID NO: 3278133 - RNA, 19 nt, Artificial Sequence
  Description of Artificial Sequence: Synthetic oligonucleotide
ugcauguagauaaccaaua

SEQ ID NO: 3278134 - RNA, 19 nt, Artificial Sequence
  Description of Artificial Sequence: Synthetic oligonucleotide
agguuguugugugaguccc

SEQ ID NO: 3278135 - RNA, 19 nt, Artificial Sequence
  Description of Artificial Sequence: Synthetic oligonucleotide
uguucucuuguguugcaug

SEQ ID NO: 3278136 - RNA, 19 nt, Artificial Sequence
  Description of Artificial Sequence: Synthetic oligonucleotide
aaagccauuacagguuugu

SEQ ID NO: 3278137 - RNA, 19 nt, Artificial Sequence
  Description of Artificial Sequence: Synthetic oligonucleotide
uggugguuccuucuuaacu

SEQ ID NO: 3278138 - RNA, 19 nt, Artificial Sequence
  Description of Artificial Sequence: Synthetic oligonucleotide
guuuguuagguuuaaugaa

SEQ ID NO: 3278139 - RNA, 19 nt, Artificial Sequence
  Description of Artificial Sequence: Synthetic oligonucleotide
ucuugacuacugaagaaua

SEQ ID NO: 3278140 - RNA, 19 nt, Artificial Sequence
  Description of Artificial Sequence: Synthetic oligonucleotide
cauguaaugauguccuuca

SEQ ID NO: 3278141 - RNA, 19 nt, Artificial Sequence
  Description of Artificial Sequence: Synthetic oligonucleotide
uaaugcuccaucugaggga

SEQ ID NO: 3278142 - RNA, 19 nt, Artificial Sequence
  Description of Artificial Sequence: Synthetic oligonucleotide
aucugagggaaccagcacu

SEQ ID NO: 3278143 - RNA, 19 nt, Artificial Sequence
  Description of Artificial Sequence: Synthetic oligonucleotide
cuaucaauagcuucauaga

SEQ ID NO: 3278144 - RNA, 19 nt, Artificial Sequence
  Description of Artificial Sequence: Synthetic oligonucleotide
uacagcucgaaacaagguu

SEQ ID NO: 3278145 - RNA, 19 nt, Artificial Sequence
  Description of Artificial Sequence: Synthetic oligonucleotide
uucaaaguuucucucuuuu

SEQ ID NO: 3278146 - RNA, 19 nt, Artificial Sequence
  Description of Artificial Sequence: Synthetic oligonucleotide
gauaaccaauauaagccac

SEQ ID NO: 3278147 - RNA, 19 nt, Artificial Sequence
  Description of Artificial Sequence: Synthetic oligonucleotide
uuacagguuuguuagguuu

SEQ ID NO: 3278148 - RNA, 19 nt, Artificial Sequence
  Description of Artificial Sequence: Synthetic oligonucleotide
ucuuguguugcauguagau

SEQ ID NO: 3278149 - RNA, 19 nt, Artificial Sequence
  Description of Artificial Sequence: Synthetic oligonucleotide
acgucuuugacacacaggg

SEQ ID NO: 3278150 - RNA, 19 nt, Artificial Sequence
  Description of Artificial Sequence: Synthetic oligonucleotide
uggacaguagccccgaggc

SEQ ID NO: 3278151 - RNA, 19 nt, Artificial Sequence
  Description of Artificial Sequence: Synthetic oligonucleotide
agugcuggcgacucggagc

SEQ ID NO: 3278152 - RNA, 19 nt, Artificial Sequence
  Description of Artificial Sequence: Synthetic oligonucleotide
agggcaaggcuccuuaggc

SEQ ID NO: 3278153 - RNA, 19 nt, Artificial Sequence
  Description of Artificial Sequence: Synthetic oligonucleotide
uacacuggaaagucccugg

SEQ ID NO: 3278154 - RNA, 19 nt, Artificial Sequence
  Description of Artificial Sequence: Synthetic oligonucleotide
aagcguagcgguccgguuc

SEQ ID NO: 3278155 - RNA, 19 nt, Artificial Sequence
  Description of Artificial Sequence: Synthetic oligonucleotide
cauuccgccucccacagcg

SEQ ID NO: 3278156 - RNA, 19 nt, Artificial Sequence
  Description of Artificial Sequence: Synthetic oligonucleotide
gucuuugacacacagggca

SEQ ID NO: 3278157 - RNA, 19 nt, Artificial Sequence
  Description of Artificial Sequence: Synthetic oligonucleotide
acuggaaagucccugggcu

SEQ ID NO: 3278158 - RNA, 19 nt, Artificial Sequence
  Description of Artificial Sequence: Synthetic oligonucleotide
gaagcuggacaguagcccc

SEQ ID NO: 3278159 - RNA, 19 nt, Artificial Sequence
  Description of Artificial Sequence: Synthetic oligonucleotide
ucagggcucaggccgaagg

SEQ ID NO: 3278160 - RNA, 19 nt, Artificial Sequence
  Description of Artificial Sequence: Synthetic oligonucleotide
uccgccuuacacuggaaag

SEQ ID NO: 3278161 - RNA, 19 nt, Artificial Sequence
  Description of Artificial Sequence: Synthetic oligonucleotide
ucccacagcgacaaggaga

SEQ ID NO: 3278162 - RNA, 19 nt, Artificial Sequence
  Description of Artificial Sequence: Synthetic oligonucleotide
uggagcgcaucuccaagcg

SEQ ID NO: 3278163 - RNA, 19 nt, Artificial Sequence
  Description of Artificial Sequence: Synthetic oligonucleotide
ucacgucuuugacacacag

SEQ ID NO: 3278164 - RNA, 19 nt, Artificial Sequence
  Description of Artificial Sequence: Synthetic oligonucleotide
guugaguugccgcuggcag

SEQ ID NO: 3278165 - RNA, 19 nt, Artificial Sequence
  Description of Artificial Sequence: Synthetic oligonucleotide
accuguggaagcuggacag

SEQ ID NO: 3278166 - RNA, 19 nt, Artificial Sequence
  Description of Artificial Sequence: Synthetic oligonucleotide
agcguagcgguccgguucc

SEQ ID NO: 3278167 - RNA, 19 nt, Artificial Sequence
  Description of Artificial Sequence: Synthetic oligonucleotide
uuugacacacagggcaagg

SEQ ID NO: 3278168 - RNA, 19 nt, Artificial Sequence
  Description of Artificial Sequence: Synthetic oligonucleotide
ugggguucagggcucaggc

SEQ ID NO: 3278169 - RNA, 19 nt, Artificial Sequence
  Description of Artificial Sequence: Synthetic oligonucleotide
ugacacacagggcaaggcu

SEQ ID NO: 3278170 - RNA, 19 nt, Artificial Sequence
  Description of Artificial Sequence: Synthetic oligonucleotide
gacaguagccccgaggcgc

SEQ ID NO: 3278171 - RNA, 19 nt, Artificial Sequence
  Description of Artificial Sequence: Synthetic oligonucleotide
uaggcuggagcgcaucucc

SEQ ID NO: 3278172 - RNA, 19 nt, Artificial Sequence
  Description of Artificial Sequence: Synthetic oligonucleotide
uguggaagcuggacaguag

SEQ ID NO: 3278173 - RNA, 19 nt, Artificial Sequence
  Description of Artificial Sequence: Synthetic oligonucleotide
uggaagcuggacaguagcc

SEQ ID NO: 3278174 - RNA, 19 nt, Artificial Sequence
  Description of Artificial Sequence: Synthetic oligonucleotide
agcgucgaccuguggaagc

SEQ ID NO: 3278175 - RNA, 19 nt, Artificial Sequence
  Description of Artificial Sequence: Synthetic oligonucleotide
ugggcuguugaguugccgc

SEQ ID NO: 3278176 - RNA, 19 nt, Artificial Sequence
  Description of Artificial Sequence: Synthetic oligonucleotide
ucuuugacacacagggcaa

SEQ ID NO: 3278177 - RNA, 19 nt, Artificial Sequence
  Description of Artificial Sequence: Synthetic oligonucleotide
aaggagacguccgccuuac

SEQ ID NO: 3278178 - RNA, 19 nt, Artificial Sequence
  Description of Artificial Sequence: Synthetic oligonucleotide
ggguucagggcucaggccg

SEQ ID NO: 3278179 - RNA, 19 nt, Artificial Sequence
  Description of Artificial Sequence: Synthetic oligonucleotide
agggcauuccgccucccac

SEQ ID NO: 3278180 - RNA, 19 nt, Artificial Sequence
  Description of Artificial Sequence: Synthetic oligonucleotide
gugcuggcgacucggagcg

SEQ ID NO: 3278181 - RNA, 19 nt, Artificial Sequence
  Description of Artificial Sequence: Synthetic oligonucleotide
ggcuccuuaggcuggagcg

SEQ ID NO: 3278182 - RNA, 19 nt, Artificial Sequence
  Description of Artificial Sequence: Synthetic oligonucleotide
agacguccgccuuacacug

SEQ ID NO: 3278183 - RNA, 19 nt, Artificial Sequence
  Description of Artificial Sequence: Synthetic oligonucleotide
acacuggaaagucccuggg

SEQ ID NO: 3278184 - RNA, 19 nt, Artificial Sequence
  Description of Artificial Sequence: Synthetic oligonucleotide
guggaagcuggacaguagc

SEQ ID NO: 3278185 - RNA, 19 nt, Artificial Sequence
  Description of Artificial Sequence: Synthetic oligonucleotide
ccuuacacuggaaaguccc

SEQ ID NO: 3278186 - RNA, 19 nt, Artificial Sequence
  Description of Artificial Sequence: Synthetic oligonucleotide
ucuccaagcguagcggucc

SEQ ID NO: 3278187 - RNA, 19 nt, Artificial Sequence
  Description of Artificial Sequence: Synthetic oligonucleotide
aaagucccugggcuguuga

SEQ ID NO: 3278188 - RNA, 19 nt, Artificial Sequence
  Description of Artificial Sequence: Synthetic oligonucleotide
uuacacuggaaagucccug

SEQ ID NO: 3278189 - RNA, 19 nt, Artificial Sequence
  Description of Artificial Sequence: Synthetic oligonucleotide
aggcuccuuaggcuggagc

SEQ ID NO: 3278190 - RNA, 19 nt, Artificial Sequence
  Description of Artificial Sequence: Synthetic oligonucleotide
acacacagggcaaggcucc

SEQ ID NO: 3278191 - RNA, 19 nt, Artificial Sequence
  Description of Artificial Sequence: Synthetic oligonucleotide
cacgucuuugacacacagg

SEQ ID NO: 3278192 - RNA, 19 nt, Artificial Sequence
  Description of Artificial Sequence: Synthetic oligonucleotide
uugaguugccgcuggcagc

SEQ ID NO: 3278193 - RNA, 19 nt, Artificial Sequence
  Description of Artificial Sequence: Synthetic oligonucleotide
uucggggucacgucuuuga

SEQ ID NO: 3278194 - RNA, 19 nt, Artificial Sequence
  Description of Artificial Sequence: Synthetic oligonucleotide
ggggucacgucuuugacac

SEQ ID NO: 3278195 - RNA, 19 nt, Artificial Sequence
  Description of Artificial Sequence: Synthetic oligonucleotide
ugaguugccgcuggcagcu

SEQ ID NO: 3278196 - RNA, 19 nt, Artificial Sequence
  Description of Artificial Sequence: Synthetic oligonucleotide
uccgguuccgacagggagu

SEQ ID NO: 3278197 - RNA, 19 nt, Artificial Sequence
  Description of Artificial Sequence: Synthetic oligonucleotide
cuggacaguagccccgagg

SEQ ID NO: 3278198 - RNA, 19 nt, Artificial Sequence
  Description of Artificial Sequence: Synthetic oligonucleotide
agcucugcagguucggggu

SEQ ID NO: 3278199 - RNA, 19 nt, Artificial Sequence
  Description of Artificial Sequence: Synthetic oligonucleotide
agggcucaggccgaagggc

SEQ ID NO: 3278200 - RNA, 19 nt, Artificial Sequence
  Description of Artificial Sequence: Synthetic oligonucleotide
aagucccugggcuguugag

SEQ ID NO: 3278201 - RNA, 19 nt, Artificial Sequence
  Description of Artificial Sequence: Synthetic oligonucleotide
cuggagcgcaucuccaagc

SEQ ID NO: 3278202 - RNA, 19 nt, Artificial Sequence
  Description of Artificial Sequence: Synthetic oligonucleotide
agcgguccgguuccgacag

SEQ ID NO: 3278203 - RNA, 19 nt, Artificial Sequence
  Description of Artificial Sequence: Synthetic oligonucleotide
guccgguuccgacagggag

SEQ ID NO: 3278204 - RNA, 19 nt, Artificial Sequence
  Description of Artificial Sequence: Synthetic oligonucleotide
cagcucugcagguucgggg

SEQ ID NO: 3278205 - RNA, 19 nt, Artificial Sequence
  Description of Artificial Sequence: Synthetic oligonucleotide
uugacacacagggcaaggc

SEQ ID NO: 3278206 - RNA, 19 nt, Artificial Sequence
  Description of Artificial Sequence: Synthetic oligonucleotide
uguugaguugccgcuggca

SEQ ID NO: 3278207 - RNA, 19 nt, Artificial Sequence
  Description of Artificial Sequence: Synthetic oligonucleotide
gacacacagggcaaggcuc

SEQ ID NO: 3278208 - RNA, 19 nt, Artificial Sequence
  Description of Artificial Sequence: Synthetic oligonucleotide
gaccuguggaagcuggaca

SEQ ID NO: 3278209 - RNA, 19 nt, Artificial Sequence
  Description of Artificial Sequence: Synthetic oligonucleotide
aagcuggacaguagccccg

SEQ ID NO: 3278210 - RNA, 19 nt, Artificial Sequence
  Description of Artificial Sequence: Synthetic oligonucleotide
cacuggaaagucccugggc

SEQ ID NO: 3278211 - RNA, 19 nt, Artificial Sequence
  Description of Artificial Sequence: Synthetic oligonucleotide
ggcaaggcuccuuaggcug

SEQ ID NO: 3278212 - RNA, 19 nt, Artificial Sequence
  Description of Artificial Sequence: Synthetic oligonucleotide
cuggaaagucccugggcug

SEQ ID NO: 3278213 - RNA, 19 nt, Artificial Sequence
  Description of Artificial Sequence: Synthetic oligonucleotide
ugcagguucggggucacgu

SEQ ID NO: 3278214 - RNA, 19 nt, Artificial Sequence
  Description of Artificial Sequence: Synthetic oligonucleotide
cagggcaaggcuccuuagg

SEQ ID NO: 3278215 - RNA, 19 nt, Artificial Sequence
  Description of Artificial Sequence: Synthetic oligonucleotide
agcgacaaggagacguccg

SEQ ID NO: 3278216 - RNA, 19 nt, Artificial Sequence
  Description of Artificial Sequence: Synthetic oligonucleotide
uugggguucagggcucagg

SEQ ID NO: 3278217 - RNA, 19 nt, Artificial Sequence
  Description of Artificial Sequence: Synthetic oligonucleotide
ggagacguccgccuuacac

SEQ ID NO: 3278218 - RNA, 19 nt, Artificial Sequence
  Description of Artificial Sequence: Synthetic oligonucleotide
uggaaagucccugggcugu

SEQ ID NO: 3278219 - RNA, 19 nt, Artificial Sequence
  Description of Artificial Sequence: Synthetic oligonucleotide
uggcagcucugcagguucg

SEQ ID NO: 3278220 - RNA, 19 nt, Artificial Sequence
  Description of Artificial Sequence: Synthetic oligonucleotide
aggccgaagggcauuccgc

SEQ ID NO: 3278221 - RNA, 19 nt, Artificial Sequence
  Description of Artificial Sequence: Synthetic oligonucleotide
uuccgacagggagugcugg

SEQ ID NO: 3278222 - RNA, 19 nt, Artificial Sequence
  Description of Artificial Sequence: Synthetic oligonucleotide
gagacguccgccuuacacu

SEQ ID NO: 3278223 - RNA, 19 nt, Artificial Sequence
  Description of Artificial Sequence: Synthetic oligonucleotide
cuuugacacacagggcaag

SEQ ID NO: 3278224 - RNA, 19 nt, Artificial Sequence
  Description of Artificial Sequence: Synthetic oligonucleotide
gagugcuggcgacucggag

SEQ ID NO: 3278225 - RNA, 19 nt, Artificial Sequence
  Description of Artificial Sequence: Synthetic oligonucleotide
cccacagcgacaaggagac

SEQ ID NO: 3278226 - RNA, 19 nt, Artificial Sequence
  Description of Artificial Sequence: Synthetic oligonucleotide
ggaagcuggacaguagccc

SEQ ID NO: 3278227 - RNA, 19 nt, Artificial Sequence
  Description of Artificial Sequence: Synthetic oligonucleotide
caggccgaagggcauuccg

SEQ ID NO: 3278228 - RNA, 19 nt, Artificial Sequence
  Description of Artificial Sequence: Synthetic oligonucleotide
cagggcucaggccgaaggg

SEQ ID NO: 3278229 - RNA, 19 nt, Artificial Sequence
  Description of Artificial Sequence: Synthetic oligonucleotide
gucgaccuguggaagcugg

SEQ ID NO: 3278230 - RNA, 19 nt, Artificial Sequence
  Description of Artificial Sequence: Synthetic oligonucleotide
aagggcauuccgccuccca

SEQ ID NO: 3278231 - RNA, 19 nt, Artificial Sequence
  Description of Artificial Sequence: Synthetic oligonucleotide
acagcgacaaggagacguc

SEQ ID NO: 3278232 - RNA, 19 nt, Artificial Sequence
  Description of Artificial Sequence: Synthetic oligonucleotide
ucggggucacgucuuugac

SEQ ID NO: 3278233 - RNA, 19 nt, Artificial Sequence
  Description of Artificial Sequence: Synthetic oligonucleotide
gcuguugaguugccgcugg

SEQ ID NO: 3278234 - RNA, 19 nt, Artificial Sequence
  Description of Artificial Sequence: Synthetic oligonucleotide
acagggcaaggcuccuuag

SEQ ID NO: 3278235 - RNA, 19 nt, Artificial Sequence
  Description of Artificial Sequence: Synthetic oligonucleotide
uuccgccucccacagcgac

SEQ ID NO: 3278236 - RNA, 19 nt, Artificial Sequence
  Description of Artificial Sequence: Synthetic oligonucleotide
uccgacagggagugcuggc

SEQ ID NO: 3278237 - RNA, 19 nt, Artificial Sequence
  Description of Artificial Sequence: Synthetic oligonucleotide
ggucacgucuuugacacac

SEQ ID NO: 3278238 - RNA, 19 nt, Artificial Sequence
  Description of Artificial Sequence: Synthetic oligonucleotide
gacagggagugcuggcgac

SEQ ID NO: 3278239 - RNA, 19 nt, Artificial Sequence
  Description of Artificial Sequence: Synthetic oligonucleotide
cuggcagcucugcagguuc

SEQ ID NO: 3278240 - RNA, 19 nt, Artificial Sequence
  Description of Artificial Sequence: Synthetic oligonucleotide
guagcgguccgguuccgac

SEQ ID NO: 3278241 - RNA, 19 nt, Artificial Sequence
  Description of Artificial Sequence: Synthetic oligonucleotide
gacaaggagacguccgccu

SEQ ID NO: 3278242 - RNA, 19 nt, Artificial Sequence
  Description of Artificial Sequence: Synthetic oligonucleotide
uagcgguccgguuccgaca

SEQ ID NO: 3278243 - RNA, 19 nt, Artificial Sequence
  Description of Artificial Sequence: Synthetic oligonucleotide
gcaucuccaagcguagcgg

SEQ ID NO: 3278244 - RNA, 19 nt, Artificial Sequence
  Description of Artificial Sequence: Synthetic oligonucleotide
aucuccaagcguagcgguc

SEQ ID NO: 3278245 - RNA, 19 nt, Artificial Sequence
  Description of Artificial Sequence: Synthetic oligonucleotide
acguccgccuuacacugga

SEQ ID NO: 3278246 - RNA, 19 nt, Artificial Sequence
  Description of Artificial Sequence: Synthetic oligonucleotide
aguagccccgaggcgcggc

SEQ ID NO: 3278247 - RNA, 19 nt, Artificial Sequence
  Description of Artificial Sequence: Synthetic oligonucleotide
ucgaccuguggaagcugga

SEQ ID NO: 3278248 - RNA, 19 nt, Artificial Sequence
  Description of Artificial Sequence: Synthetic oligonucleotide
acaguagccccgaggcgcg

SEQ ID NO: 3278249 - RNA, 19 nt, Artificial Sequence
  Description of Artificial Sequence: Synthetic oligonucleotide
aacuugaacacccacaucc

SEQ ID NO: 3278250 - RNA, 19 nt, Artificial Sequence
  Description of Artificial Sequence: Synthetic oligonucleotide
acaggaaccacacucaccc

SEQ ID NO: 3278251 - RNA, 19 nt, Artificial Sequence
  Description of Artificial Sequence: Synthetic oligonucleotide
aaggugguaauuugagucc

SEQ ID NO: 3278252 - RNA, 19 nt, Artificial Sequence
  Description of Artificial Sequence: Synthetic oligonucleotide
gauagaaauaugcuucagg

SEQ ID NO: 3278253 - RNA, 19 nt, Artificial Sequence
  Description of Artificial Sequence: Synthetic oligonucleotide
aaauuaaacgccgagagau

SEQ ID NO: 3278254 - RNA, 19 nt, Artificial Sequence
  Description of Artificial Sequence: Synthetic oligonucleotide
agagauuucauccaccuug

SEQ ID NO: 3278255 - RNA, 19 nt, Artificial Sequence
  Description of Artificial Sequence: Synthetic oligonucleotide
auagaaauaugcuucaggu

SEQ ID NO: 3278256 - RNA, 19 nt, Artificial Sequence
  Description of Artificial Sequence: Synthetic oligonucleotide
uuugacuggaguaacauau

SEQ ID NO: 3278257 - RNA, 19 nt, Artificial Sequence
  Description of Artificial Sequence: Synthetic oligonucleotide
aguucauacguauggacac

SEQ ID NO: 3278258 - RNA, 19 nt, Artificial Sequence
  Description of Artificial Sequence: Synthetic oligonucleotide
uaacauauccuuucuuucg

SEQ ID NO: 3278259 - RNA, 19 nt, Artificial Sequence
  Description of Artificial Sequence: Synthetic oligonucleotide
auuucauccaccuugcugu

SEQ ID NO: 3278260 - RNA, 19 nt, Artificial Sequence
  Description of Artificial Sequence: Synthetic oligonucleotide
uuucccaaauuaaacgccg

SEQ ID NO: 3278261 - RNA, 19 nt, Artificial Sequence
  Description of Artificial Sequence: Synthetic oligonucleotide
agaaauaugcuucagguuu

SEQ ID NO: 3278262 - RNA, 19 nt, Artificial Sequence
  Description of Artificial Sequence: Synthetic oligonucleotide
gaaggugguaauuugaguc

SEQ ID NO: 3278263 - RNA, 19 nt, Artificial Sequence
  Description of Artificial Sequence: Synthetic oligonucleotide
agcagcagaaacuugaaca

SEQ ID NO: 3278264 - RNA, 19 nt, Artificial Sequence
  Description of Artificial Sequence: Synthetic oligonucleotide
ucucccaagugauucaugg

SEQ ID NO: 3278265 - RNA, 19 nt, Artificial Sequence
  Description of Artificial Sequence: Synthetic oligonucleotide
auauccuuucuuucgauag

SEQ ID NO: 3278266 - RNA, 19 nt, Artificial Sequence
  Description of Artificial Sequence: Synthetic oligonucleotide
ugugggagugagaaggugg

SEQ ID NO: 3278267 - RNA, 19 nt, Artificial Sequence
  Description of Artificial Sequence: Synthetic oligonucleotide
guuauggauagaaauaugc

SEQ ID NO: 3278268 - RNA, 19 nt, Artificial Sequence
  Description of Artificial Sequence: Synthetic oligonucleotide
uacugugggagugagaagg

SEQ ID NO: 3278269 - RNA, 19 nt, Artificial Sequence
  Description of Artificial Sequence: Synthetic oligonucleotide
uuuucccaaauuaaacgcc

SEQ ID NO: 3278270 - RNA, 19 nt, Artificial Sequence
  Description of Artificial Sequence: Synthetic oligonucleotide
uuauggauagaaauaugcu

SEQ ID NO: 3278271 - RNA, 19 nt, Artificial Sequence
  Description of Artificial Sequence: Synthetic oligonucleotide
ucuuccauagcucccacug

SEQ ID NO: 3278272 - RNA, 19 nt, Artificial Sequence
  Description of Artificial Sequence: Synthetic oligonucleotide
auggauagaaauaugcuuc

SEQ ID NO: 3278273 - RNA, 19 nt, Artificial Sequence
  Description of Artificial Sequence: Synthetic oligonucleotide
auucauggccaguucauac

SEQ ID NO: 3278274 - RNA, 19 nt, Artificial Sequence
  Description of Artificial Sequence: Synthetic oligonucleotide
ucccaagugauucauggcc

SEQ ID NO: 3278275 - RNA, 19 nt, Artificial Sequence
  Description of Artificial Sequence: Synthetic oligonucleotide
acgccgagagauuucaucc

SEQ ID NO: 3278276 - RNA, 19 nt, Artificial Sequence
  Description of Artificial Sequence: Synthetic oligonucleotide
uagucgauggcauucuggg

SEQ ID NO: 3278277 - RNA, 19 nt, Artificial Sequence
  Description of Artificial Sequence: Synthetic oligonucleotide
agugucauuacugugggag

SEQ ID NO: 3278278 - RNA, 19 nt, Artificial Sequence
  Description of Artificial Sequence: Synthetic oligonucleotide
uuauacugcuuccuauggg

SEQ ID NO: 3278279 - RNA, 19 nt, Artificial Sequence
  Description of Artificial Sequence: Synthetic oligonucleotide
uacguauggacaccaagag

SEQ ID NO: 3278280 - RNA, 19 nt, Artificial Sequence
  Description of Artificial Sequence: Synthetic oligonucleotide
accaagagaggccucaagg

SEQ ID NO: 3278281 - RNA, 19 nt, Artificial Sequence
  Description of Artificial Sequence: Synthetic oligonucleotide
aacgccgagagauuucauc

SEQ ID NO: 3278282 - RNA, 19 nt, Artificial Sequence
  Description of Artificial Sequence: Synthetic oligonucleotide
gagagugucauuacugugg

SEQ ID NO: 3278283 - RNA, 19 nt, Artificial Sequence
  Description of Artificial Sequence: Synthetic oligonucleotide
cacucugggauguagagag

SEQ ID NO: 3278284 - RNA, 19 nt, Artificial Sequence
  Description of Artificial Sequence: Synthetic oligonucleotide
agcagaaacuugaacaccc

SEQ ID NO: 3278285 - RNA, 19 nt, Artificial Sequence
  Description of Artificial Sequence: Synthetic oligonucleotide
uauacugcuuccuaugggu

SEQ ID NO: 3278286 - RNA, 19 nt, Artificial Sequence
  Description of Artificial Sequence: Synthetic oligonucleotide
uuccauagcucccacuggg

SEQ ID NO: 3278287 - RNA, 19 nt, Artificial Sequence
  Description of Artificial Sequence: Synthetic oligonucleotide
gauuucauccaccuugcug

SEQ ID NO: 3278288 - RNA, 19 nt, Artificial Sequence
  Description of Artificial Sequence: Synthetic oligonucleotide
uauggauagaaauaugcuu

SEQ ID NO: 3278289 - RNA, 19 nt, Artificial Sequence
  Description of Artificial Sequence: Synthetic oligonucleotide
ugacuggaguaacauaucc

SEQ ID NO: 3278290 - RNA, 19 nt, Artificial Sequence
  Description of Artificial Sequence: Synthetic oligonucleotide
uacagagcgaagcucaaca

SEQ ID NO: 3278291 - RNA, 19 nt, Artificial Sequence
  Description of Artificial Sequence: Synthetic oligonucleotide
uguuauacugcuuccuaug

SEQ ID NO: 3278292 - RNA, 19 nt, Artificial Sequence
  Description of Artificial Sequence: Synthetic oligonucleotide
aacauauccuuucuuucga

SEQ ID NO: 3278293 - RNA, 19 nt, Artificial Sequence
  Description of Artificial Sequence: Synthetic oligonucleotide
guuauacugcuuccuaugg

SEQ ID NO: 3278294 - RNA, 19 nt, Artificial Sequence
  Description of Artificial Sequence: Synthetic oligonucleotide
ugaaccacuucuucacugg

SEQ ID NO: 3278295 - RNA, 19 nt, Artificial Sequence
  Description of Artificial Sequence: Synthetic oligonucleotide
cuugcuguuauacugcuuc

SEQ ID NO: 3278296 - RNA, 19 nt, Artificial Sequence
  Description of Artificial Sequence: Synthetic oligonucleotide
uucauggccaguucauacg

SEQ ID NO: 3278297 - RNA, 19 nt, Artificial Sequence
  Description of Artificial Sequence: Synthetic oligonucleotide
agagcgaagcucaacaugg

SEQ ID NO: 3278298 - RNA, 19 nt, Artificial Sequence
  Description of Artificial Sequence: Synthetic oligonucleotide
aauuugaguccugucaucu

SEQ ID NO: 3278299 - RNA, 19 nt, Artificial Sequence
  Description of Artificial Sequence: Synthetic oligonucleotide
ucugccuucccacucuggg

SEQ ID NO: 3278300 - RNA, 19 nt, Artificial Sequence
  Description of Artificial Sequence: Synthetic oligonucleotide
aguaacauauccuuucuuu

SEQ ID NO: 3278301 - RNA, 19 nt, Artificial Sequence
  Description of Artificial Sequence: Synthetic oligonucleotide
agagugucauuacuguggg

SEQ ID NO: 3278302 - RNA, 19 nt, Artificial Sequence
  Description of Artificial Sequence: Synthetic oligonucleotide
uucuucacuggucaugucu

SEQ ID NO: 3278303 - RNA, 19 nt, Artificial Sequence
  Description of Artificial Sequence: Synthetic oligonucleotide
uaugggucuucuuccauag

SEQ ID NO: 3278304 - RNA, 19 nt, Artificial Sequence
  Description of Artificial Sequence: Synthetic oligonucleotide
ugagaaggugguaauuuga

SEQ ID NO: 3278305 - RNA, 19 nt, Artificial Sequence
  Description of Artificial Sequence: Synthetic oligonucleotide
cuccucaggguacagagcg

SEQ ID NO: 3278306 - RNA, 19 nt, Artificial Sequence
  Description of Artificial Sequence: Synthetic oligonucleotide
uguagagagugucauuacu

SEQ ID NO: 3278307 - RNA, 19 nt, Artificial Sequence
  Description of Artificial Sequence: Synthetic oligonucleotide
ugggucuucuuccauagcu

SEQ ID NO: 3278308 - RNA, 19 nt, Artificial Sequence
  Description of Artificial Sequence: Synthetic oligonucleotide
auuacugugggagugagaa

SEQ ID NO: 3278309 - RNA, 19 nt, Artificial Sequence
  Description of Artificial Sequence: Synthetic oligonucleotide
uuucuuucgauagucgaug

SEQ ID NO: 3278310 - RNA, 19 nt, Artificial Sequence
  Description of Artificial Sequence: Synthetic oligonucleotide
aucuccucaggguacagag

SEQ ID NO: 3278311 - RNA, 19 nt, Artificial Sequence
  Description of Artificial Sequence: Synthetic oligonucleotide
gucgauggcauucuggggc

SEQ ID NO: 3278312 - RNA, 19 nt, Artificial Sequence
  Description of Artificial Sequence: Synthetic oligonucleotide
uuugaguccugucaucuuc

SEQ ID NO: 3278313 - RNA, 19 nt, Artificial Sequence
  Description of Artificial Sequence: Synthetic oligonucleotide
aaacuugaacacccacauc

SEQ ID NO: 3278314 - RNA, 19 nt, Artificial Sequence
  Description of Artificial Sequence: Synthetic oligonucleotide
uggaguaacauauccuuuc

SEQ ID NO: 3278315 - RNA, 19 nt, Artificial Sequence
  Description of Artificial Sequence: Synthetic oligonucleotide
uucugaaccacuucuucac

SEQ ID NO: 3278316 - RNA, 19 nt, Artificial Sequence
  Description of Artificial Sequence: Synthetic oligonucleotide
uucuuucgauagucgaugg

SEQ ID NO: 3278317 - RNA, 19 nt, Artificial Sequence
  Description of Artificial Sequence: Synthetic oligonucleotide
cguauggacaccaagagag

SEQ ID NO: 3278318 - RNA, 19 nt, Artificial Sequence
  Description of Artificial Sequence: Synthetic oligonucleotide
aacaggaaccacacucacc

SEQ ID NO: 3278319 - RNA, 19 nt, Artificial Sequence
  Description of Artificial Sequence: Synthetic oligonucleotide
accacacucacccugauuu

SEQ ID NO: 3278320 - RNA, 19 nt, Artificial Sequence
  Description of Artificial Sequence: Synthetic oligonucleotide
uccuuucuuucgauagucg

SEQ ID NO: 3278321 - RNA, 19 nt, Artificial Sequence
  Description of Artificial Sequence: Synthetic oligonucleotide
uggauagaaauaugcuuca

SEQ ID NO: 3278322 - RNA, 19 nt, Artificial Sequence
  Description of Artificial Sequence: Synthetic oligonucleotide
acuggaguaacauauccuu

SEQ ID NO: 3278323 - RNA, 19 nt, Artificial Sequence
  Description of Artificial Sequence: Synthetic oligonucleotide
gguaauuugaguccuguca

SEQ ID NO: 3278324 - RNA, 19 nt, Artificial Sequence
  Description of Artificial Sequence: Synthetic oligonucleotide
ucccaaauuaaacgccgag

SEQ ID NO: 3278325 - RNA, 19 nt, Artificial Sequence
  Description of Artificial Sequence: Synthetic oligonucleotide
cuuccuaugggucuucuuc

SEQ ID NO: 3278326 - RNA, 19 nt, Artificial Sequence
  Description of Artificial Sequence: Synthetic oligonucleotide
ccaaauuaaacgccgagag

SEQ ID NO: 3278327 - RNA, 19 nt, Artificial Sequence
  Description of Artificial Sequence: Synthetic oligonucleotide
guaacauauccuuucuuuc

SEQ ID NO: 3278328 - RNA, 19 nt, Artificial Sequence
  Description of Artificial Sequence: Synthetic oligonucleotide
aguccugucaucuucugaa

SEQ ID NO: 3278329 - RNA, 19 nt, Artificial Sequence
  Description of Artificial Sequence: Synthetic oligonucleotide
uagagagugucauuacugu

SEQ ID NO: 3278330 - RNA, 19 nt, Artificial Sequence
  Description of Artificial Sequence: Synthetic oligonucleotide
uauggacaccaagagaggc

SEQ ID NO: 3278331 - RNA, 19 nt, Artificial Sequence
  Description of Artificial Sequence: Synthetic oligonucleotide
uggguauccagcaucuccu

SEQ ID NO: 3278332 - RNA, 19 nt, Artificial Sequence
  Description of Artificial Sequence: Synthetic oligonucleotide
uccugucaucuucugaacc

SEQ ID NO: 3278333 - RNA, 19 nt, Artificial Sequence
  Description of Artificial Sequence: Synthetic oligonucleotide
uuccuaugggucuucuucc

SEQ ID NO: 3278334 - RNA, 19 nt, Artificial Sequence
  Description of Artificial Sequence: Synthetic oligonucleotide
accacuucuucacugguca

SEQ ID NO: 3278335 - RNA, 19 nt, Artificial Sequence
  Description of Artificial Sequence: Synthetic oligonucleotide
gagaaggugguaauuugag

SEQ ID NO: 3278336 - RNA, 19 nt, Artificial Sequence
  Description of Artificial Sequence: Synthetic oligonucleotide
ucuucugaaccacuucuuc

SEQ ID NO: 3278337 - RNA, 19 nt, Artificial Sequence
  Description of Artificial Sequence: Synthetic oligonucleotide
cauacguauggacaccaag

SEQ ID NO: 3278338 - RNA, 19 nt, Artificial Sequence
  Description of Artificial Sequence: Synthetic oligonucleotide
ucuucacuggucaugucuc

SEQ ID NO: 3278339 - RNA, 19 nt, Artificial Sequence
  Description of Artificial Sequence: Synthetic oligonucleotide
guauccagcaucuccucag

SEQ ID NO: 3278340 - RNA, 19 nt, Artificial Sequence
  Description of Artificial Sequence: Synthetic oligonucleotide
auguagagagugucauuac

SEQ ID NO: 3278341 - RNA, 19 nt, Artificial Sequence
  Description of Artificial Sequence: Synthetic oligonucleotide
agugauucauggccaguuc

SEQ ID NO: 3278342 - RNA, 19 nt, Artificial Sequence
  Description of Artificial Sequence: Synthetic oligonucleotide
guagagagugucauuacug

SEQ ID NO: 3278343 - RNA, 19 nt, Artificial Sequence
  Description of Artificial Sequence: Synthetic oligonucleotide
uauccagcaucuccucagg

SEQ ID NO: 3278344 - RNA, 19 nt, Artificial Sequence
  Description of Artificial Sequence: Synthetic oligonucleotide
ucaggguacagagcgaagc

SEQ ID NO: 3278345 - RNA, 19 nt, Artificial Sequence
  Description of Artificial Sequence: Synthetic oligonucleotide
gauguagagagugucauua

SEQ ID NO: 3278346 - RNA, 19 nt, Artificial Sequence
  Description of Artificial Sequence: Synthetic oligonucleotide
ucauggccaguucauacgu

SEQ ID NO: 3278347 - RNA, 19 nt, Artificial Sequence
  Description of Artificial Sequence: Synthetic oligonucleotide
cuggguauccagcaucucc

SEQ ID NO: 3278348 - RNA, 19 nt, Artificial Sequence
  Description of Artificial Sequence: Synthetic oligonucleotide
aagguuauggauagaaaua

SEQ ID NO: 3278349 - RNA, 19 nt, Artificial Sequence
  Description of Artificial Sequence: Synthetic oligonucleotide
aaagauuucaccaauggcc

SEQ ID NO: 3278350 - RNA, 19 nt, Artificial Sequence
  Description of Artificial Sequence: Synthetic oligonucleotide
cuugaaacaaguuggaccg

SEQ ID NO: 3278351 - RNA, 19 nt, Artificial Sequence
  Description of Artificial Sequence: Synthetic oligonucleotide
augccaaugcucuacaucc

SEQ ID NO: 3278352 - RNA, 19 nt, Artificial Sequence
  Description of Artificial Sequence: Synthetic oligonucleotide
ucaaagauuucaccaaugg

SEQ ID NO: 3278353 - RNA, 19 nt, Artificial Sequence
  Description of Artificial Sequence: Synthetic oligonucleotide
uucucaaucaccucuggcg

SEQ ID NO: 3278354 - RNA, 19 nt, Artificial Sequence
  Description of Artificial Sequence: Synthetic oligonucleotide
uuggccaugagcuugaucu

SEQ ID NO: 3278355 - RNA, 19 nt, Artificial Sequence
  Description of Artificial Sequence: Synthetic oligonucleotide
uaguagucugcgaagaugg

SEQ ID NO: 3278356 - RNA, 19 nt, Artificial Sequence
  Description of Artificial Sequence: Synthetic oligonucleotide
ugcaaguucauauccauag

SEQ ID NO: 3278357 - RNA, 19 nt, Artificial Sequence
  Description of Artificial Sequence: Synthetic oligonucleotide
agauggaggagauuugugc

SEQ ID NO: 3278358 - RNA, 19 nt, Artificial Sequence
  Description of Artificial Sequence: Synthetic oligonucleotide
uuccucggagaucagaugg

SEQ ID NO: 3278359 - RNA, 19 nt, Artificial Sequence
  Description of Artificial Sequence: Synthetic oligonucleotide
uagucugcgaagauggagg

SEQ ID NO: 3278360 - RNA, 19 nt, Artificial Sequence
  Description of Artificial Sequence: Synthetic oligonucleotide
accaauggccuuucgagcc

SEQ ID NO: 3278361 - RNA, 19 nt, Artificial Sequence
  Description of Artificial Sequence: Synthetic oligonucleotide
ugagcuugaucucuucugg

SEQ ID NO: 3278362 - RNA, 19 nt, Artificial Sequence
  Description of Artificial Sequence: Synthetic oligonucleotide
ugcucuacaucccucacag

SEQ ID NO: 3278363 - RNA, 19 nt, Artificial Sequence
  Description of Artificial Sequence: Synthetic oligonucleotide
uuucugcaaguucauaucc

SEQ ID NO: 3278364 - RNA, 19 nt, Artificial Sequence
  Description of Artificial Sequence: Synthetic oligonucleotide
uaggaagccuucaugaggc

SEQ ID NO: 3278365 - RNA, 19 nt, Artificial Sequence
  Description of Artificial Sequence: Synthetic oligonucleotide
aacaaguuggaccgcaugu

SEQ ID NO: 3278366 - RNA, 19 nt, Artificial Sequence
  Description of Artificial Sequence: Synthetic oligonucleotide
ucaccaauggccuuucgag

SEQ ID NO: 3278367 - RNA, 19 nt, Artificial Sequence
  Description of Artificial Sequence: Synthetic oligonucleotide
ugguccaccaccuugcucc

SEQ ID NO: 3278368 - RNA, 19 nt, Artificial Sequence
  Description of Artificial Sequence: Synthetic oligonucleotide
uucuccauauuucucuucc

SEQ ID NO: 3278369 - RNA, 19 nt, Artificial Sequence
  Description of Artificial Sequence: Synthetic oligonucleotide
agcucauccgucuuccugc

SEQ ID NO: 3278370 - RNA, 19 nt, Artificial Sequence
  Description of Artificial Sequence: Synthetic oligonucleotide
gaucagaugguccaccacc

SEQ ID NO: 3278371 - RNA, 19 nt, Artificial Sequence
  Description of Artificial Sequence: Synthetic oligonucleotide
agcuugaucucuucuggcc

SEQ ID NO: 3278372 - RNA, 19 nt, Artificial Sequence
  Description of Artificial Sequence: Synthetic oligonucleotide
ucucuucuggcccucaaag

SEQ ID NO: 3278373 - RNA, 19 nt, Artificial Sequence
  Description of Artificial Sequence: Synthetic oligonucleotide
uccugcuuggccaugagcu

SEQ ID NO: 3278374 - RNA, 19 nt, Artificial Sequence
  Description of Artificial Sequence: Synthetic oligonucleotide
uggauuugcucuuuucucc

SEQ ID NO: 3278375 - RNA, 19 nt, Artificial Sequence
  Description of Artificial Sequence: Synthetic oligonucleotide
aaugcucuacaucccucac

SEQ ID NO: 3278376 - RNA, 19 nt, Artificial Sequence
  Description of Artificial Sequence: Synthetic oligonucleotide
guaggaagccuucaugagg

SEQ ID NO: 3278377 - RNA, 19 nt, Artificial Sequence
  Description of Artificial Sequence: Synthetic oligonucleotide
cuugcucccaaacuugugg

SEQ ID NO: 3278378 - RNA, 19 nt, Artificial Sequence
  Description of Artificial Sequence: Synthetic oligonucleotide
caaagauuucaccaauggc

SEQ ID NO: 3278379 - RNA, 19 nt, Artificial Sequence
  Description of Artificial Sequence: Synthetic oligonucleotide
aagauuucaccaauggccu

SEQ ID NO: 3278380 - RNA, 19 nt, Artificial Sequence
  Description of Artificial Sequence: Synthetic oligonucleotide
auauuucucuuccagugcu

SEQ ID NO: 3278381 - RNA, 19 nt, Artificial Sequence
  Description of Artificial Sequence: Synthetic oligonucleotide
ucuucuggcccucaaagau

SEQ ID NO: 3278382 - RNA, 19 nt, Artificial Sequence
  Description of Artificial Sequence: Synthetic oligonucleotide
aaacaaguuggaccgcaug

SEQ ID NO: 3278383 - RNA, 19 nt, Artificial Sequence
  Description of Artificial Sequence: Synthetic oligonucleotide
uguaggaagccuucaugag

SEQ ID NO: 3278384 - RNA, 19 nt, Artificial Sequence
  Description of Artificial Sequence: Synthetic oligonucleotide
ucucaaucaccucuggcgu

SEQ ID NO: 3278385 - RNA, 19 nt, Artificial Sequence
  Description of Artificial Sequence: Synthetic oligonucleotide
ucugcgaagauggaggaga

SEQ ID NO: 3278386 - RNA, 19 nt, Artificial Sequence
  Description of Artificial Sequence: Synthetic oligonucleotide
ugcucuuuucuccauauuu

SEQ ID NO: 3278387 - RNA, 19 nt, Artificial Sequence
  Description of Artificial Sequence: Synthetic oligonucleotide
gauggaggagauuugugca

SEQ ID NO: 3278388 - RNA, 19 nt, Artificial Sequence
  Description of Artificial Sequence: Synthetic oligonucleotide
uucaugaggcucuuugucu

SEQ ID NO: 3278389 - RNA, 19 nt, Artificial Sequence
  Description of Artificial Sequence: Synthetic oligonucleotide
agcuuucucaaucaccucu

SEQ ID NO: 3278390 - RNA, 19 nt, Artificial Sequence
  Description of Artificial Sequence: Synthetic oligonucleotide
ucuuccagugcuuucugca

SEQ ID NO: 3278391 - RNA, 19 nt, Artificial Sequence
  Description of Artificial Sequence: Synthetic oligonucleotide
auuugugcagggcucuggg

SEQ ID NO: 3278392 - RNA, 19 nt, Artificial Sequence
  Description of Artificial Sequence: Synthetic oligonucleotide
ccuugaaacaaguuggacc

SEQ ID NO: 3278393 - RNA, 19 nt, Artificial Sequence
  Description of Artificial Sequence: Synthetic oligonucleotide
cucuuugucuccuggggcg

SEQ ID NO: 3278394 - RNA, 19 nt, Artificial Sequence
  Description of Artificial Sequence: Synthetic oligonucleotide
cauauuucucuuccagugc

SEQ ID NO: 3278395 - RNA, 19 nt, Artificial Sequence
  Description of Artificial Sequence: Synthetic oligonucleotide
uuucucaaucaccucuggc

SEQ ID NO: 3278396 - RNA, 19 nt, Artificial Sequence
  Description of Artificial Sequence: Synthetic oligonucleotide
agugcuuucugcaaguuca

SEQ ID NO: 3278397 - RNA, 19 nt, Artificial Sequence
  Description of Artificial Sequence: Synthetic oligonucleotide
uucaccaauggccuuucga

SEQ ID NO: 3278398 - RNA, 19 nt, Artificial Sequence
  Description of Artificial Sequence: Synthetic oligonucleotide
aggagauuugugcagggcu

SEQ ID NO: 3278399 - RNA, 19 nt, Artificial Sequence
  Description of Artificial Sequence: Synthetic oligonucleotide
ucggagaucagauggucca

SEQ ID NO: 3278400 - RNA, 19 nt, Artificial Sequence
  Description of Artificial Sequence: Synthetic oligonucleotide
cuuucgagccuguuccucg

SEQ ID NO: 3278401 - RNA, 19 nt, Artificial Sequence
  Description of Artificial Sequence: Synthetic oligonucleotide
cuuccugccaugccaaugc

SEQ ID NO: 3278402 - RNA, 19 nt, Artificial Sequence
  Description of Artificial Sequence: Synthetic oligonucleotide
uguuccucggagaucagau

SEQ ID NO: 3278403 - RNA, 19 nt, Artificial Sequence
  Description of Artificial Sequence: Synthetic oligonucleotide
augagcuugaucucuucug

SEQ ID NO: 3278404 - RNA, 19 nt, Artificial Sequence
  Description of Artificial Sequence: Synthetic oligonucleotide
caaguuggaccgcaugugg

SEQ ID NO: 3278405 - RNA, 19 nt, Artificial Sequence
  Description of Artificial Sequence: Synthetic oligonucleotide
caaguucauauccauagca

SEQ ID NO: 3278406 - RNA, 19 nt, Artificial Sequence
  Description of Artificial Sequence: Synthetic oligonucleotide
caugugguagcccagguca

SEQ ID NO: 3278407 - RNA, 19 nt, Artificial Sequence
  Description of Artificial Sequence: Synthetic oligonucleotide
uccauauuucucuuccagu

SEQ ID NO: 3278408 - RNA, 19 nt, Artificial Sequence
  Description of Artificial Sequence: Synthetic oligonucleotide
cuuucugcaaguucauauc

SEQ ID NO: 3278409 - RNA, 19 nt, Artificial Sequence
  Description of Artificial Sequence: Synthetic oligonucleotide
acagcuuucucaaucaccu

SEQ ID NO: 3278410 - RNA, 19 nt, Artificial Sequence
  Description of Artificial Sequence: Synthetic oligonucleotide
uucugcaaguucauaucca

SEQ ID NO: 3278411 - RNA, 19 nt, Artificial Sequence
  Description of Artificial Sequence: Synthetic oligonucleotide
accucuggcguguaggaag

SEQ ID NO: 3278412 - RNA, 19 nt, Artificial Sequence
  Description of Artificial Sequence: Synthetic oligonucleotide
gucauaguagucugcgaag

SEQ ID NO: 3278413 - RNA, 19 nt, Artificial Sequence
  Description of Artificial Sequence: Synthetic oligonucleotide
agaugguccaccaccuugc

SEQ ID NO: 3278414 - RNA, 19 nt, Artificial Sequence
  Description of Artificial Sequence: Synthetic oligonucleotide
uuccagugcuuucugcaag

SEQ ID NO: 3278415 - RNA, 19 nt, Artificial Sequence
  Description of Artificial Sequence: Synthetic oligonucleotide
cacagcuuucucaaucacc

SEQ ID NO: 3278416 - RNA, 19 nt, Artificial Sequence
  Description of Artificial Sequence: Synthetic oligonucleotide
ucuuuucuccauauuucuc

SEQ ID NO: 3278417 - RNA, 19 nt, Artificial Sequence
  Description of Artificial Sequence: Synthetic oligonucleotide
aguucauauccauagcauu

SEQ ID NO: 3278418 - RNA, 19 nt, Artificial Sequence
  Description of Artificial Sequence: Synthetic oligonucleotide
cuccauauuucucuuccag

SEQ ID NO: 3278419 - RNA, 19 nt, Artificial Sequence
  Description of Artificial Sequence: Synthetic oligonucleotide
ucauaguagucugcgaaga

SEQ ID NO: 3278420 - RNA, 19 nt, Artificial Sequence
  Description of Artificial Sequence: Synthetic oligonucleotide
ucuggguccugcuuggcca

SEQ ID NO: 3278421 - RNA, 19 nt, Artificial Sequence
  Description of Artificial Sequence: Synthetic oligonucleotide
ucugcaaguucauauccau

SEQ ID NO: 3278422 - RNA, 19 nt, Artificial Sequence
  Description of Artificial Sequence: Synthetic oligonucleotide
uuuuccggugccaccgucc

SEQ ID NO: 3278423 - RNA, 19 nt, Artificial Sequence
  Description of Artificial Sequence: Synthetic oligonucleotide
guguaggaagccuucauga

SEQ ID NO: 3278424 - RNA, 19 nt, Artificial Sequence
  Description of Artificial Sequence: Synthetic oligonucleotide
cucaaagauuucaccaaug

SEQ ID NO: 3278425 - RNA, 19 nt, Artificial Sequence
  Description of Artificial Sequence: Synthetic oligonucleotide
auggaggagauuugugcag

SEQ ID NO: 3278426 - RNA, 19 nt, Artificial Sequence
  Description of Artificial Sequence: Synthetic oligonucleotide
ugaaacaaguuggaccgca

SEQ ID NO: 3278427 - RNA, 19 nt, Artificial Sequence
  Description of Artificial Sequence: Synthetic oligonucleotide
uugugcagggcucuggguc

SEQ ID NO: 3278428 - RNA, 19 nt, Artificial Sequence
  Description of Artificial Sequence: Synthetic oligonucleotide
uggaggagauuugugcagg

SEQ ID NO: 3278429 - RNA, 19 nt, Artificial Sequence
  Description of Artificial Sequence: Synthetic oligonucleotide
auaguagucugcgaagaug

SEQ ID NO: 3278430 - RNA, 19 nt, Artificial Sequence
  Description of Artificial Sequence: Synthetic oligonucleotide
agaucagaugguccaccac

SEQ ID NO: 3278431 - RNA, 19 nt, Artificial Sequence
  Description of Artificial Sequence: Synthetic oligonucleotide
uuugcucuuuucuccauau

SEQ ID NO: 3278432 - RNA, 19 nt, Artificial Sequence
  Description of Artificial Sequence: Synthetic oligonucleotide
aaguucauauccauagcau

SEQ ID NO: 3278433 - RNA, 19 nt, Artificial Sequence
  Description of Artificial Sequence: Synthetic oligonucleotide
ugcucccaaacuuguggcg

SEQ ID NO: 3278434 - RNA, 19 nt, Artificial Sequence
  Description of Artificial Sequence: Synthetic oligonucleotide
ucaugaggcucuuugucuc

SEQ ID NO: 3278435 - RNA, 19 nt, Artificial Sequence
  Description of Artificial Sequence: Synthetic oligonucleotide
cuucaugaggcucuuuguc

SEQ ID NO: 3278436 - RNA, 19 nt, Artificial Sequence
  Description of Artificial Sequence: Synthetic oligonucleotide
uugcucccaaacuuguggc

SEQ ID NO: 3278437 - RNA, 19 nt, Artificial Sequence
  Description of Artificial Sequence: Synthetic oligonucleotide
ugugcagggcucugggucc

SEQ ID NO: 3278438 - RNA, 19 nt, Artificial Sequence
  Description of Artificial Sequence: Synthetic oligonucleotide
uuucgagccuguuccucgg

SEQ ID NO: 3278439 - RNA, 19 nt, Artificial Sequence
  Description of Artificial Sequence: Synthetic oligonucleotide
gaggcucuuugucuccugg

SEQ ID NO: 3278440 - RNA, 19 nt, Artificial Sequence
  Description of Artificial Sequence: Synthetic oligonucleotide
ucauccgucuuccugccau

SEQ ID NO: 3278441 - RNA, 19 nt, Artificial Sequence
  Description of Artificial Sequence: Synthetic oligonucleotide
caggucauaguagucugcg

SEQ ID NO: 3278442 - RNA, 19 nt, Artificial Sequence
  Description of Artificial Sequence: Synthetic oligonucleotide
ccauauuucucuuccagug

SEQ ID NO: 3278443 - RNA, 19 nt, Artificial Sequence
  Description of Artificial Sequence: Synthetic oligonucleotide
gggccuugaaacaaguugg

SEQ ID NO: 3278444 - RNA, 19 nt, Artificial Sequence
  Description of Artificial Sequence: Synthetic oligonucleotide
caugccaaugcucuacauc

SEQ ID NO: 3278445 - RNA, 19 nt, Artificial Sequence
  Description of Artificial Sequence: Synthetic oligonucleotide
cucggagaucagauggucc

SEQ ID NO: 3278446 - RNA, 19 nt, Artificial Sequence
  Description of Artificial Sequence: Synthetic oligonucleotide
gauuugugcagggcucugg

SEQ ID NO: 3278447 - RNA, 19 nt, Artificial Sequence
  Description of Artificial Sequence: Synthetic oligonucleotide
cuuuucuccauauuucucu

SEQ ID NO: 3278448 - RNA, 19 nt, Artificial Sequence
  Description of Artificial Sequence: Synthetic oligonucleotide
aucaccucuggcguguagg

SEQ ID NO: 3278449 - RNA, 19 nt, Artificial Sequence
  Description of Artificial Sequence: Synthetic oligonucleotide
aauaaaacccacuugugac

SEQ ID NO: 3278450 - RNA, 19 nt, Artificial Sequence
  Description of Artificial Sequence: Synthetic oligonucleotide
uuuauaucagcacacaugu

SEQ ID NO: 3278451 - RNA, 19 nt, Artificial Sequence
  Description of Artificial Sequence: Synthetic oligonucleotide
accacuacagaaaagaugc

SEQ ID NO: 3278452 - RNA, 19 nt, Artificial Sequence
  Description of Artificial Sequence: Synthetic oligonucleotide
auuacuuuuauaucagcac

SEQ ID NO: 3278453 - RNA, 19 nt, Artificial Sequence
  Description of Artificial Sequence: Synthetic oligonucleotide
aacucuuauagucaacagg

SEQ ID NO: 3278454 - RNA, 19 nt, Artificial Sequence
  Description of Artificial Sequence: Synthetic oligonucleotide
aauguaaaguuguauauau

SEQ ID NO: 3278455 - RNA, 19 nt, Artificial Sequence
  Description of Artificial Sequence: Synthetic oligonucleotide
uaacgcaucaauaacagcu

SEQ ID NO: 3278456 - RNA, 19 nt, Artificial Sequence
  Description of Artificial Sequence: Synthetic oligonucleotide
aagauuauugcgaagaucu

SEQ ID NO: 3278457 - RNA, 19 nt, Artificial Sequence
  Description of Artificial Sequence: Synthetic oligonucleotide
auauuuuaauguuuguaac

SEQ ID NO: 3278458 - RNA, 19 nt, Artificial Sequence
  Description of Artificial Sequence: Synthetic oligonucleotide
uuuuauaucagcacacaug

SEQ ID NO: 3278459 - RNA, 19 nt, Artificial Sequence
  Description of Artificial Sequence: Synthetic oligonucleotide
auccaugcaagcuuaaagc

SEQ ID NO: 3278460 - RNA, 19 nt, Artificial Sequence
  Description of Artificial Sequence: Synthetic oligonucleotide
ucagagauaaggcuuuugg

SEQ ID NO: 3278461 - RNA, 19 nt, Artificial Sequence
  Description of Artificial Sequence: Synthetic oligonucleotide
uuaagaucgaccacagagg

SEQ ID NO: 3278462 - RNA, 19 nt, Artificial Sequence
  Description of Artificial Sequence: Synthetic oligonucleotide
uguaacagcaguuuggcac

SEQ ID NO: 3278463 - RNA, 19 nt, Artificial Sequence
  Description of Artificial Sequence: Synthetic oligonucleotide
auguuguucaaacuugagc

SEQ ID NO: 3278464 - RNA, 19 nt, Artificial Sequence
  Description of Artificial Sequence: Synthetic oligonucleotide
augguaacaaccuaacauc

SEQ ID NO: 3278465 - RNA, 19 nt, Artificial Sequence
  Description of Artificial Sequence: Synthetic oligonucleotide
aacaaccuaacauccagag

SEQ ID NO: 3278466 - RNA, 19 nt, Artificial Sequence
  Description of Artificial Sequence: Synthetic oligonucleotide
augacagaauuguugaugg

SEQ ID NO: 3278467 - RNA, 19 nt, Artificial Sequence
  Description of Artificial Sequence: Synthetic oligonucleotide
uaugcaaugaagauuuacu

SEQ ID NO: 3278468 - RNA, 19 nt, Artificial Sequence
  Description of Artificial Sequence: Synthetic oligonucleotide
uagaugauagguauggcug

SEQ ID NO: 3278469 - RNA, 19 nt, Artificial Sequence
  Description of Artificial Sequence: Synthetic oligonucleotide
acucuuauagucaacaggg

SEQ ID NO: 3278470 - RNA, 19 nt, Artificial Sequence
  Description of Artificial Sequence: Synthetic oligonucleotide
uauuuuaauguuuguaaca

SEQ ID NO: 3278471 - RNA, 19 nt, Artificial Sequence
  Description of Artificial Sequence: Synthetic oligonucleotide
uguuucaucgauuaaugga

SEQ ID NO: 3278472 - RNA, 19 nt, Artificial Sequence
  Description of Artificial Sequence: Synthetic oligonucleotide
uuguccacauccuuuaacg

SEQ ID NO: 3278473 - RNA, 19 nt, Artificial Sequence
  Description of Artificial Sequence: Synthetic oligonucleotide
auagucuguuucuagaauc

SEQ ID NO: 3278474 - RNA, 19 nt, Artificial Sequence
  Description of Artificial Sequence: Synthetic oligonucleotide
ugugugaacaaguuguagc

SEQ ID NO: 3278475 - RNA, 19 nt, Artificial Sequence
  Description of Artificial Sequence: Synthetic oligonucleotide
gaguaauucauagaaaaug

SEQ ID NO: 3278476 - RNA, 19 nt, Artificial Sequence
  Description of Artificial Sequence: Synthetic oligonucleotide
aaaagaugccccuggugac

SEQ ID NO: 3278477 - RNA, 19 nt, Artificial Sequence
  Description of Artificial Sequence: Synthetic oligonucleotide
uagacaugaaggauuauca

SEQ ID NO: 3278478 - RNA, 19 nt, Artificial Sequence
  Description of Artificial Sequence: Synthetic oligonucleotide
acacaugugacacauaccu

SEQ ID NO: 3278479 - RNA, 19 nt, Artificial Sequence
  Description of Artificial Sequence: Synthetic oligonucleotide
aaggaagaauucucuauag

SEQ ID NO: 3278480 - RNA, 19 nt, Artificial Sequence
  Description of Artificial Sequence: Synthetic oligonucleotide
ugugacugagcaaccaugg

SEQ ID NO: 3278481 - RNA, 19 nt, Artificial Sequence
  Description of Artificial Sequence: Synthetic oligonucleotide
cuuaaaacggcugaucagg

SEQ ID NO: 3278482 - RNA, 19 nt, Artificial Sequence
  Description of Artificial Sequence: Synthetic oligonucleotide
uaaagcugcauucugccug

SEQ ID NO: 3278483 - RNA, 19 nt, Artificial Sequence
  Description of Artificial Sequence: Synthetic oligonucleotide
uaauguuuguaacagcagu

SEQ ID NO: 3278484 - RNA, 19 nt, Artificial Sequence
  Description of Artificial Sequence: Synthetic oligonucleotide
aucacuucuccuuagcauc

SEQ ID NO: 3278485 - RNA, 19 nt, Artificial Sequence
  Description of Artificial Sequence: Synthetic oligonucleotide
uuccuucugacccagaacu

SEQ ID NO: 3278486 - RNA, 19 nt, Artificial Sequence
  Description of Artificial Sequence: Synthetic oligonucleotide
uuugacacgcaucccaugc

SEQ ID NO: 3278487 - RNA, 19 nt, Artificial Sequence
  Description of Artificial Sequence: Synthetic oligonucleotide
uuaaucuuggauuacuuuu

SEQ ID NO: 3278488 - RNA, 19 nt, Artificial Sequence
  Description of Artificial Sequence: Synthetic oligonucleotide
aucgaaggaccauuugucc

SEQ ID NO: 3278489 - RNA, 19 nt, Artificial Sequence
  Description of Artificial Sequence: Synthetic oligonucleotide
cuuaaagcugcauucugcc

SEQ ID NO: 3278490 - RNA, 19 nt, Artificial Sequence
  Description of Artificial Sequence: Synthetic oligonucleotide
aaauuguugguaguuccgg

SEQ ID NO: 3278491 - RNA, 19 nt, Artificial Sequence
  Description of Artificial Sequence: Synthetic oligonucleotide
aauaacagcugguggauaa

SEQ ID NO: 3278492 - RNA, 19 nt, Artificial Sequence
  Description of Artificial Sequence: Synthetic oligonucleotide
acuccugucuuauagagga

SEQ ID NO: 3278493 - RNA, 19 nt, Artificial Sequence
  Description of Artificial Sequence: Synthetic oligonucleotide
auagucauggauggcagcc

SEQ ID NO: 3278494 - RNA, 19 nt, Artificial Sequence
  Description of Artificial Sequence: Synthetic oligonucleotide
ugagagaaaagacaucgaa

SEQ ID NO: 3278495 - RNA, 19 nt, Artificial Sequence
  Description of Artificial Sequence: Synthetic oligonucleotide
uggauuacuuuuauaucag

SEQ ID NO: 3278496 - RNA, 19 nt, Artificial Sequence
  Description of Artificial Sequence: Synthetic oligonucleotide
auucuagcacuguugcugc

SEQ ID NO: 3278497 - RNA, 19 nt, Artificial Sequence
  Description of Artificial Sequence: Synthetic oligonucleotide
ugugauguuacagugugug

SEQ ID NO: 3278498 - RNA, 19 nt, Artificial Sequence
  Description of Artificial Sequence: Synthetic oligonucleotide
aaaggaagaauucucuaua

SEQ ID NO: 3278499 - RNA, 19 nt, Artificial Sequence
  Description of Artificial Sequence: Synthetic oligonucleotide
uaugacuagaugcuaggga

SEQ ID NO: 3278500 - RNA, 19 nt, Artificial Sequence
  Description of Artificial Sequence: Synthetic oligonucleotide
ugcguuugcaagcauagac

SEQ ID NO: 3278501 - RNA, 19 nt, Artificial Sequence
  Description of Artificial Sequence: Synthetic oligonucleotide
ugguaacaaccuaacaucc

SEQ ID NO: 3278502 - RNA, 19 nt, Artificial Sequence
  Description of Artificial Sequence: Synthetic oligonucleotide
uuugauguccgccuauaca

SEQ ID NO: 3278503 - RNA, 19 nt, Artificial Sequence
  Description of Artificial Sequence: Synthetic oligonucleotide
uaccuauuugaagacaagg

SEQ ID NO: 3278504 - RNA, 19 nt, Artificial Sequence
  Description of Artificial Sequence: Synthetic oligonucleotide
gauuauugcgaagaucucc

SEQ ID NO: 3278505 - RNA, 19 nt, Artificial Sequence
  Description of Artificial Sequence: Synthetic oligonucleotide
guagauuuucaauguaaag

SEQ ID NO: 3278506 - RNA, 19 nt, Artificial Sequence
  Description of Artificial Sequence: Synthetic oligonucleotide
cucuguuugacacgcaucc

SEQ ID NO: 3278507 - RNA, 19 nt, Artificial Sequence
  Description of Artificial Sequence: Synthetic oligonucleotide
uugauguccgccuauacau

SEQ ID NO: 3278508 - RNA, 19 nt, Artificial Sequence
  Description of Artificial Sequence: Synthetic oligonucleotide
agauagcuggauccgaccg

SEQ ID NO: 3278509 - RNA, 19 nt, Artificial Sequence
  Description of Artificial Sequence: Synthetic oligonucleotide
augguugacuuucugucac

SEQ ID NO: 3278510 - RNA, 19 nt, Artificial Sequence
  Description of Artificial Sequence: Synthetic oligonucleotide
gaugacagaauuguugaug

SEQ ID NO: 3278511 - RNA, 19 nt, Artificial Sequence
  Description of Artificial Sequence: Synthetic oligonucleotide
uaagcugcacucaaguggu

SEQ ID NO: 3278512 - RNA, 19 nt, Artificial Sequence
  Description of Artificial Sequence: Synthetic oligonucleotide
gauguuucaucgauuaaug

SEQ ID NO: 3278513 - RNA, 19 nt, Artificial Sequence
  Description of Artificial Sequence: Synthetic oligonucleotide
gagagaaaagacaucgaag

SEQ ID NO: 3278514 - RNA, 19 nt, Artificial Sequence
  Description of Artificial Sequence: Synthetic oligonucleotide
uggcuguagauuuucaaug

SEQ ID NO: 3278515 - RNA, 19 nt, Artificial Sequence
  Description of Artificial Sequence: Synthetic oligonucleotide
ugacccagaacucuugaca

SEQ ID NO: 3278516 - RNA, 19 nt, Artificial Sequence
  Description of Artificial Sequence: Synthetic oligonucleotide
cuucuccuuagcaucaucc

SEQ ID NO: 3278517 - RNA, 19 nt, Artificial Sequence
  Description of Artificial Sequence: Synthetic oligonucleotide
gauuacuuuuauaucagca

SEQ ID NO: 3278518 - RNA, 19 nt, Artificial Sequence
  Description of Artificial Sequence: Synthetic oligonucleotide
ugucgugugaagguggagg

SEQ ID NO: 3278519 - RNA, 19 nt, Artificial Sequence
  Description of Artificial Sequence: Synthetic oligonucleotide
auagaggagaaaauggcag

SEQ ID NO: 3278520 - RNA, 19 nt, Artificial Sequence
  Description of Artificial Sequence: Synthetic oligonucleotide
acagagcacacagaggagc

SEQ ID NO: 3278521 - RNA, 19 nt, Artificial Sequence
  Description of Artificial Sequence: Synthetic oligonucleotide
cucgucuuccugcagaagg

SEQ ID NO: 3278522 - RNA, 19 nt, Artificial Sequence
  Description of Artificial Sequence: Synthetic oligonucleotide
auguuucaucgauuaaugg

SEQ ID NO: 3278523 - RNA, 19 nt, Artificial Sequence
  Description of Artificial Sequence: Synthetic oligonucleotide
ucauucacaccaaggaagu

SEQ ID NO: 3278524 - RNA, 19 nt, Artificial Sequence
  Description of Artificial Sequence: Synthetic oligonucleotide
ugcuuagaagccauuccag

SEQ ID NO: 3278525 - RNA, 19 nt, Artificial Sequence
  Description of Artificial Sequence: Synthetic oligonucleotide
auguacacagauucuagca

SEQ ID NO: 3278526 - RNA, 19 nt, Artificial Sequence
  Description of Artificial Sequence: Synthetic oligonucleotide
uaaugcacagucuggguga

SEQ ID NO: 3278527 - RNA, 19 nt, Artificial Sequence
  Description of Artificial Sequence: Synthetic oligonucleotide
ugaguaauucauagaaaau

SEQ ID NO: 3278528 - RNA, 19 nt, Artificial Sequence
  Description of Artificial Sequence: Synthetic oligonucleotide
cucuuuuaugcaaugaaga

SEQ ID NO: 3278529 - RNA, 19 nt, Artificial Sequence
  Description of Artificial Sequence: Synthetic oligonucleotide
aauuguugguaguuccggu

SEQ ID NO: 3278530 - RNA, 19 nt, Artificial Sequence
  Description of Artificial Sequence: Synthetic oligonucleotide
cagacucaugguaacaacc

SEQ ID NO: 3278531 - RNA, 19 nt, Artificial Sequence
  Description of Artificial Sequence: Synthetic oligonucleotide
uuagacaugaaggauuauc

SEQ ID NO: 3278532 - RNA, 19 nt, Artificial Sequence
  Description of Artificial Sequence: Synthetic oligonucleotide
cacuagaugauagguaugg

SEQ ID NO: 3278533 - RNA, 19 nt, Artificial Sequence
  Description of Artificial Sequence: Synthetic oligonucleotide
uuacgaaggaugugcauga

SEQ ID NO: 3278534 - RNA, 19 nt, Artificial Sequence
  Description of Artificial Sequence: Synthetic oligonucleotide
cacagcaucugacugaaug

SEQ ID NO: 3278535 - RNA, 19 nt, Artificial Sequence
  Description of Artificial Sequence: Synthetic oligonucleotide
ucuaacuguuugaccagag

SEQ ID NO: 3278536 - RNA, 19 nt, Artificial Sequence
  Description of Artificial Sequence: Synthetic oligonucleotide
gaagacaaggauagcagug

SEQ ID NO: 3278537 - RNA, 19 nt, Artificial Sequence
  Description of Artificial Sequence: Synthetic oligonucleotide
cuuagaagccauuccaguc

SEQ ID NO: 3278538 - RNA, 19 nt, Artificial Sequence
  Description of Artificial Sequence: Synthetic oligonucleotide
uaaucuuggauuacuuuua

SEQ ID NO: 3278539 - RNA, 19 nt, Artificial Sequence
  Description of Artificial Sequence: Synthetic oligonucleotide
uuucagucauauccgugag

SEQ ID NO: 3278540 - RNA, 19 nt, Artificial Sequence
  Description of Artificial Sequence: Synthetic oligonucleotide
ugucccaccagucugggau

SEQ ID NO: 3278541 - RNA, 19 nt, Artificial Sequence
  Description of Artificial Sequence: Synthetic oligonucleotide
guaaugcacagucugggug

SEQ ID NO: 3278542 - RNA, 19 nt, Artificial Sequence
  Description of Artificial Sequence: Synthetic oligonucleotide
ugugcagcaucagagauaa

SEQ ID NO: 3278543 - RNA, 19 nt, Artificial Sequence
  Description of Artificial Sequence: Synthetic oligonucleotide
uagaggagaaaauggcagc

SEQ ID NO: 3278544 - RNA, 19 nt, Artificial Sequence
  Description of Artificial Sequence: Synthetic oligonucleotide
uagcaguguacacagcccc

SEQ ID NO: 3278545 - RNA, 19 nt, Artificial Sequence
  Description of Artificial Sequence: Synthetic oligonucleotide
aaggcuuuuggcuucucaa

SEQ ID NO: 3278546 - RNA, 19 nt, Artificial Sequence
  Description of Artificial Sequence: Synthetic oligonucleotide
cagagauaaggcuuuuggc

SEQ ID NO: 3278547 - RNA, 19 nt, Artificial Sequence
  Description of Artificial Sequence: Synthetic oligonucleotide
uugugacugagcaaccaug

SEQ ID NO: 3278548 - RNA, 19 nt, Artificial Sequence
  Description of Artificial Sequence: Synthetic oligonucleotide
uuaauggacucacaauuuu

SEQ ID NO: 3278549 - RNA, 19 nt, Artificial Sequence
  Description of Artificial Sequence: Synthetic oligonucleotide
ucaagcaccaacaaccugg

SEQ ID NO: 3278550 - RNA, 19 nt, Artificial Sequence
  Description of Artificial Sequence: Synthetic oligonucleotide
aagaacacgaaguaggacu

SEQ ID NO: 3278551 - RNA, 19 nt, Artificial Sequence
  Description of Artificial Sequence: Synthetic oligonucleotide
uuacaaaagaacacgaagu

SEQ ID NO: 3278552 - RNA, 19 nt, Artificial Sequence
  Description of Artificial Sequence: Synthetic oligonucleotide
aucucaagcaccaacaacc

SEQ ID NO: 3278553 - RNA, 19 nt, Artificial Sequence
  Description of Artificial Sequence: Synthetic oligonucleotide
aauggccuuuuauugaagg

SEQ ID NO: 3278554 - RNA, 19 nt, Artificial Sequence
  Description of Artificial Sequence: Synthetic oligonucleotide
gaaguucucauccagggcc

SEQ ID NO: 3278555 - RNA, 19 nt, Artificial Sequence
  Description of Artificial Sequence: Synthetic oligonucleotide
cuuacaaaagaacacgaag

SEQ ID NO: 3278556 - RNA, 19 nt, Artificial Sequence
  Description of Artificial Sequence: Synthetic oligonucleotide
aaucucaagcaccaacaac

SEQ ID NO: 3278557 - RNA, 19 nt, Artificial Sequence
  Description of Artificial Sequence: Synthetic oligonucleotide
uccagaagagggaaggugg

SEQ ID NO: 3278558 - RNA, 19 nt, Artificial Sequence
  Description of Artificial Sequence: Synthetic oligonucleotide
  modified_base (10)..(10): a, c, u, g, unknown or other
aacaccuucnuuccccguc

SEQ ID NO: 3278559 - RNA, 19 nt, Artificial Sequence
  Description of Artificial Sequence: Synthetic oligonucleotide
auugaauucucucuccauc

SEQ ID NO: 3278560 - RNA, 19 nt, Artificial Sequence
  Description of Artificial Sequence: Synthetic oligonucleotide
uuauugaagggccaucuca

SEQ ID NO: 3278561 - RNA, 19 nt, Artificial Sequence
  Description of Artificial Sequence: Synthetic oligonucleotide
uauugaagggccaucucag

SEQ ID NO: 3278562 - RNA, 19 nt, Artificial Sequence
  Description of Artificial Sequence: Synthetic oligonucleotide
aguaggauggucucugccg

SEQ ID NO: 3278563 - RNA, 19 nt, Artificial Sequence
  Description of Artificial Sequence: Synthetic oligonucleotide
uccagaccaaacuaggucc

SEQ ID NO: 3278564 - RNA, 19 nt, Artificial Sequence
  Description of Artificial Sequence: Synthetic oligonucleotide
ucgaaguucucauccaggg

SEQ ID NO: 3278565 - RNA, 19 nt, Artificial Sequence
  Description of Artificial Sequence: Synthetic oligonucleotide
uccaacagaaucucaagca

SEQ ID NO: 3278566 - RNA, 19 nt, Artificial Sequence
  Description of Artificial Sequence: Synthetic oligonucleotide
agacuuacaaaagaacacg

SEQ ID NO: 3278567 - RNA, 19 nt, Artificial Sequence
  Description of Artificial Sequence: Synthetic oligonucleotide
agcaccaacaaccugggug

SEQ ID NO: 3278568 - RNA, 19 nt, Artificial Sequence
  Description of Artificial Sequence: Synthetic oligonucleotide
ucuccuuccaacagaaucu

SEQ ID NO: 3278569 - RNA, 19 nt, Artificial Sequence
  Description of Artificial Sequence: Synthetic oligonucleotide
gauuugcagaaccaaggcc

SEQ ID NO: 3278570 - RNA, 19 nt, Artificial Sequence
  Description of Artificial Sequence: Synthetic oligonucleotide
aaagaacacgaaguaggac

SEQ ID NO: 3278571 - RNA, 19 nt, Artificial Sequence
  Description of Artificial Sequence: Synthetic oligonucleotide
uacaaaagaacacgaagua

SEQ ID NO: 3278572 - RNA, 19 nt, Artificial Sequence
  Description of Artificial Sequence: Synthetic oligonucleotide
auugcgagccugaugaacc

SEQ ID NO: 3278573 - RNA, 19 nt, Artificial Sequence
  Description of Artificial Sequence: Synthetic oligonucleotide
uuccaacagaaucucaagc

SEQ ID NO: 3278574 - RNA, 19 nt, Artificial Sequence
  Description of Artificial Sequence: Synthetic oligonucleotide
ucggauaguaggauggucu

SEQ ID NO: 3278575 - RNA, 19 nt, Artificial Sequence
  Description of Artificial Sequence: Synthetic oligonucleotide
uuauugaauucucucucca

SEQ ID NO: 3278576 - RNA, 19 nt, Artificial Sequence
  Description of Artificial Sequence: Synthetic oligonucleotide
ucauccaacuuccugucug

SEQ ID NO: 3278577 - RNA, 19 nt, Artificial Sequence
  Description of Artificial Sequence: Synthetic oligonucleotide
guaggacucggauaguagg

SEQ ID NO: 3278578 - RNA, 19 nt, Artificial Sequence
  Description of Artificial Sequence: Synthetic oligonucleotide
gugaucgaaguucucaucc

SEQ ID NO: 3278579 - RNA, 19 nt, Artificial Sequence
  Description of Artificial Sequence: Synthetic oligonucleotide
uaguccagaccaaacuagg

SEQ ID NO: 3278580 - RNA, 19 nt, Artificial Sequence
  Description of Artificial Sequence: Synthetic oligonucleotide
uguggggauuugcagaacc

SEQ ID NO: 3278581 - RNA, 19 nt, Artificial Sequence
  Description of Artificial Sequence: Synthetic oligonucleotide
agagacuuacaaaagaaca

SEQ ID NO: 3278582 - RNA, 19 nt, Artificial Sequence
  Description of Artificial Sequence: Synthetic oligonucleotide
gaacccguaguccagacca

SEQ ID NO: 3278583 - RNA, 19 nt, Artificial Sequence
  Description of Artificial Sequence: Synthetic oligonucleotide
ugaagggccaucucagucc

SEQ ID NO: 3278584 - RNA, 19 nt, Artificial Sequence
  Description of Artificial Sequence: Synthetic oligonucleotide
guuauugaauucucucucc

SEQ ID NO: 3278585 - RNA, 19 nt, Artificial Sequence
  Description of Artificial Sequence: Synthetic oligonucleotide
auuugcagaaccaaggcca

SEQ ID NO: 3278586 - RNA, 19 nt, Artificial Sequence
  Description of Artificial Sequence: Synthetic oligonucleotide
cucuccaucacuugacggg

SEQ ID NO: 3278587 - RNA, 19 nt, Artificial Sequence
  Description of Artificial Sequence: Synthetic oligonucleotide
uccaggaaggugcucggcg

SEQ ID NO: 3278588 - RNA, 19 nt, Artificial Sequence
  Description of Artificial Sequence: Synthetic oligonucleotide
acuguggugauccccgacg

SEQ ID NO: 3278589 - RNA, 19 nt, Artificial Sequence
  Description of Artificial Sequence: Synthetic oligonucleotide
uuuuauugaagggccaucu

SEQ ID NO: 3278590 - RNA, 19 nt, Artificial Sequence
  Description of Artificial Sequence: Synthetic oligonucleotide
caacagaaucucaagcacc

SEQ ID NO: 3278591 - RNA, 19 nt, Artificial Sequence
  Description of Artificial Sequence: Synthetic oligonucleotide
acaaaagaacacgaaguag

SEQ ID NO: 3278592 - RNA, 19 nt, Artificial Sequence
  Description of Artificial Sequence: Synthetic oligonucleotide
agguuauugaauucucucu

SEQ ID NO: 3278593 - RNA, 19 nt, Artificial Sequence
  Description of Artificial Sequence: Synthetic oligonucleotide
acacacagaagaccuuggc

SEQ ID NO: 3278594 - RNA, 19 nt, Artificial Sequence
  Description of Artificial Sequence: Synthetic oligonucleotide
ugcagaaccaaggccaggg

SEQ ID NO: 3278595 - RNA, 19 nt, Artificial Sequence
  Description of Artificial Sequence: Synthetic oligonucleotide
gacucggauaguaggaugg

SEQ ID NO: 3278596 - RNA, 19 nt, Artificial Sequence
  Description of Artificial Sequence: Synthetic oligonucleotide
guuuccuccaggaaggugc

SEQ ID NO: 3278597 - RNA, 19 nt, Artificial Sequence
  Description of Artificial Sequence: Synthetic oligonucleotide
aaaagaacacgaaguagga

SEQ ID NO: 3278598 - RNA, 19 nt, Artificial Sequence
  Description of Artificial Sequence: Synthetic oligonucleotide
auggucucugccgaggugc

SEQ ID NO: 3278599 - RNA, 19 nt, Artificial Sequence
  Description of Artificial Sequence: Synthetic oligonucleotide
gauaguaggauggucucug

SEQ ID NO: 3278600 - RNA, 19 nt, Artificial Sequence
  Description of Artificial Sequence: Synthetic oligonucleotide
ucucuccaucacuugacgg

SEQ ID NO: 3278601 - RNA, 19 nt, Artificial Sequence
  Description of Artificial Sequence: Synthetic oligonucleotide
uuugcagaaccaaggccag

SEQ ID NO: 3278602 - RNA, 19 nt, Artificial Sequence
  Description of Artificial Sequence: Synthetic oligonucleotide
gaucgaaguucucauccag

SEQ ID NO: 3278603 - RNA, 19 nt, Artificial Sequence
  Description of Artificial Sequence: Synthetic oligonucleotide
auggccuuuuauugaaggg

SEQ ID NO: 3278604 - RNA, 19 nt, Artificial Sequence
  Description of Artificial Sequence: Synthetic oligonucleotide
aacagguuauugaauucuc

SEQ ID NO: 3278605 - RNA, 19 nt, Artificial Sequence
  Description of Artificial Sequence: Synthetic oligonucleotide
uggugacacacucacucag

SEQ ID NO: 3278606 - RNA, 19 nt, Artificial Sequence
  Description of Artificial Sequence: Synthetic oligonucleotide
cuuggucugggauugcgag

SEQ ID NO: 3278607 - RNA, 19 nt, Artificial Sequence
  Description of Artificial Sequence: Synthetic oligonucleotide
cucuccuuccaacagaauc

SEQ ID NO: 3278608 - RNA, 19 nt, Artificial Sequence
  Description of Artificial Sequence: Synthetic oligonucleotide
auaguaggauggucucugc

SEQ ID NO: 3278609 - RNA, 19 nt, Artificial Sequence
  Description of Artificial Sequence: Synthetic oligonucleotide
uggccuuuuauugaagggc

SEQ ID NO: 3278610 - RNA, 19 nt, Artificial Sequence
  Description of Artificial Sequence: Synthetic oligonucleotide
cacacagaagaccuuggcc

SEQ ID NO: 3278611 - RNA, 19 nt, Artificial Sequence
  Description of Artificial Sequence: Synthetic oligonucleotide
ugugcccaaggccaacagg

SEQ ID NO: 3278612 - RNA, 19 nt, Artificial Sequence
  Description of Artificial Sequence: Synthetic oligonucleotide
cagagacuuacaaaagaac

SEQ ID NO: 3278613 - RNA, 19 nt, Artificial Sequence
  Description of Artificial Sequence: Synthetic oligonucleotide
uccgaaauggccuuuuauu

SEQ ID NO: 3278614 - RNA, 19 nt, Artificial Sequence
  Description of Artificial Sequence: Synthetic oligonucleotide
gaaauggccuuuuauugaa

SEQ ID NO: 3278615 - RNA, 19 nt, Artificial Sequence
  Description of Artificial Sequence: Synthetic oligonucleotide
cuuccaacagaaucucaag

SEQ ID NO: 3278616 - RNA, 19 nt, Artificial Sequence
  Description of Artificial Sequence: Synthetic oligonucleotide
uaggacucggauaguagga

SEQ ID NO: 3278617 - RNA, 19 nt, Artificial Sequence
  Description of Artificial Sequence: Synthetic oligonucleotide
uucuguguggggauuugca

SEQ ID NO: 3278618 - RNA, 19 nt, Artificial Sequence
  Description of Artificial Sequence: Synthetic oligonucleotide
cagcaugccaccacugugg

SEQ ID NO: 3278619 - RNA, 19 nt, Artificial Sequence
  Description of Artificial Sequence: Synthetic oligonucleotide
uugaagggccaucucaguc

SEQ ID NO: 3278620 - RNA, 19 nt, Artificial Sequence
  Description of Artificial Sequence: Synthetic oligonucleotide
uuccccgucauccaacuuc

SEQ ID NO: 3278621 - RNA, 19 nt, Artificial Sequence
  Description of Artificial Sequence: Synthetic oligonucleotide
ugaugaacccguaguccag

SEQ ID NO: 3278622 - RNA, 19 nt, Artificial Sequence
  Description of Artificial Sequence: Synthetic oligonucleotide
agaacacgaaguaggacuc

SEQ ID NO: 3278623 - RNA, 19 nt, Artificial Sequence
  Description of Artificial Sequence: Synthetic oligonucleotide
agaaucucaagcaccaaca

SEQ ID NO: 3278624 - RNA, 19 nt, Artificial Sequence
  Description of Artificial Sequence: Synthetic oligonucleotide
uguguggggauuugcagaa

SEQ ID NO: 3278625 - RNA, 19 nt, Artificial Sequence
  Description of Artificial Sequence: Synthetic oligonucleotide
uuuauugaagggccaucuc

SEQ ID NO: 3278626 - RNA, 19 nt, Artificial Sequence
  Description of Artificial Sequence: Synthetic oligonucleotide
uaguaggauggucucugcc

SEQ ID NO: 3278627 - RNA, 19 nt, Artificial Sequence
  Description of Artificial Sequence: Synthetic oligonucleotide
gggauugcgagccugauga

SEQ ID NO: 3278628 - RNA, 19 nt, Artificial Sequence
  Description of Artificial Sequence: Synthetic oligonucleotide
uucucuccuuccaacagaa

SEQ ID NO: 3278629 - RNA, 19 nt, Artificial Sequence
  Description of Artificial Sequence: Synthetic oligonucleotide
cagaaucucaagcaccaac

SEQ ID NO: 3278630 - RNA, 19 nt, Artificial Sequence
  Description of Artificial Sequence: Synthetic oligonucleotide
uccaacuuccugucugugc

SEQ ID NO: 3278631 - RNA, 19 nt, Artificial Sequence
  Description of Artificial Sequence: Synthetic oligonucleotide
guaguccagaccaaacuag

SEQ ID NO: 3278632 - RNA, 19 nt, Artificial Sequence
  Description of Artificial Sequence: Synthetic oligonucleotide
aaggccaggguguugugau

SEQ ID NO: 3278633 - RNA, 19 nt, Artificial Sequence
  Description of Artificial Sequence: Synthetic oligonucleotide
auccccgacggccggaagc

SEQ ID NO: 3278634 - RNA, 19 nt, Artificial Sequence
  Description of Artificial Sequence: Synthetic oligonucleotide
ugaucgaaguucucaucca

SEQ ID NO: 3278635 - RNA, 19 nt, Artificial Sequence
  Description of Artificial Sequence: Synthetic oligonucleotide
gguuauugaauucucucuc

SEQ ID NO: 3278636 - RNA, 19 nt, Artificial Sequence
  Description of Artificial Sequence: Synthetic oligonucleotide
uauugaauucucucuccau

SEQ ID NO: 3278637 - RNA, 19 nt, Artificial Sequence
  Description of Artificial Sequence: Synthetic oligonucleotide
caagcaccaacaaccuggg

SEQ ID NO: 3278638 - RNA, 19 nt, Artificial Sequence
  Description of Artificial Sequence: Synthetic oligonucleotide
caugccaccacugugguga

SEQ ID NO: 3278639 - RNA, 19 nt, Artificial Sequence
  Description of Artificial Sequence: Synthetic oligonucleotide
gguggugacacacucacuc

SEQ ID NO: 3278640 - RNA, 19 nt, Artificial Sequence
  Description of Artificial Sequence: Synthetic oligonucleotide
agguccagaagagggaagg

SEQ ID NO: 3278641 - RNA, 19 nt, Artificial Sequence
  Description of Artificial Sequence: Synthetic oligonucleotide
uccccgucauccaacuucc

SEQ ID NO: 3278642 - RNA, 19 nt, Artificial Sequence
  Description of Artificial Sequence: Synthetic oligonucleotide
gacuuacaaaagaacacga

SEQ ID NO: 3278643 - RNA, 19 nt, Artificial Sequence
  Description of Artificial Sequence: Synthetic oligonucleotide
cgaaguaggacucggauag

SEQ ID NO: 3278644 - RNA, 19 nt, Artificial Sequence
  Description of Artificial Sequence: Synthetic oligonucleotide
ucuccaucacuugacgggc

SEQ ID NO: 3278645 - RNA, 19 nt, Artificial Sequence
  Description of Artificial Sequence: Synthetic oligonucleotide
uugugaucgaaguucucau

SEQ ID NO: 3278646 - RNA, 19 nt, Artificial Sequence
  Description of Artificial Sequence: Synthetic oligonucleotide
aggguguugugaucgaagu

SEQ ID NO: 3278647 - RNA, 19 nt, Artificial Sequence
  Description of Artificial Sequence: Synthetic oligonucleotide
uggugauccccgacggccg

SEQ ID NO: 3278648 - RNA, 19 nt, Artificial Sequence
  Description of Artificial Sequence: Synthetic oligonucleotide
ggauuugcagaaccaaggc

SEQ ID NO: 3278649 - RNA, 19 nt, Artificial Sequence
  Description of Artificial Sequence: Synthetic oligonucleotide
aaagaaaucucccauaucg

SEQ ID NO: 3278650 - RNA, 19 nt, Artificial Sequence
  Description of Artificial Sequence: Synthetic oligonucleotide
aacucaacaaaauagagca

SEQ ID NO: 3278651 - RNA, 19 nt, Artificial Sequence
  Description of Artificial Sequence: Synthetic oligonucleotide
uucauuuucaguaaaagcu

SEQ ID NO: 3278652 - RNA, 19 nt, Artificial Sequence
  Description of Artificial Sequence: Synthetic oligonucleotide
aguaagaaaaccuggauag

SEQ ID NO: 3278653 - RNA, 19 nt, Artificial Sequence
  Description of Artificial Sequence: Synthetic oligonucleotide
uuaguuuauaauaucagcu

SEQ ID NO: 3278654 - RNA, 19 nt, Artificial Sequence
  Description of Artificial Sequence: Synthetic oligonucleotide
augaaauucauuuucuagg

SEQ ID NO: 3278655 - RNA, 19 nt, Artificial Sequence
  Description of Artificial Sequence: Synthetic oligonucleotide
uuuucuaggaaucaugugu

SEQ ID NO: 3278656 - RNA, 19 nt, Artificial Sequence
  Description of Artificial Sequence: Synthetic oligonucleotide
guauucaccaguuucaagg

SEQ ID NO: 3278657 - RNA, 19 nt, Artificial Sequence
  Description of Artificial Sequence: Synthetic oligonucleotide
auaauaucagcuuuauuuc

SEQ ID NO: 3278658 - RNA, 19 nt, Artificial Sequence
  Description of Artificial Sequence: Synthetic oligonucleotide
aauagagcacaguaaacag

SEQ ID NO: 3278659 - RNA, 19 nt, Artificial Sequence
  Description of Artificial Sequence: Synthetic oligonucleotide
aguagauuuugcuaagagc

SEQ ID NO: 3278660 - RNA, 19 nt, Artificial Sequence
  Description of Artificial Sequence: Synthetic oligonucleotide
aaaacuuugggguaccaug

SEQ ID NO: 3278661 - RNA, 19 nt, Artificial Sequence
  Description of Artificial Sequence: Synthetic oligonucleotide
guagauuuugcuaagagcc

SEQ ID NO: 3278662 - RNA, 19 nt, Artificial Sequence
  Description of Artificial Sequence: Synthetic oligonucleotide
gaugaaauucauuuucuag

SEQ ID NO: 3278663 - RNA, 19 nt, Artificial Sequence
  Description of Artificial Sequence: Synthetic oligonucleotide
aacaaaauagagcacagua

SEQ ID NO: 3278664 - RNA, 19 nt, Artificial Sequence
  Description of Artificial Sequence: Synthetic oligonucleotide
aaauucauuuucuaggaau

SEQ ID NO: 3278665 - RNA, 19 nt, Artificial Sequence
  Description of Artificial Sequence: Synthetic oligonucleotide
uuuuaguagauuuugcuaa

SEQ ID NO: 3278666 - RNA, 19 nt, Artificial Sequence
  Description of Artificial Sequence: Synthetic oligonucleotide
aauauacacaacuggagaa

SEQ ID NO: 3278667 - RNA, 19 nt, Artificial Sequence
  Description of Artificial Sequence: Synthetic oligonucleotide
aaauagagcacaguaaaca

SEQ ID NO: 3278668 - RNA, 19 nt, Artificial Sequence
  Description of Artificial Sequence: Synthetic oligonucleotide
uggagaaacuuugugaugg

SEQ ID NO: 3278669 - RNA, 19 nt, Artificial Sequence
  Description of Artificial Sequence: Synthetic oligonucleotide
aauucauuuucuaggaauc

SEQ ID NO: 3278670 - RNA, 19 nt, Artificial Sequence
  Description of Artificial Sequence: Synthetic oligonucleotide
ucauaaguggaucugucgc

SEQ ID NO: 3278671 - RNA, 19 nt, Artificial Sequence
  Description of Artificial Sequence: Synthetic oligonucleotide
uaggauaguaagaaaaccu

SEQ ID NO: 3278672 - RNA, 19 nt, Artificial Sequence
  Description of Artificial Sequence: Synthetic oligonucleotide
guuaguuuauaauaucagc

SEQ ID NO: 3278673 - RNA, 19 nt, Artificial Sequence
  Description of Artificial Sequence: Synthetic oligonucleotide
cauuccuucucauaagugg

SEQ ID NO: 3278674 - RNA, 19 nt, Artificial Sequence
  Description of Artificial Sequence: Synthetic oligonucleotide
uaacaugcagcaaagaaau

SEQ ID NO: 3278675 - RNA, 19 nt, Artificial Sequence
  Description of Artificial Sequence: Synthetic oligonucleotide
aaagcuggcaaccauguaa

SEQ ID NO: 3278676 - RNA, 19 nt, Artificial Sequence
  Description of Artificial Sequence: Synthetic oligonucleotide
ugaaauucauuuucuagga

SEQ ID NO: 3278677 - RNA, 19 nt, Artificial Sequence
  Description of Artificial Sequence: Synthetic oligonucleotide
agaaaucucccauaucgac

SEQ ID NO: 3278678 - RNA, 19 nt, Artificial Sequence
  Description of Artificial Sequence: Synthetic oligonucleotide
ucuaacaugcagcaaagaa

SEQ ID NO: 3278679 - RNA, 19 nt, Artificial Sequence
  Description of Artificial Sequence: Synthetic oligonucleotide
aaccaacucaacaaaauag

SEQ ID NO: 3278680 - RNA, 19 nt, Artificial Sequence
  Description of Artificial Sequence: Synthetic oligonucleotide
cuucauuuucaguaaaagc

SEQ ID NO: 3278681 - RNA, 19 nt, Artificial Sequence
  Description of Artificial Sequence: Synthetic oligonucleotide
aacuggagaaacuuuguga

SEQ ID NO: 3278682 - RNA, 19 nt, Artificial Sequence
  Description of Artificial Sequence: Synthetic oligonucleotide
uuucuaggaaucaugugug

SEQ ID NO: 3278683 - RNA, 19 nt, Artificial Sequence
  Description of Artificial Sequence: Synthetic oligonucleotide
aaauuuggagucuucugcu

SEQ ID NO: 3278684 - RNA, 19 nt, Artificial Sequence
  Description of Artificial Sequence: Synthetic oligonucleotide
aaagcuugaccccagacuu

SEQ ID NO: 3278685 - RNA, 19 nt, Artificial Sequence
  Description of Artificial Sequence: Synthetic oligonucleotide
uaaacagaaucaauugcug

SEQ ID NO: 3278686 - RNA, 19 nt, Artificial Sequence
  Description of Artificial Sequence: Synthetic oligonucleotide
aaaauagagcacaguaaac

SEQ ID NO: 3278687 - RNA, 19 nt, Artificial Sequence
  Description of Artificial Sequence: Synthetic oligonucleotide
uucuuggcagauuuuaugc

SEQ ID NO: 3278688 - RNA, 19 nt, Artificial Sequence
  Description of Artificial Sequence: Synthetic oligonucleotide
uccagaguaaaccauggcu

SEQ ID NO: 3278689 - RNA, 19 nt, Artificial Sequence
  Description of Artificial Sequence: Synthetic oligonucleotide
gauaugaguguauucacca

SEQ ID NO: 3278690 - RNA, 19 nt, Artificial Sequence
  Description of Artificial Sequence: Synthetic oligonucleotide
agaaaaccuggauaguuuc

SEQ ID NO: 3278691 - RNA, 19 nt, Artificial Sequence
  Description of Artificial Sequence: Synthetic oligonucleotide
aacagaaucaauugcugaa

SEQ ID NO: 3278692 - RNA, 19 nt, Artificial Sequence
  Description of Artificial Sequence: Synthetic oligonucleotide
ucaacaaaauagagcacag

SEQ ID NO: 3278693 - RNA, 19 nt, Artificial Sequence
  Description of Artificial Sequence: Synthetic oligonucleotide
uuuucagcuguccagagua

SEQ ID NO: 3278694 - RNA, 19 nt, Artificial Sequence
  Description of Artificial Sequence: Synthetic oligonucleotide
uccaguuucagucucugca

SEQ ID NO: 3278695 - RNA, 19 nt, Artificial Sequence
  Description of Artificial Sequence: Synthetic oligonucleotide
aaacagaaucaauugcuga

SEQ ID NO: 3278696 - RNA, 19 nt, Artificial Sequence
  Description of Artificial Sequence: Synthetic oligonucleotide
uuuucuuucucuucuuggc

SEQ ID NO: 3278697 - RNA, 19 nt, Artificial Sequence
  Description of Artificial Sequence: Synthetic oligonucleotide
ugacuuucuacuuuucagc

SEQ ID NO: 3278698 - RNA, 19 nt, Artificial Sequence
  Description of Artificial Sequence: Synthetic oligonucleotide
uaauaucagcuuuauuucc

SEQ ID NO: 3278699 - RNA, 19 nt, Artificial Sequence
  Description of Artificial Sequence: Synthetic oligonucleotide
uaguagauuuugcuaagag

SEQ ID NO: 3278700 - RNA, 19 nt, Artificial Sequence
  Description of Artificial Sequence: Synthetic oligonucleotide
uccuuuuccaguuucaguc

SEQ ID NO: 3278701 - RNA, 19 nt, Artificial Sequence
  Description of Artificial Sequence: Synthetic oligonucleotide
aaauccaguugcucguagg

SEQ ID NO: 3278702 - RNA, 19 nt, Artificial Sequence
  Description of Artificial Sequence: Synthetic oligonucleotide
caacucaacaaaauagagc

SEQ ID NO: 3278703 - RNA, 19 nt, Artificial Sequence
  Description of Artificial Sequence: Synthetic oligonucleotide
ucguaggauaguaagaaaa

SEQ ID NO: 3278704 - RNA, 19 nt, Artificial Sequence
  Description of Artificial Sequence: Synthetic oligonucleotide
ugaugaaccaacucaacaa

SEQ ID NO: 3278705 - RNA, 19 nt, Artificial Sequence
  Description of Artificial Sequence: Synthetic oligonucleotide
uagagcacaguaaacagaa

SEQ ID NO: 3278706 - RNA, 19 nt, Artificial Sequence
  Description of Artificial Sequence: Synthetic oligonucleotide
uuuaguagauuuugcuaag

SEQ ID NO: 3278707 - RNA, 19 nt, Artificial Sequence
  Description of Artificial Sequence: Synthetic oligonucleotide
ucccauaucgacuagcuuc

SEQ ID NO: 3278708 - RNA, 19 nt, Artificial Sequence
  Description of Artificial Sequence: Synthetic oligonucleotide
cuuuucuuucucuucuugg

SEQ ID NO: 3278709 - RNA, 19 nt, Artificial Sequence
  Description of Artificial Sequence: Synthetic oligonucleotide
aaacuuugggguaccaugg

SEQ ID NO: 3278710 - RNA, 19 nt, Artificial Sequence
  Description of Artificial Sequence: Synthetic oligonucleotide
uguacugaugccuugguua

SEQ ID NO: 3278711 - RNA, 19 nt, Artificial Sequence
  Description of Artificial Sequence: Synthetic oligonucleotide
uucaguaaaagcuggcaac

SEQ ID NO: 3278712 - RNA, 19 nt, Artificial Sequence
  Description of Artificial Sequence: Synthetic oligonucleotide
uguggagaaauuuggaguc

SEQ ID NO: 3278713 - RNA, 19 nt, Artificial Sequence
  Description of Artificial Sequence: Synthetic oligonucleotide
aacuuugggguaccauggc

SEQ ID NO: 3278714 - RNA, 19 nt, Artificial Sequence
  Description of Artificial Sequence: Synthetic oligonucleotide
uaugaguguauucaccagu

SEQ ID NO: 3278715 - RNA, 19 nt, Artificial Sequence
  Description of Artificial Sequence: Synthetic oligonucleotide
aaaucucccauaucgacua

SEQ ID NO: 3278716 - RNA, 19 nt, Artificial Sequence
  Description of Artificial Sequence: Synthetic oligonucleotide
uguccagaguaaaccaugg

SEQ ID NO: 3278717 - RNA, 19 nt, Artificial Sequence
  Description of Artificial Sequence: Synthetic oligonucleotide
aguaaaccauggcuagugc

SEQ ID NO: 3278718 - RNA, 19 nt, Artificial Sequence
  Description of Artificial Sequence: Synthetic oligonucleotide
uaguaagaaaaccuggaua

SEQ ID NO: 3278719 - RNA, 19 nt, Artificial Sequence
  Description of Artificial Sequence: Synthetic oligonucleotide
uuucaguaaaagcuggcaa

SEQ ID NO: 3278720 - RNA, 19 nt, Artificial Sequence
  Description of Artificial Sequence: Synthetic oligonucleotide
uaaaagcuggcaaccaugu

SEQ ID NO: 3278721 - RNA, 19 nt, Artificial Sequence
  Description of Artificial Sequence: Synthetic oligonucleotide
aauccaguugcucguagga

SEQ ID NO: 3278722 - RNA, 19 nt, Artificial Sequence
  Description of Artificial Sequence: Synthetic oligonucleotide
ugcagcaaagaaaucuccc

SEQ ID NO: 3278723 - RNA, 19 nt, Artificial Sequence
  Description of Artificial Sequence: Synthetic oligonucleotide
gugacuuucuacuuuucag

SEQ ID NO: 3278724 - RNA, 19 nt, Artificial Sequence
  Description of Artificial Sequence: Synthetic oligonucleotide
agaaauuuggagucuucug

SEQ ID NO: 3278725 - RNA, 19 nt, Artificial Sequence
  Description of Artificial Sequence: Synthetic oligonucleotide
uauucaccaguuucaaggc

SEQ ID NO: 3278726 - RNA, 19 nt, Artificial Sequence
  Description of Artificial Sequence: Synthetic oligonucleotide
agauuuuaugcacucuucu

SEQ ID NO: 3278727 - RNA, 19 nt, Artificial Sequence
  Description of Artificial Sequence: Synthetic oligonucleotide
aauaucagcuuuauuucca

SEQ ID NO: 3278728 - RNA, 19 nt, Artificial Sequence
  Description of Artificial Sequence: Synthetic oligonucleotide
ucaguaaaagcuggcaacc

SEQ ID NO: 3278729 - RNA, 19 nt, Artificial Sequence
  Description of Artificial Sequence: Synthetic oligonucleotide
cauguaaauuaugucagag

SEQ ID NO: 3278730 - RNA, 19 nt, Artificial Sequence
  Description of Artificial Sequence: Synthetic oligonucleotide
aguuuauaauaucagcuuu

SEQ ID NO: 3278731 - RNA, 19 nt, Artificial Sequence
  Description of Artificial Sequence: Synthetic oligonucleotide
ucggucauagcagagaagu

SEQ ID NO: 3278732 - RNA, 19 nt, Artificial Sequence
  Description of Artificial Sequence: Synthetic oligonucleotide
aaccauggcuagugcauac

SEQ ID NO: 3278733 - RNA, 19 nt, Artificial Sequence
  Description of Artificial Sequence: Synthetic oligonucleotide
cucauaaguggaucugucg

SEQ ID NO: 3278734 - RNA, 19 nt, Artificial Sequence
  Description of Artificial Sequence: Synthetic oligonucleotide
cagaacucgcuguacaugc

SEQ ID NO: 3278735 - RNA, 19 nt, Artificial Sequence
  Description of Artificial Sequence: Synthetic oligonucleotide
uugcucguaggauaguaag

SEQ ID NO: 3278736 - RNA, 19 nt, Artificial Sequence
  Description of Artificial Sequence: Synthetic oligonucleotide
ugaaccaacucaacaaaau

SEQ ID NO: 3278737 - RNA, 19 nt, Artificial Sequence
  Description of Artificial Sequence: Synthetic oligonucleotide
gaguguauucaccaguuuc

SEQ ID NO: 3278738 - RNA, 19 nt, Artificial Sequence
  Description of Artificial Sequence: Synthetic oligonucleotide
ucuuuucuuucucuucuug

SEQ ID NO: 3278739 - RNA, 19 nt, Artificial Sequence
  Description of Artificial Sequence: Synthetic oligonucleotide
acaugcagcaaagaaaucu

SEQ ID NO: 3278740 - RNA, 19 nt, Artificial Sequence
  Description of Artificial Sequence: Synthetic oligonucleotide
uaaaccauggcuagugcau

SEQ ID NO: 3278741 - RNA, 19 nt, Artificial Sequence
  Description of Artificial Sequence: Synthetic oligonucleotide
caaaauagagcacaguaaa

SEQ ID NO: 3278742 - RNA, 19 nt, Artificial Sequence
  Description of Artificial Sequence: Synthetic oligonucleotide
uaguuuauaauaucagcuu

SEQ ID NO: 3278743 - RNA, 19 nt, Artificial Sequence
  Description of Artificial Sequence: Synthetic oligonucleotide
auggcuagugcauacagau

SEQ ID NO: 3278744 - RNA, 19 nt, Artificial Sequence
  Description of Artificial Sequence: Synthetic oligonucleotide
uuuucaguaaaagcuggca

SEQ ID NO: 3278745 - RNA, 19 nt, Artificial Sequence
  Description of Artificial Sequence: Synthetic oligonucleotide
cuuugggguaccauggcag

SEQ ID NO: 3278746 - RNA, 19 nt, Artificial Sequence
  Description of Artificial Sequence: Synthetic oligonucleotide
aacucgcuguacaugcucc

SEQ ID NO: 3278747 - RNA, 19 nt, Artificial Sequence
  Description of Artificial Sequence: Synthetic oligonucleotide
ucauagcagagaagugugg

SEQ ID NO: 3278748 - RNA, 19 nt, Artificial Sequence
  Description of Artificial Sequence: Synthetic oligonucleotide
gauaguaagaaaaccugga

SEQ ID NO: 3278749 - RNA, 19 nt, Artificial Sequence
  Description of Artificial Sequence: Synthetic oligonucleotide
aaauucugaaauuaugucc

SEQ ID NO: 3278750 - RNA, 19 nt, Artificial Sequence
  Description of Artificial Sequence: Synthetic oligonucleotide
guuaacaugggcuucaucg

SEQ ID NO: 3278751 - RNA, 19 nt, Artificial Sequence
  Description of Artificial Sequence: Synthetic oligonucleotide
aaaacuccucuucagaaac

SEQ ID NO: 3278752 - RNA, 19 nt, Artificial Sequence
  Description of Artificial Sequence: Synthetic oligonucleotide
aacaaggcaggacucaucc

SEQ ID NO: 3278753 - RNA, 19 nt, Artificial Sequence
  Description of Artificial Sequence: Synthetic oligonucleotide
aaauacagguucugggugc

SEQ ID NO: 3278754 - RNA, 19 nt, Artificial Sequence
  Description of Artificial Sequence: Synthetic oligonucleotide
aacaagauguguccugugc

SEQ ID NO: 3278755 - RNA, 19 nt, Artificial Sequence
  Description of Artificial Sequence: Synthetic oligonucleotide
gaagaaaucacuccuagac

SEQ ID NO: 3278756 - RNA, 19 nt, Artificial Sequence
  Description of Artificial Sequence: Synthetic oligonucleotide
uuuucaaacuccaaggacu

SEQ ID NO: 3278757 - RNA, 19 nt, Artificial Sequence
  Description of Artificial Sequence: Synthetic oligonucleotide
ucugccuagacaaacaggc

SEQ ID NO: 3278758 - RNA, 19 nt, Artificial Sequence
  Description of Artificial Sequence: Synthetic oligonucleotide
aaacccauguccuggaggg

SEQ ID NO: 3278759 - RNA, 19 nt, Artificial Sequence
  Description of Artificial Sequence: Synthetic oligonucleotide
uucaucgaaacccaugucc

SEQ ID NO: 3278760 - RNA, 19 nt, Artificial Sequence
  Description of Artificial Sequence: Synthetic oligonucleotide
ugaaauuauguccagcaac

SEQ ID NO: 3278761 - RNA, 19 nt, Artificial Sequence
  Description of Artificial Sequence: Synthetic oligonucleotide
aauguccuuuaguaaaggg

SEQ ID NO: 3278762 - RNA, 19 nt, Artificial Sequence
  Description of Artificial Sequence: Synthetic oligonucleotide
ucugaaauuauguccagca

SEQ ID NO: 3278763 - RNA, 19 nt, Artificial Sequence
  Description of Artificial Sequence: Synthetic oligonucleotide
aacuguugaggauggacac

SEQ ID NO: 3278764 - RNA, 19 nt, Artificial Sequence
  Description of Artificial Sequence: Synthetic oligonucleotide
uuaguaaaggguuagggau

SEQ ID NO: 3278765 - RNA, 19 nt, Artificial Sequence
  Description of Artificial Sequence: Synthetic oligonucleotide
aauucugaaauuaugucca

SEQ ID NO: 3278766 - RNA, 19 nt, Artificial Sequence
  Description of Artificial Sequence: Synthetic oligonucleotide
aaggacuugggcuccacac

SEQ ID NO: 3278767 - RNA, 19 nt, Artificial Sequence
  Description of Artificial Sequence: Synthetic oligonucleotide
uuuaguaaaggguuaggga

SEQ ID NO: 3278768 - RNA, 19 nt, Artificial Sequence
  Description of Artificial Sequence: Synthetic oligonucleotide
aauuauguccagcaacugu

SEQ ID NO: 3278769 - RNA, 19 nt, Artificial Sequence
  Description of Artificial Sequence: Synthetic oligonucleotide
uggggucuaacacaggacg

SEQ ID NO: 3278770 - RNA, 19 nt, Artificial Sequence
  Description of Artificial Sequence: Synthetic oligonucleotide
accuuuucaaacuccaagg

SEQ ID NO: 3278771 - RNA, 19 nt, Artificial Sequence
  Description of Artificial Sequence: Synthetic oligonucleotide
agaguagaaauucugaaau

SEQ ID NO: 3278772 - RNA, 19 nt, Artificial Sequence
  Description of Artificial Sequence: Synthetic oligonucleotide
gagcaaacuguuaacaugg

SEQ ID NO: 3278773 - RNA, 19 nt, Artificial Sequence
  Description of Artificial Sequence: Synthetic oligonucleotide
cuuaucagggguuugguac

SEQ ID NO: 3278774 - RNA, 19 nt, Artificial Sequence
  Description of Artificial Sequence: Synthetic oligonucleotide
aacuccaaggacuugggcu

SEQ ID NO: 3278775 - RNA, 19 nt, Artificial Sequence
  Description of Artificial Sequence: Synthetic oligonucleotide
aaaacuccaaacuccucag

SEQ ID NO: 3278776 - RNA, 19 nt, Artificial Sequence
  Description of Artificial Sequence: Synthetic oligonucleotide
aauacuggaagaaaucacu

SEQ ID NO: 3278777 - RNA, 19 nt, Artificial Sequence
  Description of Artificial Sequence: Synthetic oligonucleotide
ugcagaacaaggcaggacu

SEQ ID NO: 3278778 - RNA, 19 nt, Artificial Sequence
  Description of Artificial Sequence: Synthetic oligonucleotide
aagaguagaaauucugaaa

SEQ ID NO: 3278779 - RNA, 19 nt, Artificial Sequence
  Description of Artificial Sequence: Synthetic oligonucleotide
gacaguuucaguaacugug

SEQ ID NO: 3278780 - RNA, 19 nt, Artificial Sequence
  Description of Artificial Sequence: Synthetic oligonucleotide
ucugagaugagaagucugc

SEQ ID NO: 3278781 - RNA, 19 nt, Artificial Sequence
  Description of Artificial Sequence: Synthetic oligonucleotide
uuuggggucuaacacagga

SEQ ID NO: 3278782 - RNA, 19 nt, Artificial Sequence
  Description of Artificial Sequence: Synthetic oligonucleotide
aagaaaucacuccuagacu

SEQ ID NO: 3278783 - RNA, 19 nt, Artificial Sequence
  Description of Artificial Sequence: Synthetic oligonucleotide
ucuugguuacugaauacug

SEQ ID NO: 3278784 - RNA, 19 nt, Artificial Sequence
  Description of Artificial Sequence: Synthetic oligonucleotide
cacaaauacagguucuggg

SEQ ID NO: 3278785 - RNA, 19 nt, Artificial Sequence
  Description of Artificial Sequence: Synthetic oligonucleotide
aacuccaaacuccucagca

SEQ ID NO: 3278786 - RNA, 19 nt, Artificial Sequence
  Description of Artificial Sequence: Synthetic oligonucleotide
agaaacucugagaaugucc

SEQ ID NO: 3278787 - RNA, 19 nt, Artificial Sequence
  Description of Artificial Sequence: Synthetic oligonucleotide
aguaacuguggacuuuucg

SEQ ID NO: 3278788 - RNA, 19 nt, Artificial Sequence
  Description of Artificial Sequence: Synthetic oligonucleotide
uuuccguucucugagauga

SEQ ID NO: 3278789 - RNA, 19 nt, Artificial Sequence
  Description of Artificial Sequence: Synthetic oligonucleotide
aaacuccaaacuccucagc

SEQ ID NO: 3278790 - RNA, 19 nt, Artificial Sequence
  Description of Artificial Sequence: Synthetic oligonucleotide
ugccuagacaaacaggccc

SEQ ID NO: 3278791 - RNA, 19 nt, Artificial Sequence
  Description of Artificial Sequence: Synthetic oligonucleotide
aguuucaguaacuguggac

SEQ ID NO: 3278792 - RNA, 19 nt, Artificial Sequence
  Description of Artificial Sequence: Synthetic oligonucleotide
aaacuccaaggacuugggc

SEQ ID NO: 3278793 - RNA, 19 nt, Artificial Sequence
  Description of Artificial Sequence: Synthetic oligonucleotide
cuuuaguaaaggguuaggg

SEQ ID NO: 3278794 - RNA, 19 nt, Artificial Sequence
  Description of Artificial Sequence: Synthetic oligonucleotide
cucaugaagacacugaaca

SEQ ID NO: 3278795 - RNA, 19 nt, Artificial Sequence
  Description of Artificial Sequence: Synthetic oligonucleotide
cuugguuacugaauacugg

SEQ ID NO: 3278796 - RNA, 19 nt, Artificial Sequence
  Description of Artificial Sequence: Synthetic oligonucleotide
uguccuuuaguaaaggguu

SEQ ID NO: 3278797 - RNA, 19 nt, Artificial Sequence
  Description of Artificial Sequence: Synthetic oligonucleotide
acuggaagaaaucacuccu

SEQ ID NO: 3278798 - RNA, 19 nt, Artificial Sequence
  Description of Artificial Sequence: Synthetic oligonucleotide
uaagaguagaaauucugaa

SEQ ID NO: 3278799 - RNA, 19 nt, Artificial Sequence
  Description of Artificial Sequence: Synthetic oligonucleotide
acaaauacagguucugggu

SEQ ID NO: 3278800 - RNA, 19 nt, Artificial Sequence
  Description of Artificial Sequence: Synthetic oligonucleotide
uggacuuuucgucacggcc

SEQ ID NO: 3278801 - RNA, 19 nt, Artificial Sequence
  Description of Artificial Sequence: Synthetic oligonucleotide
uaacacaggacgacucucg

SEQ ID NO: 3278802 - RNA, 19 nt, Artificial Sequence
  Description of Artificial Sequence: Synthetic oligonucleotide
uagacuauguccagaugag

SEQ ID NO: 3278803 - RNA, 19 nt, Artificial Sequence
  Description of Artificial Sequence: Synthetic oligonucleotide
uacuuuuggggucuaacac

SEQ ID NO: 3278804 - RNA, 19 nt, Artificial Sequence
  Description of Artificial Sequence: Synthetic oligonucleotide
uugguuacugaauacugga

SEQ ID NO: 3278805 - RNA, 19 nt, Artificial Sequence
  Description of Artificial Sequence: Synthetic oligonucleotide
uccgcagguaacuggaacg

SEQ ID NO: 3278806 - RNA, 19 nt, Artificial Sequence
  Description of Artificial Sequence: Synthetic oligonucleotide
cucuucucgauccaggagc

SEQ ID NO: 3278807 - RNA, 19 nt, Artificial Sequence
  Description of Artificial Sequence: Synthetic oligonucleotide
gagaagucugccuagacaa

SEQ ID NO: 3278808 - RNA, 19 nt, Artificial Sequence
  Description of Artificial Sequence: Synthetic oligonucleotide
ugagaagucugccuagaca

SEQ ID NO: 3278809 - RNA, 19 nt, Artificial Sequence
  Description of Artificial Sequence: Synthetic oligonucleotide
gucaguuugcagaacaagg

SEQ ID NO: 3278810 - RNA, 19 nt, Artificial Sequence
  Description of Artificial Sequence: Synthetic oligonucleotide
ucaucgaaacccauguccu

SEQ ID NO: 3278811 - RNA, 19 nt, Artificial Sequence
  Description of Artificial Sequence: Synthetic oligonucleotide
cuagacuauguccagauga

SEQ ID NO: 3278812 - RNA, 19 nt, Artificial Sequence
  Description of Artificial Sequence: Synthetic oligonucleotide
aaacuguuaacaugggcuu

SEQ ID NO: 3278813 - RNA, 19 nt, Artificial Sequence
  Description of Artificial Sequence: Synthetic oligonucleotide
aaguacaugugccucugcu

SEQ ID NO: 3278814 - RNA, 19 nt, Artificial Sequence
  Description of Artificial Sequence: Synthetic oligonucleotide
cuuuucaaacuccaaggac

SEQ ID NO: 3278815 - RNA, 19 nt, Artificial Sequence
  Description of Artificial Sequence: Synthetic oligonucleotide
cugggugcaacccuaagag

SEQ ID NO: 3278816 - RNA, 19 nt, Artificial Sequence
  Description of Artificial Sequence: Synthetic oligonucleotide
uacuggaagaaaucacucc

SEQ ID NO: 3278817 - RNA, 19 nt, Artificial Sequence
  Description of Artificial Sequence: Synthetic oligonucleotide
acagguucugggugcaacc

SEQ ID NO: 3278818 - RNA, 19 nt, Artificial Sequence
  Description of Artificial Sequence: Synthetic oligonucleotide
auggcucuuggauuccucc

SEQ ID NO: 3278819 - RNA, 19 nt, Artificial Sequence
  Description of Artificial Sequence: Synthetic oligonucleotide
gucacggccacaaauacag

SEQ ID NO: 3278820 - RNA, 19 nt, Artificial Sequence
  Description of Artificial Sequence: Synthetic oligonucleotide
uuaacaugggcuucaucga

SEQ ID NO: 3278821 - RNA, 19 nt, Artificial Sequence
  Description of Artificial Sequence: Synthetic oligonucleotide
ucaucugcaucguggacag

SEQ ID NO: 3278822 - RNA, 19 nt, Artificial Sequence
  Description of Artificial Sequence: Synthetic oligonucleotide
guuacugaauacuggaaga

SEQ ID NO: 3278823 - RNA, 19 nt, Artificial Sequence
  Description of Artificial Sequence: Synthetic oligonucleotide
acuggaacgccucuucauc

SEQ ID NO: 3278824 - RNA, 19 nt, Artificial Sequence
  Description of Artificial Sequence: Synthetic oligonucleotide
gacacuuggcuguaggcug

SEQ ID NO: 3278825 - RNA, 19 nt, Artificial Sequence
  Description of Artificial Sequence: Synthetic oligonucleotide
ucacuccuagacuaugucc

SEQ ID NO: 3278826 - RNA, 19 nt, Artificial Sequence
  Description of Artificial Sequence: Synthetic oligonucleotide
uucaucugcaucguggaca

SEQ ID NO: 3278827 - RNA, 19 nt, Artificial Sequence
  Description of Artificial Sequence: Synthetic oligonucleotide
ucugggugcaacccuaaga

SEQ ID NO: 3278828 - RNA, 19 nt, Artificial Sequence
  Description of Artificial Sequence: Synthetic oligonucleotide
cacugaacaagaugugucc

SEQ ID NO: 3278829 - RNA, 19 nt, Artificial Sequence
  Description of Artificial Sequence: Synthetic oligonucleotide
agggaucugugucugcccc

SEQ ID NO: 3278830 - RNA, 19 nt, Artificial Sequence
  Description of Artificial Sequence: Synthetic oligonucleotide
cacaggacgacucucgaag

SEQ ID NO: 3278831 - RNA, 19 nt, Artificial Sequence
  Description of Artificial Sequence: Synthetic oligonucleotide
auacuuuuggggucuaaca

SEQ ID NO: 3278832 - RNA, 19 nt, Artificial Sequence
  Description of Artificial Sequence: Synthetic oligonucleotide
acaugggcuucaucgaaac

SEQ ID NO: 3278833 - RNA, 19 nt, Artificial Sequence
  Description of Artificial Sequence: Synthetic oligonucleotide
cuaagaguagaaauucuga

SEQ ID NO: 3278834 - RNA, 19 nt, Artificial Sequence
  Description of Artificial Sequence: Synthetic oligonucleotide
ucuaacacaggacgacucu

SEQ ID NO: 3278835 - RNA, 19 nt, Artificial Sequence
  Description of Artificial Sequence: Synthetic oligonucleotide
caaacuguuaacaugggcu

SEQ ID NO: 3278836 - RNA, 19 nt, Artificial Sequence
  Description of Artificial Sequence: Synthetic oligonucleotide
ugagaugagaagucugccu

SEQ ID NO: 3278837 - RNA, 19 nt, Artificial Sequence
  Description of Artificial Sequence: Synthetic oligonucleotide
caaauacagguucugggug

SEQ ID NO: 3278838 - RNA, 19 nt, Artificial Sequence
  Description of Artificial Sequence: Synthetic oligonucleotide
acuguggacuuuucgucac

SEQ ID NO: 3278839 - RNA, 19 nt, Artificial Sequence
  Description of Artificial Sequence: Synthetic oligonucleotide
ucuucaucugcaucgugga

SEQ ID NO: 3278840 - RNA, 19 nt, Artificial Sequence
  Description of Artificial Sequence: Synthetic oligonucleotide
acccuaagaguagaaauuc

SEQ ID NO: 3278841 - RNA, 19 nt, Artificial Sequence
  Description of Artificial Sequence: Synthetic oligonucleotide
aguuugccuucuccaagcc

SEQ ID NO: 3278842 - RNA, 19 nt, Artificial Sequence
  Description of Artificial Sequence: Synthetic oligonucleotide
gaguuugccuucuccaagc

SEQ ID NO: 3278843 - RNA, 19 nt, Artificial Sequence
  Description of Artificial Sequence: Synthetic oligonucleotide
gaaggcucucuccacuggg

SEQ ID NO: 3278844 - RNA, 19 nt, Artificial Sequence
  Description of Artificial Sequence: Synthetic oligonucleotide
aucacuccuagacuauguc

SEQ ID NO: 3278845 - RNA, 19 nt, Artificial Sequence
  Description of Artificial Sequence: Synthetic oligonucleotide
aguuugcagaacaaggcag

SEQ ID NO: 3278846 - RNA, 19 nt, Artificial Sequence
  Description of Artificial Sequence: Synthetic oligonucleotide
agucugccuagacaaacag

SEQ ID NO: 3278847 - RNA, 19 nt, Artificial Sequence
  Description of Artificial Sequence: Synthetic oligonucleotide
uaacuguggacuuuucguc

SEQ ID NO: 3278848 - RNA, 19 nt, Artificial Sequence
  Description of Artificial Sequence: Synthetic oligonucleotide
gaauacuggaagaaaucac

SEQ ID NO: 3278849 - RNA, 19 nt, Artificial Sequence
  Description of Artificial Sequence: Synthetic oligonucleotide
ucauagauaagcuuggaag

SEQ ID NO: 3278850 - RNA, 19 nt, Artificial Sequence
  Description of Artificial Sequence: Synthetic oligonucleotide
uuagucaucccauucauca

SEQ ID NO: 3278851 - RNA, 19 nt, Artificial Sequence
  Description of Artificial Sequence: Synthetic oligonucleotide
uaaucucaaaugcacagag

SEQ ID NO: 3278852 - RNA, 19 nt, Artificial Sequence
  Description of Artificial Sequence: Synthetic oligonucleotide
aacguuucuuaucagccgg

SEQ ID NO: 3278853 - RNA, 19 nt, Artificial Sequence
  Description of Artificial Sequence: Synthetic oligonucleotide
cucaaaugcacagagaucc

SEQ ID NO: 3278854 - RNA, 19 nt, Artificial Sequence
  Description of Artificial Sequence: Synthetic oligonucleotide
uacugaguuuucuauagcg

SEQ ID NO: 3278855 - RNA, 19 nt, Artificial Sequence
  Description of Artificial Sequence: Synthetic oligonucleotide
ugaacguuucuuaucagcc

SEQ ID NO: 3278856 - RNA, 19 nt, Artificial Sequence
  Description of Artificial Sequence: Synthetic oligonucleotide
ugcaucacaugcaucaggg

SEQ ID NO: 3278857 - RNA, 19 nt, Artificial Sequence
  Description of Artificial Sequence: Synthetic oligonucleotide
aaugcacagagaucccacc

SEQ ID NO: 3278858 - RNA, 19 nt, Artificial Sequence
  Description of Artificial Sequence: Synthetic oligonucleotide
uuugaauccacuuggugca

SEQ ID NO: 3278859 - RNA, 19 nt, Artificial Sequence
  Description of Artificial Sequence: Synthetic oligonucleotide
aaauccauucuggggaucc

SEQ ID NO: 3278860 - RNA, 19 nt, Artificial Sequence
  Description of Artificial Sequence: Synthetic oligonucleotide
uuucuuaucagccgggcca

SEQ ID NO: 3278861 - RNA, 19 nt, Artificial Sequence
  Description of Artificial Sequence: Synthetic oligonucleotide
aacauggcuuuagucaucc

SEQ ID NO: 3278862 - RNA, 19 nt, Artificial Sequence
  Description of Artificial Sequence: Synthetic oligonucleotide
aggguuucucuguauagcc

SEQ ID NO: 3278863 - RNA, 19 nt, Artificial Sequence
  Description of Artificial Sequence: Synthetic oligonucleotide
aaggaacauggcuuuaguc

SEQ ID NO: 3278864 - RNA, 19 nt, Artificial Sequence
  Description of Artificial Sequence: Synthetic oligonucleotide
aauggaugacucuacuucu

SEQ ID NO: 3278865 - RNA, 19 nt, Artificial Sequence
  Description of Artificial Sequence: Synthetic oligonucleotide
aggaacauggcuuuaguca

SEQ ID NO: 3278866 - RNA, 19 nt, Artificial Sequence
  Description of Artificial Sequence: Synthetic oligonucleotide
gaauggaugacucuacuuc

SEQ ID NO: 3278867 - RNA, 19 nt, Artificial Sequence
  Description of Artificial Sequence: Synthetic oligonucleotide
accgauaucagcuuuuacu

SEQ ID NO: 3278868 - RNA, 19 nt, Artificial Sequence
  Description of Artificial Sequence: Synthetic oligonucleotide
gauccaaaagugcaccccg

SEQ ID NO: 3278869 - RNA, 19 nt, Artificial Sequence
  Description of Artificial Sequence: Synthetic oligonucleotide
aucucaaaugcacagagau

SEQ ID NO: 3278870 - RNA, 19 nt, Artificial Sequence
  Description of Artificial Sequence: Synthetic oligonucleotide
ucaaaugaagucauagaua

SEQ ID NO: 3278871 - RNA, 19 nt, Artificial Sequence
  Description of Artificial Sequence: Synthetic oligonucleotide
uuuucuauagcggcagggg

SEQ ID NO: 3278872 - RNA, 19 nt, Artificial Sequence
  Description of Artificial Sequence: Synthetic oligonucleotide
cugaguuuucuauagcggc

SEQ ID NO: 3278873 - RNA, 19 nt, Artificial Sequence
  Description of Artificial Sequence: Synthetic oligonucleotide
gaaggguuggcccacuucc

SEQ ID NO: 3278874 - RNA, 19 nt, Artificial Sequence
  Description of Artificial Sequence: Synthetic oligonucleotide
aaaagugcaccccggccuc

SEQ ID NO: 3278875 - RNA, 19 nt, Artificial Sequence
  Description of Artificial Sequence: Synthetic oligonucleotide
gucaaauccauucugggga

SEQ ID NO: 3278876 - RNA, 19 nt, Artificial Sequence
  Description of Artificial Sequence: Synthetic oligonucleotide
acauguuugaauccacuug

SEQ ID NO: 3278877 - RNA, 19 nt, Artificial Sequence
  Description of Artificial Sequence: Synthetic oligonucleotide
agguuguucacgucaaauc

SEQ ID NO: 3278878 - RNA, 19 nt, Artificial Sequence
  Description of Artificial Sequence: Synthetic oligonucleotide
cucuguauagcccuggcug

SEQ ID NO: 3278879 - RNA, 19 nt, Artificial Sequence
  Description of Artificial Sequence: Synthetic oligonucleotide
aaaugcacagagaucccac

SEQ ID NO: 3278880 - RNA, 19 nt, Artificial Sequence
  Description of Artificial Sequence: Synthetic oligonucleotide
ucuacuucucuucugcauc

SEQ ID NO: 3278881 - RNA, 19 nt, Artificial Sequence
  Description of Artificial Sequence: Synthetic oligonucleotide
ugaguuuucuauagcggca

SEQ ID NO: 3278882 - RNA, 19 nt, Artificial Sequence
  Description of Artificial Sequence: Synthetic oligonucleotide
uggugcaccgauaucagcu

SEQ ID NO: 3278883 - RNA, 19 nt, Artificial Sequence
  Description of Artificial Sequence: Synthetic oligonucleotide
uaagcuuggaagucucugc

SEQ ID NO: 3278884 - RNA, 19 nt, Artificial Sequence
  Description of Artificial Sequence: Synthetic oligonucleotide
ucuggaacuggcucuguag

SEQ ID NO: 3278885 - RNA, 19 nt, Artificial Sequence
  Description of Artificial Sequence: Synthetic oligonucleotide
gguuguucacgucaaaucc

SEQ ID NO: 3278886 - RNA, 19 nt, Artificial Sequence
  Description of Artificial Sequence: Synthetic oligonucleotide
cugaacguuucuuaucagc

SEQ ID NO: 3278887 - RNA, 19 nt, Artificial Sequence
  Description of Artificial Sequence: Synthetic oligonucleotide
uucacgucaaauccauucu

SEQ ID NO: 3278888 - RNA, 19 nt, Artificial Sequence
  Description of Artificial Sequence: Synthetic oligonucleotide
ugcaucagugagcugggcc

SEQ ID NO: 3278889 - RNA, 19 nt, Artificial Sequence
  Description of Artificial Sequence: Synthetic oligonucleotide
ucuguauagcccuggcugc

SEQ ID NO: 3278890 - RNA, 19 nt, Artificial Sequence
  Description of Artificial Sequence: Synthetic oligonucleotide
aagcuuggaagucucugca

SEQ ID NO: 3278891 - RNA, 19 nt, Artificial Sequence
  Description of Artificial Sequence: Synthetic oligonucleotide
gaauccacuuggugcaccg

SEQ ID NO: 3278892 - RNA, 19 nt, Artificial Sequence
  Description of Artificial Sequence: Synthetic oligonucleotide
guucacgucaaauccauuc

SEQ ID NO: 3278893 - RNA, 19 nt, Artificial Sequence
  Description of Artificial Sequence: Synthetic oligonucleotide
ugcaagguggcgguggugg

SEQ ID NO: 3278894 - RNA, 19 nt, Artificial Sequence
  Description of Artificial Sequence: Synthetic oligonucleotide
ucacgucaaauccauucug

SEQ ID NO: 3278895 - RNA, 19 nt, Artificial Sequence
  Description of Artificial Sequence: Synthetic oligonucleotide
gcuaaucucaaaugcacag

SEQ ID NO: 3278896 - RNA, 19 nt, Artificial Sequence
  Description of Artificial Sequence: Synthetic oligonucleotide
acugaguuuucuauagcgg

SEQ ID NO: 3278897 - RNA, 19 nt, Artificial Sequence
  Description of Artificial Sequence: Synthetic oligonucleotide
aggcuaaucucaaaugcac

SEQ ID NO: 3278898 - RNA, 19 nt, Artificial Sequence
  Description of Artificial Sequence: Synthetic oligonucleotide
caucagggcacccacuagg

SEQ ID NO: 3278899 - RNA, 19 nt, Artificial Sequence
  Description of Artificial Sequence: Synthetic oligonucleotide
acaggguuucucuguauag

SEQ ID NO: 3278900 - RNA, 19 nt, Artificial Sequence
  Description of Artificial Sequence: Synthetic oligonucleotide
uucuauagcggcagggguc

SEQ ID NO: 3278901 - RNA, 19 nt, Artificial Sequence
  Description of Artificial Sequence: Synthetic oligonucleotide
ugggucaagguuguucacg

SEQ ID NO: 3278902 - RNA, 19 nt, Artificial Sequence
  Description of Artificial Sequence: Synthetic oligonucleotide
uggcugacauguuugaauc

SEQ ID NO: 3278903 - RNA, 19 nt, Artificial Sequence
  Description of Artificial Sequence: Synthetic oligonucleotide
ucaaaugcacagagauccc

SEQ ID NO: 3278904 - RNA, 19 nt, Artificial Sequence
  Description of Artificial Sequence: Synthetic oligonucleotide
gucaagguuguucacguca

SEQ ID NO: 3278905 - RNA, 19 nt, Artificial Sequence
  Description of Artificial Sequence: Synthetic oligonucleotide
aauccauucuggggauccc

SEQ ID NO: 3278906 - RNA, 19 nt, Artificial Sequence
  Description of Artificial Sequence: Synthetic oligonucleotide
uggagaagaggcuccgcag

SEQ ID NO: 3278907 - RNA, 19 nt, Artificial Sequence
  Description of Artificial Sequence: Synthetic oligonucleotide
accaggcuaaucucaaaug

SEQ ID NO: 3278908 - RNA, 19 nt, Artificial Sequence
  Description of Artificial Sequence: Synthetic oligonucleotide
ucucaaaugcacagagauc

SEQ ID NO: 3278909 - RNA, 19 nt, Artificial Sequence
  Description of Artificial Sequence: Synthetic oligonucleotide
ugauccaaaagugcacccc

SEQ ID NO: 3278910 - RNA, 19 nt, Artificial Sequence
  Description of Artificial Sequence: Synthetic oligonucleotide
ucaagguuguucacgucaa

SEQ ID NO: 3278911 - RNA, 19 nt, Artificial Sequence
  Description of Artificial Sequence: Synthetic oligonucleotide
uggaugacucuacuucucu

SEQ ID NO: 3278912 - RNA, 19 nt, Artificial Sequence
  Description of Artificial Sequence: Synthetic oligonucleotide
uuuagucaucccauucauc

SEQ ID NO: 3278913 - RNA, 19 nt, Artificial Sequence
  Description of Artificial Sequence: Synthetic oligonucleotide
uagauaagcuuggaagucu

SEQ ID NO: 3278914 - RNA, 19 nt, Artificial Sequence
  Description of Artificial Sequence: Synthetic oligonucleotide
cuuguucagcugaauuccc

SEQ ID NO: 3278915 - RNA, 19 nt, Artificial Sequence
  Description of Artificial Sequence: Synthetic oligonucleotide
cauagauaagcuuggaagu

SEQ ID NO: 3278916 - RNA, 19 nt, Artificial Sequence
  Description of Artificial Sequence: Synthetic oligonucleotide
uguagaccaggcuaaucuc

SEQ ID NO: 3278917 - RNA, 19 nt, Artificial Sequence
  Description of Artificial Sequence: Synthetic oligonucleotide
auaagcuuggaagucucug

SEQ ID NO: 3278918 - RNA, 19 nt, Artificial Sequence
  Description of Artificial Sequence: Synthetic oligonucleotide
agcggcaggggucuuguuc

SEQ ID NO: 3278919 - RNA, 19 nt, Artificial Sequence
  Description of Artificial Sequence: Synthetic oligonucleotide
gauaucagcuuuuacugau

SEQ ID NO: 3278920 - RNA, 19 nt, Artificial Sequence
  Description of Artificial Sequence: Synthetic oligonucleotide
gaacuggcucuguagacca

SEQ ID NO: 3278921 - RNA, 19 nt, Artificial Sequence
  Description of Artificial Sequence: Synthetic oligonucleotide
aagguuguucacgucaaau

SEQ ID NO: 3278922 - RNA, 19 nt, Artificial Sequence
  Description of Artificial Sequence: Synthetic oligonucleotide
ucuauagcggcaggggucu

SEQ ID NO: 3278923 - RNA, 19 nt, Artificial Sequence
  Description of Artificial Sequence: Synthetic oligonucleotide
uuaucagccgggccagggc

SEQ ID NO: 3278924 - RNA, 19 nt, Artificial Sequence
  Description of Artificial Sequence: Synthetic oligonucleotide
uuucucuguauagcccugg

SEQ ID NO: 3278925 - RNA, 19 nt, Artificial Sequence
  Description of Artificial Sequence: Synthetic oligonucleotide
guuucuuaucagccgggcc

SEQ ID NO: 3278926 - RNA, 19 nt, Artificial Sequence
  Description of Artificial Sequence: Synthetic oligonucleotide
acccacuaggcccucugac

SEQ ID NO: 3278927 - RNA, 19 nt, Artificial Sequence
  Description of Artificial Sequence: Synthetic oligonucleotide
ugccggaaggaacauggcu

SEQ ID NO: 3278928 - RNA, 19 nt, Artificial Sequence
  Description of Artificial Sequence: Synthetic oligonucleotide
gaagucucugcaucaguga

SEQ ID NO: 3278929 - RNA, 19 nt, Artificial Sequence
  Description of Artificial Sequence: Synthetic oligonucleotide
cuuggugcaccgauaucag

SEQ ID NO: 3278930 - RNA, 19 nt, Artificial Sequence
  Description of Artificial Sequence: Synthetic oligonucleotide
cucaaaugaagucauagau

SEQ ID NO: 3278931 - RNA, 19 nt, Artificial Sequence
  Description of Artificial Sequence: Synthetic oligonucleotide
aucccauucaucaucuucu

SEQ ID NO: 3278932 - RNA, 19 nt, Artificial Sequence
  Description of Artificial Sequence: Synthetic oligonucleotide
ccgauaucagcuuuuacug

SEQ ID NO: 3278933 - RNA, 19 nt, Artificial Sequence
  Description of Artificial Sequence: Synthetic oligonucleotide
ucucuguauagcccuggcu

SEQ ID NO: 3278934 - RNA, 19 nt, Artificial Sequence
  Description of Artificial Sequence: Synthetic oligonucleotide
cauggcuuuagucauccca

SEQ ID NO: 3278935 - RNA, 19 nt, Artificial Sequence
  Description of Artificial Sequence: Synthetic oligonucleotide
caucccauucaucaucuuc

SEQ ID NO: 3278936 - RNA, 19 nt, Artificial Sequence
  Description of Artificial Sequence: Synthetic oligonucleotide
agauaagcuuggaagucuc

SEQ ID NO: 3278937 - RNA, 19 nt, Artificial Sequence
  Description of Artificial Sequence: Synthetic oligonucleotide
ugaauucccugccggauuu

SEQ ID NO: 3278938 - RNA, 19 nt, Artificial Sequence
  Description of Artificial Sequence: Synthetic oligonucleotide
agaauggaugacucuacuu

SEQ ID NO: 3278939 - RNA, 19 nt, Artificial Sequence
  Description of Artificial Sequence: Synthetic oligonucleotide
uucucuguauagcccuggc

SEQ ID NO: 3278940 - RNA, 19 nt, Artificial Sequence
  Description of Artificial Sequence: Synthetic oligonucleotide
cugcaucacaugcaucagg

SEQ ID NO: 3278941 - RNA, 19 nt, Artificial Sequence
  Description of Artificial Sequence: Synthetic oligonucleotide
ccaggcuaaucucaaaugc

SEQ ID NO: 3278942 - RNA, 19 nt, Artificial Sequence
  Description of Artificial Sequence: Synthetic oligonucleotide
ucaaauccauucuggggau

SEQ ID NO: 3278943 - RNA, 19 nt, Artificial Sequence
  Description of Artificial Sequence: Synthetic oligonucleotide
gaagaggcuccgcagaucu

SEQ ID NO: 3278944 - RNA, 19 nt, Artificial Sequence
  Description of Artificial Sequence: Synthetic oligonucleotide
uucuuaucagccgggccag

SEQ ID NO: 3278945 - RNA, 19 nt, Artificial Sequence
  Description of Artificial Sequence: Synthetic oligonucleotide
uagaccaggcuaaucucaa

SEQ ID NO: 3278946 - RNA, 19 nt, Artificial Sequence
  Description of Artificial Sequence: Synthetic oligonucleotide
caugcaucagggcacccac

SEQ ID NO: 3278947 - RNA, 19 nt, Artificial Sequence
  Description of Artificial Sequence: Synthetic oligonucleotide
ugcaucagggcacccacua

SEQ ID NO: 3278948 - RNA, 19 nt, Artificial Sequence
  Description of Artificial Sequence: Synthetic oligonucleotide
aaucucaaaugcacagaga

SEQ ID NO: 3278949 - RNA, 19 nt, Artificial Sequence
  Description of Artificial Sequence: Synthetic oligonucleotide
uccaguuugucauaggcgg

SEQ ID NO: 3278950 - RNA, 19 nt, Artificial Sequence
  Description of Artificial Sequence: Synthetic oligonucleotide
gaccaagucauccagcucc

SEQ ID NO: 3278951 - RNA, 19 nt, Artificial Sequence
  Description of Artificial Sequence: Synthetic oligonucleotide
auaggcggcagccuuuucc

SEQ ID NO: 3278952 - RNA, 19 nt, Artificial Sequence
  Description of Artificial Sequence: Synthetic oligonucleotide
cuuuuccucauacugcugg

SEQ ID NO: 3278953 - RNA, 19 nt, Artificial Sequence
  Description of Artificial Sequence: Synthetic oligonucleotide
ucuccaguuugucauaggc

SEQ ID NO: 3278954 - RNA, 19 nt, Artificial Sequence
  Description of Artificial Sequence: Synthetic oligonucleotide
ucauacugcuggcugaggc

SEQ ID NO: 3278955 - RNA, 19 nt, Artificial Sequence
  Description of Artificial Sequence: Synthetic oligonucleotide
uuguccaaguccacgacca

SEQ ID NO: 3278956 - RNA, 19 nt, Artificial Sequence
  Description of Artificial Sequence: Synthetic oligonucleotide
uuugucauaggcggcagcc

SEQ ID NO: 3278957 - RNA, 19 nt, Artificial Sequence
  Description of Artificial Sequence: Synthetic oligonucleotide
aagucauccagcuccugcu

SEQ ID NO: 3278958 - RNA, 19 nt, Artificial Sequence
  Description of Artificial Sequence: Synthetic oligonucleotide
ucugcaaccucuucuuccc

SEQ ID NO: 3278959 - RNA, 19 nt, Artificial Sequence
  Description of Artificial Sequence: Synthetic oligonucleotide
uguucuucgucuucuccag

SEQ ID NO: 3278960 - RNA, 19 nt, Artificial Sequence
  Description of Artificial Sequence: Synthetic oligonucleotide
uucugcaaccucuucuucc

SEQ ID NO: 3278961 - RNA, 19 nt, Artificial Sequence
  Description of Artificial Sequence: Synthetic oligonucleotide
uccaaguccacgaccaagu

SEQ ID NO: 3278962 - RNA, 19 nt, Artificial Sequence
  Description of Artificial Sequence: Synthetic oligonucleotide
aaguccacgaccaagucau

SEQ ID NO: 3278963 - RNA, 19 nt, Artificial Sequence
  Description of Artificial Sequence: Synthetic oligonucleotide
cuccaguuugucauaggcg

SEQ ID NO: 3278964 - RNA, 19 nt, Artificial Sequence
  Description of Artificial Sequence: Synthetic oligonucleotide
auacugcuggcugaggccc

SEQ ID NO: 3278965 - RNA, 19 nt, Artificial Sequence
  Description of Artificial Sequence: Synthetic oligonucleotide
ugcugaagccuguucuucg

SEQ ID NO: 3278966 - RNA, 19 nt, Artificial Sequence
  Description of Artificial Sequence: Synthetic oligonucleotide
uccuucugcaaccucuucu

SEQ ID NO: 3278967 - RNA, 19 nt, Artificial Sequence
  Description of Artificial Sequence: Synthetic oligonucleotide
auccagcuccugcugaagc

SEQ ID NO: 3278968 - RNA, 19 nt, Artificial Sequence
  Description of Artificial Sequence: Synthetic oligonucleotide
uuccucauacugcuggcug

SEQ ID NO: 3278969 - RNA, 19 nt, Artificial Sequence
  Description of Artificial Sequence: Synthetic oligonucleotide
uccugcugaagccuguucu

SEQ ID NO: 3278970 - RNA, 19 nt, Artificial Sequence
  Description of Artificial Sequence: Synthetic oligonucleotide
agccuuuuccucauacugc

SEQ ID NO: 3278971 - RNA, 19 nt, Artificial Sequence
  Description of Artificial Sequence: Synthetic oligonucleotide
cauacugcuggcugaggcc

SEQ ID NO: 3278972 - RNA, 19 nt, Artificial Sequence
  Description of Artificial Sequence: Synthetic oligonucleotide
ucgcugguuguccaagucc

SEQ ID NO: 3278973 - RNA, 19 nt, Artificial Sequence
  Description of Artificial Sequence: Synthetic oligonucleotide
caagucauccagcuccugc

SEQ ID NO: 3278974 - RNA, 19 nt, Artificial Sequence
  Description of Artificial Sequence: Synthetic oligonucleotide
uuuuccucauacugcuggc

SEQ ID NO: 3278975 - RNA, 19 nt, Artificial Sequence
  Description of Artificial Sequence: Synthetic oligonucleotide
ugaagccuguucuucgucu

SEQ ID NO: 3278976 - RNA, 19 nt, Artificial Sequence
  Description of Artificial Sequence: Synthetic oligonucleotide
cagccuuuuccucauacug

SEQ ID NO: 3278977 - RNA, 19 nt, Artificial Sequence
  Description of Artificial Sequence: Synthetic oligonucleotide
aagccuguucuucgucuuc

SEQ ID NO: 3278978 - RNA, 19 nt, Artificial Sequence
  Description of Artificial Sequence: Synthetic oligonucleotide
ugguuguccaaguccacga

SEQ ID NO: 3278979 - RNA, 19 nt, Artificial Sequence
  Description of Artificial Sequence: Synthetic oligonucleotide
acgaccaagucauccagcu

SEQ ID NO: 3278980 - RNA, 19 nt, Artificial Sequence
  Description of Artificial Sequence: Synthetic oligonucleotide
guuguccaaguccacgacc

SEQ ID NO: 3278981 - RNA, 19 nt, Artificial Sequence
  Description of Artificial Sequence: Synthetic oligonucleotide
uccacgaccaagucaucca

SEQ ID NO: 3278982 - RNA, 19 nt, Artificial Sequence
  Description of Artificial Sequence: Synthetic oligonucleotide
uccgaucuccuucugcaac

SEQ ID NO: 3278983 - RNA, 19 nt, Artificial Sequence
  Description of Artificial Sequence: Synthetic oligonucleotide
uccagcuccugcugaagcc

SEQ ID NO: 3278984 - RNA, 19 nt, Artificial Sequence
  Description of Artificial Sequence: Synthetic oligonucleotide
uucgucuucuccaguuugu

SEQ ID NO: 3278985 - RNA, 19 nt, Artificial Sequence
  Description of Artificial Sequence: Synthetic oligonucleotide
uucuccaguuugucauagg

SEQ ID NO: 3278986 - RNA, 19 nt, Artificial Sequence
  Description of Artificial Sequence: Synthetic oligonucleotide
cuucgucuucuccaguuug

SEQ ID NO: 3278987 - RNA, 19 nt, Artificial Sequence
  Description of Artificial Sequence: Synthetic oligonucleotide
uccucauacugcuggcuga

SEQ ID NO: 3278988 - RNA, 19 nt, Artificial Sequence
  Description of Artificial Sequence: Synthetic oligonucleotide
ugucauaggcggcagccuu

SEQ ID NO: 3278989 - RNA, 19 nt, Artificial Sequence
  Description of Artificial Sequence: Synthetic oligonucleotide
aggcccuccgaucuccuuc

SEQ ID NO: 3278990 - RNA, 19 nt, Artificial Sequence
  Description of Artificial Sequence: Synthetic oligonucleotide
uaggcggcagccuuuuccu

SEQ ID NO: 3278991 - RNA, 19 nt, Artificial Sequence
  Description of Artificial Sequence: Synthetic oligonucleotide
cuguucuucgucuucucca

SEQ ID NO: 3278992 - RNA, 19 nt, Artificial Sequence
  Description of Artificial Sequence: Synthetic oligonucleotide
ugcaaccucuucuuccccu

SEQ ID NO: 3278993 - RNA, 19 nt, Artificial Sequence
  Description of Artificial Sequence: Synthetic oligonucleotide
cugguuguccaaguccacg

SEQ ID NO: 3278994 - RNA, 19 nt, Artificial Sequence
  Description of Artificial Sequence: Synthetic oligonucleotide
uucuucgucuucuccaguu

SEQ ID NO: 3278995 - RNA, 19 nt, Artificial Sequence
  Description of Artificial Sequence: Synthetic oligonucleotide
aaccucuucuuccccuccu

SEQ ID NO: 3278996 - RNA, 19 nt, Artificial Sequence
  Description of Artificial Sequence: Synthetic oligonucleotide
agucauccagcuccugcug

SEQ ID NO: 3278997 - RNA, 19 nt, Artificial Sequence
  Description of Artificial Sequence: Synthetic oligonucleotide
cuucuccaguuugucauag

SEQ ID NO: 3278998 - RNA, 19 nt, Artificial Sequence
  Description of Artificial Sequence: Synthetic oligonucleotide
aucuccuucugcaaccucu

SEQ ID NO: 3278999 - RNA, 19 nt, Artificial Sequence
  Description of Artificial Sequence: Synthetic oligonucleotide
cacgaccaagucauccagc

SEQ ID NO: 3279000 - RNA, 19 nt, Artificial Sequence
  Description of Artificial Sequence: Synthetic oligonucleotide
accucuucuuccccuccuc

SEQ ID NO: 3279001 - RNA, 19 nt, Artificial Sequence
  Description of Artificial Sequence: Synthetic oligonucleotide
ucuucgucuucuccaguuu

SEQ ID NO: 3279002 - RNA, 19 nt, Artificial Sequence
  Description of Artificial Sequence: Synthetic oligonucleotide
uuuccucauacugcuggcu

SEQ ID NO: 3279003 - RNA, 19 nt, Artificial Sequence
  Description of Artificial Sequence: Synthetic oligonucleotide
aguugucgcugguugucca

SEQ ID NO: 3279004 - RNA, 19 nt, Artificial Sequence
  Description of Artificial Sequence: Synthetic oligonucleotide
caaguccacgaccaaguca

SEQ ID NO: 3279005 - RNA, 19 nt, Artificial Sequence
  Description of Artificial Sequence: Synthetic oligonucleotide
ucauccagcuccugcugaa

SEQ ID NO: 3279006 - RNA, 19 nt, Artificial Sequence
  Description of Artificial Sequence: Synthetic oligonucleotide
guuugucauaggcggcagc

SEQ ID NO: 3279007 - RNA, 19 nt, Artificial Sequence
  Description of Artificial Sequence: Synthetic oligonucleotide
uugucgcugguuguccaag

SEQ ID NO: 3279008 - RNA, 19 nt, Artificial Sequence
  Description of Artificial Sequence: Synthetic oligonucleotide
aguuugucauaggcggcag

SEQ ID NO: 3279009 - RNA, 19 nt, Artificial Sequence
  Description of Artificial Sequence: Synthetic oligonucleotide
gucuucuccaguuugucau

SEQ ID NO: 3279010 - RNA, 19 nt, Artificial Sequence
  Description of Artificial Sequence: Synthetic oligonucleotide
guccacgaccaagucaucc

SEQ ID NO: 3279011 - RNA, 19 nt, Artificial Sequence
  Description of Artificial Sequence: Synthetic oligonucleotide
accaguugucgcugguugu

SEQ ID NO: 3279012 - RNA, 19 nt, Artificial Sequence
  Description of Artificial Sequence: Synthetic oligonucleotide
ugcuggcugaggcccuccg

SEQ ID NO: 3279013 - RNA, 19 nt, Artificial Sequence
  Description of Artificial Sequence: Synthetic oligonucleotide
guccaaguccacgaccaag

SEQ ID NO: 3279014 - RNA, 19 nt, Artificial Sequence
  Description of Artificial Sequence: Synthetic oligonucleotide
ucuccuucugcaaccucuu

SEQ ID NO: 3279015 - RNA, 19 nt, Artificial Sequence
  Description of Artificial Sequence: Synthetic oligonucleotide
ucuucuccaguuugucaua

SEQ ID NO: 3279016 - RNA, 19 nt, Artificial Sequence
  Description of Artificial Sequence: Synthetic oligonucleotide
ugucgcugguuguccaagu

SEQ ID NO: 3279017 - RNA, 19 nt, Artificial Sequence
  Description of Artificial Sequence: Synthetic oligonucleotide
caaccucuucuuccccucc

SEQ ID NO: 3279018 - RNA, 19 nt, Artificial Sequence
  Description of Artificial Sequence: Synthetic oligonucleotide
uguccaaguccacgaccaa

SEQ ID NO: 3279019 - RNA, 19 nt, Artificial Sequence
  Description of Artificial Sequence: Synthetic oligonucleotide
uugucauaggcggcagccu

SEQ ID NO: 3279020 - RNA, 19 nt, Artificial Sequence
  Description of Artificial Sequence: Synthetic oligonucleotide
cuucugcaaccucuucuuc

SEQ ID NO: 3279021 - RNA, 19 nt, Artificial Sequence
  Description of Artificial Sequence: Synthetic oligonucleotide
gucauccagcuccugcuga

SEQ ID NO: 3279022 - RNA, 19 nt, Artificial Sequence
  Description of Artificial Sequence: Synthetic oligonucleotide
cugaagccuguucuucguc

SEQ ID NO: 3279023 - RNA, 19 nt, Artificial Sequence
  Description of Artificial Sequence: Synthetic oligonucleotide
caguugucgcugguugucc

SEQ ID NO: 3279024 - RNA, 19 nt, Artificial Sequence
  Description of Artificial Sequence: Synthetic oligonucleotide
cucuucuuccccuccucca

SEQ ID NO: 3279025 - RNA, 19 nt, Artificial Sequence
  Description of Artificial Sequence: Synthetic oligonucleotide
ucgucuucuccaguuuguc

SEQ ID NO: 3279026 - RNA, 19 nt, Artificial Sequence
  Description of Artificial Sequence: Synthetic oligonucleotide
ccgaucuccuucugcaacc

SEQ ID NO: 3279027 - RNA, 19 nt, Artificial Sequence
  Description of Artificial Sequence: Synthetic oligonucleotide
ggcagccuuuuccucauac

SEQ ID NO: 3279028 - RNA, 19 nt, Artificial Sequence
  Description of Artificial Sequence: Synthetic oligonucleotide
ccuguucuucgucuucucc

SEQ ID NO: 3279029 - RNA, 19 nt, Artificial Sequence
  Description of Artificial Sequence: Synthetic oligonucleotide
agccuguucuucgucuucu

SEQ ID NO: 3279030 - RNA, 19 nt, Artificial Sequence
  Description of Artificial Sequence: Synthetic oligonucleotide
caguuugucauaggcggca

SEQ ID NO: 3279031 - RNA, 19 nt, Artificial Sequence
  Description of Artificial Sequence: Synthetic oligonucleotide
gaucuccuucugcaaccuc

SEQ ID NO: 3279032 - RNA, 19 nt, Artificial Sequence
  Description of Artificial Sequence: Synthetic oligonucleotide
gucgcugguuguccaaguc

SEQ ID NO: 3279033 - RNA, 19 nt, Artificial Sequence
  Description of Artificial Sequence: Synthetic oligonucleotide
cugaggcccuccgaucucc

SEQ ID NO: 3279034 - RNA, 19 nt, Artificial Sequence
  Description of Artificial Sequence: Synthetic oligonucleotide
ccaguuugucauaggcggc

SEQ ID NO: 3279035 - RNA, 19 nt, Artificial Sequence
  Description of Artificial Sequence: Synthetic oligonucleotide
cugcaaccucuucuucccc

SEQ ID NO: 3279036 - RNA, 19 nt, Artificial Sequence
  Description of Artificial Sequence: Synthetic oligonucleotide
cucauacugcuggcugagg

SEQ ID NO: 3279037 - RNA, 19 nt, Artificial Sequence
  Description of Artificial Sequence: Synthetic oligonucleotide
gguuguccaaguccacgac

SEQ ID NO: 3279038 - RNA, 19 nt, Artificial Sequence
  Description of Artificial Sequence: Synthetic oligonucleotide
cugcugaagccuguucuuc

SEQ ID NO: 3279039 - RNA, 19 nt, Artificial Sequence
  Description of Artificial Sequence: Synthetic oligonucleotide
aggcggcagccuuuuccuc

SEQ ID NO: 3279040 - RNA, 19 nt, Artificial Sequence
  Description of Artificial Sequence: Synthetic oligonucleotide
uacugcuggcugaggcccu

SEQ ID NO: 3279041 - RNA, 19 nt, Artificial Sequence
  Description of Artificial Sequence: Synthetic oligonucleotide
ugaggcccuccgaucuccu

SEQ ID NO: 3279042 - RNA, 19 nt, Artificial Sequence
  Description of Artificial Sequence: Synthetic oligonucleotide
cauccagcuccugcugaag

SEQ ID NO: 3279043 - RNA, 19 nt, Artificial Sequence
  Description of Artificial Sequence: Synthetic oligonucleotide
ucauaggcggcagccuuuu

SEQ ID NO: 3279044 - RNA, 19 nt, Artificial Sequence
  Description of Artificial Sequence: Synthetic oligonucleotide
cagcuccugcugaagccug

SEQ ID NO: 3279045 - RNA, 19 nt, Artificial Sequence
  Description of Artificial Sequence: Synthetic oligonucleotide
uggcugaggcccuccgauc

SEQ ID NO: 3279046 - RNA, 19 nt, Artificial Sequence
  Description of Artificial Sequence: Synthetic oligonucleotide
guugucgcugguuguccaa

SEQ ID NO: 3279047 - RNA, 19 nt, Artificial Sequence
  Description of Artificial Sequence: Synthetic oligonucleotide
ccacgaccaagucauccag

SEQ ID NO: 3279048 - RNA, 19 nt, Artificial Sequence
  Description of Artificial Sequence: Synthetic oligonucleotide
acugcuggcugaggcccuc

SEQ ID NO: 3279049 - RNA, 19 nt, Artificial Sequence
  Description of Artificial Sequence: Synthetic oligonucleotide
aacuccuuaccucagugcc

SEQ ID NO: 3279050 - RNA, 19 nt, Artificial Sequence
  Description of Artificial Sequence: Synthetic oligonucleotide
aacaagcaagcuuuggccc

SEQ ID NO: 3279051 - RNA, 19 nt, Artificial Sequence
  Description of Artificial Sequence: Synthetic oligonucleotide
aguugaaauaauaaguggc

SEQ ID NO: 3279052 - RNA, 19 nt, Artificial Sequence
  Description of Artificial Sequence: Synthetic oligonucleotide
ucauugaucugcaaguggg

SEQ ID NO: 3279053 - RNA, 19 nt, Artificial Sequence
  Description of Artificial Sequence: Synthetic oligonucleotide
uacaaguugaaauaauaag

SEQ ID NO: 3279054 - RNA, 19 nt, Artificial Sequence
  Description of Artificial Sequence: Synthetic oligonucleotide
auugcuguccauuuugagc

SEQ ID NO: 3279055 - RNA, 19 nt, Artificial Sequence
  Description of Artificial Sequence: Synthetic oligonucleotide
uauuuauuuauuuauuuau

SEQ ID NO: 3279056 - RNA, 19 nt, Artificial Sequence
  Description of Artificial Sequence: Synthetic oligonucleotide
caaguugaaauaauaagug

SEQ ID NO: 3279057 - RNA, 19 nt, Artificial Sequence
  Description of Artificial Sequence: Synthetic oligonucleotide
acugcuuugccaugaaacc

SEQ ID NO: 3279058 - RNA, 19 nt, Artificial Sequence
  Description of Artificial Sequence: Synthetic oligonucleotide
aaccacauugucuucgggg

SEQ ID NO: 3279059 - RNA, 19 nt, Artificial Sequence
  Description of Artificial Sequence: Synthetic oligonucleotide
aguacaggcaauguugucc

SEQ ID NO: 3279060 - RNA, 19 nt, Artificial Sequence
  Description of Artificial Sequence: Synthetic oligonucleotide
uguaguaccuccuuuucag

SEQ ID NO: 3279061 - RNA, 19 nt, Artificial Sequence
  Description of Artificial Sequence: Synthetic oligonucleotide
cauguggugaaguacaggc

SEQ ID NO: 3279062 - RNA, 19 nt, Artificial Sequence
  Description of Artificial Sequence: Synthetic oligonucleotide
aaacuccuuaccucagugc

SEQ ID NO: 3279063 - RNA, 19 nt, Artificial Sequence
  Description of Artificial Sequence: Synthetic oligonucleotide
uuuauuuauuuauuuauuu

SEQ ID NO: 3279064 - RNA, 19 nt, Artificial Sequence
  Description of Artificial Sequence: Synthetic oligonucleotide
gaaaaugugaaguccccag

SEQ ID NO: 3279065 - RNA, 19 nt, Artificial Sequence
  Description of Artificial Sequence: Synthetic oligonucleotide
uuauuguugucccauuagc

SEQ ID NO: 3279066 - RNA, 19 nt, Artificial Sequence
  Description of Artificial Sequence: Synthetic oligonucleotide
aaaccuacgccccaguaca

SEQ ID NO: 3279067 - RNA, 19 nt, Artificial Sequence
  Description of Artificial Sequence: Synthetic oligonucleotide
uugcuguccauuuugagca

SEQ ID NO: 3279068 - RNA, 19 nt, Artificial Sequence
  Description of Artificial Sequence: Synthetic oligonucleotide
auuuugagcagcugcagag

SEQ ID NO: 3279069 - RNA, 19 nt, Artificial Sequence
  Description of Artificial Sequence: Synthetic oligonucleotide
uaggaaaaugugaaguccc

SEQ ID NO: 3279070 - RNA, 19 nt, Artificial Sequence
  Description of Artificial Sequence: Synthetic oligonucleotide
uuauuuauuuauuuauuua

SEQ ID NO: 3279071 - RNA, 19 nt, Artificial Sequence
  Description of Artificial Sequence: Synthetic oligonucleotide
ugagcaaaucuacaaguug

SEQ ID NO: 3279072 - RNA, 19 nt, Artificial Sequence
  Description of Artificial Sequence: Synthetic oligonucleotide
aagagacagaggcccaacc

SEQ ID NO: 3279073 - RNA, 19 nt, Artificial Sequence
  Description of Artificial Sequence: Synthetic oligonucleotide
ugagaagagacagaggccc

SEQ ID NO: 3279074 - RNA, 19 nt, Artificial Sequence
  Description of Artificial Sequence: Synthetic oligonucleotide
ucaaaaugggccaggauuc

SEQ ID NO: 3279075 - RNA, 19 nt, Artificial Sequence
  Description of Artificial Sequence: Synthetic oligonucleotide
gucaggaggaguuaggaag

SEQ ID NO: 3279076 - RNA, 19 nt, Artificial Sequence
  Description of Artificial Sequence: Synthetic oligonucleotide
ucaggaggaguuaggaagg

SEQ ID NO: 3279077 - RNA, 19 nt, Artificial Sequence
  Description of Artificial Sequence: Synthetic oligonucleotide
uugugauugagcugcagag

SEQ ID NO: 3279078 - RNA, 19 nt, Artificial Sequence
  Description of Artificial Sequence: Synthetic oligonucleotide
ugugguuagaagcaggcaa

SEQ ID NO: 3279079 - RNA, 19 nt, Artificial Sequence
  Description of Artificial Sequence: Synthetic oligonucleotide
acaaguugaaauaauaagu

SEQ ID NO: 3279080 - RNA, 19 nt, Artificial Sequence
  Description of Artificial Sequence: Synthetic oligonucleotide
auuauuguugucccauuag

SEQ ID NO: 3279081 - RNA, 19 nt, Artificial Sequence
  Description of Artificial Sequence: Synthetic oligonucleotide
ucugagcaaaucuacaagu

SEQ ID NO: 3279082 - RNA, 19 nt, Artificial Sequence
  Description of Artificial Sequence: Synthetic oligonucleotide
uuuuauuuauuuauuuauu

SEQ ID NO: 3279083 - RNA, 19 nt, Artificial Sequence
  Description of Artificial Sequence: Synthetic oligonucleotide
ugucuucggggccagaggg

SEQ ID NO: 3279084 - RNA, 19 nt, Artificial Sequence
  Description of Artificial Sequence: Synthetic oligonucleotide
ugcgauugcagccucuggg

SEQ ID NO: 3279085 - RNA, 19 nt, Artificial Sequence
  Description of Artificial Sequence: Synthetic oligonucleotide
ugcccuucagcacaugugg

SEQ ID NO: 3279086 - RNA, 19 nt, Artificial Sequence
  Description of Artificial Sequence: Synthetic oligonucleotide
cuuaguugaaccgagggug

SEQ ID NO: 3279087 - RNA, 19 nt, Artificial Sequence
  Description of Artificial Sequence: Synthetic oligonucleotide
guugaaauaauaaguggcc

SEQ ID NO: 3279088 - RNA, 19 nt, Artificial Sequence
  Description of Artificial Sequence: Synthetic oligonucleotide
caucaagaaagcuuuuagc

SEQ ID NO: 3279089 - RNA, 19 nt, Artificial Sequence
  Description of Artificial Sequence: Synthetic oligonucleotide
ugcaagugggacaucgccg

SEQ ID NO: 3279090 - RNA, 19 nt, Artificial Sequence
  Description of Artificial Sequence: Synthetic oligonucleotide
uguugucccauuagcaugc

SEQ ID NO: 3279091 - RNA, 19 nt, Artificial Sequence
  Description of Artificial Sequence: Synthetic oligonucleotide
agcuuaguugaaccgaggg

SEQ ID NO: 3279092 - RNA, 19 nt, Artificial Sequence
  Description of Artificial Sequence: Synthetic oligonucleotide
cuagaacucucaaaauggg

SEQ ID NO: 3279093 - RNA, 19 nt, Artificial Sequence
  Description of Artificial Sequence: Synthetic oligonucleotide
ucaacuguguagcagcccu

SEQ ID NO: 3279094 - RNA, 19 nt, Artificial Sequence
  Description of Artificial Sequence: Synthetic oligonucleotide
aauaauaaguggccuggaa

SEQ ID NO: 3279095 - RNA, 19 nt, Artificial Sequence
  Description of Artificial Sequence: Synthetic oligonucleotide
agaaggaacauuggcaggg

SEQ ID NO: 3279096 - RNA, 19 nt, Artificial Sequence
  Description of Artificial Sequence: Synthetic oligonucleotide
uaguugcuagcucugagca

SEQ ID NO: 3279097 - RNA, 19 nt, Artificial Sequence
  Description of Artificial Sequence: Synthetic oligonucleotide
agggcccacgucuugaacc

SEQ ID NO: 3279098 - RNA, 19 nt, Artificial Sequence
  Description of Artificial Sequence: Synthetic oligonucleotide
ugagguaaaugauaaccac

SEQ ID NO: 3279099 - RNA, 19 nt, Artificial Sequence
  Description of Artificial Sequence: Synthetic oligonucleotide
uggagugccagcacaaagc

SEQ ID NO: 3279100 - RNA, 19 nt, Artificial Sequence
  Description of Artificial Sequence: Synthetic oligonucleotide
uaaguggccuggaagagcu

SEQ ID NO: 3279101 - RNA, 19 nt, Artificial Sequence
  Description of Artificial Sequence: Synthetic oligonucleotide
uacuuagaaggaacauugg

SEQ ID NO: 3279102 - RNA, 19 nt, Artificial Sequence
  Description of Artificial Sequence: Synthetic oligonucleotide
ugggacaucgccgugagug

SEQ ID NO: 3279103 - RNA, 19 nt, Artificial Sequence
  Description of Artificial Sequence: Synthetic oligonucleotide
ucagcaccagagaugauga

SEQ ID NO: 3279104 - RNA, 19 nt, Artificial Sequence
  Description of Artificial Sequence: Synthetic oligonucleotide
aaagccaggccgcagcuca

SEQ ID NO: 3279105 - RNA, 19 nt, Artificial Sequence
  Description of Artificial Sequence: Synthetic oligonucleotide
aagagcuuagaaagggagg

SEQ ID NO: 3279106 - RNA, 19 nt, Artificial Sequence
  Description of Artificial Sequence: Synthetic oligonucleotide
ucgagaggcaggcacaggc

SEQ ID NO: 3279107 - RNA, 19 nt, Artificial Sequence
  Description of Artificial Sequence: Synthetic oligonucleotide
uuugagcagcugcagagca

SEQ ID NO: 3279108 - RNA, 19 nt, Artificial Sequence
  Description of Artificial Sequence: Synthetic oligonucleotide
uuguugucccauuagcaug

SEQ ID NO: 3279109 - RNA, 19 nt, Artificial Sequence
  Description of Artificial Sequence: Synthetic oligonucleotide
uuaguugaaccgagggugc

SEQ ID NO: 3279110 - RNA, 19 nt, Artificial Sequence
  Description of Artificial Sequence: Synthetic oligonucleotide
cacugcuuugccaugaaac

SEQ ID NO: 3279111 - RNA, 19 nt, Artificial Sequence
  Description of Artificial Sequence: Synthetic oligonucleotide
uuucucgagaggcaggcac

SEQ ID NO: 3279112 - RNA, 19 nt, Artificial Sequence
  Description of Artificial Sequence: Synthetic oligonucleotide
uguguagcagcccuugccu

SEQ ID NO: 3279113 - RNA, 19 nt, Artificial Sequence
  Description of Artificial Sequence: Synthetic oligonucleotide
aguaccuccuuuucagguc

SEQ ID NO: 3279114 - RNA, 19 nt, Artificial Sequence
  Description of Artificial Sequence: Synthetic oligonucleotide
cuaguugcuagcucugagc

SEQ ID NO: 3279115 - RNA, 19 nt, Artificial Sequence
  Description of Artificial Sequence: Synthetic oligonucleotide
uugccaugaaaccuacgcc

SEQ ID NO: 3279116 - RNA, 19 nt, Artificial Sequence
  Description of Artificial Sequence: Synthetic oligonucleotide
uugaaauaauaaguggccu

SEQ ID NO: 3279117 - RNA, 19 nt, Artificial Sequence
  Description of Artificial Sequence: Synthetic oligonucleotide
uagaaggaacauuggcagg

SEQ ID NO: 3279118 - RNA, 19 nt, Artificial Sequence
  Description of Artificial Sequence: Synthetic oligonucleotide
aaucuacaaguugaaauaa

SEQ ID NO: 3279119 - RNA, 19 nt, Artificial Sequence
  Description of Artificial Sequence: Synthetic oligonucleotide
uccggcauuauuguugucc

SEQ ID NO: 3279120 - RNA, 19 nt, Artificial Sequence
  Description of Artificial Sequence: Synthetic oligonucleotide
aaaaugggccaggauuccg

SEQ ID NO: 3279121 - RNA, 19 nt, Artificial Sequence
  Description of Artificial Sequence: Synthetic oligonucleotide
gaaaccuacgccccaguac

SEQ ID NO: 3279122 - RNA, 19 nt, Artificial Sequence
  Description of Artificial Sequence: Synthetic oligonucleotide
aaguacaggcaauguuguc

SEQ ID NO: 3279123 - RNA, 19 nt, Artificial Sequence
  Description of Artificial Sequence: Synthetic oligonucleotide
guuaggaaggccccggggc

SEQ ID NO: 3279124 - RNA, 19 nt, Artificial Sequence
  Description of Artificial Sequence: Synthetic oligonucleotide
agggaugaaggccagcuca

SEQ ID NO: 3279125 - RNA, 19 nt, Artificial Sequence
  Description of Artificial Sequence: Synthetic oligonucleotide
aagggcaaugcuguuagca

SEQ ID NO: 3279126 - RNA, 19 nt, Artificial Sequence
  Description of Artificial Sequence: Synthetic oligonucleotide
aaaugggccaggauuccgg

SEQ ID NO: 3279127 - RNA, 19 nt, Artificial Sequence
  Description of Artificial Sequence: Synthetic oligonucleotide
ccucaggguacuuagaagg

SEQ ID NO: 3279128 - RNA, 19 nt, Artificial Sequence
  Description of Artificial Sequence: Synthetic oligonucleotide
gagcaaaucuacaaguuga

SEQ ID NO: 3279129 - RNA, 19 nt, Artificial Sequence
  Description of Artificial Sequence: Synthetic oligonucleotide
gcugagguaaaugauaacc

SEQ ID NO: 3279130 - RNA, 19 nt, Artificial Sequence
  Description of Artificial Sequence: Synthetic oligonucleotide
guuccauccuaguugcuag

SEQ ID NO: 3279131 - RNA, 19 nt, Artificial Sequence
  Description of Artificial Sequence: Synthetic oligonucleotide
agcuuagaaagggagguag

SEQ ID NO: 3279132 - RNA, 19 nt, Artificial Sequence
  Description of Artificial Sequence: Synthetic oligonucleotide
accuggaguggccaaugcc

SEQ ID NO: 3279133 - RNA, 19 nt, Artificial Sequence
  Description of Artificial Sequence: Synthetic oligonucleotide
uguaccucguugucaacug

SEQ ID NO: 3279134 - RNA, 19 nt, Artificial Sequence
  Description of Artificial Sequence: Synthetic oligonucleotide
ucccaaacuccuuaccuca

SEQ ID NO: 3279135 - RNA, 19 nt, Artificial Sequence
  Description of Artificial Sequence: Synthetic oligonucleotide
agaugaugaguucugggau

SEQ ID NO: 3279136 - RNA, 19 nt, Artificial Sequence
  Description of Artificial Sequence: Synthetic oligonucleotide
gagguaggaaaaugugaag

SEQ ID NO: 3279137 - RNA, 19 nt, Artificial Sequence
  Description of Artificial Sequence: Synthetic oligonucleotide
agguaggaaaaugugaagu

SEQ ID NO: 3279138 - RNA, 19 nt, Artificial Sequence
  Description of Artificial Sequence: Synthetic oligonucleotide
agagcuuagaaagggaggu

SEQ ID NO: 3279139 - RNA, 19 nt, Artificial Sequence
  Description of Artificial Sequence: Synthetic oligonucleotide
accaacuccagaccucagg

SEQ ID NO: 3279140 - RNA, 19 nt, Artificial Sequence
  Description of Artificial Sequence: Synthetic oligonucleotide
agggcaaugcuguuagcag

SEQ ID NO: 3279141 - RNA, 19 nt, Artificial Sequence
  Description of Artificial Sequence: Synthetic oligonucleotide
ccaaugcccaccuaggugg

SEQ ID NO: 3279142 - RNA, 19 nt, Artificial Sequence
  Description of Artificial Sequence: Synthetic oligonucleotide
cuuuucagguccuguacug

SEQ ID NO: 3279143 - RNA, 19 nt, Artificial Sequence
  Description of Artificial Sequence: Synthetic oligonucleotide
aggaaaaugugaagucccc

SEQ ID NO: 3279144 - RNA, 19 nt, Artificial Sequence
  Description of Artificial Sequence: Synthetic oligonucleotide
aaggccccggggcugcucc

SEQ ID NO: 3279145 - RNA, 19 nt, Artificial Sequence
  Description of Artificial Sequence: Synthetic oligonucleotide
aguacauccucuccgcccu

SEQ ID NO: 3279146 - RNA, 19 nt, Artificial Sequence
  Description of Artificial Sequence: Synthetic oligonucleotide
aucugcaagugggacaucg

SEQ ID NO: 3279147 - RNA, 19 nt, Artificial Sequence
  Description of Artificial Sequence: Synthetic oligonucleotide
aucagcaccagagaugaug

SEQ ID NO: 3279148 - RNA, 19 nt, Artificial Sequence
  Description of Artificial Sequence: Synthetic oligonucleotide
aguuaggaaggccccgggg

SEQ ID NO: 3279149 - RNA, 19 nt, Artificial Sequence
  Description of Artificial Sequence: Synthetic oligonucleotide
uggccaauggcucagaagg

SEQ ID NO: 3279150 - RNA, 19 nt, Artificial Sequence
  Description of Artificial Sequence: Synthetic oligonucleotide
aaacauucaugauaccaac

SEQ ID NO: 3279151 - RNA, 19 nt, Artificial Sequence
  Description of Artificial Sequence: Synthetic oligonucleotide
uuuagucucaaacugcagc

SEQ ID NO: 3279152 - RNA, 19 nt, Artificial Sequence
  Description of Artificial Sequence: Synthetic oligonucleotide
aaugacggccaccauggcc

SEQ ID NO: 3279153 - RNA, 19 nt, Artificial Sequence
  Description of Artificial Sequence: Synthetic oligonucleotide
aagucaggaagacagcagg

SEQ ID NO: 3279154 - RNA, 19 nt, Artificial Sequence
  Description of Artificial Sequence: Synthetic oligonucleotide
aacccugaaacauucauga

SEQ ID NO: 3279155 - RNA, 19 nt, Artificial Sequence
  Description of Artificial Sequence: Synthetic oligonucleotide
agugccaugaggcacaaag

SEQ ID NO: 3279156 - RNA, 19 nt, Artificial Sequence
  Description of Artificial Sequence: Synthetic oligonucleotide
acauucaugauaccaacuc

SEQ ID NO: 3279157 - RNA, 19 nt, Artificial Sequence
  Description of Artificial Sequence: Synthetic oligonucleotide
aaagacaaacccugaaaca

SEQ ID NO: 3279158 - RNA, 19 nt, Artificial Sequence
  Description of Artificial Sequence: Synthetic oligonucleotide
auucaugauaccaacuccc

SEQ ID NO: 3279159 - RNA, 19 nt, Artificial Sequence
  Description of Artificial Sequence: Synthetic oligonucleotide
aguaagaaaauaaauaaaa

SEQ ID NO: 3279160 - RNA, 19 nt, Artificial Sequence
  Description of Artificial Sequence: Synthetic oligonucleotide
ugaaacauucaugauacca

SEQ ID NO: 3279161 - RNA, 19 nt, Artificial Sequence
  Description of Artificial Sequence: Synthetic oligonucleotide
ucugguaucggacacggac

SEQ ID NO: 3279162 - RNA, 19 nt, Artificial Sequence
  Description of Artificial Sequence: Synthetic oligonucleotide
caaacugcagcuucugucg

SEQ ID NO: 3279163 - RNA, 19 nt, Artificial Sequence
  Description of Artificial Sequence: Synthetic oligonucleotide
agaagggagaguucaugcc

SEQ ID NO: 3279164 - RNA, 19 nt, Artificial Sequence
  Description of Artificial Sequence: Synthetic oligonucleotide
caaagacaaacccugaaac

SEQ ID NO: 3279165 - RNA, 19 nt, Artificial Sequence
  Description of Artificial Sequence: Synthetic oligonucleotide
gauaccaacuccccagacg

SEQ ID NO: 3279166 - RNA, 19 nt, Artificial Sequence
  Description of Artificial Sequence: Synthetic oligonucleotide
ugaggcacaaagacaaacc

SEQ ID NO: 3279167 - RNA, 19 nt, Artificial Sequence
  Description of Artificial Sequence: Synthetic oligonucleotide
agacgagucagucuggcuc

SEQ ID NO: 3279168 - RNA, 19 nt, Artificial Sequence
  Description of Artificial Sequence: Synthetic oligonucleotide
caugauaccaacuccccag

SEQ ID NO: 3279169 - RNA, 19 nt, Artificial Sequence
  Description of Artificial Sequence: Synthetic oligonucleotide
uuagucucaaacugcagcu

SEQ ID NO: 3279170 - RNA, 19 nt, Artificial Sequence
  Description of Artificial Sequence: Synthetic oligonucleotide
aaaagucaggaagacagca

SEQ ID NO: 3279171 - RNA, 19 nt, Artificial Sequence
  Description of Artificial Sequence: Synthetic oligonucleotide
aaacugcagcuucugucgc

SEQ ID NO: 3279172 - RNA, 19 nt, Artificial Sequence
  Description of Artificial Sequence: Synthetic oligonucleotide
agucagucuggcucuagcc

SEQ ID NO: 3279173 - RNA, 19 nt, Artificial Sequence
  Description of Artificial Sequence: Synthetic oligonucleotide
aaccagggcaaugacggcc

SEQ ID NO: 3279174 - RNA, 19 nt, Artificial Sequence
  Description of Artificial Sequence: Synthetic oligonucleotide
gaagggagaguucaugccc

SEQ ID NO: 3279175 - RNA, 19 nt, Artificial Sequence
  Description of Artificial Sequence: Synthetic oligonucleotide
aagacaaacccugaaacau

SEQ ID NO: 3279176 - RNA, 19 nt, Artificial Sequence
  Description of Artificial Sequence: Synthetic oligonucleotide
auaccaacuccccagacga

SEQ ID NO: 3279177 - RNA, 19 nt, Artificial Sequence
  Description of Artificial Sequence: Synthetic oligonucleotide
gaggcacaaagacaaaccc

SEQ ID NO: 3279178 - RNA, 19 nt, Artificial Sequence
  Description of Artificial Sequence: Synthetic oligonucleotide
ugccaugaggcacaaagac

SEQ ID NO: 3279179 - RNA, 19 nt, Artificial Sequence
  Description of Artificial Sequence: Synthetic oligonucleotide
cauucaugauaccaacucc

SEQ ID NO: 3279180 - RNA, 19 nt, Artificial Sequence
  Description of Artificial Sequence: Synthetic oligonucleotide
agucucaaacugcagcuuc

SEQ ID NO: 3279181 - RNA, 19 nt, Artificial Sequence
  Description of Artificial Sequence: Synthetic oligonucleotide
uucaugauaccaacucccc

SEQ ID NO: 3279182 - RNA, 19 nt, Artificial Sequence
  Description of Artificial Sequence: Synthetic oligonucleotide
ucaaacugcagcuucuguc

SEQ ID NO: 3279183 - RNA, 19 nt, Artificial Sequence
  Description of Artificial Sequence: Synthetic oligonucleotide
aauggcucagaagggagag

SEQ ID NO: 3279184 - RNA, 19 nt, Artificial Sequence
  Description of Artificial Sequence: Synthetic oligonucleotide
ccugaaacauucaugauac

SEQ ID NO: 3279185 - RNA, 19 nt, Artificial Sequence
  Description of Artificial Sequence: Synthetic oligonucleotide
ucuagccccaggaaccagg

SEQ ID NO: 3279186 - RNA, 19 nt, Artificial Sequence
  Description of Artificial Sequence: Synthetic oligonucleotide
ggaaccagggcaaugacgg

SEQ ID NO: 3279187 - RNA, 19 nt, Artificial Sequence
  Description of Artificial Sequence: Synthetic oligonucleotide
uucaugcccaguuuagucu

SEQ ID NO: 3279188 - RNA, 19 nt, Artificial Sequence
  Description of Artificial Sequence: Synthetic oligonucleotide
ucagucuggcucuagcccc

SEQ ID NO: 3279189 - RNA, 19 nt, Artificial Sequence
  Description of Artificial Sequence: Synthetic oligonucleotide
cagaagggagaguucaugc

SEQ ID NO: 3279190 - RNA, 19 nt, Artificial Sequence
  Description of Artificial Sequence: Synthetic oligonucleotide
acaaagacaaacccugaaa

SEQ ID NO: 3279191 - RNA, 19 nt, Artificial Sequence
  Description of Artificial Sequence: Synthetic oligonucleotide
augaggcacaaagacaaac

SEQ ID NO: 3279192 - RNA, 19 nt, Artificial Sequence
  Description of Artificial Sequence: Synthetic oligonucleotide
caguuuagucucaaacugc

SEQ ID NO: 3279193 - RNA, 19 nt, Artificial Sequence
  Description of Artificial Sequence: Synthetic oligonucleotide
aaagucaggaagacagcag

SEQ ID NO: 3279194 - RNA, 19 nt, Artificial Sequence
  Description of Artificial Sequence: Synthetic oligonucleotide
gaaacauucaugauaccaa

SEQ ID NO: 3279195 - RNA, 19 nt, Artificial Sequence
  Description of Artificial Sequence: Synthetic oligonucleotide
ugguaucggacacggaccc

SEQ ID NO: 3279196 - RNA, 19 nt, Artificial Sequence
  Description of Artificial Sequence: Synthetic oligonucleotide
ucaugauaccaacucccca

SEQ ID NO: 3279197 - RNA, 19 nt, Artificial Sequence
  Description of Artificial Sequence: Synthetic oligonucleotide
gacagcagggucuccagug

SEQ ID NO: 3279198 - RNA, 19 nt, Artificial Sequence
  Description of Artificial Sequence: Synthetic oligonucleotide
acagcagggucuccagugc

SEQ ID NO: 3279199 - RNA, 19 nt, Artificial Sequence
  Description of Artificial Sequence: Synthetic oligonucleotide
aaacccugaaacauucaug

SEQ ID NO: 3279200 - RNA, 19 nt, Artificial Sequence
  Description of Artificial Sequence: Synthetic oligonucleotide
ucaggaagacagcaggguc

SEQ ID NO: 3279201 - RNA, 19 nt, Artificial Sequence
  Description of Artificial Sequence: Synthetic oligonucleotide
ucuggcucuagccccagga

SEQ ID NO: 3279202 - RNA, 19 nt, Artificial Sequence
  Description of Artificial Sequence: Synthetic oligonucleotide
aagacagcagggucuccag

SEQ ID NO: 3279203 - RNA, 19 nt, Artificial Sequence
  Description of Artificial Sequence: Synthetic oligonucleotide
cugguaucggacacggacc

SEQ ID NO: 3279204 - RNA, 19 nt, Artificial Sequence
  Description of Artificial Sequence: Synthetic oligonucleotide
ucggacacggacccgaauc

SEQ ID NO: 3279205 - RNA, 19 nt, Artificial Sequence
  Description of Artificial Sequence: Synthetic oligonucleotide
aacauucaugauaccaacu

SEQ ID NO: 3279206 - RNA, 19 nt, Artificial Sequence
  Description of Artificial Sequence: Synthetic oligonucleotide
aguuuagucucaaacugca

SEQ ID NO: 3279207 - RNA, 19 nt, Artificial Sequence
  Description of Artificial Sequence: Synthetic oligonucleotide
ugagccuccagugccauga

SEQ ID NO: 3279208 - RNA, 19 nt, Artificial Sequence
  Description of Artificial Sequence: Synthetic oligonucleotide
agccccaggaaccagggca

SEQ ID NO: 3279209 - RNA, 19 nt, Artificial Sequence
  Description of Artificial Sequence: Synthetic oligonucleotide
ucugucgcuucugguaucg

SEQ ID NO: 3279210 - RNA, 19 nt, Artificial Sequence
  Description of Artificial Sequence: Synthetic oligonucleotide
ucagaagggagaguucaug

SEQ ID NO: 3279211 - RNA, 19 nt, Artificial Sequence
  Description of Artificial Sequence: Synthetic oligonucleotide
gucagucuggcucuagccc

SEQ ID NO: 3279212 - RNA, 19 nt, Artificial Sequence
  Description of Artificial Sequence: Synthetic oligonucleotide
cuucugguaucggacacgg

SEQ ID NO: 3279213 - RNA, 19 nt, Artificial Sequence
  Description of Artificial Sequence: Synthetic oligonucleotide
uccagugccaugaggcaca

SEQ ID NO: 3279214 - RNA, 19 nt, Artificial Sequence
  Description of Artificial Sequence: Synthetic oligonucleotide
gacaaacccugaaacauuc

SEQ ID NO: 3279215 - RNA, 19 nt, Artificial Sequence
  Description of Artificial Sequence: Synthetic oligonucleotide
guucaugcccaguuuaguc

SEQ ID NO: 3279216 - RNA, 19 nt, Artificial Sequence
  Description of Artificial Sequence: Synthetic oligonucleotide
ggcacaaagacaaacccug

SEQ ID NO: 3279217 - RNA, 19 nt, Artificial Sequence
  Description of Artificial Sequence: Synthetic oligonucleotide
gcaaugacggccaccaugg

SEQ ID NO: 3279218 - RNA, 19 nt, Artificial Sequence
  Description of Artificial Sequence: Synthetic oligonucleotide
gagcugagccuccagugcc

SEQ ID NO: 3279219 - RNA, 19 nt, Artificial Sequence
  Description of Artificial Sequence: Synthetic oligonucleotide
ccaguuuagucucaaacug

SEQ ID NO: 3279220 - RNA, 19 nt, Artificial Sequence
  Description of Artificial Sequence: Synthetic oligonucleotide
ucaugcccaguuuagucuc

SEQ ID NO: 3279221 - RNA, 19 nt, Artificial Sequence
  Description of Artificial Sequence: Synthetic oligonucleotide
agaguucaugcccaguuua

SEQ ID NO: 3279222 - RNA, 19 nt, Artificial Sequence
  Description of Artificial Sequence: Synthetic oligonucleotide
auggccaauggcucagaag

SEQ ID NO: 3279223 - RNA, 19 nt, Artificial Sequence
  Description of Artificial Sequence: Synthetic oligonucleotide
aacuccccagacgagucag

SEQ ID NO: 3279224 - RNA, 19 nt, Artificial Sequence
  Description of Artificial Sequence: Synthetic oligonucleotide
uggcucuagccccaggaac

SEQ ID NO: 3279225 - RNA, 19 nt, Artificial Sequence
  Description of Artificial Sequence: Synthetic oligonucleotide
augacggccaccauggcca

SEQ ID NO: 3279226 - RNA, 19 nt, Artificial Sequence
  Description of Artificial Sequence: Synthetic oligonucleotide
ugucgcuucugguaucgga

SEQ ID NO: 3279227 - RNA, 19 nt, Artificial Sequence
  Description of Artificial Sequence: Synthetic oligonucleotide
cuagccccaggaaccaggg

SEQ ID NO: 3279228 - RNA, 19 nt, Artificial Sequence
  Description of Artificial Sequence: Synthetic oligonucleotide
agucaggaagacagcaggg

SEQ ID NO: 3279229 - RNA, 19 nt, Artificial Sequence
  Description of Artificial Sequence: Synthetic oligonucleotide
gaguucaugcccaguuuag

SEQ ID NO: 3279230 - RNA, 19 nt, Artificial Sequence
  Description of Artificial Sequence: Synthetic oligonucleotide
ugauaccaacuccccagac

SEQ ID NO: 3279231 - RNA, 19 nt, Artificial Sequence
  Description of Artificial Sequence: Synthetic oligonucleotide
gagucagucuggcucuagc

SEQ ID NO: 3279232 - RNA, 19 nt, Artificial Sequence
  Description of Artificial Sequence: Synthetic oligonucleotide
aacugcagcuucugucgcu

SEQ ID NO: 3279233 - RNA, 19 nt, Artificial Sequence
  Description of Artificial Sequence: Synthetic oligonucleotide
aagggagaguucaugccca

SEQ ID NO: 3279234 - RNA, 19 nt, Artificial Sequence
  Description of Artificial Sequence: Synthetic oligonucleotide
aggaaccagggcaaugacg

SEQ ID NO: 3279235 - RNA, 19 nt, Artificial Sequence
  Description of Artificial Sequence: Synthetic oligonucleotide
augauaccaacuccccaga

SEQ ID NO: 3279236 - RNA, 19 nt, Artificial Sequence
  Description of Artificial Sequence: Synthetic oligonucleotide
aggaagacagcagggucuc

SEQ ID NO: 3279237 - RNA, 19 nt, Artificial Sequence
  Description of Artificial Sequence: Synthetic oligonucleotide
ggcaaugacggccaccaug

SEQ ID NO: 3279238 - RNA, 19 nt, Artificial Sequence
  Description of Artificial Sequence: Synthetic oligonucleotide
agggcaaugacggccacca

SEQ ID NO: 3279239 - RNA, 19 nt, Artificial Sequence
  Description of Artificial Sequence: Synthetic oligonucleotide
ugcagcuucugucgcuucu

SEQ ID NO: 3279240 - RNA, 19 nt, Artificial Sequence
  Description of Artificial Sequence: Synthetic oligonucleotide
ucucaaacugcagcuucug

SEQ ID NO: 3279241 - RNA, 19 nt, Artificial Sequence
  Description of Artificial Sequence: Synthetic oligonucleotide
gaagacagcagggucucca

SEQ ID NO: 3279242 - RNA, 19 nt, Artificial Sequence
  Description of Artificial Sequence: Synthetic oligonucleotide
ucgcuucugguaucggaca

SEQ ID NO: 3279243 - RNA, 19 nt, Artificial Sequence
  Description of Artificial Sequence: Synthetic oligonucleotide
cugaaacauucaugauacc

SEQ ID NO: 3279244 - RNA, 19 nt, Artificial Sequence
  Description of Artificial Sequence: Synthetic oligonucleotide
guuuagucucaaacugcag

SEQ ID NO: 3279245 - RNA, 19 nt, Artificial Sequence
  Description of Artificial Sequence: Synthetic oligonucleotide
agcagggucuccagugccc

SEQ ID NO: 3279246 - RNA, 19 nt, Artificial Sequence
  Description of Artificial Sequence: Synthetic oligonucleotide
ccaugaggcacaaagacaa

SEQ ID NO: 3279247 - RNA, 19 nt, Artificial Sequence
  Description of Artificial Sequence: Synthetic oligonucleotide
uggcucagaagggagaguu

SEQ ID NO: 3279248 - RNA, 19 nt, Artificial Sequence
  Description of Artificial Sequence: Synthetic oligonucleotide
gcccaguuuagucucaaac

SEQ ID NO: 3279249 - RNA, 19 nt, Artificial Sequence
  Description of Artificial Sequence: Synthetic oligonucleotide
aauaaauaaaaucuguauc

SEQ ID NO: 3279250 - RNA, 19 nt, Artificial Sequence
  Description of Artificial Sequence: Synthetic oligonucleotide
auuacuacagcuuagguac

SEQ ID NO: 3279251 - RNA, 19 nt, Artificial Sequence
  Description of Artificial Sequence: Synthetic oligonucleotide
aaggaaaauaaauaaaauc

SEQ ID NO: 3279252 - RNA, 19 nt, Artificial Sequence
  Description of Artificial Sequence: Synthetic oligonucleotide
aaaucuguaucuuagggac

SEQ ID NO: 3279253 - RNA, 19 nt, Artificial Sequence
  Description of Artificial Sequence: Synthetic oligonucleotide
aauaacuauauauauauau

SEQ ID NO: 3279254 - RNA, 19 nt, Artificial Sequence
  Description of Artificial Sequence: Synthetic oligonucleotide
uauuguuucaauuuuaucu

SEQ ID NO: 3279255 - RNA, 19 nt, Artificial Sequence
  Description of Artificial Sequence: Synthetic oligonucleotide
  modified_base (7)..(7): a, c, u, g, unknown or other
  modified_base (9)..(9): a, c, u, g, unknown or other
  modified_base (11)..(11): a, c, u, g, unknown or other
  modified_base (14)..(14): a, c, u, g, unknown or other
  modified_base (16)..(16): a, c, u, g, unknown or other
  modified_base (18)..(18): a, c, u, g, unknown or other
auauaunununuunununu

SEQ ID NO: 3279256 - RNA, 19 nt, Artificial Sequence
  Description of Artificial Sequence: Synthetic oligonucleotide
  modified_base (14)..(14): a, c, u, g, unknown or other
  modified_base (16)..(16): a, c, u, g, unknown or other
  modified_base (18)..(18): a, c, u, g, unknown or other
uauauauauauaunununu

SEQ ID NO: 3279257 - RNA, 19 nt, Artificial Sequence
  Description of Artificial Sequence: Synthetic oligonucleotide
  modified_base (16)..(16): a, c, u, g, unknown or other
  modified_base (18)..(18): a, c, u, g, unknown or other
uauauauauauauaununu

SEQ ID NO: 3279258 - RNA, 19 nt, Artificial Sequence
  Description of Artificial Sequence: Synthetic oligonucleotide
uuuaucuauaaauucauug

SEQ ID NO: 3279259 - RNA, 19 nt, Artificial Sequence
  Description of Artificial Sequence: Synthetic oligonucleotide
  modified_base (18)..(18): a, c, u, g, unknown or other
uauauauauauauauaunu

SEQ ID NO: 3279260 - RNA, 19 nt, Artificial Sequence
  Description of Artificial Sequence: Synthetic oligonucleotide
auaaauaaaaucuguaucu

SEQ ID NO: 3279261 - RNA, 19 nt, Artificial Sequence
  Description of Artificial Sequence: Synthetic oligonucleotide
  modified_base (12)..(12): a, c, u, g, unknown or other
  modified_base (14)..(14): a, c, u, g, unknown or other
  modified_base (16)..(16): a, c, u, g, unknown or other
  modified_base (19)..(19): a, c, u, g, unknown or other
uauauauauaunununuun

SEQ ID NO: 3279262 - RNA, 19 nt, Artificial Sequence
  Description of Artificial Sequence: Synthetic oligonucleotide
uauauauauauauauauau

SEQ ID NO: 3279263 - RNA, 19 nt, Artificial Sequence
  Description of Artificial Sequence: Synthetic oligonucleotide
auaauaacuauauauauau

SEQ ID NO: 3279264 - RNA, 19 nt, Artificial Sequence
  Description of Artificial Sequence: Synthetic oligonucleotide
uaaaaucuguaucuuaggg

SEQ ID NO: 3279265 - RNA, 19 nt, Artificial Sequence
  Description of Artificial Sequence: Synthetic oligonucleotide
acuuuauuaagauaaaacu

SEQ ID NO: 3279266 - RNA, 19 nt, Artificial Sequence
  Description of Artificial Sequence: Synthetic oligonucleotide
aaauaaauaaaaucuguau

SEQ ID NO: 3279267 - RNA, 19 nt, Artificial Sequence
  Description of Artificial Sequence: Synthetic oligonucleotide
auuacauuuaucuauaaau

SEQ ID NO: 3279268 - RNA, 19 nt, Artificial Sequence
  Description of Artificial Sequence: Synthetic oligonucleotide
ucauuuuaaauuacuacag

SEQ ID NO: 3279269 - RNA, 19 nt, Artificial Sequence
  Description of Artificial Sequence: Synthetic oligonucleotide
  modified_base (5)..(5): a, c, u, g, unknown or other
  modified_base (7)..(7): a, c, u, g, unknown or other
  modified_base (9)..(9): a, c, u, g, unknown or other
  modified_base (12)..(12): a, c, u, g, unknown or other
  modified_base (14)..(14): a, c, u, g, unknown or other
  modified_base (16)..(16): a, c, u, g, unknown or other
auaunununuunununuuu

SEQ ID NO: 3279270 - RNA, 19 nt, Artificial Sequence
  Description of Artificial Sequence: Synthetic oligonucleotide
aauaaaaucuguaucuuag

SEQ ID NO: 3279271 - RNA, 19 nt, Artificial Sequence
  Description of Artificial Sequence: Synthetic oligonucleotide
uauaaauucauuguagacc

SEQ ID NO: 3279272 - RNA, 19 nt, Artificial Sequence
  Description of Artificial Sequence: Synthetic oligonucleotide
auuguuucaauuuuaucuc

SEQ ID NO: 3279273 - RNA, 19 nt, Artificial Sequence
  Description of Artificial Sequence: Synthetic oligonucleotide
aaugauuauaguaccaggg

SEQ ID NO: 3279274 - RNA, 19 nt, Artificial Sequence
  Description of Artificial Sequence: Synthetic oligonucleotide
uucauuguagaccaaagga

SEQ ID NO: 3279275 - RNA, 19 nt, Artificial Sequence
  Description of Artificial Sequence: Synthetic oligonucleotide
auaaauucauuguagacca

SEQ ID NO: 3279276 - RNA, 19 nt, Artificial Sequence
  Description of Artificial Sequence: Synthetic oligonucleotide
acuauauauauauauauau

SEQ ID NO: 3279277 - RNA, 19 nt, Artificial Sequence
  Description of Artificial Sequence: Synthetic oligonucleotide
aggaaaauaaauaaaaucu

SEQ ID NO: 3279278 - RNA, 19 nt, Artificial Sequence
  Description of Artificial Sequence: Synthetic oligonucleotide
uaucucuuuacuuucaggc

SEQ ID NO: 3279279 - RNA, 19 nt, Artificial Sequence
  Description of Artificial Sequence: Synthetic oligonucleotide
auuaagauaaaacuuucca

SEQ ID NO: 3279280 - RNA, 19 nt, Artificial Sequence
  Description of Artificial Sequence: Synthetic oligonucleotide
uuaucuauaaauucauugu

SEQ ID NO: 3279281 - RNA, 19 nt, Artificial Sequence
  Description of Artificial Sequence: Synthetic oligonucleotide
aauuuuaucucuuuacuuu

SEQ ID NO: 3279282 - RNA, 19 nt, Artificial Sequence
  Description of Artificial Sequence: Synthetic oligonucleotide
auuuuaaauuacuacagcu

SEQ ID NO: 3279283 - RNA, 19 nt, Artificial Sequence
  Description of Artificial Sequence: Synthetic oligonucleotide
agggaugucagccuuaugg

SEQ ID NO: 3279284 - RNA, 19 nt, Artificial Sequence
  Description of Artificial Sequence: Synthetic oligonucleotide
caaguuuccauauuacucg

SEQ ID NO: 3279285 - RNA, 19 nt, Artificial Sequence
  Description of Artificial Sequence: Synthetic oligonucleotide
ugaaacacagcuuuucucc

SEQ ID NO: 3279286 - RNA, 19 nt, Artificial Sequence
  Description of Artificial Sequence: Synthetic oligonucleotide
uuuaaauuacuacagcuua

SEQ ID NO: 3279287 - RNA, 19 nt, Artificial Sequence
  Description of Artificial Sequence: Synthetic oligonucleotide
aaaaucuguaucuuaggga

SEQ ID NO: 3279288 - RNA, 19 nt, Artificial Sequence
  Description of Artificial Sequence: Synthetic oligonucleotide
aguuuuguaaaucugaguu

SEQ ID NO: 3279289 - RNA, 19 nt, Artificial Sequence
  Description of Artificial Sequence: Synthetic oligonucleotide
uugaagauacuuuauuaag

SEQ ID NO: 3279290 - RNA, 19 nt, Artificial Sequence
  Description of Artificial Sequence: Synthetic oligonucleotide
acucaaugauuauaguacc

SEQ ID NO: 3279291 - RNA, 19 nt, Artificial Sequence
  Description of Artificial Sequence: Synthetic oligonucleotide
  modified_base (10)..(10): a, c, u, g, unknown or other
  modified_base (12)..(12): a, c, u, g, unknown or other
  modified_base (14)..(14): a, c, u, g, unknown or other
  modified_base (17)..(17): a, c, u, g, unknown or other
  modified_base (19)..(19): a, c, u, g, unknown or other
uauauauaunununuunun

SEQ ID NO: 3279292 - RNA, 19 nt, Artificial Sequence
  Description of Artificial Sequence: Synthetic oligonucleotide
uaacuauauauauauauau

SEQ ID NO: 3279293 - RNA, 19 nt, Artificial Sequence
  Description of Artificial Sequence: Synthetic oligonucleotide
acuaaguucaguucuaacu

SEQ ID NO: 3279294 - RNA, 19 nt, Artificial Sequence
  Description of Artificial Sequence: Synthetic oligonucleotide
aacacugaaacacagcuuu

SEQ ID NO: 3279295 - RNA, 19 nt, Artificial Sequence
  Description of Artificial Sequence: Synthetic oligonucleotide
cuuagggacauuuugacuc

SEQ ID NO: 3279296 - RNA, 19 nt, Artificial Sequence
  Description of Artificial Sequence: Synthetic oligonucleotide
ucuauaaauucauuguaga

SEQ ID NO: 3279297 - RNA, 19 nt, Artificial Sequence
  Description of Artificial Sequence: Synthetic oligonucleotide
aaggaaaacagcauuccac

SEQ ID NO: 3279298 - RNA, 19 nt, Artificial Sequence
  Description of Artificial Sequence: Synthetic oligonucleotide
ucaauuuuaucucuuuacu

SEQ ID NO: 3279299 - RNA, 19 nt, Artificial Sequence
  Description of Artificial Sequence: Synthetic oligonucleotide
cuuauggacaccaaguuuc

SEQ ID NO: 3279300 - RNA, 19 nt, Artificial Sequence
  Description of Artificial Sequence: Synthetic oligonucleotide
  modified_base (6)..(6): a, c, u, g, unknown or other
  modified_base (8)..(8): a, c, u, g, unknown or other
  modified_base (10)..(10): a, c, u, g, unknown or other
  modified_base (13)..(13): a, c, u, g, unknown or other
  modified_base (15)..(15): a, c, u, g, unknown or other
  modified_base (17)..(17): a, c, u, g, unknown or other
uauaunununuunununuu

SEQ ID NO: 3279301 - RNA, 19 nt, Artificial Sequence
  Description of Artificial Sequence: Synthetic oligonucleotide
auuuuaucucuuuacuuuc

SEQ ID NO: 3279302 - RNA, 19 nt, Artificial Sequence
  Description of Artificial Sequence: Synthetic oligonucleotide
uuaaauuacuacagcuuag

SEQ ID NO: 3279303 - RNA, 19 nt, Artificial Sequence
  Description of Artificial Sequence: Synthetic oligonucleotide
uauuaagauaaaacuuucc

SEQ ID NO: 3279304 - RNA, 19 nt, Artificial Sequence
  Description of Artificial Sequence: Synthetic oligonucleotide
uuucaggccacucuaacug

SEQ ID NO: 3279305 - RNA, 19 nt, Artificial Sequence
  Description of Artificial Sequence: Synthetic oligonucleotide
uaagauaaaacuuuccauu

SEQ ID NO: 3279306 - RNA, 19 nt, Artificial Sequence
  Description of Artificial Sequence: Synthetic oligonucleotide
uuccauauuacucggggag

SEQ ID NO: 3279307 - RNA, 19 nt, Artificial Sequence
  Description of Artificial Sequence: Synthetic oligonucleotide
aauuacuacagcuuaggua

SEQ ID NO: 3279308 - RNA, 19 nt, Artificial Sequence
  Description of Artificial Sequence: Synthetic oligonucleotide
  modified_base (8)..(8): a, c, u, g, unknown or other
  modified_base (10)..(10): a, c, u, g, unknown or other
  modified_base (12)..(12): a, c, u, g, unknown or other
  modified_base (15)..(15): a, c, u, g, unknown or other
  modified_base (17)..(17): a, c, u, g, unknown or other
  modified_base (19)..(19): a, c, u, g, unknown or other
uauauaunununuununun

SEQ ID NO: 3279309 - RNA, 19 nt, Artificial Sequence
  Description of Artificial Sequence: Synthetic oligonucleotide
cacucaaugauuauaguac

SEQ ID NO: 3279310 - RNA, 19 nt, Artificial Sequence
  Description of Artificial Sequence: Synthetic oligonucleotide
uuugaagauacuuuauuaa

SEQ ID NO: 3279311 - RNA, 19 nt, Artificial Sequence
  Description of Artificial Sequence: Synthetic oligonucleotide
aguaccagggaugucagcc

SEQ ID NO: 3279312 - RNA, 19 nt, Artificial Sequence
  Description of Artificial Sequence: Synthetic oligonucleotide
agaacaugguuauuguuuc

SEQ ID NO: 3279313 - RNA, 19 nt, Artificial Sequence
  Description of Artificial Sequence: Synthetic oligonucleotide
  modified_base (9)..(9): a, c, u, g, unknown or other
  modified_base (11)..(11): a, c, u, g, unknown or other
  modified_base (13)..(13): a, c, u, g, unknown or other
  modified_base (16)..(16): a, c, u, g, unknown or other
  modified_base (18)..(18): a, c, u, g, unknown or other
auauauaunununuununu

SEQ ID NO: 3279314 - RNA, 19 nt, Artificial Sequence
  Description of Artificial Sequence: Synthetic oligonucleotide
uaaauuacuacagcuuagg

SEQ ID NO: 3279315 - RNA, 19 nt, Artificial Sequence
  Description of Artificial Sequence: Synthetic oligonucleotide
uaacuguacagacaaacac

SEQ ID NO: 3279316 - RNA, 19 nt, Artificial Sequence
  Description of Artificial Sequence: Synthetic oligonucleotide
aaacacagcuuuucucccc

SEQ ID NO: 3279317 - RNA, 19 nt, Artificial Sequence
  Description of Artificial Sequence: Synthetic oligonucleotide
uucaauuuuaucucuuuac

SEQ ID NO: 3279318 - RNA, 19 nt, Artificial Sequence
  Description of Artificial Sequence: Synthetic oligonucleotide
uacauuuaucuauaaauuc

SEQ ID NO: 3279319 - RNA, 19 nt, Artificial Sequence
  Description of Artificial Sequence: Synthetic oligonucleotide
uucaguucuaacuguacag

SEQ ID NO: 3279320 - RNA, 19 nt, Artificial Sequence
  Description of Artificial Sequence: Synthetic oligonucleotide
uauaguaccagggauguca

SEQ ID NO: 3279321 - RNA, 19 nt, Artificial Sequence
  Description of Artificial Sequence: Synthetic oligonucleotide
uuuuaaauuacuacagcuu

SEQ ID NO: 3279322 - RNA, 19 nt, Artificial Sequence
  Description of Artificial Sequence: Synthetic oligonucleotide
auaaaaucuguaucuuagg

SEQ ID NO: 3279323 - RNA, 19 nt, Artificial Sequence
  Description of Artificial Sequence: Synthetic oligonucleotide
uuaagauaaaacuuuccau

SEQ ID NO: 3279324 - RNA, 19 nt, Artificial Sequence
  Description of Artificial Sequence: Synthetic oligonucleotide
aucucuuuacuuucaggcc

SEQ ID NO: 3279325 - RNA, 19 nt, Artificial Sequence
  Description of Artificial Sequence: Synthetic oligonucleotide
cuaaguucaguucuaacug

SEQ ID NO: 3279326 - RNA, 19 nt, Artificial Sequence
  Description of Artificial Sequence: Synthetic oligonucleotide
uacagacaaacacugaaac

SEQ ID NO: 3279327 - RNA, 19 nt, Artificial Sequence
  Description of Artificial Sequence: Synthetic oligonucleotide
agauaaaacuuuccauuac

SEQ ID NO: 3279328 - RNA, 19 nt, Artificial Sequence
  Description of Artificial Sequence: Synthetic oligonucleotide
uguacagacaaacacugaa

SEQ ID NO: 3279329 - RNA, 19 nt, Artificial Sequence
  Description of Artificial Sequence: Synthetic oligonucleotide
aacagcauuccacacuaag

SEQ ID NO: 3279330 - RNA, 19 nt, Artificial Sequence
  Description of Artificial Sequence: Synthetic oligonucleotide
uuacauuuaucuauaaauu

SEQ ID NO: 3279331 - RNA, 19 nt, Artificial Sequence
  Description of Artificial Sequence: Synthetic oligonucleotide
agauacuuuauuaagauaa

SEQ ID NO: 3279332 - RNA, 19 nt, Artificial Sequence
  Description of Artificial Sequence: Synthetic oligonucleotide
aaaacagcauuccacacua

SEQ ID NO: 3279333 - RNA, 19 nt, Artificial Sequence
  Description of Artificial Sequence: Synthetic oligonucleotide
uuuacuuucaggccacucu

SEQ ID NO: 3279334 - RNA, 19 nt, Artificial Sequence
  Description of Artificial Sequence: Synthetic oligonucleotide
accaaaggaaaauaaauaa

SEQ ID NO: 3279335 - RNA, 19 nt, Artificial Sequence
  Description of Artificial Sequence: Synthetic oligonucleotide
ucucuuuacuuucaggcca

SEQ ID NO: 3279336 - RNA, 19 nt, Artificial Sequence
  Description of Artificial Sequence: Synthetic oligonucleotide
uuauuaagauaaaacuuuc

SEQ ID NO: 3279337 - RNA, 19 nt, Artificial Sequence
  Description of Artificial Sequence: Synthetic oligonucleotide
ucauuguagaccaaaggaa

SEQ ID NO: 3279338 - RNA, 19 nt, Artificial Sequence
  Description of Artificial Sequence: Synthetic oligonucleotide
uuacucggggagaacaugg

SEQ ID NO: 3279339 - RNA, 19 nt, Artificial Sequence
  Description of Artificial Sequence: Synthetic oligonucleotide
aaguuuccauauuacucgg

SEQ ID NO: 3279340 - RNA, 19 nt, Artificial Sequence
  Description of Artificial Sequence: Synthetic oligonucleotide
aagauaaaacuuuccauua

SEQ ID NO: 3279341 - RNA, 19 nt, Artificial Sequence
  Description of Artificial Sequence: Synthetic oligonucleotide
uguuuucucauuuuaaauu

SEQ ID NO: 3279342 - RNA, 19 nt, Artificial Sequence
  Description of Artificial Sequence: Synthetic oligonucleotide
aucuuagggacauuuugac

SEQ ID NO: 3279343 - RNA, 19 nt, Artificial Sequence
  Description of Artificial Sequence: Synthetic oligonucleotide
ucaaugauuauaguaccag

SEQ ID NO: 3279344 - RNA, 19 nt, Artificial Sequence
  Description of Artificial Sequence: Synthetic oligonucleotide
gauaaaacuuuccauuaca

SEQ ID NO: 3279345 - RNA, 19 nt, Artificial Sequence
  Description of Artificial Sequence: Synthetic oligonucleotide
guaaaucugaguuuacaug

SEQ ID NO: 3279346 - RNA, 19 nt, Artificial Sequence
  Description of Artificial Sequence: Synthetic oligonucleotide
uaucuuagggacauuuuga

SEQ ID NO: 3279347 - RNA, 19 nt, Artificial Sequence
  Description of Artificial Sequence: Synthetic oligonucleotide
cuauaaauucauuguagac

SEQ ID NO: 3279348 - RNA, 19 nt, Artificial Sequence
  Description of Artificial Sequence: Synthetic oligonucleotide
guuuccauauuacucgggg

SEQ ID NO: 3279349 - RNA, 19 nt, Artificial Sequence
  Description of Artificial Sequence: Synthetic oligonucleotide
aauguaauuuuacauuugg

SEQ ID NO: 3279350 - RNA, 19 nt, Artificial Sequence
  Description of Artificial Sequence: Synthetic oligonucleotide
uaagaauuacguuacaccg

SEQ ID NO: 3279351 - RNA, 19 nt, Artificial Sequence
  Description of Artificial Sequence: Synthetic oligonucleotide
uguaauuuuacauuuggcc

SEQ ID NO: 3279352 - RNA, 19 nt, Artificial Sequence
  Description of Artificial Sequence: Synthetic oligonucleotide
aaaacugucaauuaagaau

SEQ ID NO: 3279353 - RNA, 19 nt, Artificial Sequence
  Description of Artificial Sequence: Synthetic oligonucleotide
aauucuaugaucuuggaua

SEQ ID NO: 3279354 - RNA, 19 nt, Artificial Sequence
  Description of Artificial Sequence: Synthetic oligonucleotide
gaaacacugauuuaggucc

SEQ ID NO: 3279355 - RNA, 19 nt, Artificial Sequence
  Description of Artificial Sequence: Synthetic oligonucleotide
aaaaccaacuauccaauuc

SEQ ID NO: 3279356 - RNA, 19 nt, Artificial Sequence
  Description of Artificial Sequence: Synthetic oligonucleotide
aaagcuauuuucucuuggc

SEQ ID NO: 3279357 - RNA, 19 nt, Artificial Sequence
  Description of Artificial Sequence: Synthetic oligonucleotide
ucaauuaagaauuacguua

SEQ ID NO: 3279358 - RNA, 19 nt, Artificial Sequence
  Description of Artificial Sequence: Synthetic oligonucleotide
uacauuuggccaaagaaag

SEQ ID NO: 3279359 - RNA, 19 nt, Artificial Sequence
  Description of Artificial Sequence: Synthetic oligonucleotide
uuaagaauuacguuacacc

SEQ ID NO: 3279360 - RNA, 19 nt, Artificial Sequence
  Description of Artificial Sequence: Synthetic oligonucleotide
agcaaauucaguuucuggg

SEQ ID NO: 3279361 - RNA, 19 nt, Artificial Sequence
  Description of Artificial Sequence: Synthetic oligonucleotide
uuuacauuuggccaaagaa

SEQ ID NO: 3279362 - RNA, 19 nt, Artificial Sequence
  Description of Artificial Sequence: Synthetic oligonucleotide
ugucaauuaagaauuacgu

SEQ ID NO: 3279363 - RNA, 19 nt, Artificial Sequence
  Description of Artificial Sequence: Synthetic oligonucleotide
aaagaaagcuauuuucucu

SEQ ID NO: 3279364 - RNA, 19 nt, Artificial Sequence
  Description of Artificial Sequence: Synthetic oligonucleotide
aaaccaacuauccaauucu

SEQ ID NO: 3279365 - RNA, 19 nt, Artificial Sequence
  Description of Artificial Sequence: Synthetic oligonucleotide
agcaguguuaagcaaauuc

SEQ ID NO: 3279366 - RNA, 19 nt, Artificial Sequence
  Description of Artificial Sequence: Synthetic oligonucleotide
ucuguaaccuuucuuaucu

SEQ ID NO: 3279367 - RNA, 19 nt, Artificial Sequence
  Description of Artificial Sequence: Synthetic oligonucleotide
aaagccaugcuucugagaa

SEQ ID NO: 3279368 - RNA, 19 nt, Artificial Sequence
  Description of Artificial Sequence: Synthetic oligonucleotide
uccaauucuaugaucuugg

SEQ ID NO: 3279369 - RNA, 19 nt, Artificial Sequence
  Description of Artificial Sequence: Synthetic oligonucleotide
agaaacacugauuuagguc

SEQ ID NO: 3279370 - RNA, 19 nt, Artificial Sequence
  Description of Artificial Sequence: Synthetic oligonucleotide
uaugaucuuggauaugagg

SEQ ID NO: 3279371 - RNA, 19 nt, Artificial Sequence
  Description of Artificial Sequence: Synthetic oligonucleotide
uuauguagcaguguuaagc

SEQ ID NO: 3279372 - RNA, 19 nt, Artificial Sequence
  Description of Artificial Sequence: Synthetic oligonucleotide
guugagagcacacuaacag

SEQ ID NO: 3279373 - RNA, 19 nt, Artificial Sequence
  Description of Artificial Sequence: Synthetic oligonucleotide
ucucuuggcagacaaagcc

SEQ ID NO: 3279374 - RNA, 19 nt, Artificial Sequence
  Description of Artificial Sequence: Synthetic oligonucleotide
uaugaggggauaaauauau

SEQ ID NO: 3279375 - RNA, 19 nt, Artificial Sequence
  Description of Artificial Sequence: Synthetic oligonucleotide
cugucaauuaagaauuacg

SEQ ID NO: 3279376 - RNA, 19 nt, Artificial Sequence
  Description of Artificial Sequence: Synthetic oligonucleotide
auuaagaauuacguuacac

SEQ ID NO: 3279377 - RNA, 19 nt, Artificial Sequence
  Description of Artificial Sequence: Synthetic oligonucleotide
uuaauguaauuuuacauuu

SEQ ID NO: 3279378 - RNA, 19 nt, Artificial Sequence
  Description of Artificial Sequence: Synthetic oligonucleotide
ucuuaauguaauuuuacau

SEQ ID NO: 3279379 - RNA, 19 nt, Artificial Sequence
  Description of Artificial Sequence: Synthetic oligonucleotide
augaucuuggauaugaggg

SEQ ID NO: 3279380 - RNA, 19 nt, Artificial Sequence
  Description of Artificial Sequence: Synthetic oligonucleotide
uuacauuuggccaaagaaa

SEQ ID NO: 3279381 - RNA, 19 nt, Artificial Sequence
  Description of Artificial Sequence: Synthetic oligonucleotide
aagcaaauucaguuucugg

SEQ ID NO: 3279382 - RNA, 19 nt, Artificial Sequence
  Description of Artificial Sequence: Synthetic oligonucleotide
guaauuuuacauuuggcca

SEQ ID NO: 3279383 - RNA, 19 nt, Artificial Sequence
  Description of Artificial Sequence: Synthetic oligonucleotide
aagaauuacguuacaccgc

SEQ ID NO: 3279384 - RNA, 19 nt, Artificial Sequence
  Description of Artificial Sequence: Synthetic oligonucleotide
ugagaaacacugauuuagg

SEQ ID NO: 3279385 - RNA, 19 nt, Artificial Sequence
  Description of Artificial Sequence: Synthetic oligonucleotide
acuguaauauguuuuaaaa

SEQ ID NO: 3279386 - RNA, 19 nt, Artificial Sequence
  Description of Artificial Sequence: Synthetic oligonucleotide
caaacuuuccucuguaacc

SEQ ID NO: 3279387 - RNA, 19 nt, Artificial Sequence
  Description of Artificial Sequence: Synthetic oligonucleotide
caauuaagaauuacguuac

SEQ ID NO: 3279388 - RNA, 19 nt, Artificial Sequence
  Description of Artificial Sequence: Synthetic oligonucleotide
uaucuuaauguaauuuuac

SEQ ID NO: 3279389 - RNA, 19 nt, Artificial Sequence
  Description of Artificial Sequence: Synthetic oligonucleotide
aauuauguagcaguguuaa

SEQ ID NO: 3279390 - RNA, 19 nt, Artificial Sequence
  Description of Artificial Sequence: Synthetic oligonucleotide
uauguagcaguguuaagca

SEQ ID NO: 3279391 - RNA, 19 nt, Artificial Sequence
  Description of Artificial Sequence: Synthetic oligonucleotide
uuucuuaucuuaauguaau

SEQ ID NO: 3279392 - RNA, 19 nt, Artificial Sequence
  Description of Artificial Sequence: Synthetic oligonucleotide
ugaucuuggauaugagggg

SEQ ID NO: 3279393 - RNA, 19 nt, Artificial Sequence
  Description of Artificial Sequence: Synthetic oligonucleotide
ugugucuucaaacuuuccu

SEQ ID NO: 3279394 - RNA, 19 nt, Artificial Sequence
  Description of Artificial Sequence: Synthetic oligonucleotide
uucugagaaacacugauuu

SEQ ID NO: 3279395 - RNA, 19 nt, Artificial Sequence
  Description of Artificial Sequence: Synthetic oligonucleotide
ucuaugaucuuggauauga

SEQ ID NO: 3279396 - RNA, 19 nt, Artificial Sequence
  Description of Artificial Sequence: Synthetic oligonucleotide
gaaagcuauuuucucuugg

SEQ ID NO: 3279397 - RNA, 19 nt, Artificial Sequence
  Description of Artificial Sequence: Synthetic oligonucleotide
uuucucuuggcagacaaag

SEQ ID NO: 3279398 - RNA, 19 nt, Artificial Sequence
  Description of Artificial Sequence: Synthetic oligonucleotide
aaccuuucuuaucuuaaug

SEQ ID NO: 3279399 - RNA, 19 nt, Artificial Sequence
  Description of Artificial Sequence: Synthetic oligonucleotide
ugggccaaaauuuaaauuu

SEQ ID NO: 3279400 - RNA, 19 nt, Artificial Sequence
  Description of Artificial Sequence: Synthetic oligonucleotide
ucaaacuuuccucuguaac

SEQ ID NO: 3279401 - RNA, 19 nt, Artificial Sequence
  Description of Artificial Sequence: Synthetic oligonucleotide
aaacugucaauuaagaauu

SEQ ID NO: 3279402 - RNA, 19 nt, Artificial Sequence
  Description of Artificial Sequence: Synthetic oligonucleotide
uaauuuuacauuuggccaa

SEQ ID NO: 3279403 - RNA, 19 nt, Artificial Sequence
  Description of Artificial Sequence: Synthetic oligonucleotide
agcuauuuucucuuggcag

SEQ ID NO: 3279404 - RNA, 19 nt, Artificial Sequence
  Description of Artificial Sequence: Synthetic oligonucleotide
uuaucuuaauguaauuuua

SEQ ID NO: 3279405 - RNA, 19 nt, Artificial Sequence
  Description of Artificial Sequence: Synthetic oligonucleotide
agaauuacguuacaccgcu

SEQ ID NO: 3279406 - RNA, 19 nt, Artificial Sequence
  Description of Artificial Sequence: Synthetic oligonucleotide
cugagaaacacugauuuag

SEQ ID NO: 3279407 - RNA, 19 nt, Artificial Sequence
  Description of Artificial Sequence: Synthetic oligonucleotide
uguagcaguguuaagcaaa

SEQ ID NO: 3279408 - RNA, 19 nt, Artificial Sequence
  Description of Artificial Sequence: Synthetic oligonucleotide
uaauguaauuuuacauuug

SEQ ID NO: 3279409 - RNA, 19 nt, Artificial Sequence
  Description of Artificial Sequence: Synthetic oligonucleotide
uacguuacaccgcuuacug

SEQ ID NO: 3279410 - RNA, 19 nt, Artificial Sequence
  Description of Artificial Sequence: Synthetic oligonucleotide
aauuacguuacaccgcuua

SEQ ID NO: 3279411 - RNA, 19 nt, Artificial Sequence
  Description of Artificial Sequence: Synthetic oligonucleotide
aagaaagcuauuuucucuu

SEQ ID NO: 3279412 - RNA, 19 nt, Artificial Sequence
  Description of Artificial Sequence: Synthetic oligonucleotide
guuaagcaaauucaguuuc

SEQ ID NO: 3279413 - RNA, 19 nt, Artificial Sequence
  Description of Artificial Sequence: Synthetic oligonucleotide
auuacguuacaccgcuuac

SEQ ID NO: 3279414 - RNA, 19 nt, Artificial Sequence
  Description of Artificial Sequence: Synthetic oligonucleotide
aaacuuuccucuguaaccu

SEQ ID NO: 3279415 - RNA, 19 nt, Artificial Sequence
  Description of Artificial Sequence: Synthetic oligonucleotide
accuuucuuaucuuaaugu

SEQ ID NO: 3279416 - RNA, 19 nt, Artificial Sequence
  Description of Artificial Sequence: Synthetic oligonucleotide
aucuuaauguaauuuuaca

SEQ ID NO: 3279417 - RNA, 19 nt, Artificial Sequence
  Description of Artificial Sequence: Synthetic oligonucleotide
uuuuacauuuggccaaaga

SEQ ID NO: 3279418 - RNA, 19 nt, Artificial Sequence
  Description of Artificial Sequence: Synthetic oligonucleotide
gaaucugucgccuguugag

SEQ ID NO: 3279419 - RNA, 19 nt, Artificial Sequence
  Description of Artificial Sequence: Synthetic oligonucleotide
uuuugugucuucaaacuuu

SEQ ID NO: 3279420 - RNA, 19 nt, Artificial Sequence
  Description of Artificial Sequence: Synthetic oligonucleotide
cacacuaacaguuaauuaa

SEQ ID NO: 3279421 - RNA, 19 nt, Artificial Sequence
  Description of Artificial Sequence: Synthetic oligonucleotide
acuauccaauucuaugauc

SEQ ID NO: 3279422 - RNA, 19 nt, Artificial Sequence
  Description of Artificial Sequence: Synthetic oligonucleotide
ugaggggauaaauauauuu

SEQ ID NO: 3279423 - RNA, 19 nt, Artificial Sequence
  Description of Artificial Sequence: Synthetic oligonucleotide
gauaugaggggauaaauau

SEQ ID NO: 3279424 - RNA, 19 nt, Artificial Sequence
  Description of Artificial Sequence: Synthetic oligonucleotide
acugauuuagguccgggga

SEQ ID NO: 3279425 - RNA, 19 nt, Artificial Sequence
  Description of Artificial Sequence: Synthetic oligonucleotide
caaauucaguuucugggcc

SEQ ID NO: 3279426 - RNA, 19 nt, Artificial Sequence
  Description of Artificial Sequence: Synthetic oligonucleotide
ugagagcacacuaacaguu

SEQ ID NO: 3279427 - RNA, 19 nt, Artificial Sequence
  Description of Artificial Sequence: Synthetic oligonucleotide
auguaauuuuacauuuggc

SEQ ID NO: 3279428 - RNA, 19 nt, Artificial Sequence
  Description of Artificial Sequence: Synthetic oligonucleotide
ugucuucaaacuuuccucu

SEQ ID NO: 3279429 - RNA, 19 nt, Artificial Sequence
  Description of Artificial Sequence: Synthetic oligonucleotide
aaauucaguuucugggcca

SEQ ID NO: 3279430 - RNA, 19 nt, Artificial Sequence
  Description of Artificial Sequence: Synthetic oligonucleotide
aagcuauuuucucuuggca

SEQ ID NO: 3279431 - RNA, 19 nt, Artificial Sequence
  Description of Artificial Sequence: Synthetic oligonucleotide
aauuaagaauuacguuaca

SEQ ID NO: 3279432 - RNA, 19 nt, Artificial Sequence
  Description of Artificial Sequence: Synthetic oligonucleotide
aacuauccaauucuaugau

SEQ ID NO: 3279433 - RNA, 19 nt, Artificial Sequence
  Description of Artificial Sequence: Synthetic oligonucleotide
uuaagcaaauucaguuucu

SEQ ID NO: 3279434 - RNA, 19 nt, Artificial Sequence
  Description of Artificial Sequence: Synthetic oligonucleotide
uguuaagcaaauucaguuu

SEQ ID NO: 3279435 - RNA, 19 nt, Artificial Sequence
  Description of Artificial Sequence: Synthetic oligonucleotide
uccucuguaaccuuucuua

SEQ ID NO: 3279436 - RNA, 19 nt, Artificial Sequence
  Description of Artificial Sequence: Synthetic oligonucleotide
uuugugucuucaaacuuuc

SEQ ID NO: 3279437 - RNA, 19 nt, Artificial Sequence
  Description of Artificial Sequence: Synthetic oligonucleotide
caguguuaagcaaauucag

SEQ ID NO: 3279438 - RNA, 19 nt, Artificial Sequence
  Description of Artificial Sequence: Synthetic oligonucleotide
uuuggccaaagaaagcuau

SEQ ID NO: 3279439 - RNA, 19 nt, Artificial Sequence
  Description of Artificial Sequence: Synthetic oligonucleotide
ucuucaaacuuuccucugu

SEQ ID NO: 3279440 - RNA, 19 nt, Artificial Sequence
  Description of Artificial Sequence: Synthetic oligonucleotide
ucuuaucuuaauguaauuu

SEQ ID NO: 3279441 - RNA, 19 nt, Artificial Sequence
  Description of Artificial Sequence: Synthetic oligonucleotide
uguugagagcacacuaaca

SEQ ID NO: 3279442 - RNA, 19 nt, Artificial Sequence
  Description of Artificial Sequence: Synthetic oligonucleotide
uacuguaauauguuuuaaa

SEQ ID NO: 3279443 - RNA, 19 nt, Artificial Sequence
  Description of Artificial Sequence: Synthetic oligonucleotide
acugucaauuaagaauuac

SEQ ID NO: 3279444 - RNA, 19 nt, Artificial Sequence
  Description of Artificial Sequence: Synthetic oligonucleotide
caaagaaagcuauuuucuc

SEQ ID NO: 3279445 - RNA, 19 nt, Artificial Sequence
  Description of Artificial Sequence: Synthetic oligonucleotide
caacuauccaauucuauga

SEQ ID NO: 3279446 - RNA, 19 nt, Artificial Sequence
  Description of Artificial Sequence: Synthetic oligonucleotide
auucuaugaucuuggauau

SEQ ID NO: 3279447 - RNA, 19 nt, Artificial Sequence
  Description of Artificial Sequence: Synthetic oligonucleotide
agccaugcuucugagaaac

SEQ ID NO: 3279448 - RNA, 19 nt, Artificial Sequence
  Description of Artificial Sequence: Synthetic oligonucleotide
gacaaagccaugcuucuga

SEQ ID NO: 3279449 - RNA, 19 nt, Artificial Sequence
  Description of Artificial Sequence: Synthetic oligonucleotide
uuuuguauaaaacacaagg

SEQ ID NO: 3279450 - RNA, 19 nt, Artificial Sequence
  Description of Artificial Sequence: Synthetic oligonucleotide
gauauguggaaucacaccg

SEQ ID NO: 3279451 - RNA, 19 nt, Artificial Sequence
  Description of Artificial Sequence: Synthetic oligonucleotide
uuguauaaaacacaaggga

SEQ ID NO: 3279452 - RNA, 19 nt, Artificial Sequence
  Description of Artificial Sequence: Synthetic oligonucleotide
auaaugaagaaauucugag

SEQ ID NO: 3279453 - RNA, 19 nt, Artificial Sequence
  Description of Artificial Sequence: Synthetic oligonucleotide
uaacacauaaugaagaaau

SEQ ID NO: 3279454 - RNA, 19 nt, Artificial Sequence
  Description of Artificial Sequence: Synthetic oligonucleotide
aaaacauacaaauguuucu

SEQ ID NO: 3279455 - RNA, 19 nt, Artificial Sequence
  Description of Artificial Sequence: Synthetic oligonucleotide
agcaaaguauuucuaacac

SEQ ID NO: 3279456 - RNA, 19 nt, Artificial Sequence
  Description of Artificial Sequence: Synthetic oligonucleotide
aacacaugaccauaaccac

SEQ ID NO: 3279457 - RNA, 19 nt, Artificial Sequence
  Description of Artificial Sequence: Synthetic oligonucleotide
uuaaucacuuccuaagcag

SEQ ID NO: 3279458 - RNA, 19 nt, Artificial Sequence
  Description of Artificial Sequence: Synthetic oligonucleotide
auugucuaugcuuuucccc

SEQ ID NO: 3279459 - RNA, 19 nt, Artificial Sequence
  Description of Artificial Sequence: Synthetic oligonucleotide
uauuucuaacacauaauga

SEQ ID NO: 3279460 - RNA, 19 nt, Artificial Sequence
  Description of Artificial Sequence: Synthetic oligonucleotide
agguugguuaaucacuucc

SEQ ID NO: 3279461 - RNA, 19 nt, Artificial Sequence
  Description of Artificial Sequence: Synthetic oligonucleotide
uguggaaucacaccgcccc

SEQ ID NO: 3279462 - RNA, 19 nt, Artificial Sequence
  Description of Artificial Sequence: Synthetic oligonucleotide
ucaacacaugaccauaacc

SEQ ID NO: 3279463 - RNA, 19 nt, Artificial Sequence
  Description of Artificial Sequence: Synthetic oligonucleotide
ugauaagugaauccaacuc

SEQ ID NO: 3279464 - RNA, 19 nt, Artificial Sequence
  Description of Artificial Sequence: Synthetic oligonucleotide
ugguuaaucacuuccuaag

SEQ ID NO: 3279465 - RNA, 19 nt, Artificial Sequence
  Description of Artificial Sequence: Synthetic oligonucleotide
acuguaucaaacuucguga

SEQ ID NO: 3279466 - RNA, 19 nt, Artificial Sequence
  Description of Artificial Sequence: Synthetic oligonucleotide
uugucuacagcaauugucu

SEQ ID NO: 3279467 - RNA, 19 nt, Artificial Sequence
  Description of Artificial Sequence: Synthetic oligonucleotide
aacuccaguaccucagccg

SEQ ID NO: 3279468 - RNA, 19 nt, Artificial Sequence
  Description of Artificial Sequence: Synthetic oligonucleotide
acacauaaugaagaaauuc

SEQ ID NO: 3279469 - RNA, 19 nt, Artificial Sequence
  Description of Artificial Sequence: Synthetic oligonucleotide
aucaccucggauugcaagc

SEQ ID NO: 3279470 - RNA, 19 nt, Artificial Sequence
  Description of Artificial Sequence: Synthetic oligonucleotide
ucuucaucaccucggauug

SEQ ID NO: 3279471 - RNA, 19 nt, Artificial Sequence
  Description of Artificial Sequence: Synthetic oligonucleotide
acuuugagauccuuggaag

SEQ ID NO: 3279472 - RNA, 19 nt, Artificial Sequence
  Description of Artificial Sequence: Synthetic oligonucleotide
aaagggacuguaucaaacu

SEQ ID NO: 3279473 - RNA, 19 nt, Artificial Sequence
  Description of Artificial Sequence: Synthetic oligonucleotide
uguggugcgagucuucaag

SEQ ID NO: 3279474 - RNA, 19 nt, Artificial Sequence
  Description of Artificial Sequence: Synthetic oligonucleotide
caacacaugaccauaacca

SEQ ID NO: 3279475 - RNA, 19 nt, Artificial Sequence
  Description of Artificial Sequence: Synthetic oligonucleotide
aaccuggucaaucaacaca

SEQ ID NO: 3279476 - RNA, 19 nt, Artificial Sequence
  Description of Artificial Sequence: Synthetic oligonucleotide
agaauugccgcacuguaca

SEQ ID NO: 3279477 - RNA, 19 nt, Artificial Sequence
  Description of Artificial Sequence: Synthetic oligonucleotide
ucggauugcaagcugcaag

SEQ ID NO: 3279478 - RNA, 19 nt, Artificial Sequence
  Description of Artificial Sequence: Synthetic oligonucleotide
auugcaagcugcaagugac

SEQ ID NO: 3279479 - RNA, 19 nt, Artificial Sequence
  Description of Artificial Sequence: Synthetic oligonucleotide
uuugccuccagccaugguc

SEQ ID NO: 3279480 - RNA, 19 nt, Artificial Sequence
  Description of Artificial Sequence: Synthetic oligonucleotide
gauccuuggaagcauuacc

SEQ ID NO: 3279481 - RNA, 19 nt, Artificial Sequence
  Description of Artificial Sequence: Synthetic oligonucleotide
cuuggaagcauuaccugcc

SEQ ID NO: 3279482 - RNA, 19 nt, Artificial Sequence
  Description of Artificial Sequence: Synthetic oligonucleotide
cuugauaagugaauccaac

SEQ ID NO: 3279483 - RNA, 19 nt, Artificial Sequence
  Description of Artificial Sequence: Synthetic oligonucleotide
ugagcaaaguauuucuaac

SEQ ID NO: 3279484 - RNA, 19 nt, Artificial Sequence
  Description of Artificial Sequence: Synthetic oligonucleotide
acugccuuagccuuggccu

SEQ ID NO: 3279485 - RNA, 19 nt, Artificial Sequence
  Description of Artificial Sequence: Synthetic oligonucleotide
cuugucuacagcaauuguc

SEQ ID NO: 3279486 - RNA, 19 nt, Artificial Sequence
  Description of Artificial Sequence: Synthetic oligonucleotide
uauguggaaucacaccgcc

SEQ ID NO: 3279487 - RNA, 19 nt, Artificial Sequence
  Description of Artificial Sequence: Synthetic oligonucleotide
ucuaacacauaaugaagaa

SEQ ID NO: 3279488 - RNA, 19 nt, Artificial Sequence
  Description of Artificial Sequence: Synthetic oligonucleotide
uacuuugagauccuuggaa

SEQ ID NO: 3279489 - RNA, 19 nt, Artificial Sequence
  Description of Artificial Sequence: Synthetic oligonucleotide
ugaauccaacucuucauca

SEQ ID NO: 3279490 - RNA, 19 nt, Artificial Sequence
  Description of Artificial Sequence: Synthetic oligonucleotide
aaauucugagacaaauuca

SEQ ID NO: 3279491 - RNA, 19 nt, Artificial Sequence
  Description of Artificial Sequence: Synthetic oligonucleotide
uaugguagccuugauaagu

SEQ ID NO: 3279492 - RNA, 19 nt, Artificial Sequence
  Description of Artificial Sequence: Synthetic oligonucleotide
ucuacagcaauugucuaug

SEQ ID NO: 3279493 - RNA, 19 nt, Artificial Sequence
  Description of Artificial Sequence: Synthetic oligonucleotide
uggucaaucaacacaugac

SEQ ID NO: 3279494 - RNA, 19 nt, Artificial Sequence
  Description of Artificial Sequence: Synthetic oligonucleotide
aaaaccuggucaaucaaca

SEQ ID NO: 3279495 - RNA, 19 nt, Artificial Sequence
  Description of Artificial Sequence: Synthetic oligonucleotide
accauaaccacagggaaag

SEQ ID NO: 3279496 - RNA, 19 nt, Artificial Sequence
  Description of Artificial Sequence: Synthetic oligonucleotide
uuuaucuugucuacagcaa

SEQ ID NO: 3279497 - RNA, 19 nt, Artificial Sequence
  Description of Artificial Sequence: Synthetic oligonucleotide
uauaaaacacaagggaaaa

SEQ ID NO: 3279498 - RNA, 19 nt, Artificial Sequence
  Description of Artificial Sequence: Synthetic oligonucleotide
uugucuaugcuuuuccccu

SEQ ID NO: 3279499 - RNA, 19 nt, Artificial Sequence
  Description of Artificial Sequence: Synthetic oligonucleotide
guuucuuuuaucuugucua

SEQ ID NO: 3279500 - RNA, 19 nt, Artificial Sequence
  Description of Artificial Sequence: Synthetic oligonucleotide
uggauauguggaaucacac

SEQ ID NO: 3279501 - RNA, 19 nt, Artificial Sequence
  Description of Artificial Sequence: Synthetic oligonucleotide
cuuugagauccuuggaagc

SEQ ID NO: 3279502 - RNA, 19 nt, Artificial Sequence
  Description of Artificial Sequence: Synthetic oligonucleotide
aauguuucuuuuaucuugu

SEQ ID NO: 3279503 - RNA, 19 nt, Artificial Sequence
  Description of Artificial Sequence: Synthetic oligonucleotide
auugccgcacuguacacag

SEQ ID NO: 3279504 - RNA, 19 nt, Artificial Sequence
  Description of Artificial Sequence: Synthetic oligonucleotide
uaaucacuuccuaagcagu

SEQ ID NO: 3279505 - RNA, 19 nt, Artificial Sequence
  Description of Artificial Sequence: Synthetic oligonucleotide
uuucuuuuaucuugucuac

SEQ ID NO: 3279506 - RNA, 19 nt, Artificial Sequence
  Description of Artificial Sequence: Synthetic oligonucleotide
augcgcuuuacuuugagau

SEQ ID NO: 3279507 - RNA, 19 nt, Artificial Sequence
  Description of Artificial Sequence: Synthetic oligonucleotide
aagcauuaccugccaacuc

SEQ ID NO: 3279508 - RNA, 19 nt, Artificial Sequence
  Description of Artificial Sequence: Synthetic oligonucleotide
ggucaaucaacacaugacc

SEQ ID NO: 3279509 - RNA, 19 nt, Artificial Sequence
  Description of Artificial Sequence: Synthetic oligonucleotide
gaaacugcagcccagcucu

SEQ ID NO: 3279510 - RNA, 19 nt, Artificial Sequence
  Description of Artificial Sequence: Synthetic oligonucleotide
acagcaauugucuaugcuu

SEQ ID NO: 3279511 - RNA, 19 nt, Artificial Sequence
  Description of Artificial Sequence: Synthetic oligonucleotide
uaugcuuuuccccucuguc

SEQ ID NO: 3279512 - RNA, 19 nt, Artificial Sequence
  Description of Artificial Sequence: Synthetic oligonucleotide
guuaaucacuuccuaagca

SEQ ID NO: 3279513 - RNA, 19 nt, Artificial Sequence
  Description of Artificial Sequence: Synthetic oligonucleotide
uuugagauccuuggaagca

SEQ ID NO: 3279514 - RNA, 19 nt, Artificial Sequence
  Description of Artificial Sequence: Synthetic oligonucleotide
ugaccauaaccacagggaa

SEQ ID NO: 3279515 - RNA, 19 nt, Artificial Sequence
  Description of Artificial Sequence: Synthetic oligonucleotide
uuaucuugucuacagcaau

SEQ ID NO: 3279516 - RNA, 19 nt, Artificial Sequence
  Description of Artificial Sequence: Synthetic oligonucleotide
gagcaaaguauuucuaaca

SEQ ID NO: 3279517 - RNA, 19 nt, Artificial Sequence
  Description of Artificial Sequence: Synthetic oligonucleotide
ucugagacaaauucauuuu

SEQ ID NO: 3279518 - RNA, 19 nt, Artificial Sequence
  Description of Artificial Sequence: Synthetic oligonucleotide
caauugucuaugcuuuucc

SEQ ID NO: 3279519 - RNA, 19 nt, Artificial Sequence
  Description of Artificial Sequence: Synthetic oligonucleotide
aacauacaaauguuucuuu

SEQ ID NO: 3279520 - RNA, 19 nt, Artificial Sequence
  Description of Artificial Sequence: Synthetic oligonucleotide
ucaaucaacacaugaccau

SEQ ID NO: 3279521 - RNA, 19 nt, Artificial Sequence
  Description of Artificial Sequence: Synthetic oligonucleotide
uguaucaaacuucgugagu

SEQ ID NO: 3279522 - RNA, 19 nt, Artificial Sequence
  Description of Artificial Sequence: Synthetic oligonucleotide
uguacacagcagcaguggc

SEQ ID NO: 3279523 - RNA, 19 nt, Artificial Sequence
  Description of Artificial Sequence: Synthetic oligonucleotide
aucaacacaugaccauaac

SEQ ID NO: 3279524 - RNA, 19 nt, Artificial Sequence
  Description of Artificial Sequence: Synthetic oligonucleotide
cuguaucaaacuucgugag

SEQ ID NO: 3279525 - RNA, 19 nt, Artificial Sequence
  Description of Artificial Sequence: Synthetic oligonucleotide
ucagccgugagguacucca

SEQ ID NO: 3279526 - RNA, 19 nt, Artificial Sequence
  Description of Artificial Sequence: Synthetic oligonucleotide
auauguggaaucacaccgc

SEQ ID NO: 3279527 - RNA, 19 nt, Artificial Sequence
  Description of Artificial Sequence: Synthetic oligonucleotide
uuaccugccaacuccagua

SEQ ID NO: 3279528 - RNA, 19 nt, Artificial Sequence
  Description of Artificial Sequence: Synthetic oligonucleotide
cacaccucucaaaugcugg

SEQ ID NO: 3279529 - RNA, 19 nt, Artificial Sequence
  Description of Artificial Sequence: Synthetic oligonucleotide
uugguuaaucacuuccuaa

SEQ ID NO: 3279530 - RNA, 19 nt, Artificial Sequence
  Description of Artificial Sequence: Synthetic oligonucleotide
gaaagggacuguaucaaac

SEQ ID NO: 3279531 - RNA, 19 nt, Artificial Sequence
  Description of Artificial Sequence: Synthetic oligonucleotide
agggaaagggacuguauca

SEQ ID NO: 3279532 - RNA, 19 nt, Artificial Sequence
  Description of Artificial Sequence: Synthetic oligonucleotide
agugaauccaacucuucau

SEQ ID NO: 3279533 - RNA, 19 nt, Artificial Sequence
  Description of Artificial Sequence: Synthetic oligonucleotide
uaaccacagggaaagggac

SEQ ID NO: 3279534 - RNA, 19 nt, Artificial Sequence
  Description of Artificial Sequence: Synthetic oligonucleotide
cugagacaaauucauuuug

SEQ ID NO: 3279535 - RNA, 19 nt, Artificial Sequence
  Description of Artificial Sequence: Synthetic oligonucleotide
caaaguauuucuaacacau

SEQ ID NO: 3279536 - RNA, 19 nt, Artificial Sequence
  Description of Artificial Sequence: Synthetic oligonucleotide
gaauccaacucuucaucac

SEQ ID NO: 3279537 - RNA, 19 nt, Artificial Sequence
  Description of Artificial Sequence: Synthetic oligonucleotide
cacauaaugaagaaauucu

SEQ ID NO: 3279538 - RNA, 19 nt, Artificial Sequence
  Description of Artificial Sequence: Synthetic oligonucleotide
ugagcagguugguuaauca

SEQ ID NO: 3279539 - RNA, 19 nt, Artificial Sequence
  Description of Artificial Sequence: Synthetic oligonucleotide
guggauucggcccacagga

SEQ ID NO: 3279540 - RNA, 19 nt, Artificial Sequence
  Description of Artificial Sequence: Synthetic oligonucleotide
gugucuguggauucggccc

SEQ ID NO: 3279541 - RNA, 19 nt, Artificial Sequence
  Description of Artificial Sequence: Synthetic oligonucleotide
uacagcaauugucuaugcu

SEQ ID NO: 3279542 - RNA, 19 nt, Artificial Sequence
  Description of Artificial Sequence: Synthetic oligonucleotide
agugacguggagugaugcg

SEQ ID NO: 3279543 - RNA, 19 nt, Artificial Sequence
  Description of Artificial Sequence: Synthetic oligonucleotide
ucaaacuucgugagucuaa

SEQ ID NO: 3279544 - RNA, 19 nt, Artificial Sequence
  Description of Artificial Sequence: Synthetic oligonucleotide
agguacuccagaauugccg

SEQ ID NO: 3279545 - RNA, 19 nt, Artificial Sequence
  Description of Artificial Sequence: Synthetic oligonucleotide
aagggacuguaucaaacuu

SEQ ID NO: 3279546 - RNA, 19 nt, Artificial Sequence
  Description of Artificial Sequence: Synthetic oligonucleotide
acuccaguaccucagccgu

SEQ ID NO: 3279547 - RNA, 19 nt, Artificial Sequence
  Description of Artificial Sequence: Synthetic oligonucleotide
acaccucucaaaugcuggg

SEQ ID NO: 3279548 - RNA, 19 nt, Artificial Sequence
  Description of Artificial Sequence: Synthetic oligonucleotide
uugcaagcugcaagugacg

SEQ ID NO: 3279549 - RNA, 19 nt, Artificial Sequence
  Description of Artificial Sequence: Synthetic oligonucleotide
aacaagguuccucaggccc

SEQ ID NO: 3279550 - RNA, 19 nt, Artificial Sequence
  Description of Artificial Sequence: Synthetic oligonucleotide
ugugauauacuccccaugg

SEQ ID NO: 3279551 - RNA, 19 nt, Artificial Sequence
  Description of Artificial Sequence: Synthetic oligonucleotide
uuauaaugcaugaggaagg

SEQ ID NO: 3279552 - RNA, 19 nt, Artificial Sequence
  Description of Artificial Sequence: Synthetic oligonucleotide
aauuaucucaauuggauau

SEQ ID NO: 3279553 - RNA, 19 nt, Artificial Sequence
  Description of Artificial Sequence: Synthetic oligonucleotide
gaaacuucaggccacagag

SEQ ID NO: 3279554 - RNA, 19 nt, Artificial Sequence
  Description of Artificial Sequence: Synthetic oligonucleotide
uuugcauuucuucacgugg

SEQ ID NO: 3279555 - RNA, 19 nt, Artificial Sequence
  Description of Artificial Sequence: Synthetic oligonucleotide
aauuuucucccauuccagc

SEQ ID NO: 3279556 - RNA, 19 nt, Artificial Sequence
  Description of Artificial Sequence: Synthetic oligonucleotide
augucugugauauacuccc

SEQ ID NO: 3279557 - RNA, 19 nt, Artificial Sequence
  Description of Artificial Sequence: Synthetic oligonucleotide
cucauuauaaugcaugagg

SEQ ID NO: 3279558 - RNA, 19 nt, Artificial Sequence
  Description of Artificial Sequence: Synthetic oligonucleotide
gaaaagaccaggaugacag

SEQ ID NO: 3279559 - RNA, 19 nt, Artificial Sequence
  Description of Artificial Sequence: Synthetic oligonucleotide
uuaauuuucaaauccuugu

SEQ ID NO: 3279560 - RNA, 19 nt, Artificial Sequence
  Description of Artificial Sequence: Synthetic oligonucleotide
auuauaaugcaugaggaag

SEQ ID NO: 3279561 - RNA, 19 nt, Artificial Sequence
  Description of Artificial Sequence: Synthetic oligonucleotide
aaaguccuaaacaagguuc

SEQ ID NO: 3279562 - RNA, 19 nt, Artificial Sequence
  Description of Artificial Sequence: Synthetic oligonucleotide
ugaagaauccucuaucuug

SEQ ID NO: 3279563 - RNA, 19 nt, Artificial Sequence
  Description of Artificial Sequence: Synthetic oligonucleotide
uaaugcaugaggaaggcca

SEQ ID NO: 3279564 - RNA, 19 nt, Artificial Sequence
  Description of Artificial Sequence: Synthetic oligonucleotide
ucauuauaaugcaugagga

SEQ ID NO: 3279565 - RNA, 19 nt, Artificial Sequence
  Description of Artificial Sequence: Synthetic oligonucleotide
ugcaucaccugcaaaauag

SEQ ID NO: 3279566 - RNA, 19 nt, Artificial Sequence
  Description of Artificial Sequence: Synthetic oligonucleotide
cauggaaacauugacaugc

SEQ ID NO: 3279567 - RNA, 19 nt, Artificial Sequence
  Description of Artificial Sequence: Synthetic oligonucleotide
aaaauaggguguugccucc

SEQ ID NO: 3279568 - RNA, 19 nt, Artificial Sequence
  Description of Artificial Sequence: Synthetic oligonucleotide
ugaaguuccaugaagugac

SEQ ID NO: 3279569 - RNA, 19 nt, Artificial Sequence
  Description of Artificial Sequence: Synthetic oligonucleotide
aauuggauauggcuggaag

SEQ ID NO: 3279570 - RNA, 19 nt, Artificial Sequence
  Description of Artificial Sequence: Synthetic oligonucleotide
aaggucaguagacaggcuc

SEQ ID NO: 3279571 - RNA, 19 nt, Artificial Sequence
  Description of Artificial Sequence: Synthetic oligonucleotide
aaaagguuggaaucugaag

SEQ ID NO: 3279572 - RNA, 19 nt, Artificial Sequence
  Description of Artificial Sequence: Synthetic oligonucleotide
gaugacagacucuaacugg

SEQ ID NO: 3279573 - RNA, 19 nt, Artificial Sequence
  Description of Artificial Sequence: Synthetic oligonucleotide
ucucaauuggauauggcug

SEQ ID NO: 3279574 - RNA, 19 nt, Artificial Sequence
  Description of Artificial Sequence: Synthetic oligonucleotide
agugaugucugugauauac

SEQ ID NO: 3279575 - RNA, 19 nt, Artificial Sequence
  Description of Artificial Sequence: Synthetic oligonucleotide
cucucgaggacauagacag

SEQ ID NO: 3279576 - RNA, 19 nt, Artificial Sequence
  Description of Artificial Sequence: Synthetic oligonucleotide
ucuaucuugauaugcagga

SEQ ID NO: 3279577 - RNA, 19 nt, Artificial Sequence
  Description of Artificial Sequence: Synthetic oligonucleotide
ucaccugcaaaauagggug

SEQ ID NO: 3279578 - RNA, 19 nt, Artificial Sequence
  Description of Artificial Sequence: Synthetic oligonucleotide
caugaagugacagaugugg

SEQ ID NO: 3279579 - RNA, 19 nt, Artificial Sequence
  Description of Artificial Sequence: Synthetic oligonucleotide
ugaauccuagcauugcagg

SEQ ID NO: 3279580 - RNA, 19 nt, Artificial Sequence
  Description of Artificial Sequence: Synthetic oligonucleotide
ugaagugacagauguggcg

SEQ ID NO: 3279581 - RNA, 19 nt, Artificial Sequence
  Description of Artificial Sequence: Synthetic oligonucleotide
gacauagacaggcuggcgg

SEQ ID NO: 3279582 - RNA, 19 nt, Artificial Sequence
  Description of Artificial Sequence: Synthetic oligonucleotide
aacuucaggccacagaggu

SEQ ID NO: 3279583 - RNA, 19 nt, Artificial Sequence
  Description of Artificial Sequence: Synthetic oligonucleotide
cuuaauuuucaaauccuug

SEQ ID NO: 3279584 - RNA, 19 nt, Artificial Sequence
  Description of Artificial Sequence: Synthetic oligonucleotide
aaguccuaaacaagguucc

SEQ ID NO: 3279585 - RNA, 19 nt, Artificial Sequence
  Description of Artificial Sequence: Synthetic oligonucleotide
aaggcauccaguuccuggg

SEQ ID NO: 3279586 - RNA, 19 nt, Artificial Sequence
  Description of Artificial Sequence: Synthetic oligonucleotide
gauaauuuucucccauucc

SEQ ID NO: 3279587 - RNA, 19 nt, Artificial Sequence
  Description of Artificial Sequence: Synthetic oligonucleotide
agugguacaggccagagaa

SEQ ID NO: 3279588 - RNA, 19 nt, Artificial Sequence
  Description of Artificial Sequence: Synthetic oligonucleotide
cucaauuggauauggcugg

SEQ ID NO: 3279589 - RNA, 19 nt, Artificial Sequence
  Description of Artificial Sequence: Synthetic oligonucleotide
aaacaagguuccucaggcc

SEQ ID NO: 3279590 - RNA, 19 nt, Artificial Sequence
  Description of Artificial Sequence: Synthetic oligonucleotide
accacagcagcacugcugc

SEQ ID NO: 3279591 - RNA, 19 nt, Artificial Sequence
  Description of Artificial Sequence: Synthetic oligonucleotide
gacaauuccaagugcauac

SEQ ID NO: 3279592 - RNA, 19 nt, Artificial Sequence
  Description of Artificial Sequence: Synthetic oligonucleotide
cuggaauuaucucaauugg

SEQ ID NO: 3279593 - RNA, 19 nt, Artificial Sequence
  Description of Artificial Sequence: Synthetic oligonucleotide
gaagugacagauguggcgg

SEQ ID NO: 3279594 - RNA, 19 nt, Artificial Sequence
  Description of Artificial Sequence: Synthetic oligonucleotide
aaggaguucaaaagguugg

SEQ ID NO: 3279595 - RNA, 19 nt, Artificial Sequence
  Description of Artificial Sequence: Synthetic oligonucleotide
auaugcaggagcuugucug

SEQ ID NO: 3279596 - RNA, 19 nt, Artificial Sequence
  Description of Artificial Sequence: Synthetic oligonucleotide
uccaagugcauaccuaacc

SEQ ID NO: 3279597 - RNA, 19 nt, Artificial Sequence
  Description of Artificial Sequence: Synthetic oligonucleotide
uucacgugggcccaggacc

SEQ ID NO: 3279598 - RNA, 19 nt, Artificial Sequence
  Description of Artificial Sequence: Synthetic oligonucleotide
aucucaauuggauauggcu

SEQ ID NO: 3279599 - RNA, 19 nt, Artificial Sequence
  Description of Artificial Sequence: Synthetic oligonucleotide
uuaucucaauuggauaugg

SEQ ID NO: 3279600 - RNA, 19 nt, Artificial Sequence
  Description of Artificial Sequence: Synthetic oligonucleotide
ucugaagaauccucuaucu

SEQ ID NO: 3279601 - RNA, 19 nt, Artificial Sequence
  Description of Artificial Sequence: Synthetic oligonucleotide
ugcgccuuaauuuucaaau

SEQ ID NO: 3279602 - RNA, 19 nt, Artificial Sequence
  Description of Artificial Sequence: Synthetic oligonucleotide
uccuaaacaagguuccuca

SEQ ID NO: 3279603 - RNA, 19 nt, Artificial Sequence
  Description of Artificial Sequence: Synthetic oligonucleotide
auuuucaaauccuugugaa

SEQ ID NO: 3279604 - RNA, 19 nt, Artificial Sequence
  Description of Artificial Sequence: Synthetic oligonucleotide
uuuucucccauuccagcag

SEQ ID NO: 3279605 - RNA, 19 nt, Artificial Sequence
  Description of Artificial Sequence: Synthetic oligonucleotide
cauuucuucacgugggccc

SEQ ID NO: 3279606 - RNA, 19 nt, Artificial Sequence
  Description of Artificial Sequence: Synthetic oligonucleotide
uggaauuaucucaauugga

SEQ ID NO: 3279607 - RNA, 19 nt, Artificial Sequence
  Description of Artificial Sequence: Synthetic oligonucleotide
ccaaaaguccuaaacaagg

SEQ ID NO: 3279608 - RNA, 19 nt, Artificial Sequence
  Description of Artificial Sequence: Synthetic oligonucleotide
aaucugaagaauccucuau

SEQ ID NO: 3279609 - RNA, 19 nt, Artificial Sequence
  Description of Artificial Sequence: Synthetic oligonucleotide
uaacuggaggugaaguucc

SEQ ID NO: 3279610 - RNA, 19 nt, Artificial Sequence
  Description of Artificial Sequence: Synthetic oligonucleotide
caaaauaggguguugccuc

SEQ ID NO: 3279611 - RNA, 19 nt, Artificial Sequence
  Description of Artificial Sequence: Synthetic oligonucleotide
cucuaucuugauaugcagg

SEQ ID NO: 3279612 - RNA, 19 nt, Artificial Sequence
  Description of Artificial Sequence: Synthetic oligonucleotide
ucagugaugucugugauau

SEQ ID NO: 3279613 - RNA, 19 nt, Artificial Sequence
  Description of Artificial Sequence: Synthetic oligonucleotide
uugacaugcgccuuaauuu

SEQ ID NO: 3279614 - RNA, 19 nt, Artificial Sequence
  Description of Artificial Sequence: Synthetic oligonucleotide
uuggauauggcuggaaggc

SEQ ID NO: 3279615 - RNA, 19 nt, Artificial Sequence
  Description of Artificial Sequence: Synthetic oligonucleotide
ugugaauccuagcauugca

SEQ ID NO: 3279616 - RNA, 19 nt, Artificial Sequence
  Description of Artificial Sequence: Synthetic oligonucleotide
agaccaggaugacagacuc

SEQ ID NO: 3279617 - RNA, 19 nt, Artificial Sequence
  Description of Artificial Sequence: Synthetic oligonucleotide
aaauccuugugaauccuag

SEQ ID NO: 3279618 - RNA, 19 nt, Artificial Sequence
  Description of Artificial Sequence: Synthetic oligonucleotide
gaaggaguucaaaagguug

SEQ ID NO: 3279619 - RNA, 19 nt, Artificial Sequence
  Description of Artificial Sequence: Synthetic oligonucleotide
agcugagccaccaagcccc

SEQ ID NO: 3279620 - RNA, 19 nt, Artificial Sequence
  Description of Artificial Sequence: Synthetic oligonucleotide
uggggcauccagaugaucu

SEQ ID NO: 3279621 - RNA, 19 nt, Artificial Sequence
  Description of Artificial Sequence: Synthetic oligonucleotide
gaggugaaguuccaugaag

SEQ ID NO: 3279622 - RNA, 19 nt, Artificial Sequence
  Description of Artificial Sequence: Synthetic oligonucleotide
cuugauaugcaggagcuug

SEQ ID NO: 3279623 - RNA, 19 nt, Artificial Sequence
  Description of Artificial Sequence: Synthetic oligonucleotide
ugcaaaauaggguguugcc

SEQ ID NO: 3279624 - RNA, 19 nt, Artificial Sequence
  Description of Artificial Sequence: Synthetic oligonucleotide
uccucuaucuugauaugca

SEQ ID NO: 3279625 - RNA, 19 nt, Artificial Sequence
  Description of Artificial Sequence: Synthetic oligonucleotide
gaauccuagcauugcaggc

SEQ ID NO: 3279626 - RNA, 19 nt, Artificial Sequence
  Description of Artificial Sequence: Synthetic oligonucleotide
auugacaugcgccuuaauu

SEQ ID NO: 3279627 - RNA, 19 nt, Artificial Sequence
  Description of Artificial Sequence: Synthetic oligonucleotide
cuccucauuauaaugcaug

SEQ ID NO: 3279628 - RNA, 19 nt, Artificial Sequence
  Description of Artificial Sequence: Synthetic oligonucleotide
gaggacauagacaggcugg

SEQ ID NO: 3279629 - RNA, 19 nt, Artificial Sequence
  Description of Artificial Sequence: Synthetic oligonucleotide
aaugcaugaggaaggccac

SEQ ID NO: 3279630 - RNA, 19 nt, Artificial Sequence
  Description of Artificial Sequence: Synthetic oligonucleotide
ucuggacaauuccaagugc

SEQ ID NO: 3279631 - RNA, 19 nt, Artificial Sequence
  Description of Artificial Sequence: Synthetic oligonucleotide
uccucauuauaaugcauga

SEQ ID NO: 3279632 - RNA, 19 nt, Artificial Sequence
  Description of Artificial Sequence: Synthetic oligonucleotide
auuuucucccauuccagca

SEQ ID NO: 3279633 - RNA, 19 nt, Artificial Sequence
  Description of Artificial Sequence: Synthetic oligonucleotide
auccucuaucuugauaugc

SEQ ID NO: 3279634 - RNA, 19 nt, Artificial Sequence
  Description of Artificial Sequence: Synthetic oligonucleotide
uauaaugcaugaggaaggc

SEQ ID NO: 3279635 - RNA, 19 nt, Artificial Sequence
  Description of Artificial Sequence: Synthetic oligonucleotide
aauccuagcauugcaggcu

SEQ ID NO: 3279636 - RNA, 19 nt, Artificial Sequence
  Description of Artificial Sequence: Synthetic oligonucleotide
cuugccuggaauuaucuca

SEQ ID NO: 3279637 - RNA, 19 nt, Artificial Sequence
  Description of Artificial Sequence: Synthetic oligonucleotide
ugaugucugugauauacuc

SEQ ID NO: 3279638 - RNA, 19 nt, Artificial Sequence
  Description of Artificial Sequence: Synthetic oligonucleotide
cuugugaauccuagcauug

SEQ ID NO: 3279639 - RNA, 19 nt, Artificial Sequence
  Description of Artificial Sequence: Synthetic oligonucleotide
ucaaaagguuggaaucuga

SEQ ID NO: 3279640 - RNA, 19 nt, Artificial Sequence
  Description of Artificial Sequence: Synthetic oligonucleotide
auauacuccccauggauaa

SEQ ID NO: 3279641 - RNA, 19 nt, Artificial Sequence
  Description of Artificial Sequence: Synthetic oligonucleotide
gaaacauugacaugcgccu

SEQ ID NO: 3279642 - RNA, 19 nt, Artificial Sequence
  Description of Artificial Sequence: Synthetic oligonucleotide
ugcauaccuaaccccaccc

SEQ ID NO: 3279643 - RNA, 19 nt, Artificial Sequence
  Description of Artificial Sequence: Synthetic oligonucleotide
gaugucugugauauacucc

SEQ ID NO: 3279644 - RNA, 19 nt, Artificial Sequence
  Description of Artificial Sequence: Synthetic oligonucleotide
ugguacaggccagagaagc

SEQ ID NO: 3279645 - RNA, 19 nt, Artificial Sequence
  Description of Artificial Sequence: Synthetic oligonucleotide
uaugcaggagcuugucugc

SEQ ID NO: 3279646 - RNA, 19 nt, Artificial Sequence
  Description of Artificial Sequence: Synthetic oligonucleotide
auuccaagugcauaccuaa

SEQ ID NO: 3279647 - RNA, 19 nt, Artificial Sequence
  Description of Artificial Sequence: Synthetic oligonucleotide
ccauggauaauuuucuccc

SEQ ID NO: 3279648 - RNA, 19 nt, Artificial Sequence
  Description of Artificial Sequence: Synthetic oligonucleotide
auaaugcaugaggaaggcc

SEQ ID NO: 3279649 - RNA, 19 nt, Artificial Sequence
  Description of Artificial Sequence: Synthetic oligonucleotide
uccaauaacuccaaaaugc

SEQ ID NO: 3279650 - RNA, 19 nt, Artificial Sequence
  Description of Artificial Sequence: Synthetic oligonucleotide
ucaaucaagucaauaacgg

SEQ ID NO: 3279651 - RNA, 19 nt, Artificial Sequence
  Description of Artificial Sequence: Synthetic oligonucleotide
uucaaucaagucaauaacg

SEQ ID NO: 3279652 - RNA, 19 nt, Artificial Sequence
  Description of Artificial Sequence: Synthetic oligonucleotide
aaauaaagaguucuuguug

SEQ ID NO: 3279653 - RNA, 19 nt, Artificial Sequence
  Description of Artificial Sequence: Synthetic oligonucleotide
uuuugcuucaaucaaguca

SEQ ID NO: 3279654 - RNA, 19 nt, Artificial Sequence
  Description of Artificial Sequence: Synthetic oligonucleotide
aauaaagaguucuuguuga

SEQ ID NO: 3279655 - RNA, 19 nt, Artificial Sequence
  Description of Artificial Sequence: Synthetic oligonucleotide
uuugcuucaaucaagucaa

SEQ ID NO: 3279656 - RNA, 19 nt, Artificial Sequence
  Description of Artificial Sequence: Synthetic oligonucleotide
acauucuucauccaauaac

SEQ ID NO: 3279657 - RNA, 19 nt, Artificial Sequence
  Description of Artificial Sequence: Synthetic oligonucleotide
uguuguacagcuuuugaag

SEQ ID NO: 3279658 - RNA, 19 nt, Artificial Sequence
  Description of Artificial Sequence: Synthetic oligonucleotide
aaaauuguuguacagcuuu

SEQ ID NO: 3279659 - RNA, 19 nt, Artificial Sequence
  Description of Artificial Sequence: Synthetic oligonucleotide
gaggauuucaaccagcaug

SEQ ID NO: 3279660 - RNA, 19 nt, Artificial Sequence
  Description of Artificial Sequence: Synthetic oligonucleotide
ucuucauccaauaacucca

SEQ ID NO: 3279661 - RNA, 19 nt, Artificial Sequence
  Description of Artificial Sequence: Synthetic oligonucleotide
aaggauguguuugacauuc

SEQ ID NO: 3279662 - RNA, 19 nt, Artificial Sequence
  Description of Artificial Sequence: Synthetic oligonucleotide
uuuucaaauaaagaguucu

SEQ ID NO: 3279663 - RNA, 19 nt, Artificial Sequence
  Description of Artificial Sequence: Synthetic oligonucleotide
auguguuugacauucuggg

SEQ ID NO: 3279664 - RNA, 19 nt, Artificial Sequence
  Description of Artificial Sequence: Synthetic oligonucleotide
accagcaugucauagacag

SEQ ID NO: 3279665 - RNA, 19 nt, Artificial Sequence
  Description of Artificial Sequence: Synthetic oligonucleotide
acaaaauuguuguacagcu

SEQ ID NO: 3279666 - RNA, 19 nt, Artificial Sequence
  Description of Artificial Sequence: Synthetic oligonucleotide
caacaaacauucuucaucc

SEQ ID NO: 3279667 - RNA, 19 nt, Artificial Sequence
  Description of Artificial Sequence: Synthetic oligonucleotide
aaagaguucuuguugacaa

SEQ ID NO: 3279668 - RNA, 19 nt, Artificial Sequence
  Description of Artificial Sequence: Synthetic oligonucleotide
aauaacuccaaaaugccca

SEQ ID NO: 3279669 - RNA, 19 nt, Artificial Sequence
  Description of Artificial Sequence: Synthetic oligonucleotide
ucaaauaaagaguucuugu

SEQ ID NO: 3279670 - RNA, 19 nt, Artificial Sequence
  Description of Artificial Sequence: Synthetic oligonucleotide
gaagccuucacacugguac

SEQ ID NO: 3279671 - RNA, 19 nt, Artificial Sequence
  Description of Artificial Sequence: Synthetic oligonucleotide
cuuguugacaaaauuguug

SEQ ID NO: 3279672 - RNA, 19 nt, Artificial Sequence
  Description of Artificial Sequence: Synthetic oligonucleotide
uucuuguugacaaaauugu

SEQ ID NO: 3279673 - RNA, 19 nt, Artificial Sequence
  Description of Artificial Sequence: Synthetic oligonucleotide
aaucaagucaauaacgggu

SEQ ID NO: 3279674 - RNA, 19 nt, Artificial Sequence
  Description of Artificial Sequence: Synthetic oligonucleotide
ugaucugcacagcagacag

SEQ ID NO: 3279675 - RNA, 19 nt, Artificial Sequence
  Description of Artificial Sequence: Synthetic oligonucleotide
uuguugacaaaauuguugu

SEQ ID NO: 3279676 - RNA, 19 nt, Artificial Sequence
  Description of Artificial Sequence: Synthetic oligonucleotide
caugaggcaacaaacauuc

SEQ ID NO: 3279677 - RNA, 19 nt, Artificial Sequence
  Description of Artificial Sequence: Synthetic oligonucleotide
ugaaggauguguuugacau

SEQ ID NO: 3279678 - RNA, 19 nt, Artificial Sequence
  Description of Artificial Sequence: Synthetic oligonucleotide
uuucaucuguuccaugagg

SEQ ID NO: 3279679 - RNA, 19 nt, Artificial Sequence
  Description of Artificial Sequence: Synthetic oligonucleotide
agugucucuguucuucucc

SEQ ID NO: 3279680 - RNA, 19 nt, Artificial Sequence
  Description of Artificial Sequence: Synthetic oligonucleotide
uucuucauccaauaacucc

SEQ ID NO: 3279681 - RNA, 19 nt, Artificial Sequence
  Description of Artificial Sequence: Synthetic oligonucleotide
ugcuggaugaugaaggaug

SEQ ID NO: 3279682 - RNA, 19 nt, Artificial Sequence
  Description of Artificial Sequence: Synthetic oligonucleotide
uucaucuguuccaugaggc

SEQ ID NO: 3279683 - RNA, 19 nt, Artificial Sequence
  Description of Artificial Sequence: Synthetic oligonucleotide
gucaauaacggguugguug

SEQ ID NO: 3279684 - RNA, 19 nt, Artificial Sequence
  Description of Artificial Sequence: Synthetic oligonucleotide
ugguacuccaccuugucag

SEQ ID NO: 3279685 - RNA, 19 nt, Artificial Sequence
  Description of Artificial Sequence: Synthetic oligonucleotide
gauguguuugacauucugg

SEQ ID NO: 3279686 - RNA, 19 nt, Artificial Sequence
  Description of Artificial Sequence: Synthetic oligonucleotide
agacugaugaucugcacag

SEQ ID NO: 3279687 - RNA, 19 nt, Artificial Sequence
  Description of Artificial Sequence: Synthetic oligonucleotide
acagcagacagcuugcuug

SEQ ID NO: 3279688 - RNA, 19 nt, Artificial Sequence
  Description of Artificial Sequence: Synthetic oligonucleotide
uuugaagccaguuuucauc

SEQ ID NO: 3279689 - RNA, 19 nt, Artificial Sequence
  Description of Artificial Sequence: Synthetic oligonucleotide
aagugcuggaugaugaagg

SEQ ID NO: 3279690 - RNA, 19 nt, Artificial Sequence
  Description of Artificial Sequence: Synthetic oligonucleotide
gggcuuuucaaauaaagag

SEQ ID NO: 3279691 - RNA, 19 nt, Artificial Sequence
  Description of Artificial Sequence: Synthetic oligonucleotide
uucaaauaaagaguucuug

SEQ ID NO: 3279692 - RNA, 19 nt, Artificial Sequence
  Description of Artificial Sequence: Synthetic oligonucleotide
ucuguucuucuccaggaag

SEQ ID NO: 3279693 - RNA, 19 nt, Artificial Sequence
  Description of Artificial Sequence: Synthetic oligonucleotide
uugacaaaauuguuguaca

SEQ ID NO: 3279694 - RNA, 19 nt, Artificial Sequence
  Description of Artificial Sequence: Synthetic oligonucleotide
uagacagugucucuguucu

SEQ ID NO: 3279695 - RNA, 19 nt, Artificial Sequence
  Description of Artificial Sequence: Synthetic oligonucleotide
ucagcaaagugcuggauga

SEQ ID NO: 3279696 - RNA, 19 nt, Artificial Sequence
  Description of Artificial Sequence: Synthetic oligonucleotide
caccuugucagcaaagugc

SEQ ID NO: 3279697 - RNA, 19 nt, Artificial Sequence
  Description of Artificial Sequence: Synthetic oligonucleotide
cuugucagcaaagugcugg

SEQ ID NO: 3279698 - RNA, 19 nt, Artificial Sequence
  Description of Artificial Sequence: Synthetic oligonucleotide
auaaagaguucuuguugac

SEQ ID NO: 3279699 - RNA, 19 nt, Artificial Sequence
  Description of Artificial Sequence: Synthetic oligonucleotide
ugaugaucugcacagcaga

SEQ ID NO: 3279700 - RNA, 19 nt, Artificial Sequence
  Description of Artificial Sequence: Synthetic oligonucleotide
cuucaaucaagucaauaac

SEQ ID NO: 3279701 - RNA, 19 nt, Artificial Sequence
  Description of Artificial Sequence: Synthetic oligonucleotide
caaucaagucaauaacggg

SEQ ID NO: 3279702 - RNA, 19 nt, Artificial Sequence
  Description of Artificial Sequence: Synthetic oligonucleotide
guucuuguugacaaaauug

SEQ ID NO: 3279703 - RNA, 19 nt, Artificial Sequence
  Description of Artificial Sequence: Synthetic oligonucleotide
guuguacagcuuuugaagc

SEQ ID NO: 3279704 - RNA, 19 nt, Artificial Sequence
  Description of Artificial Sequence: Synthetic oligonucleotide
uuuucaucuguuccaugag

SEQ ID NO: 3279705 - RNA, 19 nt, Artificial Sequence
  Description of Artificial Sequence: Synthetic oligonucleotide
gacaaaauuguuguacagc

SEQ ID NO: 3279706 - RNA, 19 nt, Artificial Sequence
  Description of Artificial Sequence: Synthetic oligonucleotide
uguuccaugaggcaacaaa

SEQ ID NO: 3279707 - RNA, 19 nt, Artificial Sequence
  Description of Artificial Sequence: Synthetic oligonucleotide
ucauccaauaacuccaaaa

SEQ ID NO: 3279708 - RNA, 19 nt, Artificial Sequence
  Description of Artificial Sequence: Synthetic oligonucleotide
ugacaaaauuguuguacag

SEQ ID NO: 3279709 - RNA, 19 nt, Artificial Sequence
  Description of Artificial Sequence: Synthetic oligonucleotide
ugggcuuuucaaauaaaga

SEQ ID NO: 3279710 - RNA, 19 nt, Artificial Sequence
  Description of Artificial Sequence: Synthetic oligonucleotide
auagacagugucucuguuc

SEQ ID NO: 3279711 - RNA, 19 nt, Artificial Sequence
  Description of Artificial Sequence: Synthetic oligonucleotide
guugacaaaauuguuguac

SEQ ID NO: 3279712 - RNA, 19 nt, Artificial Sequence
  Description of Artificial Sequence: Synthetic oligonucleotide
auccaauaacuccaaaaug

SEQ ID NO: 3279713 - RNA, 19 nt, Artificial Sequence
  Description of Artificial Sequence: Synthetic oligonucleotide
uugaagccaguuuucaucu

SEQ ID NO: 3279714 - RNA, 19 nt, Artificial Sequence
  Description of Artificial Sequence: Synthetic oligonucleotide
caauaacuccaaaaugccc

SEQ ID NO: 3279715 - RNA, 19 nt, Artificial Sequence
  Description of Artificial Sequence: Synthetic oligonucleotide
ugcucggaggauuucaacc

SEQ ID NO: 3279716 - RNA, 19 nt, Artificial Sequence
  Description of Artificial Sequence: Synthetic oligonucleotide
aaagugcuggaugaugaag

SEQ ID NO: 3279717 - RNA, 19 nt, Artificial Sequence
  Description of Artificial Sequence: Synthetic oligonucleotide
guuuucaucuguuccauga

SEQ ID NO: 3279718 - RNA, 19 nt, Artificial Sequence
  Description of Artificial Sequence: Synthetic oligonucleotide
gauuucaaccagcauguca

SEQ ID NO: 3279719 - RNA, 19 nt, Artificial Sequence
  Description of Artificial Sequence: Synthetic oligonucleotide
uuguacagcuuuugaagcc

SEQ ID NO: 3279720 - RNA, 19 nt, Artificial Sequence
  Description of Artificial Sequence: Synthetic oligonucleotide
cugggcuuuucaaauaaag

SEQ ID NO: 3279721 - RNA, 19 nt, Artificial Sequence
  Description of Artificial Sequence: Synthetic oligonucleotide
aacuccaaaaugcccauuu

SEQ ID NO: 3279722 - RNA, 19 nt, Artificial Sequence
  Description of Artificial Sequence: Synthetic oligonucleotide
uggaugaugaaggaugugu

SEQ ID NO: 3279723 - RNA, 19 nt, Artificial Sequence
  Description of Artificial Sequence: Synthetic oligonucleotide
augucauagacagugucuc

SEQ ID NO: 3279724 - RNA, 19 nt, Artificial Sequence
  Description of Artificial Sequence: Synthetic oligonucleotide
aauuguuguacagcuuuug

SEQ ID NO: 3279725 - RNA, 19 nt, Artificial Sequence
  Description of Artificial Sequence: Synthetic oligonucleotide
ugaggcaacaaacauucuu

SEQ ID NO: 3279726 - RNA, 19 nt, Artificial Sequence
  Description of Artificial Sequence: Synthetic oligonucleotide
uguguuugacauucugggc

SEQ ID NO: 3279727 - RNA, 19 nt, Artificial Sequence
  Description of Artificial Sequence: Synthetic oligonucleotide
uuccaugaggcaacaaaca

SEQ ID NO: 3279728 - RNA, 19 nt, Artificial Sequence
  Description of Artificial Sequence: Synthetic oligonucleotide
aaacauucuucauccaaua

SEQ ID NO: 3279729 - RNA, 19 nt, Artificial Sequence
  Description of Artificial Sequence: Synthetic oligonucleotide
acaaacauucuucauccaa

SEQ ID NO: 3279730 - RNA, 19 nt, Artificial Sequence
  Description of Artificial Sequence: Synthetic oligonucleotide
cuguucuucuccaggaagc

SEQ ID NO: 3279731 - RNA, 19 nt, Artificial Sequence
  Description of Artificial Sequence: Synthetic oligonucleotide
aacauucuucauccaauaa

SEQ ID NO: 3279732 - RNA, 19 nt, Artificial Sequence
  Description of Artificial Sequence: Synthetic oligonucleotide
uucacacugguacuccacc

SEQ ID NO: 3279733 - RNA, 19 nt, Artificial Sequence
  Description of Artificial Sequence: Synthetic oligonucleotide
acugaugaucugcacagca

SEQ ID NO: 3279734 - RNA, 19 nt, Artificial Sequence
  Description of Artificial Sequence: Synthetic oligonucleotide
auuguuguacagcuuuuga

SEQ ID NO: 3279735 - RNA, 19 nt, Artificial Sequence
  Description of Artificial Sequence: Synthetic oligonucleotide
auuucaaccagcaugucau

SEQ ID NO: 3279736 - RNA, 19 nt, Artificial Sequence
  Description of Artificial Sequence: Synthetic oligonucleotide
augaugaaggauguguuug

SEQ ID NO: 3279737 - RNA, 19 nt, Artificial Sequence
  Description of Artificial Sequence: Synthetic oligonucleotide
cagacagcuugcuugcucg

SEQ ID NO: 3279738 - RNA, 19 nt, Artificial Sequence
  Description of Artificial Sequence: Synthetic oligonucleotide
uuguuguacagcuuuugaa

SEQ ID NO: 3279739 - RNA, 19 nt, Artificial Sequence
  Description of Artificial Sequence: Synthetic oligonucleotide
uuucaaauaaagaguucuu

SEQ ID NO: 3279740 - RNA, 19 nt, Artificial Sequence
  Description of Artificial Sequence: Synthetic oligonucleotide
uccaugaggcaacaaacau

SEQ ID NO: 3279741 - RNA, 19 nt, Artificial Sequence
  Description of Artificial Sequence: Synthetic oligonucleotide
agcuuuugaagccaguuuu

SEQ ID NO: 3279742 - RNA, 19 nt, Artificial Sequence
  Description of Artificial Sequence: Synthetic oligonucleotide
ucaaccagcaugucauaga

SEQ ID NO: 3279743 - RNA, 19 nt, Artificial Sequence
  Description of Artificial Sequence: Synthetic oligonucleotide
uaaagaguucuuguugaca

SEQ ID NO: 3279744 - RNA, 19 nt, Artificial Sequence
  Description of Artificial Sequence: Synthetic oligonucleotide
ugaugaaggauguguuuga

SEQ ID NO: 3279745 - RNA, 19 nt, Artificial Sequence
  Description of Artificial Sequence: Synthetic oligonucleotide
gaggcaacaaacauucuuc

SEQ ID NO: 3279746 - RNA, 19 nt, Artificial Sequence
  Description of Artificial Sequence: Synthetic oligonucleotide
ucucuguucuucuccagga

SEQ ID NO: 3279747 - RNA, 19 nt, Artificial Sequence
  Description of Artificial Sequence: Synthetic oligonucleotide
caagucaauaacggguugg

SEQ ID NO: 3279748 - RNA, 19 nt, Artificial Sequence
  Description of Artificial Sequence: Synthetic oligonucleotide
cagcaugucauagacagug

SEQ ID NO: 3279749 - RNA, 19 nt, Artificial Sequence
  Description of Artificial Sequence: Synthetic oligonucleotide
caugcuguagccuacaugg

SEQ ID NO: 3279750 - RNA, 19 nt, Artificial Sequence
  Description of Artificial Sequence: Synthetic oligonucleotide
ugagaaauggccgagaggc

SEQ ID NO: 3279751 - RNA, 19 nt, Artificial Sequence
  Description of Artificial Sequence: Synthetic oligonucleotide
aagaagucauagcugcagc

SEQ ID NO: 3279752 - RNA, 19 nt, Artificial Sequence
  Description of Artificial Sequence: Synthetic oligonucleotide
uguagagucugguaugggg

SEQ ID NO: 3279753 - RNA, 19 nt, Artificial Sequence
  Description of Artificial Sequence: Synthetic oligonucleotide
ucggaggccaccaagacgc

SEQ ID NO: 3279754 - RNA, 19 nt, Artificial Sequence
  Description of Artificial Sequence: Synthetic oligonucleotide
gaguccuccacuuugacac

SEQ ID NO: 3279755 - RNA, 19 nt, Artificial Sequence
  Description of Artificial Sequence: Synthetic oligonucleotide
uaugucaggugguacaugc

SEQ ID NO: 3279756 - RNA, 19 nt, Artificial Sequence
  Description of Artificial Sequence: Synthetic oligonucleotide
uaagagaagggaccaggcg

SEQ ID NO: 3279757 - RNA, 19 nt, Artificial Sequence
  Description of Artificial Sequence: Synthetic oligonucleotide
aagucauagcugcagccgg

SEQ ID NO: 3279758 - RNA, 19 nt, Artificial Sequence
  Description of Artificial Sequence: Synthetic oligonucleotide
acaugggccguguagaguc

SEQ ID NO: 3279759 - RNA, 19 nt, Artificial Sequence
  Description of Artificial Sequence: Synthetic oligonucleotide
uuaagagaagggaccaggc

SEQ ID NO: 3279760 - RNA, 19 nt, Artificial Sequence
  Description of Artificial Sequence: Synthetic oligonucleotide
aguggcaccacagggaggc

SEQ ID NO: 3279761 - RNA, 19 nt, Artificial Sequence
  Description of Artificial Sequence: Synthetic oligonucleotide
aguggcaaagaagucauag

SEQ ID NO: 3279762 - RNA, 19 nt, Artificial Sequence
  Description of Artificial Sequence: Synthetic oligonucleotide
cuuaagagaagggaccagg

SEQ ID NO: 3279763 - RNA, 19 nt, Artificial Sequence
  Description of Artificial Sequence: Synthetic oligonucleotide
uggagcauugguuucgggc

SEQ ID NO: 3279764 - RNA, 19 nt, Artificial Sequence
  Description of Artificial Sequence: Synthetic oligonucleotide
ugucaggugguacaugcug

SEQ ID NO: 3279765 - RNA, 19 nt, Artificial Sequence
  Description of Artificial Sequence: Synthetic oligonucleotide
gcaaagaagucauagcugc

SEQ ID NO: 3279766 - RNA, 19 nt, Artificial Sequence
  Description of Artificial Sequence: Synthetic oligonucleotide
agaaauggccgagaggccg

SEQ ID NO: 3279767 - RNA, 19 nt, Artificial Sequence
  Description of Artificial Sequence: Synthetic oligonucleotide
acugagaaauggccgagag

SEQ ID NO: 3279768 - RNA, 19 nt, Artificial Sequence
  Description of Artificial Sequence: Synthetic oligonucleotide
ggagcauugguuucgggcg

SEQ ID NO: 3279769 - RNA, 19 nt, Artificial Sequence
  Description of Artificial Sequence: Synthetic oligonucleotide
ugcuguagccuacaugggc

SEQ ID NO: 3279770 - RNA, 19 nt, Artificial Sequence
  Description of Artificial Sequence: Synthetic oligonucleotide
cucaucugugcccauggcg

SEQ ID NO: 3279771 - RNA, 19 nt, Artificial Sequence
  Description of Artificial Sequence: Synthetic oligonucleotide
ccugugaucagccaugagg

SEQ ID NO: 3279772 - RNA, 19 nt, Artificial Sequence
  Description of Artificial Sequence: Synthetic oligonucleotide
aagcggggacucugcaucc

SEQ ID NO: 3279773 - RNA, 19 nt, Artificial Sequence
  Description of Artificial Sequence: Synthetic oligonucleotide
ggcacuuugggcuuggccc

SEQ ID NO: 3279774 - RNA, 19 nt, Artificial Sequence
  Description of Artificial Sequence: Synthetic oligonucleotide
aggcgcuacaggcagcgcc

SEQ ID NO: 3279775 - RNA, 19 nt, Artificial Sequence
  Description of Artificial Sequence: Synthetic oligonucleotide
uguggggcuuccuacgaag

SEQ ID NO: 3279776 - RNA, 19 nt, Artificial Sequence
  Description of Artificial Sequence: Synthetic oligonucleotide
ugaucagccaugagggccu

SEQ ID NO: 3279777 - RNA, 19 nt, Artificial Sequence
  Description of Artificial Sequence: Synthetic oligonucleotide
uccggucugacuucucggg

SEQ ID NO: 3279778 - RNA, 19 nt, Artificial Sequence
  Description of Artificial Sequence: Synthetic oligonucleotide
ucugguagcuugaggaguc

SEQ ID NO: 3279779 - RNA, 19 nt, Artificial Sequence
  Description of Artificial Sequence: Synthetic oligonucleotide
caagacgcucuccuuagcc

SEQ ID NO: 3279780 - RNA, 19 nt, Artificial Sequence
  Description of Artificial Sequence: Synthetic oligonucleotide
ucugcauccaugggguccg

SEQ ID NO: 3279781 - RNA, 19 nt, Artificial Sequence
  Description of Artificial Sequence: Synthetic oligonucleotide
acuguagagucugguaugg

SEQ ID NO: 3279782 - RNA, 19 nt, Artificial Sequence
  Description of Artificial Sequence: Synthetic oligonucleotide
aaaggcggaguccuccacu

SEQ ID NO: 3279783 - RNA, 19 nt, Artificial Sequence
  Description of Artificial Sequence: Synthetic oligonucleotide
gaagcggggacucugcauc

SEQ ID NO: 3279784 - RNA, 19 nt, Artificial Sequence
  Description of Artificial Sequence: Synthetic oligonucleotide
ucccacaggcgcuacaggc

SEQ ID NO: 3279785 - RNA, 19 nt, Artificial Sequence
  Description of Artificial Sequence: Synthetic oligonucleotide
auugguuucgggcgggcug

SEQ ID NO: 3279786 - RNA, 19 nt, Artificial Sequence
  Description of Artificial Sequence: Synthetic oligonucleotide
cauagcugcagccggggcc

SEQ ID NO: 3279787 - RNA, 19 nt, Artificial Sequence
  Description of Artificial Sequence: Synthetic oligonucleotide
ugaagggcaguagcgaagc

SEQ ID NO: 3279788 - RNA, 19 nt, Artificial Sequence
  Description of Artificial Sequence: Synthetic oligonucleotide
uuugacaccgaguggcaaa

SEQ ID NO: 3279789 - RNA, 19 nt, Artificial Sequence
  Description of Artificial Sequence: Synthetic oligonucleotide
ggacucugcauccaugggg

SEQ ID NO: 3279790 - RNA, 19 nt, Artificial Sequence
  Description of Artificial Sequence: Synthetic oligonucleotide
acccaccuaugucaggugg

SEQ ID NO: 3279791 - RNA, 19 nt, Artificial Sequence
  Description of Artificial Sequence: Synthetic oligonucleotide
uccuacgaaggauuccagc

SEQ ID NO: 3279792 - RNA, 19 nt, Artificial Sequence
  Description of Artificial Sequence: Synthetic oligonucleotide
accaagacgcucuccuuag

SEQ ID NO: 3279793 - RNA, 19 nt, Artificial Sequence
  Description of Artificial Sequence: Synthetic oligonucleotide
cuuccugugaucagccaug

SEQ ID NO: 3279794 - RNA, 19 nt, Artificial Sequence
  Description of Artificial Sequence: Synthetic oligonucleotide
accuaugucaggugguaca

SEQ ID NO: 3279795 - RNA, 19 nt, Artificial Sequence
  Description of Artificial Sequence: Synthetic oligonucleotide
agugcugcaacgagccacc

SEQ ID NO: 3279796 - RNA, 19 nt, Artificial Sequence
  Description of Artificial Sequence: Synthetic oligonucleotide
ugagaagcggggacucugc

SEQ ID NO: 3279797 - RNA, 19 nt, Artificial Sequence
  Description of Artificial Sequence: Synthetic oligonucleotide
cugagaaauggccgagagg

SEQ ID NO: 3279798 - RNA, 19 nt, Artificial Sequence
  Description of Artificial Sequence: Synthetic oligonucleotide
acuucucggggcucucggc

SEQ ID NO: 3279799 - RNA, 19 nt, Artificial Sequence
  Description of Artificial Sequence: Synthetic oligonucleotide
acaugcuguagccuacaug

SEQ ID NO: 3279800 - RNA, 19 nt, Artificial Sequence
  Description of Artificial Sequence: Synthetic oligonucleotide
cacgcugaagggcaguagc

SEQ ID NO: 3279801 - RNA, 19 nt, Artificial Sequence
  Description of Artificial Sequence: Synthetic oligonucleotide
agcgacccgggccuagugc

SEQ ID NO: 3279802 - RNA, 19 nt, Artificial Sequence
  Description of Artificial Sequence: Synthetic oligonucleotide
cuacgaaggauuccagcug

SEQ ID NO: 3279803 - RNA, 19 nt, Artificial Sequence
  Description of Artificial Sequence: Synthetic oligonucleotide
gaaauggccgagaggccgg

SEQ ID NO: 3279804 - RNA, 19 nt, Artificial Sequence
  Description of Artificial Sequence: Synthetic oligonucleotide
ugcugcaacgagccacccg

SEQ ID NO: 3279805 - RNA, 19 nt, Artificial Sequence
  Description of Artificial Sequence: Synthetic oligonucleotide
cugaacccaccuaugucag

SEQ ID NO: 3279806 - RNA, 19 nt, Artificial Sequence
  Description of Artificial Sequence: Synthetic oligonucleotide
cacuguagagucugguaug

SEQ ID NO: 3279807 - RNA, 19 nt, Artificial Sequence
  Description of Artificial Sequence: Synthetic oligonucleotide
uugacaccgaguggcaaag

SEQ ID NO: 3279808 - RNA, 19 nt, Artificial Sequence
  Description of Artificial Sequence: Synthetic oligonucleotide
ugugaucagccaugagggc

SEQ ID NO: 3279809 - RNA, 19 nt, Artificial Sequence
  Description of Artificial Sequence: Synthetic oligonucleotide
cugaagggcaguagcgaag

SEQ ID NO: 3279810 - RNA, 19 nt, Artificial Sequence
  Description of Artificial Sequence: Synthetic oligonucleotide
ccaagugcugcaacgagcc

SEQ ID NO: 3279811 - RNA, 19 nt, Artificial Sequence
  Description of Artificial Sequence: Synthetic oligonucleotide
cucggaggccaccaagacg

SEQ ID NO: 3279812 - RNA, 19 nt, Artificial Sequence
  Description of Artificial Sequence: Synthetic oligonucleotide
cuguagccuacaugggccg

SEQ ID NO: 3279813 - RNA, 19 nt, Artificial Sequence
  Description of Artificial Sequence: Synthetic oligonucleotide
agcgcggccggcuucugcg

SEQ ID NO: 3279814 - RNA, 19 nt, Artificial Sequence
  Description of Artificial Sequence: Synthetic oligonucleotide
ucugugcccauggcggucg

SEQ ID NO: 3279815 - RNA, 19 nt, Artificial Sequence
  Description of Artificial Sequence: Synthetic oligonucleotide
uucugguagcuugaggagu

SEQ ID NO: 3279816 - RNA, 19 nt, Artificial Sequence
  Description of Artificial Sequence: Synthetic oligonucleotide
cuucucggggcucucggcc

SEQ ID NO: 3279817 - RNA, 19 nt, Artificial Sequence
  Description of Artificial Sequence: Synthetic oligonucleotide
guuucgggcgggcugggag

SEQ ID NO: 3279818 - RNA, 19 nt, Artificial Sequence
  Description of Artificial Sequence: Synthetic oligonucleotide
uuccuacgaaggauuccag

SEQ ID NO: 3279819 - RNA, 19 nt, Artificial Sequence
  Description of Artificial Sequence: Synthetic oligonucleotide
uugagaagcggggacucug

SEQ ID NO: 3279820 - RNA, 19 nt, Artificial Sequence
  Description of Artificial Sequence: Synthetic oligonucleotide
gugcccaagugcugcaacg

SEQ ID NO: 3279821 - RNA, 19 nt, Artificial Sequence
  Description of Artificial Sequence: Synthetic oligonucleotide
auuccagcugcuagaagag

SEQ ID NO: 3279822 - RNA, 19 nt, Artificial Sequence
  Description of Artificial Sequence: Synthetic oligonucleotide
uugccaaaggcggaguccu

SEQ ID NO: 3279823 - RNA, 19 nt, Artificial Sequence
  Description of Artificial Sequence: Synthetic oligonucleotide
augggguccggucugacuu

SEQ ID NO: 3279824 - RNA, 19 nt, Artificial Sequence
  Description of Artificial Sequence: Synthetic oligonucleotide
agcugcuagaagagguggc

SEQ ID NO: 3279825 - RNA, 19 nt, Artificial Sequence
  Description of Artificial Sequence: Synthetic oligonucleotide
acaggcgcuacaggcagcg

SEQ ID NO: 3279826 - RNA, 19 nt, Artificial Sequence
  Description of Artificial Sequence: Synthetic oligonucleotide
uuucgggcgggcugggagc

SEQ ID NO: 3279827 - RNA, 19 nt, Artificial Sequence
  Description of Artificial Sequence: Synthetic oligonucleotide
cuuccuacgaaggauucca

SEQ ID NO: 3279828 - RNA, 19 nt, Artificial Sequence
  Description of Artificial Sequence: Synthetic oligonucleotide
ucauagcugcagccggggc

SEQ ID NO: 3279829 - RNA, 19 nt, Artificial Sequence
  Description of Artificial Sequence: Synthetic oligonucleotide
gacaccgaguggcaaagaa

SEQ ID NO: 3279830 - RNA, 19 nt, Artificial Sequence
  Description of Artificial Sequence: Synthetic oligonucleotide
uuagccccgggcuuccugu

SEQ ID NO: 3279831 - RNA, 19 nt, Artificial Sequence
  Description of Artificial Sequence: Synthetic oligonucleotide
cuagaagagguggcugggg

SEQ ID NO: 3279832 - RNA, 19 nt, Artificial Sequence
  Description of Artificial Sequence: Synthetic oligonucleotide
cucugaacccaccuauguc

SEQ ID NO: 3279833 - RNA, 19 nt, Artificial Sequence
  Description of Artificial Sequence: Synthetic oligonucleotide
ugcaacgagccacccgcug

SEQ ID NO: 3279834 - RNA, 19 nt, Artificial Sequence
  Description of Artificial Sequence: Synthetic oligonucleotide
caugagggccuccacgcug

SEQ ID NO: 3279835 - RNA, 19 nt, Artificial Sequence
  Description of Artificial Sequence: Synthetic oligonucleotide
ugcagccggggccaugcag

SEQ ID NO: 3279836 - RNA, 19 nt, Artificial Sequence
  Description of Artificial Sequence: Synthetic oligonucleotide
cucugcauccauggggucc

SEQ ID NO: 3279837 - RNA, 19 nt, Artificial Sequence
  Description of Artificial Sequence: Synthetic oligonucleotide
guccggucugacuucucgg

SEQ ID NO: 3279838 - RNA, 19 nt, Artificial Sequence
  Description of Artificial Sequence: Synthetic oligonucleotide
uaguggcaccacagggagg

SEQ ID NO: 3279839 - RNA, 19 nt, Artificial Sequence
  Description of Artificial Sequence: Synthetic oligonucleotide
ggcaaagaagucauagcug

SEQ ID NO: 3279840 - RNA, 19 nt, Artificial Sequence
  Description of Artificial Sequence: Synthetic oligonucleotide
agcccuggagcauugguuu

SEQ ID NO: 3279841 - RNA, 19 nt, Artificial Sequence
  Description of Artificial Sequence: Synthetic oligonucleotide
acaccgaguggcaaagaag

SEQ ID NO: 3279842 - RNA, 19 nt, Artificial Sequence
  Description of Artificial Sequence: Synthetic oligonucleotide
aaauggccgagaggccggg

SEQ ID NO: 3279843 - RNA, 19 nt, Artificial Sequence
  Description of Artificial Sequence: Synthetic oligonucleotide
gguccggucugacuucucg

SEQ ID NO: 3279844 - RNA, 19 nt, Artificial Sequence
  Description of Artificial Sequence: Synthetic oligonucleotide
caacgagccacccgcugcc

SEQ ID NO: 3279845 - RNA, 19 nt, Artificial Sequence
  Description of Artificial Sequence: Synthetic oligonucleotide
caccgaguggcaaagaagu

SEQ ID NO: 3279846 - RNA, 19 nt, Artificial Sequence
  Description of Artificial Sequence: Synthetic oligonucleotide
cccgacugagaaauggccg

SEQ ID NO: 3279847 - RNA, 19 nt, Artificial Sequence
  Description of Artificial Sequence: Synthetic oligonucleotide
cuacaggcagcgccgcgcg

SEQ ID NO: 3279848 - RNA, 19 nt, Artificial Sequence
  Description of Artificial Sequence: Synthetic oligonucleotide
agucauagcugcagccggg

SEQ ID NO: 3279849 - RNA, 19 nt, Artificial Sequence
  Description of Artificial Sequence: Synthetic oligonucleotide
aauaauuaauaacuuagag

SEQ ID NO: 3279850 - RNA, 19 nt, Artificial Sequence
  Description of Artificial Sequence: Synthetic oligonucleotide
aacaacauuaaagugaugg

SEQ ID NO: 3279851 - RNA, 19 nt, Artificial Sequence
  Description of Artificial Sequence: Synthetic oligonucleotide
aaaagcaugacagagaccu

SEQ ID NO: 3279852 - RNA, 19 nt, Artificial Sequence
  Description of Artificial Sequence: Synthetic oligonucleotide
aaauaauuuauucugcaga

SEQ ID NO: 3279853 - RNA, 19 nt, Artificial Sequence
  Description of Artificial Sequence: Synthetic oligonucleotide
uucacauuccuucagacag

SEQ ID NO: 3279854 - RNA, 19 nt, Artificial Sequence
  Description of Artificial Sequence: Synthetic oligonucleotide
uuacauucaaaucacacca

SEQ ID NO: 3279855 - RNA, 19 nt, Artificial Sequence
  Description of Artificial Sequence: Synthetic oligonucleotide
aaaauaauuuauucugcag

SEQ ID NO: 3279856 - RNA, 19 nt, Artificial Sequence
  Description of Artificial Sequence: Synthetic oligonucleotide
augacagagaccuucaugg

SEQ ID NO: 3279857 - RNA, 19 nt, Artificial Sequence
  Description of Artificial Sequence: Synthetic oligonucleotide
ugugugugaaugaugaagg

SEQ ID NO: 3279858 - RNA, 19 nt, Artificial Sequence
  Description of Artificial Sequence: Synthetic oligonucleotide
acaaaagcaugacagagac

SEQ ID NO: 3279859 - RNA, 19 nt, Artificial Sequence
  Description of Artificial Sequence: Synthetic oligonucleotide
auaauuaauaacuuagaga

SEQ ID NO: 3279860 - RNA, 19 nt, Artificial Sequence
  Description of Artificial Sequence: Synthetic oligonucleotide
aauuccuuaaguguuauug

SEQ ID NO: 3279861 - RNA, 19 nt, Artificial Sequence
  Description of Artificial Sequence: Synthetic oligonucleotide
gauaaaacaacauuaaagu

SEQ ID NO: 3279862 - RNA, 19 nt, Artificial Sequence
  Description of Artificial Sequence: Synthetic oligonucleotide
uaauuuauucugcagauaa

SEQ ID NO: 3279863 - RNA, 19 nt, Artificial Sequence
  Description of Artificial Sequence: Synthetic oligonucleotide
aguucuauacccuucuugg

SEQ ID NO: 3279864 - RNA, 19 nt, Artificial Sequence
  Description of Artificial Sequence: Synthetic oligonucleotide
aauaauuuauucugcagau

SEQ ID NO: 3279865 - RNA, 19 nt, Artificial Sequence
  Description of Artificial Sequence: Synthetic oligonucleotide
uuuacauucaaaucacacc

SEQ ID NO: 3279866 - RNA, 19 nt, Artificial Sequence
  Description of Artificial Sequence: Synthetic oligonucleotide
uuauucugcagauaaaaca

SEQ ID NO: 3279867 - RNA, 19 nt, Artificial Sequence
  Description of Artificial Sequence: Synthetic oligonucleotide
ucagaaaagacaagggugc

SEQ ID NO: 3279868 - RNA, 19 nt, Artificial Sequence
  Description of Artificial Sequence: Synthetic oligonucleotide
agauaaaacaacauuaaag

SEQ ID NO: 3279869 - RNA, 19 nt, Artificial Sequence
  Description of Artificial Sequence: Synthetic oligonucleotide
uuagagauaauuccuuaag

SEQ ID NO: 3279870 - RNA, 19 nt, Artificial Sequence
  Description of Artificial Sequence: Synthetic oligonucleotide
uuuguagcucucaagauac

SEQ ID NO: 3279871 - RNA, 19 nt, Artificial Sequence
  Description of Artificial Sequence: Synthetic oligonucleotide
auuaauaacuuagagauaa

SEQ ID NO: 3279872 - RNA, 19 nt, Artificial Sequence
  Description of Artificial Sequence: Synthetic oligonucleotide
ugcagauaaaacaacauua

SEQ ID NO: 3279873 - RNA, 19 nt, Artificial Sequence
  Description of Artificial Sequence: Synthetic oligonucleotide
auaaaacaacauuaaagug

SEQ ID NO: 3279874 - RNA, 19 nt, Artificial Sequence
  Description of Artificial Sequence: Synthetic oligonucleotide
aacauuaaagugaugggag

SEQ ID NO: 3279875 - RNA, 19 nt, Artificial Sequence
  Description of Artificial Sequence: Synthetic oligonucleotide
aauugaucccaucuggcug

SEQ ID NO: 3279876 - RNA, 19 nt, Artificial Sequence
  Description of Artificial Sequence: Synthetic oligonucleotide
uuuguuucuugucuccugg

SEQ ID NO: 3279877 - RNA, 19 nt, Artificial Sequence
  Description of Artificial Sequence: Synthetic oligonucleotide
cauguggaugaauugaucc

SEQ ID NO: 3279878 - RNA, 19 nt, Artificial Sequence
  Description of Artificial Sequence: Synthetic oligonucleotide
aagaucacagcuucccagg

SEQ ID NO: 3279879 - RNA, 19 nt, Artificial Sequence
  Description of Artificial Sequence: Synthetic oligonucleotide
ugacauagcagcaugugga

SEQ ID NO: 3279880 - RNA, 19 nt, Artificial Sequence
  Description of Artificial Sequence: Synthetic oligonucleotide
caaaucacaccaaaguagc

SEQ ID NO: 3279881 - RNA, 19 nt, Artificial Sequence
  Description of Artificial Sequence: Synthetic oligonucleotide
augaauugaucccaucugg

SEQ ID NO: 3279882 - RNA, 19 nt, Artificial Sequence
  Description of Artificial Sequence: Synthetic oligonucleotide
cucagaaaagacaagggug

SEQ ID NO: 3279883 - RNA, 19 nt, Artificial Sequence
  Description of Artificial Sequence: Synthetic oligonucleotide
aaucagccuaucuuagcac

SEQ ID NO: 3279884 - RNA, 19 nt, Artificial Sequence
  Description of Artificial Sequence: Synthetic oligonucleotide
uugacauagcagcaugugg

SEQ ID NO: 3279885 - RNA, 19 nt, Artificial Sequence
  Description of Artificial Sequence: Synthetic oligonucleotide
acaacauuaaagugauggg

SEQ ID NO: 3279886 - RNA, 19 nt, Artificial Sequence
  Description of Artificial Sequence: Synthetic oligonucleotide
aaagugaugggaggugucc

SEQ ID NO: 3279887 - RNA, 19 nt, Artificial Sequence
  Description of Artificial Sequence: Synthetic oligonucleotide
accccuuagagguagaauc

SEQ ID NO: 3279888 - RNA, 19 nt, Artificial Sequence
  Description of Artificial Sequence: Synthetic oligonucleotide
cuuuacauucaaaucacac

SEQ ID NO: 3279889 - RNA, 19 nt, Artificial Sequence
  Description of Artificial Sequence: Synthetic oligonucleotide
auguggaugaauugauccc

SEQ ID NO: 3279890 - RNA, 19 nt, Artificial Sequence
  Description of Artificial Sequence: Synthetic oligonucleotide
uaacuuagagauaauuccu

SEQ ID NO: 3279891 - RNA, 19 nt, Artificial Sequence
  Description of Artificial Sequence: Synthetic oligonucleotide
uuuauucugcagauaaaac

SEQ ID NO: 3279892 - RNA, 19 nt, Artificial Sequence
  Description of Artificial Sequence: Synthetic oligonucleotide
ucucagaaaagacaagggu

SEQ ID NO: 3279893 - RNA, 19 nt, Artificial Sequence
  Description of Artificial Sequence: Synthetic oligonucleotide
aaaacaacauuaaagugau

SEQ ID NO: 3279894 - RNA, 19 nt, Artificial Sequence
  Description of Artificial Sequence: Synthetic oligonucleotide
acaccaaaguagcacagac

SEQ ID NO: 3279895 - RNA, 19 nt, Artificial Sequence
  Description of Artificial Sequence: Synthetic oligonucleotide
accaaaguagcacagacaa

SEQ ID NO: 3279896 - RNA, 19 nt, Artificial Sequence
  Description of Artificial Sequence: Synthetic oligonucleotide
gaugaauugaucccaucug

SEQ ID NO: 3279897 - RNA, 19 nt, Artificial Sequence
  Description of Artificial Sequence: Synthetic oligonucleotide
auugaucccaucuggcugg

SEQ ID NO: 3279898 - RNA, 19 nt, Artificial Sequence
  Description of Artificial Sequence: Synthetic oligonucleotide
cucaagauacuucuugggg

SEQ ID NO: 3279899 - RNA, 19 nt, Artificial Sequence
  Description of Artificial Sequence: Synthetic oligonucleotide
guucucagaaaagacaagg

SEQ ID NO: 3279900 - RNA, 19 nt, Artificial Sequence
  Description of Artificial Sequence: Synthetic oligonucleotide
aucacagcuucccagggac

SEQ ID NO: 3279901 - RNA, 19 nt, Artificial Sequence
  Description of Artificial Sequence: Synthetic oligonucleotide
agaaaggagagcuggcuuc

SEQ ID NO: 3279902 - RNA, 19 nt, Artificial Sequence
  Description of Artificial Sequence: Synthetic oligonucleotide
ucucaagauacuucuuggg

SEQ ID NO: 3279903 - RNA, 19 nt, Artificial Sequence
  Description of Artificial Sequence: Synthetic oligonucleotide
ucaugguggagaaaggaga

SEQ ID NO: 3279904 - RNA, 19 nt, Artificial Sequence
  Description of Artificial Sequence: Synthetic oligonucleotide
acauuaaagugaugggagg

SEQ ID NO: 3279905 - RNA, 19 nt, Artificial Sequence
  Description of Artificial Sequence: Synthetic oligonucleotide
uagagauaauuccuuaagu

SEQ ID NO: 3279906 - RNA, 19 nt, Artificial Sequence
  Description of Artificial Sequence: Synthetic oligonucleotide
gaagaucacagcuucccag

SEQ ID NO: 3279907 - RNA, 19 nt, Artificial Sequence
  Description of Artificial Sequence: Synthetic oligonucleotide
ucggcuuuaguacagaguu

SEQ ID NO: 3279908 - RNA, 19 nt, Artificial Sequence
  Description of Artificial Sequence: Synthetic oligonucleotide
uuaguacagaguucuauac

SEQ ID NO: 3279909 - RNA, 19 nt, Artificial Sequence
  Description of Artificial Sequence: Synthetic oligonucleotide
uugguuucuugacauagca

SEQ ID NO: 3279910 - RNA, 19 nt, Artificial Sequence
  Description of Artificial Sequence: Synthetic oligonucleotide
uucugcagauaaaacaaca

SEQ ID NO: 3279911 - RNA, 19 nt, Artificial Sequence
  Description of Artificial Sequence: Synthetic oligonucleotide
ugaauugaucccaucuggc

SEQ ID NO: 3279912 - RNA, 19 nt, Artificial Sequence
  Description of Artificial Sequence: Synthetic oligonucleotide
ucuugaagaucacagcuuc

SEQ ID NO: 3279913 - RNA, 19 nt, Artificial Sequence
  Description of Artificial Sequence: Synthetic oligonucleotide
agaaucagccuaucuuagc

SEQ ID NO: 3279914 - RNA, 19 nt, Artificial Sequence
  Description of Artificial Sequence: Synthetic oligonucleotide
cauuccuucagacagcuuc

SEQ ID NO: 3279915 - RNA, 19 nt, Artificial Sequence
  Description of Artificial Sequence: Synthetic oligonucleotide
uuuuguagcucucaagaua

SEQ ID NO: 3279916 - RNA, 19 nt, Artificial Sequence
  Description of Artificial Sequence: Synthetic oligonucleotide
aaaagacaagggugcagag

SEQ ID NO: 3279917 - RNA, 19 nt, Artificial Sequence
  Description of Artificial Sequence: Synthetic oligonucleotide
uguuauugcuucacauucc

SEQ ID NO: 3279918 - RNA, 19 nt, Artificial Sequence
  Description of Artificial Sequence: Synthetic oligonucleotide
aagcaugacagagaccuuc

SEQ ID NO: 3279919 - RNA, 19 nt, Artificial Sequence
  Description of Artificial Sequence: Synthetic oligonucleotide
uuuaguacagaguucuaua

SEQ ID NO: 3279920 - RNA, 19 nt, Artificial Sequence
  Description of Artificial Sequence: Synthetic oligonucleotide
gugugaaugaugaaggcag

SEQ ID NO: 3279921 - RNA, 19 nt, Artificial Sequence
  Description of Artificial Sequence: Synthetic oligonucleotide
uuucuugucuccuggguug

SEQ ID NO: 3279922 - RNA, 19 nt, Artificial Sequence
  Description of Artificial Sequence: Synthetic oligonucleotide
uaucuuagcacaguucuca

SEQ ID NO: 3279923 - RNA, 19 nt, Artificial Sequence
  Description of Artificial Sequence: Synthetic oligonucleotide
ucuauacccuucuuggucu

SEQ ID NO: 3279924 - RNA, 19 nt, Artificial Sequence
  Description of Artificial Sequence: Synthetic oligonucleotide
cauucaaaucacaccaaag

SEQ ID NO: 3279925 - RNA, 19 nt, Artificial Sequence
  Description of Artificial Sequence: Synthetic oligonucleotide
uagaaucagccuaucuuag

SEQ ID NO: 3279926 - RNA, 19 nt, Artificial Sequence
  Description of Artificial Sequence: Synthetic oligonucleotide
cucucaagauacuucuugg

SEQ ID NO: 3279927 - RNA, 19 nt, Artificial Sequence
  Description of Artificial Sequence: Synthetic oligonucleotide
agcacagacaaauuaaaua

SEQ ID NO: 3279928 - RNA, 19 nt, Artificial Sequence
  Description of Artificial Sequence: Synthetic oligonucleotide
uucuauacccuucuugguc

SEQ ID NO: 3279929 - RNA, 19 nt, Artificial Sequence
  Description of Artificial Sequence: Synthetic oligonucleotide
gaaucagccuaucuuagca

SEQ ID NO: 3279930 - RNA, 19 nt, Artificial Sequence
  Description of Artificial Sequence: Synthetic oligonucleotide
aaguagcacagacaaauua

SEQ ID NO: 3279931 - RNA, 19 nt, Artificial Sequence
  Description of Artificial Sequence: Synthetic oligonucleotide
gagauaauuccuuaagugu

SEQ ID NO: 3279932 - RNA, 19 nt, Artificial Sequence
  Description of Artificial Sequence: Synthetic oligonucleotide
uuccuuaaguguuauugcu

SEQ ID NO: 3279933 - RNA, 19 nt, Artificial Sequence
  Description of Artificial Sequence: Synthetic oligonucleotide
aaugaugaaggcagcagcu

SEQ ID NO: 3279934 - RNA, 19 nt, Artificial Sequence
  Description of Artificial Sequence: Synthetic oligonucleotide
acuucuuggggaucuuugg

SEQ ID NO: 3279935 - RNA, 19 nt, Artificial Sequence
  Description of Artificial Sequence: Synthetic oligonucleotide
guguuauugcuucacauuc

SEQ ID NO: 3279936 - RNA, 19 nt, Artificial Sequence
  Description of Artificial Sequence: Synthetic oligonucleotide
uugaagaucacagcuuccc

SEQ ID NO: 3279937 - RNA, 19 nt, Artificial Sequence
  Description of Artificial Sequence: Synthetic oligonucleotide
gaguucuauacccuucuug

SEQ ID NO: 3279938 - RNA, 19 nt, Artificial Sequence
  Description of Artificial Sequence: Synthetic oligonucleotide
uuugguuucuugacauagc

SEQ ID NO: 3279939 - RNA, 19 nt, Artificial Sequence
  Description of Artificial Sequence: Synthetic oligonucleotide
cuguccaaguacuccaugg

SEQ ID NO: 3279940 - RNA, 19 nt, Artificial Sequence
  Description of Artificial Sequence: Synthetic oligonucleotide
cuuugguuucuugacauag

SEQ ID NO: 3279941 - RNA, 19 nt, Artificial Sequence
  Description of Artificial Sequence: Synthetic oligonucleotide
ugugugaaugaugaaggca

SEQ ID NO: 3279942 - RNA, 19 nt, Artificial Sequence
  Description of Artificial Sequence: Synthetic oligonucleotide
caugguggagaaaggagag

SEQ ID NO: 3279943 - RNA, 19 nt, Artificial Sequence
  Description of Artificial Sequence: Synthetic oligonucleotide
uguccaaguacuccauggc

SEQ ID NO: 3279944 - RNA, 19 nt, Artificial Sequence
  Description of Artificial Sequence: Synthetic oligonucleotide
agcuucuaccccuuagagg

SEQ ID NO: 3279945 - RNA, 19 nt, Artificial Sequence
  Description of Artificial Sequence: Synthetic oligonucleotide
uaaguguuauugcuucaca

SEQ ID NO: 3279946 - RNA, 19 nt, Artificial Sequence
  Description of Artificial Sequence: Synthetic oligonucleotide
gacagagaccuucauggug

SEQ ID NO: 3279947 - RNA, 19 nt, Artificial Sequence
  Description of Artificial Sequence: Synthetic oligonucleotide
uguggaugaauugauccca

SEQ ID NO: 3279948 - RNA, 19 nt, Artificial Sequence
  Description of Artificial Sequence: Synthetic oligonucleotide
uugguuccuguucagguac

SEQ ID NO: 3279949 - RNA, 19 nt, Artificial Sequence
  Description of Artificial Sequence: Synthetic oligonucleotide
cuugacaucauccauaucc

SEQ ID NO: 3279950 - RNA, 19 nt, Artificial Sequence
  Description of Artificial Sequence: Synthetic oligonucleotide
auugccuuguaacugaagc

SEQ ID NO: 3279951 - RNA, 19 nt, Artificial Sequence
  Description of Artificial Sequence: Synthetic oligonucleotide
acaaacauugccuuguaac

SEQ ID NO: 3279952 - RNA, 19 nt, Artificial Sequence
  Description of Artificial Sequence: Synthetic oligonucleotide
cacaaauccaccauuaggg

SEQ ID NO: 3279953 - RNA, 19 nt, Artificial Sequence
  Description of Artificial Sequence: Synthetic oligonucleotide
uuguaacugaagcugaugg

SEQ ID NO: 3279954 - RNA, 19 nt, Artificial Sequence
  Description of Artificial Sequence: Synthetic oligonucleotide
aaaggggucaaguugaacu

SEQ ID NO: 3279955 - RNA, 19 nt, Artificial Sequence
  Description of Artificial Sequence: Synthetic oligonucleotide
ucaauauauggacaagggg

SEQ ID NO: 3279956 - RNA, 19 nt, Artificial Sequence
  Description of Artificial Sequence: Synthetic oligonucleotide
uucaauauauggacaaggg

SEQ ID NO: 3279957 - RNA, 19 nt, Artificial Sequence
  Description of Artificial Sequence: Synthetic oligonucleotide
aguaucaguggucaacucc

SEQ ID NO: 3279958 - RNA, 19 nt, Artificial Sequence
  Description of Artificial Sequence: Synthetic oligonucleotide
ucuuucuagagcuacagca

SEQ ID NO: 3279959 - RNA, 19 nt, Artificial Sequence
  Description of Artificial Sequence: Synthetic oligonucleotide
aaaauuguggcaaaggggu

SEQ ID NO: 3279960 - RNA, 19 nt, Artificial Sequence
  Description of Artificial Sequence: Synthetic oligonucleotide
aaucuuuacaguaucagug

SEQ ID NO: 3279961 - RNA, 19 nt, Artificial Sequence
  Description of Artificial Sequence: Synthetic oligonucleotide
ucaaguugaacucugccug

SEQ ID NO: 3279962 - RNA, 19 nt, Artificial Sequence
  Description of Artificial Sequence: Synthetic oligonucleotide
ucacaaauccaccauuagg

SEQ ID NO: 3279963 - RNA, 19 nt, Artificial Sequence
  Description of Artificial Sequence: Synthetic oligonucleotide
acaucauccauauccagcg

SEQ ID NO: 3279964 - RNA, 19 nt, Artificial Sequence
  Description of Artificial Sequence: Synthetic oligonucleotide
ucugccugcaccaagaccu

SEQ ID NO: 3279965 - RNA, 19 nt, Artificial Sequence
  Description of Artificial Sequence: Synthetic oligonucleotide
uguaaaccaaaauuguggc

SEQ ID NO: 3279966 - RNA, 19 nt, Artificial Sequence
  Description of Artificial Sequence: Synthetic oligonucleotide
agagcuacagcauauguug

SEQ ID NO: 3279967 - RNA, 19 nt, Artificial Sequence
  Description of Artificial Sequence: Synthetic oligonucleotide
gaccucauucaauauaugg

SEQ ID NO: 3279968 - RNA, 19 nt, Artificial Sequence
  Description of Artificial Sequence: Synthetic oligonucleotide
aaaaucuuuacaguaucag

SEQ ID NO: 3279969 - RNA, 19 nt, Artificial Sequence
  Description of Artificial Sequence: Synthetic oligonucleotide
aguguuucuuucuagagcu

SEQ ID NO: 3279970 - RNA, 19 nt, Artificial Sequence
  Description of Artificial Sequence: Synthetic oligonucleotide
caaaauuguggcaaagggg

SEQ ID NO: 3279971 - RNA, 19 nt, Artificial Sequence
  Description of Artificial Sequence: Synthetic oligonucleotide
aaaucuuuacaguaucagu

SEQ ID NO: 3279972 - RNA, 19 nt, Artificial Sequence
  Description of Artificial Sequence: Synthetic oligonucleotide
uuuucauacuuucugugga

SEQ ID NO: 3279973 - RNA, 19 nt, Artificial Sequence
  Description of Artificial Sequence: Synthetic oligonucleotide
aucauagccaacccacucc

SEQ ID NO: 3279974 - RNA, 19 nt, Artificial Sequence
  Description of Artificial Sequence: Synthetic oligonucleotide
aucuuuacaguaucagugg

SEQ ID NO: 3279975 - RNA, 19 nt, Artificial Sequence
  Description of Artificial Sequence: Synthetic oligonucleotide
cuuuucauacuuucugugg

SEQ ID NO: 3279976 - RNA, 19 nt, Artificial Sequence
  Description of Artificial Sequence: Synthetic oligonucleotide
guguaaaccaaaauugugg

SEQ ID NO: 3279977 - RNA, 19 nt, Artificial Sequence
  Description of Artificial Sequence: Synthetic oligonucleotide
auucaauauauggacaagg

SEQ ID NO: 3279978 - RNA, 19 nt, Artificial Sequence
  Description of Artificial Sequence: Synthetic oligonucleotide
agaagguccagugaggugg

SEQ ID NO: 3279979 - RNA, 19 nt, Artificial Sequence
  Description of Artificial Sequence: Synthetic oligonucleotide
uccugaggaauucacaggc

SEQ ID NO: 3279980 - RNA, 19 nt, Artificial Sequence
  Description of Artificial Sequence: Synthetic oligonucleotide
uuuacaguaucagugguca

SEQ ID NO: 3279981 - RNA, 19 nt, Artificial Sequence
  Description of Artificial Sequence: Synthetic oligonucleotide
ugaugguaucaucauagcc

SEQ ID NO: 3279982 - RNA, 19 nt, Artificial Sequence
  Description of Artificial Sequence: Synthetic oligonucleotide
guaguuuugccccaggagc

SEQ ID NO: 3279983 - RNA, 19 nt, Artificial Sequence
  Description of Artificial Sequence: Synthetic oligonucleotide
gaugguaucaucauagcca

SEQ ID NO: 3279984 - RNA, 19 nt, Artificial Sequence
  Description of Artificial Sequence: Synthetic oligonucleotide
aaggggucaaguugaacuc

SEQ ID NO: 3279985 - RNA, 19 nt, Artificial Sequence
  Description of Artificial Sequence: Synthetic oligonucleotide
uaaaccaaaauuguggcaa

SEQ ID NO: 3279986 - RNA, 19 nt, Artificial Sequence
  Description of Artificial Sequence: Synthetic oligonucleotide
accauuagggauuguaguc

SEQ ID NO: 3279987 - RNA, 19 nt, Artificial Sequence
  Description of Artificial Sequence: Synthetic oligonucleotide
cuuucuguggaccucagug

SEQ ID NO: 3279988 - RNA, 19 nt, Artificial Sequence
  Description of Artificial Sequence: Synthetic oligonucleotide
ucauucaauauauggacaa

SEQ ID NO: 3279989 - RNA, 19 nt, Artificial Sequence
  Description of Artificial Sequence: Synthetic oligonucleotide
uuucuguggaccucagugg

SEQ ID NO: 3279990 - RNA, 19 nt, Artificial Sequence
  Description of Artificial Sequence: Synthetic oligonucleotide
auuguagucaccuuuucau

SEQ ID NO: 3279991 - RNA, 19 nt, Artificial Sequence
  Description of Artificial Sequence: Synthetic oligonucleotide
aacaguguuucuuucuaga

SEQ ID NO: 3279992 - RNA, 19 nt, Artificial Sequence
  Description of Artificial Sequence: Synthetic oligonucleotide
aacauugccuuguaacuga

SEQ ID NO: 3279993 - RNA, 19 nt, Artificial Sequence
  Description of Artificial Sequence: Synthetic oligonucleotide
auauccagcguccacacca

SEQ ID NO: 3279994 - RNA, 19 nt, Artificial Sequence
  Description of Artificial Sequence: Synthetic oligonucleotide
aucaucauagccaacccac

SEQ ID NO: 3279995 - RNA, 19 nt, Artificial Sequence
  Description of Artificial Sequence: Synthetic oligonucleotide
uguagucaccuuuucauac

SEQ ID NO: 3279996 - RNA, 19 nt, Artificial Sequence
  Description of Artificial Sequence: Synthetic oligonucleotide
gacucucagagccaggucc

SEQ ID NO: 3279997 - RNA, 19 nt, Artificial Sequence
  Description of Artificial Sequence: Synthetic oligonucleotide
uucacaggcaguguaaacc

SEQ ID NO: 3279998 - RNA, 19 nt, Artificial Sequence
  Description of Artificial Sequence: Synthetic oligonucleotide
gauguuguuccuccagggg

SEQ ID NO: 3279999 - RNA, 19 nt, Artificial Sequence
  Description of Artificial Sequence: Synthetic oligonucleotide
cuggcagacucucagagcc

SEQ ID NO: 3280000 - RNA, 19 nt, Artificial Sequence
  Description of Artificial Sequence: Synthetic oligonucleotide
ugaggugguaguuuugccc

SEQ ID NO: 3280001 - RNA, 19 nt, Artificial Sequence
  Description of Artificial Sequence: Synthetic oligonucleotide
aaacauugccuuguaacug

SEQ ID NO: 3280002 - RNA, 19 nt, Artificial Sequence
  Description of Artificial Sequence: Synthetic oligonucleotide
ucauccauauccagcgucc

SEQ ID NO: 3280003 - RNA, 19 nt, Artificial Sequence
  Description of Artificial Sequence: Synthetic oligonucleotide
gagauguuguuccuccagg

SEQ ID NO: 3280004 - RNA, 19 nt, Artificial Sequence
  Description of Artificial Sequence: Synthetic oligonucleotide
auagccaacccacuccuuc

SEQ ID NO: 3280005 - RNA, 19 nt, Artificial Sequence
  Description of Artificial Sequence: Synthetic oligonucleotide
agauguuguuccuccaggg

SEQ ID NO: 3280006 - RNA, 19 nt, Artificial Sequence
  Description of Artificial Sequence: Synthetic oligonucleotide
aucauccauauccagcguc

SEQ ID NO: 3280007 - RNA, 19 nt, Artificial Sequence
  Description of Artificial Sequence: Synthetic oligonucleotide
uugacaucauccauaucca

SEQ ID NO: 3280008 - RNA, 19 nt, Artificial Sequence
  Description of Artificial Sequence: Synthetic oligonucleotide
agugaggugguaguuuugc

SEQ ID NO: 3280009 - RNA, 19 nt, Artificial Sequence
  Description of Artificial Sequence: Synthetic oligonucleotide
aacugaagcugaugguauc

SEQ ID NO: 3280010 - RNA, 19 nt, Artificial Sequence
  Description of Artificial Sequence: Synthetic oligonucleotide
gaggugguaguuuugcccc

SEQ ID NO: 3280011 - RNA, 19 nt, Artificial Sequence
  Description of Artificial Sequence: Synthetic oligonucleotide
uauguugcaggagauguug

SEQ ID NO: 3280012 - RNA, 19 nt, Artificial Sequence
  Description of Artificial Sequence: Synthetic oligonucleotide
ugccccaggagcaacagug

SEQ ID NO: 3280013 - RNA, 19 nt, Artificial Sequence
  Description of Artificial Sequence: Synthetic oligonucleotide
uccagcguccacaccaugg

SEQ ID NO: 3280014 - RNA, 19 nt, Artificial Sequence
  Description of Artificial Sequence: Synthetic oligonucleotide
uuucuuucuagagcuacag

SEQ ID NO: 3280015 - RNA, 19 nt, Artificial Sequence
  Description of Artificial Sequence: Synthetic oligonucleotide
acaguguuucuuucuagag

SEQ ID NO: 3280016 - RNA, 19 nt, Artificial Sequence
  Description of Artificial Sequence: Synthetic oligonucleotide
cauugccacagaaagugcc

SEQ ID NO: 3280017 - RNA, 19 nt, Artificial Sequence
  Description of Artificial Sequence: Synthetic oligonucleotide
agugcccuugacaucaucc

SEQ ID NO: 3280018 - RNA, 19 nt, Artificial Sequence
  Description of Artificial Sequence: Synthetic oligonucleotide
uaucaucauagccaaccca

SEQ ID NO: 3280019 - RNA, 19 nt, Artificial Sequence
  Description of Artificial Sequence: Synthetic oligonucleotide
uucuguggaccucaguggc

SEQ ID NO: 3280020 - RNA, 19 nt, Artificial Sequence
  Description of Artificial Sequence: Synthetic oligonucleotide
uggcaaaggggucaaguug

SEQ ID NO: 3280021 - RNA, 19 nt, Artificial Sequence
  Description of Artificial Sequence: Synthetic oligonucleotide
uacagcauauguugcagga

SEQ ID NO: 3280022 - RNA, 19 nt, Artificial Sequence
  Description of Artificial Sequence: Synthetic oligonucleotide
gaaagugcccuugacauca

SEQ ID NO: 3280023 - RNA, 19 nt, Artificial Sequence
  Description of Artificial Sequence: Synthetic oligonucleotide
ucuuuacaguaucaguggu

SEQ ID NO: 3280024 - RNA, 19 nt, Artificial Sequence
  Description of Artificial Sequence: Synthetic oligonucleotide
uugcaggagauguuguucc

SEQ ID NO: 3280025 - RNA, 19 nt, Artificial Sequence
  Description of Artificial Sequence: Synthetic oligonucleotide
uuagggauuguagucaccu

SEQ ID NO: 3280026 - RNA, 19 nt, Artificial Sequence
  Description of Artificial Sequence: Synthetic oligonucleotide
gaagcugaugguaucauca

SEQ ID NO: 3280027 - RNA, 19 nt, Artificial Sequence
  Description of Artificial Sequence: Synthetic oligonucleotide
uuuucacaaacauugccuu

SEQ ID NO: 3280028 - RNA, 19 nt, Artificial Sequence
  Description of Artificial Sequence: Synthetic oligonucleotide
aagaccucauucaauauau

SEQ ID NO: 3280029 - RNA, 19 nt, Artificial Sequence
  Description of Artificial Sequence: Synthetic oligonucleotide
aauuguggcaaagggguca

SEQ ID NO: 3280030 - RNA, 19 nt, Artificial Sequence
  Description of Artificial Sequence: Synthetic oligonucleotide
uaguuuugccccaggagca

SEQ ID NO: 3280031 - RNA, 19 nt, Artificial Sequence
  Description of Artificial Sequence: Synthetic oligonucleotide
acagaaagugcccuugaca

SEQ ID NO: 3280032 - RNA, 19 nt, Artificial Sequence
  Description of Artificial Sequence: Synthetic oligonucleotide
ucacaggcaguguaaacca

SEQ ID NO: 3280033 - RNA, 19 nt, Artificial Sequence
  Description of Artificial Sequence: Synthetic oligonucleotide
gacaucauccauauccagc

SEQ ID NO: 3280034 - RNA, 19 nt, Artificial Sequence
  Description of Artificial Sequence: Synthetic oligonucleotide
accaaaauuguggcaaagg

SEQ ID NO: 3280035 - RNA, 19 nt, Artificial Sequence
  Description of Artificial Sequence: Synthetic oligonucleotide
auucacaggcaguguaaac

SEQ ID NO: 3280036 - RNA, 19 nt, Artificial Sequence
  Description of Artificial Sequence: Synthetic oligonucleotide
ccaaaauuguggcaaaggg

SEQ ID NO: 3280037 - RNA, 19 nt, Artificial Sequence
  Description of Artificial Sequence: Synthetic oligonucleotide
ugccuuguaacugaagcug

SEQ ID NO: 3280038 - RNA, 19 nt, Artificial Sequence
  Description of Artificial Sequence: Synthetic oligonucleotide
uucacaaacauugccuugu

SEQ ID NO: 3280039 - RNA, 19 nt, Artificial Sequence
  Description of Artificial Sequence: Synthetic oligonucleotide
gguaucaucauagccaacc

SEQ ID NO: 3280040 - RNA, 19 nt, Artificial Sequence
  Description of Artificial Sequence: Synthetic oligonucleotide
gaaagggccauugccacag

SEQ ID NO: 3280041 - RNA, 19 nt, Artificial Sequence
  Description of Artificial Sequence: Synthetic oligonucleotide
acuggcagacucucagagc

SEQ ID NO: 3280042 - RNA, 19 nt, Artificial Sequence
  Description of Artificial Sequence: Synthetic oligonucleotide
ucaguggucaacuccucug

SEQ ID NO: 3280043 - RNA, 19 nt, Artificial Sequence
  Description of Artificial Sequence: Synthetic oligonucleotide
uguaacugaagcugauggu

SEQ ID NO: 3280044 - RNA, 19 nt, Artificial Sequence
  Description of Artificial Sequence: Synthetic oligonucleotide
gaggaauucacaggcagug

SEQ ID NO: 3280045 - RNA, 19 nt, Artificial Sequence
  Description of Artificial Sequence: Synthetic oligonucleotide
gcaguguaaaccaaaauug

SEQ ID NO: 3280046 - RNA, 19 nt, Artificial Sequence
  Description of Artificial Sequence: Synthetic oligonucleotide
cugaggaauucacaggcag

SEQ ID NO: 3280047 - RNA, 19 nt, Artificial Sequence
  Description of Artificial Sequence: Synthetic oligonucleotide
auugccacagaaagugccc

SEQ ID NO: 3280048 - RNA, 19 nt, Artificial Sequence
  Description of Artificial Sequence: Synthetic oligonucleotide
ucauagccaacccacuccu

SEQ ID NO: 3280049 - RNA, 19 nt, Artificial Sequence
  Description of Artificial Sequence: Synthetic oligonucleotide
aaaauagaaauauaggagg

SEQ ID NO: 3280050 - RNA, 19 nt, Artificial Sequence
  Description of Artificial Sequence: Synthetic oligonucleotide
ucauuguucacaaagauuc

SEQ ID NO: 3280051 - RNA, 19 nt, Artificial Sequence
  Description of Artificial Sequence: Synthetic oligonucleotide
aauggaaagacagagcaac

SEQ ID NO: 3280052 - RNA, 19 nt, Artificial Sequence
  Description of Artificial Sequence: Synthetic oligonucleotide
aaaucuuucagucauacuu

SEQ ID NO: 3280053 - RNA, 19 nt, Artificial Sequence
  Description of Artificial Sequence: Synthetic oligonucleotide
cuaaagaauggaaagacag

SEQ ID NO: 3280054 - RNA, 19 nt, Artificial Sequence
  Description of Artificial Sequence: Synthetic oligonucleotide
ugaggaucaaauaauaaga

SEQ ID NO: 3280055 - RNA, 19 nt, Artificial Sequence
  Description of Artificial Sequence: Synthetic oligonucleotide
aaagaauggaaagacagag

SEQ ID NO: 3280056 - RNA, 19 nt, Artificial Sequence
  Description of Artificial Sequence: Synthetic oligonucleotide
aaaaucguuucacaaugcg

SEQ ID NO: 3280057 - RNA, 19 nt, Artificial Sequence
  Description of Artificial Sequence: Synthetic oligonucleotide
aaugcuggcaagcugcugg

SEQ ID NO: 3280058 - RNA, 19 nt, Artificial Sequence
  Description of Artificial Sequence: Synthetic oligonucleotide
gaucuucauaauuugauag

SEQ ID NO: 3280059 - RNA, 19 nt, Artificial Sequence
  Description of Artificial Sequence: Synthetic oligonucleotide
aaugcgaucuucuaaagaa

SEQ ID NO: 3280060 - RNA, 19 nt, Artificial Sequence
  Description of Artificial Sequence: Synthetic oligonucleotide
ucuucuaaagaauggaaag

SEQ ID NO: 3280061 - RNA, 19 nt, Artificial Sequence
  Description of Artificial Sequence: Synthetic oligonucleotide
uugaggaucaaauaauaag

SEQ ID NO: 3280062 - RNA, 19 nt, Artificial Sequence
  Description of Artificial Sequence: Synthetic oligonucleotide
uucauaauuugauagcugc

SEQ ID NO: 3280063 - RNA, 19 nt, Artificial Sequence
  Description of Artificial Sequence: Synthetic oligonucleotide
uaaugcuuagguuaaaucu

SEQ ID NO: 3280064 - RNA, 19 nt, Artificial Sequence
  Description of Artificial Sequence: Synthetic oligonucleotide
cucaagauaggguauaugc

SEQ ID NO: 3280065 - RNA, 19 nt, Artificial Sequence
  Description of Artificial Sequence: Synthetic oligonucleotide
aacaaugcuggcaagcugc

SEQ ID NO: 3280066 - RNA, 19 nt, Artificial Sequence
  Description of Artificial Sequence: Synthetic oligonucleotide
uauaggaggaaaauuugag

SEQ ID NO: 3280067 - RNA, 19 nt, Artificial Sequence
  Description of Artificial Sequence: Synthetic oligonucleotide
agugaauccaucugugacc

SEQ ID NO: 3280068 - RNA, 19 nt, Artificial Sequence
  Description of Artificial Sequence: Synthetic oligonucleotide
agaucuuugcagcaagucc

SEQ ID NO: 3280069 - RNA, 19 nt, Artificial Sequence
  Description of Artificial Sequence: Synthetic oligonucleotide
agaauggaaagacagagca

SEQ ID NO: 3280070 - RNA, 19 nt, Artificial Sequence
  Description of Artificial Sequence: Synthetic oligonucleotide
aauucagaggagcucuuac

SEQ ID NO: 3280071 - RNA, 19 nt, Artificial Sequence
  Description of Artificial Sequence: Synthetic oligonucleotide
uucacaaagauucgaagug

SEQ ID NO: 3280072 - RNA, 19 nt, Artificial Sequence
  Description of Artificial Sequence: Synthetic oligonucleotide
aaagacagagcaacaaggc

SEQ ID NO: 3280073 - RNA, 19 nt, Artificial Sequence
  Description of Artificial Sequence: Synthetic oligonucleotide
aucuucauaauuugauagc

SEQ ID NO: 3280074 - RNA, 19 nt, Artificial Sequence
  Description of Artificial Sequence: Synthetic oligonucleotide
aagacagagcaacaaggcg

SEQ ID NO: 3280075 - RNA, 19 nt, Artificial Sequence
  Description of Artificial Sequence: Synthetic oligonucleotide
uuuucagaaauuucugugc

SEQ ID NO: 3280076 - RNA, 19 nt, Artificial Sequence
  Description of Artificial Sequence: Synthetic oligonucleotide
uaggaggaaaauuugagga

SEQ ID NO: 3280077 - RNA, 19 nt, Artificial Sequence
  Description of Artificial Sequence: Synthetic oligonucleotide
cuuucuugcauagacagcg

SEQ ID NO: 3280078 - RNA, 19 nt, Artificial Sequence
  Description of Artificial Sequence: Synthetic oligonucleotide
gaaagacagagcaacaagg

SEQ ID NO: 3280079 - RNA, 19 nt, Artificial Sequence
  Description of Artificial Sequence: Synthetic oligonucleotide
uucaccuucugucuaaugc

SEQ ID NO: 3280080 - RNA, 19 nt, Artificial Sequence
  Description of Artificial Sequence: Synthetic oligonucleotide
aguccuuucuugcauagac

SEQ ID NO: 3280081 - RNA, 19 nt, Artificial Sequence
  Description of Artificial Sequence: Synthetic oligonucleotide
ugugggaagaucuuugcag

SEQ ID NO: 3280082 - RNA, 19 nt, Artificial Sequence
  Description of Artificial Sequence: Synthetic oligonucleotide
cuucuugugaaggagaucc

SEQ ID NO: 3280083 - RNA, 19 nt, Artificial Sequence
  Description of Artificial Sequence: Synthetic oligonucleotide
agucauacuuaucccaagc

SEQ ID NO: 3280084 - RNA, 19 nt, Artificial Sequence
  Description of Artificial Sequence: Synthetic oligonucleotide
aaauauaggaggaaaauuu

SEQ ID NO: 3280085 - RNA, 19 nt, Artificial Sequence
  Description of Artificial Sequence: Synthetic oligonucleotide
uaugcugcgugcuugaaug

SEQ ID NO: 3280086 - RNA, 19 nt, Artificial Sequence
  Description of Artificial Sequence: Synthetic oligonucleotide
uuagguuaaaucuuucagu

SEQ ID NO: 3280087 - RNA, 19 nt, Artificial Sequence
  Description of Artificial Sequence: Synthetic oligonucleotide
aagauaggguauaugcugc

SEQ ID NO: 3280088 - RNA, 19 nt, Artificial Sequence
  Description of Artificial Sequence: Synthetic oligonucleotide
uccuuucuugcauagacag

SEQ ID NO: 3280089 - RNA, 19 nt, Artificial Sequence
  Description of Artificial Sequence: Synthetic oligonucleotide
cuuagguuaaaucuuucag

SEQ ID NO: 3280090 - RNA, 19 nt, Artificial Sequence
  Description of Artificial Sequence: Synthetic oligonucleotide
aaaauuugaggaucaaaua

SEQ ID NO: 3280091 - RNA, 19 nt, Artificial Sequence
  Description of Artificial Sequence: Synthetic oligonucleotide
aggaucaaauaauaagauc

SEQ ID NO: 3280092 - RNA, 19 nt, Artificial Sequence
  Description of Artificial Sequence: Synthetic oligonucleotide
aaauaauaagaucuucaua

SEQ ID NO: 3280093 - RNA, 19 nt, Artificial Sequence
  Description of Artificial Sequence: Synthetic oligonucleotide
uagguuaaaucuuucaguc

SEQ ID NO: 3280094 - RNA, 19 nt, Artificial Sequence
  Description of Artificial Sequence: Synthetic oligonucleotide
aauauaggaggaaaauuug

SEQ ID NO: 3280095 - RNA, 19 nt, Artificial Sequence
  Description of Artificial Sequence: Synthetic oligonucleotide
auaagaucuucauaauuug

SEQ ID NO: 3280096 - RNA, 19 nt, Artificial Sequence
  Description of Artificial Sequence: Synthetic oligonucleotide
aaagauucgaagugcuuga

SEQ ID NO: 3280097 - RNA, 19 nt, Artificial Sequence
  Description of Artificial Sequence: Synthetic oligonucleotide
gauagcugcccuuagcuug

SEQ ID NO: 3280098 - RNA, 19 nt, Artificial Sequence
  Description of Artificial Sequence: Synthetic oligonucleotide
guuuucagaaauuucugug

SEQ ID NO: 3280099 - RNA, 19 nt, Artificial Sequence
  Description of Artificial Sequence: Synthetic oligonucleotide
ugcuggguucucaagauag

SEQ ID NO: 3280100 - RNA, 19 nt, Artificial Sequence
  Description of Artificial Sequence: Synthetic oligonucleotide
ucuaaagaauggaaagaca

SEQ ID NO: 3280101 - RNA, 19 nt, Artificial Sequence
  Description of Artificial Sequence: Synthetic oligonucleotide
caagauaggguauaugcug

SEQ ID NO: 3280102 - RNA, 19 nt, Artificial Sequence
  Description of Artificial Sequence: Synthetic oligonucleotide
agcucuuacagagugaauc

SEQ ID NO: 3280103 - RNA, 19 nt, Artificial Sequence
  Description of Artificial Sequence: Synthetic oligonucleotide
aaauagaaauauaggagga

SEQ ID NO: 3280104 - RNA, 19 nt, Artificial Sequence
  Description of Artificial Sequence: Synthetic oligonucleotide
cuugaaaagucuugguagc

SEQ ID NO: 3280105 - RNA, 19 nt, Artificial Sequence
  Description of Artificial Sequence: Synthetic oligonucleotide
uguucacaaagauucgaag

SEQ ID NO: 3280106 - RNA, 19 nt, Artificial Sequence
  Description of Artificial Sequence: Synthetic oligonucleotide
uucuaaagaauggaaagac

SEQ ID NO: 3280107 - RNA, 19 nt, Artificial Sequence
  Description of Artificial Sequence: Synthetic oligonucleotide
cauaauuugauagcugccc

SEQ ID NO: 3280108 - RNA, 19 nt, Artificial Sequence
  Description of Artificial Sequence: Synthetic oligonucleotide
agaaacacuguuuuaaauu

SEQ ID NO: 3280109 - RNA, 19 nt, Artificial Sequence
  Description of Artificial Sequence: Synthetic oligonucleotide
ugcgaucuucuaaagaaug

SEQ ID NO: 3280110 - RNA, 19 nt, Artificial Sequence
  Description of Artificial Sequence: Synthetic oligonucleotide
ucauaauuugauagcugcc

SEQ ID NO: 3280111 - RNA, 19 nt, Artificial Sequence
  Description of Artificial Sequence: Synthetic oligonucleotide
ugaaggagaucccaauuca

SEQ ID NO: 3280112 - RNA, 19 nt, Artificial Sequence
  Description of Artificial Sequence: Synthetic oligonucleotide
uaagaucuucauaauuuga

SEQ ID NO: 3280113 - RNA, 19 nt, Artificial Sequence
  Description of Artificial Sequence: Synthetic oligonucleotide
aaagucuugguagcgaugu

SEQ ID NO: 3280114 - RNA, 19 nt, Artificial Sequence
  Description of Artificial Sequence: Synthetic oligonucleotide
ucuucauaauuugauagcu

SEQ ID NO: 3280115 - RNA, 19 nt, Artificial Sequence
  Description of Artificial Sequence: Synthetic oligonucleotide
aaauuucugugcuguuuuc

SEQ ID NO: 3280116 - RNA, 19 nt, Artificial Sequence
  Description of Artificial Sequence: Synthetic oligonucleotide
aaucguuucacaaugcgau

SEQ ID NO: 3280117 - RNA, 19 nt, Artificial Sequence
  Description of Artificial Sequence: Synthetic oligonucleotide
gauucgaagugcuugaaaa

SEQ ID NO: 3280118 - RNA, 19 nt, Artificial Sequence
  Description of Artificial Sequence: Synthetic oligonucleotide
uuugaggaucaaauaauaa

SEQ ID NO: 3280119 - RNA, 19 nt, Artificial Sequence
  Description of Artificial Sequence: Synthetic oligonucleotide
aaaggcaccugcaacaaug

SEQ ID NO: 3280120 - RNA, 19 nt, Artificial Sequence
  Description of Artificial Sequence: Synthetic oligonucleotide
uaauaagaucuucauaauu

SEQ ID NO: 3280121 - RNA, 19 nt, Artificial Sequence
  Description of Artificial Sequence: Synthetic oligonucleotide
uagaaauauaggaggaaaa

SEQ ID NO: 3280122 - RNA, 19 nt, Artificial Sequence
  Description of Artificial Sequence: Synthetic oligonucleotide
uuuucaguccuguguagag

SEQ ID NO: 3280123 - RNA, 19 nt, Artificial Sequence
  Description of Artificial Sequence: Synthetic oligonucleotide
agugcuugaaaagucuugg

SEQ ID NO: 3280124 - RNA, 19 nt, Artificial Sequence
  Description of Artificial Sequence: Synthetic oligonucleotide
ucuugcauagacagcggag

SEQ ID NO: 3280125 - RNA, 19 nt, Artificial Sequence
  Description of Artificial Sequence: Synthetic oligonucleotide
aauuugaggaucaaauaau

SEQ ID NO: 3280126 - RNA, 19 nt, Artificial Sequence
  Description of Artificial Sequence: Synthetic oligonucleotide
ucauacuuaucccaagcaa

SEQ ID NO: 3280127 - RNA, 19 nt, Artificial Sequence
  Description of Artificial Sequence: Synthetic oligonucleotide
aagaucuuugcagcaaguc

SEQ ID NO: 3280128 - RNA, 19 nt, Artificial Sequence
  Description of Artificial Sequence: Synthetic oligonucleotide
aggagaucccaauucagag

SEQ ID NO: 3280129 - RNA, 19 nt, Artificial Sequence
  Description of Artificial Sequence: Synthetic oligonucleotide
gcuugaaaagucuugguag

SEQ ID NO: 3280130 - RNA, 19 nt, Artificial Sequence
  Description of Artificial Sequence: Synthetic oligonucleotide
gaaacacuguuuuaaauua

SEQ ID NO: 3280131 - RNA, 19 nt, Artificial Sequence
  Description of Artificial Sequence: Synthetic oligonucleotide
cuuagcuuggcugagcgcc

SEQ ID NO: 3280132 - RNA, 19 nt, Artificial Sequence
  Description of Artificial Sequence: Synthetic oligonucleotide
uuaaaucuuucagucauac

SEQ ID NO: 3280133 - RNA, 19 nt, Artificial Sequence
  Description of Artificial Sequence: Synthetic oligonucleotide
gagaucccaauucagagga

SEQ ID NO: 3280134 - RNA, 19 nt, Artificial Sequence
  Description of Artificial Sequence: Synthetic oligonucleotide
uucagucauacuuauccca

SEQ ID NO: 3280135 - RNA, 19 nt, Artificial Sequence
  Description of Artificial Sequence: Synthetic oligonucleotide
cuuugcuucaccuucuguc

SEQ ID NO: 3280136 - RNA, 19 nt, Artificial Sequence
  Description of Artificial Sequence: Synthetic oligonucleotide
cagaggagcucuuacagag

SEQ ID NO: 3280137 - RNA, 19 nt, Artificial Sequence
  Description of Artificial Sequence: Synthetic oligonucleotide
aguuuucagaaauuucugu

SEQ ID NO: 3280138 - RNA, 19 nt, Artificial Sequence
  Description of Artificial Sequence: Synthetic oligonucleotide
ucagaaauuucugugcugu

SEQ ID NO: 3280139 - RNA, 19 nt, Artificial Sequence
  Description of Artificial Sequence: Synthetic oligonucleotide
auuucugugcuguuuucag

SEQ ID NO: 3280140 - RNA, 19 nt, Artificial Sequence
  Description of Artificial Sequence: Synthetic oligonucleotide
uucugucuaaugcuuaggu

SEQ ID NO: 3280141 - RNA, 19 nt, Artificial Sequence
  Description of Artificial Sequence: Synthetic oligonucleotide
uacagagugaauccaucug

SEQ ID NO: 3280142 - RNA, 19 nt, Artificial Sequence
  Description of Artificial Sequence: Synthetic oligonucleotide
uuugauagcugcccuuagc

SEQ ID NO: 3280143 - RNA, 19 nt, Artificial Sequence
  Description of Artificial Sequence: Synthetic oligonucleotide
auucgaagugcuugaaaag

SEQ ID NO: 3280144 - RNA, 19 nt, Artificial Sequence
  Description of Artificial Sequence: Synthetic oligonucleotide
uuugcuucaccuucugucu

SEQ ID NO: 3280145 - RNA, 19 nt, Artificial Sequence
  Description of Artificial Sequence: Synthetic oligonucleotide
uuucagucauacuuauccc

SEQ ID NO: 3280146 - RNA, 19 nt, Artificial Sequence
  Description of Artificial Sequence: Synthetic oligonucleotide
gagugaauccaucugugac

SEQ ID NO: 3280147 - RNA, 19 nt, Artificial Sequence
  Description of Artificial Sequence: Synthetic oligonucleotide
acagagugaauccaucugu

SEQ ID NO: 3280148 - RNA, 19 nt, Artificial Sequence
  Description of Artificial Sequence: Synthetic oligonucleotide
uugcauagacagcggaggg

SEQ ID NO: 3280149 - RNA, 19 nt, Artificial Sequence
  Description of Artificial Sequence: Synthetic oligonucleotide
uauaaacaaaguaaaaugc

SEQ ID NO: 3280150 - RNA, 19 nt, Artificial Sequence
  Description of Artificial Sequence: Synthetic oligonucleotide
aacaaaguaaaaugcaggg

SEQ ID NO: 3280151 - RNA, 19 nt, Artificial Sequence
  Description of Artificial Sequence: Synthetic oligonucleotide
gaagaaauccuucucaugg

SEQ ID NO: 3280152 - RNA, 19 nt, Artificial Sequence
  Description of Artificial Sequence: Synthetic oligonucleotide
uaaacaaaguaaaaugcag

SEQ ID NO: 3280153 - RNA, 19 nt, Artificial Sequence
  Description of Artificial Sequence: Synthetic oligonucleotide
guauaaacaaaguaaaaug

SEQ ID NO: 3280154 - RNA, 19 nt, Artificial Sequence
  Description of Artificial Sequence: Synthetic oligonucleotide
ucagaguacaccaaguccc

SEQ ID NO: 3280155 - RNA, 19 nt, Artificial Sequence
  Description of Artificial Sequence: Synthetic oligonucleotide
uauggaaagcaauucagag

SEQ ID NO: 3280156 - RNA, 19 nt, Artificial Sequence
  Description of Artificial Sequence: Synthetic oligonucleotide
aaacaaaguaaaaugcagg

SEQ ID NO: 3280157 - RNA, 19 nt, Artificial Sequence
  Description of Artificial Sequence: Synthetic oligonucleotide
aaaugcaggguauggaaag

SEQ ID NO: 3280158 - RNA, 19 nt, Artificial Sequence
  Description of Artificial Sequence: Synthetic oligonucleotide
uaagaagaaauccuucuca

SEQ ID NO: 3280159 - RNA, 19 nt, Artificial Sequence
  Description of Artificial Sequence: Synthetic oligonucleotide
uggaaagcaauucagagua

SEQ ID NO: 3280160 - RNA, 19 nt, Artificial Sequence
  Description of Artificial Sequence: Synthetic oligonucleotide
uuuaagaagaaauccuucu

SEQ ID NO: 3280161 - RNA, 19 nt, Artificial Sequence
  Description of Artificial Sequence: Synthetic oligonucleotide
ucugucuuuaagaagaaau

SEQ ID NO: 3280162 - RNA, 19 nt, Artificial Sequence
  Description of Artificial Sequence: Synthetic oligonucleotide
aaauccuucucauggucac

SEQ ID NO: 3280163 - RNA, 19 nt, Artificial Sequence
  Description of Artificial Sequence: Synthetic oligonucleotide
uguauaaacaaaguaaaau

SEQ ID NO: 3280164 - RNA, 19 nt, Artificial Sequence
  Description of Artificial Sequence: Synthetic oligonucleotide
aagcaauucagaguacacc

SEQ ID NO: 3280165 - RNA, 19 nt, Artificial Sequence
  Description of Artificial Sequence: Synthetic oligonucleotide
ugucuuuaagaagaaaucc

SEQ ID NO: 3280166 - RNA, 19 nt, Artificial Sequence
  Description of Artificial Sequence: Synthetic oligonucleotide
uucagaguacaccaagucc

SEQ ID NO: 3280167 - RNA, 19 nt, Artificial Sequence
  Description of Artificial Sequence: Synthetic oligonucleotide
agcaauucagaguacacca

SEQ ID NO: 3280168 - RNA, 19 nt, Artificial Sequence
  Description of Artificial Sequence: Synthetic oligonucleotide
cuggaagucuuccugaggg

SEQ ID NO: 3280169 - RNA, 19 nt, Artificial Sequence
  Description of Artificial Sequence: Synthetic oligonucleotide
aauccuggaagucuuccug

SEQ ID NO: 3280170 - RNA, 19 nt, Artificial Sequence
  Description of Artificial Sequence: Synthetic oligonucleotide
auucagaguacaccaaguc

SEQ ID NO: 3280171 - RNA, 19 nt, Artificial Sequence
  Description of Artificial Sequence: Synthetic oligonucleotide
uaaaaugcaggguauggaa

SEQ ID NO: 3280172 - RNA, 19 nt, Artificial Sequence
  Description of Artificial Sequence: Synthetic oligonucleotide
acaccaaguccccaggccc

SEQ ID NO: 3280173 - RNA, 19 nt, Artificial Sequence
  Description of Artificial Sequence: Synthetic oligonucleotide
aaagcaauucagaguacac

SEQ ID NO: 3280174 - RNA, 19 nt, Artificial Sequence
  Description of Artificial Sequence: Synthetic oligonucleotide
uuaagaagaaauccuucuc

SEQ ID NO: 3280175 - RNA, 19 nt, Artificial Sequence
  Description of Artificial Sequence: Synthetic oligonucleotide
guagaggcaauccuggaag

SEQ ID NO: 3280176 - RNA, 19 nt, Artificial Sequence
  Description of Artificial Sequence: Synthetic oligonucleotide
ucuuuaagaagaaauccuu

SEQ ID NO: 3280177 - RNA, 19 nt, Artificial Sequence
  Description of Artificial Sequence: Synthetic oligonucleotide
aguaaaaugcaggguaugg

SEQ ID NO: 3280178 - RNA, 19 nt, Artificial Sequence
  Description of Artificial Sequence: Synthetic oligonucleotide
aaugcaggguauggaaagc

SEQ ID NO: 3280179 - RNA, 19 nt, Artificial Sequence
  Description of Artificial Sequence: Synthetic oligonucleotide
aagaagaaauccuucucau

SEQ ID NO: 3280180 - RNA, 19 nt, Artificial Sequence
  Description of Artificial Sequence: Synthetic oligonucleotide
agaaauccuucucaugguc

SEQ ID NO: 3280181 - RNA, 19 nt, Artificial Sequence
  Description of Artificial Sequence: Synthetic oligonucleotide
aaaggcuccugagaggagg

SEQ ID NO: 3280182 - RNA, 19 nt, Artificial Sequence
  Description of Artificial Sequence: Synthetic oligonucleotide
uguaaaggcuccugagagg

SEQ ID NO: 3280183 - RNA, 19 nt, Artificial Sequence
  Description of Artificial Sequence: Synthetic oligonucleotide
auaaacaaaguaaaaugca

SEQ ID NO: 3280184 - RNA, 19 nt, Artificial Sequence
  Description of Artificial Sequence: Synthetic oligonucleotide
uggguagaggcaauccugg

SEQ ID NO: 3280185 - RNA, 19 nt, Artificial Sequence
  Description of Artificial Sequence: Synthetic oligonucleotide
cuguaaaggcuccugagag

SEQ ID NO: 3280186 - RNA, 19 nt, Artificial Sequence
  Description of Artificial Sequence: Synthetic oligonucleotide
ucagguucccuguauaaac

SEQ ID NO: 3280187 - RNA, 19 nt, Artificial Sequence
  Description of Artificial Sequence: Synthetic oligonucleotide
gacucugucuuuaagaaga

SEQ ID NO: 3280188 - RNA, 19 nt, Artificial Sequence
  Description of Artificial Sequence: Synthetic oligonucleotide
cuuuaagaagaaauccuuc

SEQ ID NO: 3280189 - RNA, 19 nt, Artificial Sequence
  Description of Artificial Sequence: Synthetic oligonucleotide
cuagcugacagucucucag

SEQ ID NO: 3280190 - RNA, 19 nt, Artificial Sequence
  Description of Artificial Sequence: Synthetic oligonucleotide
aagaaauccuucucauggu

SEQ ID NO: 3280191 - RNA, 19 nt, Artificial Sequence
  Description of Artificial Sequence: Synthetic oligonucleotide
agaaugaggacucugucuu

SEQ ID NO: 3280192 - RNA, 19 nt, Artificial Sequence
  Description of Artificial Sequence: Synthetic oligonucleotide
auguuugcugcacacucgg

SEQ ID NO: 3280193 - RNA, 19 nt, Artificial Sequence
  Description of Artificial Sequence: Synthetic oligonucleotide
cugacagucucucagguuc

SEQ ID NO: 3280194 - RNA, 19 nt, Artificial Sequence
  Description of Artificial Sequence: Synthetic oligonucleotide
cugucuuuaagaagaaauc

SEQ ID NO: 3280195 - RNA, 19 nt, Artificial Sequence
  Description of Artificial Sequence: Synthetic oligonucleotide
auggaaagcaauucagagu

SEQ ID NO: 3280196 - RNA, 19 nt, Artificial Sequence
  Description of Artificial Sequence: Synthetic oligonucleotide
caaaguaaaaugcagggua

SEQ ID NO: 3280197 - RNA, 19 nt, Artificial Sequence
  Description of Artificial Sequence: Synthetic oligonucleotide
ugcacacucggcuagcuga

SEQ ID NO: 3280198 - RNA, 19 nt, Artificial Sequence
  Description of Artificial Sequence: Synthetic oligonucleotide
caauucagaguacaccaag

SEQ ID NO: 3280199 - RNA, 19 nt, Artificial Sequence
  Description of Artificial Sequence: Synthetic oligonucleotide
guucccuguauaaacaaag

SEQ ID NO: 3280200 - RNA, 19 nt, Artificial Sequence
  Description of Artificial Sequence: Synthetic oligonucleotide
agaagaaauccuucucaug

SEQ ID NO: 3280201 - RNA, 19 nt, Artificial Sequence
  Description of Artificial Sequence: Synthetic oligonucleotide
aguacaccaaguccccagg

SEQ ID NO: 3280202 - RNA, 19 nt, Artificial Sequence
  Description of Artificial Sequence: Synthetic oligonucleotide
cuucucauggucacaccgg

SEQ ID NO: 3280203 - RNA, 19 nt, Artificial Sequence
  Description of Artificial Sequence: Synthetic oligonucleotide
aaguccccaggccccaggc

SEQ ID NO: 3280204 - RNA, 19 nt, Artificial Sequence
  Description of Artificial Sequence: Synthetic oligonucleotide
gagaggagggugcugagac

SEQ ID NO: 3280205 - RNA, 19 nt, Artificial Sequence
  Description of Artificial Sequence: Synthetic oligonucleotide
acuguaaaggcuccugaga

SEQ ID NO: 3280206 - RNA, 19 nt, Artificial Sequence
  Description of Artificial Sequence: Synthetic oligonucleotide
uucucauggucacaccggc

SEQ ID NO: 3280207 - RNA, 19 nt, Artificial Sequence
  Description of Artificial Sequence: Synthetic oligonucleotide
cauguuugcugcacacucg

SEQ ID NO: 3280208 - RNA, 19 nt, Artificial Sequence
  Description of Artificial Sequence: Synthetic oligonucleotide
aauucagaguacaccaagu

SEQ ID NO: 3280209 - RNA, 19 nt, Artificial Sequence
  Description of Artificial Sequence: Synthetic oligonucleotide
aaaguaaaaugcaggguau

SEQ ID NO: 3280210 - RNA, 19 nt, Artificial Sequence
  Description of Artificial Sequence: Synthetic oligonucleotide
gaggacucugucuuuaaga

SEQ ID NO: 3280211 - RNA, 19 nt, Artificial Sequence
  Description of Artificial Sequence: Synthetic oligonucleotide
uacaccaaguccccaggcc

SEQ ID NO: 3280212 - RNA, 19 nt, Artificial Sequence
  Description of Artificial Sequence: Synthetic oligonucleotide
ucccuguauaaacaaagua

SEQ ID NO: 3280213 - RNA, 19 nt, Artificial Sequence
  Description of Artificial Sequence: Synthetic oligonucleotide
ugaggacucugucuuuaag

SEQ ID NO: 3280214 - RNA, 19 nt, Artificial Sequence
  Description of Artificial Sequence: Synthetic oligonucleotide
aaguaaaaugcaggguaug

SEQ ID NO: 3280215 - RNA, 19 nt, Artificial Sequence
  Description of Artificial Sequence: Synthetic oligonucleotide
gaguacaccaaguccccag

SEQ ID NO: 3280216 - RNA, 19 nt, Artificial Sequence
  Description of Artificial Sequence: Synthetic oligonucleotide
gcugagacuggguagaggc

SEQ ID NO: 3280217 - RNA, 19 nt, Artificial Sequence
  Description of Artificial Sequence: Synthetic oligonucleotide
gaaagcaauucagaguaca

SEQ ID NO: 3280218 - RNA, 19 nt, Artificial Sequence
  Description of Artificial Sequence: Synthetic oligonucleotide
uucccuguauaaacaaagu

SEQ ID NO: 3280219 - RNA, 19 nt, Artificial Sequence
  Description of Artificial Sequence: Synthetic oligonucleotide
uauccagagaaggagcgga

SEQ ID NO: 3280220 - RNA, 19 nt, Artificial Sequence
  Description of Artificial Sequence: Synthetic oligonucleotide
aggacucugucuuuaagaa

SEQ ID NO: 3280221 - RNA, 19 nt, Artificial Sequence
  Description of Artificial Sequence: Synthetic oligonucleotide
gguauggaaagcaauucag

SEQ ID NO: 3280222 - RNA, 19 nt, Artificial Sequence
  Description of Artificial Sequence: Synthetic oligonucleotide
aggguauggaaagcaauuc

SEQ ID NO: 3280223 - RNA, 19 nt, Artificial Sequence
  Description of Artificial Sequence: Synthetic oligonucleotide
uagcugacagucucucagg

SEQ ID NO: 3280224 - RNA, 19 nt, Artificial Sequence
  Description of Artificial Sequence: Synthetic oligonucleotide
aaaaugcaggguauggaaa

SEQ ID NO: 3280225 - RNA, 19 nt, Artificial Sequence
  Description of Artificial Sequence: Synthetic oligonucleotide
auccuucucauggucacac

SEQ ID NO: 3280226 - RNA, 19 nt, Artificial Sequence
  Description of Artificial Sequence: Synthetic oligonucleotide
acaaaguaaaaugcagggu

SEQ ID NO: 3280227 - RNA, 19 nt, Artificial Sequence
  Description of Artificial Sequence: Synthetic oligonucleotide
cuggguagaggcaauccug

SEQ ID NO: 3280228 - RNA, 19 nt, Artificial Sequence
  Description of Artificial Sequence: Synthetic oligonucleotide
guaaaggcuccugagagga

SEQ ID NO: 3280229 - RNA, 19 nt, Artificial Sequence
  Description of Artificial Sequence: Synthetic oligonucleotide
cacuguaaaggcuccugag

SEQ ID NO: 3280230 - RNA, 19 nt, Artificial Sequence
  Description of Artificial Sequence: Synthetic oligonucleotide
ucggcuagcugacagucuc

SEQ ID NO: 3280231 - RNA, 19 nt, Artificial Sequence
  Description of Artificial Sequence: Synthetic oligonucleotide
acuggguagaggcaauccu

SEQ ID NO: 3280232 - RNA, 19 nt, Artificial Sequence
  Description of Artificial Sequence: Synthetic oligonucleotide
gaagucuuccugagggcgg

SEQ ID NO: 3280233 - RNA, 19 nt, Artificial Sequence
  Description of Artificial Sequence: Synthetic oligonucleotide
cagagaaggagcggaaugc

SEQ ID NO: 3280234 - RNA, 19 nt, Artificial Sequence
  Description of Artificial Sequence: Synthetic oligonucleotide
gaggagggugcugagacug

SEQ ID NO: 3280235 - RNA, 19 nt, Artificial Sequence
  Description of Artificial Sequence: Synthetic oligonucleotide
gaaauccuucucaugguca

SEQ ID NO: 3280236 - RNA, 19 nt, Artificial Sequence
  Description of Artificial Sequence: Synthetic oligonucleotide
uuugcugcacacucggcua

SEQ ID NO: 3280237 - RNA, 19 nt, Artificial Sequence
  Description of Artificial Sequence: Synthetic oligonucleotide
ugacagucucucagguucc

SEQ ID NO: 3280238 - RNA, 19 nt, Artificial Sequence
  Description of Artificial Sequence: Synthetic oligonucleotide
gagggcgguauccagagaa

SEQ ID NO: 3280239 - RNA, 19 nt, Artificial Sequence
  Description of Artificial Sequence: Synthetic oligonucleotide
gguauccagagaaggagcg

SEQ ID NO: 3280240 - RNA, 19 nt, Artificial Sequence
  Description of Artificial Sequence: Synthetic oligonucleotide
acacucggcuagcugacag

SEQ ID NO: 3280241 - RNA, 19 nt, Artificial Sequence
  Description of Artificial Sequence: Synthetic oligonucleotide
ugagacuggguagaggcaa

SEQ ID NO: 3280242 - RNA, 19 nt, Artificial Sequence
  Description of Artificial Sequence: Synthetic oligonucleotide
uccuggaagucuuccugag

SEQ ID NO: 3280243 - RNA, 19 nt, Artificial Sequence
  Description of Artificial Sequence: Synthetic oligonucleotide
cagaguacaccaagucccc

SEQ ID NO: 3280244 - RNA, 19 nt, Artificial Sequence
  Description of Artificial Sequence: Synthetic oligonucleotide
cugagggcgguauccagag

SEQ ID NO: 3280245 - RNA, 19 nt, Artificial Sequence
  Description of Artificial Sequence: Synthetic oligonucleotide
aaugaggacucugucuuua

SEQ ID NO: 3280246 - RNA, 19 nt, Artificial Sequence
  Description of Artificial Sequence: Synthetic oligonucleotide
ucucagguucccuguauaa

SEQ ID NO: 3280247 - RNA, 19 nt, Artificial Sequence
  Description of Artificial Sequence: Synthetic oligonucleotide
ggaagucuuccugagggcg

SEQ ID NO: 3280248 - RNA, 19 nt, Artificial Sequence
  Description of Artificial Sequence: Synthetic oligonucleotide
acucggcuagcugacaguc

SEQ ID NO: 3280249 - RNA, 19 nt, Artificial Sequence
  Description of Artificial Sequence: Synthetic oligonucleotide
auugucuaaauccauaucc

SEQ ID NO: 3280250 - RNA, 19 nt, Artificial Sequence
  Description of Artificial Sequence: Synthetic oligonucleotide
ucuguaauauuacuaaugg

SEQ ID NO: 3280251 - RNA, 19 nt, Artificial Sequence
  Description of Artificial Sequence: Synthetic oligonucleotide
uguaauauuacuaauggaa

SEQ ID NO: 3280252 - RNA, 19 nt, Artificial Sequence
  Description of Artificial Sequence: Synthetic oligonucleotide
uuucugagcaggaagaucg

SEQ ID NO: 3280253 - RNA, 19 nt, Artificial Sequence
  Description of Artificial Sequence: Synthetic oligonucleotide
cuuuucauugucuaaaucc

SEQ ID NO: 3280254 - RNA, 19 nt, Artificial Sequence
  Description of Artificial Sequence: Synthetic oligonucleotide
gaaaguguaaaauuguggc

SEQ ID NO: 3280255 - RNA, 19 nt, Artificial Sequence
  Description of Artificial Sequence: Synthetic oligonucleotide
aauuguggcauuucugagc

SEQ ID NO: 3280256 - RNA, 19 nt, Artificial Sequence
  Description of Artificial Sequence: Synthetic oligonucleotide
aaaauuguggcauuucuga

SEQ ID NO: 3280257 - RNA, 19 nt, Artificial Sequence
  Description of Artificial Sequence: Synthetic oligonucleotide
aucauagucagacaaauca

SEQ ID NO: 3280258 - RNA, 19 nt, Artificial Sequence
  Description of Artificial Sequence: Synthetic oligonucleotide
aaggcuuccagccagauau

SEQ ID NO: 3280259 - RNA, 19 nt, Artificial Sequence
  Description of Artificial Sequence: Synthetic oligonucleotide
uaauauuacuaauggaaag

SEQ ID NO: 3280260 - RNA, 19 nt, Artificial Sequence
  Description of Artificial Sequence: Synthetic oligonucleotide
uguuauucugacuaaaggu

SEQ ID NO: 3280261 - RNA, 19 nt, Artificial Sequence
  Description of Artificial Sequence: Synthetic oligonucleotide
uauacugcugcauagacuc

SEQ ID NO: 3280262 - RNA, 19 nt, Artificial Sequence
  Description of Artificial Sequence: Synthetic oligonucleotide
aauggaaaguguaaaauug

SEQ ID NO: 3280263 - RNA, 19 nt, Artificial Sequence
  Description of Artificial Sequence: Synthetic oligonucleotide
uuuggauuucuuuucauug

SEQ ID NO: 3280264 - RNA, 19 nt, Artificial Sequence
  Description of Artificial Sequence: Synthetic oligonucleotide
uugaaaaucauagucagac

SEQ ID NO: 3280265 - RNA, 19 nt, Artificial Sequence
  Description of Artificial Sequence: Synthetic oligonucleotide
agaaguccagacuugaagg

SEQ ID NO: 3280266 - RNA, 19 nt, Artificial Sequence
  Description of Artificial Sequence: Synthetic oligonucleotide
ucuaaauccauauccaccu

SEQ ID NO: 3280267 - RNA, 19 nt, Artificial Sequence
  Description of Artificial Sequence: Synthetic oligonucleotide
aauauuacuaauggaaagu

SEQ ID NO: 3280268 - RNA, 19 nt, Artificial Sequence
  Description of Artificial Sequence: Synthetic oligonucleotide
uuuucauugucuaaaucca

SEQ ID NO: 3280269 - RNA, 19 nt, Artificial Sequence
  Description of Artificial Sequence: Synthetic oligonucleotide
uaucagugaauccaucagg

SEQ ID NO: 3280270 - RNA, 19 nt, Artificial Sequence
  Description of Artificial Sequence: Synthetic oligonucleotide
acuugaaaaucauagucag

SEQ ID NO: 3280271 - RNA, 19 nt, Artificial Sequence
  Description of Artificial Sequence: Synthetic oligonucleotide
uuauucugacuaaaggugc

SEQ ID NO: 3280272 - RNA, 19 nt, Artificial Sequence
  Description of Artificial Sequence: Synthetic oligonucleotide
auguuauucugacuaaagg

SEQ ID NO: 3280273 - RNA, 19 nt, Artificial Sequence
  Description of Artificial Sequence: Synthetic oligonucleotide
caggacuugaaaaucauag

SEQ ID NO: 3280274 - RNA, 19 nt, Artificial Sequence
  Description of Artificial Sequence: Synthetic oligonucleotide
aaaguguaaaauuguggca

SEQ ID NO: 3280275 - RNA, 19 nt, Artificial Sequence
  Description of Artificial Sequence: Synthetic oligonucleotide
uuuaucagugaauccauca

SEQ ID NO: 3280276 - RNA, 19 nt, Artificial Sequence
  Description of Artificial Sequence: Synthetic oligonucleotide
gaaaaucauagucagacaa

SEQ ID NO: 3280277 - RNA, 19 nt, Artificial Sequence
  Description of Artificial Sequence: Synthetic oligonucleotide
ucauccacuccuaagauuc

SEQ ID NO: 3280278 - RNA, 19 nt, Artificial Sequence
  Description of Artificial Sequence: Synthetic oligonucleotide
uuaucagugaauccaucag

SEQ ID NO: 3280279 - RNA, 19 nt, Artificial Sequence
  Description of Artificial Sequence: Synthetic oligonucleotide
uccauauccaccuugguuc

SEQ ID NO: 3280280 - RNA, 19 nt, Artificial Sequence
  Description of Artificial Sequence: Synthetic oligonucleotide
uuuucauagaucugauugc

SEQ ID NO: 3280281 - RNA, 19 nt, Artificial Sequence
  Description of Artificial Sequence: Synthetic oligonucleotide
ucagacaaaucacuguuug

SEQ ID NO: 3280282 - RNA, 19 nt, Artificial Sequence
  Description of Artificial Sequence: Synthetic oligonucleotide
uaaaauuguggcauuucug

SEQ ID NO: 3280283 - RNA, 19 nt, Artificial Sequence
  Description of Artificial Sequence: Synthetic oligonucleotide
acuaaaggugcucucacag

SEQ ID NO: 3280284 - RNA, 19 nt, Artificial Sequence
  Description of Artificial Sequence: Synthetic oligonucleotide
aaggugcucucacaguagc

SEQ ID NO: 3280285 - RNA, 19 nt, Artificial Sequence
  Description of Artificial Sequence: Synthetic oligonucleotide
ucuuuucucugucaaaugu

SEQ ID NO: 3280286 - RNA, 19 nt, Artificial Sequence
  Description of Artificial Sequence: Synthetic oligonucleotide
agugcuuaacuucaccuuc

SEQ ID NO: 3280287 - RNA, 19 nt, Artificial Sequence
  Description of Artificial Sequence: Synthetic oligonucleotide
aaauuguggcauuucugag

SEQ ID NO: 3280288 - RNA, 19 nt, Artificial Sequence
  Description of Artificial Sequence: Synthetic oligonucleotide
uugauagugcuuaacuuca

SEQ ID NO: 3280289 - RNA, 19 nt, Artificial Sequence
  Description of Artificial Sequence: Synthetic oligonucleotide
aggaagaguagccagaagu

SEQ ID NO: 3280290 - RNA, 19 nt, Artificial Sequence
  Description of Artificial Sequence: Synthetic oligonucleotide
cuaagauucuugauagugc

SEQ ID NO: 3280291 - RNA, 19 nt, Artificial Sequence
  Description of Artificial Sequence: Synthetic oligonucleotide
uccacaucaucccugagga

SEQ ID NO: 3280292 - RNA, 19 nt, Artificial Sequence
  Description of Artificial Sequence: Synthetic oligonucleotide
acauccauguuauucugac

SEQ ID NO: 3280293 - RNA, 19 nt, Artificial Sequence
  Description of Artificial Sequence: Synthetic oligonucleotide
cuugauagugcuuaacuuc

SEQ ID NO: 3280294 - RNA, 19 nt, Artificial Sequence
  Description of Artificial Sequence: Synthetic oligonucleotide
aaaucugugguacauccau

SEQ ID NO: 3280295 - RNA, 19 nt, Artificial Sequence
  Description of Artificial Sequence: Synthetic oligonucleotide
uaagauucuugauagugcu

SEQ ID NO: 3280296 - RNA, 19 nt, Artificial Sequence
  Description of Artificial Sequence: Synthetic oligonucleotide
uucuugauagugcuuaacu

SEQ ID NO: 3280297 - RNA, 19 nt, Artificial Sequence
  Description of Artificial Sequence: Synthetic oligonucleotide
uuuucucugucaaauguac

SEQ ID NO: 3280298 - RNA, 19 nt, Artificial Sequence
  Description of Artificial Sequence: Synthetic oligonucleotide
guuauucugacuaaaggug

SEQ ID NO: 3280299 - RNA, 19 nt, Artificial Sequence
  Description of Artificial Sequence: Synthetic oligonucleotide
uugguucucacaaaguagu

SEQ ID NO: 3280300 - RNA, 19 nt, Artificial Sequence
  Description of Artificial Sequence: Synthetic oligonucleotide
cuccuaagauucuugauag

SEQ ID NO: 3280301 - RNA, 19 nt, Artificial Sequence
  Description of Artificial Sequence: Synthetic oligonucleotide
agacuugaaggcuuccagc

SEQ ID NO: 3280302 - RNA, 19 nt, Artificial Sequence
  Description of Artificial Sequence: Synthetic oligonucleotide
uaaauccauauccaccuug

SEQ ID NO: 3280303 - RNA, 19 nt, Artificial Sequence
  Description of Artificial Sequence: Synthetic oligonucleotide
uggaaaguguaaaauugug

SEQ ID NO: 3280304 - RNA, 19 nt, Artificial Sequence
  Description of Artificial Sequence: Synthetic oligonucleotide
cuuaacuucaccuucagcu

SEQ ID NO: 3280305 - RNA, 19 nt, Artificial Sequence
  Description of Artificial Sequence: Synthetic oligonucleotide
aaauccauauccaccuugg

SEQ ID NO: 3280306 - RNA, 19 nt, Artificial Sequence
  Description of Artificial Sequence: Synthetic oligonucleotide
aggaagaucguuuaucagu

SEQ ID NO: 3280307 - RNA, 19 nt, Artificial Sequence
  Description of Artificial Sequence: Synthetic oligonucleotide
aucguuuaucagugaaucc

SEQ ID NO: 3280308 - RNA, 19 nt, Artificial Sequence
  Description of Artificial Sequence: Synthetic oligonucleotide
aaaucacuguuugaaauca

SEQ ID NO: 3280309 - RNA, 19 nt, Artificial Sequence
  Description of Artificial Sequence: Synthetic oligonucleotide
ugugguacauccauguuau

SEQ ID NO: 3280310 - RNA, 19 nt, Artificial Sequence
  Description of Artificial Sequence: Synthetic oligonucleotide
cucuguaauauuacuaaug

SEQ ID NO: 3280311 - RNA, 19 nt, Artificial Sequence
  Description of Artificial Sequence: Synthetic oligonucleotide
gacuugaaggcuuccagcc

SEQ ID NO: 3280312 - RNA, 19 nt, Artificial Sequence
  Description of Artificial Sequence: Synthetic oligonucleotide
aaguguaaaauuguggcau

SEQ ID NO: 3280313 - RNA, 19 nt, Artificial Sequence
  Description of Artificial Sequence: Synthetic oligonucleotide
uugucuaaauccauaucca

SEQ ID NO: 3280314 - RNA, 19 nt, Artificial Sequence
  Description of Artificial Sequence: Synthetic oligonucleotide
uauuacuaauggaaagugu

SEQ ID NO: 3280315 - RNA, 19 nt, Artificial Sequence
  Description of Artificial Sequence: Synthetic oligonucleotide
uguggcauuucugagcagg

SEQ ID NO: 3280316 - RNA, 19 nt, Artificial Sequence
  Description of Artificial Sequence: Synthetic oligonucleotide
uucucugucaaauguacgu

SEQ ID NO: 3280317 - RNA, 19 nt, Artificial Sequence
  Description of Artificial Sequence: Synthetic oligonucleotide
uuucucugucaaauguacg

SEQ ID NO: 3280318 - RNA, 19 nt, Artificial Sequence
  Description of Artificial Sequence: Synthetic oligonucleotide
auuguggcauuucugagca

SEQ ID NO: 3280319 - RNA, 19 nt, Artificial Sequence
  Description of Artificial Sequence: Synthetic oligonucleotide
ucauagucagacaaaucac

SEQ ID NO: 3280320 - RNA, 19 nt, Artificial Sequence
  Description of Artificial Sequence: Synthetic oligonucleotide
ucguuuaucagugaaucca

SEQ ID NO: 3280321 - RNA, 19 nt, Artificial Sequence
  Description of Artificial Sequence: Synthetic oligonucleotide
cuugguucucacaaaguag

SEQ ID NO: 3280322 - RNA, 19 nt, Artificial Sequence
  Description of Artificial Sequence: Synthetic oligonucleotide
gauauacugcugcauagac

SEQ ID NO: 3280323 - RNA, 19 nt, Artificial Sequence
  Description of Artificial Sequence: Synthetic oligonucleotide
auagugcuuaacuucaccu

SEQ ID NO: 3280324 - RNA, 19 nt, Artificial Sequence
  Description of Artificial Sequence: Synthetic oligonucleotide
cauguuauucugacuaaag

SEQ ID NO: 3280325 - RNA, 19 nt, Artificial Sequence
  Description of Artificial Sequence: Synthetic oligonucleotide
ugaggaugcccacugcagg

SEQ ID NO: 3280326 - RNA, 19 nt, Artificial Sequence
  Description of Artificial Sequence: Synthetic oligonucleotide
acaaaucacuguuugaaau

SEQ ID NO: 3280327 - RNA, 19 nt, Artificial Sequence
  Description of Artificial Sequence: Synthetic oligonucleotide
agcuucuccacaucauccc

SEQ ID NO: 3280328 - RNA, 19 nt, Artificial Sequence
  Description of Artificial Sequence: Synthetic oligonucleotide
aaauguacgugguuuggau

SEQ ID NO: 3280329 - RNA, 19 nt, Artificial Sequence
  Description of Artificial Sequence: Synthetic oligonucleotide
uaauggaaaguguaaaauu

SEQ ID NO: 3280330 - RNA, 19 nt, Artificial Sequence
  Description of Artificial Sequence: Synthetic oligonucleotide
aagaucguuuaucagugaa

SEQ ID NO: 3280331 - RNA, 19 nt, Artificial Sequence
  Description of Artificial Sequence: Synthetic oligonucleotide
uaaaggugcucucacagua

SEQ ID NO: 3280332 - RNA, 19 nt, Artificial Sequence
  Description of Artificial Sequence: Synthetic oligonucleotide
auauuacuaauggaaagug

SEQ ID NO: 3280333 - RNA, 19 nt, Artificial Sequence
  Description of Artificial Sequence: Synthetic oligonucleotide
uccaccuugguucucacaa

SEQ ID NO: 3280334 - RNA, 19 nt, Artificial Sequence
  Description of Artificial Sequence: Synthetic oligonucleotide
gauagugcuuaacuucacc

SEQ ID NO: 3280335 - RNA, 19 nt, Artificial Sequence
  Description of Artificial Sequence: Synthetic oligonucleotide
uuacuaauggaaaguguaa

SEQ ID NO: 3280336 - RNA, 19 nt, Artificial Sequence
  Description of Artificial Sequence: Synthetic oligonucleotide
auccauguuauucugacua

SEQ ID NO: 3280337 - RNA, 19 nt, Artificial Sequence
  Description of Artificial Sequence: Synthetic oligonucleotide
cucugucaaauguacgugg

SEQ ID NO: 3280338 - RNA, 19 nt, Artificial Sequence
  Description of Artificial Sequence: Synthetic oligonucleotide
aguagccagaaguccagac

SEQ ID NO: 3280339 - RNA, 19 nt, Artificial Sequence
  Description of Artificial Sequence: Synthetic oligonucleotide
uuucuuuucauugucuaaa

SEQ ID NO: 3280340 - RNA, 19 nt, Artificial Sequence
  Description of Artificial Sequence: Synthetic oligonucleotide
gaaguccagacuugaaggc

SEQ ID NO: 3280341 - RNA, 19 nt, Artificial Sequence
  Description of Artificial Sequence: Synthetic oligonucleotide
ucacuguuugaaaucaaaa

SEQ ID NO: 3280342 - RNA, 19 nt, Artificial Sequence
  Description of Artificial Sequence: Synthetic oligonucleotide
ucauagaucugauugcuuu

SEQ ID NO: 3280343 - RNA, 19 nt, Artificial Sequence
  Description of Artificial Sequence: Synthetic oligonucleotide
ucauugucuaaauccauau

SEQ ID NO: 3280344 - RNA, 19 nt, Artificial Sequence
  Description of Artificial Sequence: Synthetic oligonucleotide
aauccaucaggacuugaaa

SEQ ID NO: 3280345 - RNA, 19 nt, Artificial Sequence
  Description of Artificial Sequence: Synthetic oligonucleotide
gacuugaaaaucauaguca

SEQ ID NO: 3280346 - RNA, 19 nt, Artificial Sequence
  Description of Artificial Sequence: Synthetic oligonucleotide
ucaaauguacgugguuugg

SEQ ID NO: 3280347 - RNA, 19 nt, Artificial Sequence
  Description of Artificial Sequence: Synthetic oligonucleotide
acuaauggaaaguguaaaa

SEQ ID NO: 3280348 - RNA, 19 nt, Artificial Sequence
  Description of Artificial Sequence: Synthetic oligonucleotide
ugucuaaauccauauccac

SEQ ID NO: 3280349 - RNA, 19 nt, Artificial Sequence
  Description of Artificial Sequence: Synthetic oligonucleotide
aauaggucaauuuagaugc

SEQ ID NO: 3280350 - RNA, 19 nt, Artificial Sequence
  Description of Artificial Sequence: Synthetic oligonucleotide
aauccuaucacaaaaguac

SEQ ID NO: 3280351 - RNA, 19 nt, Artificial Sequence
  Description of Artificial Sequence: Synthetic oligonucleotide
uucauagucacauaaagag

SEQ ID NO: 3280352 - RNA, 19 nt, Artificial Sequence
  Description of Artificial Sequence: Synthetic oligonucleotide
ucaauuuagaugcaaaacc

SEQ ID NO: 3280353 - RNA, 19 nt, Artificial Sequence
  Description of Artificial Sequence: Synthetic oligonucleotide
auaaauaaggaacugagcu

SEQ ID NO: 3280354 - RNA, 19 nt, Artificial Sequence
  Description of Artificial Sequence: Synthetic oligonucleotide
aauaauauaucuuaauaua

SEQ ID NO: 3280355 - RNA, 19 nt, Artificial Sequence
  Description of Artificial Sequence: Synthetic oligonucleotide
aaauaggucaauuuagaug

SEQ ID NO: 3280356 - RNA, 19 nt, Artificial Sequence
  Description of Artificial Sequence: Synthetic oligonucleotide
aaauaaggaacugagcugg

SEQ ID NO: 3280357 - RNA, 19 nt, Artificial Sequence
  Description of Artificial Sequence: Synthetic oligonucleotide
uaauuaaaauaauauaucu

SEQ ID NO: 3280358 - RNA, 19 nt, Artificial Sequence
  Description of Artificial Sequence: Synthetic oligonucleotide
ugauaaauaaggaacugag

SEQ ID NO: 3280359 - RNA, 19 nt, Artificial Sequence
  Description of Artificial Sequence: Synthetic oligonucleotide
uauaucuuaauauagcagu

SEQ ID NO: 3280360 - RNA, 19 nt, Artificial Sequence
  Description of Artificial Sequence: Synthetic oligonucleotide
aauacuagucuauaggaca

SEQ ID NO: 3280361 - RNA, 19 nt, Artificial Sequence
  Description of Artificial Sequence: Synthetic oligonucleotide
acagaagucacuuugagcu

SEQ ID NO: 3280362 - RNA, 19 nt, Artificial Sequence
  Description of Artificial Sequence: Synthetic oligonucleotide
aaaaguacaacagaaguca

SEQ ID NO: 3280363 - RNA, 19 nt, Artificial Sequence
  Description of Artificial Sequence: Synthetic oligonucleotide
aauaaauaggucaauuuag

SEQ ID NO: 3280364 - RNA, 19 nt, Artificial Sequence
  Description of Artificial Sequence: Synthetic oligonucleotide
aacagauguccguaaaccc

SEQ ID NO: 3280365 - RNA, 19 nt, Artificial Sequence
  Description of Artificial Sequence: Synthetic oligonucleotide
aaucagagaauacaguaug

SEQ ID NO: 3280366 - RNA, 19 nt, Artificial Sequence
  Description of Artificial Sequence: Synthetic oligonucleotide
aacagaagucacuuugagc

SEQ ID NO: 3280367 - RNA, 19 nt, Artificial Sequence
  Description of Artificial Sequence: Synthetic oligonucleotide
aaaaccugcaaauauaauu

SEQ ID NO: 3280368 - RNA, 19 nt, Artificial Sequence
  Description of Artificial Sequence: Synthetic oligonucleotide
aaaaucagagaauacagua

SEQ ID NO: 3280369 - RNA, 19 nt, Artificial Sequence
  Description of Artificial Sequence: Synthetic oligonucleotide
auagcagugauaaauaagg

SEQ ID NO: 3280370 - RNA, 19 nt, Artificial Sequence
  Description of Artificial Sequence: Synthetic oligonucleotide
ucacauaaagagcacauug

SEQ ID NO: 3280371 - RNA, 19 nt, Artificial Sequence
  Description of Artificial Sequence: Synthetic oligonucleotide
aagagcacauugcuaaucg

SEQ ID NO: 3280372 - RNA, 19 nt, Artificial Sequence
  Description of Artificial Sequence: Synthetic oligonucleotide
auaauuaaaauaauauauc

SEQ ID NO: 3280373 - RNA, 19 nt, Artificial Sequence
  Description of Artificial Sequence: Synthetic oligonucleotide
acuaacugaacagaugucc

SEQ ID NO: 3280374 - RNA, 19 nt, Artificial Sequence
  Description of Artificial Sequence: Synthetic oligonucleotide
auuaaaagauacaauucgc

SEQ ID NO: 3280375 - RNA, 19 nt, Artificial Sequence
  Description of Artificial Sequence: Synthetic oligonucleotide
uuaaaagauacaauucgcu

SEQ ID NO: 3280376 - RNA, 19 nt, Artificial Sequence
  Description of Artificial Sequence: Synthetic oligonucleotide
auugguuucaauccuauca

SEQ ID NO: 3280377 - RNA, 19 nt, Artificial Sequence
  Description of Artificial Sequence: Synthetic oligonucleotide
acaaaaguacaacagaagu

SEQ ID NO: 3280378 - RNA, 19 nt, Artificial Sequence
  Description of Artificial Sequence: Synthetic oligonucleotide
uguacauuaaaagauacaa

SEQ ID NO: 3280379 - RNA, 19 nt, Artificial Sequence
  Description of Artificial Sequence: Synthetic oligonucleotide
acaguauguacauuaaaag

SEQ ID NO: 3280380 - RNA, 19 nt, Artificial Sequence
  Description of Artificial Sequence: Synthetic oligonucleotide
aucuuuaaguuacagaugu

SEQ ID NO: 3280381 - RNA, 19 nt, Artificial Sequence
  Description of Artificial Sequence: Synthetic oligonucleotide
uaaaagauacaauucgcug

SEQ ID NO: 3280382 - RNA, 19 nt, Artificial Sequence
  Description of Artificial Sequence: Synthetic oligonucleotide
uauagcagugauaaauaag

SEQ ID NO: 3280383 - RNA, 19 nt, Artificial Sequence
  Description of Artificial Sequence: Synthetic oligonucleotide
aauucgcugaauugguuuc

SEQ ID NO: 3280384 - RNA, 19 nt, Artificial Sequence
  Description of Artificial Sequence: Synthetic oligonucleotide
agaaacacuaacugaacag

SEQ ID NO: 3280385 - RNA, 19 nt, Artificial Sequence
  Description of Artificial Sequence: Synthetic oligonucleotide
aucgcauauucacagacac

SEQ ID NO: 3280386 - RNA, 19 nt, Artificial Sequence
  Description of Artificial Sequence: Synthetic oligonucleotide
auaaagagcacauugcuaa

SEQ ID NO: 3280387 - RNA, 19 nt, Artificial Sequence
  Description of Artificial Sequence: Synthetic oligonucleotide
gaaauacuagucuauagga

SEQ ID NO: 3280388 - RNA, 19 nt, Artificial Sequence
  Description of Artificial Sequence: Synthetic oligonucleotide
uguccguaaacccacagug

SEQ ID NO: 3280389 - RNA, 19 nt, Artificial Sequence
  Description of Artificial Sequence: Synthetic oligonucleotide
aaagaaagacuccacuugu

SEQ ID NO: 3280390 - RNA, 19 nt, Artificial Sequence
  Description of Artificial Sequence: Synthetic oligonucleotide
gauacaauucgcugaauug

SEQ ID NO: 3280391 - RNA, 19 nt, Artificial Sequence
  Description of Artificial Sequence: Synthetic oligonucleotide
uacaguauguacauuaaaa

SEQ ID NO: 3280392 - RNA, 19 nt, Artificial Sequence
  Description of Artificial Sequence: Synthetic oligonucleotide
auuuagaugcaaaaccugc

SEQ ID NO: 3280393 - RNA, 19 nt, Artificial Sequence
  Description of Artificial Sequence: Synthetic oligonucleotide
agacacaaaagaaagacuc

SEQ ID NO: 3280394 - RNA, 19 nt, Artificial Sequence
  Description of Artificial Sequence: Synthetic oligonucleotide
aagauugccuacuaagcug

SEQ ID NO: 3280395 - RNA, 19 nt, Artificial Sequence
  Description of Artificial Sequence: Synthetic oligonucleotide
aaauacuagucuauaggac

SEQ ID NO: 3280396 - RNA, 19 nt, Artificial Sequence
  Description of Artificial Sequence: Synthetic oligonucleotide
uaauauagcagugauaaau

SEQ ID NO: 3280397 - RNA, 19 nt, Artificial Sequence
  Description of Artificial Sequence: Synthetic oligonucleotide
gucaaggucacuuccaagg

SEQ ID NO: 3280398 - RNA, 19 nt, Artificial Sequence
  Description of Artificial Sequence: Synthetic oligonucleotide
auaggacacacaaagaaac

SEQ ID NO: 3280399 - RNA, 19 nt, Artificial Sequence
  Description of Artificial Sequence: Synthetic oligonucleotide
uccaagauugccuacuaag

SEQ ID NO: 3280400 - RNA, 19 nt, Artificial Sequence
  Description of Artificial Sequence: Synthetic oligonucleotide
uagucuauaggacacacaa

SEQ ID NO: 3280401 - RNA, 19 nt, Artificial Sequence
  Description of Artificial Sequence: Synthetic oligonucleotide
uaaauaaggaacugagcug

SEQ ID NO: 3280402 - RNA, 19 nt, Artificial Sequence
  Description of Artificial Sequence: Synthetic oligonucleotide
aagauauuugcaguuaucu

SEQ ID NO: 3280403 - RNA, 19 nt, Artificial Sequence
  Description of Artificial Sequence: Synthetic oligonucleotide
ugaaggaaagauauuugca

SEQ ID NO: 3280404 - RNA, 19 nt, Artificial Sequence
  Description of Artificial Sequence: Synthetic oligonucleotide
aaagauacaauucgcugaa

SEQ ID NO: 3280405 - RNA, 19 nt, Artificial Sequence
  Description of Artificial Sequence: Synthetic oligonucleotide
acacuaacugaacagaugu

SEQ ID NO: 3280406 - RNA, 19 nt, Artificial Sequence
  Description of Artificial Sequence: Synthetic oligonucleotide
ucuugggccacguucauag

SEQ ID NO: 3280407 - RNA, 19 nt, Artificial Sequence
  Description of Artificial Sequence: Synthetic oligonucleotide
uuacagaugucucuugggc

SEQ ID NO: 3280408 - RNA, 19 nt, Artificial Sequence
  Description of Artificial Sequence: Synthetic oligonucleotide
aaauauaauuaaaauaaua

SEQ ID NO: 3280409 - RNA, 19 nt, Artificial Sequence
  Description of Artificial Sequence: Synthetic oligonucleotide
uucaauccuaucacaaaag

SEQ ID NO: 3280410 - RNA, 19 nt, Artificial Sequence
  Description of Artificial Sequence: Synthetic oligonucleotide
auacaauucgcugaauugg

SEQ ID NO: 3280411 - RNA, 19 nt, Artificial Sequence
  Description of Artificial Sequence: Synthetic oligonucleotide
aaagaaacacuaacugaac

SEQ ID NO: 3280412 - RNA, 19 nt, Artificial Sequence
  Description of Artificial Sequence: Synthetic oligonucleotide
gagaaauacuagucuauag

SEQ ID NO: 3280413 - RNA, 19 nt, Artificial Sequence
  Description of Artificial Sequence: Synthetic oligonucleotide
acauuaaaagauacaauuc

SEQ ID NO: 3280414 - RNA, 19 nt, Artificial Sequence
  Description of Artificial Sequence: Synthetic oligonucleotide
aagaaugaauaaauagguc

SEQ ID NO: 3280415 - RNA, 19 nt, Artificial Sequence
  Description of Artificial Sequence: Synthetic oligonucleotide
uuuagaugcaaaaccugca

SEQ ID NO: 3280416 - RNA, 19 nt, Artificial Sequence
  Description of Artificial Sequence: Synthetic oligonucleotide
uuaaguuacagaugucucu

SEQ ID NO: 3280417 - RNA, 19 nt, Artificial Sequence
  Description of Artificial Sequence: Synthetic oligonucleotide
acaaagaaacacuaacuga

SEQ ID NO: 3280418 - RNA, 19 nt, Artificial Sequence
  Description of Artificial Sequence: Synthetic oligonucleotide
gcaaauauaauuaaaauaa

SEQ ID NO: 3280419 - RNA, 19 nt, Artificial Sequence
  Description of Artificial Sequence: Synthetic oligonucleotide
cuaacugaacagauguccg

SEQ ID NO: 3280420 - RNA, 19 nt, Artificial Sequence
  Description of Artificial Sequence: Synthetic oligonucleotide
uuuaaguuacagaugucuc

SEQ ID NO: 3280421 - RNA, 19 nt, Artificial Sequence
  Description of Artificial Sequence: Synthetic oligonucleotide
uaaucgcauauucacagac

SEQ ID NO: 3280422 - RNA, 19 nt, Artificial Sequence
  Description of Artificial Sequence: Synthetic oligonucleotide
aguuacagaugucucuugg

SEQ ID NO: 3280423 - RNA, 19 nt, Artificial Sequence
  Description of Artificial Sequence: Synthetic oligonucleotide
gugaaggaaagauauuugc

SEQ ID NO: 3280424 - RNA, 19 nt, Artificial Sequence
  Description of Artificial Sequence: Synthetic oligonucleotide
aaauuccaagauugccuac

SEQ ID NO: 3280425 - RNA, 19 nt, Artificial Sequence
  Description of Artificial Sequence: Synthetic oligonucleotide
cacauaaagagcacauugc

SEQ ID NO: 3280426 - RNA, 19 nt, Artificial Sequence
  Description of Artificial Sequence: Synthetic oligonucleotide
gaauacaguauguacauua

SEQ ID NO: 3280427 - RNA, 19 nt, Artificial Sequence
  Description of Artificial Sequence: Synthetic oligonucleotide
gucacuuugagcucaauca

SEQ ID NO: 3280428 - RNA, 19 nt, Artificial Sequence
  Description of Artificial Sequence: Synthetic oligonucleotide
cacacaaagaaacacuaac

SEQ ID NO: 3280429 - RNA, 19 nt, Artificial Sequence
  Description of Artificial Sequence: Synthetic oligonucleotide
gaaagacuccacuugucag

SEQ ID NO: 3280430 - RNA, 19 nt, Artificial Sequence
  Description of Artificial Sequence: Synthetic oligonucleotide
uaucuuuaaguuacagaug

SEQ ID NO: 3280431 - RNA, 19 nt, Artificial Sequence
  Description of Artificial Sequence: Synthetic oligonucleotide
ucaauccuaucacaaaagu

SEQ ID NO: 3280432 - RNA, 19 nt, Artificial Sequence
  Description of Artificial Sequence: Synthetic oligonucleotide
uugguuucaauccuaucac

SEQ ID NO: 3280433 - RNA, 19 nt, Artificial Sequence
  Description of Artificial Sequence: Synthetic oligonucleotide
aauugguuucaauccuauc

SEQ ID NO: 3280434 - RNA, 19 nt, Artificial Sequence
  Description of Artificial Sequence: Synthetic oligonucleotide
acaaaagaaagacuccacu

SEQ ID NO: 3280435 - RNA, 19 nt, Artificial Sequence
  Description of Artificial Sequence: Synthetic oligonucleotide
uaaggaacugagcuggcug

SEQ ID NO: 3280436 - RNA, 19 nt, Artificial Sequence
  Description of Artificial Sequence: Synthetic oligonucleotide
caaagaaacacuaacugaa

SEQ ID NO: 3280437 - RNA, 19 nt, Artificial Sequence
  Description of Artificial Sequence: Synthetic oligonucleotide
uugcuaaucgcauauucac

SEQ ID NO: 3280438 - RNA, 19 nt, Artificial Sequence
  Description of Artificial Sequence: Synthetic oligonucleotide
aauuuagaugcaaaaccug

SEQ ID NO: 3280439 - RNA, 19 nt, Artificial Sequence
  Description of Artificial Sequence: Synthetic oligonucleotide
aaaccugcaaauauaauua

SEQ ID NO: 3280440 - RNA, 19 nt, Artificial Sequence
  Description of Artificial Sequence: Synthetic oligonucleotide
aaagagcacauugcuaauc

SEQ ID NO: 3280441 - RNA, 19 nt, Artificial Sequence
  Description of Artificial Sequence: Synthetic oligonucleotide
acgagucaaggucacuucc

SEQ ID NO: 3280442 - RNA, 19 nt, Artificial Sequence
  Description of Artificial Sequence: Synthetic oligonucleotide
gaacagauguccguaaacc

SEQ ID NO: 3280443 - RNA, 19 nt, Artificial Sequence
  Description of Artificial Sequence: Synthetic oligonucleotide
acuuccaaggccuuugcug

SEQ ID NO: 3280444 - RNA, 19 nt, Artificial Sequence
  Description of Artificial Sequence: Synthetic oligonucleotide
ucuauaggacacacaaaga

SEQ ID NO: 3280445 - RNA, 19 nt, Artificial Sequence
  Description of Artificial Sequence: Synthetic oligonucleotide
cacaaaaguacaacagaag

SEQ ID NO: 3280446 - RNA, 19 nt, Artificial Sequence
  Description of Artificial Sequence: Synthetic oligonucleotide
cagagaauacaguauguac

SEQ ID NO: 3280447 - RNA, 19 nt, Artificial Sequence
  Description of Artificial Sequence: Synthetic oligonucleotide
uuagaugcaaaaccugcaa

SEQ ID NO: 3280448 - RNA, 19 nt, Artificial Sequence
  Description of Artificial Sequence: Synthetic oligonucleotide
uaaauaggucaauuuagau

SEQ ID NO: 3280449 - RNA, 19 nt, Artificial Sequence
  Description of Artificial Sequence: Synthetic oligonucleotide
ucuucaucaauguagacug

SEQ ID NO: 3280450 - RNA, 19 nt, Artificial Sequence
  Description of Artificial Sequence: Synthetic oligonucleotide
aucaauguagacugcaggc

SEQ ID NO: 3280451 - RNA, 19 nt, Artificial Sequence
  Description of Artificial Sequence: Synthetic oligonucleotide
uuguacagcuucaucaugg

SEQ ID NO: 3280452 - RNA, 19 nt, Artificial Sequence
  Description of Artificial Sequence: Synthetic oligonucleotide
uacagcuucaucauggugu

SEQ ID NO: 3280453 - RNA, 19 nt, Artificial Sequence
  Description of Artificial Sequence: Synthetic oligonucleotide
uccuuguacagcuucauca

SEQ ID NO: 3280454 - RNA, 19 nt, Artificial Sequence
  Description of Artificial Sequence: Synthetic oligonucleotide
ugaaguacugcaccuuccg

SEQ ID NO: 3280455 - RNA, 19 nt, Artificial Sequence
  Description of Artificial Sequence: Synthetic oligonucleotide
uugcaguggacauacacag

SEQ ID NO: 3280456 - RNA, 19 nt, Artificial Sequence
  Description of Artificial Sequence: Synthetic oligonucleotide
uguccauucuccagaaggg

SEQ ID NO: 3280457 - RNA, 19 nt, Artificial Sequence
  Description of Artificial Sequence: Synthetic oligonucleotide
guguccauucuccagaagg

SEQ ID NO: 3280458 - RNA, 19 nt, Artificial Sequence
  Description of Artificial Sequence: Synthetic oligonucleotide
uuggccaugaugaaguacu

SEQ ID NO: 3280459 - RNA, 19 nt, Artificial Sequence
  Description of Artificial Sequence: Synthetic oligonucleotide
aauccuucuuccuuguaca

SEQ ID NO: 3280460 - RNA, 19 nt, Artificial Sequence
  Description of Artificial Sequence: Synthetic oligonucleotide
uccauucuccagaagggcg

SEQ ID NO: 3280461 - RNA, 19 nt, Artificial Sequence
  Description of Artificial Sequence: Synthetic oligonucleotide
uagacugcaggccucuugg

SEQ ID NO: 3280462 - RNA, 19 nt, Artificial Sequence
  Description of Artificial Sequence: Synthetic oligonucleotide
uccagauguaggcuaaucc

SEQ ID NO: 3280463 - RNA, 19 nt, Artificial Sequence
  Description of Artificial Sequence: Synthetic oligonucleotide
caugaugaaguacugcacc

SEQ ID NO: 3280464 - RNA, 19 nt, Artificial Sequence
  Description of Artificial Sequence: Synthetic oligonucleotide
uaauccuucuuccuuguac

SEQ ID NO: 3280465 - RNA, 19 nt, Artificial Sequence
  Description of Artificial Sequence: Synthetic oligonucleotide
acguaguggagccagccgc

SEQ ID NO: 3280466 - RNA, 19 nt, Artificial Sequence
  Description of Artificial Sequence: Synthetic oligonucleotide
uucuucaucaauguagacu

SEQ ID NO: 3280467 - RNA, 19 nt, Artificial Sequence
  Description of Artificial Sequence: Synthetic oligonucleotide
aaggcuucuucaucaaugu

SEQ ID NO: 3280468 - RNA, 19 nt, Artificial Sequence
  Description of Artificial Sequence: Synthetic oligonucleotide
ucaucaauguagacugcag

SEQ ID NO: 3280469 - RNA, 19 nt, Artificial Sequence
  Description of Artificial Sequence: Synthetic oligonucleotide
uucaucauggugucuggag

SEQ ID NO: 3280470 - RNA, 19 nt, Artificial Sequence
  Description of Artificial Sequence: Synthetic oligonucleotide
caucaauguagacugcagg

SEQ ID NO: 3280471 - RNA, 19 nt, Artificial Sequence
  Description of Artificial Sequence: Synthetic oligonucleotide
aguggagccagccgcacac

SEQ ID NO: 3280472 - RNA, 19 nt, Artificial Sequence
  Description of Artificial Sequence: Synthetic oligonucleotide
aaguacugcaccuuccgaa

SEQ ID NO: 3280473 - RNA, 19 nt, Artificial Sequence
  Description of Artificial Sequence: Synthetic oligonucleotide
caaggcuucuucaucaaug

SEQ ID NO: 3280474 - RNA, 19 nt, Artificial Sequence
  Description of Artificial Sequence: Synthetic oligonucleotide
aaucacguaguggagccag

SEQ ID NO: 3280475 - RNA, 19 nt, Artificial Sequence
  Description of Artificial Sequence: Synthetic oligonucleotide
cacaguguguccauucucc

SEQ ID NO: 3280476 - RNA, 19 nt, Artificial Sequence
  Description of Artificial Sequence: Synthetic oligonucleotide
aguacugcaccuuccgaag

SEQ ID NO: 3280477 - RNA, 19 nt, Artificial Sequence
  Description of Artificial Sequence: Synthetic oligonucleotide
aguggacauacacagugug

SEQ ID NO: 3280478 - RNA, 19 nt, Artificial Sequence
  Description of Artificial Sequence: Synthetic oligonucleotide
auacacaguguguccauuc

SEQ ID NO: 3280479 - RNA, 19 nt, Artificial Sequence
  Description of Artificial Sequence: Synthetic oligonucleotide
ucaauguagacugcaggcc

SEQ ID NO: 3280480 - RNA, 19 nt, Artificial Sequence
  Description of Artificial Sequence: Synthetic oligonucleotide
uguaggcuaauccuucuuc

SEQ ID NO: 3280481 - RNA, 19 nt, Artificial Sequence
  Description of Artificial Sequence: Synthetic oligonucleotide
ucaucauggugucuggagu

SEQ ID NO: 3280482 - RNA, 19 nt, Artificial Sequence
  Description of Artificial Sequence: Synthetic oligonucleotide
ucuggugugggcauccaga

SEQ ID NO: 3280483 - RNA, 19 nt, Artificial Sequence
  Description of Artificial Sequence: Synthetic oligonucleotide
ugggcauccagauguaggc

SEQ ID NO: 3280484 - RNA, 19 nt, Artificial Sequence
  Description of Artificial Sequence: Synthetic oligonucleotide
aguguguccauucuccaga

SEQ ID NO: 3280485 - RNA, 19 nt, Artificial Sequence
  Description of Artificial Sequence: Synthetic oligonucleotide
gaaggcuccagccaaucac

SEQ ID NO: 3280486 - RNA, 19 nt, Artificial Sequence
  Description of Artificial Sequence: Synthetic oligonucleotide
acagcuucaucaugguguc

SEQ ID NO: 3280487 - RNA, 19 nt, Artificial Sequence
  Description of Artificial Sequence: Synthetic oligonucleotide
agcguugcaguggacauac

SEQ ID NO: 3280488 - RNA, 19 nt, Artificial Sequence
  Description of Artificial Sequence: Synthetic oligonucleotide
gaugaaguacugcaccuuc

SEQ ID NO: 3280489 - RNA, 19 nt, Artificial Sequence
  Description of Artificial Sequence: Synthetic oligonucleotide
uggagucauggguucaggg

SEQ ID NO: 3280490 - RNA, 19 nt, Artificial Sequence
  Description of Artificial Sequence: Synthetic oligonucleotide
guaggcuaauccuucuucc

SEQ ID NO: 3280491 - RNA, 19 nt, Artificial Sequence
  Description of Artificial Sequence: Synthetic oligonucleotide
uucaucaauguagacugca

SEQ ID NO: 3280492 - RNA, 19 nt, Artificial Sequence
  Description of Artificial Sequence: Synthetic oligonucleotide
uucaggguagcgguuacag

SEQ ID NO: 3280493 - RNA, 19 nt, Artificial Sequence
  Description of Artificial Sequence: Synthetic oligonucleotide
aaggcuccagccaaucacg

SEQ ID NO: 3280494 - RNA, 19 nt, Artificial Sequence
  Description of Artificial Sequence: Synthetic oligonucleotide
augaugaaguacugcaccu

SEQ ID NO: 3280495 - RNA, 19 nt, Artificial Sequence
  Description of Artificial Sequence: Synthetic oligonucleotide
uggacauacacaguguguc

SEQ ID NO: 3280496 - RNA, 19 nt, Artificial Sequence
  Description of Artificial Sequence: Synthetic oligonucleotide
uguggcagcaucugcacuc

SEQ ID NO: 3280497 - RNA, 19 nt, Artificial Sequence
  Description of Artificial Sequence: Synthetic oligonucleotide
aauguagacugcaggccuc

SEQ ID NO: 3280498 - RNA, 19 nt, Artificial Sequence
  Description of Artificial Sequence: Synthetic oligonucleotide
ucuuccuuguacagcuuca

SEQ ID NO: 3280499 - RNA, 19 nt, Artificial Sequence
  Description of Artificial Sequence: Synthetic oligonucleotide
ggcuucuucaucaauguag

SEQ ID NO: 3280500 - RNA, 19 nt, Artificial Sequence
  Description of Artificial Sequence: Synthetic oligonucleotide
gagccagccgcacacugcg

SEQ ID NO: 3280501 - RNA, 19 nt, Artificial Sequence
  Description of Artificial Sequence: Synthetic oligonucleotide
cagccaaucacguagugga

SEQ ID NO: 3280502 - RNA, 19 nt, Artificial Sequence
  Description of Artificial Sequence: Synthetic oligonucleotide
uacugcaccuuccgaaggc

SEQ ID NO: 3280503 - RNA, 19 nt, Artificial Sequence
  Description of Artificial Sequence: Synthetic oligonucleotide
ugugccugggccaaggcuu

SEQ ID NO: 3280504 - RNA, 19 nt, Artificial Sequence
  Description of Artificial Sequence: Synthetic oligonucleotide
uacacaguguguccauucu

SEQ ID NO: 3280505 - RNA, 19 nt, Artificial Sequence
  Description of Artificial Sequence: Synthetic oligonucleotide
gcaguggacauacacagug

SEQ ID NO: 3280506 - RNA, 19 nt, Artificial Sequence
  Description of Artificial Sequence: Synthetic oligonucleotide
ugcaccuuccgaaggcucc

SEQ ID NO: 3280507 - RNA, 19 nt, Artificial Sequence
  Description of Artificial Sequence: Synthetic oligonucleotide
acacaguguguccauucuc

SEQ ID NO: 3280508 - RNA, 19 nt, Artificial Sequence
  Description of Artificial Sequence: Synthetic oligonucleotide
cagaagggcgugcaggagg

SEQ ID NO: 3280509 - RNA, 19 nt, Artificial Sequence
  Description of Artificial Sequence: Synthetic oligonucleotide
agauguaggcuaauccuuc

SEQ ID NO: 3280510 - RNA, 19 nt, Artificial Sequence
  Description of Artificial Sequence: Synthetic oligonucleotide
auggguucaggguagcggu

SEQ ID NO: 3280511 - RNA, 19 nt, Artificial Sequence
  Description of Artificial Sequence: Synthetic oligonucleotide
auggugucuggagucaugg

SEQ ID NO: 3280512 - RNA, 19 nt, Artificial Sequence
  Description of Artificial Sequence: Synthetic oligonucleotide
uucuuccuuguacagcuuc

SEQ ID NO: 3280513 - RNA, 19 nt, Artificial Sequence
  Description of Artificial Sequence: Synthetic oligonucleotide
augaaguacugcaccuucc

SEQ ID NO: 3280514 - RNA, 19 nt, Artificial Sequence
  Description of Artificial Sequence: Synthetic oligonucleotide
aagggcgugcaggaggcac

SEQ ID NO: 3280515 - RNA, 19 nt, Artificial Sequence
  Description of Artificial Sequence: Synthetic oligonucleotide
agaagggcgugcaggaggc

SEQ ID NO: 3280516 - RNA, 19 nt, Artificial Sequence
  Description of Artificial Sequence: Synthetic oligonucleotide
acugcaggccucuuggcca

SEQ ID NO: 3280517 - RNA, 19 nt, Artificial Sequence
  Description of Artificial Sequence: Synthetic oligonucleotide
agcuucaucauggugucug

SEQ ID NO: 3280518 - RNA, 19 nt, Artificial Sequence
  Description of Artificial Sequence: Synthetic oligonucleotide
cauggguucaggguagcgg

SEQ ID NO: 3280519 - RNA, 19 nt, Artificial Sequence
  Description of Artificial Sequence: Synthetic oligonucleotide
cacacugcggcuguggagc

SEQ ID NO: 3280520 - RNA, 19 nt, Artificial Sequence
  Description of Artificial Sequence: Synthetic oligonucleotide
gcuccagccaaucacguag

SEQ ID NO: 3280521 - RNA, 19 nt, Artificial Sequence
  Description of Artificial Sequence: Synthetic oligonucleotide
uccagaagggcgugcagga

SEQ ID NO: 3280522 - RNA, 19 nt, Artificial Sequence
  Description of Artificial Sequence: Synthetic oligonucleotide
gacugcaggccucuuggcc

SEQ ID NO: 3280523 - RNA, 19 nt, Artificial Sequence
  Description of Artificial Sequence: Synthetic oligonucleotide
uguggagcggccaccccag

SEQ ID NO: 3280524 - RNA, 19 nt, Artificial Sequence
  Description of Artificial Sequence: Synthetic oligonucleotide
caucauggugucuggaguc

SEQ ID NO: 3280525 - RNA, 19 nt, Artificial Sequence
  Description of Artificial Sequence: Synthetic oligonucleotide
uguacagcuucaucauggu

SEQ ID NO: 3280526 - RNA, 19 nt, Artificial Sequence
  Description of Artificial Sequence: Synthetic oligonucleotide
uaggcuaauccuucuuccu

SEQ ID NO: 3280527 - RNA, 19 nt, Artificial Sequence
  Description of Artificial Sequence: Synthetic oligonucleotide
ucagugcucaugucuggug

SEQ ID NO: 3280528 - RNA, 19 nt, Artificial Sequence
  Description of Artificial Sequence: Synthetic oligonucleotide
ucuuccugugccugggcca

SEQ ID NO: 3280529 - RNA, 19 nt, Artificial Sequence
  Description of Artificial Sequence: Synthetic oligonucleotide
uggagcggccaccccagcg

SEQ ID NO: 3280530 - RNA, 19 nt, Artificial Sequence
  Description of Artificial Sequence: Synthetic oligonucleotide
gagucauggguucagggua

SEQ ID NO: 3280531 - RNA, 19 nt, Artificial Sequence
  Description of Artificial Sequence: Synthetic oligonucleotide
cuuguacagcuucaucaug

SEQ ID NO: 3280532 - RNA, 19 nt, Artificial Sequence
  Description of Artificial Sequence: Synthetic oligonucleotide
gacauacacagugugucca

SEQ ID NO: 3280533 - RNA, 19 nt, Artificial Sequence
  Description of Artificial Sequence: Synthetic oligonucleotide
agcaucugcacucggcccu

SEQ ID NO: 3280534 - RNA, 19 nt, Artificial Sequence
  Description of Artificial Sequence: Synthetic oligonucleotide
acugcggcuguggagcggc

SEQ ID NO: 3280535 - RNA, 19 nt, Artificial Sequence
  Description of Artificial Sequence: Synthetic oligonucleotide
guacugcaccuuccgaagg

SEQ ID NO: 3280536 - RNA, 19 nt, Artificial Sequence
  Description of Artificial Sequence: Synthetic oligonucleotide
agacugcaggccucuuggc

SEQ ID NO: 3280537 - RNA, 19 nt, Artificial Sequence
  Description of Artificial Sequence: Synthetic oligonucleotide
uuccgaaggcuccagccaa

SEQ ID NO: 3280538 - RNA, 19 nt, Artificial Sequence
  Description of Artificial Sequence: Synthetic oligonucleotide
guugcaguggacauacaca

SEQ ID NO: 3280539 - RNA, 19 nt, Artificial Sequence
  Description of Artificial Sequence: Synthetic oligonucleotide
gugggcauccagauguagg

SEQ ID NO: 3280540 - RNA, 19 nt, Artificial Sequence
  Description of Artificial Sequence: Synthetic oligonucleotide
gccaugaugaaguacugca

SEQ ID NO: 3280541 - RNA, 19 nt, Artificial Sequence
  Description of Artificial Sequence: Synthetic oligonucleotide
auccuucuuccuuguacag

SEQ ID NO: 3280542 - RNA, 19 nt, Artificial Sequence
  Description of Artificial Sequence: Synthetic oligonucleotide
ucuggagucauggguucag

SEQ ID NO: 3280543 - RNA, 19 nt, Artificial Sequence
  Description of Artificial Sequence: Synthetic oligonucleotide
agugcucaugucuggugug

SEQ ID NO: 3280544 - RNA, 19 nt, Artificial Sequence
  Description of Artificial Sequence: Synthetic oligonucleotide
uguguccauucuccagaag

SEQ ID NO: 3280545 - RNA, 19 nt, Artificial Sequence
  Description of Artificial Sequence: Synthetic oligonucleotide
cugcacucggcccucagug

SEQ ID NO: 3280546 - RNA, 19 nt, Artificial Sequence
  Description of Artificial Sequence: Synthetic oligonucleotide
uccuucuuccuuguacagc

SEQ ID NO: 3280547 - RNA, 19 nt, Artificial Sequence
  Description of Artificial Sequence: Synthetic oligonucleotide
augucuggugugggcaucc

SEQ ID NO: 3280548 - RNA, 19 nt, Artificial Sequence
  Description of Artificial Sequence: Synthetic oligonucleotide
ccaaucacguaguggagcc

SEQ ID NO: 3280549 - RNA, 19 nt, Artificial Sequence
  Description of Artificial Sequence: Synthetic oligonucleotide
uuaaaaucuaaguagaugg

SEQ ID NO: 3280550 - RNA, 19 nt, Artificial Sequence
  Description of Artificial Sequence: Synthetic oligonucleotide
aaaccuuugggauagcucc

SEQ ID NO: 3280551 - RNA, 19 nt, Artificial Sequence
  Description of Artificial Sequence: Synthetic oligonucleotide
aguauaaguuacuaaaagc

SEQ ID NO: 3280552 - RNA, 19 nt, Artificial Sequence
  Description of Artificial Sequence: Synthetic oligonucleotide
uuucuuguuauucagaagc

SEQ ID NO: 3280553 - RNA, 19 nt, Artificial Sequence
  Description of Artificial Sequence: Synthetic oligonucleotide
ugugauauacuucauagcc

SEQ ID NO: 3280554 - RNA, 19 nt, Artificial Sequence
  Description of Artificial Sequence: Synthetic oligonucleotide
uguaaugaaaguuacuggg

SEQ ID NO: 3280555 - RNA, 19 nt, Artificial Sequence
  Description of Artificial Sequence: Synthetic oligonucleotide
aauucaguuaugugaaccc

SEQ ID NO: 3280556 - RNA, 19 nt, Artificial Sequence
  Description of Artificial Sequence: Synthetic oligonucleotide
uuugugauauacuucauag

SEQ ID NO: 3280557 - RNA, 19 nt, Artificial Sequence
  Description of Artificial Sequence: Synthetic oligonucleotide
aaaaucuaaguagauggcc

SEQ ID NO: 3280558 - RNA, 19 nt, Artificial Sequence
  Description of Artificial Sequence: Synthetic oligonucleotide
aguuacuaaaagcuguucc

SEQ ID NO: 3280559 - RNA, 19 nt, Artificial Sequence
  Description of Artificial Sequence: Synthetic oligonucleotide
aaauucaguuaugugaacc

SEQ ID NO: 3280560 - RNA, 19 nt, Artificial Sequence
  Description of Artificial Sequence: Synthetic oligonucleotide
aaugaaauuuguuuguggu

SEQ ID NO: 3280561 - RNA, 19 nt, Artificial Sequence
  Description of Artificial Sequence: Synthetic oligonucleotide
uguuaaguaguaauggaag

SEQ ID NO: 3280562 - RNA, 19 nt, Artificial Sequence
  Description of Artificial Sequence: Synthetic oligonucleotide
aaucuaaguagauggcccc

SEQ ID NO: 3280563 - RNA, 19 nt, Artificial Sequence
  Description of Artificial Sequence: Synthetic oligonucleotide
aaaucuaaguagauggccc

SEQ ID NO: 3280564 - RNA, 19 nt, Artificial Sequence
  Description of Artificial Sequence: Synthetic oligonucleotide
auagccuggaauuaacacc

SEQ ID NO: 3280565 - RNA, 19 nt, Artificial Sequence
  Description of Artificial Sequence: Synthetic oligonucleotide
uuuuguucaggauuguggg

SEQ ID NO: 3280566 - RNA, 19 nt, Artificial Sequence
  Description of Artificial Sequence: Synthetic oligonucleotide
guuucaaugauaaacagug

SEQ ID NO: 3280567 - RNA, 19 nt, Artificial Sequence
  Description of Artificial Sequence: Synthetic oligonucleotide
aacuguguaacauuucuug

SEQ ID NO: 3280568 - RNA, 19 nt, Artificial Sequence
  Description of Artificial Sequence: Synthetic oligonucleotide
aaucacugaaaccuuuggg

SEQ ID NO: 3280569 - RNA, 19 nt, Artificial Sequence
  Description of Artificial Sequence: Synthetic oligonucleotide
uauaaguuacuaaaagcug

SEQ ID NO: 3280570 - RNA, 19 nt, Artificial Sequence
  Description of Artificial Sequence: Synthetic oligonucleotide
uuuucuuaaauucucuaac

SEQ ID NO: 3280571 - RNA, 19 nt, Artificial Sequence
  Description of Artificial Sequence: Synthetic oligonucleotide
aagagcuacucucucuucc

SEQ ID NO: 3280572 - RNA, 19 nt, Artificial Sequence
  Description of Artificial Sequence: Synthetic oligonucleotide
accauuaagagcuacucuc

SEQ ID NO: 3280573 - RNA, 19 nt, Artificial Sequence
  Description of Artificial Sequence: Synthetic oligonucleotide
uucuuaaauucucuaacag

SEQ ID NO: 3280574 - RNA, 19 nt, Artificial Sequence
  Description of Artificial Sequence: Synthetic oligonucleotide
aacauuucuuguuauucag

SEQ ID NO: 3280575 - RNA, 19 nt, Artificial Sequence
  Description of Artificial Sequence: Synthetic oligonucleotide
guuacuaaaagcuguuccg

SEQ ID NO: 3280576 - RNA, 19 nt, Artificial Sequence
  Description of Artificial Sequence: Synthetic oligonucleotide
uguuccgugauaaucacug

SEQ ID NO: 3280577 - RNA, 19 nt, Artificial Sequence
  Description of Artificial Sequence: Synthetic oligonucleotide
ugaaauuuguuuguggugc

SEQ ID NO: 3280578 - RNA, 19 nt, Artificial Sequence
  Description of Artificial Sequence: Synthetic oligonucleotide
aacagugucccacuagcac

SEQ ID NO: 3280579 - RNA, 19 nt, Artificial Sequence
  Description of Artificial Sequence: Synthetic oligonucleotide
ucuuaaauucucuaacagc

SEQ ID NO: 3280580 - RNA, 19 nt, Artificial Sequence
  Description of Artificial Sequence: Synthetic oligonucleotide
cuuuuguucaggauugugg

SEQ ID NO: 3280581 - RNA, 19 nt, Artificial Sequence
  Description of Artificial Sequence: Synthetic oligonucleotide
accaaaaccauuaagagcu

SEQ ID NO: 3280582 - RNA, 19 nt, Artificial Sequence
  Description of Artificial Sequence: Synthetic oligonucleotide
ugauauacuucauagccug

SEQ ID NO: 3280583 - RNA, 19 nt, Artificial Sequence
  Description of Artificial Sequence: Synthetic oligonucleotide
uuauucagaagcugaagag

SEQ ID NO: 3280584 - RNA, 19 nt, Artificial Sequence
  Description of Artificial Sequence: Synthetic oligonucleotide
uuguuaaaaucuaaguaga

SEQ ID NO: 3280585 - RNA, 19 nt, Artificial Sequence
  Description of Artificial Sequence: Synthetic oligonucleotide
uccuuauucaugcugaagu

SEQ ID NO: 3280586 - RNA, 19 nt, Artificial Sequence
  Description of Artificial Sequence: Synthetic oligonucleotide
uaaugaaauuuguuugugg

SEQ ID NO: 3280587 - RNA, 19 nt, Artificial Sequence
  Description of Artificial Sequence: Synthetic oligonucleotide
uuguaaugaaaguuacugg

SEQ ID NO: 3280588 - RNA, 19 nt, Artificial Sequence
  Description of Artificial Sequence: Synthetic oligonucleotide
uaaacuguguaacauuucu

SEQ ID NO: 3280589 - RNA, 19 nt, Artificial Sequence
  Description of Artificial Sequence: Synthetic oligonucleotide
uucaaugauaaacaguguc

SEQ ID NO: 3280590 - RNA, 19 nt, Artificial Sequence
  Description of Artificial Sequence: Synthetic oligonucleotide
guuaaguaguaauggaagg

SEQ ID NO: 3280591 - RNA, 19 nt, Artificial Sequence
  Description of Artificial Sequence: Synthetic oligonucleotide
ugugggaaaauucaguuau

SEQ ID NO: 3280592 - RNA, 19 nt, Artificial Sequence
  Description of Artificial Sequence: Synthetic oligonucleotide
cuuguaaugaaaguuacug

SEQ ID NO: 3280593 - RNA, 19 nt, Artificial Sequence
  Description of Artificial Sequence: Synthetic oligonucleotide
uaaacagugucccacuagc

SEQ ID NO: 3280594 - RNA, 19 nt, Artificial Sequence
  Description of Artificial Sequence: Synthetic oligonucleotide
auucagaagcugaagagcc

SEQ ID NO: 3280595 - RNA, 19 nt, Artificial Sequence
  Description of Artificial Sequence: Synthetic oligonucleotide
uguaaugaaauuuguuugu

SEQ ID NO: 3280596 - RNA, 19 nt, Artificial Sequence
  Description of Artificial Sequence: Synthetic oligonucleotide
aaaccauuaagagcuacuc

SEQ ID NO: 3280597 - RNA, 19 nt, Artificial Sequence
  Description of Artificial Sequence: Synthetic oligonucleotide
aauggaaggccuuguaaug

SEQ ID NO: 3280598 - RNA, 19 nt, Artificial Sequence
  Description of Artificial Sequence: Synthetic oligonucleotide
uuucuuaaauucucuaaca

SEQ ID NO: 3280599 - RNA, 19 nt, Artificial Sequence
  Description of Artificial Sequence: Synthetic oligonucleotide
uaaaaucuaaguagauggc

SEQ ID NO: 3280600 - RNA, 19 nt, Artificial Sequence
  Description of Artificial Sequence: Synthetic oligonucleotide
ggaaaauucaguuauguga

SEQ ID NO: 3280601 - RNA, 19 nt, Artificial Sequence
  Description of Artificial Sequence: Synthetic oligonucleotide
aacagcuuuguuaaaaucu

SEQ ID NO: 3280602 - RNA, 19 nt, Artificial Sequence
  Description of Artificial Sequence: Synthetic oligonucleotide
gacuuugugauauacuuca

SEQ ID NO: 3280603 - RNA, 19 nt, Artificial Sequence
  Description of Artificial Sequence: Synthetic oligonucleotide
ugaggaagcaaacugccca

SEQ ID NO: 3280604 - RNA, 19 nt, Artificial Sequence
  Description of Artificial Sequence: Synthetic oligonucleotide
uaaucacugaaaccuuugg

SEQ ID NO: 3280605 - RNA, 19 nt, Artificial Sequence
  Description of Artificial Sequence: Synthetic oligonucleotide
uuaaguaguaauggaaggc

SEQ ID NO: 3280606 - RNA, 19 nt, Artificial Sequence
  Description of Artificial Sequence: Synthetic oligonucleotide
cuuccaaagaugaggaagc

SEQ ID NO: 3280607 - RNA, 19 nt, Artificial Sequence
  Description of Artificial Sequence: Synthetic oligonucleotide
aucacugaaaccuuuggga

SEQ ID NO: 3280608 - RNA, 19 nt, Artificial Sequence
  Description of Artificial Sequence: Synthetic oligonucleotide
ucucuaacagcuuuguuaa

SEQ ID NO: 3280609 - RNA, 19 nt, Artificial Sequence
  Description of Artificial Sequence: Synthetic oligonucleotide
uaaguaguaauggaaggcc

SEQ ID NO: 3280610 - RNA, 19 nt, Artificial Sequence
  Description of Artificial Sequence: Synthetic oligonucleotide
uucucuaacagcuuuguua

SEQ ID NO: 3280611 - RNA, 19 nt, Artificial Sequence
  Description of Artificial Sequence: Synthetic oligonucleotide
augauaaacagugucccac

SEQ ID NO: 3280612 - RNA, 19 nt, Artificial Sequence
  Description of Artificial Sequence: Synthetic oligonucleotide
cuuaaauucucuaacagcu

SEQ ID NO: 3280613 - RNA, 19 nt, Artificial Sequence
  Description of Artificial Sequence: Synthetic oligonucleotide
gaagcaaacugcccaaaag

SEQ ID NO: 3280614 - RNA, 19 nt, Artificial Sequence
  Description of Artificial Sequence: Synthetic oligonucleotide
acuagcaccaccaaaacca

SEQ ID NO: 3280615 - RNA, 19 nt, Artificial Sequence
  Description of Artificial Sequence: Synthetic oligonucleotide
uaaguccuuauucaugcug

SEQ ID NO: 3280616 - RNA, 19 nt, Artificial Sequence
  Description of Artificial Sequence: Synthetic oligonucleotide
ugcccaaaagcgcacagag

SEQ ID NO: 3280617 - RNA, 19 nt, Artificial Sequence
  Description of Artificial Sequence: Synthetic oligonucleotide
caguauaaguuacuaaaag

SEQ ID NO: 3280618 - RNA, 19 nt, Artificial Sequence
  Description of Artificial Sequence: Synthetic oligonucleotide
uagccuggaauuaacaccu

SEQ ID NO: 3280619 - RNA, 19 nt, Artificial Sequence
  Description of Artificial Sequence: Synthetic oligonucleotide
uaaugaaaguuacugggau

SEQ ID NO: 3280620 - RNA, 19 nt, Artificial Sequence
  Description of Artificial Sequence: Synthetic oligonucleotide
guuaaaaucuaaguagaug

SEQ ID NO: 3280621 - RNA, 19 nt, Artificial Sequence
  Description of Artificial Sequence: Synthetic oligonucleotide
agaugaggaagcaaacugc

SEQ ID NO: 3280622 - RNA, 19 nt, Artificial Sequence
  Description of Artificial Sequence: Synthetic oligonucleotide
uauucagaagcugaagagc

SEQ ID NO: 3280623 - RNA, 19 nt, Artificial Sequence
  Description of Artificial Sequence: Synthetic oligonucleotide
aauuuguuuguggugccuc

SEQ ID NO: 3280624 - RNA, 19 nt, Artificial Sequence
  Description of Artificial Sequence: Synthetic oligonucleotide
aaugauaaacaguguccca

SEQ ID NO: 3280625 - RNA, 19 nt, Artificial Sequence
  Description of Artificial Sequence: Synthetic oligonucleotide
guuauucagaagcugaaga

SEQ ID NO: 3280626 - RNA, 19 nt, Artificial Sequence
  Description of Artificial Sequence: Synthetic oligonucleotide
uuuuccucugccuuuuccc

SEQ ID NO: 3280627 - RNA, 19 nt, Artificial Sequence
  Description of Artificial Sequence: Synthetic oligonucleotide
uguguaacauuucuuguua

SEQ ID NO: 3280628 - RNA, 19 nt, Artificial Sequence
  Description of Artificial Sequence: Synthetic oligonucleotide
gaaaauucaguuaugugaa

SEQ ID NO: 3280629 - RNA, 19 nt, Artificial Sequence
  Description of Artificial Sequence: Synthetic oligonucleotide
uaaauucucuaacagcuuu

SEQ ID NO: 3280630 - RNA, 19 nt, Artificial Sequence
  Description of Artificial Sequence: Synthetic oligonucleotide
aauuaacaccuccuuuugu

SEQ ID NO: 3280631 - RNA, 19 nt, Artificial Sequence
  Description of Artificial Sequence: Synthetic oligonucleotide
auucaguuaugugaacccc

SEQ ID NO: 3280632 - RNA, 19 nt, Artificial Sequence
  Description of Artificial Sequence: Synthetic oligonucleotide
gaauuaacaccuccuuuug

SEQ ID NO: 3280633 - RNA, 19 nt, Artificial Sequence
  Description of Artificial Sequence: Synthetic oligonucleotide
auaaguuacuaaaagcugu

SEQ ID NO: 3280634 - RNA, 19 nt, Artificial Sequence
  Description of Artificial Sequence: Synthetic oligonucleotide
aaagaugaggaagcaaacu

SEQ ID NO: 3280635 - RNA, 19 nt, Artificial Sequence
  Description of Artificial Sequence: Synthetic oligonucleotide
uaauggaaggccuuguaau

SEQ ID NO: 3280636 - RNA, 19 nt, Artificial Sequence
  Description of Artificial Sequence: Synthetic oligonucleotide
caccaaaaccauuaagagc

SEQ ID NO: 3280637 - RNA, 19 nt, Artificial Sequence
  Description of Artificial Sequence: Synthetic oligonucleotide
ucugccuuuucccacuuca

SEQ ID NO: 3280638 - RNA, 19 nt, Artificial Sequence
  Description of Artificial Sequence: Synthetic oligonucleotide
cucucuuccaaagaugagg

SEQ ID NO: 3280639 - RNA, 19 nt, Artificial Sequence
  Description of Artificial Sequence: Synthetic oligonucleotide
aaccauuaagagcuacucu

SEQ ID NO: 3280640 - RNA, 19 nt, Artificial Sequence
  Description of Artificial Sequence: Synthetic oligonucleotide
augaaauuuguuuguggug

SEQ ID NO: 3280641 - RNA, 19 nt, Artificial Sequence
  Description of Artificial Sequence: Synthetic oligonucleotide
cuuguuauucagaagcuga

SEQ ID NO: 3280642 - RNA, 19 nt, Artificial Sequence
  Description of Artificial Sequence: Synthetic oligonucleotide
acugaaaccuuugggauag

SEQ ID NO: 3280643 - RNA, 19 nt, Artificial Sequence
  Description of Artificial Sequence: Synthetic oligonucleotide
aagcuguuccgugauaauc

SEQ ID NO: 3280644 - RNA, 19 nt, Artificial Sequence
  Description of Artificial Sequence: Synthetic oligonucleotide
auaaacagugucccacuag

SEQ ID NO: 3280645 - RNA, 19 nt, Artificial Sequence
  Description of Artificial Sequence: Synthetic oligonucleotide
guauaaguuacuaaaagcu

SEQ ID NO: 3280646 - RNA, 19 nt, Artificial Sequence
  Description of Artificial Sequence: Synthetic oligonucleotide
gaugaggaagcaaacugcc

SEQ ID NO: 3280647 - RNA, 19 nt, Artificial Sequence
  Description of Artificial Sequence: Synthetic oligonucleotide
uguuaaaaucuaaguagau

SEQ ID NO: 3280648 - RNA, 19 nt, Artificial Sequence
  Description of Artificial Sequence: Synthetic oligonucleotide
auugugggaaaauucaguu

SEQ ID NO: 3280649 - RNA, 19 nt, Artificial Sequence
  Description of Artificial Sequence: Synthetic oligonucleotide
ucuugguugcaucugaacg

SEQ ID NO: 3280650 - RNA, 19 nt, Artificial Sequence
  Description of Artificial Sequence: Synthetic oligonucleotide
aacgucuccaaauacagca

SEQ ID NO: 3280651 - RNA, 19 nt, Artificial Sequence
  Description of Artificial Sequence: Synthetic oligonucleotide
auuuccaucauccacaguu

SEQ ID NO: 3280652 - RNA, 19 nt, Artificial Sequence
  Description of Artificial Sequence: Synthetic oligonucleotide
ugaacgucuccaaauacag

SEQ ID NO: 3280653 - RNA, 19 nt, Artificial Sequence
  Description of Artificial Sequence: Synthetic oligonucleotide
acaguuuucagguuguucu

SEQ ID NO: 3280654 - RNA, 19 nt, Artificial Sequence
  Description of Artificial Sequence: Synthetic oligonucleotide
ugcaagucgaacuugcuug

SEQ ID NO: 3280655 - RNA, 19 nt, Artificial Sequence
  Description of Artificial Sequence: Synthetic oligonucleotide
aagcagguaacccauccuc

SEQ ID NO: 3280656 - RNA, 19 nt, Artificial Sequence
  Description of Artificial Sequence: Synthetic oligonucleotide
ugugucuuucugcaagucg

SEQ ID NO: 3280657 - RNA, 19 nt, Artificial Sequence
  Description of Artificial Sequence: Synthetic oligonucleotide
ucauccacaguuuucaggu

SEQ ID NO: 3280658 - RNA, 19 nt, Artificial Sequence
  Description of Artificial Sequence: Synthetic oligonucleotide
uucagguuguucuugguug

SEQ ID NO: 3280659 - RNA, 19 nt, Artificial Sequence
  Description of Artificial Sequence: Synthetic oligonucleotide
aagucgaacuugcuugaac

SEQ ID NO: 3280660 - RNA, 19 nt, Artificial Sequence
  Description of Artificial Sequence: Synthetic oligonucleotide
uaacccauccucaaggccu

SEQ ID NO: 3280661 - RNA, 19 nt, Artificial Sequence
  Description of Artificial Sequence: Synthetic oligonucleotide
aacuugcuugaacagucuc

SEQ ID NO: 3280662 - RNA, 19 nt, Artificial Sequence
  Description of Artificial Sequence: Synthetic oligonucleotide
agguaacccauccucaagg

SEQ ID NO: 3280663 - RNA, 19 nt, Artificial Sequence
  Description of Artificial Sequence: Synthetic oligonucleotide
ugcuugaacagucucuucu

SEQ ID NO: 3280664 - RNA, 19 nt, Artificial Sequence
  Description of Artificial Sequence: Synthetic oligonucleotide
ucuuucugcaagucgaacu

SEQ ID NO: 3280665 - RNA, 19 nt, Artificial Sequence
  Description of Artificial Sequence: Synthetic oligonucleotide
ugaagcagguaacccaucc

SEQ ID NO: 3280666 - RNA, 19 nt, Artificial Sequence
  Description of Artificial Sequence: Synthetic oligonucleotide
aauacagcacaggaugaag

SEQ ID NO: 3280667 - RNA, 19 nt, Artificial Sequence
  Description of Artificial Sequence: Synthetic oligonucleotide
aucauccacaguuuucagg

SEQ ID NO: 3280668 - RNA, 19 nt, Artificial Sequence
  Description of Artificial Sequence: Synthetic oligonucleotide
uugaacagucucuucuuag

SEQ ID NO: 3280669 - RNA, 19 nt, Artificial Sequence
  Description of Artificial Sequence: Synthetic oligonucleotide
agucgaacuugcuugaaca

SEQ ID NO: 3280670 - RNA, 19 nt, Artificial Sequence
  Description of Artificial Sequence: Synthetic oligonucleotide
uuauuuccaucauccacag

SEQ ID NO: 3280671 - RNA, 19 nt, Artificial Sequence
  Description of Artificial Sequence: Synthetic oligonucleotide
auacagcacaggaugaagc

SEQ ID NO: 3280672 - RNA, 19 nt, Artificial Sequence
  Description of Artificial Sequence: Synthetic oligonucleotide
guuuucagguuguucuugg

SEQ ID NO: 3280673 - RNA, 19 nt, Artificial Sequence
  Description of Artificial Sequence: Synthetic oligonucleotide
uucugcaagucgaacuugc

SEQ ID NO: 3280674 - RNA, 19 nt, Artificial Sequence
  Description of Artificial Sequence: Synthetic oligonucleotide
ccaaauacagcacaggaug

SEQ ID NO: 3280675 - RNA, 19 nt, Artificial Sequence
  Description of Artificial Sequence: Synthetic oligonucleotide
uguucuugguugcaucuga

SEQ ID NO: 3280676 - RNA, 19 nt, Artificial Sequence
  Description of Artificial Sequence: Synthetic oligonucleotide
aggaugaagcagguaaccc

SEQ ID NO: 3280677 - RNA, 19 nt, Artificial Sequence
  Description of Artificial Sequence: Synthetic oligonucleotide
ucugaacgucuccaaauac

SEQ ID NO: 3280678 - RNA, 19 nt, Artificial Sequence
  Description of Artificial Sequence: Synthetic oligonucleotide
uccaaauacagcacaggau

SEQ ID NO: 3280679 - RNA, 19 nt, Artificial Sequence
  Description of Artificial Sequence: Synthetic oligonucleotide
uacagcacaggaugaagca

SEQ ID NO: 3280680 - RNA, 19 nt, Artificial Sequence
  Description of Artificial Sequence: Synthetic oligonucleotide
cagcacaggaugaagcagg

SEQ ID NO: 3280681 - RNA, 19 nt, Artificial Sequence
  Description of Artificial Sequence: Synthetic oligonucleotide
auccucaaggccugaaguc

SEQ ID NO: 3280682 - RNA, 19 nt, Artificial Sequence
  Description of Artificial Sequence: Synthetic oligonucleotide
ucuccaaauacagcacagg

SEQ ID NO: 3280683 - RNA, 19 nt, Artificial Sequence
  Description of Artificial Sequence: Synthetic oligonucleotide
aaggccugaagucuuccga

SEQ ID NO: 3280684 - RNA, 19 nt, Artificial Sequence
  Description of Artificial Sequence: Synthetic oligonucleotide
uggguugugucuuucugca

SEQ ID NO: 3280685 - RNA, 19 nt, Artificial Sequence
  Description of Artificial Sequence: Synthetic oligonucleotide
auccacaguuuucagguug

SEQ ID NO: 3280686 - RNA, 19 nt, Artificial Sequence
  Description of Artificial Sequence: Synthetic oligonucleotide
aagucuuccgagcuggguu

SEQ ID NO: 3280687 - RNA, 19 nt, Artificial Sequence
  Description of Artificial Sequence: Synthetic oligonucleotide
ucagguuguucuugguugc

SEQ ID NO: 3280688 - RNA, 19 nt, Artificial Sequence
  Description of Artificial Sequence: Synthetic oligonucleotide
gguugugucuuucugcaag

SEQ ID NO: 3280689 - RNA, 19 nt, Artificial Sequence
  Description of Artificial Sequence: Synthetic oligonucleotide
cugaagucuuccgagcugg

SEQ ID NO: 3280690 - RNA, 19 nt, Artificial Sequence
  Description of Artificial Sequence: Synthetic oligonucleotide
cacaggaugaagcagguaa

SEQ ID NO: 3280691 - RNA, 19 nt, Artificial Sequence
  Description of Artificial Sequence: Synthetic oligonucleotide
cuggguugugucuuucugc

SEQ ID NO: 3280692 - RNA, 19 nt, Artificial Sequence
  Description of Artificial Sequence: Synthetic oligonucleotide
uuucagguuguucuugguu

SEQ ID NO: 3280693 - RNA, 19 nt, Artificial Sequence
  Description of Artificial Sequence: Synthetic oligonucleotide
uccacaguuuucagguugu

SEQ ID NO: 3280694 - RNA, 19 nt, Artificial Sequence
  Description of Artificial Sequence: Synthetic oligonucleotide
aaauacagcacaggaugaa

SEQ ID NO: 3280695 - RNA, 19 nt, Artificial Sequence
  Description of Artificial Sequence: Synthetic oligonucleotide
acaggaugaagcagguaac

SEQ ID NO: 3280696 - RNA, 19 nt, Artificial Sequence
  Description of Artificial Sequence: Synthetic oligonucleotide
gucgaacuugcuugaacag

SEQ ID NO: 3280697 - RNA, 19 nt, Artificial Sequence
  Description of Artificial Sequence: Synthetic oligonucleotide
agucuuccgagcuggguug

SEQ ID NO: 3280698 - RNA, 19 nt, Artificial Sequence
  Description of Artificial Sequence: Synthetic oligonucleotide
uccaucauccacaguuuuc

SEQ ID NO: 3280699 - RNA, 19 nt, Artificial Sequence
  Description of Artificial Sequence: Synthetic oligonucleotide
guaacccauccucaaggcc

SEQ ID NO: 3280700 - RNA, 19 nt, Artificial Sequence
  Description of Artificial Sequence: Synthetic oligonucleotide
aggccugaagucuuccgag

SEQ ID NO: 3280701 - RNA, 19 nt, Artificial Sequence
  Description of Artificial Sequence: Synthetic oligonucleotide
cugaacgucuccaaauaca

SEQ ID NO: 3280702 - RNA, 19 nt, Artificial Sequence
  Description of Artificial Sequence: Synthetic oligonucleotide
cuccaaauacagcacagga

SEQ ID NO: 3280703 - RNA, 19 nt, Artificial Sequence
  Description of Artificial Sequence: Synthetic oligonucleotide
guugcaucugaacgucucc

SEQ ID NO: 3280704 - RNA, 19 nt, Artificial Sequence
  Description of Artificial Sequence: Synthetic oligonucleotide
uucuugguugcaucugaac

SEQ ID NO: 3280705 - RNA, 19 nt, Artificial Sequence
  Description of Artificial Sequence: Synthetic oligonucleotide
ugaagucuuccgagcuggg

SEQ ID NO: 3280706 - RNA, 19 nt, Artificial Sequence
  Description of Artificial Sequence: Synthetic oligonucleotide
uccucaaggccugaagucu

SEQ ID NO: 3280707 - RNA, 19 nt, Artificial Sequence
  Description of Artificial Sequence: Synthetic oligonucleotide
uuuccaucauccacaguuu

SEQ ID NO: 3280708 - RNA, 19 nt, Artificial Sequence
  Description of Artificial Sequence: Synthetic oligonucleotide
caaauacagcacaggauga

SEQ ID NO: 3280709 - RNA, 19 nt, Artificial Sequence
  Description of Artificial Sequence: Synthetic oligonucleotide
ucgaacuugcuugaacagu

SEQ ID NO: 3280710 - RNA, 19 nt, Artificial Sequence
  Description of Artificial Sequence: Synthetic oligonucleotide
aguuuucagguuguucuug

SEQ ID NO: 3280711 - RNA, 19 nt, Artificial Sequence
  Description of Artificial Sequence: Synthetic oligonucleotide
ucugcaagucgaacuugcu

SEQ ID NO: 3280712 - RNA, 19 nt, Artificial Sequence
  Description of Artificial Sequence: Synthetic oligonucleotide
uuuucagguuguucuuggu

SEQ ID NO: 3280713 - RNA, 19 nt, Artificial Sequence
  Description of Artificial Sequence: Synthetic oligonucleotide
aucugaacgucuccaaaua

SEQ ID NO: 3280714 - RNA, 19 nt, Artificial Sequence
  Description of Artificial Sequence: Synthetic oligonucleotide
caaggccugaagucuuccg

SEQ ID NO: 3280715 - RNA, 19 nt, Artificial Sequence
  Description of Artificial Sequence: Synthetic oligonucleotide
caggaugaagcagguaacc

SEQ ID NO: 3280716 - RNA, 19 nt, Artificial Sequence
  Description of Artificial Sequence: Synthetic oligonucleotide
ugucuuucugcaagucgaa

SEQ ID NO: 3280717 - RNA, 19 nt, Artificial Sequence
  Description of Artificial Sequence: Synthetic oligonucleotide
uuucugcaagucgaacuug

SEQ ID NO: 3280718 - RNA, 19 nt, Artificial Sequence
  Description of Artificial Sequence: Synthetic oligonucleotide
gugucuuucugcaagucga

SEQ ID NO: 3280719 - RNA, 19 nt, Artificial Sequence
  Description of Artificial Sequence: Synthetic oligonucleotide
ggaugaagcagguaaccca

SEQ ID NO: 3280720 - RNA, 19 nt, Artificial Sequence
  Description of Artificial Sequence: Synthetic oligonucleotide
acagcacaggaugaagcag

SEQ ID NO: 3280721 - RNA, 19 nt, Artificial Sequence
  Description of Artificial Sequence: Synthetic oligonucleotide
uugcaucugaacgucucca

SEQ ID NO: 3280722 - RNA, 19 nt, Artificial Sequence
  Description of Artificial Sequence: Synthetic oligonucleotide
gucuccaaauacagcacag

SEQ ID NO: 3280723 - RNA, 19 nt, Artificial Sequence
  Description of Artificial Sequence: Synthetic oligonucleotide
acuugcuugaacagucucu

SEQ ID NO: 3280724 - RNA, 19 nt, Artificial Sequence
  Description of Artificial Sequence: Synthetic oligonucleotide
cuugguugcaucugaacgu

SEQ ID NO: 3280725 - RNA, 19 nt, Artificial Sequence
  Description of Artificial Sequence: Synthetic oligonucleotide
gguaacccauccucaaggc

SEQ ID NO: 3280726 - RNA, 19 nt, Artificial Sequence
  Description of Artificial Sequence: Synthetic oligonucleotide
uugguugcaucugaacguc

SEQ ID NO: 3280727 - RNA, 19 nt, Artificial Sequence
  Description of Artificial Sequence: Synthetic oligonucleotide
uuguucuugguugcaucug

SEQ ID NO: 3280728 - RNA, 19 nt, Artificial Sequence
  Description of Artificial Sequence: Synthetic oligonucleotide
ugcaucugaacgucuccaa

SEQ ID NO: 3280729 - RNA, 19 nt, Artificial Sequence
  Description of Artificial Sequence: Synthetic oligonucleotide
caucauccacaguuuucag

SEQ ID NO: 3280730 - RNA, 19 nt, Artificial Sequence
  Description of Artificial Sequence: Synthetic oligonucleotide
gaacgucuccaaauacagc

SEQ ID NO: 3280731 - RNA, 19 nt, Artificial Sequence
  Description of Artificial Sequence: Synthetic oligonucleotide
cagguaacccauccucaag

SEQ ID NO: 3280732 - RNA, 19 nt, Artificial Sequence
  Description of Artificial Sequence: Synthetic oligonucleotide
uuccaucauccacaguuuu

SEQ ID NO: 3280733 - RNA, 19 nt, Artificial Sequence
  Description of Artificial Sequence: Synthetic oligonucleotide
acgucuccaaauacagcac

SEQ ID NO: 3280734 - RNA, 19 nt, Artificial Sequence
  Description of Artificial Sequence: Synthetic oligonucleotide
guuguucuugguugcaucu

SEQ ID NO: 3280735 - RNA, 19 nt, Artificial Sequence
  Description of Artificial Sequence: Synthetic oligonucleotide
ucaaggccugaagucuucc

SEQ ID NO: 3280736 - RNA, 19 nt, Artificial Sequence
  Description of Artificial Sequence: Synthetic oligonucleotide
uauuuccaucauccacagu

SEQ ID NO: 3280737 - RNA, 19 nt, Artificial Sequence
  Description of Artificial Sequence: Synthetic oligonucleotide
gaugaagcagguaacccau

SEQ ID NO: 3280738 - RNA, 19 nt, Artificial Sequence
  Description of Artificial Sequence: Synthetic oligonucleotide
cacaguuuucagguuguuc

SEQ ID NO: 3280739 - RNA, 19 nt, Artificial Sequence
  Description of Artificial Sequence: Synthetic oligonucleotide
aacccauccucaaggccug

SEQ ID NO: 3280740 - RNA, 19 nt, Artificial Sequence
  Description of Artificial Sequence: Synthetic oligonucleotide
ugguugcaucugaacgucu

SEQ ID NO: 3280741 - RNA, 19 nt, Artificial Sequence
  Description of Artificial Sequence: Synthetic oligonucleotide
uccgagcuggguugugucu

SEQ ID NO: 3280742 - RNA, 19 nt, Artificial Sequence
  Description of Artificial Sequence: Synthetic oligonucleotide
cgaacuugcuugaacaguc

SEQ ID NO: 3280743 - RNA, 19 nt, Artificial Sequence
  Description of Artificial Sequence: Synthetic oligonucleotide
uuccgagcuggguuguguc

SEQ ID NO: 3280744 - RNA, 19 nt, Artificial Sequence
  Description of Artificial Sequence: Synthetic oligonucleotide
agcagguaacccauccuca

SEQ ID NO: 3280745 - RNA, 19 nt, Artificial Sequence
  Description of Artificial Sequence: Synthetic oligonucleotide
gguuguucuugguugcauc

SEQ ID NO: 3280746 - RNA, 19 nt, Artificial Sequence
  Description of Artificial Sequence: Synthetic oligonucleotide
gaagcagguaacccauccu

SEQ ID NO: 3280747 - RNA, 19 nt, Artificial Sequence
  Description of Artificial Sequence: Synthetic oligonucleotide
uugcuugaacagucucuuc

SEQ ID NO: 3280748 - RNA, 19 nt, Artificial Sequence
  Description of Artificial Sequence: Synthetic oligonucleotide
cucaaggccugaagucuuc

SEQ ID NO: 3280749 - RNA, 19 nt, Artificial Sequence
  Description of Artificial Sequence: Synthetic oligonucleotide
aaugcaaugagagaaaggg

SEQ ID NO: 3280750 - RNA, 19 nt, Artificial Sequence
  Description of Artificial Sequence: Synthetic oligonucleotide
ugaaguaauggucagagga

SEQ ID NO: 3280751 - RNA, 19 nt, Artificial Sequence
  Description of Artificial Sequence: Synthetic oligonucleotide
uuuuauuagcuuaauaauc

SEQ ID NO: 3280752 - RNA, 19 nt, Artificial Sequence
  Description of Artificial Sequence: Synthetic oligonucleotide
cuuagcauuaauaagcuuc

SEQ ID NO: 3280753 - RNA, 19 nt, Artificial Sequence
  Description of Artificial Sequence: Synthetic oligonucleotide
auuaauaagcuucagcacu

SEQ ID NO: 3280754 - RNA, 19 nt, Artificial Sequence
  Description of Artificial Sequence: Synthetic oligonucleotide
ugaaugauauuuuauuagc

SEQ ID NO: 3280755 - RNA, 19 nt, Artificial Sequence
  Description of Artificial Sequence: Synthetic oligonucleotide
agcauuaauaagcuucagc

SEQ ID NO: 3280756 - RNA, 19 nt, Artificial Sequence
  Description of Artificial Sequence: Synthetic oligonucleotide
aauaaucugggccagcccu

SEQ ID NO: 3280757 - RNA, 19 nt, Artificial Sequence
  Description of Artificial Sequence: Synthetic oligonucleotide
aagaacuggucaaagagac

SEQ ID NO: 3280758 - RNA, 19 nt, Artificial Sequence
  Description of Artificial Sequence: Synthetic oligonucleotide
aaucuguccuucuccauac

SEQ ID NO: 3280759 - RNA, 19 nt, Artificial Sequence
  Description of Artificial Sequence: Synthetic oligonucleotide
gaugaaaccguguucgucc

SEQ ID NO: 3280760 - RNA, 19 nt, Artificial Sequence
  Description of Artificial Sequence: Synthetic oligonucleotide
agagaaucuguccuucucc

SEQ ID NO: 3280761 - RNA, 19 nt, Artificial Sequence
  Description of Artificial Sequence: Synthetic oligonucleotide
uucacguccagguugacag

SEQ ID NO: 3280762 - RNA, 19 nt, Artificial Sequence
  Description of Artificial Sequence: Synthetic oligonucleotide
aaugauauuuuauuagcuu

SEQ ID NO: 3280763 - RNA, 19 nt, Artificial Sequence
  Description of Artificial Sequence: Synthetic oligonucleotide
aagaagggacgacggaucc

SEQ ID NO: 3280764 - RNA, 19 nt, Artificial Sequence
  Description of Artificial Sequence: Synthetic oligonucleotide
agagaugaaaccguguucg

SEQ ID NO: 3280765 - RNA, 19 nt, Artificial Sequence
  Description of Artificial Sequence: Synthetic oligonucleotide
gaugaaguaauggucagag

SEQ ID NO: 3280766 - RNA, 19 nt, Artificial Sequence
  Description of Artificial Sequence: Synthetic oligonucleotide
cuugccaugcacuucaacc

SEQ ID NO: 3280767 - RNA, 19 nt, Artificial Sequence
  Description of Artificial Sequence: Synthetic oligonucleotide
uugagaagaggucagacuc

SEQ ID NO: 3280768 - RNA, 19 nt, Artificial Sequence
  Description of Artificial Sequence: Synthetic oligonucleotide
agcaccuugacuuucagcu

SEQ ID NO: 3280769 - RNA, 19 nt, Artificial Sequence
  Description of Artificial Sequence: Synthetic oligonucleotide
cugaaugauauuuuauuag

SEQ ID NO: 3280770 - RNA, 19 nt, Artificial Sequence
  Description of Artificial Sequence: Synthetic oligonucleotide
auuuuauuagcuuaauaau

SEQ ID NO: 3280771 - RNA, 19 nt, Artificial Sequence
  Description of Artificial Sequence: Synthetic oligonucleotide
gagucuacuucuuaggggc

SEQ ID NO: 3280772 - RNA, 19 nt, Artificial Sequence
  Description of Artificial Sequence: Synthetic oligonucleotide
uuagcauuaauaagcuuca

SEQ ID NO: 3280773 - RNA, 19 nt, Artificial Sequence
  Description of Artificial Sequence: Synthetic oligonucleotide
uugacagagaaucuguccu

SEQ ID NO: 3280774 - RNA, 19 nt, Artificial Sequence
  Description of Artificial Sequence: Synthetic oligonucleotide
aaaaugcaaugagagaaag

SEQ ID NO: 3280775 - RNA, 19 nt, Artificial Sequence
  Description of Artificial Sequence: Synthetic oligonucleotide
acucccuagagaugaaacc

SEQ ID NO: 3280776 - RNA, 19 nt, Artificial Sequence
  Description of Artificial Sequence: Synthetic oligonucleotide
aaacuuucuuguuuuaaaa

SEQ ID NO: 3280777 - RNA, 19 nt, Artificial Sequence
  Description of Artificial Sequence: Synthetic oligonucleotide
gauagggaugaaguaaugg

SEQ ID NO: 3280778 - RNA, 19 nt, Artificial Sequence
  Description of Artificial Sequence: Synthetic oligonucleotide
uguggaacucccuagagau

SEQ ID NO: 3280779 - RNA, 19 nt, Artificial Sequence
  Description of Artificial Sequence: Synthetic oligonucleotide
aagggagucuacuucuuag

SEQ ID NO: 3280780 - RNA, 19 nt, Artificial Sequence
  Description of Artificial Sequence: Synthetic oligonucleotide
uggucaaagagacggcugg

SEQ ID NO: 3280781 - RNA, 19 nt, Artificial Sequence
  Description of Artificial Sequence: Synthetic oligonucleotide
auagggaugaaguaauggu

SEQ ID NO: 3280782 - RNA, 19 nt, Artificial Sequence
  Description of Artificial Sequence: Synthetic oligonucleotide
auacgcaucucugagaguc

SEQ ID NO: 3280783 - RNA, 19 nt, Artificial Sequence
  Description of Artificial Sequence: Synthetic oligonucleotide
aggccuguuuccuuggucc

SEQ ID NO: 3280784 - RNA, 19 nt, Artificial Sequence
  Description of Artificial Sequence: Synthetic oligonucleotide
ucugaaugauauuuuauua

SEQ ID NO: 3280785 - RNA, 19 nt, Artificial Sequence
  Description of Artificial Sequence: Synthetic oligonucleotide
gaguggaaagggaagaagg

SEQ ID NO: 3280786 - RNA, 19 nt, Artificial Sequence
  Description of Artificial Sequence: Synthetic oligonucleotide
auaagcuucagcacuaguc

SEQ ID NO: 3280787 - RNA, 19 nt, Artificial Sequence
  Description of Artificial Sequence: Synthetic oligonucleotide
ugucaauccagcugggugc

SEQ ID NO: 3280788 - RNA, 19 nt, Artificial Sequence
  Description of Artificial Sequence: Synthetic oligonucleotide
aaguaauggucagaggauc

SEQ ID NO: 3280789 - RNA, 19 nt, Artificial Sequence
  Description of Artificial Sequence: Synthetic oligonucleotide
gcauuaauaagcuucagca

SEQ ID NO: 3280790 - RNA, 19 nt, Artificial Sequence
  Description of Artificial Sequence: Synthetic oligonucleotide
uuaauaaucugggccagcc

SEQ ID NO: 3280791 - RNA, 19 nt, Artificial Sequence
  Description of Artificial Sequence: Synthetic oligonucleotide
aagggaagaagggacgacg

SEQ ID NO: 3280792 - RNA, 19 nt, Artificial Sequence
  Description of Artificial Sequence: Synthetic oligonucleotide
ugaggaccccaucagauga

SEQ ID NO: 3280793 - RNA, 19 nt, Artificial Sequence
  Description of Artificial Sequence: Synthetic oligonucleotide
uccagguugacagagaauc

SEQ ID NO: 3280794 - RNA, 19 nt, Artificial Sequence
  Description of Artificial Sequence: Synthetic oligonucleotide
ugaugggaaacuuucuugu

SEQ ID NO: 3280795 - RNA, 19 nt, Artificial Sequence
  Description of Artificial Sequence: Synthetic oligonucleotide
uucucuucacgggugaugg

SEQ ID NO: 3280796 - RNA, 19 nt, Artificial Sequence
  Description of Artificial Sequence: Synthetic oligonucleotide
accacgucuucccagcacc

SEQ ID NO: 3280797 - RNA, 19 nt, Artificial Sequence
  Description of Artificial Sequence: Synthetic oligonucleotide
augauauuuuauuagcuua

SEQ ID NO: 3280798 - RNA, 19 nt, Artificial Sequence
  Description of Artificial Sequence: Synthetic oligonucleotide
cauuaauaagcuucagcac

SEQ ID NO: 3280799 - RNA, 19 nt, Artificial Sequence
  Description of Artificial Sequence: Synthetic oligonucleotide
uccagugucaauccagcug

SEQ ID NO: 3280800 - RNA, 19 nt, Artificial Sequence
  Description of Artificial Sequence: Synthetic oligonucleotide
gaaggaaggaggguggccg

SEQ ID NO: 3280801 - RNA, 19 nt, Artificial Sequence
  Description of Artificial Sequence: Synthetic oligonucleotide
agaaagggagucuacuucu

SEQ ID NO: 3280802 - RNA, 19 nt, Artificial Sequence
  Description of Artificial Sequence: Synthetic oligonucleotide
aguaauggucagaggaucc

SEQ ID NO: 3280803 - RNA, 19 nt, Artificial Sequence
  Description of Artificial Sequence: Synthetic oligonucleotide
uuaauaagcuucagcacua

SEQ ID NO: 3280804 - RNA, 19 nt, Artificial Sequence
  Description of Artificial Sequence: Synthetic oligonucleotide
gaggauccacaucagcugg

SEQ ID NO: 3280805 - RNA, 19 nt, Artificial Sequence
  Description of Artificial Sequence: Synthetic oligonucleotide
agaaguggcaguugagaag

SEQ ID NO: 3280806 - RNA, 19 nt, Artificial Sequence
  Description of Artificial Sequence: Synthetic oligonucleotide
uccauucacagugaggacc

SEQ ID NO: 3280807 - RNA, 19 nt, Artificial Sequence
  Description of Artificial Sequence: Synthetic oligonucleotide
ucagaugauagggaugaag

SEQ ID NO: 3280808 - RNA, 19 nt, Artificial Sequence
  Description of Artificial Sequence: Synthetic oligonucleotide
uagggaugaaguaaugguc

SEQ ID NO: 3280809 - RNA, 19 nt, Artificial Sequence
  Description of Artificial Sequence: Synthetic oligonucleotide
guugacagagaaucugucc

SEQ ID NO: 3280810 - RNA, 19 nt, Artificial Sequence
  Description of Artificial Sequence: Synthetic oligonucleotide
ucacugaugggaaacuuuc

SEQ ID NO: 3280811 - RNA, 19 nt, Artificial Sequence
  Description of Artificial Sequence: Synthetic oligonucleotide
cucccuagagaugaaaccg

SEQ ID NO: 3280812 - RNA, 19 nt, Artificial Sequence
  Description of Artificial Sequence: Synthetic oligonucleotide
ucuguccuucuccauacgc

SEQ ID NO: 3280813 - RNA, 19 nt, Artificial Sequence
  Description of Artificial Sequence: Synthetic oligonucleotide
uggaacucccuagagauga

SEQ ID NO: 3280814 - RNA, 19 nt, Artificial Sequence
  Description of Artificial Sequence: Synthetic oligonucleotide
uccacaucagcugggaucc

SEQ ID NO: 3280815 - RNA, 19 nt, Artificial Sequence
  Description of Artificial Sequence: Synthetic oligonucleotide
gaaacuuucuuguuuuaaa

SEQ ID NO: 3280816 - RNA, 19 nt, Artificial Sequence
  Description of Artificial Sequence: Synthetic oligonucleotide
aguugagaagaggucagac

SEQ ID NO: 3280817 - RNA, 19 nt, Artificial Sequence
  Description of Artificial Sequence: Synthetic oligonucleotide
aucagcugggauccgguac

SEQ ID NO: 3280818 - RNA, 19 nt, Artificial Sequence
  Description of Artificial Sequence: Synthetic oligonucleotide
ugagaagaggucagacucc

SEQ ID NO: 3280819 - RNA, 19 nt, Artificial Sequence
  Description of Artificial Sequence: Synthetic oligonucleotide
guagaaggggcucagagaa

SEQ ID NO: 3280820 - RNA, 19 nt, Artificial Sequence
  Description of Artificial Sequence: Synthetic oligonucleotide
gaugauagggaugaaguaa

SEQ ID NO: 3280821 - RNA, 19 nt, Artificial Sequence
  Description of Artificial Sequence: Synthetic oligonucleotide
uugccaugcacuucaacca

SEQ ID NO: 3280822 - RNA, 19 nt, Artificial Sequence
  Description of Artificial Sequence: Synthetic oligonucleotide
agaggauccacaucagcug

SEQ ID NO: 3280823 - RNA, 19 nt, Artificial Sequence
  Description of Artificial Sequence: Synthetic oligonucleotide
acuuucagcuccucugggg

SEQ ID NO: 3280824 - RNA, 19 nt, Artificial Sequence
  Description of Artificial Sequence: Synthetic oligonucleotide
uucuccauacgcaucucug

SEQ ID NO: 3280825 - RNA, 19 nt, Artificial Sequence
  Description of Artificial Sequence: Synthetic oligonucleotide
uuuccuugguccauucaca

SEQ ID NO: 3280826 - RNA, 19 nt, Artificial Sequence
  Description of Artificial Sequence: Synthetic oligonucleotide
gaaaccguguucguccugg

SEQ ID NO: 3280827 - RNA, 19 nt, Artificial Sequence
  Description of Artificial Sequence: Synthetic oligonucleotide
gaccccaucagaugauagg

SEQ ID NO: 3280828 - RNA, 19 nt, Artificial Sequence
  Description of Artificial Sequence: Synthetic oligonucleotide
agguagaaggggcucagag

SEQ ID NO: 3280829 - RNA, 19 nt, Artificial Sequence
  Description of Artificial Sequence: Synthetic oligonucleotide
uacgcucggggccagaggc

SEQ ID NO: 3280830 - RNA, 19 nt, Artificial Sequence
  Description of Artificial Sequence: Synthetic oligonucleotide
aauaagcuucagcacuagu

SEQ ID NO: 3280831 - RNA, 19 nt, Artificial Sequence
  Description of Artificial Sequence: Synthetic oligonucleotide
aaggggcucagagaagugg

SEQ ID NO: 3280832 - RNA, 19 nt, Artificial Sequence
  Description of Artificial Sequence: Synthetic oligonucleotide
ugagaguccagugucaauc

SEQ ID NO: 3280833 - RNA, 19 nt, Artificial Sequence
  Description of Artificial Sequence: Synthetic oligonucleotide
ucucugagaguccaguguc

SEQ ID NO: 3280834 - RNA, 19 nt, Artificial Sequence
  Description of Artificial Sequence: Synthetic oligonucleotide
aaagggaagaagggacgac

SEQ ID NO: 3280835 - RNA, 19 nt, Artificial Sequence
  Description of Artificial Sequence: Synthetic oligonucleotide
gagaaagggagucuacuuc

SEQ ID NO: 3280836 - RNA, 19 nt, Artificial Sequence
  Description of Artificial Sequence: Synthetic oligonucleotide
gaggucagacuccaacagg

SEQ ID NO: 3280837 - RNA, 19 nt, Artificial Sequence
  Description of Artificial Sequence: Synthetic oligonucleotide
guuuccuugguccauucac

SEQ ID NO: 3280838 - RNA, 19 nt, Artificial Sequence
  Description of Artificial Sequence: Synthetic oligonucleotide
gaaugguacgcucggggcc

SEQ ID NO: 3280839 - RNA, 19 nt, Artificial Sequence
  Description of Artificial Sequence: Synthetic oligonucleotide
uuuccuucacugaugggaa

SEQ ID NO: 3280840 - RNA, 19 nt, Artificial Sequence
  Description of Artificial Sequence: Synthetic oligonucleotide
aguggaaagggaagaaggg

SEQ ID NO: 3280841 - RNA, 19 nt, Artificial Sequence
  Description of Artificial Sequence: Synthetic oligonucleotide
agugacagcaggcuucucu

SEQ ID NO: 3280842 - RNA, 19 nt, Artificial Sequence
  Description of Artificial Sequence: Synthetic oligonucleotide
agggagucuacuucuuagg

SEQ ID NO: 3280843 - RNA, 19 nt, Artificial Sequence
  Description of Artificial Sequence: Synthetic oligonucleotide
uuccuugguccauucacag

SEQ ID NO: 3280844 - RNA, 19 nt, Artificial Sequence
  Description of Artificial Sequence: Synthetic oligonucleotide
aaccacgucuucccagcac

SEQ ID NO: 3280845 - RNA, 19 nt, Artificial Sequence
  Description of Artificial Sequence: Synthetic oligonucleotide
ucacagauuuuccuucacu

SEQ ID NO: 3280846 - RNA, 19 nt, Artificial Sequence
  Description of Artificial Sequence: Synthetic oligonucleotide
auauuuuauuagcuuaaua

SEQ ID NO: 3280847 - RNA, 19 nt, Artificial Sequence
  Description of Artificial Sequence: Synthetic oligonucleotide
ucagaggauccacaucagc

SEQ ID NO: 3280848 - RNA, 19 nt, Artificial Sequence
  Description of Artificial Sequence: Synthetic oligonucleotide
accccaucagaugauaggg

SEQ ID NO: 3280849 - RNA, 19 nt, Artificial Sequence
  Description of Artificial Sequence: Synthetic oligonucleotide
aaaacaaacggcccaaucc

SEQ ID NO: 3280850 - RNA, 19 nt, Artificial Sequence
  Description of Artificial Sequence: Synthetic oligonucleotide
uguucgaaaaugaacaagg

SEQ ID NO: 3280851 - RNA, 19 nt, Artificial Sequence
  Description of Artificial Sequence: Synthetic oligonucleotide
aguugcaggacacagggcc

SEQ ID NO: 3280852 - RNA, 19 nt, Artificial Sequence
  Description of Artificial Sequence: Synthetic oligonucleotide
ucaugaaucgccuugugag

SEQ ID NO: 3280853 - RNA, 19 nt, Artificial Sequence
  Description of Artificial Sequence: Synthetic oligonucleotide
uuuaguucaauauaauguc

SEQ ID NO: 3280854 - RNA, 19 nt, Artificial Sequence
  Description of Artificial Sequence: Synthetic oligonucleotide
aauggaugcuauuauucuc

SEQ ID NO: 3280855 - RNA, 19 nt, Artificial Sequence
  Description of Artificial Sequence: Synthetic oligonucleotide
guaaggggcauccagaucc

SEQ ID NO: 3280856 - RNA, 19 nt, Artificial Sequence
  Description of Artificial Sequence: Synthetic oligonucleotide
aaacaaacggcccaaucca

SEQ ID NO: 3280857 - RNA, 19 nt, Artificial Sequence
  Description of Artificial Sequence: Synthetic oligonucleotide
ucucauccucacuagaugg

SEQ ID NO: 3280858 - RNA, 19 nt, Artificial Sequence
  Description of Artificial Sequence: Synthetic oligonucleotide
uuuauaguagucaggcaug

SEQ ID NO: 3280859 - RNA, 19 nt, Artificial Sequence
  Description of Artificial Sequence: Synthetic oligonucleotide
ucagauagaugacccaagg

SEQ ID NO: 3280860 - RNA, 19 nt, Artificial Sequence
  Description of Artificial Sequence: Synthetic oligonucleotide
aagacggucuucgaagucc

SEQ ID NO: 3280861 - RNA, 19 nt, Artificial Sequence
  Description of Artificial Sequence: Synthetic oligonucleotide
ugagguuuauaguagucag

SEQ ID NO: 3280862 - RNA, 19 nt, Artificial Sequence
  Description of Artificial Sequence: Synthetic oligonucleotide
ucuucgaaguccaacaggu

SEQ ID NO: 3280863 - RNA, 19 nt, Artificial Sequence
  Description of Artificial Sequence: Synthetic oligonucleotide
gcuguuagcacuuaguucc

SEQ ID NO: 3280864 - RNA, 19 nt, Artificial Sequence
  Description of Artificial Sequence: Synthetic oligonucleotide
ucccauuccagguuggugg

SEQ ID NO: 3280865 - RNA, 19 nt, Artificial Sequence
  Description of Artificial Sequence: Synthetic oligonucleotide
auggugagaacuaaggugg

SEQ ID NO: 3280866 - RNA, 19 nt, Artificial Sequence
  Description of Artificial Sequence: Synthetic oligonucleotide
uuaguucaauauaauguca

SEQ ID NO: 3280867 - RNA, 19 nt, Artificial Sequence
  Description of Artificial Sequence: Synthetic oligonucleotide
uauuugagggagaggagag

SEQ ID NO: 3280868 - RNA, 19 nt, Artificial Sequence
  Description of Artificial Sequence: Synthetic oligonucleotide
ucugcuguauuugagggag

SEQ ID NO: 3280869 - RNA, 19 nt, Artificial Sequence
  Description of Artificial Sequence: Synthetic oligonucleotide
agcacuuaguuccaggcag

SEQ ID NO: 3280870 - RNA, 19 nt, Artificial Sequence
  Description of Artificial Sequence: Synthetic oligonucleotide
agauagaugacccaagguu

SEQ ID NO: 3280871 - RNA, 19 nt, Artificial Sequence
  Description of Artificial Sequence: Synthetic oligonucleotide
agggaggucaaccugguag

SEQ ID NO: 3280872 - RNA, 19 nt, Artificial Sequence
  Description of Artificial Sequence: Synthetic oligonucleotide
ugaacagauggugagaacu

SEQ ID NO: 3280873 - RNA, 19 nt, Artificial Sequence
  Description of Artificial Sequence: Synthetic oligonucleotide
aaugaacaaggguggcugg

SEQ ID NO: 3280874 - RNA, 19 nt, Artificial Sequence
  Description of Artificial Sequence: Synthetic oligonucleotide
uuagcacuuaguuccaggc

SEQ ID NO: 3280875 - RNA, 19 nt, Artificial Sequence
  Description of Artificial Sequence: Synthetic oligonucleotide
agugauaacuggguguccc

SEQ ID NO: 3280876 - RNA, 19 nt, Artificial Sequence
  Description of Artificial Sequence: Synthetic oligonucleotide
ugguagauggcuuuccacc

SEQ ID NO: 3280877 - RNA, 19 nt, Artificial Sequence
  Description of Artificial Sequence: Synthetic oligonucleotide
uugcugagcaccacgaagc

SEQ ID NO: 3280878 - RNA, 19 nt, Artificial Sequence
  Description of Artificial Sequence: Synthetic oligonucleotide
uaguucaauauaaugucaa

SEQ ID NO: 3280879 - RNA, 19 nt, Artificial Sequence
  Description of Artificial Sequence: Synthetic oligonucleotide
uaaguaaggggcauccaga

SEQ ID NO: 3280880 - RNA, 19 nt, Artificial Sequence
  Description of Artificial Sequence: Synthetic oligonucleotide
aucgaaagaagcugguuug

SEQ ID NO: 3280881 - RNA, 19 nt, Artificial Sequence
  Description of Artificial Sequence: Synthetic oligonucleotide
caaggucaagaaaagaguc

SEQ ID NO: 3280882 - RNA, 19 nt, Artificial Sequence
  Description of Artificial Sequence: Synthetic oligonucleotide
aacaaggguggcugggcac

SEQ ID NO: 3280883 - RNA, 19 nt, Artificial Sequence
  Description of Artificial Sequence: Synthetic oligonucleotide
uuugaucauggacugggcu

SEQ ID NO: 3280884 - RNA, 19 nt, Artificial Sequence
  Description of Artificial Sequence: Synthetic oligonucleotide
agcccauagaaaugcacac

SEQ ID NO: 3280885 - RNA, 19 nt, Artificial Sequence
  Description of Artificial Sequence: Synthetic oligonucleotide
uuaccaggcagcaagggau

SEQ ID NO: 3280886 - RNA, 19 nt, Artificial Sequence
  Description of Artificial Sequence: Synthetic oligonucleotide
augccucacauuuggauuc

SEQ ID NO: 3280887 - RNA, 19 nt, Artificial Sequence
  Description of Artificial Sequence: Synthetic oligonucleotide
aaccuguccaguucugaag

SEQ ID NO: 3280888 - RNA, 19 nt, Artificial Sequence
  Description of Artificial Sequence: Synthetic oligonucleotide
gagacugucgcuccgcugc

SEQ ID NO: 3280889 - RNA, 19 nt, Artificial Sequence
  Description of Artificial Sequence: Synthetic oligonucleotide
agugcgaucaggauacugg

SEQ ID NO: 3280890 - RNA, 19 nt, Artificial Sequence
  Description of Artificial Sequence: Synthetic oligonucleotide
cuccccuuuaaauggaugc

SEQ ID NO: 3280891 - RNA, 19 nt, Artificial Sequence
  Description of Artificial Sequence: Synthetic oligonucleotide
ugauuaccaggcagcaagg

SEQ ID NO: 3280892 - RNA, 19 nt, Artificial Sequence
  Description of Artificial Sequence: Synthetic oligonucleotide
auggcuuuccacccagagc

SEQ ID NO: 3280893 - RNA, 19 nt, Artificial Sequence
  Description of Artificial Sequence: Synthetic oligonucleotide
agucaggugucaaaguagc

SEQ ID NO: 3280894 - RNA, 19 nt, Artificial Sequence
  Description of Artificial Sequence: Synthetic oligonucleotide
gacacaguacuccuugccc

SEQ ID NO: 3280895 - RNA, 19 nt, Artificial Sequence
  Description of Artificial Sequence: Synthetic oligonucleotide
uucaugaaucgccuuguga

SEQ ID NO: 3280896 - RNA, 19 nt, Artificial Sequence
  Description of Artificial Sequence: Synthetic oligonucleotide
aaaugcacacucacugugg

SEQ ID NO: 3280897 - RNA, 19 nt, Artificial Sequence
  Description of Artificial Sequence: Synthetic oligonucleotide
uguuccuugcccagauacg

SEQ ID NO: 3280898 - RNA, 19 nt, Artificial Sequence
  Description of Artificial Sequence: Synthetic oligonucleotide
agcucugcuguauuugagg

SEQ ID NO: 3280899 - RNA, 19 nt, Artificial Sequence
  Description of Artificial Sequence: Synthetic oligonucleotide
gauuccguugcugagcacc

SEQ ID NO: 3280900 - RNA, 19 nt, Artificial Sequence
  Description of Artificial Sequence: Synthetic oligonucleotide
cagguacugagguuuauag

SEQ ID NO: 3280901 - RNA, 19 nt, Artificial Sequence
  Description of Artificial Sequence: Synthetic oligonucleotide
cuguggaugaggcucagag

SEQ ID NO: 3280902 - RNA, 19 nt, Artificial Sequence
  Description of Artificial Sequence: Synthetic oligonucleotide
guuagcacuuaguuccagg

SEQ ID NO: 3280903 - RNA, 19 nt, Artificial Sequence
  Description of Artificial Sequence: Synthetic oligonucleotide
aggucaagaaaagagucag

SEQ ID NO: 3280904 - RNA, 19 nt, Artificial Sequence
  Description of Artificial Sequence: Synthetic oligonucleotide
cuauuauucucauggccac

SEQ ID NO: 3280905 - RNA, 19 nt, Artificial Sequence
  Description of Artificial Sequence: Synthetic oligonucleotide
gacugagcugggaagacgg

SEQ ID NO: 3280906 - RNA, 19 nt, Artificial Sequence
  Description of Artificial Sequence: Synthetic oligonucleotide
gguuuggcaauccucgugg

SEQ ID NO: 3280907 - RNA, 19 nt, Artificial Sequence
  Description of Artificial Sequence: Synthetic oligonucleotide
cagaggacugcuaugugag

SEQ ID NO: 3280908 - RNA, 19 nt, Artificial Sequence
  Description of Artificial Sequence: Synthetic oligonucleotide
uugcaaagagccuccuggg

SEQ ID NO: 3280909 - RNA, 19 nt, Artificial Sequence
  Description of Artificial Sequence: Synthetic oligonucleotide
ucucgcuugagcuugcaaa

SEQ ID NO: 3280910 - RNA, 19 nt, Artificial Sequence
  Description of Artificial Sequence: Synthetic oligonucleotide
aauuuggcuagugccaacu

SEQ ID NO: 3280911 - RNA, 19 nt, Artificial Sequence
  Description of Artificial Sequence: Synthetic oligonucleotide
gaaagaagcugguuuggca

SEQ ID NO: 3280912 - RNA, 19 nt, Artificial Sequence
  Description of Artificial Sequence: Synthetic oligonucleotide
aaguaaggggcauccagau

SEQ ID NO: 3280913 - RNA, 19 nt, Artificial Sequence
  Description of Artificial Sequence: Synthetic oligonucleotide
agaguugaaggaguugagg

SEQ ID NO: 3280914 - RNA, 19 nt, Artificial Sequence
  Description of Artificial Sequence: Synthetic oligonucleotide
ugagccauggacugagcug

SEQ ID NO: 3280915 - RNA, 19 nt, Artificial Sequence
  Description of Artificial Sequence: Synthetic oligonucleotide
augaaucgccuugugaggg

SEQ ID NO: 3280916 - RNA, 19 nt, Artificial Sequence
  Description of Artificial Sequence: Synthetic oligonucleotide
gacuccuuuggacacugcc

SEQ ID NO: 3280917 - RNA, 19 nt, Artificial Sequence
  Description of Artificial Sequence: Synthetic oligonucleotide
augucagccagccuggcca

SEQ ID NO: 3280918 - RNA, 19 nt, Artificial Sequence
  Description of Artificial Sequence: Synthetic oligonucleotide
uauccugggagaacuccag

SEQ ID NO: 3280919 - RNA, 19 nt, Artificial Sequence
  Description of Artificial Sequence: Synthetic oligonucleotide
guucgaaaaugaacaaggg

SEQ ID NO: 3280920 - RNA, 19 nt, Artificial Sequence
  Description of Artificial Sequence: Synthetic oligonucleotide
gucuucgaaguccaacagg

SEQ ID NO: 3280921 - RNA, 19 nt, Artificial Sequence
  Description of Artificial Sequence: Synthetic oligonucleotide
gguacacccacccuacugg

SEQ ID NO: 3280922 - RNA, 19 nt, Artificial Sequence
  Description of Artificial Sequence: Synthetic oligonucleotide
accuaacagagacuucagg

SEQ ID NO: 3280923 - RNA, 19 nt, Artificial Sequence
  Description of Artificial Sequence: Synthetic oligonucleotide
auuaccaggcagcaaggga

SEQ ID NO: 3280924 - RNA, 19 nt, Artificial Sequence
  Description of Artificial Sequence: Synthetic oligonucleotide
cucgcuugagcuugcaaag

SEQ ID NO: 3280925 - RNA, 19 nt, Artificial Sequence
  Description of Artificial Sequence: Synthetic oligonucleotide
acagaggacugcuauguga

SEQ ID NO: 3280926 - RNA, 19 nt, Artificial Sequence
  Description of Artificial Sequence: Synthetic oligonucleotide
accagugauaacugggugu

SEQ ID NO: 3280927 - RNA, 19 nt, Artificial Sequence
  Description of Artificial Sequence: Synthetic oligonucleotide
gagguuuauaguagucagg

SEQ ID NO: 3280928 - RNA, 19 nt, Artificial Sequence
  Description of Artificial Sequence: Synthetic oligonucleotide
aagcccauagaaaugcaca

SEQ ID NO: 3280929 - RNA, 19 nt, Artificial Sequence
  Description of Artificial Sequence: Synthetic oligonucleotide
gugcagcucagauagauga

SEQ ID NO: 3280930 - RNA, 19 nt, Artificial Sequence
  Description of Artificial Sequence: Synthetic oligonucleotide
aaggucaagaaaagaguca

SEQ ID NO: 3280931 - RNA, 19 nt, Artificial Sequence
  Description of Artificial Sequence: Synthetic oligonucleotide
gaucaggauacugguagag

SEQ ID NO: 3280932 - RNA, 19 nt, Artificial Sequence
  Description of Artificial Sequence: Synthetic oligonucleotide
gcaaggagccaacugaucc

SEQ ID NO: 3280933 - RNA, 19 nt, Artificial Sequence
  Description of Artificial Sequence: Synthetic oligonucleotide
cucauccucacuagauggg

SEQ ID NO: 3280934 - RNA, 19 nt, Artificial Sequence
  Description of Artificial Sequence: Synthetic oligonucleotide
ucgaaagaagcugguuugg

SEQ ID NO: 3280935 - RNA, 19 nt, Artificial Sequence
  Description of Artificial Sequence: Synthetic oligonucleotide
guguuccuugcccagauac

SEQ ID NO: 3280936 - RNA, 19 nt, Artificial Sequence
  Description of Artificial Sequence: Synthetic oligonucleotide
ugagaugccggucucucau

SEQ ID NO: 3280937 - RNA, 19 nt, Artificial Sequence
  Description of Artificial Sequence: Synthetic oligonucleotide
ugguacacccacccuacug

SEQ ID NO: 3280938 - RNA, 19 nt, Artificial Sequence
  Description of Artificial Sequence: Synthetic oligonucleotide
cuugugagggaggucaacc

SEQ ID NO: 3280939 - RNA, 19 nt, Artificial Sequence
  Description of Artificial Sequence: Synthetic oligonucleotide
caaggagccaacugauccc

SEQ ID NO: 3280940 - RNA, 19 nt, Artificial Sequence
  Description of Artificial Sequence: Synthetic oligonucleotide
gcgaucaggauacugguag

SEQ ID NO: 3280941 - RNA, 19 nt, Artificial Sequence
  Description of Artificial Sequence: Synthetic oligonucleotide
ucuagucacucuguggaca

SEQ ID NO: 3280942 - RNA, 19 nt, Artificial Sequence
  Description of Artificial Sequence: Synthetic oligonucleotide
caggucgaagcgaauaaac

SEQ ID NO: 3280943 - RNA, 19 nt, Artificial Sequence
  Description of Artificial Sequence: Synthetic oligonucleotide
uguuggaucuccggcagcc

SEQ ID NO: 3280944 - RNA, 19 nt, Artificial Sequence
  Description of Artificial Sequence: Synthetic oligonucleotide
ugguuuggcaauccucgug

SEQ ID NO: 3280945 - RNA, 19 nt, Artificial Sequence
  Description of Artificial Sequence: Synthetic oligonucleotide
uccgcugccaggcacugug

SEQ ID NO: 3280946 - RNA, 19 nt, Artificial Sequence
  Description of Artificial Sequence: Synthetic oligonucleotide
gauuaccaggcagcaaggg

SEQ ID NO: 3280947 - RNA, 19 nt, Artificial Sequence
  Description of Artificial Sequence: Synthetic oligonucleotide
uuuggcaauccucguggca

SEQ ID NO: 3280948 - RNA, 19 nt, Artificial Sequence
  Description of Artificial Sequence: Synthetic oligonucleotide
gauacugguagaggauucc

SEQ ID NO: 3280949 - RNA, 19 nt, Artificial Sequence
  Description of Artificial Sequence: Synthetic oligonucleotide
auucucuugaacuugguuc

SEQ ID NO: 3280950 - RNA, 19 nt, Artificial Sequence
  Description of Artificial Sequence: Synthetic oligonucleotide
uucucuugaacuugguucg

SEQ ID NO: 3280951 - RNA, 19 nt, Artificial Sequence
  Description of Artificial Sequence: Synthetic oligonucleotide
augagggaguccuagggcc

SEQ ID NO: 3280952 - RNA, 19 nt, Artificial Sequence
  Description of Artificial Sequence: Synthetic oligonucleotide
uuugucauccauugggugc

SEQ ID NO: 3280953 - RNA, 19 nt, Artificial Sequence
  Description of Artificial Sequence: Synthetic oligonucleotide
uugccuauucucuugaacu

SEQ ID NO: 3280954 - RNA, 19 nt, Artificial Sequence
  Description of Artificial Sequence: Synthetic oligonucleotide
auugggugcuuguuggacc

SEQ ID NO: 3280955 - RNA, 19 nt, Artificial Sequence
  Description of Artificial Sequence: Synthetic oligonucleotide
ugcuuguuggaccucaggc

SEQ ID NO: 3280956 - RNA, 19 nt, Artificial Sequence
  Description of Artificial Sequence: Synthetic oligonucleotide
uccaccuccagccagcacc

SEQ ID NO: 3280957 - RNA, 19 nt, Artificial Sequence
  Description of Artificial Sequence: Synthetic oligonucleotide
uccauugggugcuuguugg

SEQ ID NO: 3280958 - RNA, 19 nt, Artificial Sequence
  Description of Artificial Sequence: Synthetic oligonucleotide
uccguagugugccugaggc

SEQ ID NO: 3280959 - RNA, 19 nt, Artificial Sequence
  Description of Artificial Sequence: Synthetic oligonucleotide
agaugagggaguccuaggg

SEQ ID NO: 3280960 - RNA, 19 nt, Artificial Sequence
  Description of Artificial Sequence: Synthetic oligonucleotide
aguccuagggccaaggaac

SEQ ID NO: 3280961 - RNA, 19 nt, Artificial Sequence
  Description of Artificial Sequence: Synthetic oligonucleotide
ugcugguugggccaggcag

SEQ ID NO: 3280962 - RNA, 19 nt, Artificial Sequence
  Description of Artificial Sequence: Synthetic oligonucleotide
ugggugauggcagaugagg

SEQ ID NO: 3280963 - RNA, 19 nt, Artificial Sequence
  Description of Artificial Sequence: Synthetic oligonucleotide
uuuugucauccauugggug

SEQ ID NO: 3280964 - RNA, 19 nt, Artificial Sequence
  Description of Artificial Sequence: Synthetic oligonucleotide
caaggaaccacuguggcug

SEQ ID NO: 3280965 - RNA, 19 nt, Artificial Sequence
  Description of Artificial Sequence: Synthetic oligonucleotide
gaugagggaguccuagggc

SEQ ID NO: 3280966 - RNA, 19 nt, Artificial Sequence
  Description of Artificial Sequence: Synthetic oligonucleotide
uucuccuugccuauucucu

SEQ ID NO: 3280967 - RNA, 19 nt, Artificial Sequence
  Description of Artificial Sequence: Synthetic oligonucleotide
cuugaacuugguucgcugc

SEQ ID NO: 3280968 - RNA, 19 nt, Artificial Sequence
  Description of Artificial Sequence: Synthetic oligonucleotide
aacuugguucgcugcuugg

SEQ ID NO: 3280969 - RNA, 19 nt, Artificial Sequence
  Description of Artificial Sequence: Synthetic oligonucleotide
uucgcugcuugggugaugg

SEQ ID NO: 3280970 - RNA, 19 nt, Artificial Sequence
  Description of Artificial Sequence: Synthetic oligonucleotide
ucuugaacuugguucgcug

SEQ ID NO: 3280971 - RNA, 19 nt, Artificial Sequence
  Description of Artificial Sequence: Synthetic oligonucleotide
uuuaggacuccguuucuuc

SEQ ID NO: 3280972 - RNA, 19 nt, Artificial Sequence
  Description of Artificial Sequence: Synthetic oligonucleotide
ugugccugaggccugugcu

SEQ ID NO: 3280973 - RNA, 19 nt, Artificial Sequence
  Description of Artificial Sequence: Synthetic oligonucleotide
gaaccacuguggcuggugg

SEQ ID NO: 3280974 - RNA, 19 nt, Artificial Sequence
  Description of Artificial Sequence: Synthetic oligonucleotide
uugaacuugguucgcugcu

SEQ ID NO: 3280975 - RNA, 19 nt, Artificial Sequence
  Description of Artificial Sequence: Synthetic oligonucleotide
aaccacuguggcugguggg

SEQ ID NO: 3280976 - RNA, 19 nt, Artificial Sequence
  Description of Artificial Sequence: Synthetic oligonucleotide
uuaggacuccguuucuucu

SEQ ID NO: 3280977 - RNA, 19 nt, Artificial Sequence
  Description of Artificial Sequence: Synthetic oligonucleotide
uauucucuugaacuugguu

SEQ ID NO: 3280978 - RNA, 19 nt, Artificial Sequence
  Description of Artificial Sequence: Synthetic oligonucleotide
aaggaaccacuguggcugg

SEQ ID NO: 3280979 - RNA, 19 nt, Artificial Sequence
  Description of Artificial Sequence: Synthetic oligonucleotide
cuugccuauucucuugaac

SEQ ID NO: 3280980 - RNA, 19 nt, Artificial Sequence
  Description of Artificial Sequence: Synthetic oligonucleotide
gugauggcagaugagggag

SEQ ID NO: 3280981 - RNA, 19 nt, Artificial Sequence
  Description of Artificial Sequence: Synthetic oligonucleotide
accacuguggcuggugggc

SEQ ID NO: 3280982 - RNA, 19 nt, Artificial Sequence
  Description of Artificial Sequence: Synthetic oligonucleotide
ucggcauuucuccuugccu

SEQ ID NO: 3280983 - RNA, 19 nt, Artificial Sequence
  Description of Artificial Sequence: Synthetic oligonucleotide
auccauugggugcuuguug

SEQ ID NO: 3280984 - RNA, 19 nt, Artificial Sequence
  Description of Artificial Sequence: Synthetic oligonucleotide
guggcuggugggcacaggg

SEQ ID NO: 3280985 - RNA, 19 nt, Artificial Sequence
  Description of Artificial Sequence: Synthetic oligonucleotide
gaacuugguucgcugcuug

SEQ ID NO: 3280986 - RNA, 19 nt, Artificial Sequence
  Description of Artificial Sequence: Synthetic oligonucleotide
uugguucgcugcuugggug

SEQ ID NO: 3280987 - RNA, 19 nt, Artificial Sequence
  Description of Artificial Sequence: Synthetic oligonucleotide
uuucuccuugccuauucuc

SEQ ID NO: 3280988 - RNA, 19 nt, Artificial Sequence
  Description of Artificial Sequence: Synthetic oligonucleotide
uugggugcuuguuggaccu

SEQ ID NO: 3280989 - RNA, 19 nt, Artificial Sequence
  Description of Artificial Sequence: Synthetic oligonucleotide
uugucauccauugggugcu

SEQ ID NO: 3280990 - RNA, 19 nt, Artificial Sequence
  Description of Artificial Sequence: Synthetic oligonucleotide
ccuauucucuugaacuugg

SEQ ID NO: 3280991 - RNA, 19 nt, Artificial Sequence
  Description of Artificial Sequence: Synthetic oligonucleotide
uccuugccuauucucuuga

SEQ ID NO: 3280992 - RNA, 19 nt, Artificial Sequence
  Description of Artificial Sequence: Synthetic oligonucleotide
ugggcacagggacucuccg

SEQ ID NO: 3280993 - RNA, 19 nt, Artificial Sequence
  Description of Artificial Sequence: Synthetic oligonucleotide
acuugguucgcugcuuggg

SEQ ID NO: 3280994 - RNA, 19 nt, Artificial Sequence
  Description of Artificial Sequence: Synthetic oligonucleotide
ugaggccugugcugguugg

SEQ ID NO: 3280995 - RNA, 19 nt, Artificial Sequence
  Description of Artificial Sequence: Synthetic oligonucleotide
auuucuccuugccuauucu

SEQ ID NO: 3280996 - RNA, 19 nt, Artificial Sequence
  Description of Artificial Sequence: Synthetic oligonucleotide
uggcagaugagggaguccu

SEQ ID NO: 3280997 - RNA, 19 nt, Artificial Sequence
  Description of Artificial Sequence: Synthetic oligonucleotide
uugggugauggcagaugag

SEQ ID NO: 3280998 - RNA, 19 nt, Artificial Sequence
  Description of Artificial Sequence: Synthetic oligonucleotide
cuugggugauggcagauga

SEQ ID NO: 3280999 - RNA, 19 nt, Artificial Sequence
  Description of Artificial Sequence: Synthetic oligonucleotide
ugagggaguccuagggcca

SEQ ID NO: 3281000 - RNA, 19 nt, Artificial Sequence
  Description of Artificial Sequence: Synthetic oligonucleotide
ucauccauugggugcuugu

SEQ ID NO: 3281001 - RNA, 19 nt, Artificial Sequence
  Description of Artificial Sequence: Synthetic oligonucleotide
cagaugagggaguccuagg

SEQ ID NO: 3281002 - RNA, 19 nt, Artificial Sequence
  Description of Artificial Sequence: Synthetic oligonucleotide
agggacucuccguagugug

SEQ ID NO: 3281003 - RNA, 19 nt, Artificial Sequence
  Description of Artificial Sequence: Synthetic oligonucleotide
gcuuguuggaccucaggcc

SEQ ID NO: 3281004 - RNA, 19 nt, Artificial Sequence
  Description of Artificial Sequence: Synthetic oligonucleotide
uguuggaccucaggccugg

SEQ ID NO: 3281005 - RNA, 19 nt, Artificial Sequence
  Description of Artificial Sequence: Synthetic oligonucleotide
ugccugaggccugugcugg

SEQ ID NO: 3281006 - RNA, 19 nt, Artificial Sequence
  Description of Artificial Sequence: Synthetic oligonucleotide
cauuucuccuugccuauuc

SEQ ID NO: 3281007 - RNA, 19 nt, Artificial Sequence
  Description of Artificial Sequence: Synthetic oligonucleotide
ugguucgcugcuuggguga

SEQ ID NO: 3281008 - RNA, 19 nt, Artificial Sequence
  Description of Artificial Sequence: Synthetic oligonucleotide
acagggacucuccguagug

SEQ ID NO: 3281009 - RNA, 19 nt, Artificial Sequence
  Description of Artificial Sequence: Synthetic oligonucleotide
caccggucggcauuucucc

SEQ ID NO: 3281010 - RNA, 19 nt, Artificial Sequence
  Description of Artificial Sequence: Synthetic oligonucleotide
ggcuuuaggacuccguuuc

SEQ ID NO: 3281011 - RNA, 19 nt, Artificial Sequence
  Description of Artificial Sequence: Synthetic oligonucleotide
ugccuauucucuugaacuu

SEQ ID NO: 3281012 - RNA, 19 nt, Artificial Sequence
  Description of Artificial Sequence: Synthetic oligonucleotide
uuguuggaccucaggccug

SEQ ID NO: 3281013 - RNA, 19 nt, Artificial Sequence
  Description of Artificial Sequence: Synthetic oligonucleotide
gaguccuagggccaaggaa

SEQ ID NO: 3281014 - RNA, 19 nt, Artificial Sequence
  Description of Artificial Sequence: Synthetic oligonucleotide
ugauggcagaugagggagu

SEQ ID NO: 3281015 - RNA, 19 nt, Artificial Sequence
  Description of Artificial Sequence: Synthetic oligonucleotide
agggcuuuaggacuccguu

SEQ ID NO: 3281016 - RNA, 19 nt, Artificial Sequence
  Description of Artificial Sequence: Synthetic oligonucleotide
gucggcauuucuccuugcc

SEQ ID NO: 3281017 - RNA, 19 nt, Artificial Sequence
  Description of Artificial Sequence: Synthetic oligonucleotide
gugcuuguuggaccucagg

SEQ ID NO: 3281018 - RNA, 19 nt, Artificial Sequence
  Description of Artificial Sequence: Synthetic oligonucleotide
cuuguuggaccucaggccu

SEQ ID NO: 3281019 - RNA, 19 nt, Artificial Sequence
  Description of Artificial Sequence: Synthetic oligonucleotide
auggcagaugagggagucc

SEQ ID NO: 3281020 - RNA, 19 nt, Artificial Sequence
  Description of Artificial Sequence: Synthetic oligonucleotide
ucuccuugccuauucucuu

SEQ ID NO: 3281021 - RNA, 19 nt, Artificial Sequence
  Description of Artificial Sequence: Synthetic oligonucleotide
uagggccaaggaaccacug

SEQ ID NO: 3281022 - RNA, 19 nt, Artificial Sequence
  Description of Artificial Sequence: Synthetic oligonucleotide
gauggcagaugagggaguc

SEQ ID NO: 3281023 - RNA, 19 nt, Artificial Sequence
  Description of Artificial Sequence: Synthetic oligonucleotide
cauugggugcuuguuggac

SEQ ID NO: 3281024 - RNA, 19 nt, Artificial Sequence
  Description of Artificial Sequence: Synthetic oligonucleotide
gggccaaggaaccacugug

SEQ ID NO: 3281025 - RNA, 19 nt, Artificial Sequence
  Description of Artificial Sequence: Synthetic oligonucleotide
cuccuugccuauucucuug

SEQ ID NO: 3281026 - RNA, 19 nt, Artificial Sequence
  Description of Artificial Sequence: Synthetic oligonucleotide
aggccugugcugguugggc

SEQ ID NO: 3281027 - RNA, 19 nt, Artificial Sequence
  Description of Artificial Sequence: Synthetic oligonucleotide
agggccaaggaaccacugu

SEQ ID NO: 3281028 - RNA, 19 nt, Artificial Sequence
  Description of Artificial Sequence: Synthetic oligonucleotide
gggugauggcagaugaggg

SEQ ID NO: 3281029 - RNA, 19 nt, Artificial Sequence
  Description of Artificial Sequence: Synthetic oligonucleotide
gccgccuccaccuccagcc

SEQ ID NO: 3281030 - RNA, 19 nt, Artificial Sequence
  Description of Artificial Sequence: Synthetic oligonucleotide
uaggacuccguuucuucuu

SEQ ID NO: 3281031 - RNA, 19 nt, Artificial Sequence
  Description of Artificial Sequence: Synthetic oligonucleotide
uccagccagcaccggucgg

SEQ ID NO: 3281032 - RNA, 19 nt, Artificial Sequence
  Description of Artificial Sequence: Synthetic oligonucleotide
ucucuugaacuugguucgc

SEQ ID NO: 3281033 - RNA, 19 nt, Artificial Sequence
  Description of Artificial Sequence: Synthetic oligonucleotide
ggugauggcagaugaggga

SEQ ID NO: 3281034 - RNA, 19 nt, Artificial Sequence
  Description of Artificial Sequence: Synthetic oligonucleotide
gcugcuugggugauggcag

SEQ ID NO: 3281035 - RNA, 19 nt, Artificial Sequence
  Description of Artificial Sequence: Synthetic oligonucleotide
cuccagccagcaccggucg

SEQ ID NO: 3281036 - RNA, 19 nt, Artificial Sequence
  Description of Artificial Sequence: Synthetic oligonucleotide
agccgccuccaccuccagc

SEQ ID NO: 3281037 - RNA, 19 nt, Artificial Sequence
  Description of Artificial Sequence: Synthetic oligonucleotide
gccaaggaaccacuguggc

SEQ ID NO: 3281038 - RNA, 19 nt, Artificial Sequence
  Description of Artificial Sequence: Synthetic oligonucleotide
cuccguagugugccugagg

SEQ ID NO: 3281039 - RNA, 19 nt, Artificial Sequence
  Description of Artificial Sequence: Synthetic oligonucleotide
uggcuggugggcacaggga

SEQ ID NO: 3281040 - RNA, 19 nt, Artificial Sequence
  Description of Artificial Sequence: Synthetic oligonucleotide
ccaggcagggcuuuaggac

SEQ ID NO: 3281041 - RNA, 19 nt, Artificial Sequence
  Description of Artificial Sequence: Synthetic oligonucleotide
ggccaaggaaccacugugg

SEQ ID NO: 3281042 - RNA, 19 nt, Artificial Sequence
  Description of Artificial Sequence: Synthetic oligonucleotide
gcagaugagggaguccuag

SEQ ID NO: 3281043 - RNA, 19 nt, Artificial Sequence
  Description of Artificial Sequence: Synthetic oligonucleotide
ugugcugguugggccaggc

SEQ ID NO: 3281044 - RNA, 19 nt, Artificial Sequence
  Description of Artificial Sequence: Synthetic oligonucleotide
ugaacuugguucgcugcuu

SEQ ID NO: 3281045 - RNA, 19 nt, Artificial Sequence
  Description of Artificial Sequence: Synthetic oligonucleotide
aggacuccguuucuucuuu

SEQ ID NO: 3281046 - RNA, 19 nt, Artificial Sequence
  Description of Artificial Sequence: Synthetic oligonucleotide
gugccugaggccugugcug

SEQ ID NO: 3281047 - RNA, 19 nt, Artificial Sequence
  Description of Artificial Sequence: Synthetic oligonucleotide
ucuccguagugugccugag

SEQ ID NO: 3281048 - RNA, 19 nt, Artificial Sequence
  Description of Artificial Sequence: Synthetic oligonucleotide
accuccagccagcaccggu

SEQ ID NO: 3281049 - RNA, 19 nt, Artificial Sequence
  Description of Artificial Sequence: Synthetic oligonucleotide
aaugccuuugauuaaacug

SEQ ID NO: 3281050 - RNA, 19 nt, Artificial Sequence
  Description of Artificial Sequence: Synthetic oligonucleotide
uaccaaaugagaaacaucu

SEQ ID NO: 3281051 - RNA, 19 nt, Artificial Sequence
  Description of Artificial Sequence: Synthetic oligonucleotide
augucuuccaaacuagugc

SEQ ID NO: 3281052 - RNA, 19 nt, Artificial Sequence
  Description of Artificial Sequence: Synthetic oligonucleotide
aaacaucuguguuucuugc

SEQ ID NO: 3281053 - RNA, 19 nt, Artificial Sequence
  Description of Artificial Sequence: Synthetic oligonucleotide
agaaguucccauucgacac

SEQ ID NO: 3281054 - RNA, 19 nt, Artificial Sequence
  Description of Artificial Sequence: Synthetic oligonucleotide
uucuccaauaccaaaugag

SEQ ID NO: 3281055 - RNA, 19 nt, Artificial Sequence
  Description of Artificial Sequence: Synthetic oligonucleotide
uuggcaugcagccagagca

SEQ ID NO: 3281056 - RNA, 19 nt, Artificial Sequence
  Description of Artificial Sequence: Synthetic oligonucleotide
aaaugagaaacaucugugu

SEQ ID NO: 3281057 - RNA, 19 nt, Artificial Sequence
  Description of Artificial Sequence: Synthetic oligonucleotide
uuugccauuggcaugcagc

SEQ ID NO: 3281058 - RNA, 19 nt, Artificial Sequence
  Description of Artificial Sequence: Synthetic oligonucleotide
caaacuagugcccagaauc

SEQ ID NO: 3281059 - RNA, 19 nt, Artificial Sequence
  Description of Artificial Sequence: Synthetic oligonucleotide
agugugauaaacucugcag

SEQ ID NO: 3281060 - RNA, 19 nt, Artificial Sequence
  Description of Artificial Sequence: Synthetic oligonucleotide
gacacuucaagucuuugcc

SEQ ID NO: 3281061 - RNA, 19 nt, Artificial Sequence
  Description of Artificial Sequence: Synthetic oligonucleotide
uggagugugauaaacucug

SEQ ID NO: 3281062 - RNA, 19 nt, Artificial Sequence
  Description of Artificial Sequence: Synthetic oligonucleotide
ugugauaaacucugcagug

SEQ ID NO: 3281063 - RNA, 19 nt, Artificial Sequence
  Description of Artificial Sequence: Synthetic oligonucleotide
ugauaaacucugcagugcc

SEQ ID NO: 3281064 - RNA, 19 nt, Artificial Sequence
  Description of Artificial Sequence: Synthetic oligonucleotide
ucuccaauaccaaaugaga

SEQ ID NO: 3281065 - RNA, 19 nt, Artificial Sequence
  Description of Artificial Sequence: Synthetic oligonucleotide
ugucuuccaaacuagugcc

SEQ ID NO: 3281066 - RNA, 19 nt, Artificial Sequence
  Description of Artificial Sequence: Synthetic oligonucleotide
uuugauuaaacugguggag

SEQ ID NO: 3281067 - RNA, 19 nt, Artificial Sequence
  Description of Artificial Sequence: Synthetic oligonucleotide
cagaaucuuagucaguucc

SEQ ID NO: 3281068 - RNA, 19 nt, Artificial Sequence
  Description of Artificial Sequence: Synthetic oligonucleotide
auaaacucugcagugcccc

SEQ ID NO: 3281069 - RNA, 19 nt, Artificial Sequence
  Description of Artificial Sequence: Synthetic oligonucleotide
caaaugagaaacaucugug

SEQ ID NO: 3281070 - RNA, 19 nt, Artificial Sequence
  Description of Artificial Sequence: Synthetic oligonucleotide
aaugagaaacaucuguguu

SEQ ID NO: 3281071 - RNA, 19 nt, Artificial Sequence
  Description of Artificial Sequence: Synthetic oligonucleotide
aauaccaaaugagaaacau

SEQ ID NO: 3281072 - RNA, 19 nt, Artificial Sequence
  Description of Artificial Sequence: Synthetic oligonucleotide
uugauuaaacugguggagg

SEQ ID NO: 3281073 - RNA, 19 nt, Artificial Sequence
  Description of Artificial Sequence: Synthetic oligonucleotide
uuuggagugugauaaacuc

SEQ ID NO: 3281074 - RNA, 19 nt, Artificial Sequence
  Description of Artificial Sequence: Synthetic oligonucleotide
uucaugucuuccaaacuag

SEQ ID NO: 3281075 - RNA, 19 nt, Artificial Sequence
  Description of Artificial Sequence: Synthetic oligonucleotide
aagucuuugccauuggcau

SEQ ID NO: 3281076 - RNA, 19 nt, Artificial Sequence
  Description of Artificial Sequence: Synthetic oligonucleotide
ugauuaaacugguggaggc

SEQ ID NO: 3281077 - RNA, 19 nt, Artificial Sequence
  Description of Artificial Sequence: Synthetic oligonucleotide
ucauccagcucccaggagc

SEQ ID NO: 3281078 - RNA, 19 nt, Artificial Sequence
  Description of Artificial Sequence: Synthetic oligonucleotide
agugcccagaaucuuaguc

SEQ ID NO: 3281079 - RNA, 19 nt, Artificial Sequence
  Description of Artificial Sequence: Synthetic oligonucleotide
gaaacaucuguguuucuug

SEQ ID NO: 3281080 - RNA, 19 nt, Artificial Sequence
  Description of Artificial Sequence: Synthetic oligonucleotide
augccuuugauuaaacugg

SEQ ID NO: 3281081 - RNA, 19 nt, Artificial Sequence
  Description of Artificial Sequence: Synthetic oligonucleotide
agagccagcacuguugccc

SEQ ID NO: 3281082 - RNA, 19 nt, Artificial Sequence
  Description of Artificial Sequence: Synthetic oligonucleotide
uuuuggagugugauaaacu

SEQ ID NO: 3281083 - RNA, 19 nt, Artificial Sequence
  Description of Artificial Sequence: Synthetic oligonucleotide
cuuagucaguuccucaucc

SEQ ID NO: 3281084 - RNA, 19 nt, Artificial Sequence
  Description of Artificial Sequence: Synthetic oligonucleotide
agcacuguugcccaggcug

SEQ ID NO: 3281085 - RNA, 19 nt, Artificial Sequence
  Description of Artificial Sequence: Synthetic oligonucleotide
ucccauucgacacuucaag

SEQ ID NO: 3281086 - RNA, 19 nt, Artificial Sequence
  Description of Artificial Sequence: Synthetic oligonucleotide
ccuuugauuaaacuggugg

SEQ ID NO: 3281087 - RNA, 19 nt, Artificial Sequence
  Description of Artificial Sequence: Synthetic oligonucleotide
uccaauaccaaaugagaaa

SEQ ID NO: 3281088 - RNA, 19 nt, Artificial Sequence
  Description of Artificial Sequence: Synthetic oligonucleotide
aaucuuagucaguuccuca

SEQ ID NO: 3281089 - RNA, 19 nt, Artificial Sequence
  Description of Artificial Sequence: Synthetic oligonucleotide
auuaaacugguggaggcuc

SEQ ID NO: 3281090 - RNA, 19 nt, Artificial Sequence
  Description of Artificial Sequence: Synthetic oligonucleotide
agccauuugccuuuuggag

SEQ ID NO: 3281091 - RNA, 19 nt, Artificial Sequence
  Description of Artificial Sequence: Synthetic oligonucleotide
uagucaguuccucauccag

SEQ ID NO: 3281092 - RNA, 19 nt, Artificial Sequence
  Description of Artificial Sequence: Synthetic oligonucleotide
auuggcaugcagccagagc

SEQ ID NO: 3281093 - RNA, 19 nt, Artificial Sequence
  Description of Artificial Sequence: Synthetic oligonucleotide
augcagccagagcagagcc

SEQ ID NO: 3281094 - RNA, 19 nt, Artificial Sequence
  Description of Artificial Sequence: Synthetic oligonucleotide
uuuccagaaguucccauuc

SEQ ID NO: 3281095 - RNA, 19 nt, Artificial Sequence
  Description of Artificial Sequence: Synthetic oligonucleotide
aacugguggaggcuccuuc

SEQ ID NO: 3281096 - RNA, 19 nt, Artificial Sequence
  Description of Artificial Sequence: Synthetic oligonucleotide
ugagaaacaucuguguuuc

SEQ ID NO: 3281097 - RNA, 19 nt, Artificial Sequence
  Description of Artificial Sequence: Synthetic oligonucleotide
ucaagucuuugccauuggc

SEQ ID NO: 3281098 - RNA, 19 nt, Artificial Sequence
  Description of Artificial Sequence: Synthetic oligonucleotide
cuuugauuaaacuggugga

SEQ ID NO: 3281099 - RNA, 19 nt, Artificial Sequence
  Description of Artificial Sequence: Synthetic oligonucleotide
ugcccagaaucuuagucag

SEQ ID NO: 3281100 - RNA, 19 nt, Artificial Sequence
  Description of Artificial Sequence: Synthetic oligonucleotide
uccuucaugucuuccaaac

SEQ ID NO: 3281101 - RNA, 19 nt, Artificial Sequence
  Description of Artificial Sequence: Synthetic oligonucleotide
uccucauccagcucccagg

SEQ ID NO: 3281102 - RNA, 19 nt, Artificial Sequence
  Description of Artificial Sequence: Synthetic oligonucleotide
uuggagugugauaaacucu

SEQ ID NO: 3281103 - RNA, 19 nt, Artificial Sequence
  Description of Artificial Sequence: Synthetic oligonucleotide
uugccauuggcaugcagcc

SEQ ID NO: 3281104 - RNA, 19 nt, Artificial Sequence
  Description of Artificial Sequence: Synthetic oligonucleotide
cuuggcaggauuugccucc

SEQ ID NO: 3281105 - RNA, 19 nt, Artificial Sequence
  Description of Artificial Sequence: Synthetic oligonucleotide
uuccagaaguucccauucg

SEQ ID NO: 3281106 - RNA, 19 nt, Artificial Sequence
  Description of Artificial Sequence: Synthetic oligonucleotide
ugagggauccugauccuug

SEQ ID NO: 3281107 - RNA, 19 nt, Artificial Sequence
  Description of Artificial Sequence: Synthetic oligonucleotide
caugucuuccaaacuagug

SEQ ID NO: 3281108 - RNA, 19 nt, Artificial Sequence
  Description of Artificial Sequence: Synthetic oligonucleotide
caguuccucauccagcucc

SEQ ID NO: 3281109 - RNA, 19 nt, Artificial Sequence
  Description of Artificial Sequence: Synthetic oligonucleotide
uuaaacugguggaggcucc

SEQ ID NO: 3281110 - RNA, 19 nt, Artificial Sequence
  Description of Artificial Sequence: Synthetic oligonucleotide
gauccugauccuuggcagg

SEQ ID NO: 3281111 - RNA, 19 nt, Artificial Sequence
  Description of Artificial Sequence: Synthetic oligonucleotide
aacaucuguguuucuugcu

SEQ ID NO: 3281112 - RNA, 19 nt, Artificial Sequence
  Description of Artificial Sequence: Synthetic oligonucleotide
uccuucuccaauaccaaau

SEQ ID NO: 3281113 - RNA, 19 nt, Artificial Sequence
  Description of Artificial Sequence: Synthetic oligonucleotide
uccagaaguucccauucga

SEQ ID NO: 3281114 - RNA, 19 nt, Artificial Sequence
  Description of Artificial Sequence: Synthetic oligonucleotide
augagaaacaucuguguuu

SEQ ID NO: 3281115 - RNA, 19 nt, Artificial Sequence
  Description of Artificial Sequence: Synthetic oligonucleotide
uucaagucuuugccauugg

SEQ ID NO: 3281116 - RNA, 19 nt, Artificial Sequence
  Description of Artificial Sequence: Synthetic oligonucleotide
aaacuagugcccagaaucu

SEQ ID NO: 3281117 - RNA, 19 nt, Artificial Sequence
  Description of Artificial Sequence: Synthetic oligonucleotide
agucaguuccucauccagc

SEQ ID NO: 3281118 - RNA, 19 nt, Artificial Sequence
  Description of Artificial Sequence: Synthetic oligonucleotide
ggcugagggauccugaucc

SEQ ID NO: 3281119 - RNA, 19 nt, Artificial Sequence
  Description of Artificial Sequence: Synthetic oligonucleotide
cuagugcccagaaucuuag

SEQ ID NO: 3281120 - RNA, 19 nt, Artificial Sequence
  Description of Artificial Sequence: Synthetic oligonucleotide
auaccaaaugagaaacauc

SEQ ID NO: 3281121 - RNA, 19 nt, Artificial Sequence
  Description of Artificial Sequence: Synthetic oligonucleotide
auuugccuccuucaugucu

SEQ ID NO: 3281122 - RNA, 19 nt, Artificial Sequence
  Description of Artificial Sequence: Synthetic oligonucleotide
cuuuuggagugugauaaac

SEQ ID NO: 3281123 - RNA, 19 nt, Artificial Sequence
  Description of Artificial Sequence: Synthetic oligonucleotide
uuugccuccuucaugucuu

SEQ ID NO: 3281124 - RNA, 19 nt, Artificial Sequence
  Description of Artificial Sequence: Synthetic oligonucleotide
ucuuccaaacuagugccca

SEQ ID NO: 3281125 - RNA, 19 nt, Artificial Sequence
  Description of Artificial Sequence: Synthetic oligonucleotide
ucaugucuuccaaacuagu

SEQ ID NO: 3281126 - RNA, 19 nt, Artificial Sequence
  Description of Artificial Sequence: Synthetic oligonucleotide
gagugugauaaacucugca

SEQ ID NO: 3281127 - RNA, 19 nt, Artificial Sequence
  Description of Artificial Sequence: Synthetic oligonucleotide
caagucuuugccauuggca

SEQ ID NO: 3281128 - RNA, 19 nt, Artificial Sequence
  Description of Artificial Sequence: Synthetic oligonucleotide
cuguugcccaggcugaggg

SEQ ID NO: 3281129 - RNA, 19 nt, Artificial Sequence
  Description of Artificial Sequence: Synthetic oligonucleotide
ggagccauuugccuuuugg

SEQ ID NO: 3281130 - RNA, 19 nt, Artificial Sequence
  Description of Artificial Sequence: Synthetic oligonucleotide
gagggauccugauccuugg

SEQ ID NO: 3281131 - RNA, 19 nt, Artificial Sequence
  Description of Artificial Sequence: Synthetic oligonucleotide
ucuuagucaguuccucauc

SEQ ID NO: 3281132 - RNA, 19 nt, Artificial Sequence
  Description of Artificial Sequence: Synthetic oligonucleotide
uuagucaguuccucaucca

SEQ ID NO: 3281133 - RNA, 19 nt, Artificial Sequence
  Description of Artificial Sequence: Synthetic oligonucleotide
aggauuugccuccuucaug

SEQ ID NO: 3281134 - RNA, 19 nt, Artificial Sequence
  Description of Artificial Sequence: Synthetic oligonucleotide
uuccucauccagcucccag

SEQ ID NO: 3281135 - RNA, 19 nt, Artificial Sequence
  Description of Artificial Sequence: Synthetic oligonucleotide
aucuuagucaguuccucau

SEQ ID NO: 3281136 - RNA, 19 nt, Artificial Sequence
  Description of Artificial Sequence: Synthetic oligonucleotide
gucuuugccauuggcaugc

SEQ ID NO: 3281137 - RNA, 19 nt, Artificial Sequence
  Description of Artificial Sequence: Synthetic oligonucleotide
ugccuuugauuaaacuggu

SEQ ID NO: 3281138 - RNA, 19 nt, Artificial Sequence
  Description of Artificial Sequence: Synthetic oligonucleotide
gauaaacucugcagugccc

SEQ ID NO: 3281139 - RNA, 19 nt, Artificial Sequence
  Description of Artificial Sequence: Synthetic oligonucleotide
auccuuggcaggauuugcc

SEQ ID NO: 3281140 - RNA, 19 nt, Artificial Sequence
  Description of Artificial Sequence: Synthetic oligonucleotide
cauccagcucccaggagcc

SEQ ID NO: 3281141 - RNA, 19 nt, Artificial Sequence
  Description of Artificial Sequence: Synthetic oligonucleotide
uuugccuuuuggaguguga

SEQ ID NO: 3281142 - RNA, 19 nt, Artificial Sequence
  Description of Artificial Sequence: Synthetic oligonucleotide
cuucaugucuuccaaacua

SEQ ID NO: 3281143 - RNA, 19 nt, Artificial Sequence
  Description of Artificial Sequence: Synthetic oligonucleotide
cuucaagucuuugccauug

SEQ ID NO: 3281144 - RNA, 19 nt, Artificial Sequence
  Description of Artificial Sequence: Synthetic oligonucleotide
acacuucaagucuuugcca

SEQ ID NO: 3281145 - RNA, 19 nt, Artificial Sequence
  Description of Artificial Sequence: Synthetic oligonucleotide
ccaauaccaaaugagaaac

SEQ ID NO: 3281146 - RNA, 19 nt, Artificial Sequence
  Description of Artificial Sequence: Synthetic oligonucleotide
gagccauuugccuuuugga

SEQ ID NO: 3281147 - RNA, 19 nt, Artificial Sequence
  Description of Artificial Sequence: Synthetic oligonucleotide
gugauaaacucugcagugc

SEQ ID NO: 3281148 - RNA, 19 nt, Artificial Sequence
  Description of Artificial Sequence: Synthetic oligonucleotide
cuccuuuccagaaguuccc

SEQ ID NO: 3281149 - RNA, 19 nt, Artificial Sequence
  Description of Artificial Sequence: Synthetic oligonucleotide
aacagacugagucauuucc

SEQ ID NO: 3281150 - RNA, 19 nt, Artificial Sequence
  Description of Artificial Sequence: Synthetic oligonucleotide
uccccuuauaugaagaugg

SEQ ID NO: 3281151 - RNA, 19 nt, Artificial Sequence
  Description of Artificial Sequence: Synthetic oligonucleotide
uguuguacagcuagggugg

SEQ ID NO: 3281152 - RNA, 19 nt, Artificial Sequence
  Description of Artificial Sequence: Synthetic oligonucleotide
gauugcaaggaacagacug

SEQ ID NO: 3281153 - RNA, 19 nt, Artificial Sequence
  Description of Artificial Sequence: Synthetic oligonucleotide
agaacuguuguacagcuag

SEQ ID NO: 3281154 - RNA, 19 nt, Artificial Sequence
  Description of Artificial Sequence: Synthetic oligonucleotide
uaggcagauacccagagug

SEQ ID NO: 3281155 - RNA, 19 nt, Artificial Sequence
  Description of Artificial Sequence: Synthetic oligonucleotide
auuccaaauugauagcugg

SEQ ID NO: 3281156 - RNA, 19 nt, Artificial Sequence
  Description of Artificial Sequence: Synthetic oligonucleotide
uuaguguccccuuauauga

SEQ ID NO: 3281157 - RNA, 19 nt, Artificial Sequence
  Description of Artificial Sequence: Synthetic oligonucleotide
acuccagacaggcaaaggc

SEQ ID NO: 3281158 - RNA, 19 nt, Artificial Sequence
  Description of Artificial Sequence: Synthetic oligonucleotide
gauagcuggcaucauaucc

SEQ ID NO: 3281159 - RNA, 19 nt, Artificial Sequence
  Description of Artificial Sequence: Synthetic oligonucleotide
caaaggcugacucugaagg

SEQ ID NO: 3281160 - RNA, 19 nt, Artificial Sequence
  Description of Artificial Sequence: Synthetic oligonucleotide
ugagucauuuccuaugcag

SEQ ID NO: 3281161 - RNA, 19 nt, Artificial Sequence
  Description of Artificial Sequence: Synthetic oligonucleotide
acugagucauuuccuaugc

SEQ ID NO: 3281162 - RNA, 19 nt, Artificial Sequence
  Description of Artificial Sequence: Synthetic oligonucleotide
uuaggcugucuucacaagg

SEQ ID NO: 3281163 - RNA, 19 nt, Artificial Sequence
  Description of Artificial Sequence: Synthetic oligonucleotide
uaugcaguggcuccguuag

SEQ ID NO: 3281164 - RNA, 19 nt, Artificial Sequence
  Description of Artificial Sequence: Synthetic oligonucleotide
gauguaggcagauacccag

SEQ ID NO: 3281165 - RNA, 19 nt, Artificial Sequence
  Description of Artificial Sequence: Synthetic oligonucleotide
aggagaugcagauguaggc

SEQ ID NO: 3281166 - RNA, 19 nt, Artificial Sequence
  Description of Artificial Sequence: Synthetic oligonucleotide
ugcagauguaggcagauac

SEQ ID NO: 3281167 - RNA, 19 nt, Artificial Sequence
  Description of Artificial Sequence: Synthetic oligonucleotide
uccagcgaggcacagauug

SEQ ID NO: 3281168 - RNA, 19 nt, Artificial Sequence
  Description of Artificial Sequence: Synthetic oligonucleotide
uucacaaggcuccauacac

SEQ ID NO: 3281169 - RNA, 19 nt, Artificial Sequence
  Description of Artificial Sequence: Synthetic oligonucleotide
aaauugauagcuggcauca

SEQ ID NO: 3281170 - RNA, 19 nt, Artificial Sequence
  Description of Artificial Sequence: Synthetic oligonucleotide
aaggcagagaccccagaac

SEQ ID NO: 3281171 - RNA, 19 nt, Artificial Sequence
  Description of Artificial Sequence: Synthetic oligonucleotide
auuaguguccccuuauaug

SEQ ID NO: 3281172 - RNA, 19 nt, Artificial Sequence
  Description of Artificial Sequence: Synthetic oligonucleotide
aauuaguguccccuuauau

SEQ ID NO: 3281173 - RNA, 19 nt, Artificial Sequence
  Description of Artificial Sequence: Synthetic oligonucleotide
ggccauuccaaauugauag

SEQ ID NO: 3281174 - RNA, 19 nt, Artificial Sequence
  Description of Artificial Sequence: Synthetic oligonucleotide
uccauacacaggauagugg

SEQ ID NO: 3281175 - RNA, 19 nt, Artificial Sequence
  Description of Artificial Sequence: Synthetic oligonucleotide
auagcuggcaucauauccc

SEQ ID NO: 3281176 - RNA, 19 nt, Artificial Sequence
  Description of Artificial Sequence: Synthetic oligonucleotide
cagauugcaaggaacagac

SEQ ID NO: 3281177 - RNA, 19 nt, Artificial Sequence
  Description of Artificial Sequence: Synthetic oligonucleotide
acaguagagagguucaugu

SEQ ID NO: 3281178 - RNA, 19 nt, Artificial Sequence
  Description of Artificial Sequence: Synthetic oligonucleotide
uaugaagauggccauucca

SEQ ID NO: 3281179 - RNA, 19 nt, Artificial Sequence
  Description of Artificial Sequence: Synthetic oligonucleotide
aacuguuguacagcuaggg

SEQ ID NO: 3281180 - RNA, 19 nt, Artificial Sequence
  Description of Artificial Sequence: Synthetic oligonucleotide
cuguuguacagcuagggug

SEQ ID NO: 3281181 - RNA, 19 nt, Artificial Sequence
  Description of Artificial Sequence: Synthetic oligonucleotide
agagguucauguuugaaaa

SEQ ID NO: 3281182 - RNA, 19 nt, Artificial Sequence
  Description of Artificial Sequence: Synthetic oligonucleotide
ucauuuccuaugcaguggc

SEQ ID NO: 3281183 - RNA, 19 nt, Artificial Sequence
  Description of Artificial Sequence: Synthetic oligonucleotide
agugggugacuccagacag

SEQ ID NO: 3281184 - RNA, 19 nt, Artificial Sequence
  Description of Artificial Sequence: Synthetic oligonucleotide
acucugaagguccagcgag

SEQ ID NO: 3281185 - RNA, 19 nt, Artificial Sequence
  Description of Artificial Sequence: Synthetic oligonucleotide
gagaugcagauguaggcag

SEQ ID NO: 3281186 - RNA, 19 nt, Artificial Sequence
  Description of Artificial Sequence: Synthetic oligonucleotide
aacaccaggagaugcagau

SEQ ID NO: 3281187 - RNA, 19 nt, Artificial Sequence
  Description of Artificial Sequence: Synthetic oligonucleotide
uguaggcagauacccagag

SEQ ID NO: 3281188 - RNA, 19 nt, Artificial Sequence
  Description of Artificial Sequence: Synthetic oligonucleotide
uugauagcuggcaucauau

SEQ ID NO: 3281189 - RNA, 19 nt, Artificial Sequence
  Description of Artificial Sequence: Synthetic oligonucleotide
uccagacaggcaaaggcag

SEQ ID NO: 3281190 - RNA, 19 nt, Artificial Sequence
  Description of Artificial Sequence: Synthetic oligonucleotide
ugggagguggcccaauuag

SEQ ID NO: 3281191 - RNA, 19 nt, Artificial Sequence
  Description of Artificial Sequence: Synthetic oligonucleotide
auaugaagauggccauucc

SEQ ID NO: 3281192 - RNA, 19 nt, Artificial Sequence
  Description of Artificial Sequence: Synthetic oligonucleotide
caggcaaaggcagagaccc

SEQ ID NO: 3281193 - RNA, 19 nt, Artificial Sequence
  Description of Artificial Sequence: Synthetic oligonucleotide
uuuccuaugcaguggcucc

SEQ ID NO: 3281194 - RNA, 19 nt, Artificial Sequence
  Description of Artificial Sequence: Synthetic oligonucleotide
aaggcauucaaaggcugac

SEQ ID NO: 3281195 - RNA, 19 nt, Artificial Sequence
  Description of Artificial Sequence: Synthetic oligonucleotide
ugggaugucagcccuggag

SEQ ID NO: 3281196 - RNA, 19 nt, Artificial Sequence
  Description of Artificial Sequence: Synthetic oligonucleotide
uauaugaagauggccauuc

SEQ ID NO: 3281197 - RNA, 19 nt, Artificial Sequence
  Description of Artificial Sequence: Synthetic oligonucleotide
ugacucugaagguccagcg

SEQ ID NO: 3281198 - RNA, 19 nt, Artificial Sequence
  Description of Artificial Sequence: Synthetic oligonucleotide
auagugggugacuccagac

SEQ ID NO: 3281199 - RNA, 19 nt, Artificial Sequence
  Description of Artificial Sequence: Synthetic oligonucleotide
agucauuuccuaugcagug

SEQ ID NO: 3281200 - RNA, 19 nt, Artificial Sequence
  Description of Artificial Sequence: Synthetic oligonucleotide
uaggcugucuucacaaggc

SEQ ID NO: 3281201 - RNA, 19 nt, Artificial Sequence
  Description of Artificial Sequence: Synthetic oligonucleotide
aaggcugacucugaagguc

SEQ ID NO: 3281202 - RNA, 19 nt, Artificial Sequence
  Description of Artificial Sequence: Synthetic oligonucleotide
uguacagcuagggugggag

SEQ ID NO: 3281203 - RNA, 19 nt, Artificial Sequence
  Description of Artificial Sequence: Synthetic oligonucleotide
auggacaguagagagguuc

SEQ ID NO: 3281204 - RNA, 19 nt, Artificial Sequence
  Description of Artificial Sequence: Synthetic oligonucleotide
aagauggccauuccaaauu

SEQ ID NO: 3281205 - RNA, 19 nt, Artificial Sequence
  Description of Artificial Sequence: Synthetic oligonucleotide
gaggcaauggacaguagag

SEQ ID NO: 3281206 - RNA, 19 nt, Artificial Sequence
  Description of Artificial Sequence: Synthetic oligonucleotide
aaaggcagagaccccagaa

SEQ ID NO: 3281207 - RNA, 19 nt, Artificial Sequence
  Description of Artificial Sequence: Synthetic oligonucleotide
aguagagagguucauguuu

SEQ ID NO: 3281208 - RNA, 19 nt, Artificial Sequence
  Description of Artificial Sequence: Synthetic oligonucleotide
gacugagucauuuccuaug

SEQ ID NO: 3281209 - RNA, 19 nt, Artificial Sequence
  Description of Artificial Sequence: Synthetic oligonucleotide
ugaagguccagcgaggcac

SEQ ID NO: 3281210 - RNA, 19 nt, Artificial Sequence
  Description of Artificial Sequence: Synthetic oligonucleotide
ucaaaggcugacucugaag

SEQ ID NO: 3281211 - RNA, 19 nt, Artificial Sequence
  Description of Artificial Sequence: Synthetic oligonucleotide
uuccaaauugauagcuggc

SEQ ID NO: 3281212 - RNA, 19 nt, Artificial Sequence
  Description of Artificial Sequence: Synthetic oligonucleotide
cacaaggcuccauacacag

SEQ ID NO: 3281213 - RNA, 19 nt, Artificial Sequence
  Description of Artificial Sequence: Synthetic oligonucleotide
auuuccuaugcaguggcuc

SEQ ID NO: 3281214 - RNA, 19 nt, Artificial Sequence
  Description of Artificial Sequence: Synthetic oligonucleotide
caggagaugcagauguagg

SEQ ID NO: 3281215 - RNA, 19 nt, Artificial Sequence
  Description of Artificial Sequence: Synthetic oligonucleotide
caaauugauagcuggcauc

SEQ ID NO: 3281216 - RNA, 19 nt, Artificial Sequence
  Description of Artificial Sequence: Synthetic oligonucleotide
gacaggcaaaggcagagac

SEQ ID NO: 3281217 - RNA, 19 nt, Artificial Sequence
  Description of Artificial Sequence: Synthetic oligonucleotide
uccaaauugauagcuggca

SEQ ID NO: 3281218 - RNA, 19 nt, Artificial Sequence
  Description of Artificial Sequence: Synthetic oligonucleotide
cagauguaggcagauaccc

SEQ ID NO: 3281219 - RNA, 19 nt, Artificial Sequence
  Description of Artificial Sequence: Synthetic oligonucleotide
ggcaauggacaguagagag

SEQ ID NO: 3281220 - RNA, 19 nt, Artificial Sequence
  Description of Artificial Sequence: Synthetic oligonucleotide
aaaggcugacucugaaggu

SEQ ID NO: 3281221 - RNA, 19 nt, Artificial Sequence
  Description of Artificial Sequence: Synthetic oligonucleotide
agguggcccaauuaguguc

SEQ ID NO: 3281222 - RNA, 19 nt, Artificial Sequence
  Description of Artificial Sequence: Synthetic oligonucleotide
ccauacacaggauaguggg

SEQ ID NO: 3281223 - RNA, 19 nt, Artificial Sequence
  Description of Artificial Sequence: Synthetic oligonucleotide
auacacaggauagugggug

SEQ ID NO: 3281224 - RNA, 19 nt, Artificial Sequence
  Description of Artificial Sequence: Synthetic oligonucleotide
cauucaaaggcugacucug

SEQ ID NO: 3281225 - RNA, 19 nt, Artificial Sequence
  Description of Artificial Sequence: Synthetic oligonucleotide
gcaaggaacagacugaguc

SEQ ID NO: 3281226 - RNA, 19 nt, Artificial Sequence
  Description of Artificial Sequence: Synthetic oligonucleotide
ucuucacaaggcuccauac

SEQ ID NO: 3281227 - RNA, 19 nt, Artificial Sequence
  Description of Artificial Sequence: Synthetic oligonucleotide
cauuccaaauugauagcug

SEQ ID NO: 3281228 - RNA, 19 nt, Artificial Sequence
  Description of Artificial Sequence: Synthetic oligonucleotide
uggacaguagagagguuca

SEQ ID NO: 3281229 - RNA, 19 nt, Artificial Sequence
  Description of Artificial Sequence: Synthetic oligonucleotide
aaaaggcauucaaaggcug

SEQ ID NO: 3281230 - RNA, 19 nt, Artificial Sequence
  Description of Artificial Sequence: Synthetic oligonucleotide
uggaggaggcaauggacag

SEQ ID NO: 3281231 - RNA, 19 nt, Artificial Sequence
  Description of Artificial Sequence: Synthetic oligonucleotide
caaggcuccauacacagga

SEQ ID NO: 3281232 - RNA, 19 nt, Artificial Sequence
  Description of Artificial Sequence: Synthetic oligonucleotide
ccuuauaugaagauggcca

SEQ ID NO: 3281233 - RNA, 19 nt, Artificial Sequence
  Description of Artificial Sequence: Synthetic oligonucleotide
gagagguucauguuugaaa

SEQ ID NO: 3281234 - RNA, 19 nt, Artificial Sequence
  Description of Artificial Sequence: Synthetic oligonucleotide
agauggccauuccaaauug

SEQ ID NO: 3281235 - RNA, 19 nt, Artificial Sequence
  Description of Artificial Sequence: Synthetic oligonucleotide
aggcagagaccccagaacu

SEQ ID NO: 3281236 - RNA, 19 nt, Artificial Sequence
  Description of Artificial Sequence: Synthetic oligonucleotide
aguguccccuuauaugaag

SEQ ID NO: 3281237 - RNA, 19 nt, Artificial Sequence
  Description of Artificial Sequence: Synthetic oligonucleotide
uagugggugacuccagaca

SEQ ID NO: 3281238 - RNA, 19 nt, Artificial Sequence
  Description of Artificial Sequence: Synthetic oligonucleotide
guagagagguucauguuug

SEQ ID NO: 3281239 - RNA, 19 nt, Artificial Sequence
  Description of Artificial Sequence: Synthetic oligonucleotide
uugcaaggaacagacugag

SEQ ID NO: 3281240 - RNA, 19 nt, Artificial Sequence
  Description of Artificial Sequence: Synthetic oligonucleotide
aaggaacagacugagucau

SEQ ID NO: 3281241 - RNA, 19 nt, Artificial Sequence
  Description of Artificial Sequence: Synthetic oligonucleotide
acuguuguacagcuagggu

SEQ ID NO: 3281242 - RNA, 19 nt, Artificial Sequence
  Description of Artificial Sequence: Synthetic oligonucleotide
ugaagauggccauuccaaa

SEQ ID NO: 3281243 - RNA, 19 nt, Artificial Sequence
  Description of Artificial Sequence: Synthetic oligonucleotide
ucacaaggcuccauacaca

SEQ ID NO: 3281244 - RNA, 19 nt, Artificial Sequence
  Description of Artificial Sequence: Synthetic oligonucleotide
acaggauagugggugacuc

SEQ ID NO: 3281245 - RNA, 19 nt, Artificial Sequence
  Description of Artificial Sequence: Synthetic oligonucleotide
gggaugucagcccuggagg

SEQ ID NO: 3281246 - RNA, 19 nt, Artificial Sequence
  Description of Artificial Sequence: Synthetic oligonucleotide
gucauuuccuaugcagugg

SEQ ID NO: 3281247 - RNA, 19 nt, Artificial Sequence
  Description of Artificial Sequence: Synthetic oligonucleotide
auugauagcuggcaucaua

SEQ ID NO: 3281248 - RNA, 19 nt, Artificial Sequence
  Description of Artificial Sequence: Synthetic oligonucleotide
ugcaguggcuccguuaggc

SEQ ID NO: 3281249 - RNA, 19 nt, Artificial Sequence
  Description of Artificial Sequence: Synthetic oligonucleotide
aaaauagagaaauuggcug

SEQ ID NO: 3281250 - RNA, 19 nt, Artificial Sequence
  Description of Artificial Sequence: Synthetic oligonucleotide
auacauggcagacugaugc

SEQ ID NO: 3281251 - RNA, 19 nt, Artificial Sequence
  Description of Artificial Sequence: Synthetic oligonucleotide
uguaauuuugcccucaucu

SEQ ID NO: 3281252 - RNA, 19 nt, Artificial Sequence
  Description of Artificial Sequence: Synthetic oligonucleotide
ugcaaaauagagaaauugg

SEQ ID NO: 3281253 - RNA, 19 nt, Artificial Sequence
  Description of Artificial Sequence: Synthetic oligonucleotide
uucauuaaagacuaggucu

SEQ ID NO: 3281254 - RNA, 19 nt, Artificial Sequence
  Description of Artificial Sequence: Synthetic oligonucleotide
uuugauguaauuuugcccu

SEQ ID NO: 3281255 - RNA, 19 nt, Artificial Sequence
  Description of Artificial Sequence: Synthetic oligonucleotide
aaaaccuucauuauggagu

SEQ ID NO: 3281256 - RNA, 19 nt, Artificial Sequence
  Description of Artificial Sequence: Synthetic oligonucleotide
ucuggugcaaaauagagaa

SEQ ID NO: 3281257 - RNA, 19 nt, Artificial Sequence
  Description of Artificial Sequence: Synthetic oligonucleotide
aaauagagaaauuggcugu

SEQ ID NO: 3281258 - RNA, 19 nt, Artificial Sequence
  Description of Artificial Sequence: Synthetic oligonucleotide
uauggaguauucuucaaag

SEQ ID NO: 3281259 - RNA, 19 nt, Artificial Sequence
  Description of Artificial Sequence: Synthetic oligonucleotide
aguugguagaaucucugcc

SEQ ID NO: 3281260 - RNA, 19 nt, Artificial Sequence
  Description of Artificial Sequence: Synthetic oligonucleotide
ucauuaaagacuaggucug

SEQ ID NO: 3281261 - RNA, 19 nt, Artificial Sequence
  Description of Artificial Sequence: Synthetic oligonucleotide
uucuucaaaggucagcugc

SEQ ID NO: 3281262 - RNA, 19 nt, Artificial Sequence
  Description of Artificial Sequence: Synthetic oligonucleotide
uucaaaugcagcuugggcu

SEQ ID NO: 3281263 - RNA, 19 nt, Artificial Sequence
  Description of Artificial Sequence: Synthetic oligonucleotide
uaaagacuaggucuggugc

SEQ ID NO: 3281264 - RNA, 19 nt, Artificial Sequence
  Description of Artificial Sequence: Synthetic oligonucleotide
uggaguauucuucaaaggu

SEQ ID NO: 3281265 - RNA, 19 nt, Artificial Sequence
  Description of Artificial Sequence: Synthetic oligonucleotide
ucuucauuaaagacuaggu

SEQ ID NO: 3281266 - RNA, 19 nt, Artificial Sequence
  Description of Artificial Sequence: Synthetic oligonucleotide
ucaaaggucagcugcagcc

SEQ ID NO: 3281267 - RNA, 19 nt, Artificial Sequence
  Description of Artificial Sequence: Synthetic oligonucleotide
aaacugaaggcugaucugg

SEQ ID NO: 3281268 - RNA, 19 nt, Artificial Sequence
  Description of Artificial Sequence: Synthetic oligonucleotide
acaaacugaaggcugaucu

SEQ ID NO: 3281269 - RNA, 19 nt, Artificial Sequence
  Description of Artificial Sequence: Synthetic oligonucleotide
cuuugauguaauuuugccc

SEQ ID NO: 3281270 - RNA, 19 nt, Artificial Sequence
  Description of Artificial Sequence: Synthetic oligonucleotide
ucuuugauguaauuuugcc

SEQ ID NO: 3281271 - RNA, 19 nt, Artificial Sequence
  Description of Artificial Sequence: Synthetic oligonucleotide
agcaaaaccuucauuaugg

SEQ ID NO: 3281272 - RNA, 19 nt, Artificial Sequence
  Description of Artificial Sequence: Synthetic oligonucleotide
acuguugugacacuuggug

SEQ ID NO: 3281273 - RNA, 19 nt, Artificial Sequence
  Description of Artificial Sequence: Synthetic oligonucleotide
uagagaaauuggcuguucg

SEQ ID NO: 3281274 - RNA, 19 nt, Artificial Sequence
  Description of Artificial Sequence: Synthetic oligonucleotide
uuuggaacugugcucagca

SEQ ID NO: 3281275 - RNA, 19 nt, Artificial Sequence
  Description of Artificial Sequence: Synthetic oligonucleotide
aaaggucagcugcagccgc

SEQ ID NO: 3281276 - RNA, 19 nt, Artificial Sequence
  Description of Artificial Sequence: Synthetic oligonucleotide
aacugugcucagcagcagc

SEQ ID NO: 3281277 - RNA, 19 nt, Artificial Sequence
  Description of Artificial Sequence: Synthetic oligonucleotide
uaauuuugcccucaucucu

SEQ ID NO: 3281278 - RNA, 19 nt, Artificial Sequence
  Description of Artificial Sequence: Synthetic oligonucleotide
uucucuucauuaaagacua

SEQ ID NO: 3281279 - RNA, 19 nt, Artificial Sequence
  Description of Artificial Sequence: Synthetic oligonucleotide
uuugaggccaucuuuugga

SEQ ID NO: 3281280 - RNA, 19 nt, Artificial Sequence
  Description of Artificial Sequence: Synthetic oligonucleotide
uauucuucaaaggucagcu

SEQ ID NO: 3281281 - RNA, 19 nt, Artificial Sequence
  Description of Artificial Sequence: Synthetic oligonucleotide
guucauacauggcagacug

SEQ ID NO: 3281282 - RNA, 19 nt, Artificial Sequence
  Description of Artificial Sequence: Synthetic oligonucleotide
uggcacaguucauacaugg

SEQ ID NO: 3281283 - RNA, 19 nt, Artificial Sequence
  Description of Artificial Sequence: Synthetic oligonucleotide
ucuucucuucauuaaagac

SEQ ID NO: 3281284 - RNA, 19 nt, Artificial Sequence
  Description of Artificial Sequence: Synthetic oligonucleotide
uuaaagacuaggucuggug

SEQ ID NO: 3281285 - RNA, 19 nt, Artificial Sequence
  Description of Artificial Sequence: Synthetic oligonucleotide
uucuuugauguaauuuugc

SEQ ID NO: 3281286 - RNA, 19 nt, Artificial Sequence
  Description of Artificial Sequence: Synthetic oligonucleotide
ucauuauggaguauucuuc

SEQ ID NO: 3281287 - RNA, 19 nt, Artificial Sequence
  Description of Artificial Sequence: Synthetic oligonucleotide
aucucugccagcucugccc

SEQ ID NO: 3281288 - RNA, 19 nt, Artificial Sequence
  Description of Artificial Sequence: Synthetic oligonucleotide
aguucuuugauguaauuuu

SEQ ID NO: 3281289 - RNA, 19 nt, Artificial Sequence
  Description of Artificial Sequence: Synthetic oligonucleotide
ugcagcuugggcuuugagg

SEQ ID NO: 3281290 - RNA, 19 nt, Artificial Sequence
  Description of Artificial Sequence: Synthetic oligonucleotide
uaggucuggugcaaaauag

SEQ ID NO: 3281291 - RNA, 19 nt, Artificial Sequence
  Description of Artificial Sequence: Synthetic oligonucleotide
gagaagcuuggucaguugg

SEQ ID NO: 3281292 - RNA, 19 nt, Artificial Sequence
  Description of Artificial Sequence: Synthetic oligonucleotide
agcagcaaaaccuucauua

SEQ ID NO: 3281293 - RNA, 19 nt, Artificial Sequence
  Description of Artificial Sequence: Synthetic oligonucleotide
ucuuuuggaacugugcuca

SEQ ID NO: 3281294 - RNA, 19 nt, Artificial Sequence
  Description of Artificial Sequence: Synthetic oligonucleotide
aaagacuaggucuggugca

SEQ ID NO: 3281295 - RNA, 19 nt, Artificial Sequence
  Description of Artificial Sequence: Synthetic oligonucleotide
uuggugaccaucuuccuca

SEQ ID NO: 3281296 - RNA, 19 nt, Artificial Sequence
  Description of Artificial Sequence: Synthetic oligonucleotide
gaacuguugugacacuugg

SEQ ID NO: 3281297 - RNA, 19 nt, Artificial Sequence
  Description of Artificial Sequence: Synthetic oligonucleotide
augcauggagucgagaagc

SEQ ID NO: 3281298 - RNA, 19 nt, Artificial Sequence
  Description of Artificial Sequence: Synthetic oligonucleotide
aaucucugccagcucugcc

SEQ ID NO: 3281299 - RNA, 19 nt, Artificial Sequence
  Description of Artificial Sequence: Synthetic oligonucleotide
ucucuucaaaugcagcuug

SEQ ID NO: 3281300 - RNA, 19 nt, Artificial Sequence
  Description of Artificial Sequence: Synthetic oligonucleotide
agccgcacaaacugaaggc

SEQ ID NO: 3281301 - RNA, 19 nt, Artificial Sequence
  Description of Artificial Sequence: Synthetic oligonucleotide
aauuccagcaggucacuca

SEQ ID NO: 3281302 - RNA, 19 nt, Artificial Sequence
  Description of Artificial Sequence: Synthetic oligonucleotide
uugguagaaucucugccag

SEQ ID NO: 3281303 - RNA, 19 nt, Artificial Sequence
  Description of Artificial Sequence: Synthetic oligonucleotide
uucauuauggaguauucuu

SEQ ID NO: 3281304 - RNA, 19 nt, Artificial Sequence
  Description of Artificial Sequence: Synthetic oligonucleotide
uguugugacacuuggugac

SEQ ID NO: 3281305 - RNA, 19 nt, Artificial Sequence
  Description of Artificial Sequence: Synthetic oligonucleotide
auuccagcaggucacucac

SEQ ID NO: 3281306 - RNA, 19 nt, Artificial Sequence
  Description of Artificial Sequence: Synthetic oligonucleotide
aaauuggcuguucguaugu

SEQ ID NO: 3281307 - RNA, 19 nt, Artificial Sequence
  Description of Artificial Sequence: Synthetic oligonucleotide
uagaaucucugccagcucu

SEQ ID NO: 3281308 - RNA, 19 nt, Artificial Sequence
  Description of Artificial Sequence: Synthetic oligonucleotide
uggaacugugcucagcagc

SEQ ID NO: 3281309 - RNA, 19 nt, Artificial Sequence
  Description of Artificial Sequence: Synthetic oligonucleotide
gagucgagaagcuugguca

SEQ ID NO: 3281310 - RNA, 19 nt, Artificial Sequence
  Description of Artificial Sequence: Synthetic oligonucleotide
cacuuggugaccaucuucc

SEQ ID NO: 3281311 - RNA, 19 nt, Artificial Sequence
  Description of Artificial Sequence: Synthetic oligonucleotide
uuggcuguucguauguuug

SEQ ID NO: 3281312 - RNA, 19 nt, Artificial Sequence
  Description of Artificial Sequence: Synthetic oligonucleotide
cuucauuaaagacuagguc

SEQ ID NO: 3281313 - RNA, 19 nt, Artificial Sequence
  Description of Artificial Sequence: Synthetic oligonucleotide
cacaguucauacauggcag

SEQ ID NO: 3281314 - RNA, 19 nt, Artificial Sequence
  Description of Artificial Sequence: Synthetic oligonucleotide
cauggagucgagaagcuug

SEQ ID NO: 3281315 - RNA, 19 nt, Artificial Sequence
  Description of Artificial Sequence: Synthetic oligonucleotide
auggaguauucuucaaagg

SEQ ID NO: 3281316 - RNA, 19 nt, Artificial Sequence
  Description of Artificial Sequence: Synthetic oligonucleotide
ucaguugguagaaucucug

SEQ ID NO: 3281317 - RNA, 19 nt, Artificial Sequence
  Description of Artificial Sequence: Synthetic oligonucleotide
aucuuuuggaacugugcuc

SEQ ID NO: 3281318 - RNA, 19 nt, Artificial Sequence
  Description of Artificial Sequence: Synthetic oligonucleotide
uuauggaguauucuucaaa

SEQ ID NO: 3281319 - RNA, 19 nt, Artificial Sequence
  Description of Artificial Sequence: Synthetic oligonucleotide
uuccucaguucuuugaugu

SEQ ID NO: 3281320 - RNA, 19 nt, Artificial Sequence
  Description of Artificial Sequence: Synthetic oligonucleotide
gaaauuggcuguucguaug

SEQ ID NO: 3281321 - RNA, 19 nt, Artificial Sequence
  Description of Artificial Sequence: Synthetic oligonucleotide
cucuucauuaaagacuagg

SEQ ID NO: 3281322 - RNA, 19 nt, Artificial Sequence
  Description of Artificial Sequence: Synthetic oligonucleotide
acugaugcaucuucucuuc

SEQ ID NO: 3281323 - RNA, 19 nt, Artificial Sequence
  Description of Artificial Sequence: Synthetic oligonucleotide
aaaccuucauuauggagua

SEQ ID NO: 3281324 - RNA, 19 nt, Artificial Sequence
  Description of Artificial Sequence: Synthetic oligonucleotide
caucuucucuucauuaaag

SEQ ID NO: 3281325 - RNA, 19 nt, Artificial Sequence
  Description of Artificial Sequence: Synthetic oligonucleotide
caaaaccuucauuauggag

SEQ ID NO: 3281326 - RNA, 19 nt, Artificial Sequence
  Description of Artificial Sequence: Synthetic oligonucleotide
cucaccagaucaugcaugg

SEQ ID NO: 3281327 - RNA, 19 nt, Artificial Sequence
  Description of Artificial Sequence: Synthetic oligonucleotide
ucaugcauggagucgagaa

SEQ ID NO: 3281328 - RNA, 19 nt, Artificial Sequence
  Description of Artificial Sequence: Synthetic oligonucleotide
ucuucaaaggucagcugca

SEQ ID NO: 3281329 - RNA, 19 nt, Artificial Sequence
  Description of Artificial Sequence: Synthetic oligonucleotide
uggugcaaaauagagaaau

SEQ ID NO: 3281330 - RNA, 19 nt, Artificial Sequence
  Description of Artificial Sequence: Synthetic oligonucleotide
gugcaaaauagagaaauug

SEQ ID NO: 3281331 - RNA, 19 nt, Artificial Sequence
  Description of Artificial Sequence: Synthetic oligonucleotide
ucaucucuucaaaugcagc

SEQ ID NO: 3281332 - RNA, 19 nt, Artificial Sequence
  Description of Artificial Sequence: Synthetic oligonucleotide
cuucaaaugcagcuugggc

SEQ ID NO: 3281333 - RNA, 19 nt, Artificial Sequence
  Description of Artificial Sequence: Synthetic oligonucleotide
aagcuuggucaguugguag

SEQ ID NO: 3281334 - RNA, 19 nt, Artificial Sequence
  Description of Artificial Sequence: Synthetic oligonucleotide
gcagcuugggcuuugaggc

SEQ ID NO: 3281335 - RNA, 19 nt, Artificial Sequence
  Description of Artificial Sequence: Synthetic oligonucleotide
ucuucaaaugcagcuuggg

SEQ ID NO: 3281336 - RNA, 19 nt, Artificial Sequence
  Description of Artificial Sequence: Synthetic oligonucleotide
caccagaucaugcauggag

SEQ ID NO: 3281337 - RNA, 19 nt, Artificial Sequence
  Description of Artificial Sequence: Synthetic oligonucleotide
ugacacuuggugaccaucu

SEQ ID NO: 3281338 - RNA, 19 nt, Artificial Sequence
  Description of Artificial Sequence: Synthetic oligonucleotide
aacugaaggcugaucuggc

SEQ ID NO: 3281339 - RNA, 19 nt, Artificial Sequence
  Description of Artificial Sequence: Synthetic oligonucleotide
uccagcaggucacucacca

SEQ ID NO: 3281340 - RNA, 19 nt, Artificial Sequence
  Description of Artificial Sequence: Synthetic oligonucleotide
cucaucucuucaaaugcag

SEQ ID NO: 3281341 - RNA, 19 nt, Artificial Sequence
  Description of Artificial Sequence: Synthetic oligonucleotide
gaguauucuucaaagguca

SEQ ID NO: 3281342 - RNA, 19 nt, Artificial Sequence
  Description of Artificial Sequence: Synthetic oligonucleotide
cuuugaggccaucuuuugg

SEQ ID NO: 3281343 - RNA, 19 nt, Artificial Sequence
  Description of Artificial Sequence: Synthetic oligonucleotide
cagaauuccagcaggucac

SEQ ID NO: 3281344 - RNA, 19 nt, Artificial Sequence
  Description of Artificial Sequence: Synthetic oligonucleotide
acacuuggugaccaucuuc

SEQ ID NO: 3281345 - RNA, 19 nt, Artificial Sequence
  Description of Artificial Sequence: Synthetic oligonucleotide
guugguagaaucucugcca

SEQ ID NO: 3281346 - RNA, 19 nt, Artificial Sequence
  Description of Artificial Sequence: Synthetic oligonucleotide
aucuucucuucauuaaaga

SEQ ID NO: 3281347 - RNA, 19 nt, Artificial Sequence
  Description of Artificial Sequence: Synthetic oligonucleotide
ucaaaugcagcuugggcuu

SEQ ID NO: 3281348 - RNA, 19 nt, Artificial Sequence
  Description of Artificial Sequence: Synthetic oligonucleotide
gcaaaauagagaaauuggc

SEQ ID NO: 3281349 - RNA, 19 nt, Artificial Sequence
  Description of Artificial Sequence: Synthetic oligonucleotide
ucuauaaacaguaacuuug

SEQ ID NO: 3281350 - RNA, 19 nt, Artificial Sequence
  Description of Artificial Sequence: Synthetic oligonucleotide
aaugagugcagcgauaugc

SEQ ID NO: 3281351 - RNA, 19 nt, Artificial Sequence
  Description of Artificial Sequence: Synthetic oligonucleotide
uaaacaguaacuuugcccc

SEQ ID NO: 3281352 - RNA, 19 nt, Artificial Sequence
  Description of Artificial Sequence: Synthetic oligonucleotide
uauuccgaaacauauacag

SEQ ID NO: 3281353 - RNA, 19 nt, Artificial Sequence
  Description of Artificial Sequence: Synthetic oligonucleotide
auggaauccaauuaccagc

SEQ ID NO: 3281354 - RNA, 19 nt, Artificial Sequence
  Description of Artificial Sequence: Synthetic oligonucleotide
uauaucaucacauccuaag

SEQ ID NO: 3281355 - RNA, 19 nt, Artificial Sequence
  Description of Artificial Sequence: Synthetic oligonucleotide
uaauggugcaaauaaaacc

SEQ ID NO: 3281356 - RNA, 19 nt, Artificial Sequence
  Description of Artificial Sequence: Synthetic oligonucleotide
uuuucaauacaucacuuga

SEQ ID NO: 3281357 - RNA, 19 nt, Artificial Sequence
  Description of Artificial Sequence: Synthetic oligonucleotide
guaugugauacauacaaag

SEQ ID NO: 3281358 - RNA, 19 nt, Artificial Sequence
  Description of Artificial Sequence: Synthetic oligonucleotide
aauauuggagucaaaguag

SEQ ID NO: 3281359 - RNA, 19 nt, Artificial Sequence
  Description of Artificial Sequence: Synthetic oligonucleotide
gacacggucacguugaugc

SEQ ID NO: 3281360 - RNA, 19 nt, Artificial Sequence
  Description of Artificial Sequence: Synthetic oligonucleotide
aauggugcaaauaaaacca

SEQ ID NO: 3281361 - RNA, 19 nt, Artificial Sequence
  Description of Artificial Sequence: Synthetic oligonucleotide
guauucaaagauuucaccc

SEQ ID NO: 3281362 - RNA, 19 nt, Artificial Sequence
  Description of Artificial Sequence: Synthetic oligonucleotide
aaaucugucugucaauuca

SEQ ID NO: 3281363 - RNA, 19 nt, Artificial Sequence
  Description of Artificial Sequence: Synthetic oligonucleotide
ugagacuaauauuugaugu

SEQ ID NO: 3281364 - RNA, 19 nt, Artificial Sequence
  Description of Artificial Sequence: Synthetic oligonucleotide
uaucuaauggugcaaauaa

SEQ ID NO: 3281365 - RNA, 19 nt, Artificial Sequence
  Description of Artificial Sequence: Synthetic oligonucleotide
gagacuguaaauucaguag

SEQ ID NO: 3281366 - RNA, 19 nt, Artificial Sequence
  Description of Artificial Sequence: Synthetic oligonucleotide
aaaccuuuguuaaauacag

SEQ ID NO: 3281367 - RNA, 19 nt, Artificial Sequence
  Description of Artificial Sequence: Synthetic oligonucleotide
uaaaucaaauuugggaacg

SEQ ID NO: 3281368 - RNA, 19 nt, Artificial Sequence
  Description of Artificial Sequence: Synthetic oligonucleotide
cacauuuuaaaaugaacag

SEQ ID NO: 3281369 - RNA, 19 nt, Artificial Sequence
  Description of Artificial Sequence: Synthetic oligonucleotide
uagauuucgccauaggcag

SEQ ID NO: 3281370 - RNA, 19 nt, Artificial Sequence
  Description of Artificial Sequence: Synthetic oligonucleotide
aguaaaauccauuauuaaa

SEQ ID NO: 3281371 - RNA, 19 nt, Artificial Sequence
  Description of Artificial Sequence: Synthetic oligonucleotide
uuuaucaccauuauacaua

SEQ ID NO: 3281372 - RNA, 19 nt, Artificial Sequence
  Description of Artificial Sequence: Synthetic oligonucleotide
agucaaaucuugcauuuac

SEQ ID NO: 3281373 - RNA, 19 nt, Artificial Sequence
  Description of Artificial Sequence: Synthetic oligonucleotide
aacuggaaugguuguagac

SEQ ID NO: 3281374 - RNA, 19 nt, Artificial Sequence
  Description of Artificial Sequence: Synthetic oligonucleotide
aaacguugccucguuaugc

SEQ ID NO: 3281375 - RNA, 19 nt, Artificial Sequence
  Description of Artificial Sequence: Synthetic oligonucleotide
ucacaagcucguaugaagg

SEQ ID NO: 3281376 - RNA, 19 nt, Artificial Sequence
  Description of Artificial Sequence: Synthetic oligonucleotide
aaaucaggguuuccuuugc

SEQ ID NO: 3281377 - RNA, 19 nt, Artificial Sequence
  Description of Artificial Sequence: Synthetic oligonucleotide
aauacagugccucgaaggu

SEQ ID NO: 3281378 - RNA, 19 nt, Artificial Sequence
  Description of Artificial Sequence: Synthetic oligonucleotide
accguggcgaaccacagcc

SEQ ID NO: 3281379 - RNA, 19 nt, Artificial Sequence
  Description of Artificial Sequence: Synthetic oligonucleotide
uaaauuaacuccucugaga

SEQ ID NO: 3281380 - RNA, 19 nt, Artificial Sequence
  Description of Artificial Sequence: Synthetic oligonucleotide
uaaaaccuuuguuaaauac

SEQ ID NO: 3281381 - RNA, 19 nt, Artificial Sequence
  Description of Artificial Sequence: Synthetic oligonucleotide
uggauuaauuuggugagcg

SEQ ID NO: 3281382 - RNA, 19 nt, Artificial Sequence
  Description of Artificial Sequence: Synthetic oligonucleotide
auaccgauagaucacuguc

SEQ ID NO: 3281383 - RNA, 19 nt, Artificial Sequence
  Description of Artificial Sequence: Synthetic oligonucleotide
acaauucaguaauaucugg

SEQ ID NO: 3281384 - RNA, 19 nt, Artificial Sequence
  Description of Artificial Sequence: Synthetic oligonucleotide
agacuaauauuugauguac

SEQ ID NO: 3281385 - RNA, 19 nt, Artificial Sequence
  Description of Artificial Sequence: Synthetic oligonucleotide
uacaucaucccacugcuga

SEQ ID NO: 3281386 - RNA, 19 nt, Artificial Sequence
  Description of Artificial Sequence: Synthetic oligonucleotide
acauaaauuaacuccucug

SEQ ID NO: 3281387 - RNA, 19 nt, Artificial Sequence
  Description of Artificial Sequence: Synthetic oligonucleotide
aaaaccuuuguuaaauaca

SEQ ID NO: 3281388 - RNA, 19 nt, Artificial Sequence
  Description of Artificial Sequence: Synthetic oligonucleotide
ugcguauguaaacauauuc

SEQ ID NO: 3281389 - RNA, 19 nt, Artificial Sequence
  Description of Artificial Sequence: Synthetic oligonucleotide
uuggagucaaaguagauuu

SEQ ID NO: 3281390 - RNA, 19 nt, Artificial Sequence
  Description of Artificial Sequence: Synthetic oligonucleotide
uucggauugugcuacagga

SEQ ID NO: 3281391 - RNA, 19 nt, Artificial Sequence
  Description of Artificial Sequence: Synthetic oligonucleotide
uauacuugaacaagacccu

SEQ ID NO: 3281392 - RNA, 19 nt, Artificial Sequence
  Description of Artificial Sequence: Synthetic oligonucleotide
caauguuugauaacacgcc

SEQ ID NO: 3281393 - RNA, 19 nt, Artificial Sequence
  Description of Artificial Sequence: Synthetic oligonucleotide
uguuugauaacacgccuac

SEQ ID NO: 3281394 - RNA, 19 nt, Artificial Sequence
  Description of Artificial Sequence: Synthetic oligonucleotide
gagauuacuuccuguaagc

SEQ ID NO: 3281395 - RNA, 19 nt, Artificial Sequence
  Description of Artificial Sequence: Synthetic oligonucleotide
uacugugcaguuuagagua

SEQ ID NO: 3281396 - RNA, 19 nt, Artificial Sequence
  Description of Artificial Sequence: Synthetic oligonucleotide
uucucauacuuccagucca

SEQ ID NO: 3281397 - RNA, 19 nt, Artificial Sequence
  Description of Artificial Sequence: Synthetic oligonucleotide
cuugaugaaguagugagug

SEQ ID NO: 3281398 - RNA, 19 nt, Artificial Sequence
  Description of Artificial Sequence: Synthetic oligonucleotide
acuugaacaagacccuccg

SEQ ID NO: 3281399 - RNA, 19 nt, Artificial Sequence
  Description of Artificial Sequence: Synthetic oligonucleotide
uuagaaaauuauuuucaau

SEQ ID NO: 3281400 - RNA, 19 nt, Artificial Sequence
  Description of Artificial Sequence: Synthetic oligonucleotide
uuuacgacauguucacuug

SEQ ID NO: 3281401 - RNA, 19 nt, Artificial Sequence
  Description of Artificial Sequence: Synthetic oligonucleotide
aaugggcgguacaucaucc

SEQ ID NO: 3281402 - RNA, 19 nt, Artificial Sequence
  Description of Artificial Sequence: Synthetic oligonucleotide
uugccuguaucuaauggug

SEQ ID NO: 3281403 - RNA, 19 nt, Artificial Sequence
  Description of Artificial Sequence: Synthetic oligonucleotide
agcuauuucgaaacuuucc

SEQ ID NO: 3281404 - RNA, 19 nt, Artificial Sequence
  Description of Artificial Sequence: Synthetic oligonucleotide
ugauaacacgccuacugug

SEQ ID NO: 3281405 - RNA, 19 nt, Artificial Sequence
  Description of Artificial Sequence: Synthetic oligonucleotide
ucguuggcgauguugagca

SEQ ID NO: 3281406 - RNA, 19 nt, Artificial Sequence
  Description of Artificial Sequence: Synthetic oligonucleotide
gcaaauaaaaccaucacuc

SEQ ID NO: 3281407 - RNA, 19 nt, Artificial Sequence
  Description of Artificial Sequence: Synthetic oligonucleotide
gucauacaagccuccaugg

SEQ ID NO: 3281408 - RNA, 19 nt, Artificial Sequence
  Description of Artificial Sequence: Synthetic oligonucleotide
auuuacgacauguucacuu

SEQ ID NO: 3281409 - RNA, 19 nt, Artificial Sequence
  Description of Artificial Sequence: Synthetic oligonucleotide
acauuuuaaaaugaacaga

SEQ ID NO: 3281410 - RNA, 19 nt, Artificial Sequence
  Description of Artificial Sequence: Synthetic oligonucleotide
gaaacuuucccagccaaug

SEQ ID NO: 3281411 - RNA, 19 nt, Artificial Sequence
  Description of Artificial Sequence: Synthetic oligonucleotide
uagcccugcaccuugcccg

SEQ ID NO: 3281412 - RNA, 19 nt, Artificial Sequence
  Description of Artificial Sequence: Synthetic oligonucleotide
aacaguaacuuugccccac

SEQ ID NO: 3281413 - RNA, 19 nt, Artificial Sequence
  Description of Artificial Sequence: Synthetic oligonucleotide
gacaauucaguaauaucug

SEQ ID NO: 3281414 - RNA, 19 nt, Artificial Sequence
  Description of Artificial Sequence: Synthetic oligonucleotide
ugucgcaggaacuggaugu

SEQ ID NO: 3281415 - RNA, 19 nt, Artificial Sequence
  Description of Artificial Sequence: Synthetic oligonucleotide
uucaguagcuauuucgaaa

SEQ ID NO: 3281416 - RNA, 19 nt, Artificial Sequence
  Description of Artificial Sequence: Synthetic oligonucleotide
aaacuuucccagccaaugu

SEQ ID NO: 3281417 - RNA, 19 nt, Artificial Sequence
  Description of Artificial Sequence: Synthetic oligonucleotide
uuaccauuccaucuucacu

SEQ ID NO: 3281418 - RNA, 19 nt, Artificial Sequence
  Description of Artificial Sequence: Synthetic oligonucleotide
ucguauaaaauuucugaua

SEQ ID NO: 3281419 - RNA, 19 nt, Artificial Sequence
  Description of Artificial Sequence: Synthetic oligonucleotide
ucaaagauuucacccugca

SEQ ID NO: 3281420 - RNA, 19 nt, Artificial Sequence
  Description of Artificial Sequence: Synthetic oligonucleotide
gauaacacgccuacugugc

SEQ ID NO: 3281421 - RNA, 19 nt, Artificial Sequence
  Description of Artificial Sequence: Synthetic oligonucleotide
ucggccaucuuccccaggg

SEQ ID NO: 3281422 - RNA, 19 nt, Artificial Sequence
  Description of Artificial Sequence: Synthetic oligonucleotide
ugucucacauaauuuacaa

SEQ ID NO: 3281423 - RNA, 19 nt, Artificial Sequence
  Description of Artificial Sequence: Synthetic oligonucleotide
ucacauccuaaguagagau

SEQ ID NO: 3281424 - RNA, 19 nt, Artificial Sequence
  Description of Artificial Sequence: Synthetic oligonucleotide
uuuaccauuccaucuucac

SEQ ID NO: 3281425 - RNA, 19 nt, Artificial Sequence
  Description of Artificial Sequence: Synthetic oligonucleotide
uaccgauagaucacugucc

SEQ ID NO: 3281426 - RNA, 19 nt, Artificial Sequence
  Description of Artificial Sequence: Synthetic oligonucleotide
acuaaagucggaaaaucug

SEQ ID NO: 3281427 - RNA, 19 nt, Artificial Sequence
  Description of Artificial Sequence: Synthetic oligonucleotide
gaauugcaucuccacgucg

SEQ ID NO: 3281428 - RNA, 19 nt, Artificial Sequence
  Description of Artificial Sequence: Synthetic oligonucleotide
uccuagugggguaugucag

SEQ ID NO: 3281429 - RNA, 19 nt, Artificial Sequence
  Description of Artificial Sequence: Synthetic oligonucleotide
gcuauuucgaaacuuuccc

SEQ ID NO: 3281430 - RNA, 19 nt, Artificial Sequence
  Description of Artificial Sequence: Synthetic oligonucleotide
ucaccuuuaaggucauuca

SEQ ID NO: 3281431 - RNA, 19 nt, Artificial Sequence
  Description of Artificial Sequence: Synthetic oligonucleotide
auaucaucacauccuaagu

SEQ ID NO: 3281432 - RNA, 19 nt, Artificial Sequence
  Description of Artificial Sequence: Synthetic oligonucleotide
caauauuggagucaaagua

SEQ ID NO: 3281433 - RNA, 19 nt, Artificial Sequence
  Description of Artificial Sequence: Synthetic oligonucleotide
aaggucgacaauucaguaa

SEQ ID NO: 3281434 - RNA, 19 nt, Artificial Sequence
  Description of Artificial Sequence: Synthetic oligonucleotide
ggcgauguagaacucaucc

SEQ ID NO: 3281435 - RNA, 19 nt, Artificial Sequence
  Description of Artificial Sequence: Synthetic oligonucleotide
aggucgacaauucaguaau

SEQ ID NO: 3281436 - RNA, 19 nt, Artificial Sequence
  Description of Artificial Sequence: Synthetic oligonucleotide
ugcuauauuuaucaccauu

SEQ ID NO: 3281437 - RNA, 19 nt, Artificial Sequence
  Description of Artificial Sequence: Synthetic oligonucleotide
aacaagacccuccgacuug

SEQ ID NO: 3281438 - RNA, 19 nt, Artificial Sequence
  Description of Artificial Sequence: Synthetic oligonucleotide
uuaccucuugccgaucucg

SEQ ID NO: 3281439 - RNA, 19 nt, Artificial Sequence
  Description of Artificial Sequence: Synthetic oligonucleotide
uccuuugcuuaucagugac

SEQ ID NO: 3281440 - RNA, 19 nt, Artificial Sequence
  Description of Artificial Sequence: Synthetic oligonucleotide
uuaaauccccgccgaagca

SEQ ID NO: 3281441 - RNA, 19 nt, Artificial Sequence
  Description of Artificial Sequence: Synthetic oligonucleotide
aacguugccucguuaugcu

SEQ ID NO: 3281442 - RNA, 19 nt, Artificial Sequence
  Description of Artificial Sequence: Synthetic oligonucleotide
ugcuacaggagacgcugcg

SEQ ID NO: 3281443 - RNA, 19 nt, Artificial Sequence
  Description of Artificial Sequence: Synthetic oligonucleotide
uugaccguggcgaaccaca

SEQ ID NO: 3281444 - RNA, 19 nt, Artificial Sequence
  Description of Artificial Sequence: Synthetic oligonucleotide
uuacgacauguucacuugc

SEQ ID NO: 3281445 - RNA, 19 nt, Artificial Sequence
  Description of Artificial Sequence: Synthetic oligonucleotide
caugccguagcgcacgugc

SEQ ID NO: 3281446 - RNA, 19 nt, Artificial Sequence
  Description of Artificial Sequence: Synthetic oligonucleotide
aaagcagcacgggaaagca

SEQ ID NO: 3281447 - RNA, 19 nt, Artificial Sequence
  Description of Artificial Sequence: Synthetic oligonucleotide
ucugugauguagucuuuca

SEQ ID NO: 3281448 - RNA, 19 nt, Artificial Sequence
  Description of Artificial Sequence: Synthetic oligonucleotide
ucgacaauucaguaauauc

SEQ ID NO: 3281449 - RNA, 19 nt, Artificial Sequence
  Description of Artificial Sequence: Synthetic oligonucleotide
aaccauuuaaaauuaauag

SEQ ID NO: 3281450 - RNA, 19 nt, Artificial Sequence
  Description of Artificial Sequence: Synthetic oligonucleotide
uuuaaaauuaauaggagac

SEQ ID NO: 3281451 - RNA, 19 nt, Artificial Sequence
  Description of Artificial Sequence: Synthetic oligonucleotide
aauuuuauuuuauaaaacu

SEQ ID NO: 3281452 - RNA, 19 nt, Artificial Sequence
  Description of Artificial Sequence: Synthetic oligonucleotide
aauaucucaaacaaaaggg

SEQ ID NO: 3281453 - RNA, 19 nt, Artificial Sequence
  Description of Artificial Sequence: Synthetic oligonucleotide
aguuuaaauauuuaaagag

SEQ ID NO: 3281454 - RNA, 19 nt, Artificial Sequence
  Description of Artificial Sequence: Synthetic oligonucleotide
guaaaauucaaauuuacag

SEQ ID NO: 3281455 - RNA, 19 nt, Artificial Sequence
  Description of Artificial Sequence: Synthetic oligonucleotide
ugaguuuaaauauuuaaag

SEQ ID NO: 3281456 - RNA, 19 nt, Artificial Sequence
  Description of Artificial Sequence: Synthetic oligonucleotide
uuucacauaaguaaaauuc

SEQ ID NO: 3281457 - RNA, 19 nt, Artificial Sequence
  Description of Artificial Sequence: Synthetic oligonucleotide
aauauuuaaagaguaaacu

SEQ ID NO: 3281458 - RNA, 19 nt, Artificial Sequence
  Description of Artificial Sequence: Synthetic oligonucleotide
auaaguaaaauucaaauuu

SEQ ID NO: 3281459 - RNA, 19 nt, Artificial Sequence
  Description of Artificial Sequence: Synthetic oligonucleotide
aaauauuuaaagaguaaac

SEQ ID NO: 3281460 - RNA, 19 nt, Artificial Sequence
  Description of Artificial Sequence: Synthetic oligonucleotide
accauuuaaaauuaauagg

SEQ ID NO: 3281461 - RNA, 19 nt, Artificial Sequence
  Description of Artificial Sequence: Synthetic oligonucleotide
aaaauucaaauuuacagua

SEQ ID NO: 3281462 - RNA, 19 nt, Artificial Sequence
  Description of Artificial Sequence: Synthetic oligonucleotide
uaaaauucaaauuuacagu

SEQ ID NO: 3281463 - RNA, 19 nt, Artificial Sequence
  Description of Artificial Sequence: Synthetic oligonucleotide
uuuaaauauuuaaagagua

SEQ ID NO: 3281464 - RNA, 19 nt, Artificial Sequence
  Description of Artificial Sequence: Synthetic oligonucleotide
aauucaaauuuacaguaug

SEQ ID NO: 3281465 - RNA, 19 nt, Artificial Sequence
  Description of Artificial Sequence: Synthetic oligonucleotide
uuuaaguauuuucaguugc

SEQ ID NO: 3281466 - RNA, 19 nt, Artificial Sequence
  Description of Artificial Sequence: Synthetic oligonucleotide
aaauuaauaggagaccuuc

SEQ ID NO: 3281467 - RNA, 19 nt, Artificial Sequence
  Description of Artificial Sequence: Synthetic oligonucleotide
caauaucucaaacaaaagg

SEQ ID NO: 3281468 - RNA, 19 nt, Artificial Sequence
  Description of Artificial Sequence: Synthetic oligonucleotide
aaaagggaauucugcaggc

SEQ ID NO: 3281469 - RNA, 19 nt, Artificial Sequence
  Description of Artificial Sequence: Synthetic oligonucleotide
aucauuuccuuauacaguc

SEQ ID NO: 3281470 - RNA, 19 nt, Artificial Sequence
  Description of Artificial Sequence: Synthetic oligonucleotide
uuaaagaguaaacuuaaaa

SEQ ID NO: 3281471 - RNA, 19 nt, Artificial Sequence
  Description of Artificial Sequence: Synthetic oligonucleotide
uauuuaaagaguaaacuua

SEQ ID NO: 3281472 - RNA, 19 nt, Artificial Sequence
  Description of Artificial Sequence: Synthetic oligonucleotide
aaacaaaagggaauucugc

SEQ ID NO: 3281473 - RNA, 19 nt, Artificial Sequence
  Description of Artificial Sequence: Synthetic oligonucleotide
uuuuauuuuauaaaacuuu

SEQ ID NO: 3281474 - RNA, 19 nt, Artificial Sequence
  Description of Artificial Sequence: Synthetic oligonucleotide
aaguugugaacacaaaugu

SEQ ID NO: 3281475 - RNA, 19 nt, Artificial Sequence
  Description of Artificial Sequence: Synthetic oligonucleotide
auuaauaggagaccuucac

SEQ ID NO: 3281476 - RNA, 19 nt, Artificial Sequence
  Description of Artificial Sequence: Synthetic oligonucleotide
auuuaaaauuaauaggaga

SEQ ID NO: 3281477 - RNA, 19 nt, Artificial Sequence
  Description of Artificial Sequence: Synthetic oligonucleotide
aaagugccaaaccugaaca

SEQ ID NO: 3281478 - RNA, 19 nt, Artificial Sequence
  Description of Artificial Sequence: Synthetic oligonucleotide
uugugaacacaaauguugg

SEQ ID NO: 3281479 - RNA, 19 nt, Artificial Sequence
  Description of Artificial Sequence: Synthetic oligonucleotide
aagccuuucacauaaguaa

SEQ ID NO: 3281480 - RNA, 19 nt, Artificial Sequence
  Description of Artificial Sequence: Synthetic oligonucleotide
uaauaggagaccuucacac

SEQ ID NO: 3281481 - RNA, 19 nt, Artificial Sequence
  Description of Artificial Sequence: Synthetic oligonucleotide
uuuauuuuauaaaacuuuu

SEQ ID NO: 3281482 - RNA, 19 nt, Artificial Sequence
  Description of Artificial Sequence: Synthetic oligonucleotide
uucacauaaguaaaauuca

SEQ ID NO: 3281483 - RNA, 19 nt, Artificial Sequence
  Description of Artificial Sequence: Synthetic oligonucleotide
aacaaaagggaauucugca

SEQ ID NO: 3281484 - RNA, 19 nt, Artificial Sequence
  Description of Artificial Sequence: Synthetic oligonucleotide
acauaaguaaaauucaaau

SEQ ID NO: 3281485 - RNA, 19 nt, Artificial Sequence
  Description of Artificial Sequence: Synthetic oligonucleotide
aaguaaaauucaaauuuac

SEQ ID NO: 3281486 - RNA, 19 nt, Artificial Sequence
  Description of Artificial Sequence: Synthetic oligonucleotide
aaaguugugaacacaaaug

SEQ ID NO: 3281487 - RNA, 19 nt, Artificial Sequence
  Description of Artificial Sequence: Synthetic oligonucleotide
acaaauguugggaaguucc

SEQ ID NO: 3281488 - RNA, 19 nt, Artificial Sequence
  Description of Artificial Sequence: Synthetic oligonucleotide
ucagucauccaucauuucc

SEQ ID NO: 3281489 - RNA, 19 nt, Artificial Sequence
  Description of Artificial Sequence: Synthetic oligonucleotide
uaaaauuaauaggagaccu

SEQ ID NO: 3281490 - RNA, 19 nt, Artificial Sequence
  Description of Artificial Sequence: Synthetic oligonucleotide
caaauuuacaguauguuca

SEQ ID NO: 3281491 - RNA, 19 nt, Artificial Sequence
  Description of Artificial Sequence: Synthetic oligonucleotide
uauguucauuuucugaacc

SEQ ID NO: 3281492 - RNA, 19 nt, Artificial Sequence
  Description of Artificial Sequence: Synthetic oligonucleotide
uaaauauuuaaagaguaaa

SEQ ID NO: 3281493 - RNA, 19 nt, Artificial Sequence
  Description of Artificial Sequence: Synthetic oligonucleotide
uucugaaccauuuaaaauu

SEQ ID NO: 3281494 - RNA, 19 nt, Artificial Sequence
  Description of Artificial Sequence: Synthetic oligonucleotide
ucaaauuuacaguauguuc

SEQ ID NO: 3281495 - RNA, 19 nt, Artificial Sequence
  Description of Artificial Sequence: Synthetic oligonucleotide
gaauucugcaggcagguag

SEQ ID NO: 3281496 - RNA, 19 nt, Artificial Sequence
  Description of Artificial Sequence: Synthetic oligonucleotide
uuaaaauuaauaggagacc

SEQ ID NO: 3281497 - RNA, 19 nt, Artificial Sequence
  Description of Artificial Sequence: Synthetic oligonucleotide
auauuuaaagaguaaacuu

SEQ ID NO: 3281498 - RNA, 19 nt, Artificial Sequence
  Description of Artificial Sequence: Synthetic oligonucleotide
ucugaguuuaaauauuuaa

SEQ ID NO: 3281499 - RNA, 19 nt, Artificial Sequence
  Description of Artificial Sequence: Synthetic oligonucleotide
uucaguugcaauuuuauuu

SEQ ID NO: 3281500 - RNA, 19 nt, Artificial Sequence
  Description of Artificial Sequence: Synthetic oligonucleotide
ugcaauuuuauuuuauaaa

SEQ ID NO: 3281501 - RNA, 19 nt, Artificial Sequence
  Description of Artificial Sequence: Synthetic oligonucleotide
cauuuaaaauuaauaggag

SEQ ID NO: 3281502 - RNA, 19 nt, Artificial Sequence
  Description of Artificial Sequence: Synthetic oligonucleotide
uuuuaaguauuuucaguug

SEQ ID NO: 3281503 - RNA, 19 nt, Artificial Sequence
  Description of Artificial Sequence: Synthetic oligonucleotide
uuaaauauuuaaagaguaa

SEQ ID NO: 3281504 - RNA, 19 nt, Artificial Sequence
  Description of Artificial Sequence: Synthetic oligonucleotide
uacaguauguucauuuucu

SEQ ID NO: 3281505 - RNA, 19 nt, Artificial Sequence
  Description of Artificial Sequence: Synthetic oligonucleotide
gaguuuaaauauuuaaaga

SEQ ID NO: 3281506 - RNA, 19 nt, Artificial Sequence
  Description of Artificial Sequence: Synthetic oligonucleotide
caaaagggaauucugcagg

SEQ ID NO: 3281507 - RNA, 19 nt, Artificial Sequence
  Description of Artificial Sequence: Synthetic oligonucleotide
caauuuuauuuuauaaaac

SEQ ID NO: 3281508 - RNA, 19 nt, Artificial Sequence
  Description of Artificial Sequence: Synthetic oligonucleotide
aguauuuucaguugcaauu

SEQ ID NO: 3281509 - RNA, 19 nt, Artificial Sequence
  Description of Artificial Sequence: Synthetic oligonucleotide
aguauguucauuuucugaa

SEQ ID NO: 3281510 - RNA, 19 nt, Artificial Sequence
  Description of Artificial Sequence: Synthetic oligonucleotide
aagggaauucugcaggcag

SEQ ID NO: 3281511 - RNA, 19 nt, Artificial Sequence
  Description of Artificial Sequence: Synthetic oligonucleotide
aauuaaagugccaaaccug

SEQ ID NO: 3281512 - RNA, 19 nt, Artificial Sequence
  Description of Artificial Sequence: Synthetic oligonucleotide
uuuucugaaccauuuaaaa

SEQ ID NO: 3281513 - RNA, 19 nt, Artificial Sequence
  Description of Artificial Sequence: Synthetic oligonucleotide
ugaacagucagucauccau

SEQ ID NO: 3281514 - RNA, 19 nt, Artificial Sequence
  Description of Artificial Sequence: Synthetic oligonucleotide
guugugaacacaaauguug

SEQ ID NO: 3281515 - RNA, 19 nt, Artificial Sequence
  Description of Artificial Sequence: Synthetic oligonucleotide
uucaaaguugugaacacaa

SEQ ID NO: 3281516 - RNA, 19 nt, Artificial Sequence
  Description of Artificial Sequence: Synthetic oligonucleotide
uaaguaaaauucaaauuua

SEQ ID NO: 3281517 - RNA, 19 nt, Artificial Sequence
  Description of Artificial Sequence: Synthetic oligonucleotide
cagguagcaauuaaagugc

SEQ ID NO: 3281518 - RNA, 19 nt, Artificial Sequence
  Description of Artificial Sequence: Synthetic oligonucleotide
agcaauuaaagugccaaac

SEQ ID NO: 3281519 - RNA, 19 nt, Artificial Sequence
  Description of Artificial Sequence: Synthetic oligonucleotide
aaguuccuaagccuuucac

SEQ ID NO: 3281520 - RNA, 19 nt, Artificial Sequence
  Description of Artificial Sequence: Synthetic oligonucleotide
uccuuauacagucugaguu

SEQ ID NO: 3281521 - RNA, 19 nt, Artificial Sequence
  Description of Artificial Sequence: Synthetic oligonucleotide
uuaauaggagaccuucaca

SEQ ID NO: 3281522 - RNA, 19 nt, Artificial Sequence
  Description of Artificial Sequence: Synthetic oligonucleotide
aauucugcaggcagguagc

SEQ ID NO: 3281523 - RNA, 19 nt, Artificial Sequence
  Description of Artificial Sequence: Synthetic oligonucleotide
aauguugggaaguuccuaa

SEQ ID NO: 3281524 - RNA, 19 nt, Artificial Sequence
  Description of Artificial Sequence: Synthetic oligonucleotide
acaaaagggaauucugcag

SEQ ID NO: 3281525 - RNA, 19 nt, Artificial Sequence
  Description of Artificial Sequence: Synthetic oligonucleotide
uuaaguauuuucaguugca

SEQ ID NO: 3281526 - RNA, 19 nt, Artificial Sequence
  Description of Artificial Sequence: Synthetic oligonucleotide
ucacacaauaucucaaaca

SEQ ID NO: 3281527 - RNA, 19 nt, Artificial Sequence
  Description of Artificial Sequence: Synthetic oligonucleotide
gcagguagcaauuaaagug

SEQ ID NO: 3281528 - RNA, 19 nt, Artificial Sequence
  Description of Artificial Sequence: Synthetic oligonucleotide
uaucucaaacaaaagggaa

SEQ ID NO: 3281529 - RNA, 19 nt, Artificial Sequence
  Description of Artificial Sequence: Synthetic oligonucleotide
aaccugaacagucagucau

SEQ ID NO: 3281530 - RNA, 19 nt, Artificial Sequence
  Description of Artificial Sequence: Synthetic oligonucleotide
aaauuuacaguauguucau

SEQ ID NO: 3281531 - RNA, 19 nt, Artificial Sequence
  Description of Artificial Sequence: Synthetic oligonucleotide
cacaauaucucaaacaaaa

SEQ ID NO: 3281532 - RNA, 19 nt, Artificial Sequence
  Description of Artificial Sequence: Synthetic oligonucleotide
auuuacaguauguucauuu

SEQ ID NO: 3281533 - RNA, 19 nt, Artificial Sequence
  Description of Artificial Sequence: Synthetic oligonucleotide
caaacaaaagggaauucug

SEQ ID NO: 3281534 - RNA, 19 nt, Artificial Sequence
  Description of Artificial Sequence: Synthetic oligonucleotide
uaaagugccaaaccugaac

SEQ ID NO: 3281535 - RNA, 19 nt, Artificial Sequence
  Description of Artificial Sequence: Synthetic oligonucleotide
uuuucaguugcaauuuuau

SEQ ID NO: 3281536 - RNA, 19 nt, Artificial Sequence
  Description of Artificial Sequence: Synthetic oligonucleotide
ucaaacaaaagggaauucu

SEQ ID NO: 3281537 - RNA, 19 nt, Artificial Sequence
  Description of Artificial Sequence: Synthetic oligonucleotide
uuucugaaccauuuaaaau

SEQ ID NO: 3281538 - RNA, 19 nt, Artificial Sequence
  Description of Artificial Sequence: Synthetic oligonucleotide
ugaaccauuuaaaauuaau

SEQ ID NO: 3281539 - RNA, 19 nt, Artificial Sequence
  Description of Artificial Sequence: Synthetic oligonucleotide
uugcaauuuuauuuuauaa

SEQ ID NO: 3281540 - RNA, 19 nt, Artificial Sequence
  Description of Artificial Sequence: Synthetic oligonucleotide
acagucugaguuuaaauau

SEQ ID NO: 3281541 - RNA, 19 nt, Artificial Sequence
  Description of Artificial Sequence: Synthetic oligonucleotide
ugugaacacaaauguuggg

SEQ ID NO: 3281542 - RNA, 19 nt, Artificial Sequence
  Description of Artificial Sequence: Synthetic oligonucleotide
gagaccuucacacaauauc

SEQ ID NO: 3281543 - RNA, 19 nt, Artificial Sequence
  Description of Artificial Sequence: Synthetic oligonucleotide
aacacaaauguugggaagu

SEQ ID NO: 3281544 - RNA, 19 nt, Artificial Sequence
  Description of Artificial Sequence: Synthetic oligonucleotide
guugggaaguuccuaagcc

SEQ ID NO: 3281545 - RNA, 19 nt, Artificial Sequence
  Description of Artificial Sequence: Synthetic oligonucleotide
uacagucugaguuuaaaua

SEQ ID NO: 3281546 - RNA, 19 nt, Artificial Sequence
  Description of Artificial Sequence: Synthetic oligonucleotide
ucacauaaguaaaauucaa

SEQ ID NO: 3281547 - RNA, 19 nt, Artificial Sequence
  Description of Artificial Sequence: Synthetic oligonucleotide
aauaggagaccuucacaca

SEQ ID NO: 3281548 - RNA, 19 nt, Artificial Sequence
  Description of Artificial Sequence: Synthetic oligonucleotide
uccuaagccuuucacauaa

SEQ ID NO: 3281549 - RNA, 19 nt, Artificial Sequence
  Description of Artificial Sequence: Synthetic oligonucleotide
agugcugucauccucaccc

SEQ ID NO: 3281550 - RNA, 19 nt, Artificial Sequence
  Description of Artificial Sequence: Synthetic oligonucleotide
agugauuccucacugaagg

SEQ ID NO: 3281551 - RNA, 19 nt, Artificial Sequence
  Description of Artificial Sequence: Synthetic oligonucleotide
ucaguuacaccaaugagga

SEQ ID NO: 3281552 - RNA, 19 nt, Artificial Sequence
  Description of Artificial Sequence: Synthetic oligonucleotide
aaaugcagaacaaacuggg

SEQ ID NO: 3281553 - RNA, 19 nt, Artificial Sequence
  Description of Artificial Sequence: Synthetic oligonucleotide
auuaauuccuaauggauga

SEQ ID NO: 3281554 - RNA, 19 nt, Artificial Sequence
  Description of Artificial Sequence: Synthetic oligonucleotide
gcuauaauaacccaggaug

SEQ ID NO: 3281555 - RNA, 19 nt, Artificial Sequence
  Description of Artificial Sequence: Synthetic oligonucleotide
uaauggaugaccuccaaga

SEQ ID NO: 3281556 - RNA, 19 nt, Artificial Sequence
  Description of Artificial Sequence: Synthetic oligonucleotide
ugugacuucugucaggggc

SEQ ID NO: 3281557 - RNA, 19 nt, Artificial Sequence
  Description of Artificial Sequence: Synthetic oligonucleotide
acuauugugacuucuguca

SEQ ID NO: 3281558 - RNA, 19 nt, Artificial Sequence
  Description of Artificial Sequence: Synthetic oligonucleotide
auugucacaguugaggugg

SEQ ID NO: 3281559 - RNA, 19 nt, Artificial Sequence
  Description of Artificial Sequence: Synthetic oligonucleotide
uauaagccgauccaguccc

SEQ ID NO: 3281560 - RNA, 19 nt, Artificial Sequence
  Description of Artificial Sequence: Synthetic oligonucleotide
aauaacccaggaugaaguc

SEQ ID NO: 3281561 - RNA, 19 nt, Artificial Sequence
  Description of Artificial Sequence: Synthetic oligonucleotide
aagaucagaacaucugcca

SEQ ID NO: 3281562 - RNA, 19 nt, Artificial Sequence
  Description of Artificial Sequence: Synthetic oligonucleotide
aaggugaccugguagauau

SEQ ID NO: 3281563 - RNA, 19 nt, Artificial Sequence
  Description of Artificial Sequence: Synthetic oligonucleotide
acauaagccacguaguccu

SEQ ID NO: 3281564 - RNA, 19 nt, Artificial Sequence
  Description of Artificial Sequence: Synthetic oligonucleotide
uccaagaucagaacaucug

SEQ ID NO: 3281565 - RNA, 19 nt, Artificial Sequence
  Description of Artificial Sequence: Synthetic oligonucleotide
ugcugauugucacaguuga

SEQ ID NO: 3281566 - RNA, 19 nt, Artificial Sequence
  Description of Artificial Sequence: Synthetic oligonucleotide
aaugcagaacaaacugggc

SEQ ID NO: 3281567 - RNA, 19 nt, Artificial Sequence
  Description of Artificial Sequence: Synthetic oligonucleotide
ucggcugccacuauuguga

SEQ ID NO: 3281568 - RNA, 19 nt, Artificial Sequence
  Description of Artificial Sequence: Synthetic oligonucleotide
uuuggcccagacauaagcc

SEQ ID NO: 3281569 - RNA, 19 nt, Artificial Sequence
  Description of Artificial Sequence: Synthetic oligonucleotide
aggagcuccgagcaaacac

SEQ ID NO: 3281570 - RNA, 19 nt, Artificial Sequence
  Description of Artificial Sequence: Synthetic oligonucleotide
aggcacaucaucccuaaag

SEQ ID NO: 3281571 - RNA, 19 nt, Artificial Sequence
  Description of Artificial Sequence: Synthetic oligonucleotide
ugaccugguagauauuacc

SEQ ID NO: 3281572 - RNA, 19 nt, Artificial Sequence
  Description of Artificial Sequence: Synthetic oligonucleotide
cuugggugcaagcagcucc

SEQ ID NO: 3281573 - RNA, 19 nt, Artificial Sequence
  Description of Artificial Sequence: Synthetic oligonucleotide
uuuggggugagggacuacg

SEQ ID NO: 3281574 - RNA, 19 nt, Artificial Sequence
  Description of Artificial Sequence: Synthetic oligonucleotide
uucgaggcacagcuggugg

SEQ ID NO: 3281575 - RNA, 19 nt, Artificial Sequence
  Description of Artificial Sequence: Synthetic oligonucleotide
uauuccauguggcugcggu

SEQ ID NO: 3281576 - RNA, 19 nt, Artificial Sequence
  Description of Artificial Sequence: Synthetic oligonucleotide
aacccacccgguauaagcc

SEQ ID NO: 3281577 - RNA, 19 nt, Artificial Sequence
  Description of Artificial Sequence: Synthetic oligonucleotide
aauggaugaccuccaagau

SEQ ID NO: 3281578 - RNA, 19 nt, Artificial Sequence
  Description of Artificial Sequence: Synthetic oligonucleotide
cuauaauaacccaggauga

SEQ ID NO: 3281579 - RNA, 19 nt, Artificial Sequence
  Description of Artificial Sequence: Synthetic oligonucleotide
uucacgggaugaaggacgg

SEQ ID NO: 3281580 - RNA, 19 nt, Artificial Sequence
  Description of Artificial Sequence: Synthetic oligonucleotide
acccgguauaagccgaucc

SEQ ID NO: 3281581 - RNA, 19 nt, Artificial Sequence
  Description of Artificial Sequence: Synthetic oligonucleotide
ugguggaaggcccaagggc

SEQ ID NO: 3281582 - RNA, 19 nt, Artificial Sequence
  Description of Artificial Sequence: Synthetic oligonucleotide
uucugagguaggcagcgag

SEQ ID NO: 3281583 - RNA, 19 nt, Artificial Sequence
  Description of Artificial Sequence: Synthetic oligonucleotide
guggcuauaauaacccagg

SEQ ID NO: 3281584 - RNA, 19 nt, Artificial Sequence
  Description of Artificial Sequence: Synthetic oligonucleotide
guauaagccgauccagucc

SEQ ID NO: 3281585 - RNA, 19 nt, Artificial Sequence
  Description of Artificial Sequence: Synthetic oligonucleotide
acaguguauuccauguggc

SEQ ID NO: 3281586 - RNA, 19 nt, Artificial Sequence
  Description of Artificial Sequence: Synthetic oligonucleotide
uaauuccuaauggaugacc

SEQ ID NO: 3281587 - RNA, 19 nt, Artificial Sequence
  Description of Artificial Sequence: Synthetic oligonucleotide
gacguucacgggaugaagg

SEQ ID NO: 3281588 - RNA, 19 nt, Artificial Sequence
  Description of Artificial Sequence: Synthetic oligonucleotide
gauugucacaguugaggug

SEQ ID NO: 3281589 - RNA, 19 nt, Artificial Sequence
  Description of Artificial Sequence: Synthetic oligonucleotide
ugagguggugccaggacug

SEQ ID NO: 3281590 - RNA, 19 nt, Artificial Sequence
  Description of Artificial Sequence: Synthetic oligonucleotide
guucacgggaugaaggacg

SEQ ID NO: 3281591 - RNA, 19 nt, Artificial Sequence
  Description of Artificial Sequence: Synthetic oligonucleotide
ucugucaggggcuacccga

SEQ ID NO: 3281592 - RNA, 19 nt, Artificial Sequence
  Description of Artificial Sequence: Synthetic oligonucleotide
auuccuaauggaugaccuc

SEQ ID NO: 3281593 - RNA, 19 nt, Artificial Sequence
  Description of Artificial Sequence: Synthetic oligonucleotide
gcaagagagaggcaggccg

SEQ ID NO: 3281594 - RNA, 19 nt, Artificial Sequence
  Description of Artificial Sequence: Synthetic oligonucleotide
acgguuuccacgcgauacc

SEQ ID NO: 3281595 - RNA, 19 nt, Artificial Sequence
  Description of Artificial Sequence: Synthetic oligonucleotide
ccagacauaagccacguag

SEQ ID NO: 3281596 - RNA, 19 nt, Artificial Sequence
  Description of Artificial Sequence: Synthetic oligonucleotide
caaggcuggaagcaggccc

SEQ ID NO: 3281597 - RNA, 19 nt, Artificial Sequence
  Description of Artificial Sequence: Synthetic oligonucleotide
uagauauuaccaucuacuu

SEQ ID NO: 3281598 - RNA, 19 nt, Artificial Sequence
  Description of Artificial Sequence: Synthetic oligonucleotide
cucacugaaggugaccugg

SEQ ID NO: 3281599 - RNA, 19 nt, Artificial Sequence
  Description of Artificial Sequence: Synthetic oligonucleotide
gucacugacaguguauucc

SEQ ID NO: 3281600 - RNA, 19 nt, Artificial Sequence
  Description of Artificial Sequence: Synthetic oligonucleotide
cuggccaagacagaguggc

SEQ ID NO: 3281601 - RNA, 19 nt, Artificial Sequence
  Description of Artificial Sequence: Synthetic oligonucleotide
gagagcaagacuggggaag

SEQ ID NO: 3281602 - RNA, 19 nt, Artificial Sequence
  Description of Artificial Sequence: Synthetic oligonucleotide
uucauguuuggcccagaca

SEQ ID NO: 3281603 - RNA, 19 nt, Artificial Sequence
  Description of Artificial Sequence: Synthetic oligonucleotide
cuauugugacuucugucag

SEQ ID NO: 3281604 - RNA, 19 nt, Artificial Sequence
  Description of Artificial Sequence: Synthetic oligonucleotide
cuaauggaugaccuccaag

SEQ ID NO: 3281605 - RNA, 19 nt, Artificial Sequence
  Description of Artificial Sequence: Synthetic oligonucleotide
cuugcagugccggaaaccc

SEQ ID NO: 3281606 - RNA, 19 nt, Artificial Sequence
  Description of Artificial Sequence: Synthetic oligonucleotide
uugcugauugucacaguug

SEQ ID NO: 3281607 - RNA, 19 nt, Artificial Sequence
  Description of Artificial Sequence: Synthetic oligonucleotide
agagcaagacuggggaagc

SEQ ID NO: 3281608 - RNA, 19 nt, Artificial Sequence
  Description of Artificial Sequence: Synthetic oligonucleotide
uaacgacuggagcagcagc

SEQ ID NO: 3281609 - RNA, 19 nt, Artificial Sequence
  Description of Artificial Sequence: Synthetic oligonucleotide
uugagguggugccaggacu

SEQ ID NO: 3281610 - RNA, 19 nt, Artificial Sequence
  Description of Artificial Sequence: Synthetic oligonucleotide
aaggacggagagcaagacu

SEQ ID NO: 3281611 - RNA, 19 nt, Artificial Sequence
  Description of Artificial Sequence: Synthetic oligonucleotide
guagauauuaccaucuacu

SEQ ID NO: 3281612 - RNA, 19 nt, Artificial Sequence
  Description of Artificial Sequence: Synthetic oligonucleotide
ugcagugccggaaacccac

SEQ ID NO: 3281613 - RNA, 19 nt, Artificial Sequence
  Description of Artificial Sequence: Synthetic oligonucleotide
gcaaacacgguuuccacgc

SEQ ID NO: 3281614 - RNA, 19 nt, Artificial Sequence
  Description of Artificial Sequence: Synthetic oligonucleotide
ggugccaggacugaguuag

SEQ ID NO: 3281615 - RNA, 19 nt, Artificial Sequence
  Description of Artificial Sequence: Synthetic oligonucleotide
caccugugcaagaaugggg

SEQ ID NO: 3281616 - RNA, 19 nt, Artificial Sequence
  Description of Artificial Sequence: Synthetic oligonucleotide
ugguuaacgacuggagcag

SEQ ID NO: 3281617 - RNA, 19 nt, Artificial Sequence
  Description of Artificial Sequence: Synthetic oligonucleotide
uauaauaacccaggaugaa

SEQ ID NO: 3281618 - RNA, 19 nt, Artificial Sequence
  Description of Artificial Sequence: Synthetic oligonucleotide
agugccggaaacccacccg

SEQ ID NO: 3281619 - RNA, 19 nt, Artificial Sequence
  Description of Artificial Sequence: Synthetic oligonucleotide
acaccaaugaggaugcugu

SEQ ID NO: 3281620 - RNA, 19 nt, Artificial Sequence
  Description of Artificial Sequence: Synthetic oligonucleotide
uuaccaucuacuucuucau

SEQ ID NO: 3281621 - RNA, 19 nt, Artificial Sequence
  Description of Artificial Sequence: Synthetic oligonucleotide
uuaacgacuggagcagcag

SEQ ID NO: 3281622 - RNA, 19 nt, Artificial Sequence
  Description of Artificial Sequence: Synthetic oligonucleotide
ugacaguguauuccaugug

SEQ ID NO: 3281623 - RNA, 19 nt, Artificial Sequence
  Description of Artificial Sequence: Synthetic oligonucleotide
ugugcaagaaugggguccc

SEQ ID NO: 3281624 - RNA, 19 nt, Artificial Sequence
  Description of Artificial Sequence: Synthetic oligonucleotide
uaagccacguaguccuugc

SEQ ID NO: 3281625 - RNA, 19 nt, Artificial Sequence
  Description of Artificial Sequence: Synthetic oligonucleotide
uuggggugagggacuacgg

SEQ ID NO: 3281626 - RNA, 19 nt, Artificial Sequence
  Description of Artificial Sequence: Synthetic oligonucleotide
uacaccaaugaggaugcug

SEQ ID NO: 3281627 - RNA, 19 nt, Artificial Sequence
  Description of Artificial Sequence: Synthetic oligonucleotide
gacuacggcugccaccgcg

SEQ ID NO: 3281628 - RNA, 19 nt, Artificial Sequence
  Description of Artificial Sequence: Synthetic oligonucleotide
gguagauauuaccaucuac

SEQ ID NO: 3281629 - RNA, 19 nt, Artificial Sequence
  Description of Artificial Sequence: Synthetic oligonucleotide
uggcuauaauaacccagga

SEQ ID NO: 3281630 - RNA, 19 nt, Artificial Sequence
  Description of Artificial Sequence: Synthetic oligonucleotide
ugacucucccguccugagg

SEQ ID NO: 3281631 - RNA, 19 nt, Artificial Sequence
  Description of Artificial Sequence: Synthetic oligonucleotide
uaccaucuacuucuucaug

SEQ ID NO: 3281632 - RNA, 19 nt, Artificial Sequence
  Description of Artificial Sequence: Synthetic oligonucleotide
uucugucaggggcuacccg

SEQ ID NO: 3281633 - RNA, 19 nt, Artificial Sequence
  Description of Artificial Sequence: Synthetic oligonucleotide
cugugcaagaauggggucc

SEQ ID NO: 3281634 - RNA, 19 nt, Artificial Sequence
  Description of Artificial Sequence: Synthetic oligonucleotide
cacuauugugacuucuguc

SEQ ID NO: 3281635 - RNA, 19 nt, Artificial Sequence
  Description of Artificial Sequence: Synthetic oligonucleotide
ggugguggcuauaauaacc

SEQ ID NO: 3281636 - RNA, 19 nt, Artificial Sequence
  Description of Artificial Sequence: Synthetic oligonucleotide
agcaagacuggggaagcgg

SEQ ID NO: 3281637 - RNA, 19 nt, Artificial Sequence
  Description of Artificial Sequence: Synthetic oligonucleotide
uggggugagggacuacggc

SEQ ID NO: 3281638 - RNA, 19 nt, Artificial Sequence
  Description of Artificial Sequence: Synthetic oligonucleotide
auaacccaggaugaagucu

SEQ ID NO: 3281639 - RNA, 19 nt, Artificial Sequence
  Description of Artificial Sequence: Synthetic oligonucleotide
aauggggucccaggcgagg

SEQ ID NO: 3281640 - RNA, 19 nt, Artificial Sequence
  Description of Artificial Sequence: Synthetic oligonucleotide
uuaauuccuaauggaugac

SEQ ID NO: 3281641 - RNA, 19 nt, Artificial Sequence
  Description of Artificial Sequence: Synthetic oligonucleotide
cacgggaugaaggacggag

SEQ ID NO: 3281642 - RNA, 19 nt, Artificial Sequence
  Description of Artificial Sequence: Synthetic oligonucleotide
gccaccgcgacguucacgg

SEQ ID NO: 3281643 - RNA, 19 nt, Artificial Sequence
  Description of Artificial Sequence: Synthetic oligonucleotide
gguggcuauaauaacccag

SEQ ID NO: 3281644 - RNA, 19 nt, Artificial Sequence
  Description of Artificial Sequence: Synthetic oligonucleotide
acaguugagguggugccag

SEQ ID NO: 3281645 - RNA, 19 nt, Artificial Sequence
  Description of Artificial Sequence: Synthetic oligonucleotide
augaccuccaagaucagaa

SEQ ID NO: 3281646 - RNA, 19 nt, Artificial Sequence
  Description of Artificial Sequence: Synthetic oligonucleotide
gguauaagccgauccaguc

SEQ ID NO: 3281647 - RNA, 19 nt, Artificial Sequence
  Description of Artificial Sequence: Synthetic oligonucleotide
acguucacgggaugaagga

SEQ ID NO: 3281648 - RNA, 19 nt, Artificial Sequence
  Description of Artificial Sequence: Synthetic oligonucleotide
gacggagagcaagacuggg

SEQ ID NO: 3281649 - RNA, 19 nt, Artificial Sequence
  Description of Artificial Sequence: Synthetic oligonucleotide
aagaagcacagcuacaagc

SEQ ID NO: 3281650 - RNA, 19 nt, Artificial Sequence
  Description of Artificial Sequence: Synthetic oligonucleotide
accauuagcaguuugaguc

SEQ ID NO: 3281651 - RNA, 19 nt, Artificial Sequence
  Description of Artificial Sequence: Synthetic oligonucleotide
uucuugugcauguagaugg

SEQ ID NO: 3281652 - RNA, 19 nt, Artificial Sequence
  Description of Artificial Sequence: Synthetic oligonucleotide
agaaacugauuucucaggc

SEQ ID NO: 3281653 - RNA, 19 nt, Artificial Sequence
  Description of Artificial Sequence: Synthetic oligonucleotide
gauggaaaaguccagguug

SEQ ID NO: 3281654 - RNA, 19 nt, Artificial Sequence
  Description of Artificial Sequence: Synthetic oligonucleotide
uaacauaugugacuuuugg

SEQ ID NO: 3281655 - RNA, 19 nt, Artificial Sequence
  Description of Artificial Sequence: Synthetic oligonucleotide
aacauaugugacuuuuggg

SEQ ID NO: 3281656 - RNA, 19 nt, Artificial Sequence
  Description of Artificial Sequence: Synthetic oligonucleotide
ugcaguaucucuaacauau

SEQ ID NO: 3281657 - RNA, 19 nt, Artificial Sequence
  Description of Artificial Sequence: Synthetic oligonucleotide
ugugacauuacugauucgg

SEQ ID NO: 3281658 - RNA, 19 nt, Artificial Sequence
  Description of Artificial Sequence: Synthetic oligonucleotide
aaacugauuucucaggcug

SEQ ID NO: 3281659 - RNA, 19 nt, Artificial Sequence
  Description of Artificial Sequence: Synthetic oligonucleotide
uuuaaugggccccacagga

SEQ ID NO: 3281660 - RNA, 19 nt, Artificial Sequence
  Description of Artificial Sequence: Synthetic oligonucleotide
uuugaggaguuucacacag

SEQ ID NO: 3281661 - RNA, 19 nt, Artificial Sequence
  Description of Artificial Sequence: Synthetic oligonucleotide
ucaagcacauacaacacug

SEQ ID NO: 3281662 - RNA, 19 nt, Artificial Sequence
  Description of Artificial Sequence: Synthetic oligonucleotide
auauauuggaugccgacuc

SEQ ID NO: 3281663 - RNA, 19 nt, Artificial Sequence
  Description of Artificial Sequence: Synthetic oligonucleotide
uuugaguccaagaagcaca

SEQ ID NO: 3281664 - RNA, 19 nt, Artificial Sequence
  Description of Artificial Sequence: Synthetic oligonucleotide
acauaugugacuuuuggga

SEQ ID NO: 3281665 - RNA, 19 nt, Artificial Sequence
  Description of Artificial Sequence: Synthetic oligonucleotide
acauuacugauucggaugg

SEQ ID NO: 3281666 - RNA, 19 nt, Artificial Sequence
  Description of Artificial Sequence: Synthetic oligonucleotide
aaguauauauuggaugccg

SEQ ID NO: 3281667 - RNA, 19 nt, Artificial Sequence
  Description of Artificial Sequence: Synthetic oligonucleotide
uuucgguucaagcacauac

SEQ ID NO: 3281668 - RNA, 19 nt, Artificial Sequence
  Description of Artificial Sequence: Synthetic oligonucleotide
auguuuucgguucaagcac

SEQ ID NO: 3281669 - RNA, 19 nt, Artificial Sequence
  Description of Artificial Sequence: Synthetic oligonucleotide
aacagaaacugauuucuca

SEQ ID NO: 3281670 - RNA, 19 nt, Artificial Sequence
  Description of Artificial Sequence: Synthetic oligonucleotide
uggaaguauauauuggaug

SEQ ID NO: 3281671 - RNA, 19 nt, Artificial Sequence
  Description of Artificial Sequence: Synthetic oligonucleotide
aguuucacacaguaguagg

SEQ ID NO: 3281672 - RNA, 19 nt, Artificial Sequence
  Description of Artificial Sequence: Synthetic oligonucleotide
aggaguuucacacaguagu

SEQ ID NO: 3281673 - RNA, 19 nt, Artificial Sequence
  Description of Artificial Sequence: Synthetic oligonucleotide
gacugaaucuccuugucag

SEQ ID NO: 3281674 - RNA, 19 nt, Artificial Sequence
  Description of Artificial Sequence: Synthetic oligonucleotide
gauguuuucgguucaagca

SEQ ID NO: 3281675 - RNA, 19 nt, Artificial Sequence
  Description of Artificial Sequence: Synthetic oligonucleotide
ggaaguauauauuggaugc

SEQ ID NO: 3281676 - RNA, 19 nt, Artificial Sequence
  Description of Artificial Sequence: Synthetic oligonucleotide
caguuugaguccaagaagc

SEQ ID NO: 3281677 - RNA, 19 nt, Artificial Sequence
  Description of Artificial Sequence: Synthetic oligonucleotide
uuugcaguaucucuaacau

SEQ ID NO: 3281678 - RNA, 19 nt, Artificial Sequence
  Description of Artificial Sequence: Synthetic oligonucleotide
gacauuacugauucggaug

SEQ ID NO: 3281679 - RNA, 19 nt, Artificial Sequence
  Description of Artificial Sequence: Synthetic oligonucleotide
acagaaacugauuucucag

SEQ ID NO: 3281680 - RNA, 19 nt, Artificial Sequence
  Description of Artificial Sequence: Synthetic oligonucleotide
aagcagagaggucacagug

SEQ ID NO: 3281681 - RNA, 19 nt, Artificial Sequence
  Description of Artificial Sequence: Synthetic oligonucleotide
cuauggaaguauauauugg

SEQ ID NO: 3281682 - RNA, 19 nt, Artificial Sequence
  Description of Artificial Sequence: Synthetic oligonucleotide
auaugugacuuuugggaac

SEQ ID NO: 3281683 - RNA, 19 nt, Artificial Sequence
  Description of Artificial Sequence: Synthetic oligonucleotide
acauacaacacugugccuc

SEQ ID NO: 3281684 - RNA, 19 nt, Artificial Sequence
  Description of Artificial Sequence: Synthetic oligonucleotide
auguagauggcagaggcac

SEQ ID NO: 3281685 - RNA, 19 nt, Artificial Sequence
  Description of Artificial Sequence: Synthetic oligonucleotide
accaauuaccauuagcagu

SEQ ID NO: 3281686 - RNA, 19 nt, Artificial Sequence
  Description of Artificial Sequence: Synthetic oligonucleotide
cauuuaaugggccccacag

SEQ ID NO: 3281687 - RNA, 19 nt, Artificial Sequence
  Description of Artificial Sequence: Synthetic oligonucleotide
ugauguuuucgguucaagc

SEQ ID NO: 3281688 - RNA, 19 nt, Artificial Sequence
  Description of Artificial Sequence: Synthetic oligonucleotide
cacagugcaguucagagug

SEQ ID NO: 3281689 - RNA, 19 nt, Artificial Sequence
  Description of Artificial Sequence: Synthetic oligonucleotide
gguucaagcacauacaaca

SEQ ID NO: 3281690 - RNA, 19 nt, Artificial Sequence
  Description of Artificial Sequence: Synthetic oligonucleotide
agcacauacaacacugugc

SEQ ID NO: 3281691 - RNA, 19 nt, Artificial Sequence
  Description of Artificial Sequence: Synthetic oligonucleotide
agcaacagaaacugauuuc

SEQ ID NO: 3281692 - RNA, 19 nt, Artificial Sequence
  Description of Artificial Sequence: Synthetic oligonucleotide
uaaugggccccacaggaag

SEQ ID NO: 3281693 - RNA, 19 nt, Artificial Sequence
  Description of Artificial Sequence: Synthetic oligonucleotide
uugugcauguagauggcag

SEQ ID NO: 3281694 - RNA, 19 nt, Artificial Sequence
  Description of Artificial Sequence: Synthetic oligonucleotide
auuggaugccgacucugcc

SEQ ID NO: 3281695 - RNA, 19 nt, Artificial Sequence
  Description of Artificial Sequence: Synthetic oligonucleotide
aauuaccauuagcaguuug

SEQ ID NO: 3281696 - RNA, 19 nt, Artificial Sequence
  Description of Artificial Sequence: Synthetic oligonucleotide
auuuaaugggccccacagg

SEQ ID NO: 3281697 - RNA, 19 nt, Artificial Sequence
  Description of Artificial Sequence: Synthetic oligonucleotide
ugaaucaccaucagcuccu

SEQ ID NO: 3281698 - RNA, 19 nt, Artificial Sequence
  Description of Artificial Sequence: Synthetic oligonucleotide
ucugcuuugaggaguuuca

SEQ ID NO: 3281699 - RNA, 19 nt, Artificial Sequence
  Description of Artificial Sequence: Synthetic oligonucleotide
aucucuaacauaugugacu

SEQ ID NO: 3281700 - RNA, 19 nt, Artificial Sequence
  Description of Artificial Sequence: Synthetic oligonucleotide
uaucucuaacauaugugac

SEQ ID NO: 3281701 - RNA, 19 nt, Artificial Sequence
  Description of Artificial Sequence: Synthetic oligonucleotide
aucaccaucagcuccugug

SEQ ID NO: 3281702 - RNA, 19 nt, Artificial Sequence
  Description of Artificial Sequence: Synthetic oligonucleotide
uucacacaguaguaggugc

SEQ ID NO: 3281703 - RNA, 19 nt, Artificial Sequence
  Description of Artificial Sequence: Synthetic oligonucleotide
agcaguaucugauguuuuc

SEQ ID NO: 3281704 - RNA, 19 nt, Artificial Sequence
  Description of Artificial Sequence: Synthetic oligonucleotide
uucucuuugcaguaucucu

SEQ ID NO: 3281705 - RNA, 19 nt, Artificial Sequence
  Description of Artificial Sequence: Synthetic oligonucleotide
agcuacaagcacuucagca

SEQ ID NO: 3281706 - RNA, 19 nt, Artificial Sequence
  Description of Artificial Sequence: Synthetic oligonucleotide
uucaagcacauacaacacu

SEQ ID NO: 3281707 - RNA, 19 nt, Artificial Sequence
  Description of Artificial Sequence: Synthetic oligonucleotide
uauauauuggaugccgacu

SEQ ID NO: 3281708 - RNA, 19 nt, Artificial Sequence
  Description of Artificial Sequence: Synthetic oligonucleotide
gucacagugcaguucagag

SEQ ID NO: 3281709 - RNA, 19 nt, Artificial Sequence
  Description of Artificial Sequence: Synthetic oligonucleotide
uugaguccaagaagcacag

SEQ ID NO: 3281710 - RNA, 19 nt, Artificial Sequence
  Description of Artificial Sequence: Synthetic oligonucleotide
uaucugauguuuucgguuc

SEQ ID NO: 3281711 - RNA, 19 nt, Artificial Sequence
  Description of Artificial Sequence: Synthetic oligonucleotide
agcaguuugaguccaagaa

SEQ ID NO: 3281712 - RNA, 19 nt, Artificial Sequence
  Description of Artificial Sequence: Synthetic oligonucleotide
gucagcuucugcuuugagg

SEQ ID NO: 3281713 - RNA, 19 nt, Artificial Sequence
  Description of Artificial Sequence: Synthetic oligonucleotide
aaaaguccagguuguuucu

SEQ ID NO: 3281714 - RNA, 19 nt, Artificial Sequence
  Description of Artificial Sequence: Synthetic oligonucleotide
ucugcuuucuugugcaugu

SEQ ID NO: 3281715 - RNA, 19 nt, Artificial Sequence
  Description of Artificial Sequence: Synthetic oligonucleotide
cugaaucaccaucagcucc

SEQ ID NO: 3281716 - RNA, 19 nt, Artificial Sequence
  Description of Artificial Sequence: Synthetic oligonucleotide
cagaaacugauuucucagg

SEQ ID NO: 3281717 - RNA, 19 nt, Artificial Sequence
  Description of Artificial Sequence: Synthetic oligonucleotide
uuaccguggaaccauuuaa

SEQ ID NO: 3281718 - RNA, 19 nt, Artificial Sequence
  Description of Artificial Sequence: Synthetic oligonucleotide
ugaggaguuucacacagua

SEQ ID NO: 3281719 - RNA, 19 nt, Artificial Sequence
  Description of Artificial Sequence: Synthetic oligonucleotide
uguuuucgguucaagcaca

SEQ ID NO: 3281720 - RNA, 19 nt, Artificial Sequence
  Description of Artificial Sequence: Synthetic oligonucleotide
acuuuugggaacugcucuc

SEQ ID NO: 3281721 - RNA, 19 nt, Artificial Sequence
  Description of Artificial Sequence: Synthetic oligonucleotide
ugcuuucuugugcauguag

SEQ ID NO: 3281722 - RNA, 19 nt, Artificial Sequence
  Description of Artificial Sequence: Synthetic oligonucleotide
uacugauucggauggaaaa

SEQ ID NO: 3281723 - RNA, 19 nt, Artificial Sequence
  Description of Artificial Sequence: Synthetic oligonucleotide
gcacauacaacacugugcc

SEQ ID NO: 3281724 - RNA, 19 nt, Artificial Sequence
  Description of Artificial Sequence: Synthetic oligonucleotide
ucacacaguaguaggugcc

SEQ ID NO: 3281725 - RNA, 19 nt, Artificial Sequence
  Description of Artificial Sequence: Synthetic oligonucleotide
uccagguuguuucucuuug

SEQ ID NO: 3281726 - RNA, 19 nt, Artificial Sequence
  Description of Artificial Sequence: Synthetic oligonucleotide
caguaucugauguuuucgg

SEQ ID NO: 3281727 - RNA, 19 nt, Artificial Sequence
  Description of Artificial Sequence: Synthetic oligonucleotide
acaguaguaggugccagcg

SEQ ID NO: 3281728 - RNA, 19 nt, Artificial Sequence
  Description of Artificial Sequence: Synthetic oligonucleotide
uucgguucaagcacauaca

SEQ ID NO: 3281729 - RNA, 19 nt, Artificial Sequence
  Description of Artificial Sequence: Synthetic oligonucleotide
uuucucaggcugaaucacc

SEQ ID NO: 3281730 - RNA, 19 nt, Artificial Sequence
  Description of Artificial Sequence: Synthetic oligonucleotide
agaggcaccaauuaccauu

SEQ ID NO: 3281731 - RNA, 19 nt, Artificial Sequence
  Description of Artificial Sequence: Synthetic oligonucleotide
gcuacaagcacuucagcag

SEQ ID NO: 3281732 - RNA, 19 nt, Artificial Sequence
  Description of Artificial Sequence: Synthetic oligonucleotide
uauuggaugccgacucugc

SEQ ID NO: 3281733 - RNA, 19 nt, Artificial Sequence
  Description of Artificial Sequence: Synthetic oligonucleotide
ucuaacauaugugacuuuu

SEQ ID NO: 3281734 - RNA, 19 nt, Artificial Sequence
  Description of Artificial Sequence: Synthetic oligonucleotide
guauauauuggaugccgac

SEQ ID NO: 3281735 - RNA, 19 nt, Artificial Sequence
  Description of Artificial Sequence: Synthetic oligonucleotide
ucucuuugcaguaucucua

SEQ ID NO: 3281736 - RNA, 19 nt, Artificial Sequence
  Description of Artificial Sequence: Synthetic oligonucleotide
cauacaacacugugccucc

SEQ ID NO: 3281737 - RNA, 19 nt, Artificial Sequence
  Description of Artificial Sequence: Synthetic oligonucleotide
aguaucugauguuuucggu

SEQ ID NO: 3281738 - RNA, 19 nt, Artificial Sequence
  Description of Artificial Sequence: Synthetic oligonucleotide
gaaguauauauuggaugcc

SEQ ID NO: 3281739 - RNA, 19 nt, Artificial Sequence
  Description of Artificial Sequence: Synthetic oligonucleotide
acugauucggauggaaaag

SEQ ID NO: 3281740 - RNA, 19 nt, Artificial Sequence
  Description of Artificial Sequence: Synthetic oligonucleotide
caccaauuaccauuagcag

SEQ ID NO: 3281741 - RNA, 19 nt, Artificial Sequence
  Description of Artificial Sequence: Synthetic oligonucleotide
aagcacuucagcaguaucu

SEQ ID NO: 3281742 - RNA, 19 nt, Artificial Sequence
  Description of Artificial Sequence: Synthetic oligonucleotide
uuucuugugcauguagaug

SEQ ID NO: 3281743 - RNA, 19 nt, Artificial Sequence
  Description of Artificial Sequence: Synthetic oligonucleotide
aggcugaaucaccaucagc

SEQ ID NO: 3281744 - RNA, 19 nt, Artificial Sequence
  Description of Artificial Sequence: Synthetic oligonucleotide
ucggauggaaaaguccagg

SEQ ID NO: 3281745 - RNA, 19 nt, Artificial Sequence
  Description of Artificial Sequence: Synthetic oligonucleotide
gaguuucacacaguaguag

SEQ ID NO: 3281746 - RNA, 19 nt, Artificial Sequence
  Description of Artificial Sequence: Synthetic oligonucleotide
cguggaaccauuuaauggg

SEQ ID NO: 3281747 - RNA, 19 nt, Artificial Sequence
  Description of Artificial Sequence: Synthetic oligonucleotide
ucgguucaagcacauacaa

SEQ ID NO: 3281748 - RNA, 19 nt, Artificial Sequence
  Description of Artificial Sequence: Synthetic oligonucleotide
aaugggccccacaggaagc

SEQ ID NO: 3281749 - RNA, 19 nt, Artificial Sequence
  Description of Artificial Sequence: Synthetic oligonucleotide
aacaguugguucuaggucc

SEQ ID NO: 3281750 - RNA, 19 nt, Artificial Sequence
  Description of Artificial Sequence: Synthetic oligonucleotide
aaagaaaguaucuaaagau

SEQ ID NO: 3281751 - RNA, 19 nt, Artificial Sequence
  Description of Artificial Sequence: Synthetic oligonucleotide
ucuagcacaagcucgaugg

SEQ ID NO: 3281752 - RNA, 19 nt, Artificial Sequence
  Description of Artificial Sequence: Synthetic oligonucleotide
aaugaagccaucuggcugg

SEQ ID NO: 3281753 - RNA, 19 nt, Artificial Sequence
  Description of Artificial Sequence: Synthetic oligonucleotide
cuaaagauuccuauguucc

SEQ ID NO: 3281754 - RNA, 19 nt, Artificial Sequence
  Description of Artificial Sequence: Synthetic oligonucleotide
ugaaagaaaguaucuaaag

SEQ ID NO: 3281755 - RNA, 19 nt, Artificial Sequence
  Description of Artificial Sequence: Synthetic oligonucleotide
caaacaugcaucuacacac

SEQ ID NO: 3281756 - RNA, 19 nt, Artificial Sequence
  Description of Artificial Sequence: Synthetic oligonucleotide
aagagugagugguacuucc

SEQ ID NO: 3281757 - RNA, 19 nt, Artificial Sequence
  Description of Artificial Sequence: Synthetic oligonucleotide
ucuagguccaugaaaagug

SEQ ID NO: 3281758 - RNA, 19 nt, Artificial Sequence
  Description of Artificial Sequence: Synthetic oligonucleotide
aauggagagacacucccuc

SEQ ID NO: 3281759 - RNA, 19 nt, Artificial Sequence
  Description of Artificial Sequence: Synthetic oligonucleotide
uuccaaaugauccuguuga

SEQ ID NO: 3281760 - RNA, 19 nt, Artificial Sequence
  Description of Artificial Sequence: Synthetic oligonucleotide
uaucuaaagauuccuaugu

SEQ ID NO: 3281761 - RNA, 19 nt, Artificial Sequence
  Description of Artificial Sequence: Synthetic oligonucleotide
aauauaguucccagcaagc

SEQ ID NO: 3281762 - RNA, 19 nt, Artificial Sequence
  Description of Artificial Sequence: Synthetic oligonucleotide
ugacuguccagaaugaagc

SEQ ID NO: 3281763 - RNA, 19 nt, Artificial Sequence
  Description of Artificial Sequence: Synthetic oligonucleotide
ucuacacacacacacacac

SEQ ID NO: 3281764 - RNA, 19 nt, Artificial Sequence
  Description of Artificial Sequence: Synthetic oligonucleotide
ugcaucuacacacacacac

SEQ ID NO: 3281765 - RNA, 19 nt, Artificial Sequence
  Description of Artificial Sequence: Synthetic oligonucleotide
gaaagaaaguaucuaaaga

SEQ ID NO: 3281766 - RNA, 19 nt, Artificial Sequence
  Description of Artificial Sequence: Synthetic oligonucleotide
caaaugauccuguugacug

SEQ ID NO: 3281767 - RNA, 19 nt, Artificial Sequence
  Description of Artificial Sequence: Synthetic oligonucleotide
agaaaguaucuaaagauuc

SEQ ID NO: 3281768 - RNA, 19 nt, Artificial Sequence
  Description of Artificial Sequence: Synthetic oligonucleotide
ugaauggagagacacuccc

SEQ ID NO: 3281769 - RNA, 19 nt, Artificial Sequence
  Description of Artificial Sequence: Synthetic oligonucleotide
gauccuuucuagcacaagc

SEQ ID NO: 3281770 - RNA, 19 nt, Artificial Sequence
  Description of Artificial Sequence: Synthetic oligonucleotide
ucucaugaaagaaaguauc

SEQ ID NO: 3281771 - RNA, 19 nt, Artificial Sequence
  Description of Artificial Sequence: Synthetic oligonucleotide
aucuauaacaguugguucu

SEQ ID NO: 3281772 - RNA, 19 nt, Artificial Sequence
  Description of Artificial Sequence: Synthetic oligonucleotide
uuuuggauccuuucuagca

SEQ ID NO: 3281773 - RNA, 19 nt, Artificial Sequence
  Description of Artificial Sequence: Synthetic oligonucleotide
aacaugcaucuacacacac

SEQ ID NO: 3281774 - RNA, 19 nt, Artificial Sequence
  Description of Artificial Sequence: Synthetic oligonucleotide
caugcaucuacacacacac

SEQ ID NO: 3281775 - RNA, 19 nt, Artificial Sequence
  Description of Artificial Sequence: Synthetic oligonucleotide
uacacacacacacacacac

SEQ ID NO: 3281776 - RNA, 19 nt, Artificial Sequence
  Description of Artificial Sequence: Synthetic oligonucleotide
uuccaggcaauauaguucc

SEQ ID NO: 3281777 - RNA, 19 nt, Artificial Sequence
  Description of Artificial Sequence: Synthetic oligonucleotide
ucuaaagauuccuauguuc

SEQ ID NO: 3281778 - RNA, 19 nt, Artificial Sequence
  Description of Artificial Sequence: Synthetic oligonucleotide
uugacuguccagaaugaag

SEQ ID NO: 3281779 - RNA, 19 nt, Artificial Sequence
  Description of Artificial Sequence: Synthetic oligonucleotide
uugaccaaugugaauggag

SEQ ID NO: 3281780 - RNA, 19 nt, Artificial Sequence
  Description of Artificial Sequence: Synthetic oligonucleotide
ugaaggugccccuacagcc

SEQ ID NO: 3281781 - RNA, 19 nt, Artificial Sequence
  Description of Artificial Sequence: Synthetic oligonucleotide
uguucuggguggaagagug

SEQ ID NO: 3281782 - RNA, 19 nt, Artificial Sequence
  Description of Artificial Sequence: Synthetic oligonucleotide
uauaacaguugguucuagg

SEQ ID NO: 3281783 - RNA, 19 nt, Artificial Sequence
  Description of Artificial Sequence: Synthetic oligonucleotide
aagauuccuauguuccauc

SEQ ID NO: 3281784 - RNA, 19 nt, Artificial Sequence
  Description of Artificial Sequence: Synthetic oligonucleotide
aaaguaucuaaagauuccu

SEQ ID NO: 3281785 - RNA, 19 nt, Artificial Sequence
  Description of Artificial Sequence: Synthetic oligonucleotide
aagccaucuggcuggauuc

SEQ ID NO: 3281786 - RNA, 19 nt, Artificial Sequence
  Description of Artificial Sequence: Synthetic oligonucleotide
ugaccaaugugaauggaga

SEQ ID NO: 3281787 - RNA, 19 nt, Artificial Sequence
  Description of Artificial Sequence: Synthetic oligonucleotide
cagaguaucgaccucgugc

SEQ ID NO: 3281788 - RNA, 19 nt, Artificial Sequence
  Description of Artificial Sequence: Synthetic oligonucleotide
auaacaguugguucuaggu

SEQ ID NO: 3281789 - RNA, 19 nt, Artificial Sequence
  Description of Artificial Sequence: Synthetic oligonucleotide
augaaaagugcucugggca

SEQ ID NO: 3281790 - RNA, 19 nt, Artificial Sequence
  Description of Artificial Sequence: Synthetic oligonucleotide
ucugccagcuuuuggaucc

SEQ ID NO: 3281791 - RNA, 19 nt, Artificial Sequence
  Description of Artificial Sequence: Synthetic oligonucleotide
caauauaguucccagcaag

SEQ ID NO: 3281792 - RNA, 19 nt, Artificial Sequence
  Description of Artificial Sequence: Synthetic oligonucleotide
aguaucuaaagauuccuau

SEQ ID NO: 3281793 - RNA, 19 nt, Artificial Sequence
  Description of Artificial Sequence: Synthetic oligonucleotide
gaaugaagccaucuggcug

SEQ ID NO: 3281794 - RNA, 19 nt, Artificial Sequence
  Description of Artificial Sequence: Synthetic oligonucleotide
ucccaucuauaacaguugg

SEQ ID NO: 3281795 - RNA, 19 nt, Artificial Sequence
  Description of Artificial Sequence: Synthetic oligonucleotide
gaaaguaucuaaagauucc

SEQ ID NO: 3281796 - RNA, 19 nt, Artificial Sequence
  Description of Artificial Sequence: Synthetic oligonucleotide
cuuagcauuuuccaaauga

SEQ ID NO: 3281797 - RNA, 19 nt, Artificial Sequence
  Description of Artificial Sequence: Synthetic oligonucleotide
guugucucaugaaagaaag

SEQ ID NO: 3281798 - RNA, 19 nt, Artificial Sequence
  Description of Artificial Sequence: Synthetic oligonucleotide
agcucgauggccucugagc

SEQ ID NO: 3281799 - RNA, 19 nt, Artificial Sequence
  Description of Artificial Sequence: Synthetic oligonucleotide
uuagcauuuuccaaaugau

SEQ ID NO: 3281800 - RNA, 19 nt, Artificial Sequence
  Description of Artificial Sequence: Synthetic oligonucleotide
auaguuguuugcagcaucc

SEQ ID NO: 3281801 - RNA, 19 nt, Artificial Sequence
  Description of Artificial Sequence: Synthetic oligonucleotide
cuggauuccauguuccagg

SEQ ID NO: 3281802 - RNA, 19 nt, Artificial Sequence
  Description of Artificial Sequence: Synthetic oligonucleotide
acaaacaugcaucuacaca

SEQ ID NO: 3281803 - RNA, 19 nt, Artificial Sequence
  Description of Artificial Sequence: Synthetic oligonucleotide
agcuugaccaaugugaaug

SEQ ID NO: 3281804 - RNA, 19 nt, Artificial Sequence
  Description of Artificial Sequence: Synthetic oligonucleotide
uccaucuuagcauuuucca

SEQ ID NO: 3281805 - RNA, 19 nt, Artificial Sequence
  Description of Artificial Sequence: Synthetic oligonucleotide
uuuggauccuuucuagcac

SEQ ID NO: 3281806 - RNA, 19 nt, Artificial Sequence
  Description of Artificial Sequence: Synthetic oligonucleotide
guaucuaaagauuccuaug

SEQ ID NO: 3281807 - RNA, 19 nt, Artificial Sequence
  Description of Artificial Sequence: Synthetic oligonucleotide
aaugauccuguugacuguc

SEQ ID NO: 3281808 - RNA, 19 nt, Artificial Sequence
  Description of Artificial Sequence: Synthetic oligonucleotide
cagaaugaagccaucuggc

SEQ ID NO: 3281809 - RNA, 19 nt, Artificial Sequence
  Description of Artificial Sequence: Synthetic oligonucleotide
ugucucaugaaagaaagua

SEQ ID NO: 3281810 - RNA, 19 nt, Artificial Sequence
  Description of Artificial Sequence: Synthetic oligonucleotide
agaguaucgaccucgugca

SEQ ID NO: 3281811 - RNA, 19 nt, Artificial Sequence
  Description of Artificial Sequence: Synthetic oligonucleotide
aguuguuugcagcauccuc

SEQ ID NO: 3281812 - RNA, 19 nt, Artificial Sequence
  Description of Artificial Sequence: Synthetic oligonucleotide
uuccaucuuagcauuuucc

SEQ ID NO: 3281813 - RNA, 19 nt, Artificial Sequence
  Description of Artificial Sequence: Synthetic oligonucleotide
caugcugaucugaaggugc

SEQ ID NO: 3281814 - RNA, 19 nt, Artificial Sequence
  Description of Artificial Sequence: Synthetic oligonucleotide
cuguugacuguccagaaug

SEQ ID NO: 3281815 - RNA, 19 nt, Artificial Sequence
  Description of Artificial Sequence: Synthetic oligonucleotide
acggaucccaucuauaaca

SEQ ID NO: 3281816 - RNA, 19 nt, Artificial Sequence
  Description of Artificial Sequence: Synthetic oligonucleotide
ucacaagcuguucugggug

SEQ ID NO: 3281817 - RNA, 19 nt, Artificial Sequence
  Description of Artificial Sequence: Synthetic oligonucleotide
uguugucucaugaaagaaa

SEQ ID NO: 3281818 - RNA, 19 nt, Artificial Sequence
  Description of Artificial Sequence: Synthetic oligonucleotide
gauuccauguuccaggcaa

SEQ ID NO: 3281819 - RNA, 19 nt, Artificial Sequence
  Description of Artificial Sequence: Synthetic oligonucleotide
ucugaaggugccccuacag

SEQ ID NO: 3281820 - RNA, 19 nt, Artificial Sequence
  Description of Artificial Sequence: Synthetic oligonucleotide
ugugaauggagagacacuc

SEQ ID NO: 3281821 - RNA, 19 nt, Artificial Sequence
  Description of Artificial Sequence: Synthetic oligonucleotide
auucacaagcuguucuggg

SEQ ID NO: 3281822 - RNA, 19 nt, Artificial Sequence
  Description of Artificial Sequence: Synthetic oligonucleotide
caugaaaagugcucugggc

SEQ ID NO: 3281823 - RNA, 19 nt, Artificial Sequence
  Description of Artificial Sequence: Synthetic oligonucleotide
uccauucacaagcuguucu

SEQ ID NO: 3281824 - RNA, 19 nt, Artificial Sequence
  Description of Artificial Sequence: Synthetic oligonucleotide
uaacaguugguucuagguc

SEQ ID NO: 3281825 - RNA, 19 nt, Artificial Sequence
  Description of Artificial Sequence: Synthetic oligonucleotide
uccaugaaaagugcucugg

SEQ ID NO: 3281826 - RNA, 19 nt, Artificial Sequence
  Description of Artificial Sequence: Synthetic oligonucleotide
guuguuugcagcauccucc

SEQ ID NO: 3281827 - RNA, 19 nt, Artificial Sequence
  Description of Artificial Sequence: Synthetic oligonucleotide
ugaaaagugcucugggcac

SEQ ID NO: 3281828 - RNA, 19 nt, Artificial Sequence
  Description of Artificial Sequence: Synthetic oligonucleotide
aggcaauauaguucccagc

SEQ ID NO: 3281829 - RNA, 19 nt, Artificial Sequence
  Description of Artificial Sequence: Synthetic oligonucleotide
uccagaaugaagccaucug

SEQ ID NO: 3281830 - RNA, 19 nt, Artificial Sequence
  Description of Artificial Sequence: Synthetic oligonucleotide
auaguucccagcaagcauc

SEQ ID NO: 3281831 - RNA, 19 nt, Artificial Sequence
  Description of Artificial Sequence: Synthetic oligonucleotide
uauaguucccagcaagcau

SEQ ID NO: 3281832 - RNA, 19 nt, Artificial Sequence
  Description of Artificial Sequence: Synthetic oligonucleotide
aaaugauccuguugacugu

SEQ ID NO: 3281833 - RNA, 19 nt, Artificial Sequence
  Description of Artificial Sequence: Synthetic oligonucleotide
uaaagauuccuauguucca

SEQ ID NO: 3281834 - RNA, 19 nt, Artificial Sequence
  Description of Artificial Sequence: Synthetic oligonucleotide
caucuacacacacacacac

SEQ ID NO: 3281835 - RNA, 19 nt, Artificial Sequence
  Description of Artificial Sequence: Synthetic oligonucleotide
caugaaagaaaguaucuaa

SEQ ID NO: 3281836 - RNA, 19 nt, Artificial Sequence
  Description of Artificial Sequence: Synthetic oligonucleotide
cacacacacacacacacac

SEQ ID NO: 3281837 - RNA, 19 nt, Artificial Sequence
  Description of Artificial Sequence: Synthetic oligonucleotide
uacuuccccacacggaucc

SEQ ID NO: 3281838 - RNA, 19 nt, Artificial Sequence
  Description of Artificial Sequence: Synthetic oligonucleotide
gaccaaugugaauggagag

SEQ ID NO: 3281839 - RNA, 19 nt, Artificial Sequence
  Description of Artificial Sequence: Synthetic oligonucleotide
auuccuauguuccaucuua

SEQ ID NO: 3281840 - RNA, 19 nt, Artificial Sequence
  Description of Artificial Sequence: Synthetic oligonucleotide
gagagacacucccucaugc

SEQ ID NO: 3281841 - RNA, 19 nt, Artificial Sequence
  Description of Artificial Sequence: Synthetic oligonucleotide
uagcauuuuccaaaugauc

SEQ ID NO: 3281842 - RNA, 19 nt, Artificial Sequence
  Description of Artificial Sequence: Synthetic oligonucleotide
agugguacuuccccacacg

SEQ ID NO: 3281843 - RNA, 19 nt, Artificial Sequence
  Description of Artificial Sequence: Synthetic oligonucleotide
cuuuuggauccuuucuagc

SEQ ID NO: 3281844 - RNA, 19 nt, Artificial Sequence
  Description of Artificial Sequence: Synthetic oligonucleotide
ugcagcauccuccuuucca

SEQ ID NO: 3281845 - RNA, 19 nt, Artificial Sequence
  Description of Artificial Sequence: Synthetic oligonucleotide
agaaugaagccaucuggcu

SEQ ID NO: 3281846 - RNA, 19 nt, Artificial Sequence
  Description of Artificial Sequence: Synthetic oligonucleotide
ucugggcacaugcuuuccg

SEQ ID NO: 3281847 - RNA, 19 nt, Artificial Sequence
  Description of Artificial Sequence: Synthetic oligonucleotide
uuccuauguuccaucuuag

SEQ ID NO: 3281848 - RNA, 19 nt, Artificial Sequence
  Description of Artificial Sequence: Synthetic oligonucleotide
cuagguccaugaaaagugc

SEQ ID NO: 3281849 - RNA, 19 nt, Artificial Sequence
  Description of Artificial Sequence: Synthetic oligonucleotide
aaagucuucagcuugagcc

SEQ ID NO: 3281850 - RNA, 19 nt, Artificial Sequence
  Description of Artificial Sequence: Synthetic oligonucleotide
ugugacaucaccaugaucc

SEQ ID NO: 3281851 - RNA, 19 nt, Artificial Sequence
  Description of Artificial Sequence: Synthetic oligonucleotide
uucaauauucaguucaucg

SEQ ID NO: 3281852 - RNA, 19 nt, Artificial Sequence
  Description of Artificial Sequence: Synthetic oligonucleotide
aauaaaggcuuguauacuc

SEQ ID NO: 3281853 - RNA, 19 nt, Artificial Sequence
  Description of Artificial Sequence: Synthetic oligonucleotide
acuuguauaguuuauugcg

SEQ ID NO: 3281854 - RNA, 19 nt, Artificial Sequence
  Description of Artificial Sequence: Synthetic oligonucleotide
uuuauagaaugccucaagg

SEQ ID NO: 3281855 - RNA, 19 nt, Artificial Sequence
  Description of Artificial Sequence: Synthetic oligonucleotide
uaauucaauauucaguuca

SEQ ID NO: 3281856 - RNA, 19 nt, Artificial Sequence
  Description of Artificial Sequence: Synthetic oligonucleotide
auaauuaucugcuacucuc

SEQ ID NO: 3281857 - RNA, 19 nt, Artificial Sequence
  Description of Artificial Sequence: Synthetic oligonucleotide
uacagcuucaaauaaaggc

SEQ ID NO: 3281858 - RNA, 19 nt, Artificial Sequence
  Description of Artificial Sequence: Synthetic oligonucleotide
ucaaacucaagaauggggc

SEQ ID NO: 3281859 - RNA, 19 nt, Artificial Sequence
  Description of Artificial Sequence: Synthetic oligonucleotide
aguaauucaauauucaguu

SEQ ID NO: 3281860 - RNA, 19 nt, Artificial Sequence
  Description of Artificial Sequence: Synthetic oligonucleotide
caagguaagacuuguauag

SEQ ID NO: 3281861 - RNA, 19 nt, Artificial Sequence
  Description of Artificial Sequence: Synthetic oligonucleotide
aaugaguucagggugauga

SEQ ID NO: 3281862 - RNA, 19 nt, Artificial Sequence
  Description of Artificial Sequence: Synthetic oligonucleotide
ucaagaauggggcacauaa

SEQ ID NO: 3281863 - RNA, 19 nt, Artificial Sequence
  Description of Artificial Sequence: Synthetic oligonucleotide
caaauaaaggcuuguauac

SEQ ID NO: 3281864 - RNA, 19 nt, Artificial Sequence
  Description of Artificial Sequence: Synthetic oligonucleotide
ugaugauuaaagcacgucu

SEQ ID NO: 3281865 - RNA, 19 nt, Artificial Sequence
  Description of Artificial Sequence: Synthetic oligonucleotide
uucagggugaugauuaaag

SEQ ID NO: 3281866 - RNA, 19 nt, Artificial Sequence
  Description of Artificial Sequence: Synthetic oligonucleotide
aaugccucaagguaagacu

SEQ ID NO: 3281867 - RNA, 19 nt, Artificial Sequence
  Description of Artificial Sequence: Synthetic oligonucleotide
acgucugucagccucaaac

SEQ ID NO: 3281868 - RNA, 19 nt, Artificial Sequence
  Description of Artificial Sequence: Synthetic oligonucleotide
ucaaauaaaggcuuguaua

SEQ ID NO: 3281869 - RNA, 19 nt, Artificial Sequence
  Description of Artificial Sequence: Synthetic oligonucleotide
uuaucugcuacucucuuca

SEQ ID NO: 3281870 - RNA, 19 nt, Artificial Sequence
  Description of Artificial Sequence: Synthetic oligonucleotide
aucaccaugauccuugcag

SEQ ID NO: 3281871 - RNA, 19 nt, Artificial Sequence
  Description of Artificial Sequence: Synthetic oligonucleotide
uucagcuugagccaacaag

SEQ ID NO: 3281872 - RNA, 19 nt, Artificial Sequence
  Description of Artificial Sequence: Synthetic oligonucleotide
uauagaaugccucaaggua

SEQ ID NO: 3281873 - RNA, 19 nt, Artificial Sequence
  Description of Artificial Sequence: Synthetic oligonucleotide
ucagcuugagccaacaagu

SEQ ID NO: 3281874 - RNA, 19 nt, Artificial Sequence
  Description of Artificial Sequence: Synthetic oligonucleotide
ucaauauucaguucaucga

SEQ ID NO: 3281875 - RNA, 19 nt, Artificial Sequence
  Description of Artificial Sequence: Synthetic oligonucleotide
auacuccauaauuaucugc

SEQ ID NO: 3281876 - RNA, 19 nt, Artificial Sequence
  Description of Artificial Sequence: Synthetic oligonucleotide
uacuccauaauuaucugcu

SEQ ID NO: 3281877 - RNA, 19 nt, Artificial Sequence
  Description of Artificial Sequence: Synthetic oligonucleotide
ucuucaucugcucaaaguc

SEQ ID NO: 3281878 - RNA, 19 nt, Artificial Sequence
  Description of Artificial Sequence: Synthetic oligonucleotide
ucugcuacucucuucaucu

SEQ ID NO: 3281879 - RNA, 19 nt, Artificial Sequence
  Description of Artificial Sequence: Synthetic oligonucleotide
auuaaagcacgucugucag

SEQ ID NO: 3281880 - RNA, 19 nt, Artificial Sequence
  Description of Artificial Sequence: Synthetic oligonucleotide
ugcagaauuuauagaaugc

SEQ ID NO: 3281881 - RNA, 19 nt, Artificial Sequence
  Description of Artificial Sequence: Synthetic oligonucleotide
ucaggauagagcuugccgc

SEQ ID NO: 3281882 - RNA, 19 nt, Artificial Sequence
  Description of Artificial Sequence: Synthetic oligonucleotide
agaauuuauagaaugccuc

SEQ ID NO: 3281883 - RNA, 19 nt, Artificial Sequence
  Description of Artificial Sequence: Synthetic oligonucleotide
cucaaacucaagaaugggg

SEQ ID NO: 3281884 - RNA, 19 nt, Artificial Sequence
  Description of Artificial Sequence: Synthetic oligonucleotide
uagagcuugccgcaggugg

SEQ ID NO: 3281885 - RNA, 19 nt, Artificial Sequence
  Description of Artificial Sequence: Synthetic oligonucleotide
uuuauugcgcaguaauuca

SEQ ID NO: 3281886 - RNA, 19 nt, Artificial Sequence
  Description of Artificial Sequence: Synthetic oligonucleotide
uugcagaauuuauagaaug

SEQ ID NO: 3281887 - RNA, 19 nt, Artificial Sequence
  Description of Artificial Sequence: Synthetic oligonucleotide
aaacucaagaauggggcac

SEQ ID NO: 3281888 - RNA, 19 nt, Artificial Sequence
  Description of Artificial Sequence: Synthetic oligonucleotide
caauauucaguucaucgag

SEQ ID NO: 3281889 - RNA, 19 nt, Artificial Sequence
  Description of Artificial Sequence: Synthetic oligonucleotide
aagaauggggcacauaauu

SEQ ID NO: 3281890 - RNA, 19 nt, Artificial Sequence
  Description of Artificial Sequence: Synthetic oligonucleotide
uuauagaaugccucaaggu

SEQ ID NO: 3281891 - RNA, 19 nt, Artificial Sequence
  Description of Artificial Sequence: Synthetic oligonucleotide
auccuugcagaauuuauag

SEQ ID NO: 3281892 - RNA, 19 nt, Artificial Sequence
  Description of Artificial Sequence: Synthetic oligonucleotide
acauaauuucugcugugac

SEQ ID NO: 3281893 - RNA, 19 nt, Artificial Sequence
  Description of Artificial Sequence: Synthetic oligonucleotide
cuuguauaguuuauugcgc

SEQ ID NO: 3281894 - RNA, 19 nt, Artificial Sequence
  Description of Artificial Sequence: Synthetic oligonucleotide
auauucaguucaucgagag

SEQ ID NO: 3281895 - RNA, 19 nt, Artificial Sequence
  Description of Artificial Sequence: Synthetic oligonucleotide
auuuauagaaugccucaag

SEQ ID NO: 3281896 - RNA, 19 nt, Artificial Sequence
  Description of Artificial Sequence: Synthetic oligonucleotide
uucaaauaaaggcuuguau

SEQ ID NO: 3281897 - RNA, 19 nt, Artificial Sequence
  Description of Artificial Sequence: Synthetic oligonucleotide
gacuuguauaguuuauugc

SEQ ID NO: 3281898 - RNA, 19 nt, Artificial Sequence
  Description of Artificial Sequence: Synthetic oligonucleotide
gaauuuauagaaugccuca

SEQ ID NO: 3281899 - RNA, 19 nt, Artificial Sequence
  Description of Artificial Sequence: Synthetic oligonucleotide
gauuaaagcacgucuguca

SEQ ID NO: 3281900 - RNA, 19 nt, Artificial Sequence
  Description of Artificial Sequence: Synthetic oligonucleotide
agggugaugauuaaagcac

SEQ ID NO: 3281901 - RNA, 19 nt, Artificial Sequence
  Description of Artificial Sequence: Synthetic oligonucleotide
agacuuguauaguuuauug

SEQ ID NO: 3281902 - RNA, 19 nt, Artificial Sequence
  Description of Artificial Sequence: Synthetic oligonucleotide
agcuugagccaacaagugc

SEQ ID NO: 3281903 - RNA, 19 nt, Artificial Sequence
  Description of Artificial Sequence: Synthetic oligonucleotide
gaugauuaaagcacgucug

SEQ ID NO: 3281904 - RNA, 19 nt, Artificial Sequence
  Description of Artificial Sequence: Synthetic oligonucleotide
aauuucugcugugacauca

SEQ ID NO: 3281905 - RNA, 19 nt, Artificial Sequence
  Description of Artificial Sequence: Synthetic oligonucleotide
uaaagcacgucugucagcc

SEQ ID NO: 3281906 - RNA, 19 nt, Artificial Sequence
  Description of Artificial Sequence: Synthetic oligonucleotide
cuuugcucaguucagugcc

SEQ ID NO: 3281907 - RNA, 19 nt, Artificial Sequence
  Description of Artificial Sequence: Synthetic oligonucleotide
ugagccaacaagugcagcc

SEQ ID NO: 3281908 - RNA, 19 nt, Artificial Sequence
  Description of Artificial Sequence: Synthetic oligonucleotide
uuguauaguuuauugcgca

SEQ ID NO: 3281909 - RNA, 19 nt, Artificial Sequence
  Description of Artificial Sequence: Synthetic oligonucleotide
uguauaguuuauugcgcag

SEQ ID NO: 3281910 - RNA, 19 nt, Artificial Sequence
  Description of Artificial Sequence: Synthetic oligonucleotide
uaguuuauugcgcaguaau

SEQ ID NO: 3281911 - RNA, 19 nt, Artificial Sequence
  Description of Artificial Sequence: Synthetic oligonucleotide
aagcacgucugucagccuc

SEQ ID NO: 3281912 - RNA, 19 nt, Artificial Sequence
  Description of Artificial Sequence: Synthetic oligonucleotide
ucaguucagugccaaauga

SEQ ID NO: 3281913 - RNA, 19 nt, Artificial Sequence
  Description of Artificial Sequence: Synthetic oligonucleotide
auaauuucugcugugacau

SEQ ID NO: 3281914 - RNA, 19 nt, Artificial Sequence
  Description of Artificial Sequence: Synthetic oligonucleotide
ugcugugacaucaccauga

SEQ ID NO: 3281915 - RNA, 19 nt, Artificial Sequence
  Description of Artificial Sequence: Synthetic oligonucleotide
ucugcucaaagucuucagc

SEQ ID NO: 3281916 - RNA, 19 nt, Artificial Sequence
  Description of Artificial Sequence: Synthetic oligonucleotide
ucugucagccucaaacuca

SEQ ID NO: 3281917 - RNA, 19 nt, Artificial Sequence
  Description of Artificial Sequence: Synthetic oligonucleotide
uccauaauuaucugcuacu

SEQ ID NO: 3281918 - RNA, 19 nt, Artificial Sequence
  Description of Artificial Sequence: Synthetic oligonucleotide
aacaagugcagccccucag

SEQ ID NO: 3281919 - RNA, 19 nt, Artificial Sequence
  Description of Artificial Sequence: Synthetic oligonucleotide
auaaaggcuuguauacucc

SEQ ID NO: 3281920 - RNA, 19 nt, Artificial Sequence
  Description of Artificial Sequence: Synthetic oligonucleotide
uaauuaucugcuacucucu

SEQ ID NO: 3281921 - RNA, 19 nt, Artificial Sequence
  Description of Artificial Sequence: Synthetic oligonucleotide
uguauacuccauaauuauc

SEQ ID NO: 3281922 - RNA, 19 nt, Artificial Sequence
  Description of Artificial Sequence: Synthetic oligonucleotide
auuaucugcuacucucuuc

SEQ ID NO: 3281923 - RNA, 19 nt, Artificial Sequence
  Description of Artificial Sequence: Synthetic oligonucleotide
auucaguucaucgagagua

SEQ ID NO: 3281924 - RNA, 19 nt, Artificial Sequence
  Description of Artificial Sequence: Synthetic oligonucleotide
acagcuucaaauaaaggcu

SEQ ID NO: 3281925 - RNA, 19 nt, Artificial Sequence
  Description of Artificial Sequence: Synthetic oligonucleotide
aaauaaaggcuuguauacu

SEQ ID NO: 3281926 - RNA, 19 nt, Artificial Sequence
  Description of Artificial Sequence: Synthetic oligonucleotide
uauacuccauaauuaucug

SEQ ID NO: 3281927 - RNA, 19 nt, Artificial Sequence
  Description of Artificial Sequence: Synthetic oligonucleotide
uagaaugccucaagguaag

SEQ ID NO: 3281928 - RNA, 19 nt, Artificial Sequence
  Description of Artificial Sequence: Synthetic oligonucleotide
ucuucuuugcucaguucag

SEQ ID NO: 3281929 - RNA, 19 nt, Artificial Sequence
  Description of Artificial Sequence: Synthetic oligonucleotide
uuguauacuccauaauuau

SEQ ID NO: 3281930 - RNA, 19 nt, Artificial Sequence
  Description of Artificial Sequence: Synthetic oligonucleotide
gaauggggcacauaauuuc

SEQ ID NO: 3281931 - RNA, 19 nt, Artificial Sequence
  Description of Artificial Sequence: Synthetic oligonucleotide
aagucuucagcuugagcca

SEQ ID NO: 3281932 - RNA, 19 nt, Artificial Sequence
  Description of Artificial Sequence: Synthetic oligonucleotide
ucagccucaaacucaagaa

SEQ ID NO: 3281933 - RNA, 19 nt, Artificial Sequence
  Description of Artificial Sequence: Synthetic oligonucleotide
gugccaaaugaguucaggg

SEQ ID NO: 3281934 - RNA, 19 nt, Artificial Sequence
  Description of Artificial Sequence: Synthetic oligonucleotide
cucaggauagagcuugccg

SEQ ID NO: 3281935 - RNA, 19 nt, Artificial Sequence
  Description of Artificial Sequence: Synthetic oligonucleotide
ucuuugcucaguucagugc

SEQ ID NO: 3281936 - RNA, 19 nt, Artificial Sequence
  Description of Artificial Sequence: Synthetic oligonucleotide
ucagggugaugauuaaagc

SEQ ID NO: 3281937 - RNA, 19 nt, Artificial Sequence
  Description of Artificial Sequence: Synthetic oligonucleotide
ucaagguaagacuuguaua

SEQ ID NO: 3281938 - RNA, 19 nt, Artificial Sequence
  Description of Artificial Sequence: Synthetic oligonucleotide
uauaguuuauugcgcagua

SEQ ID NO: 3281939 - RNA, 19 nt, Artificial Sequence
  Description of Artificial Sequence: Synthetic oligonucleotide
ugccaaaugaguucagggu

SEQ ID NO: 3281940 - RNA, 19 nt, Artificial Sequence
  Description of Artificial Sequence: Synthetic oligonucleotide
gacaucaccaugauccuug

SEQ ID NO: 3281941 - RNA, 19 nt, Artificial Sequence
  Description of Artificial Sequence: Synthetic oligonucleotide
uucuuugcucaguucagug

SEQ ID NO: 3281942 - RNA, 19 nt, Artificial Sequence
  Description of Artificial Sequence: Synthetic oligonucleotide
guuuauugcgcaguaauuc

SEQ ID NO: 3281943 - RNA, 19 nt, Artificial Sequence
  Description of Artificial Sequence: Synthetic oligonucleotide
aauuuauagaaugccucaa

SEQ ID NO: 3281944 - RNA, 19 nt, Artificial Sequence
  Description of Artificial Sequence: Synthetic oligonucleotide
ugcgcaguaauucaauauu

SEQ ID NO: 3281945 - RNA, 19 nt, Artificial Sequence
  Description of Artificial Sequence: Synthetic oligonucleotide
uaaaggcuuguauacucca

SEQ ID NO: 3281946 - RNA, 19 nt, Artificial Sequence
  Description of Artificial Sequence: Synthetic oligonucleotide
uucugcugugacaucacca

SEQ ID NO: 3281947 - RNA, 19 nt, Artificial Sequence
  Description of Artificial Sequence: Synthetic oligonucleotide
aauauucaguucaucgaga

SEQ ID NO: 3281948 - RNA, 19 nt, Artificial Sequence
  Description of Artificial Sequence: Synthetic oligonucleotide
augauuaaagcacgucugu

SEQ ID NO: 3281949 - RNA, 19 nt, Artificial Sequence
  Description of Artificial Sequence: Synthetic oligonucleotide
aaauccacaaccuuuagaa

SEQ ID NO: 3281950 - RNA, 19 nt, Artificial Sequence
  Description of Artificial Sequence: Synthetic oligonucleotide
uuuaaguuuccuucgaucc

SEQ ID NO: 3281951 - RNA, 19 nt, Artificial Sequence
  Description of Artificial Sequence: Synthetic oligonucleotide
ucggacauacuuaagauca

SEQ ID NO: 3281952 - RNA, 19 nt, Artificial Sequence
  Description of Artificial Sequence: Synthetic oligonucleotide
agauugugcaggcaaagcc

SEQ ID NO: 3281953 - RNA, 19 nt, Artificial Sequence
  Description of Artificial Sequence: Synthetic oligonucleotide
aaaugaaagauuccugaug

SEQ ID NO: 3281954 - RNA, 19 nt, Artificial Sequence
  Description of Artificial Sequence: Synthetic oligonucleotide
acugugcaaauccacaacc

SEQ ID NO: 3281955 - RNA, 19 nt, Artificial Sequence
  Description of Artificial Sequence: Synthetic oligonucleotide
uuguuugucauccacggcc

SEQ ID NO: 3281956 - RNA, 19 nt, Artificial Sequence
  Description of Artificial Sequence: Synthetic oligonucleotide
ucaaaugaaagauuccuga

SEQ ID NO: 3281957 - RNA, 19 nt, Artificial Sequence
  Description of Artificial Sequence: Synthetic oligonucleotide
uuugcuacagcccaaucca

SEQ ID NO: 3281958 - RNA, 19 nt, Artificial Sequence
  Description of Artificial Sequence: Synthetic oligonucleotide
aaaccguucucguuuuggc

SEQ ID NO: 3281959 - RNA, 19 nt, Artificial Sequence
  Description of Artificial Sequence: Synthetic oligonucleotide
ucagguaucaaaccacuug

SEQ ID NO: 3281960 - RNA, 19 nt, Artificial Sequence
  Description of Artificial Sequence: Synthetic oligonucleotide
aaauugcugaaggaccucc

SEQ ID NO: 3281961 - RNA, 19 nt, Artificial Sequence
  Description of Artificial Sequence: Synthetic oligonucleotide
gauauucacuuccagaaca

SEQ ID NO: 3281962 - RNA, 19 nt, Artificial Sequence
  Description of Artificial Sequence: Synthetic oligonucleotide
auguacacacccuacagag

SEQ ID NO: 3281963 - RNA, 19 nt, Artificial Sequence
  Description of Artificial Sequence: Synthetic oligonucleotide
aacugugcaaauccacaac

SEQ ID NO: 3281964 - RNA, 19 nt, Artificial Sequence
  Description of Artificial Sequence: Synthetic oligonucleotide
aauuuuggggccucggugu

SEQ ID NO: 3281965 - RNA, 19 nt, Artificial Sequence
  Description of Artificial Sequence: Synthetic oligonucleotide
ugacucaaaugaaagauuc

SEQ ID NO: 3281966 - RNA, 19 nt, Artificial Sequence
  Description of Artificial Sequence: Synthetic oligonucleotide
gacaaagauauucugguuc

SEQ ID NO: 3281967 - RNA, 19 nt, Artificial Sequence
  Description of Artificial Sequence: Synthetic oligonucleotide
auccacaaccuuuagaaug

SEQ ID NO: 3281968 - RNA, 19 nt, Artificial Sequence
  Description of Artificial Sequence: Synthetic oligonucleotide
augaacugcuuuaaggucc

SEQ ID NO: 3281969 - RNA, 19 nt, Artificial Sequence
  Description of Artificial Sequence: Synthetic oligonucleotide
ucuaguuuaaguccaccac

SEQ ID NO: 3281970 - RNA, 19 nt, Artificial Sequence
  Description of Artificial Sequence: Synthetic oligonucleotide
auagcccagggacugaccc

SEQ ID NO: 3281971 - RNA, 19 nt, Artificial Sequence
  Description of Artificial Sequence: Synthetic oligonucleotide
cuaguuuaaguccaccacc

SEQ ID NO: 3281972 - RNA, 19 nt, Artificial Sequence
  Description of Artificial Sequence: Synthetic oligonucleotide
agaagguaacugcugcugc

SEQ ID NO: 3281973 - RNA, 19 nt, Artificial Sequence
  Description of Artificial Sequence: Synthetic oligonucleotide
uuaggugccugcaaagaag

SEQ ID NO: 3281974 - RNA, 19 nt, Artificial Sequence
  Description of Artificial Sequence: Synthetic oligonucleotide
aauguacacacccuacaga

SEQ ID NO: 3281975 - RNA, 19 nt, Artificial Sequence
  Description of Artificial Sequence: Synthetic oligonucleotide
gaauguacacacccuacag

SEQ ID NO: 3281976 - RNA, 19 nt, Artificial Sequence
  Description of Artificial Sequence: Synthetic oligonucleotide
ucuaaagagaacuccacua

SEQ ID NO: 3281977 - RNA, 19 nt, Artificial Sequence
  Description of Artificial Sequence: Synthetic oligonucleotide
cuggaugcaagacaauucg

SEQ ID NO: 3281978 - RNA, 19 nt, Artificial Sequence
  Description of Artificial Sequence: Synthetic oligonucleotide
cuuggcaacagucacguug

SEQ ID NO: 3281979 - RNA, 19 nt, Artificial Sequence
  Description of Artificial Sequence: Synthetic oligonucleotide
agauagagguuccgggucc

SEQ ID NO: 3281980 - RNA, 19 nt, Artificial Sequence
  Description of Artificial Sequence: Synthetic oligonucleotide
ucaaaaguagugaucuccu

SEQ ID NO: 3281981 - RNA, 19 nt, Artificial Sequence
  Description of Artificial Sequence: Synthetic oligonucleotide
uaggugccugcaaagaagg

SEQ ID NO: 3281982 - RNA, 19 nt, Artificial Sequence
  Description of Artificial Sequence: Synthetic oligonucleotide
uacagcccaauccacagcc

SEQ ID NO: 3281983 - RNA, 19 nt, Artificial Sequence
  Description of Artificial Sequence: Synthetic oligonucleotide
cuucugacucaaaugaaag

SEQ ID NO: 3281984 - RNA, 19 nt, Artificial Sequence
  Description of Artificial Sequence: Synthetic oligonucleotide
auuaaucuggcuuucuuau

SEQ ID NO: 3281985 - RNA, 19 nt, Artificial Sequence
  Description of Artificial Sequence: Synthetic oligonucleotide
cuuugcuacagcccaaucc

SEQ ID NO: 3281986 - RNA, 19 nt, Artificial Sequence
  Description of Artificial Sequence: Synthetic oligonucleotide
ucugacucaaaugaaagau

SEQ ID NO: 3281987 - RNA, 19 nt, Artificial Sequence
  Description of Artificial Sequence: Synthetic oligonucleotide
aaagauauucugguucuug

SEQ ID NO: 3281988 - RNA, 19 nt, Artificial Sequence
  Description of Artificial Sequence: Synthetic oligonucleotide
aacccuguccacgaggugg

SEQ ID NO: 3281989 - RNA, 19 nt, Artificial Sequence
  Description of Artificial Sequence: Synthetic oligonucleotide
gaguuucugauguuucagg

SEQ ID NO: 3281990 - RNA, 19 nt, Artificial Sequence
  Description of Artificial Sequence: Synthetic oligonucleotide
uccauagggaguaaaugcu

SEQ ID NO: 3281991 - RNA, 19 nt, Artificial Sequence
  Description of Artificial Sequence: Synthetic oligonucleotide
ugaagggagugccaggacc

SEQ ID NO: 3281992 - RNA, 19 nt, Artificial Sequence
  Description of Artificial Sequence: Synthetic oligonucleotide
guugaagugggcuucugcc

SEQ ID NO: 3281993 - RNA, 19 nt, Artificial Sequence
  Description of Artificial Sequence: Synthetic oligonucleotide
ugaucuugcaaccuucaaa

SEQ ID NO: 3281994 - RNA, 19 nt, Artificial Sequence
  Description of Artificial Sequence: Synthetic oligonucleotide
gaugcaagacaauucggac

SEQ ID NO: 3281995 - RNA, 19 nt, Artificial Sequence
  Description of Artificial Sequence: Synthetic oligonucleotide
uuucugcuuauacuguuca

SEQ ID NO: 3281996 - RNA, 19 nt, Artificial Sequence
  Description of Artificial Sequence: Synthetic oligonucleotide
ucuggguuauuguugauau

SEQ ID NO: 3281997 - RNA, 19 nt, Artificial Sequence
  Description of Artificial Sequence: Synthetic oligonucleotide
cuuucugcagucugcaggc

SEQ ID NO: 3281998 - RNA, 19 nt, Artificial Sequence
  Description of Artificial Sequence: Synthetic oligonucleotide
ucuucuuggcaacagucac

SEQ ID NO: 3281999 - RNA, 19 nt, Artificial Sequence
  Description of Artificial Sequence: Synthetic oligonucleotide
ucaucuucugaacacuuaa

SEQ ID NO: 3282000 - RNA, 19 nt, Artificial Sequence
  Description of Artificial Sequence: Synthetic oligonucleotide
aacacuuaaagcugagguu

SEQ ID NO: 3282001 - RNA, 19 nt, Artificial Sequence
  Description of Artificial Sequence: Synthetic oligonucleotide
uuugcugccucaucacggg

SEQ ID NO: 3282002 - RNA, 19 nt, Artificial Sequence
  Description of Artificial Sequence: Synthetic oligonucleotide
uggagaggcagcugcaagg

SEQ ID NO: 3282003 - RNA, 19 nt, Artificial Sequence
  Description of Artificial Sequence: Synthetic oligonucleotide
ugagguuccggauaauuaa

SEQ ID NO: 3282004 - RNA, 19 nt, Artificial Sequence
  Description of Artificial Sequence: Synthetic oligonucleotide
ucugccuuauuuuccuuag

SEQ ID NO: 3282005 - RNA, 19 nt, Artificial Sequence
  Description of Artificial Sequence: Synthetic oligonucleotide
uuaaguuuccuucgauccu

SEQ ID NO: 3282006 - RNA, 19 nt, Artificial Sequence
  Description of Artificial Sequence: Synthetic oligonucleotide
uggaugcaagacaauucgg

SEQ ID NO: 3282007 - RNA, 19 nt, Artificial Sequence
  Description of Artificial Sequence: Synthetic oligonucleotide
aguuucugauguuucagga

SEQ ID NO: 3282008 - RNA, 19 nt, Artificial Sequence
  Description of Artificial Sequence: Synthetic oligonucleotide
ucuggaugcaagacaauuc

SEQ ID NO: 3282009 - RNA, 19 nt, Artificial Sequence
  Description of Artificial Sequence: Synthetic oligonucleotide
uuaaagcugagguuccgga

SEQ ID NO: 3282010 - RNA, 19 nt, Artificial Sequence
  Description of Artificial Sequence: Synthetic oligonucleotide
aaccacgcaucuuuccauc

SEQ ID NO: 3282011 - RNA, 19 nt, Artificial Sequence
  Description of Artificial Sequence: Synthetic oligonucleotide
ucugcaggcggcaucaggu

SEQ ID NO: 3282012 - RNA, 19 nt, Artificial Sequence
  Description of Artificial Sequence: Synthetic oligonucleotide
gauuucuggguuauuguug

SEQ ID NO: 3282013 - RNA, 19 nt, Artificial Sequence
  Description of Artificial Sequence: Synthetic oligonucleotide
ucuuucauguucaugccuu

SEQ ID NO: 3282014 - RNA, 19 nt, Artificial Sequence
  Description of Artificial Sequence: Synthetic oligonucleotide
aauugcugaaggaccuccc

SEQ ID NO: 3282015 - RNA, 19 nt, Artificial Sequence
  Description of Artificial Sequence: Synthetic oligonucleotide
gaaagauuccugaugaaaa

SEQ ID NO: 3282016 - RNA, 19 nt, Artificial Sequence
  Description of Artificial Sequence: Synthetic oligonucleotide
ucgaguggcguccagcagc

SEQ ID NO: 3282017 - RNA, 19 nt, Artificial Sequence
  Description of Artificial Sequence: Synthetic oligonucleotide
caagucaucuucugaacac

SEQ ID NO: 3282018 - RNA, 19 nt, Artificial Sequence
  Description of Artificial Sequence: Synthetic oligonucleotide
agcuuuuccugcuucaaga

SEQ ID NO: 3282019 - RNA, 19 nt, Artificial Sequence
  Description of Artificial Sequence: Synthetic oligonucleotide
cacggaucaagccuucucg

SEQ ID NO: 3282020 - RNA, 19 nt, Artificial Sequence
  Description of Artificial Sequence: Synthetic oligonucleotide
acaaccuuuagaaugcucu

SEQ ID NO: 3282021 - RNA, 19 nt, Artificial Sequence
  Description of Artificial Sequence: Synthetic oligonucleotide
ugggauucuguguaggccu

SEQ ID NO: 3282022 - RNA, 19 nt, Artificial Sequence
  Description of Artificial Sequence: Synthetic oligonucleotide
ugaacugcuuuaagguccc

SEQ ID NO: 3282023 - RNA, 19 nt, Artificial Sequence
  Description of Artificial Sequence: Synthetic oligonucleotide
gaucaagccuucucgggcc

SEQ ID NO: 3282024 - RNA, 19 nt, Artificial Sequence
  Description of Artificial Sequence: Synthetic oligonucleotide
gagacaaagauauucuggu

SEQ ID NO: 3282025 - RNA, 19 nt, Artificial Sequence
  Description of Artificial Sequence: Synthetic oligonucleotide
uucugacucaaaugaaaga

SEQ ID NO: 3282026 - RNA, 19 nt, Artificial Sequence
  Description of Artificial Sequence: Synthetic oligonucleotide
uugacuucuuaggaggaag

SEQ ID NO: 3282027 - RNA, 19 nt, Artificial Sequence
  Description of Artificial Sequence: Synthetic oligonucleotide
uuugccuuugucccgcaac

SEQ ID NO: 3282028 - RNA, 19 nt, Artificial Sequence
  Description of Artificial Sequence: Synthetic oligonucleotide
guuccggauaauuaaucug

SEQ ID NO: 3282029 - RNA, 19 nt, Artificial Sequence
  Description of Artificial Sequence: Synthetic oligonucleotide
auucggacauacuuaagau

SEQ ID NO: 3282030 - RNA, 19 nt, Artificial Sequence
  Description of Artificial Sequence: Synthetic oligonucleotide
uauuuguccuuugcuacag

SEQ ID NO: 3282031 - RNA, 19 nt, Artificial Sequence
  Description of Artificial Sequence: Synthetic oligonucleotide
uggggcuuugacuucuuag

SEQ ID NO: 3282032 - RNA, 19 nt, Artificial Sequence
  Description of Artificial Sequence: Synthetic oligonucleotide
ucccgcaucacucuacacu

SEQ ID NO: 3282033 - RNA, 19 nt, Artificial Sequence
  Description of Artificial Sequence: Synthetic oligonucleotide
uggagaagggaccaagaau

SEQ ID NO: 3282034 - RNA, 19 nt, Artificial Sequence
  Description of Artificial Sequence: Synthetic oligonucleotide
ucccgcaaccuaauuuugg

SEQ ID NO: 3282035 - RNA, 19 nt, Artificial Sequence
  Description of Artificial Sequence: Synthetic oligonucleotide
aacagucacguugaucuug

SEQ ID NO: 3282036 - RNA, 19 nt, Artificial Sequence
  Description of Artificial Sequence: Synthetic oligonucleotide
uugccuuugucccgcaacc

SEQ ID NO: 3282037 - RNA, 19 nt, Artificial Sequence
  Description of Artificial Sequence: Synthetic oligonucleotide
agggacuucacuuugccuu

SEQ ID NO: 3282038 - RNA, 19 nt, Artificial Sequence
  Description of Artificial Sequence: Synthetic oligonucleotide
uccggauaauuaaucuggc

SEQ ID NO: 3282039 - RNA, 19 nt, Artificial Sequence
  Description of Artificial Sequence: Synthetic oligonucleotide
acugcuuuaaggucccgca

SEQ ID NO: 3282040 - RNA, 19 nt, Artificial Sequence
  Description of Artificial Sequence: Synthetic oligonucleotide
uuuugcuccuuuuggggcu

SEQ ID NO: 3282041 - RNA, 19 nt, Artificial Sequence
  Description of Artificial Sequence: Synthetic oligonucleotide
aauccacaaccuuuagaau

SEQ ID NO: 3282042 - RNA, 19 nt, Artificial Sequence
  Description of Artificial Sequence: Synthetic oligonucleotide
uucggacauacuuaagauc

SEQ ID NO: 3282043 - RNA, 19 nt, Artificial Sequence
  Description of Artificial Sequence: Synthetic oligonucleotide
uccuucgauccucuaaaga

SEQ ID NO: 3282044 - RNA, 19 nt, Artificial Sequence
  Description of Artificial Sequence: Synthetic oligonucleotide
ucccacuucuucuucuugc

SEQ ID NO: 3282045 - RNA, 19 nt, Artificial Sequence
  Description of Artificial Sequence: Synthetic oligonucleotide
acggaucaagccuucucgg

SEQ ID NO: 3282046 - RNA, 19 nt, Artificial Sequence
  Description of Artificial Sequence: Synthetic oligonucleotide
gcuuucugcagucugcagg

SEQ ID NO: 3282047 - RNA, 19 nt, Artificial Sequence
  Description of Artificial Sequence: Synthetic oligonucleotide
acagucacguugaucuugc

SEQ ID NO: 3282048 - RNA, 19 nt, Artificial Sequence
  Description of Artificial Sequence: Synthetic oligonucleotide
ugugcaaauccacaaccuu

SEQ ID NO: 3282049 - RNA, 19 nt, Artificial Sequence
  Description of Artificial Sequence: Synthetic oligonucleotide
  modified_base (14)..(14): a, c, u, g, unknown or other
aacaauuuuaaccngcugc

SEQ ID NO: 3282050 - RNA, 19 nt, Artificial Sequence
  Description of Artificial Sequence: Synthetic oligonucleotide
aacagcaacaauuuuaacc

SEQ ID NO: 3282051 - RNA, 19 nt, Artificial Sequence
  Description of Artificial Sequence: Synthetic oligonucleotide
uuuaaagcacagaagagcc

SEQ ID NO: 3282052 - RNA, 19 nt, Artificial Sequence
  Description of Artificial Sequence: Synthetic oligonucleotide
  modified_base (10)..(10): a, c, u, g, unknown or other
auuuuaaccngcugcgugc

SEQ ID NO: 3282053 - RNA, 19 nt, Artificial Sequence
  Description of Artificial Sequence: Synthetic oligonucleotide
ucauagaagacauucaacu

SEQ ID NO: 3282054 - RNA, 19 nt, Artificial Sequence
  Description of Artificial Sequence: Synthetic oligonucleotide
agagaaaccaaauucagga

SEQ ID NO: 3282055 - RNA, 19 nt, Artificial Sequence
  Description of Artificial Sequence: Synthetic oligonucleotide
  modified_base (19)..(19): a, c, u, g, unknown or other
acagcaacaauuuuaaccn

SEQ ID NO: 3282056 - RNA, 19 nt, Artificial Sequence
  Description of Artificial Sequence: Synthetic oligonucleotide
ugugucaaaaugcacacug

SEQ ID NO: 3282057 - RNA, 19 nt, Artificial Sequence
  Description of Artificial Sequence: Synthetic oligonucleotide
gaucuucucucuuauaagg

SEQ ID NO: 3282058 - RNA, 19 nt, Artificial Sequence
  Description of Artificial Sequence: Synthetic oligonucleotide
  modified_base (11)..(11): a, c, u, g, unknown or other
aauuuuaaccngcugcgug

SEQ ID NO: 3282059 - RNA, 19 nt, Artificial Sequence
  Description of Artificial Sequence: Synthetic oligonucleotide
gaagauguggccuuccagg

SEQ ID NO: 3282060 - RNA, 19 nt, Artificial Sequence
  Description of Artificial Sequence: Synthetic oligonucleotide
uuuuaaagcacagaagagc

SEQ ID NO: 3282061 - RNA, 19 nt, Artificial Sequence
  Description of Artificial Sequence: Synthetic oligonucleotide
accggaagcagacucaucc

SEQ ID NO: 3282062 - RNA, 19 nt, Artificial Sequence
  Description of Artificial Sequence: Synthetic oligonucleotide
ucaaaaugcacacuguccu

SEQ ID NO: 3282063 - RNA, 19 nt, Artificial Sequence
  Description of Artificial Sequence: Synthetic oligonucleotide
agacauucaacucugcauc

SEQ ID NO: 3282064 - RNA, 19 nt, Artificial Sequence
  Description of Artificial Sequence: Synthetic oligonucleotide
agaaaccaaauucaggaag

SEQ ID NO: 3282065 - RNA, 19 nt, Artificial Sequence
  Description of Artificial Sequence: Synthetic oligonucleotide
auagaagacauucaacucu

SEQ ID NO: 3282066 - RNA, 19 nt, Artificial Sequence
  Description of Artificial Sequence: Synthetic oligonucleotide
aaggucugugucaaaaugc

SEQ ID NO: 3282067 - RNA, 19 nt, Artificial Sequence
  Description of Artificial Sequence: Synthetic oligonucleotide
agccagagaaaccaaauuc

SEQ ID NO: 3282068 - RNA, 19 nt, Artificial Sequence
  Description of Artificial Sequence: Synthetic oligonucleotide
gaaaccaaauucaggaagg

SEQ ID NO: 3282069 - RNA, 19 nt, Artificial Sequence
  Description of Artificial Sequence: Synthetic oligonucleotide
uguuccaggaaccggaagc

SEQ ID NO: 3282070 - RNA, 19 nt, Artificial Sequence
  Description of Artificial Sequence: Synthetic oligonucleotide
acaaugggcucuuggagcc

SEQ ID NO: 3282071 - RNA, 19 nt, Artificial Sequence
  Description of Artificial Sequence: Synthetic oligonucleotide
ucaacagcaacaauuuuaa

SEQ ID NO: 3282072 - RNA, 19 nt, Artificial Sequence
  Description of Artificial Sequence: Synthetic oligonucleotide
ucuacuggguugcagaaga

SEQ ID NO: 3282073 - RNA, 19 nt, Artificial Sequence
  Description of Artificial Sequence: Synthetic oligonucleotide
ugcaucaacagcaacaauu

SEQ ID NO: 3282074 - RNA, 19 nt, Artificial Sequence
  Description of Artificial Sequence: Synthetic oligonucleotide
aagauguggccuuccaggg

SEQ ID NO: 3282075 - RNA, 19 nt, Artificial Sequence
  Description of Artificial Sequence: Synthetic oligonucleotide
uuagagaacuuguuccagg

SEQ ID NO: 3282076 - RNA, 19 nt, Artificial Sequence
  Description of Artificial Sequence: Synthetic oligonucleotide
aagacauucaacucugcau

SEQ ID NO: 3282077 - RNA, 19 nt, Artificial Sequence
  Description of Artificial Sequence: Synthetic oligonucleotide
  modified_base (13)..(13): a, c, u, g, unknown or other
acaauuuuaaccngcugcg

SEQ ID NO: 3282078 - RNA, 19 nt, Artificial Sequence
  Description of Artificial Sequence: Synthetic oligonucleotide
agaagagccauguaguacu

SEQ ID NO: 3282079 - RNA, 19 nt, Artificial Sequence
  Description of Artificial Sequence: Synthetic oligonucleotide
aguacugcacgucuacugg

SEQ ID NO: 3282080 - RNA, 19 nt, Artificial Sequence
  Description of Artificial Sequence: Synthetic oligonucleotide
uagaagacauucaacucug

SEQ ID NO: 3282081 - RNA, 19 nt, Artificial Sequence
  Description of Artificial Sequence: Synthetic oligonucleotide
uucaacucugcaucaacag

SEQ ID NO: 3282082 - RNA, 19 nt, Artificial Sequence
  Description of Artificial Sequence: Synthetic oligonucleotide
gagaacuuguuccaggaac

SEQ ID NO: 3282083 - RNA, 19 nt, Artificial Sequence
  Description of Artificial Sequence: Synthetic oligonucleotide
agaacuuguuccaggaacc

SEQ ID NO: 3282084 - RNA, 19 nt, Artificial Sequence
  Description of Artificial Sequence: Synthetic oligonucleotide
gacaaugggcucuuggagc

SEQ ID NO: 3282085 - RNA, 19 nt, Artificial Sequence
  Description of Artificial Sequence: Synthetic oligonucleotide
aauucaggaaggucugugu

SEQ ID NO: 3282086 - RNA, 19 nt, Artificial Sequence
  Description of Artificial Sequence: Synthetic oligonucleotide
agccauguaguacugcacg

SEQ ID NO: 3282087 - RNA, 19 nt, Artificial Sequence
  Description of Artificial Sequence: Synthetic oligonucleotide
gaaggucugugucaaaaug

SEQ ID NO: 3282088 - RNA, 19 nt, Artificial Sequence
  Description of Artificial Sequence: Synthetic oligonucleotide
ucaacucugcaucaacagc

SEQ ID NO: 3282089 - RNA, 19 nt, Artificial Sequence
  Description of Artificial Sequence: Synthetic oligonucleotide
  modified_base (17)..(17): a, c, u, g, unknown or other
agcaacaauuuuaaccngc

SEQ ID NO: 3282090 - RNA, 19 nt, Artificial Sequence
  Description of Artificial Sequence: Synthetic oligonucleotide
accaaauucaggaaggucu

SEQ ID NO: 3282091 - RNA, 19 nt, Artificial Sequence
  Description of Artificial Sequence: Synthetic oligonucleotide
auucaggaaggucuguguc

SEQ ID NO: 3282092 - RNA, 19 nt, Artificial Sequence
  Description of Artificial Sequence: Synthetic oligonucleotide
ucugugucaaaaugcacac

SEQ ID NO: 3282093 - RNA, 19 nt, Artificial Sequence
  Description of Artificial Sequence: Synthetic oligonucleotide
ugucaaaaugcacacuguc

SEQ ID NO: 3282094 - RNA, 19 nt, Artificial Sequence
  Description of Artificial Sequence: Synthetic oligonucleotide
acuguagggccuuagagaa

SEQ ID NO: 3282095 - RNA, 19 nt, Artificial Sequence
  Description of Artificial Sequence: Synthetic oligonucleotide
ucucuuauaagggagccgu

SEQ ID NO: 3282096 - RNA, 19 nt, Artificial Sequence
  Description of Artificial Sequence: Synthetic oligonucleotide
ucuucucucuuauaaggga

SEQ ID NO: 3282097 - RNA, 19 nt, Artificial Sequence
  Description of Artificial Sequence: Synthetic oligonucleotide
acacuguccucauagaaga

SEQ ID NO: 3282098 - RNA, 19 nt, Artificial Sequence
  Description of Artificial Sequence: Synthetic oligonucleotide
cagagaaaccaaauucagg

SEQ ID NO: 3282099 - RNA, 19 nt, Artificial Sequence
  Description of Artificial Sequence: Synthetic oligonucleotide
cuucucucuuauaagggag

SEQ ID NO: 3282100 - RNA, 19 nt, Artificial Sequence
  Description of Artificial Sequence: Synthetic oligonucleotide
augcacacuguccucauag

SEQ ID NO: 3282101 - RNA, 19 nt, Artificial Sequence
  Description of Artificial Sequence: Synthetic oligonucleotide
aggaaccggaagcagacuc

SEQ ID NO: 3282102 - RNA, 19 nt, Artificial Sequence
  Description of Artificial Sequence: Synthetic oligonucleotide
aaaaugcacacuguccuca

SEQ ID NO: 3282103 - RNA, 19 nt, Artificial Sequence
  Description of Artificial Sequence: Synthetic oligonucleotide
aaauucaggaaggucugug

SEQ ID NO: 3282104 - RNA, 19 nt, Artificial Sequence
  Description of Artificial Sequence: Synthetic oligonucleotide
cauagaagacauucaacuc

SEQ ID NO: 3282105 - RNA, 19 nt, Artificial Sequence
  Description of Artificial Sequence: Synthetic oligonucleotide
uguaguacugcacgucuac

SEQ ID NO: 3282106 - RNA, 19 nt, Artificial Sequence
  Description of Artificial Sequence: Synthetic oligonucleotide
aucuccguggacuguaggg

SEQ ID NO: 3282107 - RNA, 19 nt, Artificial Sequence
  Description of Artificial Sequence: Synthetic oligonucleotide
uggguugcagaagaugugg

SEQ ID NO: 3282108 - RNA, 19 nt, Artificial Sequence
  Description of Artificial Sequence: Synthetic oligonucleotide
aaccaaauucaggaagguc

SEQ ID NO: 3282109 - RNA, 19 nt, Artificial Sequence
  Description of Artificial Sequence: Synthetic oligonucleotide
uucucucuuauaagggagc

SEQ ID NO: 3282110 - RNA, 19 nt, Artificial Sequence
  Description of Artificial Sequence: Synthetic oligonucleotide
cacacuguccucauagaag

SEQ ID NO: 3282111 - RNA, 19 nt, Artificial Sequence
  Description of Artificial Sequence: Synthetic oligonucleotide
gaagucccagcccaggcag

SEQ ID NO: 3282112 - RNA, 19 nt, Artificial Sequence
  Description of Artificial Sequence: Synthetic oligonucleotide
cucauagaagacauucaac

SEQ ID NO: 3282113 - RNA, 19 nt, Artificial Sequence
  Description of Artificial Sequence: Synthetic oligonucleotide
uccagggcaggacaauggg

SEQ ID NO: 3282114 - RNA, 19 nt, Artificial Sequence
  Description of Artificial Sequence: Synthetic oligonucleotide
uagagaacuuguuccagga

SEQ ID NO: 3282115 - RNA, 19 nt, Artificial Sequence
  Description of Artificial Sequence: Synthetic oligonucleotide
uguagggccuuagagaacu

SEQ ID NO: 3282116 - RNA, 19 nt, Artificial Sequence
  Description of Artificial Sequence: Synthetic oligonucleotide
uuccagggcaggacaaugg

SEQ ID NO: 3282117 - RNA, 19 nt, Artificial Sequence
  Description of Artificial Sequence: Synthetic oligonucleotide
uuaaagcacagaagagcca

SEQ ID NO: 3282118 - RNA, 19 nt, Artificial Sequence
  Description of Artificial Sequence: Synthetic oligonucleotide
uaguacugcacgucuacug

SEQ ID NO: 3282119 - RNA, 19 nt, Artificial Sequence
  Description of Artificial Sequence: Synthetic oligonucleotide
agcagacucaucccggauc

SEQ ID NO: 3282120 - RNA, 19 nt, Artificial Sequence
  Description of Artificial Sequence: Synthetic oligonucleotide
  modified_base (7)..(7): a, c, u, g, unknown or other
uuaaccngcugcgugcuga

SEQ ID NO: 3282121 - RNA, 19 nt, Artificial Sequence
  Description of Artificial Sequence: Synthetic oligonucleotide
uucaggaaggucuguguca

SEQ ID NO: 3282122 - RNA, 19 nt, Artificial Sequence
  Description of Artificial Sequence: Synthetic oligonucleotide
caacucugcaucaacagca

SEQ ID NO: 3282123 - RNA, 19 nt, Artificial Sequence
  Description of Artificial Sequence: Synthetic oligonucleotide
agagccauguaguacugca

SEQ ID NO: 3282124 - RNA, 19 nt, Artificial Sequence
  Description of Artificial Sequence: Synthetic oligonucleotide
gaagacauucaacucugca

SEQ ID NO: 3282125 - RNA, 19 nt, Artificial Sequence
  Description of Artificial Sequence: Synthetic oligonucleotide
agaagauguggccuuccag

SEQ ID NO: 3282126 - RNA, 19 nt, Artificial Sequence
  Description of Artificial Sequence: Synthetic oligonucleotide
uaaagcacagaagagccau

SEQ ID NO: 3282127 - RNA, 19 nt, Artificial Sequence
  Description of Artificial Sequence: Synthetic oligonucleotide
aacuuguuccaggaaccgg

SEQ ID NO: 3282128 - RNA, 19 nt, Artificial Sequence
  Description of Artificial Sequence: Synthetic oligonucleotide
gucaaaaugcacacugucc

SEQ ID NO: 3282129 - RNA, 19 nt, Artificial Sequence
  Description of Artificial Sequence: Synthetic oligonucleotide
agauguggccuuccagggc

SEQ ID NO: 3282130 - RNA, 19 nt, Artificial Sequence
  Description of Artificial Sequence: Synthetic oligonucleotide
gacuguagggccuuagaga

SEQ ID NO: 3282131 - RNA, 19 nt, Artificial Sequence
  Description of Artificial Sequence: Synthetic oligonucleotide
uccucauagaagacauuca

SEQ ID NO: 3282132 - RNA, 19 nt, Artificial Sequence
  Description of Artificial Sequence: Synthetic oligonucleotide
gauguggccuuccagggca

SEQ ID NO: 3282133 - RNA, 19 nt, Artificial Sequence
  Description of Artificial Sequence: Synthetic oligonucleotide
aucuucucucuuauaaggg

SEQ ID NO: 3282134 - RNA, 19 nt, Artificial Sequence
  Description of Artificial Sequence: Synthetic oligonucleotide
ucugcaucaacagcaacaa

SEQ ID NO: 3282135 - RNA, 19 nt, Artificial Sequence
  Description of Artificial Sequence: Synthetic oligonucleotide
gcacagaagagccauguag

SEQ ID NO: 3282136 - RNA, 19 nt, Artificial Sequence
  Description of Artificial Sequence: Synthetic oligonucleotide
gccuuagagaacuuguucc

SEQ ID NO: 3282137 - RNA, 19 nt, Artificial Sequence
  Description of Artificial Sequence: Synthetic oligonucleotide
aagagccauguaguacugc

SEQ ID NO: 3282138 - RNA, 19 nt, Artificial Sequence
  Description of Artificial Sequence: Synthetic oligonucleotide
uccaggaaccggaagcaga

SEQ ID NO: 3282139 - RNA, 19 nt, Artificial Sequence
  Description of Artificial Sequence: Synthetic oligonucleotide
ugaagucccagcccaggca

SEQ ID NO: 3282140 - RNA, 19 nt, Artificial Sequence
  Description of Artificial Sequence: Synthetic oligonucleotide
ucuuggagccagagaaacc

SEQ ID NO: 3282141 - RNA, 19 nt, Artificial Sequence
  Description of Artificial Sequence: Synthetic oligonucleotide
aggacaaugggcucuugga

SEQ ID NO: 3282142 - RNA, 19 nt, Artificial Sequence
  Description of Artificial Sequence: Synthetic oligonucleotide
ucucucuuauaagggagcc

SEQ ID NO: 3282143 - RNA, 19 nt, Artificial Sequence
  Description of Artificial Sequence: Synthetic oligonucleotide
gaacuuguuccaggaaccg

SEQ ID NO: 3282144 - RNA, 19 nt, Artificial Sequence
  Description of Artificial Sequence: Synthetic oligonucleotide
cucugcaucaacagcaaca

SEQ ID NO: 3282145 - RNA, 19 nt, Artificial Sequence
  Description of Artificial Sequence: Synthetic oligonucleotide
aaaccaaauucaggaaggu

SEQ ID NO: 3282146 - RNA, 19 nt, Artificial Sequence
  Description of Artificial Sequence: Synthetic oligonucleotide
acuggguugcagaagaugu

SEQ ID NO: 3282147 - RNA, 19 nt, Artificial Sequence
  Description of Artificial Sequence: Synthetic oligonucleotide
aucaacagcaacaauuuua

SEQ ID NO: 3282148 - RNA, 19 nt, Artificial Sequence
  Description of Artificial Sequence: Synthetic oligonucleotide
guacugcacgucuacuggg

SEQ ID NO: 3282149 - RNA, 19 nt, Artificial Sequence
  Description of Artificial Sequence: Synthetic oligonucleotide
aaugacauccuccacaucu

SEQ ID NO: 3282150 - RNA, 19 nt, Artificial Sequence
  Description of Artificial Sequence: Synthetic oligonucleotide
aacacgcucagauugagag

SEQ ID NO: 3282151 - RNA, 19 nt, Artificial Sequence
  Description of Artificial Sequence: Synthetic oligonucleotide
  modified_base (3)..(3): a, c, u, g, unknown or other
ucncuaaaggcucaauggg

SEQ ID NO: 3282152 - RNA, 19 nt, Artificial Sequence
  Description of Artificial Sequence: Synthetic oligonucleotide
gaugaacacgcucagauug

SEQ ID NO: 3282153 - RNA, 19 nt, Artificial Sequence
  Description of Artificial Sequence: Synthetic oligonucleotide
ugcaccuacgaaaugaugc

SEQ ID NO: 3282154 - RNA, 19 nt, Artificial Sequence
  Description of Artificial Sequence: Synthetic oligonucleotide
  modified_base (4)..(4): a, c, u, g, unknown or other
gucncuaaaggcucaaugg

SEQ ID NO: 3282155 - RNA, 19 nt, Artificial Sequence
  Description of Artificial Sequence: Synthetic oligonucleotide
aaaugaugcucugugcugc

SEQ ID NO: 3282156 - RNA, 19 nt, Artificial Sequence
  Description of Artificial Sequence: Synthetic oligonucleotide
uacgaaaugaugcucugug

SEQ ID NO: 3282157 - RNA, 19 nt, Artificial Sequence
  Description of Artificial Sequence: Synthetic oligonucleotide
cucaaugggacacacagug

SEQ ID NO: 3282158 - RNA, 19 nt, Artificial Sequence
  Description of Artificial Sequence: Synthetic oligonucleotide
ugcaaugacauccuccaca

SEQ ID NO: 3282159 - RNA, 19 nt, Artificial Sequence
  Description of Artificial Sequence: Synthetic oligonucleotide
ugcuacauacacaugcaug

SEQ ID NO: 3282160 - RNA, 19 nt, Artificial Sequence
  Description of Artificial Sequence: Synthetic oligonucleotide
cagugcuacauacacaugc

SEQ ID NO: 3282161 - RNA, 19 nt, Artificial Sequence
  Description of Artificial Sequence: Synthetic oligonucleotide
ucucggaugaacacgcuca

SEQ ID NO: 3282162 - RNA, 19 nt, Artificial Sequence
  Description of Artificial Sequence: Synthetic oligonucleotide
uacacaugcaugcaccuac

SEQ ID NO: 3282163 - RNA, 19 nt, Artificial Sequence
  Description of Artificial Sequence: Synthetic oligonucleotide
acauacacaugcaugcacc

SEQ ID NO: 3282164 - RNA, 19 nt, Artificial Sequence
  Description of Artificial Sequence: Synthetic oligonucleotide
acauccuccacaucugggg

SEQ ID NO: 3282165 - RNA, 19 nt, Artificial Sequence
  Description of Artificial Sequence: Synthetic oligonucleotide
ugacgguccaucuucagga

SEQ ID NO: 3282166 - RNA, 19 nt, Artificial Sequence
  Description of Artificial Sequence: Synthetic oligonucleotide
cacaucuggggacacaugg

SEQ ID NO: 3282167 - RNA, 19 nt, Artificial Sequence
  Description of Artificial Sequence: Synthetic oligonucleotide
acgaaaugaugcucugugc

SEQ ID NO: 3282168 - RNA, 19 nt, Artificial Sequence
  Description of Artificial Sequence: Synthetic oligonucleotide
  modified_base (18)..(18): a, c, u, g, unknown or other
agauugagagccccgucnc

SEQ ID NO: 3282169 - RNA, 19 nt, Artificial Sequence
  Description of Artificial Sequence: Synthetic oligonucleotide
gaaaugaugcucugugcug

SEQ ID NO: 3282170 - RNA, 19 nt, Artificial Sequence
  Description of Artificial Sequence: Synthetic oligonucleotide
auccaggacauguugugac

SEQ ID NO: 3282171 - RNA, 19 nt, Artificial Sequence
  Description of Artificial Sequence: Synthetic oligonucleotide
gcuacauacacaugcaugc

SEQ ID NO: 3282172 - RNA, 19 nt, Artificial Sequence
  Description of Artificial Sequence: Synthetic oligonucleotide
ucuucaggagagcugucag

SEQ ID NO: 3282173 - RNA, 19 nt, Artificial Sequence
  Description of Artificial Sequence: Synthetic oligonucleotide
ucuggggacacauggcuag

SEQ ID NO: 3282174 - RNA, 19 nt, Artificial Sequence
  Description of Artificial Sequence: Synthetic oligonucleotide
gacacacagugcuacauac

SEQ ID NO: 3282175 - RNA, 19 nt, Artificial Sequence
  Description of Artificial Sequence: Synthetic oligonucleotide
uacauacacaugcaugcac

SEQ ID NO: 3282176 - RNA, 19 nt, Artificial Sequence
  Description of Artificial Sequence: Synthetic oligonucleotide
cacacagugcuacauacac

SEQ ID NO: 3282177 - RNA, 19 nt, Artificial Sequence
  Description of Artificial Sequence: Synthetic oligonucleotide
ugcugcaaugacauccucc

SEQ ID NO: 3282178 - RNA, 19 nt, Artificial Sequence
  Description of Artificial Sequence: Synthetic oligonucleotide
ggcucaaugggacacacag

SEQ ID NO: 3282179 - RNA, 19 nt, Artificial Sequence
  Description of Artificial Sequence: Synthetic oligonucleotide
cacgcucagauugagagcc

SEQ ID NO: 3282180 - RNA, 19 nt, Artificial Sequence
  Description of Artificial Sequence: Synthetic oligonucleotide
cugugcugcaaugacaucc

SEQ ID NO: 3282181 - RNA, 19 nt, Artificial Sequence
  Description of Artificial Sequence: Synthetic oligonucleotide
ugacauccuccacaucugg

SEQ ID NO: 3282182 - RNA, 19 nt, Artificial Sequence
  Description of Artificial Sequence: Synthetic oligonucleotide
uucaggagagcugucagac

SEQ ID NO: 3282183 - RNA, 19 nt, Artificial Sequence
  Description of Artificial Sequence: Synthetic oligonucleotide
uccaggacauguugugacg

SEQ ID NO: 3282184 - RNA, 19 nt, Artificial Sequence
  Description of Artificial Sequence: Synthetic oligonucleotide
  modified_base (12)..(12): a, c, u, g, unknown or other
agagccccgucncuaaagg

SEQ ID NO: 3282185 - RNA, 19 nt, Artificial Sequence
  Description of Artificial Sequence: Synthetic oligonucleotide
guugugacgguccaucuuc

SEQ ID NO: 3282186 - RNA, 19 nt, Artificial Sequence
  Description of Artificial Sequence: Synthetic oligonucleotide
acacgcucagauugagagc

SEQ ID NO: 3282187 - RNA, 19 nt, Artificial Sequence
  Description of Artificial Sequence: Synthetic oligonucleotide
caugcaugcaccuacgaaa

SEQ ID NO: 3282188 - RNA, 19 nt, Artificial Sequence
  Description of Artificial Sequence: Synthetic oligonucleotide
uaaaggcucaaugggacac

SEQ ID NO: 3282189 - RNA, 19 nt, Artificial Sequence
  Description of Artificial Sequence: Synthetic oligonucleotide
uaggguagcggauccagga

SEQ ID NO: 3282190 - RNA, 19 nt, Artificial Sequence
  Description of Artificial Sequence: Synthetic oligonucleotide
ucaaugggacacacagugc

SEQ ID NO: 3282191 - RNA, 19 nt, Artificial Sequence
  Description of Artificial Sequence: Synthetic oligonucleotide
uccaucuucaggagagcug

SEQ ID NO: 3282192 - RNA, 19 nt, Artificial Sequence
  Description of Artificial Sequence: Synthetic oligonucleotide
ugugcugcaaugacauccu

SEQ ID NO: 3282193 - RNA, 19 nt, Artificial Sequence
  Description of Artificial Sequence: Synthetic oligonucleotide
aaggcucaaugggacacac

SEQ ID NO: 3282194 - RNA, 19 nt, Artificial Sequence
  Description of Artificial Sequence: Synthetic oligonucleotide
gaugcucugugcugcaaug

SEQ ID NO: 3282195 - RNA, 19 nt, Artificial Sequence
  Description of Artificial Sequence: Synthetic oligonucleotide
gugacgguccaucuucagg

SEQ ID NO: 3282196 - RNA, 19 nt, Artificial Sequence
  Description of Artificial Sequence: Synthetic oligonucleotide
aaugaugcucugugcugca

SEQ ID NO: 3282197 - RNA, 19 nt, Artificial Sequence
  Description of Artificial Sequence: Synthetic oligonucleotide
augggacacacagugcuac

SEQ ID NO: 3282198 - RNA, 19 nt, Artificial Sequence
  Description of Artificial Sequence: Synthetic oligonucleotide
aggguagcggauccaggac

SEQ ID NO: 3282199 - RNA, 19 nt, Artificial Sequence
  Description of Artificial Sequence: Synthetic oligonucleotide
ugcucugugcugcaaugac

SEQ ID NO: 3282200 - RNA, 19 nt, Artificial Sequence
  Description of Artificial Sequence: Synthetic oligonucleotide
agugcggucucggaugaac

SEQ ID NO: 3282201 - RNA, 19 nt, Artificial Sequence
  Description of Artificial Sequence: Synthetic oligonucleotide
auccuccacaucuggggac

SEQ ID NO: 3282202 - RNA, 19 nt, Artificial Sequence
  Description of Artificial Sequence: Synthetic oligonucleotide
  modified_base (2)..(2): a, c, u, g, unknown or other
cncuaaaggcucaauggga

SEQ ID NO: 3282203 - RNA, 19 nt, Artificial Sequence
  Description of Artificial Sequence: Synthetic oligonucleotide
ugaacacgcucagauugag

SEQ ID NO: 3282204 - RNA, 19 nt, Artificial Sequence
  Description of Artificial Sequence: Synthetic oligonucleotide
gacauccuccacaucuggg

SEQ ID NO: 3282205 - RNA, 19 nt, Artificial Sequence
  Description of Artificial Sequence: Synthetic oligonucleotide
acaucuggggacacauggc

SEQ ID NO: 3282206 - RNA, 19 nt, Artificial Sequence
  Description of Artificial Sequence: Synthetic oligonucleotide
cauguugugacgguccauc

SEQ ID NO: 3282207 - RNA, 19 nt, Artificial Sequence
  Description of Artificial Sequence: Synthetic oligonucleotide
acaugcaugcaccuacgaa

SEQ ID NO: 3282208 - RNA, 19 nt, Artificial Sequence
  Description of Artificial Sequence: Synthetic oligonucleotide
cuaggguagcggauccagg

SEQ ID NO: 3282209 - RNA, 19 nt, Artificial Sequence
  Description of Artificial Sequence: Synthetic oligonucleotide
auggcuaggguagcggauc

SEQ ID NO: 3282210 - RNA, 19 nt, Artificial Sequence
  Description of Artificial Sequence: Synthetic oligonucleotide
ugaugcucugugcugcaau

SEQ ID NO: 3282211 - RNA, 19 nt, Artificial Sequence
  Description of Artificial Sequence: Synthetic oligonucleotide
aggacauguugugacgguc

SEQ ID NO: 3282212 - RNA, 19 nt, Artificial Sequence
  Description of Artificial Sequence: Synthetic oligonucleotide
ucaggagagcugucagacc

SEQ ID NO: 3282213 - RNA, 19 nt, Artificial Sequence
  Description of Artificial Sequence: Synthetic oligonucleotide
gcugcaaugacauccucca

SEQ ID NO: 3282214 - RNA, 19 nt, Artificial Sequence
  Description of Artificial Sequence: Synthetic oligonucleotide
ggacacauggcuaggguag

SEQ ID NO: 3282215 - RNA, 19 nt, Artificial Sequence
  Description of Artificial Sequence: Synthetic oligonucleotide
ucagauugagagccccguc

SEQ ID NO: 3282216 - RNA, 19 nt, Artificial Sequence
  Description of Artificial Sequence: Synthetic oligonucleotide
ugugacgguccaucuucag

SEQ ID NO: 3282217 - RNA, 19 nt, Artificial Sequence
  Description of Artificial Sequence: Synthetic oligonucleotide
acauggcuaggguagcgga

SEQ ID NO: 3282218 - RNA, 19 nt, Artificial Sequence
  Description of Artificial Sequence: Synthetic oligonucleotide
cacagugcuacauacacau

SEQ ID NO: 3282219 - RNA, 19 nt, Artificial Sequence
  Description of Artificial Sequence: Synthetic oligonucleotide
  modified_base (10)..(10): a, c, u, g, unknown or other
agccccgucncuaaaggcu

SEQ ID NO: 3282220 - RNA, 19 nt, Artificial Sequence
  Description of Artificial Sequence: Synthetic oligonucleotide
  modified_base (19)..(19): a, c, u, g, unknown or other
cagauugagagccccgucn

SEQ ID NO: 3282221 - RNA, 19 nt, Artificial Sequence
  Description of Artificial Sequence: Synthetic oligonucleotide
accuacgaaaugaugcucu

SEQ ID NO: 3282222 - RNA, 19 nt, Artificial Sequence
  Description of Artificial Sequence: Synthetic oligonucleotide
  modified_base (16)..(16): a, c, u, g, unknown or other
auugagagccccgucncua

SEQ ID NO: 3282223 - RNA, 19 nt, Artificial Sequence
  Description of Artificial Sequence: Synthetic oligonucleotide
uagcggauccaggacaugu

SEQ ID NO: 3282224 - RNA, 19 nt, Artificial Sequence
  Description of Artificial Sequence: Synthetic oligonucleotide
gacgguccaucuucaggag

SEQ ID NO: 3282225 - RNA, 19 nt, Artificial Sequence
  Description of Artificial Sequence: Synthetic oligonucleotide
uugugacgguccaucuuca

SEQ ID NO: 3282226 - RNA, 19 nt, Artificial Sequence
  Description of Artificial Sequence: Synthetic oligonucleotide
agugcuacauacacaugca

SEQ ID NO: 3282227 - RNA, 19 nt, Artificial Sequence
  Description of Artificial Sequence: Synthetic oligonucleotide
gacauguugugacggucca

SEQ ID NO: 3282228 - RNA, 19 nt, Artificial Sequence
  Description of Artificial Sequence: Synthetic oligonucleotide
uggcuaggguagcggaucc

SEQ ID NO: 3282229 - RNA, 19 nt, Artificial Sequence
  Description of Artificial Sequence: Synthetic oligonucleotide
ugcaugcaccuacgaaaug

SEQ ID NO: 3282230 - RNA, 19 nt, Artificial Sequence
  Description of Artificial Sequence: Synthetic oligonucleotide
uguugugacgguccaucuu

SEQ ID NO: 3282231 - RNA, 19 nt, Artificial Sequence
  Description of Artificial Sequence: Synthetic oligonucleotide
aaaggcucaaugggacaca

SEQ ID NO: 3282232 - RNA, 19 nt, Artificial Sequence
  Description of Artificial Sequence: Synthetic oligonucleotide
uccacaucuggggacacau

SEQ ID NO: 3282233 - RNA, 19 nt, Artificial Sequence
  Description of Artificial Sequence: Synthetic oligonucleotide
ugcggucucggaugaacac

SEQ ID NO: 3282234 - RNA, 19 nt, Artificial Sequence
  Description of Artificial Sequence: Synthetic oligonucleotide
  modified_base (14)..(14): a, c, u, g, unknown or other
ugagagccccgucncuaaa

SEQ ID NO: 3282235 - RNA, 19 nt, Artificial Sequence
  Description of Artificial Sequence: Synthetic oligonucleotide
ggauccaggacauguugug

SEQ ID NO: 3282236 - RNA, 19 nt, Artificial Sequence
  Description of Artificial Sequence: Synthetic oligonucleotide
uggggacacauggcuaggg

SEQ ID NO: 3282237 - RNA, 19 nt, Artificial Sequence
  Description of Artificial Sequence: Synthetic oligonucleotide
  modified_base (13)..(13): a, c, u, g, unknown or other
gagagccccgucncuaaag

SEQ ID NO: 3282238 - RNA, 19 nt, Artificial Sequence
  Description of Artificial Sequence: Synthetic oligonucleotide
cuaaaggcucaaugggaca

SEQ ID NO: 3282239 - RNA, 19 nt, Artificial Sequence
  Description of Artificial Sequence: Synthetic oligonucleotide
caaugggacacacagugcu

SEQ ID NO: 3282240 - RNA, 19 nt, Artificial Sequence
  Description of Artificial Sequence: Synthetic oligonucleotide
cucggaugaacacgcucag

SEQ ID NO: 3282241 - RNA, 19 nt, Artificial Sequence
  Description of Artificial Sequence: Synthetic oligonucleotide
  modified_base (11)..(11): a, c, u, g, unknown or other
gagccccgucncuaaaggc

SEQ ID NO: 3282242 - RNA, 19 nt, Artificial Sequence
  Description of Artificial Sequence: Synthetic oligonucleotide
auguugugacgguccaucu

SEQ ID NO: 3282243 - RNA, 19 nt, Artificial Sequence
  Description of Artificial Sequence: Synthetic oligonucleotide
cacauggcuaggguagcgg

SEQ ID NO: 3282244 - RNA, 19 nt, Artificial Sequence
  Description of Artificial Sequence: Synthetic oligonucleotide
aucuucaggagagcuguca

SEQ ID NO: 3282245 - RNA, 19 nt, Artificial Sequence
  Description of Artificial Sequence: Synthetic oligonucleotide
acacaugcaugcaccuacg

SEQ ID NO: 3282246 - RNA, 19 nt, Artificial Sequence
  Description of Artificial Sequence: Synthetic oligonucleotide
acacauggcuaggguagcg

SEQ ID NO: 3282247 - RNA, 19 nt, Artificial Sequence
  Description of Artificial Sequence: Synthetic oligonucleotide
gauccaggacauguuguga

SEQ ID NO: 3282248 - RNA, 19 nt, Artificial Sequence
  Description of Artificial Sequence: Synthetic oligonucleotide
  modified_base (15)..(15): a, c, u, g, unknown or other
uugagagccccgucncuaa

SEQ ID NO: 3282249 - RNA, 19 nt, Artificial Sequence
  Description of Artificial Sequence: Synthetic oligonucleotide
ucuuugaaggaauacaggg

SEQ ID NO: 3282250 - RNA, 19 nt, Artificial Sequence
  Description of Artificial Sequence: Synthetic oligonucleotide
aauuuuacaggugggaauc

SEQ ID NO: 3282251 - RNA, 19 nt, Artificial Sequence
  Description of Artificial Sequence: Synthetic oligonucleotide
uuugaaggaauacagggcu

SEQ ID NO: 3282252 - RNA, 19 nt, Artificial Sequence
  Description of Artificial Sequence: Synthetic oligonucleotide
acuucguuuguccaggccc

SEQ ID NO: 3282253 - RNA, 19 nt, Artificial Sequence
  Description of Artificial Sequence: Synthetic oligonucleotide
agcacuuggucuuugaagg

SEQ ID NO: 3282254 - RNA, 19 nt, Artificial Sequence
  Description of Artificial Sequence: Synthetic oligonucleotide
acagccuacaauuuuacag

SEQ ID NO: 3282255 - RNA, 19 nt, Artificial Sequence
  Description of Artificial Sequence: Synthetic oligonucleotide
uccuuuagcacuuuguagc

SEQ ID NO: 3282256 - RNA, 19 nt, Artificial Sequence
  Description of Artificial Sequence: Synthetic oligonucleotide
ugaagcaucuugaaauagg

SEQ ID NO: 3282257 - RNA, 19 nt, Artificial Sequence
  Description of Artificial Sequence: Synthetic oligonucleotide
uuuagcacuuuguagcccg

SEQ ID NO: 3282258 - RNA, 19 nt, Artificial Sequence
  Description of Artificial Sequence: Synthetic oligonucleotide
cuugaaauagggcugcugg

SEQ ID NO: 3282259 - RNA, 19 nt, Artificial Sequence
  Description of Artificial Sequence: Synthetic oligonucleotide
uuucuuguggagaagguca

SEQ ID NO: 3282260 - RNA, 19 nt, Artificial Sequence
  Description of Artificial Sequence: Synthetic oligonucleotide
agcaucuugaaauagggcu

SEQ ID NO: 3282261 - RNA, 19 nt, Artificial Sequence
  Description of Artificial Sequence: Synthetic oligonucleotide
aguaucuuaucucagauuu

SEQ ID NO: 3282262 - RNA, 19 nt, Artificial Sequence
  Description of Artificial Sequence: Synthetic oligonucleotide
gaauacagggcuugcaagg

SEQ ID NO: 3282263 - RNA, 19 nt, Artificial Sequence
  Description of Artificial Sequence: Synthetic oligonucleotide
ucuuguuacuccauguacc

SEQ ID NO: 3282264 - RNA, 19 nt, Artificial Sequence
  Description of Artificial Sequence: Synthetic oligonucleotide
ucgauuuucccauacgcag

SEQ ID NO: 3282265 - RNA, 19 nt, Artificial Sequence
  Description of Artificial Sequence: Synthetic oligonucleotide
aggcauucaaucuggaacg

SEQ ID NO: 3282266 - RNA, 19 nt, Artificial Sequence
  Description of Artificial Sequence: Synthetic oligonucleotide
uugugaagcaucuugaaau

SEQ ID NO: 3282267 - RNA, 19 nt, Artificial Sequence
  Description of Artificial Sequence: Synthetic oligonucleotide
aacacguauauacaccugu

SEQ ID NO: 3282268 - RNA, 19 nt, Artificial Sequence
  Description of Artificial Sequence: Synthetic oligonucleotide
uuuucccauacgcaggagg

SEQ ID NO: 3282269 - RNA, 19 nt, Artificial Sequence
  Description of Artificial Sequence: Synthetic oligonucleotide
cuuaucucagauuuguaug

SEQ ID NO: 3282270 - RNA, 19 nt, Artificial Sequence
  Description of Artificial Sequence: Synthetic oligonucleotide
gaagcaucuugaaauaggg

SEQ ID NO: 3282271 - RNA, 19 nt, Artificial Sequence
  Description of Artificial Sequence: Synthetic oligonucleotide
aucuuguuacuccauguac

SEQ ID NO: 3282272 - RNA, 19 nt, Artificial Sequence
  Description of Artificial Sequence: Synthetic oligonucleotide
cauguuucaaccccgcugg

SEQ ID NO: 3282273 - RNA, 19 nt, Artificial Sequence
  Description of Artificial Sequence: Synthetic oligonucleotide
aagcacuuggucuuugaag

SEQ ID NO: 3282274 - RNA, 19 nt, Artificial Sequence
  Description of Artificial Sequence: Synthetic oligonucleotide
cuuguuacuccauguaccg

SEQ ID NO: 3282275 - RNA, 19 nt, Artificial Sequence
  Description of Artificial Sequence: Synthetic oligonucleotide
acagcugauaagcacuugg

SEQ ID NO: 3282276 - RNA, 19 nt, Artificial Sequence
  Description of Artificial Sequence: Synthetic oligonucleotide
uaucucacuauccuuuagc

SEQ ID NO: 3282277 - RNA, 19 nt, Artificial Sequence
  Description of Artificial Sequence: Synthetic oligonucleotide
ugugguauugugaagcauc

SEQ ID NO: 3282278 - RNA, 19 nt, Artificial Sequence
  Description of Artificial Sequence: Synthetic oligonucleotide
cuuugaaggaauacagggc

SEQ ID NO: 3282279 - RNA, 19 nt, Artificial Sequence
  Description of Artificial Sequence: Synthetic oligonucleotide
uggaacguguccauuaucu

SEQ ID NO: 3282280 - RNA, 19 nt, Artificial Sequence
  Description of Artificial Sequence: Synthetic oligonucleotide
uccauuaucucacuauccu

SEQ ID NO: 3282281 - RNA, 19 nt, Artificial Sequence
  Description of Artificial Sequence: Synthetic oligonucleotide
uuaucucagauuuguaugu

SEQ ID NO: 3282282 - RNA, 19 nt, Artificial Sequence
  Description of Artificial Sequence: Synthetic oligonucleotide
uucaguacuucguuugucc

SEQ ID NO: 3282283 - RNA, 19 nt, Artificial Sequence
  Description of Artificial Sequence: Synthetic oligonucleotide
accaguccauguuucaacc

SEQ ID NO: 3282284 - RNA, 19 nt, Artificial Sequence
  Description of Artificial Sequence: Synthetic oligonucleotide
aacguguccauuaucucac

SEQ ID NO: 3282285 - RNA, 19 nt, Artificial Sequence
  Description of Artificial Sequence: Synthetic oligonucleotide
cagccuacaauuuuacagg

SEQ ID NO: 3282286 - RNA, 19 nt, Artificial Sequence
  Description of Artificial Sequence: Synthetic oligonucleotide
ucuuaucucagauuuguau

SEQ ID NO: 3282287 - RNA, 19 nt, Artificial Sequence
  Description of Artificial Sequence: Synthetic oligonucleotide
agaacacguauauacaccu

SEQ ID NO: 3282288 - RNA, 19 nt, Artificial Sequence
  Description of Artificial Sequence: Synthetic oligonucleotide
uuucccauacgcaggaggc

SEQ ID NO: 3282289 - RNA, 19 nt, Artificial Sequence
  Description of Artificial Sequence: Synthetic oligonucleotide
aauacagggcuugcaaggg

SEQ ID NO: 3282290 - RNA, 19 nt, Artificial Sequence
  Description of Artificial Sequence: Synthetic oligonucleotide
accugugguauugugaagc

SEQ ID NO: 3282291 - RNA, 19 nt, Artificial Sequence
  Description of Artificial Sequence: Synthetic oligonucleotide
auacgcaggaggcuguagc

SEQ ID NO: 3282292 - RNA, 19 nt, Artificial Sequence
  Description of Artificial Sequence: Synthetic oligonucleotide
uuuacaggugggaaucuug

SEQ ID NO: 3282293 - RNA, 19 nt, Artificial Sequence
  Description of Artificial Sequence: Synthetic oligonucleotide
cacacuggaaggcaggugg

SEQ ID NO: 3282294 - RNA, 19 nt, Artificial Sequence
  Description of Artificial Sequence: Synthetic oligonucleotide
gugcagaacacguauauac

SEQ ID NO: 3282295 - RNA, 19 nt, Artificial Sequence
  Description of Artificial Sequence: Synthetic oligonucleotide
uaugucgugagguuguuuc

SEQ ID NO: 3282296 - RNA, 19 nt, Artificial Sequence
  Description of Artificial Sequence: Synthetic oligonucleotide
caggcauucaaucuggaac

SEQ ID NO: 3282297 - RNA, 19 nt, Artificial Sequence
  Description of Artificial Sequence: Synthetic oligonucleotide
ccuacaauuuuacaggugg

SEQ ID NO: 3282298 - RNA, 19 nt, Artificial Sequence
  Description of Artificial Sequence: Synthetic oligonucleotide
uuguuucuuguggagaagg

SEQ ID NO: 3282299 - RNA, 19 nt, Artificial Sequence
  Description of Artificial Sequence: Synthetic oligonucleotide
aucucagauuuguaugucg

SEQ ID NO: 3282300 - RNA, 19 nt, Artificial Sequence
  Description of Artificial Sequence: Synthetic oligonucleotide
gguauugugaagcaucuug

SEQ ID NO: 3282301 - RNA, 19 nt, Artificial Sequence
  Description of Artificial Sequence: Synthetic oligonucleotide
aaauagggcugcuggcagg

SEQ ID NO: 3282302 - RNA, 19 nt, Artificial Sequence
  Description of Artificial Sequence: Synthetic oligonucleotide
uaucuuaucucagauuugu

SEQ ID NO: 3282303 - RNA, 19 nt, Artificial Sequence
  Description of Artificial Sequence: Synthetic oligonucleotide
gaggcuguagcuuugggca

SEQ ID NO: 3282304 - RNA, 19 nt, Artificial Sequence
  Description of Artificial Sequence: Synthetic oligonucleotide
uguaccguccuucaggcau

SEQ ID NO: 3282305 - RNA, 19 nt, Artificial Sequence
  Description of Artificial Sequence: Synthetic oligonucleotide
ucagauuuguaugucguga

SEQ ID NO: 3282306 - RNA, 19 nt, Artificial Sequence
  Description of Artificial Sequence: Synthetic oligonucleotide
agauuuguaugucgugagg

SEQ ID NO: 3282307 - RNA, 19 nt, Artificial Sequence
  Description of Artificial Sequence: Synthetic oligonucleotide
uguuacuccauguaccguc

SEQ ID NO: 3282308 - RNA, 19 nt, Artificial Sequence
  Description of Artificial Sequence: Synthetic oligonucleotide
ucucagauuuguaugucgu

SEQ ID NO: 3282309 - RNA, 19 nt, Artificial Sequence
  Description of Artificial Sequence: Synthetic oligonucleotide
acguauauacaccuguggu

SEQ ID NO: 3282310 - RNA, 19 nt, Artificial Sequence
  Description of Artificial Sequence: Synthetic oligonucleotide
gugagguuguuucuugugg

SEQ ID NO: 3282311 - RNA, 19 nt, Artificial Sequence
  Description of Artificial Sequence: Synthetic oligonucleotide
gaaauagggcugcuggcag

SEQ ID NO: 3282312 - RNA, 19 nt, Artificial Sequence
  Description of Artificial Sequence: Synthetic oligonucleotide
aagcaucuugaaauagggc

SEQ ID NO: 3282313 - RNA, 19 nt, Artificial Sequence
  Description of Artificial Sequence: Synthetic oligonucleotide
uuuguaugucgugagguug

SEQ ID NO: 3282314 - RNA, 19 nt, Artificial Sequence
  Description of Artificial Sequence: Synthetic oligonucleotide
agcugauaagcacuugguc

SEQ ID NO: 3282315 - RNA, 19 nt, Artificial Sequence
  Description of Artificial Sequence: Synthetic oligonucleotide
auccuuuagcacuuuguag

SEQ ID NO: 3282316 - RNA, 19 nt, Artificial Sequence
  Description of Artificial Sequence: Synthetic oligonucleotide
ugcagaacacguauauaca

SEQ ID NO: 3282317 - RNA, 19 nt, Artificial Sequence
  Description of Artificial Sequence: Synthetic oligonucleotide
uuuguagcccgugucacag

SEQ ID NO: 3282318 - RNA, 19 nt, Artificial Sequence
  Description of Artificial Sequence: Synthetic oligonucleotide
uucaaucuggaacgugucc

SEQ ID NO: 3282319 - RNA, 19 nt, Artificial Sequence
  Description of Artificial Sequence: Synthetic oligonucleotide
uauccuuuagcacuuugua

SEQ ID NO: 3282320 - RNA, 19 nt, Artificial Sequence
  Description of Artificial Sequence: Synthetic oligonucleotide
cagaacacguauauacacc

SEQ ID NO: 3282321 - RNA, 19 nt, Artificial Sequence
  Description of Artificial Sequence: Synthetic oligonucleotide
cuucaggcauucaaucugg

SEQ ID NO: 3282322 - RNA, 19 nt, Artificial Sequence
  Description of Artificial Sequence: Synthetic oligonucleotide
uguccauuaucucacuauc

SEQ ID NO: 3282323 - RNA, 19 nt, Artificial Sequence
  Description of Artificial Sequence: Synthetic oligonucleotide
ucaaucuggaacgugucca

SEQ ID NO: 3282324 - RNA, 19 nt, Artificial Sequence
  Description of Artificial Sequence: Synthetic oligonucleotide
aaucuuguuacuccaugua

SEQ ID NO: 3282325 - RNA, 19 nt, Artificial Sequence
  Description of Artificial Sequence: Synthetic oligonucleotide
cuacaauuuuacagguggg

SEQ ID NO: 3282326 - RNA, 19 nt, Artificial Sequence
  Description of Artificial Sequence: Synthetic oligonucleotide
aguacuucguuuguccagg

SEQ ID NO: 3282327 - RNA, 19 nt, Artificial Sequence
  Description of Artificial Sequence: Synthetic oligonucleotide
gaacguguccauuaucuca

SEQ ID NO: 3282328 - RNA, 19 nt, Artificial Sequence
  Description of Artificial Sequence: Synthetic oligonucleotide
uuguccaggccccaugugc

SEQ ID NO: 3282329 - RNA, 19 nt, Artificial Sequence
  Description of Artificial Sequence: Synthetic oligonucleotide
cauguaccguccuucaggc

SEQ ID NO: 3282330 - RNA, 19 nt, Artificial Sequence
  Description of Artificial Sequence: Synthetic oligonucleotide
uguggagaaggucaccagu

SEQ ID NO: 3282331 - RNA, 19 nt, Artificial Sequence
  Description of Artificial Sequence: Synthetic oligonucleotide
ugaaauagggcugcuggca

SEQ ID NO: 3282332 - RNA, 19 nt, Artificial Sequence
  Description of Artificial Sequence: Synthetic oligonucleotide
cacguauauacaccugugg

SEQ ID NO: 3282333 - RNA, 19 nt, Artificial Sequence
  Description of Artificial Sequence: Synthetic oligonucleotide
uuacaggugggaaucuugu

SEQ ID NO: 3282334 - RNA, 19 nt, Artificial Sequence
  Description of Artificial Sequence: Synthetic oligonucleotide
uuaucucacuauccuuuag

SEQ ID NO: 3282335 - RNA, 19 nt, Artificial Sequence
  Description of Artificial Sequence: Synthetic oligonucleotide
uacaccugugguauuguga

SEQ ID NO: 3282336 - RNA, 19 nt, Artificial Sequence
  Description of Artificial Sequence: Synthetic oligonucleotide
uacaauuuuacagguggga

SEQ ID NO: 3282337 - RNA, 19 nt, Artificial Sequence
  Description of Artificial Sequence: Synthetic oligonucleotide
aucucacuauccuuuagca

SEQ ID NO: 3282338 - RNA, 19 nt, Artificial Sequence
  Description of Artificial Sequence: Synthetic oligonucleotide
ugagguuguuucuugugga

SEQ ID NO: 3282339 - RNA, 19 nt, Artificial Sequence
  Description of Artificial Sequence: Synthetic oligonucleotide
uugaaauagggcugcuggc

SEQ ID NO: 3282340 - RNA, 19 nt, Artificial Sequence
  Description of Artificial Sequence: Synthetic oligonucleotide
auacagggcuugcaagggc

SEQ ID NO: 3282341 - RNA, 19 nt, Artificial Sequence
  Description of Artificial Sequence: Synthetic oligonucleotide
cucuucaguacuucguuug

SEQ ID NO: 3282342 - RNA, 19 nt, Artificial Sequence
  Description of Artificial Sequence: Synthetic oligonucleotide
aagggcucgauuuucccau

SEQ ID NO: 3282343 - RNA, 19 nt, Artificial Sequence
  Description of Artificial Sequence: Synthetic oligonucleotide
ugaaggaauacagggcuug

SEQ ID NO: 3282344 - RNA, 19 nt, Artificial Sequence
  Description of Artificial Sequence: Synthetic oligonucleotide
auugugaagcaucuugaaa

SEQ ID NO: 3282345 - RNA, 19 nt, Artificial Sequence
  Description of Artificial Sequence: Synthetic oligonucleotide
uuguaugucgugagguugu

SEQ ID NO: 3282346 - RNA, 19 nt, Artificial Sequence
  Description of Artificial Sequence: Synthetic oligonucleotide
uggucuuugaaggaauaca

SEQ ID NO: 3282347 - RNA, 19 nt, Artificial Sequence
  Description of Artificial Sequence: Synthetic oligonucleotide
ugucacagcugauaagcac

SEQ ID NO: 3282348 - RNA, 19 nt, Artificial Sequence
  Description of Artificial Sequence: Synthetic oligonucleotide
cagauuuguaugucgugag

SEQ ID NO: 3282349 - RNA, 19 nt, Artificial Sequence
  Description of Artificial Sequence: Synthetic oligonucleotide
aaaagcugaauuuuaaagg

SEQ ID NO: 3282350 - RNA, 19 nt, Artificial Sequence
  Description of Artificial Sequence: Synthetic oligonucleotide
uuucccaucauaaagauac

SEQ ID NO: 3282351 - RNA, 19 nt, Artificial Sequence
  Description of Artificial Sequence: Synthetic oligonucleotide
ugcauauucacuuuaaagc

SEQ ID NO: 3282352 - RNA, 19 nt, Artificial Sequence
  Description of Artificial Sequence: Synthetic oligonucleotide
auguuuuacauuuaugagg

SEQ ID NO: 3282353 - RNA, 19 nt, Artificial Sequence
  Description of Artificial Sequence: Synthetic oligonucleotide
uguuuuacauuuaugaggu

SEQ ID NO: 3282354 - RNA, 19 nt, Artificial Sequence
  Description of Artificial Sequence: Synthetic oligonucleotide
agugaugagaugcauauuc

SEQ ID NO: 3282355 - RNA, 19 nt, Artificial Sequence
  Description of Artificial Sequence: Synthetic oligonucleotide
aaucaagacauuguaaggg

SEQ ID NO: 3282356 - RNA, 19 nt, Artificial Sequence
  Description of Artificial Sequence: Synthetic oligonucleotide
aaagcugaauuuuaaaggu

SEQ ID NO: 3282357 - RNA, 19 nt, Artificial Sequence
  Description of Artificial Sequence: Synthetic oligonucleotide
uugaugagaaacaagcucc

SEQ ID NO: 3282358 - RNA, 19 nt, Artificial Sequence
  Description of Artificial Sequence: Synthetic oligonucleotide
auuguaaggguuuaaaucu

SEQ ID NO: 3282359 - RNA, 19 nt, Artificial Sequence
  Description of Artificial Sequence: Synthetic oligonucleotide
acaaucaagacauuguaag

SEQ ID NO: 3282360 - RNA, 19 nt, Artificial Sequence
  Description of Artificial Sequence: Synthetic oligonucleotide
aauuuuaaagguuuuggaa

SEQ ID NO: 3282361 - RNA, 19 nt, Artificial Sequence
  Description of Artificial Sequence: Synthetic oligonucleotide
auuuacuugguguuucucc

SEQ ID NO: 3282362 - RNA, 19 nt, Artificial Sequence
  Description of Artificial Sequence: Synthetic oligonucleotide
uuuaugagugaugagaugc

SEQ ID NO: 3282363 - RNA, 19 nt, Artificial Sequence
  Description of Artificial Sequence: Synthetic oligonucleotide
aaggguuuaaaucuggaga

SEQ ID NO: 3282364 - RNA, 19 nt, Artificial Sequence
  Description of Artificial Sequence: Synthetic oligonucleotide
aaguucugaaucuaaagca

SEQ ID NO: 3282365 - RNA, 19 nt, Artificial Sequence
  Description of Artificial Sequence: Synthetic oligonucleotide
uuuuccaugucaugaaugg

SEQ ID NO: 3282366 - RNA, 19 nt, Artificial Sequence
  Description of Artificial Sequence: Synthetic oligonucleotide
ugaauuuuaaagguuuugg

SEQ ID NO: 3282367 - RNA, 19 nt, Artificial Sequence
  Description of Artificial Sequence: Synthetic oligonucleotide
uucacuuuaaagcucuucc

SEQ ID NO: 3282368 - RNA, 19 nt, Artificial Sequence
  Description of Artificial Sequence: Synthetic oligonucleotide
caaaagcugaauuuuaaag

SEQ ID NO: 3282369 - RNA, 19 nt, Artificial Sequence
  Description of Artificial Sequence: Synthetic oligonucleotide
aguguuucccaucauaaag

SEQ ID NO: 3282370 - RNA, 19 nt, Artificial Sequence
  Description of Artificial Sequence: Synthetic oligonucleotide
uuuuaaagguuuuggaaug

SEQ ID NO: 3282371 - RNA, 19 nt, Artificial Sequence
  Description of Artificial Sequence: Synthetic oligonucleotide
ugaaucuaaagcaaaaguu

SEQ ID NO: 3282372 - RNA, 19 nt, Artificial Sequence
  Description of Artificial Sequence: Synthetic oligonucleotide
uuugaugagaaacaagcuc

SEQ ID NO: 3282373 - RNA, 19 nt, Artificial Sequence
  Description of Artificial Sequence: Synthetic oligonucleotide
auuuuaaagguuuuggaau

SEQ ID NO: 3282374 - RNA, 19 nt, Artificial Sequence
  Description of Artificial Sequence: Synthetic oligonucleotide
acaaggaaaagucauguca

SEQ ID NO: 3282375 - RNA, 19 nt, Artificial Sequence
  Description of Artificial Sequence: Synthetic oligonucleotide
uggaauguguguaaagugc

SEQ ID NO: 3282376 - RNA, 19 nt, Artificial Sequence
  Description of Artificial Sequence: Synthetic oligonucleotide
uguguaaagugcuugauua

SEQ ID NO: 3282377 - RNA, 19 nt, Artificial Sequence
  Description of Artificial Sequence: Synthetic oligonucleotide
caaguucugaaucuaaagc

SEQ ID NO: 3282378 - RNA, 19 nt, Artificial Sequence
  Description of Artificial Sequence: Synthetic oligonucleotide
cauuguaaggguuuaaauc

SEQ ID NO: 3282379 - RNA, 19 nt, Artificial Sequence
  Description of Artificial Sequence: Synthetic oligonucleotide
ucaucaauacugcaguucu

SEQ ID NO: 3282380 - RNA, 19 nt, Artificial Sequence
  Description of Artificial Sequence: Synthetic oligonucleotide
aagucgucgucaucaauac

SEQ ID NO: 3282381 - RNA, 19 nt, Artificial Sequence
  Description of Artificial Sequence: Synthetic oligonucleotide
uguaaggguuuaaaucugg

SEQ ID NO: 3282382 - RNA, 19 nt, Artificial Sequence
  Description of Artificial Sequence: Synthetic oligonucleotide
agcaaaagcuuguauuuac

SEQ ID NO: 3282383 - RNA, 19 nt, Artificial Sequence
  Description of Artificial Sequence: Synthetic oligonucleotide
ugcuugauuagccuagugc

SEQ ID NO: 3282384 - RNA, 19 nt, Artificial Sequence
  Description of Artificial Sequence: Synthetic oligonucleotide
cauguuuuacauuuaugag

SEQ ID NO: 3282385 - RNA, 19 nt, Artificial Sequence
  Description of Artificial Sequence: Synthetic oligonucleotide
caagcuccgagaaacaagg

SEQ ID NO: 3282386 - RNA, 19 nt, Artificial Sequence
  Description of Artificial Sequence: Synthetic oligonucleotide
aagcccacacaguagcagc

SEQ ID NO: 3282387 - RNA, 19 nt, Artificial Sequence
  Description of Artificial Sequence: Synthetic oligonucleotide
aacaaggaaaagucauguc

SEQ ID NO: 3282388 - RNA, 19 nt, Artificial Sequence
  Description of Artificial Sequence: Synthetic oligonucleotide
gaaaagucaugucacaauc

SEQ ID NO: 3282389 - RNA, 19 nt, Artificial Sequence
  Description of Artificial Sequence: Synthetic oligonucleotide
aaagucaugucacaaucaa

SEQ ID NO: 3282390 - RNA, 19 nt, Artificial Sequence
  Description of Artificial Sequence: Synthetic oligonucleotide
ucaugucacaaucaagaca

SEQ ID NO: 3282391 - RNA, 19 nt, Artificial Sequence
  Description of Artificial Sequence: Synthetic oligonucleotide
cacaccguacauuugaaag

SEQ ID NO: 3282392 - RNA, 19 nt, Artificial Sequence
  Description of Artificial Sequence: Synthetic oligonucleotide
agguucuucucucaugugg

SEQ ID NO: 3282393 - RNA, 19 nt, Artificial Sequence
  Description of Artificial Sequence: Synthetic oligonucleotide
uuaaaucuggagaaugaaa

SEQ ID NO: 3282394 - RNA, 19 nt, Artificial Sequence
  Description of Artificial Sequence: Synthetic oligonucleotide
ugaugagaaacaagcuccg

SEQ ID NO: 3282395 - RNA, 19 nt, Artificial Sequence
  Description of Artificial Sequence: Synthetic oligonucleotide
acacaguagcagcaaaagc

SEQ ID NO: 3282396 - RNA, 19 nt, Artificial Sequence
  Description of Artificial Sequence: Synthetic oligonucleotide
ugagaaacaagcuccgaga

SEQ ID NO: 3282397 - RNA, 19 nt, Artificial Sequence
  Description of Artificial Sequence: Synthetic oligonucleotide
gaauuuuaaagguuuugga

SEQ ID NO: 3282398 - RNA, 19 nt, Artificial Sequence
  Description of Artificial Sequence: Synthetic oligonucleotide
aaagguuuuggaaugugug

SEQ ID NO: 3282399 - RNA, 19 nt, Artificial Sequence
  Description of Artificial Sequence: Synthetic oligonucleotide
uaagcaguguuucccauca

SEQ ID NO: 3282400 - RNA, 19 nt, Artificial Sequence
  Description of Artificial Sequence: Synthetic oligonucleotide
uaaggguuuaaaucuggag

SEQ ID NO: 3282401 - RNA, 19 nt, Artificial Sequence
  Description of Artificial Sequence: Synthetic oligonucleotide
ucaugaaugguuugaugag

SEQ ID NO: 3282402 - RNA, 19 nt, Artificial Sequence
  Description of Artificial Sequence: Synthetic oligonucleotide
gucaugaaugguuugauga

SEQ ID NO: 3282403 - RNA, 19 nt, Artificial Sequence
  Description of Artificial Sequence: Synthetic oligonucleotide
caaucaagacauuguaagg

SEQ ID NO: 3282404 - RNA, 19 nt, Artificial Sequence
  Description of Artificial Sequence: Synthetic oligonucleotide
acaccguacauuugaaagg

SEQ ID NO: 3282405 - RNA, 19 nt, Artificial Sequence
  Description of Artificial Sequence: Synthetic oligonucleotide
ugcucuuuccggcaaagcc

SEQ ID NO: 3282406 - RNA, 19 nt, Artificial Sequence
  Description of Artificial Sequence: Synthetic oligonucleotide
ucguuuaugagugaugaga

SEQ ID NO: 3282407 - RNA, 19 nt, Artificial Sequence
  Description of Artificial Sequence: Synthetic oligonucleotide
aauguguguaaagugcuug

SEQ ID NO: 3282408 - RNA, 19 nt, Artificial Sequence
  Description of Artificial Sequence: Synthetic oligonucleotide
augagaaacaagcuccgag

SEQ ID NO: 3282409 - RNA, 19 nt, Artificial Sequence
  Description of Artificial Sequence: Synthetic oligonucleotide
aaugguuugaugagaaaca

SEQ ID NO: 3282410 - RNA, 19 nt, Artificial Sequence
  Description of Artificial Sequence: Synthetic oligonucleotide
caaggaaaagucaugucac

SEQ ID NO: 3282411 - RNA, 19 nt, Artificial Sequence
  Description of Artificial Sequence: Synthetic oligonucleotide
aagguuuuggaaugugugu

SEQ ID NO: 3282412 - RNA, 19 nt, Artificial Sequence
  Description of Artificial Sequence: Synthetic oligonucleotide
uuggaauguguguaaagug

SEQ ID NO: 3282413 - RNA, 19 nt, Artificial Sequence
  Description of Artificial Sequence: Synthetic oligonucleotide
gguuugaugagaaacaagc

SEQ ID NO: 3282414 - RNA, 19 nt, Artificial Sequence
  Description of Artificial Sequence: Synthetic oligonucleotide
uuuggaauguguguaaagu

SEQ ID NO: 3282415 - RNA, 19 nt, Artificial Sequence
  Description of Artificial Sequence: Synthetic oligonucleotide
ugagugaugagaugcauau

SEQ ID NO: 3282416 - RNA, 19 nt, Artificial Sequence
  Description of Artificial Sequence: Synthetic oligonucleotide
uguaaagugcuugauuagc

SEQ ID NO: 3282417 - RNA, 19 nt, Artificial Sequence
  Description of Artificial Sequence: Synthetic oligonucleotide
cuugguguuucuccuaugg

SEQ ID NO: 3282418 - RNA, 19 nt, Artificial Sequence
  Description of Artificial Sequence: Synthetic oligonucleotide
uuuacuugguguuucuccu

SEQ ID NO: 3282419 - RNA, 19 nt, Artificial Sequence
  Description of Artificial Sequence: Synthetic oligonucleotide
uuuugcacauguuuuacau

SEQ ID NO: 3282420 - RNA, 19 nt, Artificial Sequence
  Description of Artificial Sequence: Synthetic oligonucleotide
ucucaugugggucuucuca

SEQ ID NO: 3282421 - RNA, 19 nt, Artificial Sequence
  Description of Artificial Sequence: Synthetic oligonucleotide
uuuaaagcucuucccacac

SEQ ID NO: 3282422 - RNA, 19 nt, Artificial Sequence
  Description of Artificial Sequence: Synthetic oligonucleotide
ucaauacugcaguucuugg

SEQ ID NO: 3282423 - RNA, 19 nt, Artificial Sequence
  Description of Artificial Sequence: Synthetic oligonucleotide
uuuacauuuaugagguuuu

SEQ ID NO: 3282424 - RNA, 19 nt, Artificial Sequence
  Description of Artificial Sequence: Synthetic oligonucleotide
uaaagguuuuggaaugugu

SEQ ID NO: 3282425 - RNA, 19 nt, Artificial Sequence
  Description of Artificial Sequence: Synthetic oligonucleotide
acauuugaaagguucuucu

SEQ ID NO: 3282426 - RNA, 19 nt, Artificial Sequence
  Description of Artificial Sequence: Synthetic oligonucleotide
agucaugucacaaucaaga

SEQ ID NO: 3282427 - RNA, 19 nt, Artificial Sequence
  Description of Artificial Sequence: Synthetic oligonucleotide
ucacuuuaaagcucuuccc

SEQ ID NO: 3282428 - RNA, 19 nt, Artificial Sequence
  Description of Artificial Sequence: Synthetic oligonucleotide
aguucuuggacuccuccuc

SEQ ID NO: 3282429 - RNA, 19 nt, Artificial Sequence
  Description of Artificial Sequence: Synthetic oligonucleotide
ucgucaucaauacugcagu

SEQ ID NO: 3282430 - RNA, 19 nt, Artificial Sequence
  Description of Artificial Sequence: Synthetic oligonucleotide
uugcacauguuuuacauuu

SEQ ID NO: 3282431 - RNA, 19 nt, Artificial Sequence
  Description of Artificial Sequence: Synthetic oligonucleotide
uuugaaagguucuucucuc

SEQ ID NO: 3282432 - RNA, 19 nt, Artificial Sequence
  Description of Artificial Sequence: Synthetic oligonucleotide
gcuugauuagccuagugcc

SEQ ID NO: 3282433 - RNA, 19 nt, Artificial Sequence
  Description of Artificial Sequence: Synthetic oligonucleotide
aggguuuaaaucuggagaa

SEQ ID NO: 3282434 - RNA, 19 nt, Artificial Sequence
  Description of Artificial Sequence: Synthetic oligonucleotide
uugguguuucuccuauggg

SEQ ID NO: 3282435 - RNA, 19 nt, Artificial Sequence
  Description of Artificial Sequence: Synthetic oligonucleotide
ugguguuucuccuaugggu

SEQ ID NO: 3282436 - RNA, 19 nt, Artificial Sequence
  Description of Artificial Sequence: Synthetic oligonucleotide
cuugauuagccuagugccc

SEQ ID NO: 3282437 - RNA, 19 nt, Artificial Sequence
  Description of Artificial Sequence: Synthetic oligonucleotide
augagaugcauauucacuu

SEQ ID NO: 3282438 - RNA, 19 nt, Artificial Sequence
  Description of Artificial Sequence: Synthetic oligonucleotide
ucacaaucaagacauugua

SEQ ID NO: 3282439 - RNA, 19 nt, Artificial Sequence
  Description of Artificial Sequence: Synthetic oligonucleotide
aucaagacauuguaagggu

SEQ ID NO: 3282440 - RNA, 19 nt, Artificial Sequence
  Description of Artificial Sequence: Synthetic oligonucleotide
uuguaaggguuuaaaucug

SEQ ID NO: 3282441 - RNA, 19 nt, Artificial Sequence
  Description of Artificial Sequence: Synthetic oligonucleotide
uuaugagugaugagaugca

SEQ ID NO: 3282442 - RNA, 19 nt, Artificial Sequence
  Description of Artificial Sequence: Synthetic oligonucleotide
aaagugcuugauuagccua

SEQ ID NO: 3282443 - RNA, 19 nt, Artificial Sequence
  Description of Artificial Sequence: Synthetic oligonucleotide
aaucuaaagcaaaaguuuu

SEQ ID NO: 3282444 - RNA, 19 nt, Artificial Sequence
  Description of Artificial Sequence: Synthetic oligonucleotide
ugaugagaugcauauucac

SEQ ID NO: 3282445 - RNA, 19 nt, Artificial Sequence
  Description of Artificial Sequence: Synthetic oligonucleotide
auaagcaguguuucccauc

SEQ ID NO: 3282446 - RNA, 19 nt, Artificial Sequence
  Description of Artificial Sequence: Synthetic oligonucleotide
ucucaugggaugcaaguuc

SEQ ID NO: 3282447 - RNA, 19 nt, Artificial Sequence
  Description of Artificial Sequence: Synthetic oligonucleotide
uaaagugcuugauuagccu

SEQ ID NO: 3282448 - RNA, 19 nt, Artificial Sequence
  Description of Artificial Sequence: Synthetic oligonucleotide
ugguuugaugagaaacaag

SEQ ID NO: 3282449 - RNA, 19 nt, Artificial Sequence
  Description of Artificial Sequence: Synthetic oligonucleotide
aaaccuuagagguggcacc

SEQ ID NO: 3282450 - RNA, 19 nt, Artificial Sequence
  Description of Artificial Sequence: Synthetic oligonucleotide
ucuuaucuuaaaauggcug

SEQ ID NO: 3282451 - RNA, 19 nt, Artificial Sequence
  Description of Artificial Sequence: Synthetic oligonucleotide
uuugauggaaggagggugg

SEQ ID NO: 3282452 - RNA, 19 nt, Artificial Sequence
  Description of Artificial Sequence: Synthetic oligonucleotide
agacugaaggaccacaagg

SEQ ID NO: 3282453 - RNA, 19 nt, Artificial Sequence
  Description of Artificial Sequence: Synthetic oligonucleotide
guaagguacagccagcggg

SEQ ID NO: 3282454 - RNA, 19 nt, Artificial Sequence
  Description of Artificial Sequence: Synthetic oligonucleotide
ucaauuugguggcagagcu

SEQ ID NO: 3282455 - RNA, 19 nt, Artificial Sequence
  Description of Artificial Sequence: Synthetic oligonucleotide
ugucagagaaguaagccga

SEQ ID NO: 3282456 - RNA, 19 nt, Artificial Sequence
  Description of Artificial Sequence: Synthetic oligonucleotide
uguuggauuugucuccugg

SEQ ID NO: 3282457 - RNA, 19 nt, Artificial Sequence
  Description of Artificial Sequence: Synthetic oligonucleotide
acaaccuacugcuuuagag

SEQ ID NO: 3282458 - RNA, 19 nt, Artificial Sequence
  Description of Artificial Sequence: Synthetic oligonucleotide
augggcaucaucuuaauaa

SEQ ID NO: 3282459 - RNA, 19 nt, Artificial Sequence
  Description of Artificial Sequence: Synthetic oligonucleotide
caaccuacugcuuuagagg

SEQ ID NO: 3282460 - RNA, 19 nt, Artificial Sequence
  Description of Artificial Sequence: Synthetic oligonucleotide
cuuuauuccaaaggcaucc

SEQ ID NO: 3282461 - RNA, 19 nt, Artificial Sequence
  Description of Artificial Sequence: Synthetic oligonucleotide
aauuugguggcagagcuca

SEQ ID NO: 3282462 - RNA, 19 nt, Artificial Sequence
  Description of Artificial Sequence: Synthetic oligonucleotide
aaguuagcacauuuggccu

SEQ ID NO: 3282463 - RNA, 19 nt, Artificial Sequence
  Description of Artificial Sequence: Synthetic oligonucleotide
aaugccaggaucucuugca

SEQ ID NO: 3282464 - RNA, 19 nt, Artificial Sequence
  Description of Artificial Sequence: Synthetic oligonucleotide
acagcagucucauccgucc

SEQ ID NO: 3282465 - RNA, 19 nt, Artificial Sequence
  Description of Artificial Sequence: Synthetic oligonucleotide
ucuggaaugcuacaagcac

SEQ ID NO: 3282466 - RNA, 19 nt, Artificial Sequence
  Description of Artificial Sequence: Synthetic oligonucleotide
uccuagacaaccuacugcu

SEQ ID NO: 3282467 - RNA, 19 nt, Artificial Sequence
  Description of Artificial Sequence: Synthetic oligonucleotide
aaacauauuuaaggguggg

SEQ ID NO: 3282468 - RNA, 19 nt, Artificial Sequence
  Description of Artificial Sequence: Synthetic oligonucleotide
aaugcggagagacuugcgu

SEQ ID NO: 3282469 - RNA, 19 nt, Artificial Sequence
  Description of Artificial Sequence: Synthetic oligonucleotide
aaaauggcuguucccagga

SEQ ID NO: 3282470 - RNA, 19 nt, Artificial Sequence
  Description of Artificial Sequence: Synthetic oligonucleotide
aacauauuuaagggugggg

SEQ ID NO: 3282471 - RNA, 19 nt, Artificial Sequence
  Description of Artificial Sequence: Synthetic oligonucleotide
aaugcuacaagcacaucug

SEQ ID NO: 3282472 - RNA, 19 nt, Artificial Sequence
  Description of Artificial Sequence: Synthetic oligonucleotide
acguccaaagacugguucc

SEQ ID NO: 3282473 - RNA, 19 nt, Artificial Sequence
  Description of Artificial Sequence: Synthetic oligonucleotide
agaaguuagcacauuuggc

SEQ ID NO: 3282474 - RNA, 19 nt, Artificial Sequence
  Description of Artificial Sequence: Synthetic oligonucleotide
guaaccaugacuacauugc

SEQ ID NO: 3282475 - RNA, 19 nt, Artificial Sequence
  Description of Artificial Sequence: Synthetic oligonucleotide
uuugcuugggagcugucug

SEQ ID NO: 3282476 - RNA, 19 nt, Artificial Sequence
  Description of Artificial Sequence: Synthetic oligonucleotide
uaagguacagccagcgggc

SEQ ID NO: 3282477 - RNA, 19 nt, Artificial Sequence
  Description of Artificial Sequence: Synthetic oligonucleotide
aaauccaccccugcuuggc

SEQ ID NO: 3282478 - RNA, 19 nt, Artificial Sequence
  Description of Artificial Sequence: Synthetic oligonucleotide
augaggcaccaucagggcc

SEQ ID NO: 3282479 - RNA, 19 nt, Artificial Sequence
  Description of Artificial Sequence: Synthetic oligonucleotide
aauccaccccugcuuggcc

SEQ ID NO: 3282480 - RNA, 19 nt, Artificial Sequence
  Description of Artificial Sequence: Synthetic oligonucleotide
acauauuuaaggguggggu

SEQ ID NO: 3282481 - RNA, 19 nt, Artificial Sequence
  Description of Artificial Sequence: Synthetic oligonucleotide
aacgucggggauccagggc

SEQ ID NO: 3282482 - RNA, 19 nt, Artificial Sequence
  Description of Artificial Sequence: Synthetic oligonucleotide
ugaggcaccaucagggcca

SEQ ID NO: 3282483 - RNA, 19 nt, Artificial Sequence
  Description of Artificial Sequence: Synthetic oligonucleotide
aucccagguagaccaaugc

SEQ ID NO: 3282484 - RNA, 19 nt, Artificial Sequence
  Description of Artificial Sequence: Synthetic oligonucleotide
uguuggucccgcaggaucc

SEQ ID NO: 3282485 - RNA, 19 nt, Artificial Sequence
  Description of Artificial Sequence: Synthetic oligonucleotide
guuggauuugucuccuggg

SEQ ID NO: 3282486 - RNA, 19 nt, Artificial Sequence
  Description of Artificial Sequence: Synthetic oligonucleotide
ucuagcucaggacaaggaa

SEQ ID NO: 3282487 - RNA, 19 nt, Artificial Sequence
  Description of Artificial Sequence: Synthetic oligonucleotide
uuuggagguaguaccugag

SEQ ID NO: 3282488 - RNA, 19 nt, Artificial Sequence
  Description of Artificial Sequence: Synthetic oligonucleotide
gaaugcuacaagcacaucu

SEQ ID NO: 3282489 - RNA, 19 nt, Artificial Sequence
  Description of Artificial Sequence: Synthetic oligonucleotide
agucuuugaggccucagcu

SEQ ID NO: 3282490 - RNA, 19 nt, Artificial Sequence
  Description of Artificial Sequence: Synthetic oligonucleotide
uaguaagguacagccagcg

SEQ ID NO: 3282491 - RNA, 19 nt, Artificial Sequence
  Description of Artificial Sequence: Synthetic oligonucleotide
uuuuggagguaguaccuga

SEQ ID NO: 3282492 - RNA, 19 nt, Artificial Sequence
  Description of Artificial Sequence: Synthetic oligonucleotide
uuagagguggcaccugcug

SEQ ID NO: 3282493 - RNA, 19 nt, Artificial Sequence
  Description of Artificial Sequence: Synthetic oligonucleotide
ugcagcagaagcuggugag

SEQ ID NO: 3282494 - RNA, 19 nt, Artificial Sequence
  Description of Artificial Sequence: Synthetic oligonucleotide
uuaguaagguacagccagc

SEQ ID NO: 3282495 - RNA, 19 nt, Artificial Sequence
  Description of Artificial Sequence: Synthetic oligonucleotide
caaaccaaacuuuauucca

SEQ ID NO: 3282496 - RNA, 19 nt, Artificial Sequence
  Description of Artificial Sequence: Synthetic oligonucleotide
cugcuggaagccaagcugg

SEQ ID NO: 3282497 - RNA, 19 nt, Artificial Sequence
  Description of Artificial Sequence: Synthetic oligonucleotide
gguaaccaugacuacauug

SEQ ID NO: 3282498 - RNA, 19 nt, Artificial Sequence
  Description of Artificial Sequence: Synthetic oligonucleotide
uggcuuuugauggaaggag

SEQ ID NO: 3282499 - RNA, 19 nt, Artificial Sequence
  Description of Artificial Sequence: Synthetic oligonucleotide
aaggucaccugaccacagg

SEQ ID NO: 3282500 - RNA, 19 nt, Artificial Sequence
  Description of Artificial Sequence: Synthetic oligonucleotide
ugagcaaggucaccugacc

SEQ ID NO: 3282501 - RNA, 19 nt, Artificial Sequence
  Description of Artificial Sequence: Synthetic oligonucleotide
aguaagguacagccagcgg

SEQ ID NO: 3282502 - RNA, 19 nt, Artificial Sequence
  Description of Artificial Sequence: Synthetic oligonucleotide
uuaaggguggggugcagca

SEQ ID NO: 3282503 - RNA, 19 nt, Artificial Sequence
  Description of Artificial Sequence: Synthetic oligonucleotide
gaucucuugcaccauugac

SEQ ID NO: 3282504 - RNA, 19 nt, Artificial Sequence
  Description of Artificial Sequence: Synthetic oligonucleotide
ucaggacaaggaaugggga

SEQ ID NO: 3282505 - RNA, 19 nt, Artificial Sequence
  Description of Artificial Sequence: Synthetic oligonucleotide
ggagguaguaccugagugg

SEQ ID NO: 3282506 - RNA, 19 nt, Artificial Sequence
  Description of Artificial Sequence: Synthetic oligonucleotide
auuuggccuggucugaaug

SEQ ID NO: 3282507 - RNA, 19 nt, Artificial Sequence
  Description of Artificial Sequence: Synthetic oligonucleotide
augacuacauugcuggaaa

SEQ ID NO: 3282508 - RNA, 19 nt, Artificial Sequence
  Description of Artificial Sequence: Synthetic oligonucleotide
ugcaccauugacaggccca

SEQ ID NO: 3282509 - RNA, 19 nt, Artificial Sequence
  Description of Artificial Sequence: Synthetic oligonucleotide
uaagccgaggagacuacug

SEQ ID NO: 3282510 - RNA, 19 nt, Artificial Sequence
  Description of Artificial Sequence: Synthetic oligonucleotide
agagacuugcguuguuuag

SEQ ID NO: 3282511 - RNA, 19 nt, Artificial Sequence
  Description of Artificial Sequence: Synthetic oligonucleotide
caggugaucauuguauggc

SEQ ID NO: 3282512 - RNA, 19 nt, Artificial Sequence
  Description of Artificial Sequence: Synthetic oligonucleotide
uggaacugaacgucgggga

SEQ ID NO: 3282513 - RNA, 19 nt, Artificial Sequence
  Description of Artificial Sequence: Synthetic oligonucleotide
ugaaaggccagagaaguua

SEQ ID NO: 3282514 - RNA, 19 nt, Artificial Sequence
  Description of Artificial Sequence: Synthetic oligonucleotide
cuggugucagagaaguaag

SEQ ID NO: 3282515 - RNA, 19 nt, Artificial Sequence
  Description of Artificial Sequence: Synthetic oligonucleotide
caagcuggaaggcacauca

SEQ ID NO: 3282516 - RNA, 19 nt, Artificial Sequence
  Description of Artificial Sequence: Synthetic oligonucleotide
gaaaggccagagaaguuag

SEQ ID NO: 3282517 - RNA, 19 nt, Artificial Sequence
  Description of Artificial Sequence: Synthetic oligonucleotide
ugcauucuaagccuucuuu

SEQ ID NO: 3282518 - RNA, 19 nt, Artificial Sequence
  Description of Artificial Sequence: Synthetic oligonucleotide
agggccaggaugugugacc

SEQ ID NO: 3282519 - RNA, 19 nt, Artificial Sequence
  Description of Artificial Sequence: Synthetic oligonucleotide
uuuggccuggucugaauga

SEQ ID NO: 3282520 - RNA, 19 nt, Artificial Sequence
  Description of Artificial Sequence: Synthetic oligonucleotide
gagaaguaagccgaggaga

SEQ ID NO: 3282521 - RNA, 19 nt, Artificial Sequence
  Description of Artificial Sequence: Synthetic oligonucleotide
aggaugugugacccugagc

SEQ ID NO: 3282522 - RNA, 19 nt, Artificial Sequence
  Description of Artificial Sequence: Synthetic oligonucleotide
aaauggcuguucccaggag

SEQ ID NO: 3282523 - RNA, 19 nt, Artificial Sequence
  Description of Artificial Sequence: Synthetic oligonucleotide
cuuaucuuaaaauggcugu

SEQ ID NO: 3282524 - RNA, 19 nt, Artificial Sequence
  Description of Artificial Sequence: Synthetic oligonucleotide
gagucuuugaggccucagc

SEQ ID NO: 3282525 - RNA, 19 nt, Artificial Sequence
  Description of Artificial Sequence: Synthetic oligonucleotide
ugcggagagacuugcguug

SEQ ID NO: 3282526 - RNA, 19 nt, Artificial Sequence
  Description of Artificial Sequence: Synthetic oligonucleotide
ucccagguagaccaaugca

SEQ ID NO: 3282527 - RNA, 19 nt, Artificial Sequence
  Description of Artificial Sequence: Synthetic oligonucleotide
cccuauaccaaaauccacc

SEQ ID NO: 3282528 - RNA, 19 nt, Artificial Sequence
  Description of Artificial Sequence: Synthetic oligonucleotide
aaaccaaacuuuauuccaa

SEQ ID NO: 3282529 - RNA, 19 nt, Artificial Sequence
  Description of Artificial Sequence: Synthetic oligonucleotide
ccuuugugcacacuguugg

SEQ ID NO: 3282530 - RNA, 19 nt, Artificial Sequence
  Description of Artificial Sequence: Synthetic oligonucleotide
aucucuugcaccauugaca

SEQ ID NO: 3282531 - RNA, 19 nt, Artificial Sequence
  Description of Artificial Sequence: Synthetic oligonucleotide
uaucccagguagaccaaug

SEQ ID NO: 3282532 - RNA, 19 nt, Artificial Sequence
  Description of Artificial Sequence: Synthetic oligonucleotide
ugggcaucaucuuaauaau

SEQ ID NO: 3282533 - RNA, 19 nt, Artificial Sequence
  Description of Artificial Sequence: Synthetic oligonucleotide
ucccuauaccaaaauccac

SEQ ID NO: 3282534 - RNA, 19 nt, Artificial Sequence
  Description of Artificial Sequence: Synthetic oligonucleotide
ggcaguuugaccacucugg

SEQ ID NO: 3282535 - RNA, 19 nt, Artificial Sequence
  Description of Artificial Sequence: Synthetic oligonucleotide
aagguacagccagcgggcc

SEQ ID NO: 3282536 - RNA, 19 nt, Artificial Sequence
  Description of Artificial Sequence: Synthetic oligonucleotide
agcuuaucccagguagacc

SEQ ID NO: 3282537 - RNA, 19 nt, Artificial Sequence
  Description of Artificial Sequence: Synthetic oligonucleotide
ccuauaccaaaauccaccc

SEQ ID NO: 3282538 - RNA, 19 nt, Artificial Sequence
  Description of Artificial Sequence: Synthetic oligonucleotide
cuagugagcucuggaaugc

SEQ ID NO: 3282539 - RNA, 19 nt, Artificial Sequence
  Description of Artificial Sequence: Synthetic oligonucleotide
ggauuugucuccugggccc

SEQ ID NO: 3282540 - RNA, 19 nt, Artificial Sequence
  Description of Artificial Sequence: Synthetic oligonucleotide
uuuaaggguggggugcagc

SEQ ID NO: 3282541 - RNA, 19 nt, Artificial Sequence
  Description of Artificial Sequence: Synthetic oligonucleotide
cucccuauaccaaaaucca

SEQ ID NO: 3282542 - RNA, 19 nt, Artificial Sequence
  Description of Artificial Sequence: Synthetic oligonucleotide
cagguagaccaaugcagcc

SEQ ID NO: 3282543 - RNA, 19 nt, Artificial Sequence
  Description of Artificial Sequence: Synthetic oligonucleotide
aagagcuagugagcucugg

SEQ ID NO: 3282544 - RNA, 19 nt, Artificial Sequence
  Description of Artificial Sequence: Synthetic oligonucleotide
gacaggcccauuugcauuc

SEQ ID NO: 3282545 - RNA, 19 nt, Artificial Sequence
  Description of Artificial Sequence: Synthetic oligonucleotide
gaaggaggguggcacagca

SEQ ID NO: 3282546 - RNA, 19 nt, Artificial Sequence
  Description of Artificial Sequence: Synthetic oligonucleotide
cucaauuugguggcagagc

SEQ ID NO: 3282547 - RNA, 19 nt, Artificial Sequence
  Description of Artificial Sequence: Synthetic oligonucleotide
gauccccgcaccgaucugg

SEQ ID NO: 3282548 - RNA, 19 nt, Artificial Sequence
  Description of Artificial Sequence: Synthetic oligonucleotide
acagacagggagagggcgc

SEQ ID NO: 3282549 - RNA, 19 nt, Artificial Sequence
  Description of Artificial Sequence: Synthetic oligonucleotide
aaugucaccauguacguuc

SEQ ID NO: 3282550 - RNA, 19 nt, Artificial Sequence
  Description of Artificial Sequence: Synthetic oligonucleotide
aaagguaaacaucgaacgc

SEQ ID NO: 3282551 - RNA, 19 nt, Artificial Sequence
  Description of Artificial Sequence: Synthetic oligonucleotide
guuuauucaaacaauaugc

SEQ ID NO: 3282552 - RNA, 19 nt, Artificial Sequence
  Description of Artificial Sequence: Synthetic oligonucleotide
ucugucauauaauacauug

SEQ ID NO: 3282553 - RNA, 19 nt, Artificial Sequence
  Description of Artificial Sequence: Synthetic oligonucleotide
aauacauugugucaugacu

SEQ ID NO: 3282554 - RNA, 19 nt, Artificial Sequence
  Description of Artificial Sequence: Synthetic oligonucleotide
uauuacaaagaacucauac

SEQ ID NO: 3282555 - RNA, 19 nt, Artificial Sequence
  Description of Artificial Sequence: Synthetic oligonucleotide
aauagguacaaccauagua

SEQ ID NO: 3282556 - RNA, 19 nt, Artificial Sequence
  Description of Artificial Sequence: Synthetic oligonucleotide
uucucuauaacauuguaac

SEQ ID NO: 3282557 - RNA, 19 nt, Artificial Sequence
  Description of Artificial Sequence: Synthetic oligonucleotide
uucauaacaaucuuauggc

SEQ ID NO: 3282558 - RNA, 19 nt, Artificial Sequence
  Description of Artificial Sequence: Synthetic oligonucleotide
ucacauaugaucaauaauu

SEQ ID NO: 3282559 - RNA, 19 nt, Artificial Sequence
  Description of Artificial Sequence: Synthetic oligonucleotide
aaagcacggguuuuaaaac

SEQ ID NO: 3282560 - RNA, 19 nt, Artificial Sequence
  Description of Artificial Sequence: Synthetic oligonucleotide
uuagccuggauacacaugc

SEQ ID NO: 3282561 - RNA, 19 nt, Artificial Sequence
  Description of Artificial Sequence: Synthetic oligonucleotide
guugcaguaccucaaaugg

SEQ ID NO: 3282562 - RNA, 19 nt, Artificial Sequence
  Description of Artificial Sequence: Synthetic oligonucleotide
aaaugcaguacugaaucgc

SEQ ID NO: 3282563 - RNA, 19 nt, Artificial Sequence
  Description of Artificial Sequence: Synthetic oligonucleotide
uaggaaaauauaaaacacc

SEQ ID NO: 3282564 - RNA, 19 nt, Artificial Sequence
  Description of Artificial Sequence: Synthetic oligonucleotide
aagacuaguaagaaaagag

SEQ ID NO: 3282565 - RNA, 19 nt, Artificial Sequence
  Description of Artificial Sequence: Synthetic oligonucleotide
aguuuauucaaacaauaug

SEQ ID NO: 3282566 - RNA, 19 nt, Artificial Sequence
  Description of Artificial Sequence: Synthetic oligonucleotide
uuuauguaaguacuggaga

SEQ ID NO: 3282567 - RNA, 19 nt, Artificial Sequence
  Description of Artificial Sequence: Synthetic oligonucleotide
uuuauucaaacaauaugca

SEQ ID NO: 3282568 - RNA, 19 nt, Artificial Sequence
  Description of Artificial Sequence: Synthetic oligonucleotide
aaauauaaaacaccaugaa

SEQ ID NO: 3282569 - RNA, 19 nt, Artificial Sequence
  Description of Artificial Sequence: Synthetic oligonucleotide
ucucgagucacacacauac

SEQ ID NO: 3282570 - RNA, 19 nt, Artificial Sequence
  Description of Artificial Sequence: Synthetic oligonucleotide
uugauggacaaaaucuacg

SEQ ID NO: 3282571 - RNA, 19 nt, Artificial Sequence
  Description of Artificial Sequence: Synthetic oligonucleotide
aauauguugcaguaccuca

SEQ ID NO: 3282572 - RNA, 19 nt, Artificial Sequence
  Description of Artificial Sequence: Synthetic oligonucleotide
cuaggaaaauauaaaacac

SEQ ID NO: 3282573 - RNA, 19 nt, Artificial Sequence
  Description of Artificial Sequence: Synthetic oligonucleotide
uuuaguaaguucucgaguc

SEQ ID NO: 3282574 - RNA, 19 nt, Artificial Sequence
  Description of Artificial Sequence: Synthetic oligonucleotide
aagucaaugugauaaacau

SEQ ID NO: 3282575 - RNA, 19 nt, Artificial Sequence
  Description of Artificial Sequence: Synthetic oligonucleotide
cauguauaaucuuugcucc

SEQ ID NO: 3282576 - RNA, 19 nt, Artificial Sequence
  Description of Artificial Sequence: Synthetic oligonucleotide
acugcauaugaucaguuuc

SEQ ID NO: 3282577 - RNA, 19 nt, Artificial Sequence
  Description of Artificial Sequence: Synthetic oligonucleotide
uaauauugcagauggaagu

SEQ ID NO: 3282578 - RNA, 19 nt, Artificial Sequence
  Description of Artificial Sequence: Synthetic oligonucleotide
aaaucugauguaucaacug

SEQ ID NO: 3282579 - RNA, 19 nt, Artificial Sequence
  Description of Artificial Sequence: Synthetic oligonucleotide
uaauaagugucacauauua

SEQ ID NO: 3282580 - RNA, 19 nt, Artificial Sequence
  Description of Artificial Sequence: Synthetic oligonucleotide
ucuaauacuguagauacac

SEQ ID NO: 3282581 - RNA, 19 nt, Artificial Sequence
  Description of Artificial Sequence: Synthetic oligonucleotide
uucauuaacagaacaaaau

SEQ ID NO: 3282582 - RNA, 19 nt, Artificial Sequence
  Description of Artificial Sequence: Synthetic oligonucleotide
cuuuauguaaguacuggag

SEQ ID NO: 3282583 - RNA, 19 nt, Artificial Sequence
  Description of Artificial Sequence: Synthetic oligonucleotide
auggucacuacguaauccc

SEQ ID NO: 3282584 - RNA, 19 nt, Artificial Sequence
  Description of Artificial Sequence: Synthetic oligonucleotide
ugauguaucaacugcuuug

SEQ ID NO: 3282585 - RNA, 19 nt, Artificial Sequence
  Description of Artificial Sequence: Synthetic oligonucleotide
aauucauaggcuugcuuug

SEQ ID NO: 3282586 - RNA, 19 nt, Artificial Sequence
  Description of Artificial Sequence: Synthetic oligonucleotide
uuuaaaacugagcgcagug

SEQ ID NO: 3282587 - RNA, 19 nt, Artificial Sequence
  Description of Artificial Sequence: Synthetic oligonucleotide
aaagcuguggauuggcaug

SEQ ID NO: 3282588 - RNA, 19 nt, Artificial Sequence
  Description of Artificial Sequence: Synthetic oligonucleotide
ugauggacaaaaucuacgc

SEQ ID NO: 3282589 - RNA, 19 nt, Artificial Sequence
  Description of Artificial Sequence: Synthetic oligonucleotide
auggcggucauguauaauc

SEQ ID NO: 3282590 - RNA, 19 nt, Artificial Sequence
  Description of Artificial Sequence: Synthetic oligonucleotide
uuaaauggcggucauguau

SEQ ID NO: 3282591 - RNA, 19 nt, Artificial Sequence
  Description of Artificial Sequence: Synthetic oligonucleotide
uaaaucugauguaucaacu

SEQ ID NO: 3282592 - RNA, 19 nt, Artificial Sequence
  Description of Artificial Sequence: Synthetic oligonucleotide
ugucacauauuacaaagaa

SEQ ID NO: 3282593 - RNA, 19 nt, Artificial Sequence
  Description of Artificial Sequence: Synthetic oligonucleotide
uugguauauaccaugaauu

SEQ ID NO: 3282594 - RNA, 19 nt, Artificial Sequence
  Description of Artificial Sequence: Synthetic oligonucleotide
augaaagugcaccauauga

SEQ ID NO: 3282595 - RNA, 19 nt, Artificial Sequence
  Description of Artificial Sequence: Synthetic oligonucleotide
aaugcaugaagucauuauu

SEQ ID NO: 3282596 - RNA, 19 nt, Artificial Sequence
  Description of Artificial Sequence: Synthetic oligonucleotide
aauauugcagauggaagug

SEQ ID NO: 3282597 - RNA, 19 nt, Artificial Sequence
  Description of Artificial Sequence: Synthetic oligonucleotide
uacuuagauggucacuacg

SEQ ID NO: 3282598 - RNA, 19 nt, Artificial Sequence
  Description of Artificial Sequence: Synthetic oligonucleotide
uauuuguagcuaauauugc

SEQ ID NO: 3282599 - RNA, 19 nt, Artificial Sequence
  Description of Artificial Sequence: Synthetic oligonucleotide
gaucaauaauuacaaaaga

SEQ ID NO: 3282600 - RNA, 19 nt, Artificial Sequence
  Description of Artificial Sequence: Synthetic oligonucleotide
ucagauauaccccucccac

SEQ ID NO: 3282601 - RNA, 19 nt, Artificial Sequence
  Description of Artificial Sequence: Synthetic oligonucleotide
aacauuagauaccuaggaa

SEQ ID NO: 3282602 - RNA, 19 nt, Artificial Sequence
  Description of Artificial Sequence: Synthetic oligonucleotide
ugugauaaacaucaaccau

SEQ ID NO: 3282603 - RNA, 19 nt, Artificial Sequence
  Description of Artificial Sequence: Synthetic oligonucleotide
auuuguagcuaauauugca

SEQ ID NO: 3282604 - RNA, 19 nt, Artificial Sequence
  Description of Artificial Sequence: Synthetic oligonucleotide
uauggcaguguuuaaacaa

SEQ ID NO: 3282605 - RNA, 19 nt, Artificial Sequence
  Description of Artificial Sequence: Synthetic oligonucleotide
aagguaaacaucgaacgcu

SEQ ID NO: 3282606 - RNA, 19 nt, Artificial Sequence
  Description of Artificial Sequence: Synthetic oligonucleotide
aaaugcaugaagucauuau

SEQ ID NO: 3282607 - RNA, 19 nt, Artificial Sequence
  Description of Artificial Sequence: Synthetic oligonucleotide
uauaacauuguaacugcaa

SEQ ID NO: 3282608 - RNA, 19 nt, Artificial Sequence
  Description of Artificial Sequence: Synthetic oligonucleotide
uaagccaaaggacaccucu

SEQ ID NO: 3282609 - RNA, 19 nt, Artificial Sequence
  Description of Artificial Sequence: Synthetic oligonucleotide
uuucucuauaacauuguaa

SEQ ID NO: 3282610 - RNA, 19 nt, Artificial Sequence
  Description of Artificial Sequence: Synthetic oligonucleotide
acgagacugaaguagacug

SEQ ID NO: 3282611 - RNA, 19 nt, Artificial Sequence
  Description of Artificial Sequence: Synthetic oligonucleotide
ucagccaugcuuaggaugu

SEQ ID NO: 3282612 - RNA, 19 nt, Artificial Sequence
  Description of Artificial Sequence: Synthetic oligonucleotide
uguaaucaggucuauuccu

SEQ ID NO: 3282613 - RNA, 19 nt, Artificial Sequence
  Description of Artificial Sequence: Synthetic oligonucleotide
aaauucaaacuuauaguga

SEQ ID NO: 3282614 - RNA, 19 nt, Artificial Sequence
  Description of Artificial Sequence: Synthetic oligonucleotide
aggaaaauauaaaacacca

SEQ ID NO: 3282615 - RNA, 19 nt, Artificial Sequence
  Description of Artificial Sequence: Synthetic oligonucleotide
cuuauggcaguguuuaaac

SEQ ID NO: 3282616 - RNA, 19 nt, Artificial Sequence
  Description of Artificial Sequence: Synthetic oligonucleotide
uucaaacuuauagugaggu

SEQ ID NO: 3282617 - RNA, 19 nt, Artificial Sequence
  Description of Artificial Sequence: Synthetic oligonucleotide
ugcaagcuggcauaaacug

SEQ ID NO: 3282618 - RNA, 19 nt, Artificial Sequence
  Description of Artificial Sequence: Synthetic oligonucleotide
aaacaacugaauguguucu

SEQ ID NO: 3282619 - RNA, 19 nt, Artificial Sequence
  Description of Artificial Sequence: Synthetic oligonucleotide
gcggcuaucagauauaccc

SEQ ID NO: 3282620 - RNA, 19 nt, Artificial Sequence
  Description of Artificial Sequence: Synthetic oligonucleotide
gaaaauucuuuucuucuga

SEQ ID NO: 3282621 - RNA, 19 nt, Artificial Sequence
  Description of Artificial Sequence: Synthetic oligonucleotide
auacauugugucaugacuc

SEQ ID NO: 3282622 - RNA, 19 nt, Artificial Sequence
  Description of Artificial Sequence: Synthetic oligonucleotide
gauuggcaugaucacaugc

SEQ ID NO: 3282623 - RNA, 19 nt, Artificial Sequence
  Description of Artificial Sequence: Synthetic oligonucleotide
cuacguaaucccaacacac

SEQ ID NO: 3282624 - RNA, 19 nt, Artificial Sequence
  Description of Artificial Sequence: Synthetic oligonucleotide
uauauaccaugaauuagaa

SEQ ID NO: 3282625 - RNA, 19 nt, Artificial Sequence
  Description of Artificial Sequence: Synthetic oligonucleotide
ucauaacaaucuuauggca

SEQ ID NO: 3282626 - RNA, 19 nt, Artificial Sequence
  Description of Artificial Sequence: Synthetic oligonucleotide
augugauaaacaucaacca

SEQ ID NO: 3282627 - RNA, 19 nt, Artificial Sequence
  Description of Artificial Sequence: Synthetic oligonucleotide
aaaucuacgcugagaauag

SEQ ID NO: 3282628 - RNA, 19 nt, Artificial Sequence
  Description of Artificial Sequence: Synthetic oligonucleotide
gaauguguucuguggaaag

SEQ ID NO: 3282629 - RNA, 19 nt, Artificial Sequence
  Description of Artificial Sequence: Synthetic oligonucleotide
uuuccuucuggauacuucu

SEQ ID NO: 3282630 - RNA, 19 nt, Artificial Sequence
  Description of Artificial Sequence: Synthetic oligonucleotide
uaacauuguaacugcaagu

SEQ ID NO: 3282631 - RNA, 19 nt, Artificial Sequence
  Description of Artificial Sequence: Synthetic oligonucleotide
acaccaugaaaauuucaag

SEQ ID NO: 3282632 - RNA, 19 nt, Artificial Sequence
  Description of Artificial Sequence: Synthetic oligonucleotide
agauauaccccucccaccu

SEQ ID NO: 3282633 - RNA, 19 nt, Artificial Sequence
  Description of Artificial Sequence: Synthetic oligonucleotide
ucgaacgcugcuuaggcug

SEQ ID NO: 3282634 - RNA, 19 nt, Artificial Sequence
  Description of Artificial Sequence: Synthetic oligonucleotide
uguugauggacaaaaucua

SEQ ID NO: 3282635 - RNA, 19 nt, Artificial Sequence
  Description of Artificial Sequence: Synthetic oligonucleotide
acguucuuaaaaugggaag

SEQ ID NO: 3282636 - RNA, 19 nt, Artificial Sequence
  Description of Artificial Sequence: Synthetic oligonucleotide
uacguucuuaaaaugggaa

SEQ ID NO: 3282637 - RNA, 19 nt, Artificial Sequence
  Description of Artificial Sequence: Synthetic oligonucleotide
aacaccaugaaaauuucaa

SEQ ID NO: 3282638 - RNA, 19 nt, Artificial Sequence
  Description of Artificial Sequence: Synthetic oligonucleotide
uuguagcuaauauugcaga

SEQ ID NO: 3282639 - RNA, 19 nt, Artificial Sequence
  Description of Artificial Sequence: Synthetic oligonucleotide
gcaauauuaccauuccacg

SEQ ID NO: 3282640 - RNA, 19 nt, Artificial Sequence
  Description of Artificial Sequence: Synthetic oligonucleotide
uaggcugguaccuagcaac

SEQ ID NO: 3282641 - RNA, 19 nt, Artificial Sequence
  Description of Artificial Sequence: Synthetic oligonucleotide
ucgagucacacacauacau

SEQ ID NO: 3282642 - RNA, 19 nt, Artificial Sequence
  Description of Artificial Sequence: Synthetic oligonucleotide
uaccuagcaacacauucca

SEQ ID NO: 3282643 - RNA, 19 nt, Artificial Sequence
  Description of Artificial Sequence: Synthetic oligonucleotide
aaaucugaaucaaaguuuu

SEQ ID NO: 3282644 - RNA, 19 nt, Artificial Sequence
  Description of Artificial Sequence: Synthetic oligonucleotide
ugagguauauuuucuuuuc

SEQ ID NO: 3282645 - RNA, 19 nt, Artificial Sequence
  Description of Artificial Sequence: Synthetic oligonucleotide
cuguaaucaggucuauucc

SEQ ID NO: 3282646 - RNA, 19 nt, Artificial Sequence
  Description of Artificial Sequence: Synthetic oligonucleotide
uacauugugucaugacucc

SEQ ID NO: 3282647 - RNA, 19 nt, Artificial Sequence
  Description of Artificial Sequence: Synthetic oligonucleotide
uuaguaaguucucgaguca

SEQ ID NO: 3282648 - RNA, 19 nt, Artificial Sequence
  Description of Artificial Sequence: Synthetic oligonucleotide
cacaugcugaagcugaagc

SEQ ID NO: 3282649 - RNA, 19 nt, Artificial Sequence
  Description of Artificial Sequence: Synthetic oligonucleotide
accuuguacacguacaccg

SEQ ID NO: 3282650 - RNA, 19 nt, Artificial Sequence
  Description of Artificial Sequence: Synthetic oligonucleotide
gaguucaugaugcccaugg

SEQ ID NO: 3282651 - RNA, 19 nt, Artificial Sequence
  Description of Artificial Sequence: Synthetic oligonucleotide
uucaugaugcccauggccu

SEQ ID NO: 3282652 - RNA, 19 nt, Artificial Sequence
  Description of Artificial Sequence: Synthetic oligonucleotide
uuggucacggccuucuugg

SEQ ID NO: 3282653 - RNA, 19 nt, Artificial Sequence
  Description of Artificial Sequence: Synthetic oligonucleotide
auggccuuggaggagaugc

SEQ ID NO: 3282654 - RNA, 19 nt, Artificial Sequence
  Description of Artificial Sequence: Synthetic oligonucleotide
augcccauggccuuggagg

SEQ ID NO: 3282655 - RNA, 19 nt, Artificial Sequence
  Description of Artificial Sequence: Synthetic oligonucleotide
ugcuucagcaccuuguaca

SEQ ID NO: 3282656 - RNA, 19 nt, Artificial Sequence
  Description of Artificial Sequence: Synthetic oligonucleotide
uacacguacaccgaguagc

SEQ ID NO: 3282657 - RNA, 19 nt, Artificial Sequence
  Description of Artificial Sequence: Synthetic oligonucleotide
uucuucugggccuugguca

SEQ ID NO: 3282658 - RNA, 19 nt, Artificial Sequence
  Description of Artificial Sequence: Synthetic oligonucleotide
uucagcaccuuguacacgu

SEQ ID NO: 3282659 - RNA, 19 nt, Artificial Sequence
  Description of Artificial Sequence: Synthetic oligonucleotide
guucaugaugcccauggcc

SEQ ID NO: 3282660 - RNA, 19 nt, Artificial Sequence
  Description of Artificial Sequence: Synthetic oligonucleotide
guugcgaacgaguucauga

SEQ ID NO: 3282661 - RNA, 19 nt, Artificial Sequence
  Description of Artificial Sequence: Synthetic oligonucleotide
aacgaguucaugaugccca

SEQ ID NO: 3282662 - RNA, 19 nt, Artificial Sequence
  Description of Artificial Sequence: Synthetic oligonucleotide
ugcguugcgaacgaguuca

SEQ ID NO: 3282663 - RNA, 19 nt, Artificial Sequence
  Description of Artificial Sequence: Synthetic oligonucleotide
aguucaugaugcccauggc

SEQ ID NO: 3282664 - RNA, 19 nt, Artificial Sequence
  Description of Artificial Sequence: Synthetic oligonucleotide
cuugccguccuucuucugg

SEQ ID NO: 3282665 - RNA, 19 nt, Artificial Sequence
  Description of Artificial Sequence: Synthetic oligonucleotide
acguacaccgaguagcucu

SEQ ID NO: 3282666 - RNA, 19 nt, Artificial Sequence
  Description of Artificial Sequence: Synthetic oligonucleotide
uguacacguacaccgagua

SEQ ID NO: 3282667 - RNA, 19 nt, Artificial Sequence
  Description of Artificial Sequence: Synthetic oligonucleotide
ugaaccugcuucagcaccu

SEQ ID NO: 3282668 - RNA, 19 nt, Artificial Sequence
  Description of Artificial Sequence: Synthetic oligonucleotide
cuuguacacguacaccgag

SEQ ID NO: 3282669 - RNA, 19 nt, Artificial Sequence
  Description of Artificial Sequence: Synthetic oligonucleotide
ugcgaacgaguucaugaug

SEQ ID NO: 3282670 - RNA, 19 nt, Artificial Sequence
  Description of Artificial Sequence: Synthetic oligonucleotide
accgaguagcucuccuugc

SEQ ID NO: 3282671 - RNA, 19 nt, Artificial Sequence
  Description of Artificial Sequence: Synthetic oligonucleotide
gaguagcucuccuugcggc

SEQ ID NO: 3282672 - RNA, 19 nt, Artificial Sequence
  Description of Artificial Sequence: Synthetic oligonucleotide
gaggagaugccgguguccg

SEQ ID NO: 3282673 - RNA, 19 nt, Artificial Sequence
  Description of Artificial Sequence: Synthetic oligonucleotide
gucacggccuucuuggagc

SEQ ID NO: 3282674 - RNA, 19 nt, Artificial Sequence
  Description of Artificial Sequence: Synthetic oligonucleotide
uugccguccuucuucuggg

SEQ ID NO: 3282675 - RNA, 19 nt, Artificial Sequence
  Description of Artificial Sequence: Synthetic oligonucleotide
uuggaggagaugccggugu

SEQ ID NO: 3282676 - RNA, 19 nt, Artificial Sequence
  Description of Artificial Sequence: Synthetic oligonucleotide
ugcgcuugcgcuucuugcc

SEQ ID NO: 3282677 - RNA, 19 nt, Artificial Sequence
  Description of Artificial Sequence: Synthetic oligonucleotide
gugaaccugcuucagcacc

SEQ ID NO: 3282678 - RNA, 19 nt, Artificial Sequence
  Description of Artificial Sequence: Synthetic oligonucleotide
uuguacacguacaccgagu

SEQ ID NO: 3282679 - RNA, 19 nt, Artificial Sequence
  Description of Artificial Sequence: Synthetic oligonucleotide
ucgaagaugcguugcgaac

SEQ ID NO: 3282680 - RNA, 19 nt, Artificial Sequence
  Description of Artificial Sequence: Synthetic oligonucleotide
gaacgaguucaugaugccc

SEQ ID NO: 3282681 - RNA, 19 nt, Artificial Sequence
  Description of Artificial Sequence: Synthetic oligonucleotide
cuucuugccguccuucuuc

SEQ ID NO: 3282682 - RNA, 19 nt, Artificial Sequence
  Description of Artificial Sequence: Synthetic oligonucleotide
gaugcccauggccuuggag

SEQ ID NO: 3282683 - RNA, 19 nt, Artificial Sequence
  Description of Artificial Sequence: Synthetic oligonucleotide
ugggccuuggucacggccu

SEQ ID NO: 3282684 - RNA, 19 nt, Artificial Sequence
  Description of Artificial Sequence: Synthetic oligonucleotide
ucuucugggccuuggucac

SEQ ID NO: 3282685 - RNA, 19 nt, Artificial Sequence
  Description of Artificial Sequence: Synthetic oligonucleotide
gaagaugcguugcgaacga

SEQ ID NO: 3282686 - RNA, 19 nt, Artificial Sequence
  Description of Artificial Sequence: Synthetic oligonucleotide
uugcgaacgaguucaugau

SEQ ID NO: 3282687 - RNA, 19 nt, Artificial Sequence
  Description of Artificial Sequence: Synthetic oligonucleotide
cuuggucacggccuucuug

SEQ ID NO: 3282688 - RNA, 19 nt, Artificial Sequence
  Description of Artificial Sequence: Synthetic oligonucleotide
uucugggccuuggucacgg

SEQ ID NO: 3282689 - RNA, 19 nt, Artificial Sequence
  Description of Artificial Sequence: Synthetic oligonucleotide
ugcccauggccuuggagga

SEQ ID NO: 3282690 - RNA, 19 nt, Artificial Sequence
  Description of Artificial Sequence: Synthetic oligonucleotide
augcguugcgaacgaguuc

SEQ ID NO: 3282691 - RNA, 19 nt, Artificial Sequence
  Description of Artificial Sequence: Synthetic oligonucleotide
guacacguacaccgaguag

SEQ ID NO: 3282692 - RNA, 19 nt, Artificial Sequence
  Description of Artificial Sequence: Synthetic oligonucleotide
aguagcucuccuugcggcu

SEQ ID NO: 3282693 - RNA, 19 nt, Artificial Sequence
  Description of Artificial Sequence: Synthetic oligonucleotide
uacaccgaguagcucuccu

SEQ ID NO: 3282694 - RNA, 19 nt, Artificial Sequence
  Description of Artificial Sequence: Synthetic oligonucleotide
uccgggugaaccugcuuca

SEQ ID NO: 3282695 - RNA, 19 nt, Artificial Sequence
  Description of Artificial Sequence: Synthetic oligonucleotide
cuucuucugggccuugguc

SEQ ID NO: 3282696 - RNA, 19 nt, Artificial Sequence
  Description of Artificial Sequence: Synthetic oligonucleotide
caccgaguagcucuccuug

SEQ ID NO: 3282697 - RNA, 19 nt, Artificial Sequence
  Description of Artificial Sequence: Synthetic oligonucleotide
gcgaacgaguucaugaugc

SEQ ID NO: 3282698 - RNA, 19 nt, Artificial Sequence
  Description of Artificial Sequence: Synthetic oligonucleotide
cuugcggcugcgcuugcgc

SEQ ID NO: 3282699 - RNA, 19 nt, Artificial Sequence
  Description of Artificial Sequence: Synthetic oligonucleotide
uucuugccguccuucuucu

SEQ ID NO: 3282700 - RNA, 19 nt, Artificial Sequence
  Description of Artificial Sequence: Synthetic oligonucleotide
cugcgcuugcgcuucuugc

SEQ ID NO: 3282701 - RNA, 19 nt, Artificial Sequence
  Description of Artificial Sequence: Synthetic oligonucleotide
guccgggugaaccugcuuc

SEQ ID NO: 3282702 - RNA, 19 nt, Artificial Sequence
  Description of Artificial Sequence: Synthetic oligonucleotide
ugcgcucgaagaugcguug

SEQ ID NO: 3282703 - RNA, 19 nt, Artificial Sequence
  Description of Artificial Sequence: Synthetic oligonucleotide
aaccugcuucagcaccuug

SEQ ID NO: 3282704 - RNA, 19 nt, Artificial Sequence
  Description of Artificial Sequence: Synthetic oligonucleotide
gggugaaccugcuucagca

SEQ ID NO: 3282705 - RNA, 19 nt, Artificial Sequence
  Description of Artificial Sequence: Synthetic oligonucleotide
ucacggccuucuuggagcc

SEQ ID NO: 3282706 - RNA, 19 nt, Artificial Sequence
  Description of Artificial Sequence: Synthetic oligonucleotide
ggagaugccgguguccggg

SEQ ID NO: 3282707 - RNA, 19 nt, Artificial Sequence
  Description of Artificial Sequence: Synthetic oligonucleotide
uggccuuggaggagaugcc

SEQ ID NO: 3282708 - RNA, 19 nt, Artificial Sequence
  Description of Artificial Sequence: Synthetic oligonucleotide
gaugccgguguccggguga

SEQ ID NO: 3282709 - RNA, 19 nt, Artificial Sequence
  Description of Artificial Sequence: Synthetic oligonucleotide
aagaugcguugcgaacgag

SEQ ID NO: 3282710 - RNA, 19 nt, Artificial Sequence
  Description of Artificial Sequence: Synthetic oligonucleotide
caccuuguacacguacacc

SEQ ID NO: 3282711 - RNA, 19 nt, Artificial Sequence
  Description of Artificial Sequence: Synthetic oligonucleotide
agaugcguugcgaacgagu

SEQ ID NO: 3282712 - RNA, 19 nt, Artificial Sequence
  Description of Artificial Sequence: Synthetic oligonucleotide
uccuucuucugggccuugg

SEQ ID NO: 3282713 - RNA, 19 nt, Artificial Sequence
  Description of Artificial Sequence: Synthetic oligonucleotide
cugggccuuggucacggcc

SEQ ID NO: 3282714 - RNA, 19 nt, Artificial Sequence
  Description of Artificial Sequence: Synthetic oligonucleotide
cucgaagaugcguugcgaa

SEQ ID NO: 3282715 - RNA, 19 nt, Artificial Sequence
  Description of Artificial Sequence: Synthetic oligonucleotide
agcaccuuguacacguaca

SEQ ID NO: 3282716 - RNA, 19 nt, Artificial Sequence
  Description of Artificial Sequence: Synthetic oligonucleotide
gcuucagcaccuuguacac

SEQ ID NO: 3282717 - RNA, 19 nt, Artificial Sequence
  Description of Artificial Sequence: Synthetic oligonucleotide
aggagaugccgguguccgg

SEQ ID NO: 3282718 - RNA, 19 nt, Artificial Sequence
  Description of Artificial Sequence: Synthetic oligonucleotide
cuucagcaccuuguacacg

SEQ ID NO: 3282719 - RNA, 19 nt, Artificial Sequence
  Description of Artificial Sequence: Synthetic oligonucleotide
uagcucuccuugcggcugc

SEQ ID NO: 3282720 - RNA, 19 nt, Artificial Sequence
  Description of Artificial Sequence: Synthetic oligonucleotide
ucaugaugcccauggccuu

SEQ ID NO: 3282721 - RNA, 19 nt, Artificial Sequence
  Description of Artificial Sequence: Synthetic oligonucleotide
uggaggagaugccgguguc

SEQ ID NO: 3282722 - RNA, 19 nt, Artificial Sequence
  Description of Artificial Sequence: Synthetic oligonucleotide
cagcaccuuguacacguac

SEQ ID NO: 3282723 - RNA, 19 nt, Artificial Sequence
  Description of Artificial Sequence: Synthetic oligonucleotide
cgaagaugcguugcgaacg

SEQ ID NO: 3282724 - RNA, 19 nt, Artificial Sequence
  Description of Artificial Sequence: Synthetic oligonucleotide
cugcuucagcaccuuguac

SEQ ID NO: 3282725 - RNA, 19 nt, Artificial Sequence
  Description of Artificial Sequence: Synthetic oligonucleotide
augaugcccauggccuugg

SEQ ID NO: 3282726 - RNA, 19 nt, Artificial Sequence
  Description of Artificial Sequence: Synthetic oligonucleotide
uugcgcuucuugccguccu

SEQ ID NO: 3282727 - RNA, 19 nt, Artificial Sequence
  Description of Artificial Sequence: Synthetic oligonucleotide
caugaugcccauggccuug

SEQ ID NO: 3282728 - RNA, 19 nt, Artificial Sequence
  Description of Artificial Sequence: Synthetic oligonucleotide
guagcucuccuugcggcug

SEQ ID NO: 3282729 - RNA, 19 nt, Artificial Sequence
  Description of Artificial Sequence: Synthetic oligonucleotide
ggucacggccuucuuggag

SEQ ID NO: 3282730 - RNA, 19 nt, Artificial Sequence
  Description of Artificial Sequence: Synthetic oligonucleotide
cuuggaggagaugccggug

SEQ ID NO: 3282731 - RNA, 19 nt, Artificial Sequence
  Description of Artificial Sequence: Synthetic oligonucleotide
gcaccuuguacacguacac

SEQ ID NO: 3282732 - RNA, 19 nt, Artificial Sequence
  Description of Artificial Sequence: Synthetic oligonucleotide
acacguacaccgaguagcu

SEQ ID NO: 3282733 - RNA, 19 nt, Artificial Sequence
  Description of Artificial Sequence: Synthetic oligonucleotide
accugcuucagcaccuugu

SEQ ID NO: 3282734 - RNA, 19 nt, Artificial Sequence
  Description of Artificial Sequence: Synthetic oligonucleotide
ucuccuugcggcugcgcuu

SEQ ID NO: 3282735 - RNA, 19 nt, Artificial Sequence
  Description of Artificial Sequence: Synthetic oligonucleotide
acgaguucaugaugcccau

SEQ ID NO: 3282736 - RNA, 19 nt, Artificial Sequence
  Description of Artificial Sequence: Synthetic oligonucleotide
ggugaaccugcuucagcac

SEQ ID NO: 3282737 - RNA, 19 nt, Artificial Sequence
  Description of Artificial Sequence: Synthetic oligonucleotide
uugcggcugcgcuugcgcu

SEQ ID NO: 3282738 - RNA, 19 nt, Artificial Sequence
  Description of Artificial Sequence: Synthetic oligonucleotide
acaccgaguagcucuccuu

SEQ ID NO: 3282739 - RNA, 19 nt, Artificial Sequence
  Description of Artificial Sequence: Synthetic oligonucleotide
gaugcguugcgaacgaguu

SEQ ID NO: 3282740 - RNA, 19 nt, Artificial Sequence
  Description of Artificial Sequence: Synthetic oligonucleotide
ccgaguagcucuccuugcg

SEQ ID NO: 3282741 - RNA, 19 nt, Artificial Sequence
  Description of Artificial Sequence: Synthetic oligonucleotide
ucuugccguccuucuucug

SEQ ID NO: 3282742 - RNA, 19 nt, Artificial Sequence
  Description of Artificial Sequence: Synthetic oligonucleotide
gcgcuugcgcuucuugccg

SEQ ID NO: 3282743 - RNA, 19 nt, Artificial Sequence
  Description of Artificial Sequence: Synthetic oligonucleotide
cuugcgcuucuugccgucc

SEQ ID NO: 3282744 - RNA, 19 nt, Artificial Sequence
  Description of Artificial Sequence: Synthetic oligonucleotide
cuccuugcggcugcgcuug

SEQ ID NO: 3282745 - RNA, 19 nt, Artificial Sequence
  Description of Artificial Sequence: Synthetic oligonucleotide
ggccuuggaggagaugccg

SEQ ID NO: 3282746 - RNA, 19 nt, Artificial Sequence
  Description of Artificial Sequence: Synthetic oligonucleotide
agaugccgguguccgggug

SEQ ID NO: 3282747 - RNA, 19 nt, Artificial Sequence
  Description of Artificial Sequence: Synthetic oligonucleotide
ugccguccuucuucugggc

SEQ ID NO: 3282748 - RNA, 19 nt, Artificial Sequence
  Description of Artificial Sequence: Synthetic oligonucleotide
gaugcgcucgaagaugcgu

SEQ ID NO: 3282749 - RNA, 19 nt, Artificial Sequence
  Description of Artificial Sequence: Synthetic oligonucleotide
aacaaguauguacauagcc

SEQ ID NO: 3282750 - RNA, 19 nt, Artificial Sequence
  Description of Artificial Sequence: Synthetic oligonucleotide
auuuauacaguuuacaaag

SEQ ID NO: 3282751 - RNA, 19 nt, Artificial Sequence
  Description of Artificial Sequence: Synthetic oligonucleotide
aauauugaaggaaaucucc

SEQ ID NO: 3282752 - RNA, 19 nt, Artificial Sequence
  Description of Artificial Sequence: Synthetic oligonucleotide
aguuuacaaagcuugaccc

SEQ ID NO: 3282753 - RNA, 19 nt, Artificial Sequence
  Description of Artificial Sequence: Synthetic oligonucleotide
auaaauaacacuuguaaga

SEQ ID NO: 3282754 - RNA, 19 nt, Artificial Sequence
  Description of Artificial Sequence: Synthetic oligonucleotide
uuuacauuuauacaguuua

SEQ ID NO: 3282755 - RNA, 19 nt, Artificial Sequence
  Description of Artificial Sequence: Synthetic oligonucleotide
acuuguaagauuaacaggg

SEQ ID NO: 3282756 - RNA, 19 nt, Artificial Sequence
  Description of Artificial Sequence: Synthetic oligonucleotide
uaagaaaugauacaguuuu

SEQ ID NO: 3282757 - RNA, 19 nt, Artificial Sequence
  Description of Artificial Sequence: Synthetic oligonucleotide
uuaauauugaaggaaaucu

SEQ ID NO: 3282758 - RNA, 19 nt, Artificial Sequence
  Description of Artificial Sequence: Synthetic oligonucleotide
aagaaaauacccuucuucu

SEQ ID NO: 3282759 - RNA, 19 nt, Artificial Sequence
  Description of Artificial Sequence: Synthetic oligonucleotide
uguaagauuaacagggccc

SEQ ID NO: 3282760 - RNA, 19 nt, Artificial Sequence
  Description of Artificial Sequence: Synthetic oligonucleotide
cuugguuaagaaaugauac

SEQ ID NO: 3282761 - RNA, 19 nt, Artificial Sequence
  Description of Artificial Sequence: Synthetic oligonucleotide
aaaauacccuucuucuucg

SEQ ID NO: 3282762 - RNA, 19 nt, Artificial Sequence
  Description of Artificial Sequence: Synthetic oligonucleotide
ucuucuuggauuuaguugu

SEQ ID NO: 3282763 - RNA, 19 nt, Artificial Sequence
  Description of Artificial Sequence: Synthetic oligonucleotide
cagaaguuggacuagaaag

SEQ ID NO: 3282764 - RNA, 19 nt, Artificial Sequence
  Description of Artificial Sequence: Synthetic oligonucleotide
aacaccaggagucaucguc

SEQ ID NO: 3282765 - RNA, 19 nt, Artificial Sequence
  Description of Artificial Sequence: Synthetic oligonucleotide
agaaaggucaucuguauag

SEQ ID NO: 3282766 - RNA, 19 nt, Artificial Sequence
  Description of Artificial Sequence: Synthetic oligonucleotide
acacuuguaagauuaacag

SEQ ID NO: 3282767 - RNA, 19 nt, Artificial Sequence
  Description of Artificial Sequence: Synthetic oligonucleotide
cauaaauaacacuuguaag

SEQ ID NO: 3282768 - RNA, 19 nt, Artificial Sequence
  Description of Artificial Sequence: Synthetic oligonucleotide
acaaguauguacauagccc

SEQ ID NO: 3282769 - RNA, 19 nt, Artificial Sequence
  Description of Artificial Sequence: Synthetic oligonucleotide
caaguauguacauagcccc

SEQ ID NO: 3282770 - RNA, 19 nt, Artificial Sequence
  Description of Artificial Sequence: Synthetic oligonucleotide
agaacacccaaacagcuuc

SEQ ID NO: 3282771 - RNA, 19 nt, Artificial Sequence
  Description of Artificial Sequence: Synthetic oligonucleotide
aauaacacuuguaagauua

SEQ ID NO: 3282772 - RNA, 19 nt, Artificial Sequence
  Description of Artificial Sequence: Synthetic oligonucleotide
ugguuaagaaaugauacag

SEQ ID NO: 3282773 - RNA, 19 nt, Artificial Sequence
  Description of Artificial Sequence: Synthetic oligonucleotide
uuauacaguuuacaaagcu

SEQ ID NO: 3282774 - RNA, 19 nt, Artificial Sequence
  Description of Artificial Sequence: Synthetic oligonucleotide
ugacccauaaauaacacuu

SEQ ID NO: 3282775 - RNA, 19 nt, Artificial Sequence
  Description of Artificial Sequence: Synthetic oligonucleotide
uucaccauauacuccagag

SEQ ID NO: 3282776 - RNA, 19 nt, Artificial Sequence
  Description of Artificial Sequence: Synthetic oligonucleotide
gacuaaacugugcaguggg

SEQ ID NO: 3282777 - RNA, 19 nt, Artificial Sequence
  Description of Artificial Sequence: Synthetic oligonucleotide
ucaucuguauaguagguga

SEQ ID NO: 3282778 - RNA, 19 nt, Artificial Sequence
  Description of Artificial Sequence: Synthetic oligonucleotide
gaaaauacccuucuucuuc

SEQ ID NO: 3282779 - RNA, 19 nt, Artificial Sequence
  Description of Artificial Sequence: Synthetic oligonucleotide
aguaggugaaucucugugg

SEQ ID NO: 3282780 - RNA, 19 nt, Artificial Sequence
  Description of Artificial Sequence: Synthetic oligonucleotide
uucuucuuggauuuaguug

SEQ ID NO: 3282781 - RNA, 19 nt, Artificial Sequence
  Description of Artificial Sequence: Synthetic oligonucleotide
uuuauacaguuuacaaagc

SEQ ID NO: 3282782 - RNA, 19 nt, Artificial Sequence
  Description of Artificial Sequence: Synthetic oligonucleotide
uuuaguuguccucugacua

SEQ ID NO: 3282783 - RNA, 19 nt, Artificial Sequence
  Description of Artificial Sequence: Synthetic oligonucleotide
uuguaagauuaacagggcc

SEQ ID NO: 3282784 - RNA, 19 nt, Artificial Sequence
  Description of Artificial Sequence: Synthetic oligonucleotide
uaauauugaaggaaaucuc

SEQ ID NO: 3282785 - RNA, 19 nt, Artificial Sequence
  Description of Artificial Sequence: Synthetic oligonucleotide
gcaacaaguauguacauag

SEQ ID NO: 3282786 - RNA, 19 nt, Artificial Sequence
  Description of Artificial Sequence: Synthetic oligonucleotide
uauaguaggugaaucucug

SEQ ID NO: 3282787 - RNA, 19 nt, Artificial Sequence
  Description of Artificial Sequence: Synthetic oligonucleotide
uguacauagccccaccaug

SEQ ID NO: 3282788 - RNA, 19 nt, Artificial Sequence
  Description of Artificial Sequence: Synthetic oligonucleotide
gggaagaacacccaaacag

SEQ ID NO: 3282789 - RNA, 19 nt, Artificial Sequence
  Description of Artificial Sequence: Synthetic oligonucleotide
uuuaauauugaaggaaauc

SEQ ID NO: 3282790 - RNA, 19 nt, Artificial Sequence
  Description of Artificial Sequence: Synthetic oligonucleotide
aggucaucuguauaguagg

SEQ ID NO: 3282791 - RNA, 19 nt, Artificial Sequence
  Description of Artificial Sequence: Synthetic oligonucleotide
auugaaggaaaucuccgug

SEQ ID NO: 3282792 - RNA, 19 nt, Artificial Sequence
  Description of Artificial Sequence: Synthetic oligonucleotide
ucaccauauacuccagagg

SEQ ID NO: 3282793 - RNA, 19 nt, Artificial Sequence
  Description of Artificial Sequence: Synthetic oligonucleotide
ucuucuucggagucggagg

SEQ ID NO: 3282794 - RNA, 19 nt, Artificial Sequence
  Description of Artificial Sequence: Synthetic oligonucleotide
acauuuauacaguuuacaa

SEQ ID NO: 3282795 - RNA, 19 nt, Artificial Sequence
  Description of Artificial Sequence: Synthetic oligonucleotide
aagcuugacccauaaauaa

SEQ ID NO: 3282796 - RNA, 19 nt, Artificial Sequence
  Description of Artificial Sequence: Synthetic oligonucleotide
agaaguuggacuagaaagg

SEQ ID NO: 3282797 - RNA, 19 nt, Artificial Sequence
  Description of Artificial Sequence: Synthetic oligonucleotide
aacacuuguaagauuaaca

SEQ ID NO: 3282798 - RNA, 19 nt, Artificial Sequence
  Description of Artificial Sequence: Synthetic oligonucleotide
ucuacuugguuaagaaaug

SEQ ID NO: 3282799 - RNA, 19 nt, Artificial Sequence
  Description of Artificial Sequence: Synthetic oligonucleotide
aacagcuucuccuugguuu

SEQ ID NO: 3282800 - RNA, 19 nt, Artificial Sequence
  Description of Artificial Sequence: Synthetic oligonucleotide
caagaaaauacccuucuuc

SEQ ID NO: 3282801 - RNA, 19 nt, Artificial Sequence
  Description of Artificial Sequence: Synthetic oligonucleotide
uaguaggugaaucucugug

SEQ ID NO: 3282802 - RNA, 19 nt, Artificial Sequence
  Description of Artificial Sequence: Synthetic oligonucleotide
uaaauaacacuuguaagau

SEQ ID NO: 3282803 - RNA, 19 nt, Artificial Sequence
  Description of Artificial Sequence: Synthetic oligonucleotide
uguccucugacuaaacugu

SEQ ID NO: 3282804 - RNA, 19 nt, Artificial Sequence
  Description of Artificial Sequence: Synthetic oligonucleotide
uuguccucugacuaaacug

SEQ ID NO: 3282805 - RNA, 19 nt, Artificial Sequence
  Description of Artificial Sequence: Synthetic oligonucleotide
uugguuucaccauauacuc

SEQ ID NO: 3282806 - RNA, 19 nt, Artificial Sequence
  Description of Artificial Sequence: Synthetic oligonucleotide
cacuuguaagauuaacagg

SEQ ID NO: 3282807 - RNA, 19 nt, Artificial Sequence
  Description of Artificial Sequence: Synthetic oligonucleotide
ugggcagugcagaaguugg

SEQ ID NO: 3282808 - RNA, 19 nt, Artificial Sequence
  Description of Artificial Sequence: Synthetic oligonucleotide
uuguccaagaaaauacccu

SEQ ID NO: 3282809 - RNA, 19 nt, Artificial Sequence
  Description of Artificial Sequence: Synthetic oligonucleotide
uuuuaauauugaaggaaau

SEQ ID NO: 3282810 - RNA, 19 nt, Artificial Sequence
  Description of Artificial Sequence: Synthetic oligonucleotide
caguuuacaaagcuugacc

SEQ ID NO: 3282811 - RNA, 19 nt, Artificial Sequence
  Description of Artificial Sequence: Synthetic oligonucleotide
aaggucaucuguauaguag

SEQ ID NO: 3282812 - RNA, 19 nt, Artificial Sequence
  Description of Artificial Sequence: Synthetic oligonucleotide
aaucuccgugucuacuugg

SEQ ID NO: 3282813 - RNA, 19 nt, Artificial Sequence
  Description of Artificial Sequence: Synthetic oligonucleotide
uuaacagggccccagcaac

SEQ ID NO: 3282814 - RNA, 19 nt, Artificial Sequence
  Description of Artificial Sequence: Synthetic oligonucleotide
auacaguuuacaaagcuug

SEQ ID NO: 3282815 - RNA, 19 nt, Artificial Sequence
  Description of Artificial Sequence: Synthetic oligonucleotide
uugguuaagaaaugauaca

SEQ ID NO: 3282816 - RNA, 19 nt, Artificial Sequence
  Description of Artificial Sequence: Synthetic oligonucleotide
uauacaguuuacaaagcuu

SEQ ID NO: 3282817 - RNA, 19 nt, Artificial Sequence
  Description of Artificial Sequence: Synthetic oligonucleotide
uccaagaaaauacccuucu

SEQ ID NO: 3282818 - RNA, 19 nt, Artificial Sequence
  Description of Artificial Sequence: Synthetic oligonucleotide
uuaagaaaugauacaguuu

SEQ ID NO: 3282819 - RNA, 19 nt, Artificial Sequence
  Description of Artificial Sequence: Synthetic oligonucleotide
uaaacugugcagugggcag

SEQ ID NO: 3282820 - RNA, 19 nt, Artificial Sequence
  Description of Artificial Sequence: Synthetic oligonucleotide
uggacuagaaaggucaucu

SEQ ID NO: 3282821 - RNA, 19 nt, Artificial Sequence
  Description of Artificial Sequence: Synthetic oligonucleotide
auauugaaggaaaucuccg

SEQ ID NO: 3282822 - RNA, 19 nt, Artificial Sequence
  Description of Artificial Sequence: Synthetic oligonucleotide
gauuuaguuguccucugac

SEQ ID NO: 3282823 - RNA, 19 nt, Artificial Sequence
  Description of Artificial Sequence: Synthetic oligonucleotide
uacauuuauacaguuuaca

SEQ ID NO: 3282824 - RNA, 19 nt, Artificial Sequence
  Description of Artificial Sequence: Synthetic oligonucleotide
uggaggacgaacaccagga

SEQ ID NO: 3282825 - RNA, 19 nt, Artificial Sequence
  Description of Artificial Sequence: Synthetic oligonucleotide
uacuccagagguaugugug

SEQ ID NO: 3282826 - RNA, 19 nt, Artificial Sequence
  Description of Artificial Sequence: Synthetic oligonucleotide
ucugacuaaacugugcagu

SEQ ID NO: 3282827 - RNA, 19 nt, Artificial Sequence
  Description of Artificial Sequence: Synthetic oligonucleotide
uagggaagaacacccaaac

SEQ ID NO: 3282828 - RNA, 19 nt, Artificial Sequence
  Description of Artificial Sequence: Synthetic oligonucleotide
agauuaacagggccccagc

SEQ ID NO: 3282829 - RNA, 19 nt, Artificial Sequence
  Description of Artificial Sequence: Synthetic oligonucleotide
uuacauuuauacaguuuac

SEQ ID NO: 3282830 - RNA, 19 nt, Artificial Sequence
  Description of Artificial Sequence: Synthetic oligonucleotide
uauugaaggaaaucuccgu

SEQ ID NO: 3282831 - RNA, 19 nt, Artificial Sequence
  Description of Artificial Sequence: Synthetic oligonucleotide
ugccuagggaagaacaccc

SEQ ID NO: 3282832 - RNA, 19 nt, Artificial Sequence
  Description of Artificial Sequence: Synthetic oligonucleotide
aaaucuccgugucuacuug

SEQ ID NO: 3282833 - RNA, 19 nt, Artificial Sequence
  Description of Artificial Sequence: Synthetic oligonucleotide
auacccuucuucuucggag

SEQ ID NO: 3282834 - RNA, 19 nt, Artificial Sequence
  Description of Artificial Sequence: Synthetic oligonucleotide
aggacgaacaccaggaguc

SEQ ID NO: 3282835 - RNA, 19 nt, Artificial Sequence
  Description of Artificial Sequence: Synthetic oligonucleotide
uugaaggaaaucuccgugu

SEQ ID NO: 3282836 - RNA, 19 nt, Artificial Sequence
  Description of Artificial Sequence: Synthetic oligonucleotide
uuuuacauuuauacaguuu

SEQ ID NO: 3282837 - RNA, 19 nt, Artificial Sequence
  Description of Artificial Sequence: Synthetic oligonucleotide
cuuguaagauuaacagggc

SEQ ID NO: 3282838 - RNA, 19 nt, Artificial Sequence
  Description of Artificial Sequence: Synthetic oligonucleotide
uauguacauagccccacca

SEQ ID NO: 3282839 - RNA, 19 nt, Artificial Sequence
  Description of Artificial Sequence: Synthetic oligonucleotide
aguuggacuagaaagguca

SEQ ID NO: 3282840 - RNA, 19 nt, Artificial Sequence
  Description of Artificial Sequence: Synthetic oligonucleotide
aggugaaucucuguggccg

SEQ ID NO: 3282841 - RNA, 19 nt, Artificial Sequence
  Description of Artificial Sequence: Synthetic oligonucleotide
agccccaccaugcauacag

SEQ ID NO: 3282842 - RNA, 19 nt, Artificial Sequence
  Description of Artificial Sequence: Synthetic oligonucleotide
aaauacccuucuucuucgg

SEQ ID NO: 3282843 - RNA, 19 nt, Artificial Sequence
  Description of Artificial Sequence: Synthetic oligonucleotide
acacccaaacagcuucucc

SEQ ID NO: 3282844 - RNA, 19 nt, Artificial Sequence
  Description of Artificial Sequence: Synthetic oligonucleotide
acaguuuacaaagcuugac

SEQ ID NO: 3282845 - RNA, 19 nt, Artificial Sequence
  Description of Artificial Sequence: Synthetic oligonucleotide
auuuaguuguccucugacu

SEQ ID NO: 3282846 - RNA, 19 nt, Artificial Sequence
  Description of Artificial Sequence: Synthetic oligonucleotide
guaggugaaucucuguggc

SEQ ID NO: 3282847 - RNA, 19 nt, Artificial Sequence
  Description of Artificial Sequence: Synthetic oligonucleotide
aagauuaacagggccccag

SEQ ID NO: 3282848 - RNA, 19 nt, Artificial Sequence
  Description of Artificial Sequence: Synthetic oligonucleotide
uguauaguaggugaaucuc

SEQ ID NO: 3282849 - RNA, 19 nt, Artificial Sequence
  Description of Artificial Sequence: Synthetic oligonucleotide
aaaagcuucgguugaaucc

SEQ ID NO: 3282850 - RNA, 19 nt, Artificial Sequence
  Description of Artificial Sequence: Synthetic oligonucleotide
auaacaaagauucugggcu

SEQ ID NO: 3282851 - RNA, 19 nt, Artificial Sequence
  Description of Artificial Sequence: Synthetic oligonucleotide
aaagauucugggcuguugg

SEQ ID NO: 3282852 - RNA, 19 nt, Artificial Sequence
  Description of Artificial Sequence: Synthetic oligonucleotide
auagucaccggucagcacc

SEQ ID NO: 3282853 - RNA, 19 nt, Artificial Sequence
  Description of Artificial Sequence: Synthetic oligonucleotide
aaaggauaugugcaccacc

SEQ ID NO: 3282854 - RNA, 19 nt, Artificial Sequence
  Description of Artificial Sequence: Synthetic oligonucleotide
agauucaagagaccaaggc

SEQ ID NO: 3282855 - RNA, 19 nt, Artificial Sequence
  Description of Artificial Sequence: Synthetic oligonucleotide
aagggcaacaucuuccagg

SEQ ID NO: 3282856 - RNA, 19 nt, Artificial Sequence
  Description of Artificial Sequence: Synthetic oligonucleotide
aaccgguuaggucuggccc

SEQ ID NO: 3282857 - RNA, 19 nt, Artificial Sequence
  Description of Artificial Sequence: Synthetic oligonucleotide
aaagcuucgguugaauccg

SEQ ID NO: 3282858 - RNA, 19 nt, Artificial Sequence
  Description of Artificial Sequence: Synthetic oligonucleotide
uguuugaagccuccaaagg

SEQ ID NO: 3282859 - RNA, 19 nt, Artificial Sequence
  Description of Artificial Sequence: Synthetic oligonucleotide
uguaguagccuccugcugc

SEQ ID NO: 3282860 - RNA, 19 nt, Artificial Sequence
  Description of Artificial Sequence: Synthetic oligonucleotide
gucaugaaagauaacaaag

SEQ ID NO: 3282861 - RNA, 19 nt, Artificial Sequence
  Description of Artificial Sequence: Synthetic oligonucleotide
aagauguacuuccaaggca

SEQ ID NO: 3282862 - RNA, 19 nt, Artificial Sequence
  Description of Artificial Sequence: Synthetic oligonucleotide
aagggugauuuccucuggc

SEQ ID NO: 3282863 - RNA, 19 nt, Artificial Sequence
  Description of Artificial Sequence: Synthetic oligonucleotide
agguaauuagaugaguggg

SEQ ID NO: 3282864 - RNA, 19 nt, Artificial Sequence
  Description of Artificial Sequence: Synthetic oligonucleotide
gauucaagagaccaaggca

SEQ ID NO: 3282865 - RNA, 19 nt, Artificial Sequence
  Description of Artificial Sequence: Synthetic oligonucleotide
gauguucuguuccaaagac

SEQ ID NO: 3282866 - RNA, 19 nt, Artificial Sequence
  Description of Artificial Sequence: Synthetic oligonucleotide
uauggcgcuggcuagaugu

SEQ ID NO: 3282867 - RNA, 19 nt, Artificial Sequence
  Description of Artificial Sequence: Synthetic oligonucleotide
uuuuguacgugguuucaag

SEQ ID NO: 3282868 - RNA, 19 nt, Artificial Sequence
  Description of Artificial Sequence: Synthetic oligonucleotide
gaaguacacgcccuguccg

SEQ ID NO: 3282869 - RNA, 19 nt, Artificial Sequence
  Description of Artificial Sequence: Synthetic oligonucleotide
aauuagaugagugggcaga

SEQ ID NO: 3282870 - RNA, 19 nt, Artificial Sequence
  Description of Artificial Sequence: Synthetic oligonucleotide
aaggaccugacccgaggcc

SEQ ID NO: 3282871 - RNA, 19 nt, Artificial Sequence
  Description of Artificial Sequence: Synthetic oligonucleotide
  modified_base (7)..(7): a, c, u, g, unknown or other
gauccanccuuucaggauc

SEQ ID NO: 3282872 - RNA, 19 nt, Artificial Sequence
  Description of Artificial Sequence: Synthetic oligonucleotide
cagguaauuagaugagugg

SEQ ID NO: 3282873 - RNA, 19 nt, Artificial Sequence
  Description of Artificial Sequence: Synthetic oligonucleotide
uguacgugguuucaaguac

SEQ ID NO: 3282874 - RNA, 19 nt, Artificial Sequence
  Description of Artificial Sequence: Synthetic oligonucleotide
ucuuaggucaaauguccag

SEQ ID NO: 3282875 - RNA, 19 nt, Artificial Sequence
  Description of Artificial Sequence: Synthetic oligonucleotide
uguacuuccaaggcagccg

SEQ ID NO: 3282876 - RNA, 19 nt, Artificial Sequence
  Description of Artificial Sequence: Synthetic oligonucleotide
acugcagacuccgaugugc

SEQ ID NO: 3282877 - RNA, 19 nt, Artificial Sequence
  Description of Artificial Sequence: Synthetic oligonucleotide
auaauacagcugcaggaag

SEQ ID NO: 3282878 - RNA, 19 nt, Artificial Sequence
  Description of Artificial Sequence: Synthetic oligonucleotide
cuuaggucaaauguccagg

SEQ ID NO: 3282879 - RNA, 19 nt, Artificial Sequence
  Description of Artificial Sequence: Synthetic oligonucleotide
ucaagggugauuuccucug

SEQ ID NO: 3282880 - RNA, 19 nt, Artificial Sequence
  Description of Artificial Sequence: Synthetic oligonucleotide
agauguacuuccaaggcag

SEQ ID NO: 3282881 - RNA, 19 nt, Artificial Sequence
  Description of Artificial Sequence: Synthetic oligonucleotide
uuauccuggcuuuccagcc

SEQ ID NO: 3282882 - RNA, 19 nt, Artificial Sequence
  Description of Artificial Sequence: Synthetic oligonucleotide
guaaugcucacaucguggc

SEQ ID NO: 3282883 - RNA, 19 nt, Artificial Sequence
  Description of Artificial Sequence: Synthetic oligonucleotide
cucgccuuaguguaguagc

SEQ ID NO: 3282884 - RNA, 19 nt, Artificial Sequence
  Description of Artificial Sequence: Synthetic oligonucleotide
uccagugguagccaguccu

SEQ ID NO: 3282885 - RNA, 19 nt, Artificial Sequence
  Description of Artificial Sequence: Synthetic oligonucleotide
guuugaagccuccaaagga

SEQ ID NO: 3282886 - RNA, 19 nt, Artificial Sequence
  Description of Artificial Sequence: Synthetic oligonucleotide
aggaucuauguccaguaug

SEQ ID NO: 3282887 - RNA, 19 nt, Artificial Sequence
  Description of Artificial Sequence: Synthetic oligonucleotide
aaggauaugugcaccacca

SEQ ID NO: 3282888 - RNA, 19 nt, Artificial Sequence
  Description of Artificial Sequence: Synthetic oligonucleotide
uuaggucaaauguccagga

SEQ ID NO: 3282889 - RNA, 19 nt, Artificial Sequence
  Description of Artificial Sequence: Synthetic oligonucleotide
aaagccacggaggaugaug

SEQ ID NO: 3282890 - RNA, 19 nt, Artificial Sequence
  Description of Artificial Sequence: Synthetic oligonucleotide
augcagcugguacuguugc

SEQ ID NO: 3282891 - RNA, 19 nt, Artificial Sequence
  Description of Artificial Sequence: Synthetic oligonucleotide
ggaucuauguccaguaugg

SEQ ID NO: 3282892 - RNA, 19 nt, Artificial Sequence
  Description of Artificial Sequence: Synthetic oligonucleotide
uggccuugagacuccaagg

SEQ ID NO: 3282893 - RNA, 19 nt, Artificial Sequence
  Description of Artificial Sequence: Synthetic oligonucleotide
ucugccacaaaagcuucgg

SEQ ID NO: 3282894 - RNA, 19 nt, Artificial Sequence
  Description of Artificial Sequence: Synthetic oligonucleotide
uuggacuuccuccagucuc

SEQ ID NO: 3282895 - RNA, 19 nt, Artificial Sequence
  Description of Artificial Sequence: Synthetic oligonucleotide
ugcgcagaugucaagcacu

SEQ ID NO: 3282896 - RNA, 19 nt, Artificial Sequence
  Description of Artificial Sequence: Synthetic oligonucleotide
aguccuucccauguagccc

SEQ ID NO: 3282897 - RNA, 19 nt, Artificial Sequence
  Description of Artificial Sequence: Synthetic oligonucleotide
acugccuggguacuucacg

SEQ ID NO: 3282898 - RNA, 19 nt, Artificial Sequence
  Description of Artificial Sequence: Synthetic oligonucleotide
ggugucaugaaagauaaca

SEQ ID NO: 3282899 - RNA, 19 nt, Artificial Sequence
  Description of Artificial Sequence: Synthetic oligonucleotide
ucgguugaauccgugugcg

SEQ ID NO: 3282900 - RNA, 19 nt, Artificial Sequence
  Description of Artificial Sequence: Synthetic oligonucleotide
ucgagcaggccaaggaacc

SEQ ID NO: 3282901 - RNA, 19 nt, Artificial Sequence
  Description of Artificial Sequence: Synthetic oligonucleotide
caaggaucgguggauagcc

SEQ ID NO: 3282902 - RNA, 19 nt, Artificial Sequence
  Description of Artificial Sequence: Synthetic oligonucleotide
acccgaggcccucagaggg

SEQ ID NO: 3282903 - RNA, 19 nt, Artificial Sequence
  Description of Artificial Sequence: Synthetic oligonucleotide
auguacuuccaaggcagcc

SEQ ID NO: 3282904 - RNA, 19 nt, Artificial Sequence
  Description of Artificial Sequence: Synthetic oligonucleotide
guagcguacggccuuggag

SEQ ID NO: 3282905 - RNA, 19 nt, Artificial Sequence
  Description of Artificial Sequence: Synthetic oligonucleotide
gugggcagcauccagugug

SEQ ID NO: 3282906 - RNA, 19 nt, Artificial Sequence
  Description of Artificial Sequence: Synthetic oligonucleotide
agucacaucuacuccuuca

SEQ ID NO: 3282907 - RNA, 19 nt, Artificial Sequence
  Description of Artificial Sequence: Synthetic oligonucleotide
aggaccugacccgaggccc

SEQ ID NO: 3282908 - RNA, 19 nt, Artificial Sequence
  Description of Artificial Sequence: Synthetic oligonucleotide
gguaaugcucacaucgugg

SEQ ID NO: 3282909 - RNA, 19 nt, Artificial Sequence
  Description of Artificial Sequence: Synthetic oligonucleotide
uccaaggaucgguggauag

SEQ ID NO: 3282910 - RNA, 19 nt, Artificial Sequence
  Description of Artificial Sequence: Synthetic oligonucleotide
agccgauaacgcccggucc

SEQ ID NO: 3282911 - RNA, 19 nt, Artificial Sequence
  Description of Artificial Sequence: Synthetic oligonucleotide
uauccugcucaaaggauau

SEQ ID NO: 3282912 - RNA, 19 nt, Artificial Sequence
  Description of Artificial Sequence: Synthetic oligonucleotide
guagcgauccaguaccgac

SEQ ID NO: 3282913 - RNA, 19 nt, Artificial Sequence
  Description of Artificial Sequence: Synthetic oligonucleotide
cuucgguugaauccgugug

SEQ ID NO: 3282914 - RNA, 19 nt, Artificial Sequence
  Description of Artificial Sequence: Synthetic oligonucleotide
agcgcauggccccuggauc

SEQ ID NO: 3282915 - RNA, 19 nt, Artificial Sequence
  Description of Artificial Sequence: Synthetic oligonucleotide
ugugacacucguuccacuc

SEQ ID NO: 3282916 - RNA, 19 nt, Artificial Sequence
  Description of Artificial Sequence: Synthetic oligonucleotide
acguccaguguauggcagc

SEQ ID NO: 3282917 - RNA, 19 nt, Artificial Sequence
  Description of Artificial Sequence: Synthetic oligonucleotide
guugaauccgugugcgcag

SEQ ID NO: 3282918 - RNA, 19 nt, Artificial Sequence
  Description of Artificial Sequence: Synthetic oligonucleotide
gguccaaccaacacgggcg

SEQ ID NO: 3282919 - RNA, 19 nt, Artificial Sequence
  Description of Artificial Sequence: Synthetic oligonucleotide
ugugucauagaaggccugc

SEQ ID NO: 3282920 - RNA, 19 nt, Artificial Sequence
  Description of Artificial Sequence: Synthetic oligonucleotide
uguagccccuucaggguag

SEQ ID NO: 3282921 - RNA, 19 nt, Artificial Sequence
  Description of Artificial Sequence: Synthetic oligonucleotide
gugggugugacacucguuc

SEQ ID NO: 3282922 - RNA, 19 nt, Artificial Sequence
  Description of Artificial Sequence: Synthetic oligonucleotide
gagacucacugucuccucc

SEQ ID NO: 3282923 - RNA, 19 nt, Artificial Sequence
  Description of Artificial Sequence: Synthetic oligonucleotide
cagccagcagcaaggagcg

SEQ ID NO: 3282924 - RNA, 19 nt, Artificial Sequence
  Description of Artificial Sequence: Synthetic oligonucleotide
ucuuggacuuccuccaguc

SEQ ID NO: 3282925 - RNA, 19 nt, Artificial Sequence
  Description of Artificial Sequence: Synthetic oligonucleotide
ggauaugugcaccaccagc

SEQ ID NO: 3282926 - RNA, 19 nt, Artificial Sequence
  Description of Artificial Sequence: Synthetic oligonucleotide
caguccuucccauguagcc

SEQ ID NO: 3282927 - RNA, 19 nt, Artificial Sequence
  Description of Artificial Sequence: Synthetic oligonucleotide
uucuugcagguaauuagau

SEQ ID NO: 3282928 - RNA, 19 nt, Artificial Sequence
  Description of Artificial Sequence: Synthetic oligonucleotide
guuguuugaagccuccaaa

SEQ ID NO: 3282929 - RNA, 19 nt, Artificial Sequence
  Description of Artificial Sequence: Synthetic oligonucleotide
auggcagcuaaugcugccc

SEQ ID NO: 3282930 - RNA, 19 nt, Artificial Sequence
  Description of Artificial Sequence: Synthetic oligonucleotide
agugacgagcugccugggc

SEQ ID NO: 3282931 - RNA, 19 nt, Artificial Sequence
  Description of Artificial Sequence: Synthetic oligonucleotide
gugacacucguuccacucg

SEQ ID NO: 3282932 - RNA, 19 nt, Artificial Sequence
  Description of Artificial Sequence: Synthetic oligonucleotide
uauggcagcuaaugcugcc

SEQ ID NO: 3282933 - RNA, 19 nt, Artificial Sequence
  Description of Artificial Sequence: Synthetic oligonucleotide
auuagaugagugggcagag

SEQ ID NO: 3282934 - RNA, 19 nt, Artificial Sequence
  Description of Artificial Sequence: Synthetic oligonucleotide
uagcgauccaguaccgaca

SEQ ID NO: 3282935 - RNA, 19 nt, Artificial Sequence
  Description of Artificial Sequence: Synthetic oligonucleotide
ucauccccagucucaagug

SEQ ID NO: 3282936 - RNA, 19 nt, Artificial Sequence
  Description of Artificial Sequence: Synthetic oligonucleotide
uaaugcucacaucguggca

SEQ ID NO: 3282937 - RNA, 19 nt, Artificial Sequence
  Description of Artificial Sequence: Synthetic oligonucleotide
ccucuuaggucaaaugucc

SEQ ID NO: 3282938 - RNA, 19 nt, Artificial Sequence
  Description of Artificial Sequence: Synthetic oligonucleotide
cauugcaucaggcgcuccc

SEQ ID NO: 3282939 - RNA, 19 nt, Artificial Sequence
  Description of Artificial Sequence: Synthetic oligonucleotide
gaaccgguuaggucuggcc

SEQ ID NO: 3282940 - RNA, 19 nt, Artificial Sequence
  Description of Artificial Sequence: Synthetic oligonucleotide
agguuucuccuucuccauc

SEQ ID NO: 3282941 - RNA, 19 nt, Artificial Sequence
  Description of Artificial Sequence: Synthetic oligonucleotide
aaguacacgcccuguccgu

SEQ ID NO: 3282942 - RNA, 19 nt, Artificial Sequence
  Description of Artificial Sequence: Synthetic oligonucleotide
uagccaguccuucccaugu

SEQ ID NO: 3282943 - RNA, 19 nt, Artificial Sequence
  Description of Artificial Sequence: Synthetic oligonucleotide
ucuuucagcuccugcucug

SEQ ID NO: 3282944 - RNA, 19 nt, Artificial Sequence
  Description of Artificial Sequence: Synthetic oligonucleotide
ucaccggucagcacccgug

SEQ ID NO: 3282945 - RNA, 19 nt, Artificial Sequence
  Description of Artificial Sequence: Synthetic oligonucleotide
gaugcagcugguacuguug

SEQ ID NO: 3282946 - RNA, 19 nt, Artificial Sequence
  Description of Artificial Sequence: Synthetic oligonucleotide
auugcaucaggcgcucccg

SEQ ID NO: 3282947 - RNA, 19 nt, Artificial Sequence
  Description of Artificial Sequence: Synthetic oligonucleotide
uguccguagagugugccgu

SEQ ID NO: 3282948 - RNA, 19 nt, Artificial Sequence
  Description of Artificial Sequence: Synthetic oligonucleotide
agcuugggugucaugaaag

SEQ ID NO: 3282949 - RNA, 19 nt, Artificial Sequence
  Description of Artificial Sequence: Synthetic oligonucleotide
aaaaugaucaaauugcagc

SEQ ID NO: 3282950 - RNA, 19 nt, Artificial Sequence
  Description of Artificial Sequence: Synthetic oligonucleotide
cuugauaaaauauacaugc

SEQ ID NO: 3282951 - RNA, 19 nt, Artificial Sequence
  Description of Artificial Sequence: Synthetic oligonucleotide
aaaaucaauaguucugacg

SEQ ID NO: 3282952 - RNA, 19 nt, Artificial Sequence
  Description of Artificial Sequence: Synthetic oligonucleotide
aauguucaaagacacugcc

SEQ ID NO: 3282953 - RNA, 19 nt, Artificial Sequence
  Description of Artificial Sequence: Synthetic oligonucleotide
aaauauacccuccagacau

SEQ ID NO: 3282954 - RNA, 19 nt, Artificial Sequence
  Description of Artificial Sequence: Synthetic oligonucleotide
aaaggauuacaacuguagg

SEQ ID NO: 3282955 - RNA, 19 nt, Artificial Sequence
  Description of Artificial Sequence: Synthetic oligonucleotide
aaagcauugguuuauuaga

SEQ ID NO: 3282956 - RNA, 19 nt, Artificial Sequence
  Description of Artificial Sequence: Synthetic oligonucleotide
aaagacacugcccaaaagu

SEQ ID NO: 3282957 - RNA, 19 nt, Artificial Sequence
  Description of Artificial Sequence: Synthetic oligonucleotide
uucggcauaauccagcucc

SEQ ID NO: 3282958 - RNA, 19 nt, Artificial Sequence
  Description of Artificial Sequence: Synthetic oligonucleotide
aaaguuucuuaauucaacu

SEQ ID NO: 3282959 - RNA, 19 nt, Artificial Sequence
  Description of Artificial Sequence: Synthetic oligonucleotide
aaugugguugucaaauucc

SEQ ID NO: 3282960 - RNA, 19 nt, Artificial Sequence
  Description of Artificial Sequence: Synthetic oligonucleotide
auaacagaaggaaauauac

SEQ ID NO: 3282961 - RNA, 19 nt, Artificial Sequence
  Description of Artificial Sequence: Synthetic oligonucleotide
gagaaaagaacaaaggagc

SEQ ID NO: 3282962 - RNA, 19 nt, Artificial Sequence
  Description of Artificial Sequence: Synthetic oligonucleotide
aaagaaaacugccuccaag

SEQ ID NO: 3282963 - RNA, 19 nt, Artificial Sequence
  Description of Artificial Sequence: Synthetic oligonucleotide
aaacucauuucuuuggcug

SEQ ID NO: 3282964 - RNA, 19 nt, Artificial Sequence
  Description of Artificial Sequence: Synthetic oligonucleotide
agggcaaacauauuuacag

SEQ ID NO: 3282965 - RNA, 19 nt, Artificial Sequence
  Description of Artificial Sequence: Synthetic oligonucleotide
agugaggagacugagagcg

SEQ ID NO: 3282966 - RNA, 19 nt, Artificial Sequence
  Description of Artificial Sequence: Synthetic oligonucleotide
ucaugugugauaaaguuaa

SEQ ID NO: 3282967 - RNA, 19 nt, Artificial Sequence
  Description of Artificial Sequence: Synthetic oligonucleotide
aaggauuacaacuguagga

SEQ ID NO: 3282968 - RNA, 19 nt, Artificial Sequence
  Description of Artificial Sequence: Synthetic oligonucleotide
aagcaaggaaaaugagucc

SEQ ID NO: 3282969 - RNA, 19 nt, Artificial Sequence
  Description of Artificial Sequence: Synthetic oligonucleotide
aagaaaacugccuccaaga

SEQ ID NO: 3282970 - RNA, 19 nt, Artificial Sequence
  Description of Artificial Sequence: Synthetic oligonucleotide
uaaagucaaaaccucuucc

SEQ ID NO: 3282971 - RNA, 19 nt, Artificial Sequence
  Description of Artificial Sequence: Synthetic oligonucleotide
auacuacaaauacggaacc

SEQ ID NO: 3282972 - RNA, 19 nt, Artificial Sequence
  Description of Artificial Sequence: Synthetic oligonucleotide
uacggcucaaucuacaacc

SEQ ID NO: 3282973 - RNA, 19 nt, Artificial Sequence
  Description of Artificial Sequence: Synthetic oligonucleotide
agucccuucacuucaaauc

SEQ ID NO: 3282974 - RNA, 19 nt, Artificial Sequence
  Description of Artificial Sequence: Synthetic oligonucleotide
auaaagucaaaaccucuuc

SEQ ID NO: 3282975 - RNA, 19 nt, Artificial Sequence
  Description of Artificial Sequence: Synthetic oligonucleotide
acgugggugacucuguucc

SEQ ID NO: 3282976 - RNA, 19 nt, Artificial Sequence
  Description of Artificial Sequence: Synthetic oligonucleotide
ugaagagacagccuggccu

SEQ ID NO: 3282977 - RNA, 19 nt, Artificial Sequence
  Description of Artificial Sequence: Synthetic oligonucleotide
aggagaaaagaacaaagga

SEQ ID NO: 3282978 - RNA, 19 nt, Artificial Sequence
  Description of Artificial Sequence: Synthetic oligonucleotide
acaaaggagccucuacugc

SEQ ID NO: 3282979 - RNA, 19 nt, Artificial Sequence
  Description of Artificial Sequence: Synthetic oligonucleotide
auugcaguauacuacaaau

SEQ ID NO: 3282980 - RNA, 19 nt, Artificial Sequence
  Description of Artificial Sequence: Synthetic oligonucleotide
gaauaugauguacuugggc

SEQ ID NO: 3282981 - RNA, 19 nt, Artificial Sequence
  Description of Artificial Sequence: Synthetic oligonucleotide
aacucucucugcuugaggu

SEQ ID NO: 3282982 - RNA, 19 nt, Artificial Sequence
  Description of Artificial Sequence: Synthetic oligonucleotide
uuguacuuuugucugagcu

SEQ ID NO: 3282983 - RNA, 19 nt, Artificial Sequence
  Description of Artificial Sequence: Synthetic oligonucleotide
uuuacuugcugguauaaau

SEQ ID NO: 3282984 - RNA, 19 nt, Artificial Sequence
  Description of Artificial Sequence: Synthetic oligonucleotide
aaaacucauuucuuuggcu

SEQ ID NO: 3282985 - RNA, 19 nt, Artificial Sequence
  Description of Artificial Sequence: Synthetic oligonucleotide
caggagaaaagaacaaagg

SEQ ID NO: 3282986 - RNA, 19 nt, Artificial Sequence
  Description of Artificial Sequence: Synthetic oligonucleotide
aaucccgacggccggagcg

SEQ ID NO: 3282987 - RNA, 19 nt, Artificial Sequence
  Description of Artificial Sequence: Synthetic oligonucleotide
caucuuuguuucuugaaag

SEQ ID NO: 3282988 - RNA, 19 nt, Artificial Sequence
  Description of Artificial Sequence: Synthetic oligonucleotide
gucccuucacuucaaaucg

SEQ ID NO: 3282989 - RNA, 19 nt, Artificial Sequence
  Description of Artificial Sequence: Synthetic oligonucleotide
uacugcaaauuacuuaaca

SEQ ID NO: 3282990 - RNA, 19 nt, Artificial Sequence
  Description of Artificial Sequence: Synthetic oligonucleotide
ucuagccaacccaaaaggc

SEQ ID NO: 3282991 - RNA, 19 nt, Artificial Sequence
  Description of Artificial Sequence: Synthetic oligonucleotide
uccugaccugagaagaugg

SEQ ID NO: 3282992 - RNA, 19 nt, Artificial Sequence
  Description of Artificial Sequence: Synthetic oligonucleotide
gaaaaugaucaaauugcag

SEQ ID NO: 3282993 - RNA, 19 nt, Artificial Sequence
  Description of Artificial Sequence: Synthetic oligonucleotide
ggagaaaagaacaaaggag

SEQ ID NO: 3282994 - RNA, 19 nt, Artificial Sequence
  Description of Artificial Sequence: Synthetic oligonucleotide
acugugguuggucugaaca

SEQ ID NO: 3282995 - RNA, 19 nt, Artificial Sequence
  Description of Artificial Sequence: Synthetic oligonucleotide
guacuugcuucucauaaag

SEQ ID NO: 3282996 - RNA, 19 nt, Artificial Sequence
  Description of Artificial Sequence: Synthetic oligonucleotide
acuguccagaacaagguac

SEQ ID NO: 3282997 - RNA, 19 nt, Artificial Sequence
  Description of Artificial Sequence: Synthetic oligonucleotide
acaggagaaaagaacaaag

SEQ ID NO: 3282998 - RNA, 19 nt, Artificial Sequence
  Description of Artificial Sequence: Synthetic oligonucleotide
aauacuaggaaggcaaaua

SEQ ID NO: 3282999 - RNA, 19 nt, Artificial Sequence
  Description of Artificial Sequence: Synthetic oligonucleotide
gcagcauuuauguuuagag

SEQ ID NO: 3283000 - RNA, 19 nt, Artificial Sequence
  Description of Artificial Sequence: Synthetic oligonucleotide
caaaacucauuucuuuggc

SEQ ID NO: 3283001 - RNA, 19 nt, Artificial Sequence
  Description of Artificial Sequence: Synthetic oligonucleotide
aggucuuuuaaucucugcu

SEQ ID NO: 3283002 - RNA, 19 nt, Artificial Sequence
  Description of Artificial Sequence: Synthetic oligonucleotide
uuuucgggaucuugaagag

SEQ ID NO: 3283003 - RNA, 19 nt, Artificial Sequence
  Description of Artificial Sequence: Synthetic oligonucleotide
uuauaaccuuuaaaguuuc

SEQ ID NO: 3283004 - RNA, 19 nt, Artificial Sequence
  Description of Artificial Sequence: Synthetic oligonucleotide
aaacucucucugcuugagg

SEQ ID NO: 3283005 - RNA, 19 nt, Artificial Sequence
  Description of Artificial Sequence: Synthetic oligonucleotide
uggcucucuaggaucaagg

SEQ ID NO: 3283006 - RNA, 19 nt, Artificial Sequence
  Description of Artificial Sequence: Synthetic oligonucleotide
auauggauaggguggcuag

SEQ ID NO: 3283007 - RNA, 19 nt, Artificial Sequence
  Description of Artificial Sequence: Synthetic oligonucleotide
aagacacugcccaaaagug

SEQ ID NO: 3283008 - RNA, 19 nt, Artificial Sequence
  Description of Artificial Sequence: Synthetic oligonucleotide
gaccugaucggaaauagug

SEQ ID NO: 3283009 - RNA, 19 nt, Artificial Sequence
  Description of Artificial Sequence: Synthetic oligonucleotide
acucuauuauccucugguc

SEQ ID NO: 3283010 - RNA, 19 nt, Artificial Sequence
  Description of Artificial Sequence: Synthetic oligonucleotide
acagaauucuuaucuucag

SEQ ID NO: 3283011 - RNA, 19 nt, Artificial Sequence
  Description of Artificial Sequence: Synthetic oligonucleotide
cuugcuucgacugcgacug

SEQ ID NO: 3283012 - RNA, 19 nt, Artificial Sequence
  Description of Artificial Sequence: Synthetic oligonucleotide
uauugcaguauacuacaaa

SEQ ID NO: 3283013 - RNA, 19 nt, Artificial Sequence
  Description of Artificial Sequence: Synthetic oligonucleotide
uguaaagccaaagcccucc

SEQ ID NO: 3283014 - RNA, 19 nt, Artificial Sequence
  Description of Artificial Sequence: Synthetic oligonucleotide
agaaggaaauauacccucc

SEQ ID NO: 3283015 - RNA, 19 nt, Artificial Sequence
  Description of Artificial Sequence: Synthetic oligonucleotide
cuuggccuaggcaaguggg

SEQ ID NO: 3283016 - RNA, 19 nt, Artificial Sequence
  Description of Artificial Sequence: Synthetic oligonucleotide
uguacuuuugucugagcuc

SEQ ID NO: 3283017 - RNA, 19 nt, Artificial Sequence
  Description of Artificial Sequence: Synthetic oligonucleotide
ggggcuaaauacuaggaag

SEQ ID NO: 3283018 - RNA, 19 nt, Artificial Sequence
  Description of Artificial Sequence: Synthetic oligonucleotide
gagaaaacugucccaacuc

SEQ ID NO: 3283019 - RNA, 19 nt, Artificial Sequence
  Description of Artificial Sequence: Synthetic oligonucleotide
gaagaauaggucaccuucc

SEQ ID NO: 3283020 - RNA, 19 nt, Artificial Sequence
  Description of Artificial Sequence: Synthetic oligonucleotide
uaauccuuguacuuuuguc

SEQ ID NO: 3283021 - RNA, 19 nt, Artificial Sequence
  Description of Artificial Sequence: Synthetic oligonucleotide
ugcugaauguggaugggcu

SEQ ID NO: 3283022 - RNA, 19 nt, Artificial Sequence
  Description of Artificial Sequence: Synthetic oligonucleotide
gaagcuuuaaaacuacuau

SEQ ID NO: 3283023 - RNA, 19 nt, Artificial Sequence
  Description of Artificial Sequence: Synthetic oligonucleotide
gaaaaucaauaguucugac

SEQ ID NO: 3283024 - RNA, 19 nt, Artificial Sequence
  Description of Artificial Sequence: Synthetic oligonucleotide
uggucguaagaguuaaugu

SEQ ID NO: 3283025 - RNA, 19 nt, Artificial Sequence
  Description of Artificial Sequence: Synthetic oligonucleotide
ugcgauugccuuuucuuug

SEQ ID NO: 3283026 - RNA, 19 nt, Artificial Sequence
  Description of Artificial Sequence: Synthetic oligonucleotide
aacauaauccuuguacuuu

SEQ ID NO: 3283027 - RNA, 19 nt, Artificial Sequence
  Description of Artificial Sequence: Synthetic oligonucleotide
ugcuuuugguucuagguua

SEQ ID NO: 3283028 - RNA, 19 nt, Artificial Sequence
  Description of Artificial Sequence: Synthetic oligonucleotide
cuuacuaaagcauugguuu

SEQ ID NO: 3283029 - RNA, 19 nt, Artificial Sequence
  Description of Artificial Sequence: Synthetic oligonucleotide
guucuggucagugucacag

SEQ ID NO: 3283030 - RNA, 19 nt, Artificial Sequence
  Description of Artificial Sequence: Synthetic oligonucleotide
uacgacucccaacucaagu

SEQ ID NO: 3283031 - RNA, 19 nt, Artificial Sequence
  Description of Artificial Sequence: Synthetic oligonucleotide
gaaccuacagaugugcuca

SEQ ID NO: 3283032 - RNA, 19 nt, Artificial Sequence
  Description of Artificial Sequence: Synthetic oligonucleotide
ugcuauucugggagguagg

SEQ ID NO: 3283033 - RNA, 19 nt, Artificial Sequence
  Description of Artificial Sequence: Synthetic oligonucleotide
uagggcaaacauauuuaca

SEQ ID NO: 3283034 - RNA, 19 nt, Artificial Sequence
  Description of Artificial Sequence: Synthetic oligonucleotide
auguucaaagacacugccc

SEQ ID NO: 3283035 - RNA, 19 nt, Artificial Sequence
  Description of Artificial Sequence: Synthetic oligonucleotide
cuggaaucgagcugggcag

SEQ ID NO: 3283036 - RNA, 19 nt, Artificial Sequence
  Description of Artificial Sequence: Synthetic oligonucleotide
caagaaagguggcagggug

SEQ ID NO: 3283037 - RNA, 19 nt, Artificial Sequence
  Description of Artificial Sequence: Synthetic oligonucleotide
uagcaagaaagguggcagg

SEQ ID NO: 3283038 - RNA, 19 nt, Artificial Sequence
  Description of Artificial Sequence: Synthetic oligonucleotide
aaugccaauggcggcggcg

SEQ ID NO: 3283039 - RNA, 19 nt, Artificial Sequence
  Description of Artificial Sequence: Synthetic oligonucleotide
cuguccagaacaagguacc

SEQ ID NO: 3283040 - RNA, 19 nt, Artificial Sequence
  Description of Artificial Sequence: Synthetic oligonucleotide
agcaagaaagguggcaggg

SEQ ID NO: 3283041 - RNA, 19 nt, Artificial Sequence
  Description of Artificial Sequence: Synthetic oligonucleotide
uuggccuaggcaagugggg

SEQ ID NO: 3283042 - RNA, 19 nt, Artificial Sequence
  Description of Artificial Sequence: Synthetic oligonucleotide
auaauccuuguacuuuugu

SEQ ID NO: 3283043 - RNA, 19 nt, Artificial Sequence
  Description of Artificial Sequence: Synthetic oligonucleotide
auaguaaacccaaagcaaa

SEQ ID NO: 3283044 - RNA, 19 nt, Artificial Sequence
  Description of Artificial Sequence: Synthetic oligonucleotide
ugagcuuacgacucccaac

SEQ ID NO: 3283045 - RNA, 19 nt, Artificial Sequence
  Description of Artificial Sequence: Synthetic oligonucleotide
uccgcauagcuucuacuca

SEQ ID NO: 3283046 - RNA, 19 nt, Artificial Sequence
  Description of Artificial Sequence: Synthetic oligonucleotide
ucacaggagaaaagaacaa

SEQ ID NO: 3283047 - RNA, 19 nt, Artificial Sequence
  Description of Artificial Sequence: Synthetic oligonucleotide
ggaucaaggcucuggaucc

SEQ ID NO: 3283048 - RNA, 19 nt, Artificial Sequence
  Description of Artificial Sequence: Synthetic oligonucleotide
uuacuaaagcauugguuua

SEQ ID NO: 3283049 - RNA, 19 nt, Artificial Sequence
  Description of Artificial Sequence: Synthetic oligonucleotide
aacugaacugcucagaagc

SEQ ID NO: 3283050 - RNA, 19 nt, Artificial Sequence
  Description of Artificial Sequence: Synthetic oligonucleotide
uguccaaugaaccuaagag

SEQ ID NO: 3283051 - RNA, 19 nt, Artificial Sequence
  Description of Artificial Sequence: Synthetic oligonucleotide
cacaagagaaguaagaggc

SEQ ID NO: 3283052 - RNA, 19 nt, Artificial Sequence
  Description of Artificial Sequence: Synthetic oligonucleotide
gaugaugaugauaaggucg

SEQ ID NO: 3283053 - RNA, 19 nt, Artificial Sequence
  Description of Artificial Sequence: Synthetic oligonucleotide
agaaguaagaggcugguuc

SEQ ID NO: 3283054 - RNA, 19 nt, Artificial Sequence
  Description of Artificial Sequence: Synthetic oligonucleotide
uccaaugaaccuaagagca

SEQ ID NO: 3283055 - RNA, 19 nt, Artificial Sequence
  Description of Artificial Sequence: Synthetic oligonucleotide
aaccuaagagcauugauga

SEQ ID NO: 3283056 - RNA, 19 nt, Artificial Sequence
  Description of Artificial Sequence: Synthetic oligonucleotide
ucagaagcgaugaugauga

SEQ ID NO: 3283057 - RNA, 19 nt, Artificial Sequence
  Description of Artificial Sequence: Synthetic oligonucleotide
gauaaggucguaauugucg

SEQ ID NO: 3283058 - RNA, 19 nt, Artificial Sequence
  Description of Artificial Sequence: Synthetic oligonucleotide
gaugauaaggucguaauug

SEQ ID NO: 3283059 - RNA, 19 nt, Artificial Sequence
  Description of Artificial Sequence: Synthetic oligonucleotide
uagaacuuccuucucaugc

SEQ ID NO: 3283060 - RNA, 19 nt, Artificial Sequence
  Description of Artificial Sequence: Synthetic oligonucleotide
aauccuccuccucaugucc

SEQ ID NO: 3283061 - RNA, 19 nt, Artificial Sequence
  Description of Artificial Sequence: Synthetic oligonucleotide
ucacaagagaaguaagagg

SEQ ID NO: 3283062 - RNA, 19 nt, Artificial Sequence
  Description of Artificial Sequence: Synthetic oligonucleotide
cuaagagcauugaugaagg

SEQ ID NO: 3283063 - RNA, 19 nt, Artificial Sequence
  Description of Artificial Sequence: Synthetic oligonucleotide
acaugauucgaacugaacu

SEQ ID NO: 3283064 - RNA, 19 nt, Artificial Sequence
  Description of Artificial Sequence: Synthetic oligonucleotide
uugaugaaggaugacaugc

SEQ ID NO: 3283065 - RNA, 19 nt, Artificial Sequence
  Description of Artificial Sequence: Synthetic oligonucleotide
gaugacaugccacuucccg

SEQ ID NO: 3283066 - RNA, 19 nt, Artificial Sequence
  Description of Artificial Sequence: Synthetic oligonucleotide
acgacauagaacuuccuuc

SEQ ID NO: 3283067 - RNA, 19 nt, Artificial Sequence
  Description of Artificial Sequence: Synthetic oligonucleotide
aggaugacaugccacuucc

SEQ ID NO: 3283068 - RNA, 19 nt, Artificial Sequence
  Description of Artificial Sequence: Synthetic oligonucleotide
uaauugucgaaccccaucu

SEQ ID NO: 3283069 - RNA, 19 nt, Artificial Sequence
  Description of Artificial Sequence: Synthetic oligonucleotide
aaggucguaauugucgaac

SEQ ID NO: 3283070 - RNA, 19 nt, Artificial Sequence
  Description of Artificial Sequence: Synthetic oligonucleotide
caugauucgaacugaacug

SEQ ID NO: 3283071 - RNA, 19 nt, Artificial Sequence
  Description of Artificial Sequence: Synthetic oligonucleotide
ugggaaacucacaagagaa

SEQ ID NO: 3283072 - RNA, 19 nt, Artificial Sequence
  Description of Artificial Sequence: Synthetic oligonucleotide
gucacagcaauucuuacug

SEQ ID NO: 3283073 - RNA, 19 nt, Artificial Sequence
  Description of Artificial Sequence: Synthetic oligonucleotide
ugcucagaagcgaugauga

SEQ ID NO: 3283074 - RNA, 19 nt, Artificial Sequence
  Description of Artificial Sequence: Synthetic oligonucleotide
gaaguaagaggcugguucc

SEQ ID NO: 3283075 - RNA, 19 nt, Artificial Sequence
  Description of Artificial Sequence: Synthetic oligonucleotide
aaggaugacaugccacuuc

SEQ ID NO: 3283076 - RNA, 19 nt, Artificial Sequence
  Description of Artificial Sequence: Synthetic oligonucleotide
gaagcgaugaugaugauaa

SEQ ID NO: 3283077 - RNA, 19 nt, Artificial Sequence
  Description of Artificial Sequence: Synthetic oligonucleotide
uggguuucuagacuuauuc

SEQ ID NO: 3283078 - RNA, 19 nt, Artificial Sequence
  Description of Artificial Sequence: Synthetic oligonucleotide
gaaccuaagagcauugaug

SEQ ID NO: 3283079 - RNA, 19 nt, Artificial Sequence
  Description of Artificial Sequence: Synthetic oligonucleotide
augauucgaacugaacugc

SEQ ID NO: 3283080 - RNA, 19 nt, Artificial Sequence
  Description of Artificial Sequence: Synthetic oligonucleotide
uccucauguccaaugaacc

SEQ ID NO: 3283081 - RNA, 19 nt, Artificial Sequence
  Description of Artificial Sequence: Synthetic oligonucleotide
aauugucgaaccccaucuc

SEQ ID NO: 3283082 - RNA, 19 nt, Artificial Sequence
  Description of Artificial Sequence: Synthetic oligonucleotide
cuucucaugcucugcaugg

SEQ ID NO: 3283083 - RNA, 19 nt, Artificial Sequence
  Description of Artificial Sequence: Synthetic oligonucleotide
auucuuacuggguuucuag

SEQ ID NO: 3283084 - RNA, 19 nt, Artificial Sequence
  Description of Artificial Sequence: Synthetic oligonucleotide
agagcauugaugaaggaug

SEQ ID NO: 3283085 - RNA, 19 nt, Artificial Sequence
  Description of Artificial Sequence: Synthetic oligonucleotide
uaguucuccaugcucuggg

SEQ ID NO: 3283086 - RNA, 19 nt, Artificial Sequence
  Description of Artificial Sequence: Synthetic oligonucleotide
cuucacaugauucgaacug

SEQ ID NO: 3283087 - RNA, 19 nt, Artificial Sequence
  Description of Artificial Sequence: Synthetic oligonucleotide
ugggaugugaccccugugc

SEQ ID NO: 3283088 - RNA, 19 nt, Artificial Sequence
  Description of Artificial Sequence: Synthetic oligonucleotide
uccacauugggaaacucac

SEQ ID NO: 3283089 - RNA, 19 nt, Artificial Sequence
  Description of Artificial Sequence: Synthetic oligonucleotide
uugggaaacucacaagaga

SEQ ID NO: 3283090 - RNA, 19 nt, Artificial Sequence
  Description of Artificial Sequence: Synthetic oligonucleotide
aggucguaauugucgaacc

SEQ ID NO: 3283091 - RNA, 19 nt, Artificial Sequence
  Description of Artificial Sequence: Synthetic oligonucleotide
agcgaugaugaugauaagg

SEQ ID NO: 3283092 - RNA, 19 nt, Artificial Sequence
  Description of Artificial Sequence: Synthetic oligonucleotide
aucucaugcagguaguucu

SEQ ID NO: 3283093 - RNA, 19 nt, Artificial Sequence
  Description of Artificial Sequence: Synthetic oligonucleotide
guccaaugaaccuaagagc

SEQ ID NO: 3283094 - RNA, 19 nt, Artificial Sequence
  Description of Artificial Sequence: Synthetic oligonucleotide
ugaaggaugacaugccacu

SEQ ID NO: 3283095 - RNA, 19 nt, Artificial Sequence
  Description of Artificial Sequence: Synthetic oligonucleotide
cacagcaauucuuacuggg

SEQ ID NO: 3283096 - RNA, 19 nt, Artificial Sequence
  Description of Artificial Sequence: Synthetic oligonucleotide
aagagaaguaagaggcugg

SEQ ID NO: 3283097 - RNA, 19 nt, Artificial Sequence
  Description of Artificial Sequence: Synthetic oligonucleotide
agcuucacaugauucgaac

SEQ ID NO: 3283098 - RNA, 19 nt, Artificial Sequence
  Description of Artificial Sequence: Synthetic oligonucleotide
aaacucacaagagaaguaa

SEQ ID NO: 3283099 - RNA, 19 nt, Artificial Sequence
  Description of Artificial Sequence: Synthetic oligonucleotide
ugacaugccacuucccgag

SEQ ID NO: 3283100 - RNA, 19 nt, Artificial Sequence
  Description of Artificial Sequence: Synthetic oligonucleotide
ugaauccuccuccucaugu

SEQ ID NO: 3283101 - RNA, 19 nt, Artificial Sequence
  Description of Artificial Sequence: Synthetic oligonucleotide
ucuuacuggguuucuagac

SEQ ID NO: 3283102 - RNA, 19 nt, Artificial Sequence
  Description of Artificial Sequence: Synthetic oligonucleotide
ugaugaaggaugacaugcc

SEQ ID NO: 3283103 - RNA, 19 nt, Artificial Sequence
  Description of Artificial Sequence: Synthetic oligonucleotide
aggcaggucccacagcucc

SEQ ID NO: 3283104 - RNA, 19 nt, Artificial Sequence
  Description of Artificial Sequence: Synthetic oligonucleotide
gguuucuagacuuauucug

SEQ ID NO: 3283105 - RNA, 19 nt, Artificial Sequence
  Description of Artificial Sequence: Synthetic oligonucleotide
auucgaacugaacugcuca

SEQ ID NO: 3283106 - RNA, 19 nt, Artificial Sequence
  Description of Artificial Sequence: Synthetic oligonucleotide
cucacaagagaaguaagag

SEQ ID NO: 3283107 - RNA, 19 nt, Artificial Sequence
  Description of Artificial Sequence: Synthetic oligonucleotide
ucuagacuuauucuguauu

SEQ ID NO: 3283108 - RNA, 19 nt, Artificial Sequence
  Description of Artificial Sequence: Synthetic oligonucleotide
uuuggccagcuucacauga

SEQ ID NO: 3283109 - RNA, 19 nt, Artificial Sequence
  Description of Artificial Sequence: Synthetic oligonucleotide
auaaggucguaauugucga

SEQ ID NO: 3283110 - RNA, 19 nt, Artificial Sequence
  Description of Artificial Sequence: Synthetic oligonucleotide
augauaaggucguaauugu

SEQ ID NO: 3283111 - RNA, 19 nt, Artificial Sequence
  Description of Artificial Sequence: Synthetic oligonucleotide
cauugggaaacucacaaga

SEQ ID NO: 3283112 - RNA, 19 nt, Artificial Sequence
  Description of Artificial Sequence: Synthetic oligonucleotide
acauagaacuuccuucuca

SEQ ID NO: 3283113 - RNA, 19 nt, Artificial Sequence
  Description of Artificial Sequence: Synthetic oligonucleotide
uguccagacgacauagaac

SEQ ID NO: 3283114 - RNA, 19 nt, Artificial Sequence
  Description of Artificial Sequence: Synthetic oligonucleotide
ucguaauugucgaacccca

SEQ ID NO: 3283115 - RNA, 19 nt, Artificial Sequence
  Description of Artificial Sequence: Synthetic oligonucleotide
augcucugggaugugaccc

SEQ ID NO: 3283116 - RNA, 19 nt, Artificial Sequence
  Description of Artificial Sequence: Synthetic oligonucleotide
aagagcauugaugaaggau

SEQ ID NO: 3283117 - RNA, 19 nt, Artificial Sequence
  Description of Artificial Sequence: Synthetic oligonucleotide
aaccccaucucaugcaggu

SEQ ID NO: 3283118 - RNA, 19 nt, Artificial Sequence
  Description of Artificial Sequence: Synthetic oligonucleotide
ugaaccuaagagcauugau

SEQ ID NO: 3283119 - RNA, 19 nt, Artificial Sequence
  Description of Artificial Sequence: Synthetic oligonucleotide
auugaugaaggaugacaug

SEQ ID NO: 3283120 - RNA, 19 nt, Artificial Sequence
  Description of Artificial Sequence: Synthetic oligonucleotide
cagacgacauagaacuucc

SEQ ID NO: 3283121 - RNA, 19 nt, Artificial Sequence
  Description of Artificial Sequence: Synthetic oligonucleotide
ugcagguaguucuccaugc

SEQ ID NO: 3283122 - RNA, 19 nt, Artificial Sequence
  Description of Artificial Sequence: Synthetic oligonucleotide
auugucgaaccccaucuca

SEQ ID NO: 3283123 - RNA, 19 nt, Artificial Sequence
  Description of Artificial Sequence: Synthetic oligonucleotide
uuguccagacgacauagaa

SEQ ID NO: 3283124 - RNA, 19 nt, Artificial Sequence
  Description of Artificial Sequence: Synthetic oligonucleotide
gaugugaccccugugccag

SEQ ID NO: 3283125 - RNA, 19 nt, Artificial Sequence
  Description of Artificial Sequence: Synthetic oligonucleotide
uaagaggcugguuccuggg

SEQ ID NO: 3283126 - RNA, 19 nt, Artificial Sequence
  Description of Artificial Sequence: Synthetic oligonucleotide
augaugauaaggucguaau

SEQ ID NO: 3283127 - RNA, 19 nt, Artificial Sequence
  Description of Artificial Sequence: Synthetic oligonucleotide
guccagacgacauagaacu

SEQ ID NO: 3283128 - RNA, 19 nt, Artificial Sequence
  Description of Artificial Sequence: Synthetic oligonucleotide
aaugaaccuaagagcauug

SEQ ID NO: 3283129 - RNA, 19 nt, Artificial Sequence
  Description of Artificial Sequence: Synthetic oligonucleotide
agucacagcaauucuuacu

SEQ ID NO: 3283130 - RNA, 19 nt, Artificial Sequence
  Description of Artificial Sequence: Synthetic oligonucleotide
gaacugaacugcucagaag

SEQ ID NO: 3283131 - RNA, 19 nt, Artificial Sequence
  Description of Artificial Sequence: Synthetic oligonucleotide
agaacuuccuucucaugcu

SEQ ID NO: 3283132 - RNA, 19 nt, Artificial Sequence
  Description of Artificial Sequence: Synthetic oligonucleotide
uucuccaugcucugggaug

SEQ ID NO: 3283133 - RNA, 19 nt, Artificial Sequence
  Description of Artificial Sequence: Synthetic oligonucleotide
uccugggugguccucacca

SEQ ID NO: 3283134 - RNA, 19 nt, Artificial Sequence
  Description of Artificial Sequence: Synthetic oligonucleotide
uccucaccaccccaguggg

SEQ ID NO: 3283135 - RNA, 19 nt, Artificial Sequence
  Description of Artificial Sequence: Synthetic oligonucleotide
ucauguccaaugaaccuaa

SEQ ID NO: 3283136 - RNA, 19 nt, Artificial Sequence
  Description of Artificial Sequence: Synthetic oligonucleotide
ugaacugcucagaagcgau

SEQ ID NO: 3283137 - RNA, 19 nt, Artificial Sequence
  Description of Artificial Sequence: Synthetic oligonucleotide
gaugaaggaugacaugcca

SEQ ID NO: 3283138 - RNA, 19 nt, Artificial Sequence
  Description of Artificial Sequence: Synthetic oligonucleotide
uucgaacugaacugcucag

SEQ ID NO: 3283139 - RNA, 19 nt, Artificial Sequence
  Description of Artificial Sequence: Synthetic oligonucleotide
guaagaggcugguuccugg

SEQ ID NO: 3283140 - RNA, 19 nt, Artificial Sequence
  Description of Artificial Sequence: Synthetic oligonucleotide
ucacagcaauucuuacugg

SEQ ID NO: 3283141 - RNA, 19 nt, Artificial Sequence
  Description of Artificial Sequence: Synthetic oligonucleotide
augaaggaugacaugccac

SEQ ID NO: 3283142 - RNA, 19 nt, Artificial Sequence
  Description of Artificial Sequence: Synthetic oligonucleotide
cuccucauguccaaugaac

SEQ ID NO: 3283143 - RNA, 19 nt, Artificial Sequence
  Description of Artificial Sequence: Synthetic oligonucleotide
aacucacaagagaaguaag

SEQ ID NO: 3283144 - RNA, 19 nt, Artificial Sequence
  Description of Artificial Sequence: Synthetic oligonucleotide
acauugggaaacucacaag

SEQ ID NO: 3283145 - RNA, 19 nt, Artificial Sequence
  Description of Artificial Sequence: Synthetic oligonucleotide
cucugcauggcuuuggcca

SEQ ID NO: 3283146 - RNA, 19 nt, Artificial Sequence
  Description of Artificial Sequence: Synthetic oligonucleotide
caagagaaguaagaggcug

SEQ ID NO: 3283147 - RNA, 19 nt, Artificial Sequence
  Description of Artificial Sequence: Synthetic oligonucleotide
uucuuacuggguuucuaga

SEQ ID NO: 3283148 - RNA, 19 nt, Artificial Sequence
  Description of Artificial Sequence: Synthetic oligonucleotide
ugauaaggucguaauuguc

SEQ ID NO: 3283149 - RNA, 19 nt, Artificial Sequence
  Description of Artificial Sequence: Synthetic oligonucleotide
aaauauuacacuuuuaaac

SEQ ID NO: 3283150 - RNA, 19 nt, Artificial Sequence
  Description of Artificial Sequence: Synthetic oligonucleotide
augauuacaaauuacaacc

SEQ ID NO: 3283151 - RNA, 19 nt, Artificial Sequence
  Description of Artificial Sequence: Synthetic oligonucleotide
aaugauuacaaauuacaac

SEQ ID NO: 3283152 - RNA, 19 nt, Artificial Sequence
  Description of Artificial Sequence: Synthetic oligonucleotide
aauauuacacuuuuaaaca

SEQ ID NO: 3283153 - RNA, 19 nt, Artificial Sequence
  Description of Artificial Sequence: Synthetic oligonucleotide
uaaacauguauuuacagag

SEQ ID NO: 3283154 - RNA, 19 nt, Artificial Sequence
  Description of Artificial Sequence: Synthetic oligonucleotide
acuccaucaacucagaaac

SEQ ID NO: 3283155 - RNA, 19 nt, Artificial Sequence
  Description of Artificial Sequence: Synthetic oligonucleotide
aaucugagcuccuacagac

SEQ ID NO: 3283156 - RNA, 19 nt, Artificial Sequence
  Description of Artificial Sequence: Synthetic oligonucleotide
auaaaagcuggcuaaacac

SEQ ID NO: 3283157 - RNA, 19 nt, Artificial Sequence
  Description of Artificial Sequence: Synthetic oligonucleotide
ucaacucagaaacagaccc

SEQ ID NO: 3283158 - RNA, 19 nt, Artificial Sequence
  Description of Artificial Sequence: Synthetic oligonucleotide
uuuccggugaagaauaugg

SEQ ID NO: 3283159 - RNA, 19 nt, Artificial Sequence
  Description of Artificial Sequence: Synthetic oligonucleotide
uuacaaauuacaaccaggc

SEQ ID NO: 3283160 - RNA, 19 nt, Artificial Sequence
  Description of Artificial Sequence: Synthetic oligonucleotide
aagauaauaaaagcuuccc

SEQ ID NO: 3283161 - RNA, 19 nt, Artificial Sequence
  Description of Artificial Sequence: Synthetic oligonucleotide
acaaauagaaaaugauuac

SEQ ID NO: 3283162 - RNA, 19 nt, Artificial Sequence
  Description of Artificial Sequence: Synthetic oligonucleotide
agauaauaaaagcuucccc

SEQ ID NO: 3283163 - RNA, 19 nt, Artificial Sequence
  Description of Artificial Sequence: Synthetic oligonucleotide
ucuuguacaaaauauuaca

SEQ ID NO: 3283164 - RNA, 19 nt, Artificial Sequence
  Description of Artificial Sequence: Synthetic oligonucleotide
aaaaugauuacaaauuaca

SEQ ID NO: 3283165 - RNA, 19 nt, Artificial Sequence
  Description of Artificial Sequence: Synthetic oligonucleotide
uuuaaacauguauuuacag

SEQ ID NO: 3283166 - RNA, 19 nt, Artificial Sequence
  Description of Artificial Sequence: Synthetic oligonucleotide
cuuuuaaacauguauuuac

SEQ ID NO: 3283167 - RNA, 19 nt, Artificial Sequence
  Description of Artificial Sequence: Synthetic oligonucleotide
aaaaucugagcuccuacag

SEQ ID NO: 3283168 - RNA, 19 nt, Artificial Sequence
  Description of Artificial Sequence: Synthetic oligonucleotide
aaaagcuuccccucucccc

SEQ ID NO: 3283169 - RNA, 19 nt, Artificial Sequence
  Description of Artificial Sequence: Synthetic oligonucleotide
cuuggcaagauaauaaaag

SEQ ID NO: 3283170 - RNA, 19 nt, Artificial Sequence
  Description of Artificial Sequence: Synthetic oligonucleotide
auagaaaaugauuacaaau

SEQ ID NO: 3283171 - RNA, 19 nt, Artificial Sequence
  Description of Artificial Sequence: Synthetic oligonucleotide
auccaugugagcuauacag

SEQ ID NO: 3283172 - RNA, 19 nt, Artificial Sequence
  Description of Artificial Sequence: Synthetic oligonucleotide
acagaguuugcacaaauag

SEQ ID NO: 3283173 - RNA, 19 nt, Artificial Sequence
  Description of Artificial Sequence: Synthetic oligonucleotide
aauauggaagaguuuugag

SEQ ID NO: 3283174 - RNA, 19 nt, Artificial Sequence
  Description of Artificial Sequence: Synthetic oligonucleotide
aaaauauuacacuuuuaaa

SEQ ID NO: 3283175 - RNA, 19 nt, Artificial Sequence
  Description of Artificial Sequence: Synthetic oligonucleotide
uuaaacauguauuuacaga

SEQ ID NO: 3283176 - RNA, 19 nt, Artificial Sequence
  Description of Artificial Sequence: Synthetic oligonucleotide
uauaaaagcuggcuaaaca

SEQ ID NO: 3283177 - RNA, 19 nt, Artificial Sequence
  Description of Artificial Sequence: Synthetic oligonucleotide
auaauaaaagcuuccccuc

SEQ ID NO: 3283178 - RNA, 19 nt, Artificial Sequence
  Description of Artificial Sequence: Synthetic oligonucleotide
aauaaaagcuuccccucuc

SEQ ID NO: 3283179 - RNA, 19 nt, Artificial Sequence
  Description of Artificial Sequence: Synthetic oligonucleotide
uuuuaaacauguauuuaca

SEQ ID NO: 3283180 - RNA, 19 nt, Artificial Sequence
  Description of Artificial Sequence: Synthetic oligonucleotide
uguacaaaauauuacacuu

SEQ ID NO: 3283181 - RNA, 19 nt, Artificial Sequence
  Description of Artificial Sequence: Synthetic oligonucleotide
uacacuuuuaaacauguau

SEQ ID NO: 3283182 - RNA, 19 nt, Artificial Sequence
  Description of Artificial Sequence: Synthetic oligonucleotide
caaauuacaaccaggcuug

SEQ ID NO: 3283183 - RNA, 19 nt, Artificial Sequence
  Description of Artificial Sequence: Synthetic oligonucleotide
acaaauuacaaccaggcuu

SEQ ID NO: 3283184 - RNA, 19 nt, Artificial Sequence
  Description of Artificial Sequence: Synthetic oligonucleotide
ugaagaauauggaagaguu

SEQ ID NO: 3283185 - RNA, 19 nt, Artificial Sequence
  Description of Artificial Sequence: Synthetic oligonucleotide
uuugaguucccuuuguucu

SEQ ID NO: 3283186 - RNA, 19 nt, Artificial Sequence
  Description of Artificial Sequence: Synthetic oligonucleotide
aacagacccacucagccag

SEQ ID NO: 3283187 - RNA, 19 nt, Artificial Sequence
  Description of Artificial Sequence: Synthetic oligonucleotide
aauagaaaaugauuacaaa

SEQ ID NO: 3283188 - RNA, 19 nt, Artificial Sequence
  Description of Artificial Sequence: Synthetic oligonucleotide
uuggcaagauaauaaaagc

SEQ ID NO: 3283189 - RNA, 19 nt, Artificial Sequence
  Description of Artificial Sequence: Synthetic oligonucleotide
gauuacaaauuacaaccag

SEQ ID NO: 3283190 - RNA, 19 nt, Artificial Sequence
  Description of Artificial Sequence: Synthetic oligonucleotide
aaaagcuggcuaaacaccg

SEQ ID NO: 3283191 - RNA, 19 nt, Artificial Sequence
  Description of Artificial Sequence: Synthetic oligonucleotide
gaaacagacccacucagcc

SEQ ID NO: 3283192 - RNA, 19 nt, Artificial Sequence
  Description of Artificial Sequence: Synthetic oligonucleotide
uaaaagcuggcuaaacacc

SEQ ID NO: 3283193 - RNA, 19 nt, Artificial Sequence
  Description of Artificial Sequence: Synthetic oligonucleotide
uauuacacuuuuaaacaug

SEQ ID NO: 3283194 - RNA, 19 nt, Artificial Sequence
  Description of Artificial Sequence: Synthetic oligonucleotide
gauaauaaaagcuuccccu

SEQ ID NO: 3283195 - RNA, 19 nt, Artificial Sequence
  Description of Artificial Sequence: Synthetic oligonucleotide
uauggaagaguuuugaguu

SEQ ID NO: 3283196 - RNA, 19 nt, Artificial Sequence
  Description of Artificial Sequence: Synthetic oligonucleotide
ugugucuuguacaaaauau

SEQ ID NO: 3283197 - RNA, 19 nt, Artificial Sequence
  Description of Artificial Sequence: Synthetic oligonucleotide
aaauagaaaaugauuacaa

SEQ ID NO: 3283198 - RNA, 19 nt, Artificial Sequence
  Description of Artificial Sequence: Synthetic oligonucleotide
auuacaaccaggcuuggca

SEQ ID NO: 3283199 - RNA, 19 nt, Artificial Sequence
  Description of Artificial Sequence: Synthetic oligonucleotide
aagaauauggaagaguuuu

SEQ ID NO: 3283200 - RNA, 19 nt, Artificial Sequence
  Description of Artificial Sequence: Synthetic oligonucleotide
caagauaauaaaagcuucc

SEQ ID NO: 3283201 - RNA, 19 nt, Artificial Sequence
  Description of Artificial Sequence: Synthetic oligonucleotide
augauugcuccauauuuac

SEQ ID NO: 3283202 - RNA, 19 nt, Artificial Sequence
  Description of Artificial Sequence: Synthetic oligonucleotide
uauuuacagaguuugcaca

SEQ ID NO: 3283203 - RNA, 19 nt, Artificial Sequence
  Description of Artificial Sequence: Synthetic oligonucleotide
aacucagaaacagacccac

SEQ ID NO: 3283204 - RNA, 19 nt, Artificial Sequence
  Description of Artificial Sequence: Synthetic oligonucleotide
uggaggaaguguauaaaag

SEQ ID NO: 3283205 - RNA, 19 nt, Artificial Sequence
  Description of Artificial Sequence: Synthetic oligonucleotide
auaaaagcuuccccucucc

SEQ ID NO: 3283206 - RNA, 19 nt, Artificial Sequence
  Description of Artificial Sequence: Synthetic oligonucleotide
uggcaagauaauaaaagcu

SEQ ID NO: 3283207 - RNA, 19 nt, Artificial Sequence
  Description of Artificial Sequence: Synthetic oligonucleotide
auuacaaauuacaaccagg

SEQ ID NO: 3283208 - RNA, 19 nt, Artificial Sequence
  Description of Artificial Sequence: Synthetic oligonucleotide
uuguacaaaauauuacacu

SEQ ID NO: 3283209 - RNA, 19 nt, Artificial Sequence
  Description of Artificial Sequence: Synthetic oligonucleotide
uguauuuacagaguuugca

SEQ ID NO: 3283210 - RNA, 19 nt, Artificial Sequence
  Description of Artificial Sequence: Synthetic oligonucleotide
cauguauuuacagaguuug

SEQ ID NO: 3283211 - RNA, 19 nt, Artificial Sequence
  Description of Artificial Sequence: Synthetic oligonucleotide
ugauuacaaauuacaacca

SEQ ID NO: 3283212 - RNA, 19 nt, Artificial Sequence
  Description of Artificial Sequence: Synthetic oligonucleotide
uuugcacaaauagaaaaug

SEQ ID NO: 3283213 - RNA, 19 nt, Artificial Sequence
  Description of Artificial Sequence: Synthetic oligonucleotide
ugucuuguacaaaauauua

SEQ ID NO: 3283214 - RNA, 19 nt, Artificial Sequence
  Description of Artificial Sequence: Synthetic oligonucleotide
uacaaaauauuacacuuuu

SEQ ID NO: 3283215 - RNA, 19 nt, Artificial Sequence
  Description of Artificial Sequence: Synthetic oligonucleotide
aguuugcacaaauagaaaa

SEQ ID NO: 3283216 - RNA, 19 nt, Artificial Sequence
  Description of Artificial Sequence: Synthetic oligonucleotide
caucaacucagaaacagac

SEQ ID NO: 3283217 - RNA, 19 nt, Artificial Sequence
  Description of Artificial Sequence: Synthetic oligonucleotide
uuuacaucuauguuuuaaa

SEQ ID NO: 3283218 - RNA, 19 nt, Artificial Sequence
  Description of Artificial Sequence: Synthetic oligonucleotide
uauacagggguugauacca

SEQ ID NO: 3283219 - RNA, 19 nt, Artificial Sequence
  Description of Artificial Sequence: Synthetic oligonucleotide
caaaauauuacacuuuuaa

SEQ ID NO: 3283220 - RNA, 19 nt, Artificial Sequence
  Description of Artificial Sequence: Synthetic oligonucleotide
uccaugugagcuauacagg

SEQ ID NO: 3283221 - RNA, 19 nt, Artificial Sequence
  Description of Artificial Sequence: Synthetic oligonucleotide
cacaaauagaaaaugauua

SEQ ID NO: 3283222 - RNA, 19 nt, Artificial Sequence
  Description of Artificial Sequence: Synthetic oligonucleotide
agaaaaugauuacaaauua

SEQ ID NO: 3283223 - RNA, 19 nt, Artificial Sequence
  Description of Artificial Sequence: Synthetic oligonucleotide
ugcacaaauagaaaaugau

SEQ ID NO: 3283224 - RNA, 19 nt, Artificial Sequence
  Description of Artificial Sequence: Synthetic oligonucleotide
ugaugauugcuccauauuu

SEQ ID NO: 3283225 - RNA, 19 nt, Artificial Sequence
  Description of Artificial Sequence: Synthetic oligonucleotide
uugcacaaauagaaaauga

SEQ ID NO: 3283226 - RNA, 19 nt, Artificial Sequence
  Description of Artificial Sequence: Synthetic oligonucleotide
gaaaaugauuacaaauuac

SEQ ID NO: 3283227 - RNA, 19 nt, Artificial Sequence
  Description of Artificial Sequence: Synthetic oligonucleotide
uccaucaacucagaaacag

SEQ ID NO: 3283228 - RNA, 19 nt, Artificial Sequence
  Description of Artificial Sequence: Synthetic oligonucleotide
aaagcuuccccucucccca

SEQ ID NO: 3283229 - RNA, 19 nt, Artificial Sequence
  Description of Artificial Sequence: Synthetic oligonucleotide
aaacaccgucaauccaucc

SEQ ID NO: 3283230 - RNA, 19 nt, Artificial Sequence
  Description of Artificial Sequence: Synthetic oligonucleotide
aaaugauuacaaauuacaa

SEQ ID NO: 3283231 - RNA, 19 nt, Artificial Sequence
  Description of Artificial Sequence: Synthetic oligonucleotide
guugauaccagccggccag

SEQ ID NO: 3283232 - RNA, 19 nt, Artificial Sequence
  Description of Artificial Sequence: Synthetic oligonucleotide
ucagaaacagacccacuca

SEQ ID NO: 3283233 - RNA, 19 nt, Artificial Sequence
  Description of Artificial Sequence: Synthetic oligonucleotide
guauuuacagaguuugcac

SEQ ID NO: 3283234 - RNA, 19 nt, Artificial Sequence
  Description of Artificial Sequence: Synthetic oligonucleotide
ucugagcuccuacagaccu

SEQ ID NO: 3283235 - RNA, 19 nt, Artificial Sequence
  Description of Artificial Sequence: Synthetic oligonucleotide
uaauaaaagcuuccccucu

SEQ ID NO: 3283236 - RNA, 19 nt, Artificial Sequence
  Description of Artificial Sequence: Synthetic oligonucleotide
aauuacaaccaggcuuggc

SEQ ID NO: 3283237 - RNA, 19 nt, Artificial Sequence
  Description of Artificial Sequence: Synthetic oligonucleotide
aacaccgucaauccaucca

SEQ ID NO: 3283238 - RNA, 19 nt, Artificial Sequence
  Description of Artificial Sequence: Synthetic oligonucleotide
aaguguauaaaagcuggcu

SEQ ID NO: 3283239 - RNA, 19 nt, Artificial Sequence
  Description of Artificial Sequence: Synthetic oligonucleotide
uuacaucuauguuuuaaaa

SEQ ID NO: 3283240 - RNA, 19 nt, Artificial Sequence
  Description of Artificial Sequence: Synthetic oligonucleotide
agaguuugcacaaauagaa

SEQ ID NO: 3283241 - RNA, 19 nt, Artificial Sequence
  Description of Artificial Sequence: Synthetic oligonucleotide
aagcuggcuaaacaccguc

SEQ ID NO: 3283242 - RNA, 19 nt, Artificial Sequence
  Description of Artificial Sequence: Synthetic oligonucleotide
uuuugaguucccuuuguuc

SEQ ID NO: 3283243 - RNA, 19 nt, Artificial Sequence
  Description of Artificial Sequence: Synthetic oligonucleotide
uggacuucuauuuccggug

SEQ ID NO: 3283244 - RNA, 19 nt, Artificial Sequence
  Description of Artificial Sequence: Synthetic oligonucleotide
auauuacacuuuuaaacau

SEQ ID NO: 3283245 - RNA, 19 nt, Artificial Sequence
  Description of Artificial Sequence: Synthetic oligonucleotide
ucaggugugaugauugcuc

SEQ ID NO: 3283246 - RNA, 19 nt, Artificial Sequence
  Description of Artificial Sequence: Synthetic oligonucleotide
uacaaauuacaaccaggcu

SEQ ID NO: 3283247 - RNA, 19 nt, Artificial Sequence
  Description of Artificial Sequence: Synthetic oligonucleotide
auugcuccauauuuacauc

SEQ ID NO: 3283248 - RNA, 19 nt, Artificial Sequence
  Description of Artificial Sequence: Synthetic oligonucleotide
ggaggaaguguauaaaagc

SEQ ID NO: 3283249 - RNA, 19 nt, Artificial Sequence
  Description of Artificial Sequence: Synthetic oligonucleotide
aucucugugaguuugaggc

SEQ ID NO: 3283250 - RNA, 19 nt, Artificial Sequence
  Description of Artificial Sequence: Synthetic oligonucleotide
aaaacauuaacuuacuuuu

SEQ ID NO: 3283251 - RNA, 19 nt, Artificial Sequence
  Description of Artificial Sequence: Synthetic oligonucleotide
uuuaauuuaauuuuaguuu

SEQ ID NO: 3283252 - RNA, 19 nt, Artificial Sequence
  Description of Artificial Sequence: Synthetic oligonucleotide
uuuuauuuaauuuaauuuu

SEQ ID NO: 3283253 - RNA, 19 nt, Artificial Sequence
  Description of Artificial Sequence: Synthetic oligonucleotide
uuauuuaauuuaauuuuag

SEQ ID NO: 3283254 - RNA, 19 nt, Artificial Sequence
  Description of Artificial Sequence: Synthetic oligonucleotide
auuuaauuuaauuuuaguu

SEQ ID NO: 3283255 - RNA, 19 nt, Artificial Sequence
  Description of Artificial Sequence: Synthetic oligonucleotide
aaucccagcacuugggagg

SEQ ID NO: 3283256 - RNA, 19 nt, Artificial Sequence
  Description of Artificial Sequence: Synthetic oligonucleotide
uuuauuuaauuuaauuuua

SEQ ID NO: 3283257 - RNA, 19 nt, Artificial Sequence
  Description of Artificial Sequence: Synthetic oligonucleotide
uuuaaucccagcacuuggg

SEQ ID NO: 3283258 - RNA, 19 nt, Artificial Sequence
  Description of Artificial Sequence: Synthetic oligonucleotide
uuguuauaggguaugcucc

SEQ ID NO: 3283259 - RNA, 19 nt, Artificial Sequence
  Description of Artificial Sequence: Synthetic oligonucleotide
uaggguaugcuccagaggu

SEQ ID NO: 3283260 - RNA, 19 nt, Artificial Sequence
  Description of Artificial Sequence: Synthetic oligonucleotide
uagucuggucuauagaggg

SEQ ID NO: 3283261 - RNA, 19 nt, Artificial Sequence
  Description of Artificial Sequence: Synthetic oligonucleotide
agguguuccacagagaaac

SEQ ID NO: 3283262 - RNA, 19 nt, Artificial Sequence
  Description of Artificial Sequence: Synthetic oligonucleotide
uuugaggcuagucuggucu

SEQ ID NO: 3283263 - RNA, 19 nt, Artificial Sequence
  Description of Artificial Sequence: Synthetic oligonucleotide
uauuuaauuuaauuuuagu

SEQ ID NO: 3283264 - RNA, 19 nt, Artificial Sequence
  Description of Artificial Sequence: Synthetic oligonucleotide
agagggaguuguuauaggg

SEQ ID NO: 3283265 - RNA, 19 nt, Artificial Sequence
  Description of Artificial Sequence: Synthetic oligonucleotide
ugaguuugaggcuagucug

SEQ ID NO: 3283266 - RNA, 19 nt, Artificial Sequence
  Description of Artificial Sequence: Synthetic oligonucleotide
uggcacaugccuuuaaucc

SEQ ID NO: 3283267 - RNA, 19 nt, Artificial Sequence
  Description of Artificial Sequence: Synthetic oligonucleotide
uauaggguaugcuccagag

SEQ ID NO: 3283268 - RNA, 19 nt, Artificial Sequence
  Description of Artificial Sequence: Synthetic oligonucleotide
guuguuauaggguaugcuc

SEQ ID NO: 3283269 - RNA, 19 nt, Artificial Sequence
  Description of Artificial Sequence: Synthetic oligonucleotide
cuuuaaucccagcacuugg

SEQ ID NO: 3283270 - RNA, 19 nt, Artificial Sequence
  Description of Artificial Sequence: Synthetic oligonucleotide
augccuuuaaucccagcac

SEQ ID NO: 3283271 - RNA, 19 nt, Artificial Sequence
  Description of Artificial Sequence: Synthetic oligonucleotide
cuagucuggucuauagagg

SEQ ID NO: 3283272 - RNA, 19 nt, Artificial Sequence
  Description of Artificial Sequence: Synthetic oligonucleotide
agagguguuccacagagaa

SEQ ID NO: 3283273 - RNA, 19 nt, Artificial Sequence
  Description of Artificial Sequence: Synthetic oligonucleotide
uguuccacagagaaacccu

SEQ ID NO: 3283274 - RNA, 19 nt, Artificial Sequence
  Description of Artificial Sequence: Synthetic oligonucleotide
aggaggugguggcacaugc

SEQ ID NO: 3283275 - RNA, 19 nt, Artificial Sequence
  Description of Artificial Sequence: Synthetic oligonucleotide
gcuagucuggucuauagag

SEQ ID NO: 3283276 - RNA, 19 nt, Artificial Sequence
  Description of Artificial Sequence: Synthetic oligonucleotide
auagagggaguuguuauag

SEQ ID NO: 3283277 - RNA, 19 nt, Artificial Sequence
  Description of Artificial Sequence: Synthetic oligonucleotide
uguuauaggguaugcucca

SEQ ID NO: 3283278 - RNA, 19 nt, Artificial Sequence
  Description of Artificial Sequence: Synthetic oligonucleotide
uuaaucccagcacuuggga

SEQ ID NO: 3283279 - RNA, 19 nt, Artificial Sequence
  Description of Artificial Sequence: Synthetic oligonucleotide
gaucucugugaguuugagg

SEQ ID NO: 3283280 - RNA, 19 nt, Artificial Sequence
  Description of Artificial Sequence: Synthetic oligonucleotide
ugccuuuaaucccagcacu

SEQ ID NO: 3283281 - RNA, 19 nt, Artificial Sequence
  Description of Artificial Sequence: Synthetic oligonucleotide
uaaucccagcacuugggag

SEQ ID NO: 3283282 - RNA, 19 nt, Artificial Sequence
  Description of Artificial Sequence: Synthetic oligonucleotide
agaaacccugucuugaaaa

SEQ ID NO: 3283283 - RNA, 19 nt, Artificial Sequence
  Description of Artificial Sequence: Synthetic oligonucleotide
auaggguaugcuccagagg

SEQ ID NO: 3283284 - RNA, 19 nt, Artificial Sequence
  Description of Artificial Sequence: Synthetic oligonucleotide
uuauaggguaugcuccaga

SEQ ID NO: 3283285 - RNA, 19 nt, Artificial Sequence
  Description of Artificial Sequence: Synthetic oligonucleotide
uagagggaguuguuauagg

SEQ ID NO: 3283286 - RNA, 19 nt, Artificial Sequence
  Description of Artificial Sequence: Synthetic oligonucleotide
caugccuuuaaucccagca

SEQ ID NO: 3283287 - RNA, 19 nt, Artificial Sequence
  Description of Artificial Sequence: Synthetic oligonucleotide
gaguuugaggcuagucugg

SEQ ID NO: 3283288 - RNA, 19 nt, Artificial Sequence
  Description of Artificial Sequence: Synthetic oligonucleotide
ucugugaguuugaggcuag

SEQ ID NO: 3283289 - RNA, 19 nt, Artificial Sequence
  Description of Artificial Sequence: Synthetic oligonucleotide
acagagaaacccugucuug

SEQ ID NO: 3283290 - RNA, 19 nt, Artificial Sequence
  Description of Artificial Sequence: Synthetic oligonucleotide
uaugcuccagagguguucc

SEQ ID NO: 3283291 - RNA, 19 nt, Artificial Sequence
  Description of Artificial Sequence: Synthetic oligonucleotide
uauagagggaguuguuaua

SEQ ID NO: 3283292 - RNA, 19 nt, Artificial Sequence
  Description of Artificial Sequence: Synthetic oligonucleotide
agggaguuguuauagggua

SEQ ID NO: 3283293 - RNA, 19 nt, Artificial Sequence
  Description of Artificial Sequence: Synthetic oligonucleotide
ucuauagagggaguuguua

SEQ ID NO: 3283294 - RNA, 19 nt, Artificial Sequence
  Description of Artificial Sequence: Synthetic oligonucleotide
gucuggucuauagagggag

SEQ ID NO: 3283295 - RNA, 19 nt, Artificial Sequence
  Description of Artificial Sequence: Synthetic oligonucleotide
acuugggaggcagaggcag

SEQ ID NO: 3283296 - RNA, 19 nt, Artificial Sequence
  Description of Artificial Sequence: Synthetic oligonucleotide
uccacagagaaacccuguc

SEQ ID NO: 3283297 - RNA, 19 nt, Artificial Sequence
  Description of Artificial Sequence: Synthetic oligonucleotide
aggcuagucuggucuauag

SEQ ID NO: 3283298 - RNA, 19 nt, Artificial Sequence
  Description of Artificial Sequence: Synthetic oligonucleotide
gcacuugggaggcagaggc

SEQ ID NO: 3283299 - RNA, 19 nt, Artificial Sequence
  Description of Artificial Sequence: Synthetic oligonucleotide
aguuguuauaggguaugcu

SEQ ID NO: 3283300 - RNA, 19 nt, Artificial Sequence
  Description of Artificial Sequence: Synthetic oligonucleotide
acaugccuuuaaucccagc

SEQ ID NO: 3283301 - RNA, 19 nt, Artificial Sequence
  Description of Artificial Sequence: Synthetic oligonucleotide
ggcacaugccuuuaauccc

SEQ ID NO: 3283302 - RNA, 19 nt, Artificial Sequence
  Description of Artificial Sequence: Synthetic oligonucleotide
aucccagcacuugggaggc

SEQ ID NO: 3283303 - RNA, 19 nt, Artificial Sequence
  Description of Artificial Sequence: Synthetic oligonucleotide
uggucuauagagggaguug

SEQ ID NO: 3283304 - RNA, 19 nt, Artificial Sequence
  Description of Artificial Sequence: Synthetic oligonucleotide
gugaguuugaggcuagucu

SEQ ID NO: 3283305 - RNA, 19 nt, Artificial Sequence
  Description of Artificial Sequence: Synthetic oligonucleotide
uuccacagagaaacccugu

SEQ ID NO: 3283306 - RNA, 19 nt, Artificial Sequence
  Description of Artificial Sequence: Synthetic oligonucleotide
guguuccacagagaaaccc

SEQ ID NO: 3283307 - RNA, 19 nt, Artificial Sequence
  Description of Artificial Sequence: Synthetic oligonucleotide
ucucugugaguuugaggcu

SEQ ID NO: 3283308 - RNA, 19 nt, Artificial Sequence
  Description of Artificial Sequence: Synthetic oligonucleotide
cuccagagguguuccacag

SEQ ID NO: 3283309 - RNA, 19 nt, Artificial Sequence
  Description of Artificial Sequence: Synthetic oligonucleotide
gaguuguuauaggguaugc

SEQ ID NO: 3283310 - RNA, 19 nt, Artificial Sequence
  Description of Artificial Sequence: Synthetic oligonucleotide
ucuggucuauagagggagu

SEQ ID NO: 3283311 - RNA, 19 nt, Artificial Sequence
  Description of Artificial Sequence: Synthetic oligonucleotide
ugugaguuugaggcuaguc

SEQ ID NO: 3283312 - RNA, 19 nt, Artificial Sequence
  Description of Artificial Sequence: Synthetic oligonucleotide
ccagagguguuccacagag

SEQ ID NO: 3283313 - RNA, 19 nt, Artificial Sequence
  Description of Artificial Sequence: Synthetic oligonucleotide
agagaaacccugucuugaa

SEQ ID NO: 3283314 - RNA, 19 nt, Artificial Sequence
  Description of Artificial Sequence: Synthetic oligonucleotide
aggcagguggaucucugug

SEQ ID NO: 3283315 - RNA, 19 nt, Artificial Sequence
  Description of Artificial Sequence: Synthetic oligonucleotide
guggaucucugugaguuug

SEQ ID NO: 3283316 - RNA, 19 nt, Artificial Sequence
  Description of Artificial Sequence: Synthetic oligonucleotide
cuugggaggcagaggcagg

SEQ ID NO: 3283317 - RNA, 19 nt, Artificial Sequence
  Description of Artificial Sequence: Synthetic oligonucleotide
agguggaucucugugaguu

SEQ ID NO: 3283318 - RNA, 19 nt, Artificial Sequence
  Description of Artificial Sequence: Synthetic oligonucleotide
guggcacaugccuuuaauc

SEQ ID NO: 3283319 - RNA, 19 nt, Artificial Sequence
  Description of Artificial Sequence: Synthetic oligonucleotide
uggaucucugugaguuuga

SEQ ID NO: 3283320 - RNA, 19 nt, Artificial Sequence
  Description of Artificial Sequence: Synthetic oligonucleotide
gggaggcagaggcaggugg

SEQ ID NO: 3283321 - RNA, 19 nt, Artificial Sequence
  Description of Artificial Sequence: Synthetic oligonucleotide
guuccacagagaaacccug

SEQ ID NO: 3283322 - RNA, 19 nt, Artificial Sequence
  Description of Artificial Sequence: Synthetic oligonucleotide
guuauaggguaugcuccag

SEQ ID NO: 3283323 - RNA, 19 nt, Artificial Sequence
  Description of Artificial Sequence: Synthetic oligonucleotide
uccagagguguuccacaga

SEQ ID NO: 3283324 - RNA, 19 nt, Artificial Sequence
  Description of Artificial Sequence: Synthetic oligonucleotide
gcagguggaucucugugag

SEQ ID NO: 3283325 - RNA, 19 nt, Artificial Sequence
  Description of Artificial Sequence: Synthetic oligonucleotide
gagaaacccugucuugaaa

SEQ ID NO: 3283326 - RNA, 19 nt, Artificial Sequence
  Description of Artificial Sequence: Synthetic oligonucleotide
agcacuugggaggcagagg

SEQ ID NO: 3283327 - RNA, 19 nt, Artificial Sequence
  Description of Artificial Sequence: Synthetic oligonucleotide
gaggugguggcacaugccu

SEQ ID NO: 3283328 - RNA, 19 nt, Artificial Sequence
  Description of Artificial Sequence: Synthetic oligonucleotide
cuauagagggaguuguuau

SEQ ID NO: 3283329 - RNA, 19 nt, Artificial Sequence
  Description of Artificial Sequence: Synthetic oligonucleotide
ggaguuguuauaggguaug

SEQ ID NO: 3283330 - RNA, 19 nt, Artificial Sequence
  Description of Artificial Sequence: Synthetic oligonucleotide
aguuugaggcuagucuggu

SEQ ID NO: 3283331 - RNA, 19 nt, Artificial Sequence
  Description of Artificial Sequence: Synthetic oligonucleotide
ugcuccagagguguuccac

SEQ ID NO: 3283332 - RNA, 19 nt, Artificial Sequence
  Description of Artificial Sequence: Synthetic oligonucleotide
cacaugccuuuaaucccag

SEQ ID NO: 3283333 - RNA, 19 nt, Artificial Sequence
  Description of Artificial Sequence: Synthetic oligonucleotide
cagagaaacccugucuuga

SEQ ID NO: 3283334 - RNA, 19 nt, Artificial Sequence
  Description of Artificial Sequence: Synthetic oligonucleotide
uugggaggcagaggcaggu

SEQ ID NO: 3283335 - RNA, 19 nt, Artificial Sequence
  Description of Artificial Sequence: Synthetic oligonucleotide
uugaggcuagucuggucua

SEQ ID NO: 3283336 - RNA, 19 nt, Artificial Sequence
  Description of Artificial Sequence: Synthetic oligonucleotide
guuugaggcuagucugguc

SEQ ID NO: 3283337 - RNA, 19 nt, Artificial Sequence
  Description of Artificial Sequence: Synthetic oligonucleotide
gagggaguuguuauagggu

SEQ ID NO: 3283338 - RNA, 19 nt, Artificial Sequence
  Description of Artificial Sequence: Synthetic oligonucleotide
guaugcuccagagguguuc

SEQ ID NO: 3283339 - RNA, 19 nt, Artificial Sequence
  Description of Artificial Sequence: Synthetic oligonucleotide
aggcagaggcagguggauc

SEQ ID NO: 3283340 - RNA, 19 nt, Artificial Sequence
  Description of Artificial Sequence: Synthetic oligonucleotide
cagcacuugggaggcagag

SEQ ID NO: 3283341 - RNA, 19 nt, Artificial Sequence
  Description of Artificial Sequence: Synthetic oligonucleotide
ggcagguggaucucuguga

SEQ ID NO: 3283342 - RNA, 19 nt, Artificial Sequence
  Description of Artificial Sequence: Synthetic oligonucleotide
cacagagaaacccugucuu

SEQ ID NO: 3283343 - RNA, 19 nt, Artificial Sequence
  Description of Artificial Sequence: Synthetic oligonucleotide
ggaucucugugaguuugag

SEQ ID NO: 3283344 - RNA, 19 nt, Artificial Sequence
  Description of Artificial Sequence: Synthetic oligonucleotide
agucuggucuauagaggga

SEQ ID NO: 3283345 - RNA, 19 nt, Artificial Sequence
  Description of Artificial Sequence: Synthetic oligonucleotide
ugguggcacaugccuuuaa

SEQ ID NO: 3283346 - RNA, 19 nt, Artificial Sequence
  Description of Artificial Sequence: Synthetic oligonucleotide
agaggcagguggaucucug

SEQ ID NO: 3283347 - RNA, 19 nt, Artificial Sequence
  Description of Artificial Sequence: Synthetic oligonucleotide
ccuuuaaucccagcacuug

SEQ ID NO: 3283348 - RNA, 19 nt, Artificial Sequence
  Description of Artificial Sequence: Synthetic oligonucleotide
ugaggcuagucuggucuau

SEQ ID NO: 3283349 - RNA, 19 nt, Artificial Sequence
  Description of Artificial Sequence: Synthetic oligonucleotide
ucuuucuucaucuucauca

SEQ ID NO: 3283350 - RNA, 19 nt, Artificial Sequence
  Description of Artificial Sequence: Synthetic oligonucleotide
aucacuggcauucagaguc

SEQ ID NO: 3283351 - RNA, 19 nt, Artificial Sequence
  Description of Artificial Sequence: Synthetic oligonucleotide
uucauugcgaaguuguucg

SEQ ID NO: 3283352 - RNA, 19 nt, Artificial Sequence
  Description of Artificial Sequence: Synthetic oligonucleotide
ucaauggugaaaugaaccg

SEQ ID NO: 3283353 - RNA, 19 nt, Artificial Sequence
  Description of Artificial Sequence: Synthetic oligonucleotide
uucaauggugaaaugaacc

SEQ ID NO: 3283354 - RNA, 19 nt, Artificial Sequence
  Description of Artificial Sequence: Synthetic oligonucleotide
agaacgaagacgcuggcgg

SEQ ID NO: 3283355 - RNA, 19 nt, Artificial Sequence
  Description of Artificial Sequence: Synthetic oligonucleotide
ucuucuuuugcucggaagc

SEQ ID NO: 3283356 - RNA, 19 nt, Artificial Sequence
  Description of Artificial Sequence: Synthetic oligonucleotide
aaguuguucgcacaggaug

SEQ ID NO: 3283357 - RNA, 19 nt, Artificial Sequence
  Description of Artificial Sequence: Synthetic oligonucleotide
agauuuagguccucgggcc

SEQ ID NO: 3283358 - RNA, 19 nt, Artificial Sequence
  Description of Artificial Sequence: Synthetic oligonucleotide
uucuucaucuucaucaucu

SEQ ID NO: 3283359 - RNA, 19 nt, Artificial Sequence
  Description of Artificial Sequence: Synthetic oligonucleotide
ggauguggcauacagaacg

SEQ ID NO: 3283360 - RNA, 19 nt, Artificial Sequence
  Description of Artificial Sequence: Synthetic oligonucleotide
uuugcuuuguccuucuucu

SEQ ID NO: 3283361 - RNA, 19 nt, Artificial Sequence
  Description of Artificial Sequence: Synthetic oligonucleotide
gauccuaguaaugacggcg

SEQ ID NO: 3283362 - RNA, 19 nt, Artificial Sequence
  Description of Artificial Sequence: Synthetic oligonucleotide
gaugauccuaguaaugacg

SEQ ID NO: 3283363 - RNA, 19 nt, Artificial Sequence
  Description of Artificial Sequence: Synthetic oligonucleotide
uuucgcuucccuuucauug

SEQ ID NO: 3283364 - RNA, 19 nt, Artificial Sequence
  Description of Artificial Sequence: Synthetic oligonucleotide
ucuuccauggcugacagca

SEQ ID NO: 3283365 - RNA, 19 nt, Artificial Sequence
  Description of Artificial Sequence: Synthetic oligonucleotide
aguaaugacggcguugggc

SEQ ID NO: 3283366 - RNA, 19 nt, Artificial Sequence
  Description of Artificial Sequence: Synthetic oligonucleotide
aaaugaaccgcuggaacuc

SEQ ID NO: 3283367 - RNA, 19 nt, Artificial Sequence
  Description of Artificial Sequence: Synthetic oligonucleotide
ucaguugucuacuuccucc

SEQ ID NO: 3283368 - RNA, 19 nt, Artificial Sequence
  Description of Artificial Sequence: Synthetic oligonucleotide
auucucucgacucaguugu

SEQ ID NO: 3283369 - RNA, 19 nt, Artificial Sequence
  Description of Artificial Sequence: Synthetic oligonucleotide
uguggcauacagaacgaag

SEQ ID NO: 3283370 - RNA, 19 nt, Artificial Sequence
  Description of Artificial Sequence: Synthetic oligonucleotide
ucuuucaauggugaaauga

SEQ ID NO: 3283371 - RNA, 19 nt, Artificial Sequence
  Description of Artificial Sequence: Synthetic oligonucleotide
gacucaguugucuacuucc

SEQ ID NO: 3283372 - RNA, 19 nt, Artificial Sequence
  Description of Artificial Sequence: Synthetic oligonucleotide
ugaaaugaaccgcuggaac

SEQ ID NO: 3283373 - RNA, 19 nt, Artificial Sequence
  Description of Artificial Sequence: Synthetic oligonucleotide
acaucacuggcauucagag

SEQ ID NO: 3283374 - RNA, 19 nt, Artificial Sequence
  Description of Artificial Sequence: Synthetic oligonucleotide
uccuugaugauccuaguaa

SEQ ID NO: 3283375 - RNA, 19 nt, Artificial Sequence
  Description of Artificial Sequence: Synthetic oligonucleotide
uccuuggagauguugacgc

SEQ ID NO: 3283376 - RNA, 19 nt, Artificial Sequence
  Description of Artificial Sequence: Synthetic oligonucleotide
auugcgaaguuguucgcac

SEQ ID NO: 3283377 - RNA, 19 nt, Artificial Sequence
  Description of Artificial Sequence: Synthetic oligonucleotide
guugggcagauuuaggucc

SEQ ID NO: 3283378 - RNA, 19 nt, Artificial Sequence
  Description of Artificial Sequence: Synthetic oligonucleotide
ucaucuuccucccugcucu

SEQ ID NO: 3283379 - RNA, 19 nt, Artificial Sequence
  Description of Artificial Sequence: Synthetic oligonucleotide
uagucuuucuucaucuuca

SEQ ID NO: 3283380 - RNA, 19 nt, Artificial Sequence
  Description of Artificial Sequence: Synthetic oligonucleotide
gagauguugacgccguccg

SEQ ID NO: 3283381 - RNA, 19 nt, Artificial Sequence
  Description of Artificial Sequence: Synthetic oligonucleotide
uucaucaucuuccucccug

SEQ ID NO: 3283382 - RNA, 19 nt, Artificial Sequence
  Description of Artificial Sequence: Synthetic oligonucleotide
cuaguaaugacggcguugg

SEQ ID NO: 3283383 - RNA, 19 nt, Artificial Sequence
  Description of Artificial Sequence: Synthetic oligonucleotide
ucuagggcuucuuucaaug

SEQ ID NO: 3283384 - RNA, 19 nt, Artificial Sequence
  Description of Artificial Sequence: Synthetic oligonucleotide
agcgcuuccuugaugaucc

SEQ ID NO: 3283385 - RNA, 19 nt, Artificial Sequence
  Description of Artificial Sequence: Synthetic oligonucleotide
uugaugauccuaguaauga

SEQ ID NO: 3283386 - RNA, 19 nt, Artificial Sequence
  Description of Artificial Sequence: Synthetic oligonucleotide
uggugaaaugaaccgcugg

SEQ ID NO: 3283387 - RNA, 19 nt, Artificial Sequence
  Description of Artificial Sequence: Synthetic oligonucleotide
aauggugaaaugaaccgcu

SEQ ID NO: 3283388 - RNA, 19 nt, Artificial Sequence
  Description of Artificial Sequence: Synthetic oligonucleotide
uucuagucuuucuucaucu

SEQ ID NO: 3283389 - RNA, 19 nt, Artificial Sequence
  Description of Artificial Sequence: Synthetic oligonucleotide
uuucaauggugaaaugaac

SEQ ID NO: 3283390 - RNA, 19 nt, Artificial Sequence
  Description of Artificial Sequence: Synthetic oligonucleotide
augauccuaguaaugacgg

SEQ ID NO: 3283391 - RNA, 19 nt, Artificial Sequence
  Description of Artificial Sequence: Synthetic oligonucleotide
gauguugacgccguccggg

SEQ ID NO: 3283392 - RNA, 19 nt, Artificial Sequence
  Description of Artificial Sequence: Synthetic oligonucleotide
cuucuugccuuucugcucc

SEQ ID NO: 3283393 - RNA, 19 nt, Artificial Sequence
  Description of Artificial Sequence: Synthetic oligonucleotide
ugcgaaguuguucgcacag

SEQ ID NO: 3283394 - RNA, 19 nt, Artificial Sequence
  Description of Artificial Sequence: Synthetic oligonucleotide
cagauuuagguccucgggc

SEQ ID NO: 3283395 - RNA, 19 nt, Artificial Sequence
  Description of Artificial Sequence: Synthetic oligonucleotide
guaaugacggcguugggca

SEQ ID NO: 3283396 - RNA, 19 nt, Artificial Sequence
  Description of Artificial Sequence: Synthetic oligonucleotide
uucccuuucauugcgaagu

SEQ ID NO: 3283397 - RNA, 19 nt, Artificial Sequence
  Description of Artificial Sequence: Synthetic oligonucleotide
aaccgcuggaacuccaucu

SEQ ID NO: 3283398 - RNA, 19 nt, Artificial Sequence
  Description of Artificial Sequence: Synthetic oligonucleotide
agcuucuagggcuucuuuc

SEQ ID NO: 3283399 - RNA, 19 nt, Artificial Sequence
  Description of Artificial Sequence: Synthetic oligonucleotide
cuugaugauccuaguaaug

SEQ ID NO: 3283400 - RNA, 19 nt, Artificial Sequence
  Description of Artificial Sequence: Synthetic oligonucleotide
auucagagucuuucgcuuc

SEQ ID NO: 3283401 - RNA, 19 nt, Artificial Sequence
  Description of Artificial Sequence: Synthetic oligonucleotide
uucuucuuuugcucggaag

SEQ ID NO: 3283402 - RNA, 19 nt, Artificial Sequence
  Description of Artificial Sequence: Synthetic oligonucleotide
uuuguccuucuucuuuugc

SEQ ID NO: 3283403 - RNA, 19 nt, Artificial Sequence
  Description of Artificial Sequence: Synthetic oligonucleotide
uucagagucuuucgcuucc

SEQ ID NO: 3283404 - RNA, 19 nt, Artificial Sequence
  Description of Artificial Sequence: Synthetic oligonucleotide
ucucuuccauggcugacag

SEQ ID NO: 3283405 - RNA, 19 nt, Artificial Sequence
  Description of Artificial Sequence: Synthetic oligonucleotide
cacaggauguggcauacag

SEQ ID NO: 3283406 - RNA, 19 nt, Artificial Sequence
  Description of Artificial Sequence: Synthetic oligonucleotide
uguucgcacaggauguggc

SEQ ID NO: 3283407 - RNA, 19 nt, Artificial Sequence
  Description of Artificial Sequence: Synthetic oligonucleotide
gcauacagaacgaagacgc

SEQ ID NO: 3283408 - RNA, 19 nt, Artificial Sequence
  Description of Artificial Sequence: Synthetic oligonucleotide
ugaugauccuaguaaugac

SEQ ID NO: 3283409 - RNA, 19 nt, Artificial Sequence
  Description of Artificial Sequence: Synthetic oligonucleotide
uucauucugcucuuccucu

SEQ ID NO: 3283410 - RNA, 19 nt, Artificial Sequence
  Description of Artificial Sequence: Synthetic oligonucleotide
uggaacuccaucucuucca

SEQ ID NO: 3283411 - RNA, 19 nt, Artificial Sequence
  Description of Artificial Sequence: Synthetic oligonucleotide
cuuucaauggugaaaugaa

SEQ ID NO: 3283412 - RNA, 19 nt, Artificial Sequence
  Description of Artificial Sequence: Synthetic oligonucleotide
uggcauacagaacgaagac

SEQ ID NO: 3283413 - RNA, 19 nt, Artificial Sequence
  Description of Artificial Sequence: Synthetic oligonucleotide
ucuuuugcucggaagcuuc

SEQ ID NO: 3283414 - RNA, 19 nt, Artificial Sequence
  Description of Artificial Sequence: Synthetic oligonucleotide
cuuggagauguugacgccg

SEQ ID NO: 3283415 - RNA, 19 nt, Artificial Sequence
  Description of Artificial Sequence: Synthetic oligonucleotide
uuguccuucuucuuuugcu

SEQ ID NO: 3283416 - RNA, 19 nt, Artificial Sequence
  Description of Artificial Sequence: Synthetic oligonucleotide
gaaaugaaccgcuggaacu

SEQ ID NO: 3283417 - RNA, 19 nt, Artificial Sequence
  Description of Artificial Sequence: Synthetic oligonucleotide
uggcauucagagucuuucg

SEQ ID NO: 3283418 - RNA, 19 nt, Artificial Sequence
  Description of Artificial Sequence: Synthetic oligonucleotide
aacgaagacgcuggcggcg

SEQ ID NO: 3283419 - RNA, 19 nt, Artificial Sequence
  Description of Artificial Sequence: Synthetic oligonucleotide
ucuucauucugcucuuccu

SEQ ID NO: 3283420 - RNA, 19 nt, Artificial Sequence
  Description of Artificial Sequence: Synthetic oligonucleotide
caggauguggcauacagaa

SEQ ID NO: 3283421 - RNA, 19 nt, Artificial Sequence
  Description of Artificial Sequence: Synthetic oligonucleotide
uucgcuucccuuucauugc

SEQ ID NO: 3283422 - RNA, 19 nt, Artificial Sequence
  Description of Artificial Sequence: Synthetic oligonucleotide
ucugcucccgccuguaagc

SEQ ID NO: 3283423 - RNA, 19 nt, Artificial Sequence
  Description of Artificial Sequence: Synthetic oligonucleotide
uucugcucccgccuguaag

SEQ ID NO: 3283424 - RNA, 19 nt, Artificial Sequence
  Description of Artificial Sequence: Synthetic oligonucleotide
uagggcuucuuucaauggu

SEQ ID NO: 3283425 - RNA, 19 nt, Artificial Sequence
  Description of Artificial Sequence: Synthetic oligonucleotide
guccuucuucuuuugcucg

SEQ ID NO: 3283426 - RNA, 19 nt, Artificial Sequence
  Description of Artificial Sequence: Synthetic oligonucleotide
uccuucuucuuuugcucgg

SEQ ID NO: 3283427 - RNA, 19 nt, Artificial Sequence
  Description of Artificial Sequence: Synthetic oligonucleotide
cuagucuuucuucaucuuc

SEQ ID NO: 3283428 - RNA, 19 nt, Artificial Sequence
  Description of Artificial Sequence: Synthetic oligonucleotide
uuccuucuugccuuucugc

SEQ ID NO: 3283429 - RNA, 19 nt, Artificial Sequence
  Description of Artificial Sequence: Synthetic oligonucleotide
uuucauugcgaaguuguuc

SEQ ID NO: 3283430 - RNA, 19 nt, Artificial Sequence
  Description of Artificial Sequence: Synthetic oligonucleotide
uuccauggcugacagcaca

SEQ ID NO: 3283431 - RNA, 19 nt, Artificial Sequence
  Description of Artificial Sequence: Synthetic oligonucleotide
cauucucucgacucaguug

SEQ ID NO: 3283432 - RNA, 19 nt, Artificial Sequence
  Description of Artificial Sequence: Synthetic oligonucleotide
ugcucuuccucuucuaguc

SEQ ID NO: 3283433 - RNA, 19 nt, Artificial Sequence
  Description of Artificial Sequence: Synthetic oligonucleotide
cuagggcuucuuucaaugg

SEQ ID NO: 3283434 - RNA, 19 nt, Artificial Sequence
  Description of Artificial Sequence: Synthetic oligonucleotide
auacagaacgaagacgcug

SEQ ID NO: 3283435 - RNA, 19 nt, Artificial Sequence
  Description of Artificial Sequence: Synthetic oligonucleotide
acagaacgaagacgcuggc

SEQ ID NO: 3283436 - RNA, 19 nt, Artificial Sequence
  Description of Artificial Sequence: Synthetic oligonucleotide
cugacagcacaucacuggc

SEQ ID NO: 3283437 - RNA, 19 nt, Artificial Sequence
  Description of Artificial Sequence: Synthetic oligonucleotide
uguccuucuucuuuugcuc

SEQ ID NO: 3283438 - RNA, 19 nt, Artificial Sequence
  Description of Artificial Sequence: Synthetic oligonucleotide
agucuuucgcuucccuuuc

SEQ ID NO: 3283439 - RNA, 19 nt, Artificial Sequence
  Description of Artificial Sequence: Synthetic oligonucleotide
ugcucuucggaaucugucu

SEQ ID NO: 3283440 - RNA, 19 nt, Artificial Sequence
  Description of Artificial Sequence: Synthetic oligonucleotide
caauggugaaaugaaccgc

SEQ ID NO: 3283441 - RNA, 19 nt, Artificial Sequence
  Description of Artificial Sequence: Synthetic oligonucleotide
uccuucuugccuuucugcu

SEQ ID NO: 3283442 - RNA, 19 nt, Artificial Sequence
  Description of Artificial Sequence: Synthetic oligonucleotide
ucggaagcuuccuucuugc

SEQ ID NO: 3283443 - RNA, 19 nt, Artificial Sequence
  Description of Artificial Sequence: Synthetic oligonucleotide
ucuacuuccuccucuucau

SEQ ID NO: 3283444 - RNA, 19 nt, Artificial Sequence
  Description of Artificial Sequence: Synthetic oligonucleotide
ucgcuucccuuucauugcg

SEQ ID NO: 3283445 - RNA, 19 nt, Artificial Sequence
  Description of Artificial Sequence: Synthetic oligonucleotide
acuccaucucuuccauggc

SEQ ID NO: 3283446 - RNA, 19 nt, Artificial Sequence
  Description of Artificial Sequence: Synthetic oligonucleotide
auugccuccgcuggagccc

SEQ ID NO: 3283447 - RNA, 19 nt, Artificial Sequence
  Description of Artificial Sequence: Synthetic oligonucleotide
cuucauucugcucuuccuc

SEQ ID NO: 3283448 - RNA, 19 nt, Artificial Sequence
  Description of Artificial Sequence: Synthetic oligonucleotide
ucuuguccugcucuucgga

SEQ ID NO: 3283449 - RNA, 19 nt, Artificial Sequence
  Description of Artificial Sequence: Synthetic oligonucleotide
aaagaacgaaaccaaauag

SEQ ID NO: 3283450 - RNA, 19 nt, Artificial Sequence
  Description of Artificial Sequence: Synthetic oligonucleotide
aacgaaaccaaauaggccu

SEQ ID NO: 3283451 - RNA, 19 nt, Artificial Sequence
  Description of Artificial Sequence: Synthetic oligonucleotide
gagaaagaaagaaagaacg

SEQ ID NO: 3283452 - RNA, 19 nt, Artificial Sequence
  Description of Artificial Sequence: Synthetic oligonucleotide
gaaacagucauguugggag

SEQ ID NO: 3283453 - RNA, 19 nt, Artificial Sequence
  Description of Artificial Sequence: Synthetic oligonucleotide
aaggcaggcucccagaacc

SEQ ID NO: 3283454 - RNA, 19 nt, Artificial Sequence
  Description of Artificial Sequence: Synthetic oligonucleotide
agaaagaaagaacgaaacc

SEQ ID NO: 3283455 - RNA, 19 nt, Artificial Sequence
  Description of Artificial Sequence: Synthetic oligonucleotide
uagagaaacagucauguug

SEQ ID NO: 3283456 - RNA, 19 nt, Artificial Sequence
  Description of Artificial Sequence: Synthetic oligonucleotide
aagaaagaaagaacgaaac

SEQ ID NO: 3283457 - RNA, 19 nt, Artificial Sequence
  Description of Artificial Sequence: Synthetic oligonucleotide
ugagaaauggauucuaccc

SEQ ID NO: 3283458 - RNA, 19 nt, Artificial Sequence
  Description of Artificial Sequence: Synthetic oligonucleotide
aaauggauucuacccaugg

SEQ ID NO: 3283459 - RNA, 19 nt, Artificial Sequence
  Description of Artificial Sequence: Synthetic oligonucleotide
aauggauucuacccauggc

SEQ ID NO: 3283460 - RNA, 19 nt, Artificial Sequence
  Description of Artificial Sequence: Synthetic oligonucleotide
uguuuuauuggcaucagaa

SEQ ID NO: 3283461 - RNA, 19 nt, Artificial Sequence
  Description of Artificial Sequence: Synthetic oligonucleotide
agaacgaaaccaaauaggc

SEQ ID NO: 3283462 - RNA, 19 nt, Artificial Sequence
  Description of Artificial Sequence: Synthetic oligonucleotide
aaaaccaacguucuccugu

SEQ ID NO: 3283463 - RNA, 19 nt, Artificial Sequence
  Description of Artificial Sequence: Synthetic oligonucleotide
gagagagaaagaaagaaag

SEQ ID NO: 3283464 - RNA, 19 nt, Artificial Sequence
  Description of Artificial Sequence: Synthetic oligonucleotide
gaaagaaagaacgaaacca

SEQ ID NO: 3283465 - RNA, 19 nt, Artificial Sequence
  Description of Artificial Sequence: Synthetic oligonucleotide
aagaacgaaaccaaauagg

SEQ ID NO: 3283466 - RNA, 19 nt, Artificial Sequence
  Description of Artificial Sequence: Synthetic oligonucleotide
gagagagagagaaagaaag

SEQ ID NO: 3283467 - RNA, 19 nt, Artificial Sequence
  Description of Artificial Sequence: Synthetic oligonucleotide
uuuuauuggcaucagaauu

SEQ ID NO: 3283468 - RNA, 19 nt, Artificial Sequence
  Description of Artificial Sequence: Synthetic oligonucleotide
accaaauaggccucaaaac

SEQ ID NO: 3283469 - RNA, 19 nt, Artificial Sequence
  Description of Artificial Sequence: Synthetic oligonucleotide
gagagggagagacagagag

SEQ ID NO: 3283470 - RNA, 19 nt, Artificial Sequence
  Description of Artificial Sequence: Synthetic oligonucleotide
auuggcaucagaauuacuc

SEQ ID NO: 3283471 - RNA, 19 nt, Artificial Sequence
  Description of Artificial Sequence: Synthetic oligonucleotide
uacucggagaacuugguag

SEQ ID NO: 3283472 - RNA, 19 nt, Artificial Sequence
  Description of Artificial Sequence: Synthetic oligonucleotide
agagaaacagucauguugg

SEQ ID NO: 3283473 - RNA, 19 nt, Artificial Sequence
  Description of Artificial Sequence: Synthetic oligonucleotide
gacagagagagagagaaag

SEQ ID NO: 3283474 - RNA, 19 nt, Artificial Sequence
  Description of Artificial Sequence: Synthetic oligonucleotide
uuggcaucagaauuacucg

SEQ ID NO: 3283475 - RNA, 19 nt, Artificial Sequence
  Description of Artificial Sequence: Synthetic oligonucleotide
uuuauuggcaucagaauua

SEQ ID NO: 3283476 - RNA, 19 nt, Artificial Sequence
  Description of Artificial Sequence: Synthetic oligonucleotide
aaccaaauaggccucaaaa

SEQ ID NO: 3283477 - RNA, 19 nt, Artificial Sequence
  Description of Artificial Sequence: Synthetic oligonucleotide
acuuccaaauuccugagug

SEQ ID NO: 3283478 - RNA, 19 nt, Artificial Sequence
  Description of Artificial Sequence: Synthetic oligonucleotide
agagaaagaaagaaagaac

SEQ ID NO: 3283479 - RNA, 19 nt, Artificial Sequence
  Description of Artificial Sequence: Synthetic oligonucleotide
aauuacucggagaacuugg

SEQ ID NO: 3283480 - RNA, 19 nt, Artificial Sequence
  Description of Artificial Sequence: Synthetic oligonucleotide
aaacagucauguugggagg

SEQ ID NO: 3283481 - RNA, 19 nt, Artificial Sequence
  Description of Artificial Sequence: Synthetic oligonucleotide
aucagaauuacucggagaa

SEQ ID NO: 3283482 - RNA, 19 nt, Artificial Sequence
  Description of Artificial Sequence: Synthetic oligonucleotide
aaagacaggagaaaggaaa

SEQ ID NO: 3283483 - RNA, 19 nt, Artificial Sequence
  Description of Artificial Sequence: Synthetic oligonucleotide
aaagaaagaaagaacgaaa

SEQ ID NO: 3283484 - RNA, 19 nt, Artificial Sequence
  Description of Artificial Sequence: Synthetic oligonucleotide
cucaaaaccaacguucucc

SEQ ID NO: 3283485 - RNA, 19 nt, Artificial Sequence
  Description of Artificial Sequence: Synthetic oligonucleotide
gagggagagacagagagag

SEQ ID NO: 3283486 - RNA, 19 nt, Artificial Sequence
  Description of Artificial Sequence: Synthetic oligonucleotide
aggagaaaggaaaagugac

SEQ ID NO: 3283487 - RNA, 19 nt, Artificial Sequence
  Description of Artificial Sequence: Synthetic oligonucleotide
auggauucuacccauggca

SEQ ID NO: 3283488 - RNA, 19 nt, Artificial Sequence
  Description of Artificial Sequence: Synthetic oligonucleotide
agaaaggaaaagugacaac

SEQ ID NO: 3283489 - RNA, 19 nt, Artificial Sequence
  Description of Artificial Sequence: Synthetic oligonucleotide
aaagaaagaacgaaaccaa

SEQ ID NO: 3283490 - RNA, 19 nt, Artificial Sequence
  Description of Artificial Sequence: Synthetic oligonucleotide
uggcaucagaauuacucgg

SEQ ID NO: 3283491 - RNA, 19 nt, Artificial Sequence
  Description of Artificial Sequence: Synthetic oligonucleotide
gaaagaacgaaaccaaaua

SEQ ID NO: 3283492 - RNA, 19 nt, Artificial Sequence
  Description of Artificial Sequence: Synthetic oligonucleotide
aaaggaaaagugacaacug

SEQ ID NO: 3283493 - RNA, 19 nt, Artificial Sequence
  Description of Artificial Sequence: Synthetic oligonucleotide
gagagacagagagagagag

SEQ ID NO: 3283494 - RNA, 19 nt, Artificial Sequence
  Description of Artificial Sequence: Synthetic oligonucleotide
gagagaaagaaagaaagaa

SEQ ID NO: 3283495 - RNA, 19 nt, Artificial Sequence
  Description of Artificial Sequence: Synthetic oligonucleotide
ccaaauaggccucaaaacc

SEQ ID NO: 3283496 - RNA, 19 nt, Artificial Sequence
  Description of Artificial Sequence: Synthetic oligonucleotide
gaaaggaaaagugacaacu

SEQ ID NO: 3283497 - RNA, 19 nt, Artificial Sequence
  Description of Artificial Sequence: Synthetic oligonucleotide
gagggugagaaauggauuc

SEQ ID NO: 3283498 - RNA, 19 nt, Artificial Sequence
  Description of Artificial Sequence: Synthetic oligonucleotide
gagaaauggauucuaccca

SEQ ID NO: 3283499 - RNA, 19 nt, Artificial Sequence
  Description of Artificial Sequence: Synthetic oligonucleotide
gaaagaaagaaagaacgaa

SEQ ID NO: 3283500 - RNA, 19 nt, Artificial Sequence
  Description of Artificial Sequence: Synthetic oligonucleotide
acucggagaacuugguagg

SEQ ID NO: 3283501 - RNA, 19 nt, Artificial Sequence
  Description of Artificial Sequence: Synthetic oligonucleotide
aaauuccugagugguagag

SEQ ID NO: 3283502 - RNA, 19 nt, Artificial Sequence
  Description of Artificial Sequence: Synthetic oligonucleotide
ucaaaaccaacguucuccu

SEQ ID NO: 3283503 - RNA, 19 nt, Artificial Sequence
  Description of Artificial Sequence: Synthetic oligonucleotide
aacagucauguugggaggg

SEQ ID NO: 3283504 - RNA, 19 nt, Artificial Sequence
  Description of Artificial Sequence: Synthetic oligonucleotide
cuuccaaauuccugagugg

SEQ ID NO: 3283505 - RNA, 19 nt, Artificial Sequence
  Description of Artificial Sequence: Synthetic oligonucleotide
gugagaaauggauucuacc

SEQ ID NO: 3283506 - RNA, 19 nt, Artificial Sequence
  Description of Artificial Sequence: Synthetic oligonucleotide
auuccugagugguagagaa

SEQ ID NO: 3283507 - RNA, 19 nt, Artificial Sequence
  Description of Artificial Sequence: Synthetic oligonucleotide
caaauaggccucaaaacca

SEQ ID NO: 3283508 - RNA, 19 nt, Artificial Sequence
  Description of Artificial Sequence: Synthetic oligonucleotide
acguucuccuguuuuauug

SEQ ID NO: 3283509 - RNA, 19 nt, Artificial Sequence
  Description of Artificial Sequence: Synthetic oligonucleotide
uccugagugguagagaaac

SEQ ID NO: 3283510 - RNA, 19 nt, Artificial Sequence
  Description of Artificial Sequence: Synthetic oligonucleotide
gaacuugguaggaaggcag

SEQ ID NO: 3283511 - RNA, 19 nt, Artificial Sequence
  Description of Artificial Sequence: Synthetic oligonucleotide
ugagugguagagaaacagu

SEQ ID NO: 3283512 - RNA, 19 nt, Artificial Sequence
  Description of Artificial Sequence: Synthetic oligonucleotide
gagacagagagagagagaa

SEQ ID NO: 3283513 - RNA, 19 nt, Artificial Sequence
  Description of Artificial Sequence: Synthetic oligonucleotide
agaaauggauucuacccau

SEQ ID NO: 3283514 - RNA, 19 nt, Artificial Sequence
  Description of Artificial Sequence: Synthetic oligonucleotide
gaacgaaaccaaauaggcc

SEQ ID NO: 3283515 - RNA, 19 nt, Artificial Sequence
  Description of Artificial Sequence: Synthetic oligonucleotide
gagaaaggaaaagugacaa

SEQ ID NO: 3283516 - RNA, 19 nt, Artificial Sequence
  Description of Artificial Sequence: Synthetic oligonucleotide
acaggagaaaggaaaagug

SEQ ID NO: 3283517 - RNA, 19 nt, Artificial Sequence
  Description of Artificial Sequence: Synthetic oligonucleotide
uccuguuuuauuggcauca

SEQ ID NO: 3283518 - RNA, 19 nt, Artificial Sequence
  Description of Artificial Sequence: Synthetic oligonucleotide
uaggccucaaaaccaacgu

SEQ ID NO: 3283519 - RNA, 19 nt, Artificial Sequence
  Description of Artificial Sequence: Synthetic oligonucleotide
gagggagagggagagacag

SEQ ID NO: 3283520 - RNA, 19 nt, Artificial Sequence
  Description of Artificial Sequence: Synthetic oligonucleotide
uugggagggugagaaaugg

SEQ ID NO: 3283521 - RNA, 19 nt, Artificial Sequence
  Description of Artificial Sequence: Synthetic oligonucleotide
uugguaggaaggcaggcuc

SEQ ID NO: 3283522 - RNA, 19 nt, Artificial Sequence
  Description of Artificial Sequence: Synthetic oligonucleotide
uggauucuacccauggcaa

SEQ ID NO: 3283523 - RNA, 19 nt, Artificial Sequence
  Description of Artificial Sequence: Synthetic oligonucleotide
agaaagaaagaaagaacga

SEQ ID NO: 3283524 - RNA, 19 nt, Artificial Sequence
  Description of Artificial Sequence: Synthetic oligonucleotide
gagagagagaaagaaagaa

SEQ ID NO: 3283525 - RNA, 19 nt, Artificial Sequence
  Description of Artificial Sequence: Synthetic oligonucleotide
aauaggccucaaaaccaac

SEQ ID NO: 3283526 - RNA, 19 nt, Artificial Sequence
  Description of Artificial Sequence: Synthetic oligonucleotide
cugagugguagagaaacag

SEQ ID NO: 3283527 - RNA, 19 nt, Artificial Sequence
  Description of Artificial Sequence: Synthetic oligonucleotide
gagugguagagaaacaguc

SEQ ID NO: 3283528 - RNA, 19 nt, Artificial Sequence
  Description of Artificial Sequence: Synthetic oligonucleotide
uuccaaauuccugaguggu

SEQ ID NO: 3283529 - RNA, 19 nt, Artificial Sequence
  Description of Artificial Sequence: Synthetic oligonucleotide
ugguagagaaacagucaug

SEQ ID NO: 3283530 - RNA, 19 nt, Artificial Sequence
  Description of Artificial Sequence: Synthetic oligonucleotide
auaggccucaaaaccaacg

SEQ ID NO: 3283531 - RNA, 19 nt, Artificial Sequence
  Description of Artificial Sequence: Synthetic oligonucleotide
ucuccuguuuuauuggcau

SEQ ID NO: 3283532 - RNA, 19 nt, Artificial Sequence
  Description of Artificial Sequence: Synthetic oligonucleotide
uaggaaggcaggcucccag

SEQ ID NO: 3283533 - RNA, 19 nt, Artificial Sequence
  Description of Artificial Sequence: Synthetic oligonucleotide
gaauuacucggagaacuug

SEQ ID NO: 3283534 - RNA, 19 nt, Artificial Sequence
  Description of Artificial Sequence: Synthetic oligonucleotide
gagaacuugguaggaaggc

SEQ ID NO: 3283535 - RNA, 19 nt, Artificial Sequence
  Description of Artificial Sequence: Synthetic oligonucleotide
aacuugguaggaaggcagg

SEQ ID NO: 3283536 - RNA, 19 nt, Artificial Sequence
  Description of Artificial Sequence: Synthetic oligonucleotide
acuugguaggaaggcaggc

SEQ ID NO: 3283537 - RNA, 19 nt, Artificial Sequence
  Description of Artificial Sequence: Synthetic oligonucleotide
gggagagacagagagagag

SEQ ID NO: 3283538 - RNA, 19 nt, Artificial Sequence
  Description of Artificial Sequence: Synthetic oligonucleotide
aaaccaaauaggccucaaa

SEQ ID NO: 3283539 - RNA, 19 nt, Artificial Sequence
  Description of Artificial Sequence: Synthetic oligonucleotide
uguugggagggugagaaau

SEQ ID NO: 3283540 - RNA, 19 nt, Artificial Sequence
  Description of Artificial Sequence: Synthetic oligonucleotide
uucuccuguuuuauuggca

SEQ ID NO: 3283541 - RNA, 19 nt, Artificial Sequence
  Description of Artificial Sequence: Synthetic oligonucleotide
gagaaacagucauguuggg

SEQ ID NO: 3283542 - RNA, 19 nt, Artificial Sequence
  Description of Artificial Sequence: Synthetic oligonucleotide
uuauuggcaucagaauuac

SEQ ID NO: 3283543 - RNA, 19 nt, Artificial Sequence
  Description of Artificial Sequence: Synthetic oligonucleotide
agaaagaacgaaaccaaau

SEQ ID NO: 3283544 - RNA, 19 nt, Artificial Sequence
  Description of Artificial Sequence: Synthetic oligonucleotide
caggagaaaggaaaaguga

SEQ ID NO: 3283545 - RNA, 19 nt, Artificial Sequence
  Description of Artificial Sequence: Synthetic oligonucleotide
aauuccugagugguagaga

SEQ ID NO: 3283546 - RNA, 19 nt, Artificial Sequence
  Description of Artificial Sequence: Synthetic oligonucleotide
agagagaaagaaagaaaga

SEQ ID NO: 3283547 - RNA, 19 nt, Artificial Sequence
  Description of Artificial Sequence: Synthetic oligonucleotide
ugguaggaaggcaggcucc

SEQ ID NO: 3283548 - RNA, 19 nt, Artificial Sequence
  Description of Artificial Sequence: Synthetic oligonucleotide
aagacaggagaaaggaaaa

SEQ ID NO: 3283549 - RNA, 19 nt, Artificial Sequence
  Description of Artificial Sequence: Synthetic oligonucleotide
auuaaauuuaaugagugcc

SEQ ID NO: 3283550 - RNA, 19 nt, Artificial Sequence
  Description of Artificial Sequence: Synthetic oligonucleotide
uuugccauuaauuaucagg

SEQ ID NO: 3283551 - RNA, 19 nt, Artificial Sequence
  Description of Artificial Sequence: Synthetic oligonucleotide
aaagaagaaaggcuugggc

SEQ ID NO: 3283552 - RNA, 19 nt, Artificial Sequence
  Description of Artificial Sequence: Synthetic oligonucleotide
uugccauuaauuaucaggg

SEQ ID NO: 3283553 - RNA, 19 nt, Artificial Sequence
  Description of Artificial Sequence: Synthetic oligonucleotide
ucaacgauucucuuggugg

SEQ ID NO: 3283554 - RNA, 19 nt, Artificial Sequence
  Description of Artificial Sequence: Synthetic oligonucleotide
acagauauuuacaacaggc

SEQ ID NO: 3283555 - RNA, 19 nt, Artificial Sequence
  Description of Artificial Sequence: Synthetic oligonucleotide
uaucuaacgaggcaaagcc

SEQ ID NO: 3283556 - RNA, 19 nt, Artificial Sequence
  Description of Artificial Sequence: Synthetic oligonucleotide
agucccaacaguaagaggc

SEQ ID NO: 3283557 - RNA, 19 nt, Artificial Sequence
  Description of Artificial Sequence: Synthetic oligonucleotide
uuaucagggacuuuaacug

SEQ ID NO: 3283558 - RNA, 19 nt, Artificial Sequence
  Description of Artificial Sequence: Synthetic oligonucleotide
ucgggauuaaauuuaauga

SEQ ID NO: 3283559 - RNA, 19 nt, Artificial Sequence
  Description of Artificial Sequence: Synthetic oligonucleotide
uuaaauuuaaugagugcca

SEQ ID NO: 3283560 - RNA, 19 nt, Artificial Sequence
  Description of Artificial Sequence: Synthetic oligonucleotide
auuaucagggacuuuaacu

SEQ ID NO: 3283561 - RNA, 19 nt, Artificial Sequence
  Description of Artificial Sequence: Synthetic oligonucleotide
ucuccgaagaagucgaacg

SEQ ID NO: 3283562 - RNA, 19 nt, Artificial Sequence
  Description of Artificial Sequence: Synthetic oligonucleotide
uugaucguccuuaaaacgc

SEQ ID NO: 3283563 - RNA, 19 nt, Artificial Sequence
  Description of Artificial Sequence: Synthetic oligonucleotide
aaaggcuugggcuucccgg

SEQ ID NO: 3283564 - RNA, 19 nt, Artificial Sequence
  Description of Artificial Sequence: Synthetic oligonucleotide
aucgaugcgaagcaacugc

SEQ ID NO: 3283565 - RNA, 19 nt, Artificial Sequence
  Description of Artificial Sequence: Synthetic oligonucleotide
ucuaacgaggcaaagccgc

SEQ ID NO: 3283566 - RNA, 19 nt, Artificial Sequence
  Description of Artificial Sequence: Synthetic oligonucleotide
uuugccauugacgaucucg

SEQ ID NO: 3283567 - RNA, 19 nt, Artificial Sequence
  Description of Artificial Sequence: Synthetic oligonucleotide
ggcauaaagaccaagagag

SEQ ID NO: 3283568 - RNA, 19 nt, Artificial Sequence
  Description of Artificial Sequence: Synthetic oligonucleotide
uacaacaggcauaaagacc

SEQ ID NO: 3283569 - RNA, 19 nt, Artificial Sequence
  Description of Artificial Sequence: Synthetic oligonucleotide
aaggguacagccccucggc

SEQ ID NO: 3283570 - RNA, 19 nt, Artificial Sequence
  Description of Artificial Sequence: Synthetic oligonucleotide
aaggaugugaauccgguau

SEQ ID NO: 3283571 - RNA, 19 nt, Artificial Sequence
  Description of Artificial Sequence: Synthetic oligonucleotide
uuuaugucguuacugagua

SEQ ID NO: 3283572 - RNA, 19 nt, Artificial Sequence
  Description of Artificial Sequence: Synthetic oligonucleotide
aacgagaaggggucgcggc

SEQ ID NO: 3283573 - RNA, 19 nt, Artificial Sequence
  Description of Artificial Sequence: Synthetic oligonucleotide
uacagauauuuacaacagg

SEQ ID NO: 3283574 - RNA, 19 nt, Artificial Sequence
  Description of Artificial Sequence: Synthetic oligonucleotide
agagagauccuaucccugc

SEQ ID NO: 3283575 - RNA, 19 nt, Artificial Sequence
  Description of Artificial Sequence: Synthetic oligonucleotide
cuugaucguccuuaaaacg

SEQ ID NO: 3283576 - RNA, 19 nt, Artificial Sequence
  Description of Artificial Sequence: Synthetic oligonucleotide
cucgggauuaaauuuaaug

SEQ ID NO: 3283577 - RNA, 19 nt, Artificial Sequence
  Description of Artificial Sequence: Synthetic oligonucleotide
agauauuuacaacaggcau

SEQ ID NO: 3283578 - RNA, 19 nt, Artificial Sequence
  Description of Artificial Sequence: Synthetic oligonucleotide
acaacaggcauaaagacca

SEQ ID NO: 3283579 - RNA, 19 nt, Artificial Sequence
  Description of Artificial Sequence: Synthetic oligonucleotide
uuacaacaggcauaaagac

SEQ ID NO: 3283580 - RNA, 19 nt, Artificial Sequence
  Description of Artificial Sequence: Synthetic oligonucleotide
gaauccgguaucuaacgag

SEQ ID NO: 3283581 - RNA, 19 nt, Artificial Sequence
  Description of Artificial Sequence: Synthetic oligonucleotide
aauccgguaucuaacgagg

SEQ ID NO: 3283582 - RNA, 19 nt, Artificial Sequence
  Description of Artificial Sequence: Synthetic oligonucleotide
ugugaauccgguaucuaac

SEQ ID NO: 3283583 - RNA, 19 nt, Artificial Sequence
  Description of Artificial Sequence: Synthetic oligonucleotide
uccuugaucguccuuaaaa

SEQ ID NO: 3283584 - RNA, 19 nt, Artificial Sequence
  Description of Artificial Sequence: Synthetic oligonucleotide
aaaaguugggaagucggug

SEQ ID NO: 3283585 - RNA, 19 nt, Artificial Sequence
  Description of Artificial Sequence: Synthetic oligonucleotide
cugaguaucgaugcgaagc

SEQ ID NO: 3283586 - RNA, 19 nt, Artificial Sequence
  Description of Artificial Sequence: Synthetic oligonucleotide
ugaguaucgaugcgaagca

SEQ ID NO: 3283587 - RNA, 19 nt, Artificial Sequence
  Description of Artificial Sequence: Synthetic oligonucleotide
gaagaagucgaacgagaag

SEQ ID NO: 3283588 - RNA, 19 nt, Artificial Sequence
  Description of Artificial Sequence: Synthetic oligonucleotide
uccgggugccacuugagcg

SEQ ID NO: 3283589 - RNA, 19 nt, Artificial Sequence
  Description of Artificial Sequence: Synthetic oligonucleotide
ugcucuuugccauuaauua

SEQ ID NO: 3283590 - RNA, 19 nt, Artificial Sequence
  Description of Artificial Sequence: Synthetic oligonucleotide
ucuuugccauuaauuauca

SEQ ID NO: 3283591 - RNA, 19 nt, Artificial Sequence
  Description of Artificial Sequence: Synthetic oligonucleotide
ucaaacgggucuccgaaga

SEQ ID NO: 3283592 - RNA, 19 nt, Artificial Sequence
  Description of Artificial Sequence: Synthetic oligonucleotide
ucucggaaggagaagacau

SEQ ID NO: 3283593 - RNA, 19 nt, Artificial Sequence
  Description of Artificial Sequence: Synthetic oligonucleotide
uacaccucgcgcuugcggg

SEQ ID NO: 3283594 - RNA, 19 nt, Artificial Sequence
  Description of Artificial Sequence: Synthetic oligonucleotide
acuuuaugucguuacugag

SEQ ID NO: 3283595 - RNA, 19 nt, Artificial Sequence
  Description of Artificial Sequence: Synthetic oligonucleotide
gaaagaagaaaggcuuggg

SEQ ID NO: 3283596 - RNA, 19 nt, Artificial Sequence
  Description of Artificial Sequence: Synthetic oligonucleotide
ugaaggaggcagagaaggg

SEQ ID NO: 3283597 - RNA, 19 nt, Artificial Sequence
  Description of Artificial Sequence: Synthetic oligonucleotide
agaggcaccagaaugagca

SEQ ID NO: 3283598 - RNA, 19 nt, Artificial Sequence
  Description of Artificial Sequence: Synthetic oligonucleotide
aggacauggagaaagaaga

SEQ ID NO: 3283599 - RNA, 19 nt, Artificial Sequence
  Description of Artificial Sequence: Synthetic oligonucleotide
ucguuacugaguaucgaug

SEQ ID NO: 3283600 - RNA, 19 nt, Artificial Sequence
  Description of Artificial Sequence: Synthetic oligonucleotide
gugaauccgguaucuaacg

SEQ ID NO: 3283601 - RNA, 19 nt, Artificial Sequence
  Description of Artificial Sequence: Synthetic oligonucleotide
agaagacauacuggaaggc

SEQ ID NO: 3283602 - RNA, 19 nt, Artificial Sequence
  Description of Artificial Sequence: Synthetic oligonucleotide
ugaucguccuuaaaacgca

SEQ ID NO: 3283603 - RNA, 19 nt, Artificial Sequence
  Description of Artificial Sequence: Synthetic oligonucleotide
caggacauggagaaagaag

SEQ ID NO: 3283604 - RNA, 19 nt, Artificial Sequence
  Description of Artificial Sequence: Synthetic oligonucleotide
aaauuuaaugagugccaaa

SEQ ID NO: 3283605 - RNA, 19 nt, Artificial Sequence
  Description of Artificial Sequence: Synthetic oligonucleotide
augagugccaaaggcauac

SEQ ID NO: 3283606 - RNA, 19 nt, Artificial Sequence
  Description of Artificial Sequence: Synthetic oligonucleotide
guuacugaguaucgaugcg

SEQ ID NO: 3283607 - RNA, 19 nt, Artificial Sequence
  Description of Artificial Sequence: Synthetic oligonucleotide
aacgaggcaaagccgccuc

SEQ ID NO: 3283608 - RNA, 19 nt, Artificial Sequence
  Description of Artificial Sequence: Synthetic oligonucleotide
accgacuugaaguugccug

SEQ ID NO: 3283609 - RNA, 19 nt, Artificial Sequence
  Description of Artificial Sequence: Synthetic oligonucleotide
aggcauaaagaccaagaga

SEQ ID NO: 3283610 - RNA, 19 nt, Artificial Sequence
  Description of Artificial Sequence: Synthetic oligonucleotide
aguaucgaugcgaagcaac

SEQ ID NO: 3283611 - RNA, 19 nt, Artificial Sequence
  Description of Artificial Sequence: Synthetic oligonucleotide
auaaagaccaagagagauc

SEQ ID NO: 3283612 - RNA, 19 nt, Artificial Sequence
  Description of Artificial Sequence: Synthetic oligonucleotide
uaaauuuaaugagugccaa

SEQ ID NO: 3283613 - RNA, 19 nt, Artificial Sequence
  Description of Artificial Sequence: Synthetic oligonucleotide
guugggaagucggugaagg

SEQ ID NO: 3283614 - RNA, 19 nt, Artificial Sequence
  Description of Artificial Sequence: Synthetic oligonucleotide
auacagauauuuacaacag

SEQ ID NO: 3283615 - RNA, 19 nt, Artificial Sequence
  Description of Artificial Sequence: Synthetic oligonucleotide
gaaggguacagccccucgg

SEQ ID NO: 3283616 - RNA, 19 nt, Artificial Sequence
  Description of Artificial Sequence: Synthetic oligonucleotide
ucgguggagguugacaccg

SEQ ID NO: 3283617 - RNA, 19 nt, Artificial Sequence
  Description of Artificial Sequence: Synthetic oligonucleotide
ucucgguggagguugacac

SEQ ID NO: 3283618 - RNA, 19 nt, Artificial Sequence
  Description of Artificial Sequence: Synthetic oligonucleotide
aagucgaacgagaaggggu

SEQ ID NO: 3283619 - RNA, 19 nt, Artificial Sequence
  Description of Artificial Sequence: Synthetic oligonucleotide
uggagguugacaccgacuu

SEQ ID NO: 3283620 - RNA, 19 nt, Artificial Sequence
  Description of Artificial Sequence: Synthetic oligonucleotide
ucucaaacgggucuccgaa

SEQ ID NO: 3283621 - RNA, 19 nt, Artificial Sequence
  Description of Artificial Sequence: Synthetic oligonucleotide
caggcauaaagaccaagag

SEQ ID NO: 3283622 - RNA, 19 nt, Artificial Sequence
  Description of Artificial Sequence: Synthetic oligonucleotide
ugaauccgguaucuaacga

SEQ ID NO: 3283623 - RNA, 19 nt, Artificial Sequence
  Description of Artificial Sequence: Synthetic oligonucleotide
aaguucucaaacgggucuc

SEQ ID NO: 3283624 - RNA, 19 nt, Artificial Sequence
  Description of Artificial Sequence: Synthetic oligonucleotide
agauccuaucccugcaguc

SEQ ID NO: 3283625 - RNA, 19 nt, Artificial Sequence
  Description of Artificial Sequence: Synthetic oligonucleotide
cucggcaucggcuuccccg

SEQ ID NO: 3283626 - RNA, 19 nt, Artificial Sequence
  Description of Artificial Sequence: Synthetic oligonucleotide
agauaggaccucguaggcc

SEQ ID NO: 3283627 - RNA, 19 nt, Artificial Sequence
  Description of Artificial Sequence: Synthetic oligonucleotide
uccuggaacgggcugccgg

SEQ ID NO: 3283628 - RNA, 19 nt, Artificial Sequence
  Description of Artificial Sequence: Synthetic oligonucleotide
aggaugugaauccgguauc

SEQ ID NO: 3283629 - RNA, 19 nt, Artificial Sequence
  Description of Artificial Sequence: Synthetic oligonucleotide
gauauuuacaacaggcaua

SEQ ID NO: 3283630 - RNA, 19 nt, Artificial Sequence
  Description of Artificial Sequence: Synthetic oligonucleotide
ugcagucccaacaguaaga

SEQ ID NO: 3283631 - RNA, 19 nt, Artificial Sequence
  Description of Artificial Sequence: Synthetic oligonucleotide
aaacgggucuccgaagaag

SEQ ID NO: 3283632 - RNA, 19 nt, Artificial Sequence
  Description of Artificial Sequence: Synthetic oligonucleotide
uuacugaguaucgaugcga

SEQ ID NO: 3283633 - RNA, 19 nt, Artificial Sequence
  Description of Artificial Sequence: Synthetic oligonucleotide
ccauugacgaucucggugg

SEQ ID NO: 3283634 - RNA, 19 nt, Artificial Sequence
  Description of Artificial Sequence: Synthetic oligonucleotide
gauaggaccucguaggccu

SEQ ID NO: 3283635 - RNA, 19 nt, Artificial Sequence
  Description of Artificial Sequence: Synthetic oligonucleotide
gagugccaaaggcauacag

SEQ ID NO: 3283636 - RNA, 19 nt, Artificial Sequence
  Description of Artificial Sequence: Synthetic oligonucleotide
uaucagggacuuuaacugu

SEQ ID NO: 3283637 - RNA, 19 nt, Artificial Sequence
  Description of Artificial Sequence: Synthetic oligonucleotide
accgccacaggacauggag

SEQ ID NO: 3283638 - RNA, 19 nt, Artificial Sequence
  Description of Artificial Sequence: Synthetic oligonucleotide
guaucuaacgaggcaaagc

SEQ ID NO: 3283639 - RNA, 19 nt, Artificial Sequence
  Description of Artificial Sequence: Synthetic oligonucleotide
uaauuaucagggacuuuaa

SEQ ID NO: 3283640 - RNA, 19 nt, Artificial Sequence
  Description of Artificial Sequence: Synthetic oligonucleotide
ugaaccgccucucugccuc

SEQ ID NO: 3283641 - RNA, 19 nt, Artificial Sequence
  Description of Artificial Sequence: Synthetic oligonucleotide
cagauauuuacaacaggca

SEQ ID NO: 3283642 - RNA, 19 nt, Artificial Sequence
  Description of Artificial Sequence: Synthetic oligonucleotide
ugcucgggguucuuguccg

SEQ ID NO: 3283643 - RNA, 19 nt, Artificial Sequence
  Description of Artificial Sequence: Synthetic oligonucleotide
cuugcgguacgccuugcgg

SEQ ID NO: 3283644 - RNA, 19 nt, Artificial Sequence
  Description of Artificial Sequence: Synthetic oligonucleotide
uaagaggcaccagaaugag

SEQ ID NO: 3283645 - RNA, 19 nt, Artificial Sequence
  Description of Artificial Sequence: Synthetic oligonucleotide
uguccaucuucuuccaccu

SEQ ID NO: 3283646 - RNA, 19 nt, Artificial Sequence
  Description of Artificial Sequence: Synthetic oligonucleotide
aagaccaagagagauccua

SEQ ID NO: 3283647 - RNA, 19 nt, Artificial Sequence
  Description of Artificial Sequence: Synthetic oligonucleotide
uccgaagaagucgaacgag

SEQ ID NO: 3283648 - RNA, 19 nt, Artificial Sequence
  Description of Artificial Sequence: Synthetic oligonucleotide
aacaggcauaaagaccaag

SEQ ID NO: 3283649 - RNA, 19 nt, Artificial Sequence
  Description of Artificial Sequence: Synthetic oligonucleotide
uugucaaugaacaagcagc

SEQ ID NO: 3283650 - RNA, 19 nt, Artificial Sequence
  Description of Artificial Sequence: Synthetic oligonucleotide
aaagggcuccaucugacgc

SEQ ID NO: 3283651 - RNA, 19 nt, Artificial Sequence
  Description of Artificial Sequence: Synthetic oligonucleotide
uuuaccuccauccagugga

SEQ ID NO: 3283652 - RNA, 19 nt, Artificial Sequence
  Description of Artificial Sequence: Synthetic oligonucleotide
auuuugucaaugaacaagc

SEQ ID NO: 3283653 - RNA, 19 nt, Artificial Sequence
  Description of Artificial Sequence: Synthetic oligonucleotide
ucaaugaacaagcagcccu

SEQ ID NO: 3283654 - RNA, 19 nt, Artificial Sequence
  Description of Artificial Sequence: Synthetic oligonucleotide
uggagauugguaaaugucc

SEQ ID NO: 3283655 - RNA, 19 nt, Artificial Sequence
  Description of Artificial Sequence: Synthetic oligonucleotide
aaaugauccauuucaugcu

SEQ ID NO: 3283656 - RNA, 19 nt, Artificial Sequence
  Description of Artificial Sequence: Synthetic oligonucleotide
aaugauccauuucaugcug

SEQ ID NO: 3283657 - RNA, 19 nt, Artificial Sequence
  Description of Artificial Sequence: Synthetic oligonucleotide
ugucaaugaacaagcagcc

SEQ ID NO: 3283658 - RNA, 19 nt, Artificial Sequence
  Description of Artificial Sequence: Synthetic oligonucleotide
aaaccggcgacgcucucgc

SEQ ID NO: 3283659 - RNA, 19 nt, Artificial Sequence
  Description of Artificial Sequence: Synthetic oligonucleotide
aguccugagaucugcacgg

SEQ ID NO: 3283660 - RNA, 19 nt, Artificial Sequence
  Description of Artificial Sequence: Synthetic oligonucleotide
gagaagguccggaagagcg

SEQ ID NO: 3283661 - RNA, 19 nt, Artificial Sequence
  Description of Artificial Sequence: Synthetic oligonucleotide
agucaagcaacagagcuuc

SEQ ID NO: 3283662 - RNA, 19 nt, Artificial Sequence
  Description of Artificial Sequence: Synthetic oligonucleotide
uccauuucaugcuggauga

SEQ ID NO: 3283663 - RNA, 19 nt, Artificial Sequence
  Description of Artificial Sequence: Synthetic oligonucleotide
uuggguucaguccugagau

SEQ ID NO: 3283664 - RNA, 19 nt, Artificial Sequence
  Description of Artificial Sequence: Synthetic oligonucleotide
agauugguaaaugucccac

SEQ ID NO: 3283665 - RNA, 19 nt, Artificial Sequence
  Description of Artificial Sequence: Synthetic oligonucleotide
ugguaaaugucccacuguc

SEQ ID NO: 3283666 - RNA, 19 nt, Artificial Sequence
  Description of Artificial Sequence: Synthetic oligonucleotide
uugcugaccacaccacugg

SEQ ID NO: 3283667 - RNA, 19 nt, Artificial Sequence
  Description of Artificial Sequence: Synthetic oligonucleotide
ugucccacuguccauuuug

SEQ ID NO: 3283668 - RNA, 19 nt, Artificial Sequence
  Description of Artificial Sequence: Synthetic oligonucleotide
ugaacaagcagcccugcaa

SEQ ID NO: 3283669 - RNA, 19 nt, Artificial Sequence
  Description of Artificial Sequence: Synthetic oligonucleotide
ugcuggaugauucgggcug

SEQ ID NO: 3283670 - RNA, 19 nt, Artificial Sequence
  Description of Artificial Sequence: Synthetic oligonucleotide
gucauuuaccuccauccag

SEQ ID NO: 3283671 - RNA, 19 nt, Artificial Sequence
  Description of Artificial Sequence: Synthetic oligonucleotide
cuccaucugacgcagcucg

SEQ ID NO: 3283672 - RNA, 19 nt, Artificial Sequence
  Description of Artificial Sequence: Synthetic oligonucleotide
uuuugucaaugaacaagca

SEQ ID NO: 3283673 - RNA, 19 nt, Artificial Sequence
  Description of Artificial Sequence: Synthetic oligonucleotide
aguggagauugguaaaugu

SEQ ID NO: 3283674 - RNA, 19 nt, Artificial Sequence
  Description of Artificial Sequence: Synthetic oligonucleotide
aguaggagcgcgugcgcgc

SEQ ID NO: 3283675 - RNA, 19 nt, Artificial Sequence
  Description of Artificial Sequence: Synthetic oligonucleotide
cugcaaaugauccauuuca

SEQ ID NO: 3283676 - RNA, 19 nt, Artificial Sequence
  Description of Artificial Sequence: Synthetic oligonucleotide
auuuaccuccauccagugg

SEQ ID NO: 3283677 - RNA, 19 nt, Artificial Sequence
  Description of Artificial Sequence: Synthetic oligonucleotide
uguauggcggcuguggcgc

SEQ ID NO: 3283678 - RNA, 19 nt, Artificial Sequence
  Description of Artificial Sequence: Synthetic oligonucleotide
aaggugaccaagcggcugu

SEQ ID NO: 3283679 - RNA, 19 nt, Artificial Sequence
  Description of Artificial Sequence: Synthetic oligonucleotide
agcaacagagcuucaguca

SEQ ID NO: 3283680 - RNA, 19 nt, Artificial Sequence
  Description of Artificial Sequence: Synthetic oligonucleotide
uguccauuuugucaaugaa

SEQ ID NO: 3283681 - RNA, 19 nt, Artificial Sequence
  Description of Artificial Sequence: Synthetic oligonucleotide
agcugugcggguuccacgg

SEQ ID NO: 3283682 - RNA, 19 nt, Artificial Sequence
  Description of Artificial Sequence: Synthetic oligonucleotide
cugcaugccaguuuuccag

SEQ ID NO: 3283683 - RNA, 19 nt, Artificial Sequence
  Description of Artificial Sequence: Synthetic oligonucleotide
ucagucauuuaccuccauc

SEQ ID NO: 3283684 - RNA, 19 nt, Artificial Sequence
  Description of Artificial Sequence: Synthetic oligonucleotide
caugcuggaugauucgggc

SEQ ID NO: 3283685 - RNA, 19 nt, Artificial Sequence
  Description of Artificial Sequence: Synthetic oligonucleotide
ucaagcaacagagcuucag

SEQ ID NO: 3283686 - RNA, 19 nt, Artificial Sequence
  Description of Artificial Sequence: Synthetic oligonucleotide
gaagguccggaagagcgcg

SEQ ID NO: 3283687 - RNA, 19 nt, Artificial Sequence
  Description of Artificial Sequence: Synthetic oligonucleotide
cuggaagcgaggcacacac

SEQ ID NO: 3283688 - RNA, 19 nt, Artificial Sequence
  Description of Artificial Sequence: Synthetic oligonucleotide
cuugcugaccacaccacug

SEQ ID NO: 3283689 - RNA, 19 nt, Artificial Sequence
  Description of Artificial Sequence: Synthetic oligonucleotide
gacacacgcgcguguaugg

SEQ ID NO: 3283690 - RNA, 19 nt, Artificial Sequence
  Description of Artificial Sequence: Synthetic oligonucleotide
uccccgaccugacacacgc

SEQ ID NO: 3283691 - RNA, 19 nt, Artificial Sequence
  Description of Artificial Sequence: Synthetic oligonucleotide
caaugaacaagcagcccug

SEQ ID NO: 3283692 - RNA, 19 nt, Artificial Sequence
  Description of Artificial Sequence: Synthetic oligonucleotide
agcuucagucauuuaccuc

SEQ ID NO: 3283693 - RNA, 19 nt, Artificial Sequence
  Description of Artificial Sequence: Synthetic oligonucleotide
auccaguggagauugguaa

SEQ ID NO: 3283694 - RNA, 19 nt, Artificial Sequence
  Description of Artificial Sequence: Synthetic oligonucleotide
ugcacggccuggaagcgag

SEQ ID NO: 3283695 - RNA, 19 nt, Artificial Sequence
  Description of Artificial Sequence: Synthetic oligonucleotide
agucauuuaccuccaucca

SEQ ID NO: 3283696 - RNA, 19 nt, Artificial Sequence
  Description of Artificial Sequence: Synthetic oligonucleotide
ugauccauuucaugcugga

SEQ ID NO: 3283697 - RNA, 19 nt, Artificial Sequence
  Description of Artificial Sequence: Synthetic oligonucleotide
agguaccgccaguaggagc

SEQ ID NO: 3283698 - RNA, 19 nt, Artificial Sequence
  Description of Artificial Sequence: Synthetic oligonucleotide
ucugcaugccaguuuucca

SEQ ID NO: 3283699 - RNA, 19 nt, Artificial Sequence
  Description of Artificial Sequence: Synthetic oligonucleotide
gaacaagcagcccugcaaa

SEQ ID NO: 3283700 - RNA, 19 nt, Artificial Sequence
  Description of Artificial Sequence: Synthetic oligonucleotide
guccauuuugucaaugaac

SEQ ID NO: 3283701 - RNA, 19 nt, Artificial Sequence
  Description of Artificial Sequence: Synthetic oligonucleotide
aucaccugcaccagccgcc

SEQ ID NO: 3283702 - RNA, 19 nt, Artificial Sequence
  Description of Artificial Sequence: Synthetic oligonucleotide
ucggggaaggugaccaagc

SEQ ID NO: 3283703 - RNA, 19 nt, Artificial Sequence
  Description of Artificial Sequence: Synthetic oligonucleotide
uguccacccuacuugcuga

SEQ ID NO: 3283704 - RNA, 19 nt, Artificial Sequence
  Description of Artificial Sequence: Synthetic oligonucleotide
agcacgugaagcggaaagg

SEQ ID NO: 3283705 - RNA, 19 nt, Artificial Sequence
  Description of Artificial Sequence: Synthetic oligonucleotide
acgcagcucgcgcaggcgc

SEQ ID NO: 3283706 - RNA, 19 nt, Artificial Sequence
  Description of Artificial Sequence: Synthetic oligonucleotide
guguauggcggcuguggcg

SEQ ID NO: 3283707 - RNA, 19 nt, Artificial Sequence
  Description of Artificial Sequence: Synthetic oligonucleotide
gaaaccggcgacgcucucg

SEQ ID NO: 3283708 - RNA, 19 nt, Artificial Sequence
  Description of Artificial Sequence: Synthetic oligonucleotide
ugaccaagcggcuguccag

SEQ ID NO: 3283709 - RNA, 19 nt, Artificial Sequence
  Description of Artificial Sequence: Synthetic oligonucleotide
cugaccacaccacuggcuc

SEQ ID NO: 3283710 - RNA, 19 nt, Artificial Sequence
  Description of Artificial Sequence: Synthetic oligonucleotide
cucagucaagcaacagagc

SEQ ID NO: 3283711 - RNA, 19 nt, Artificial Sequence
  Description of Artificial Sequence: Synthetic oligonucleotide
aggcgccucagguaccgcc

SEQ ID NO: 3283712 - RNA, 19 nt, Artificial Sequence
  Description of Artificial Sequence: Synthetic oligonucleotide
uuaccuccauccaguggag

SEQ ID NO: 3283713 - RNA, 19 nt, Artificial Sequence
  Description of Artificial Sequence: Synthetic oligonucleotide
uccugagaucugcacggcc

SEQ ID NO: 3283714 - RNA, 19 nt, Artificial Sequence
  Description of Artificial Sequence: Synthetic oligonucleotide
uggcgcgccccguacaagg

SEQ ID NO: 3283715 - RNA, 19 nt, Artificial Sequence
  Description of Artificial Sequence: Synthetic oligonucleotide
ugcaugccaguuuuccaga

SEQ ID NO: 3283716 - RNA, 19 nt, Artificial Sequence
  Description of Artificial Sequence: Synthetic oligonucleotide
ugauucgggcuguccaccc

SEQ ID NO: 3283717 - RNA, 19 nt, Artificial Sequence
  Description of Artificial Sequence: Synthetic oligonucleotide
uccaguggagauugguaaa

SEQ ID NO: 3283718 - RNA, 19 nt, Artificial Sequence
  Description of Artificial Sequence: Synthetic oligonucleotide
acuugcugaccacaccacu

SEQ ID NO: 3283719 - RNA, 19 nt, Artificial Sequence
  Description of Artificial Sequence: Synthetic oligonucleotide
caagcagcccugcaaauga

SEQ ID NO: 3283720 - RNA, 19 nt, Artificial Sequence
  Description of Artificial Sequence: Synthetic oligonucleotide
cauuuaccuccauccagug

SEQ ID NO: 3283721 - RNA, 19 nt, Artificial Sequence
  Description of Artificial Sequence: Synthetic oligonucleotide
uccggaagagcgcgucggg

SEQ ID NO: 3283722 - RNA, 19 nt, Artificial Sequence
  Description of Artificial Sequence: Synthetic oligonucleotide
augauccauuucaugcugg

SEQ ID NO: 3283723 - RNA, 19 nt, Artificial Sequence
  Description of Artificial Sequence: Synthetic oligonucleotide
ugacacacgcgcguguaug

SEQ ID NO: 3283724 - RNA, 19 nt, Artificial Sequence
  Description of Artificial Sequence: Synthetic oligonucleotide
cacacgcgcguguauggcg

SEQ ID NO: 3283725 - RNA, 19 nt, Artificial Sequence
  Description of Artificial Sequence: Synthetic oligonucleotide
caucaccugcaccagccgc

SEQ ID NO: 3283726 - RNA, 19 nt, Artificial Sequence
  Description of Artificial Sequence: Synthetic oligonucleotide
guggagauugguaaauguc

SEQ ID NO: 3283727 - RNA, 19 nt, Artificial Sequence
  Description of Artificial Sequence: Synthetic oligonucleotide
acaccacuggcucuccucu

SEQ ID NO: 3283728 - RNA, 19 nt, Artificial Sequence
  Description of Artificial Sequence: Synthetic oligonucleotide
uggaagcgaggcacacacg

SEQ ID NO: 3283729 - RNA, 19 nt, Artificial Sequence
  Description of Artificial Sequence: Synthetic oligonucleotide
acacacgccaggaaaccgg

SEQ ID NO: 3283730 - RNA, 19 nt, Artificial Sequence
  Description of Artificial Sequence: Synthetic oligonucleotide
acgugaagcggaaagggcu

SEQ ID NO: 3283731 - RNA, 19 nt, Artificial Sequence
  Description of Artificial Sequence: Synthetic oligonucleotide
acaagcagcccugcaaaug

SEQ ID NO: 3283732 - RNA, 19 nt, Artificial Sequence
  Description of Artificial Sequence: Synthetic oligonucleotide
ugagaagguccggaagagc

SEQ ID NO: 3283733 - RNA, 19 nt, Artificial Sequence
  Description of Artificial Sequence: Synthetic oligonucleotide
accggcgacgcucucgcag

SEQ ID NO: 3283734 - RNA, 19 nt, Artificial Sequence
  Description of Artificial Sequence: Synthetic oligonucleotide
ugagaucugcacggccugg

SEQ ID NO: 3283735 - RNA, 19 nt, Artificial Sequence
  Description of Artificial Sequence: Synthetic oligonucleotide
aggccggccgacgagcugc

SEQ ID NO: 3283736 - RNA, 19 nt, Artificial Sequence
  Description of Artificial Sequence: Synthetic oligonucleotide
gcugggguucaccagcacg

SEQ ID NO: 3283737 - RNA, 19 nt, Artificial Sequence
  Description of Artificial Sequence: Synthetic oligonucleotide
gucugcaugccaguuuucc

SEQ ID NO: 3283738 - RNA, 19 nt, Artificial Sequence
  Description of Artificial Sequence: Synthetic oligonucleotide
ucuaggccggccgacgagc

SEQ ID NO: 3283739 - RNA, 19 nt, Artificial Sequence
  Description of Artificial Sequence: Synthetic oligonucleotide
caucugacgcagcucgcgc

SEQ ID NO: 3283740 - RNA, 19 nt, Artificial Sequence
  Description of Artificial Sequence: Synthetic oligonucleotide
gugagaagguccggaagag

SEQ ID NO: 3283741 - RNA, 19 nt, Artificial Sequence
  Description of Artificial Sequence: Synthetic oligonucleotide
aggcacacacgccaggaaa

SEQ ID NO: 3283742 - RNA, 19 nt, Artificial Sequence
  Description of Artificial Sequence: Synthetic oligonucleotide
ugacgcagcucgcgcaggc

SEQ ID NO: 3283743 - RNA, 19 nt, Artificial Sequence
  Description of Artificial Sequence: Synthetic oligonucleotide
acacacgcgcguguauggc

SEQ ID NO: 3283744 - RNA, 19 nt, Artificial Sequence
  Description of Artificial Sequence: Synthetic oligonucleotide
augcuggaugauucgggcu

SEQ ID NO: 3283745 - RNA, 19 nt, Artificial Sequence
  Description of Artificial Sequence: Synthetic oligonucleotide
gguaaaugucccacugucc

SEQ ID NO: 3283746 - RNA, 19 nt, Artificial Sequence
  Description of Artificial Sequence: Synthetic oligonucleotide
gaagcgaggcacacacgcc

SEQ ID NO: 3283747 - RNA, 19 nt, Artificial Sequence
  Description of Artificial Sequence: Synthetic oligonucleotide
gacgcucucgcagcccucg

SEQ ID NO: 3283748 - RNA, 19 nt, Artificial Sequence
  Description of Artificial Sequence: Synthetic oligonucleotide
caggaaaccggcgacgcuc

SEQ ID NO: 3283749 - RNA, 19 nt, Artificial Sequence
  Description of Artificial Sequence: Synthetic oligonucleotide
uuaagaaggagauagaggg

SEQ ID NO: 3283750 - RNA, 19 nt, Artificial Sequence
  Description of Artificial Sequence: Synthetic oligonucleotide
aauauaaucauugauugca

SEQ ID NO: 3283751 - RNA, 19 nt, Artificial Sequence
  Description of Artificial Sequence: Synthetic oligonucleotide
aaaauaucuggcuacucgg

SEQ ID NO: 3283752 - RNA, 19 nt, Artificial Sequence
  Description of Artificial Sequence: Synthetic oligonucleotide
agaauaaaggacuuggguc

SEQ ID NO: 3283753 - RNA, 19 nt, Artificial Sequence
  Description of Artificial Sequence: Synthetic oligonucleotide
ugaaauugcagguucauca

SEQ ID NO: 3283754 - RNA, 19 nt, Artificial Sequence
  Description of Artificial Sequence: Synthetic oligonucleotide
aaggucacaacggacaccc

SEQ ID NO: 3283755 - RNA, 19 nt, Artificial Sequence
  Description of Artificial Sequence: Synthetic oligonucleotide
uugugaaauuccuugauag

SEQ ID NO: 3283756 - RNA, 19 nt, Artificial Sequence
  Description of Artificial Sequence: Synthetic oligonucleotide
uucagauucacugauaaca

SEQ ID NO: 3283757 - RNA, 19 nt, Artificial Sequence
  Description of Artificial Sequence: Synthetic oligonucleotide
aauugcagguucaucagcc

SEQ ID NO: 3283758 - RNA, 19 nt, Artificial Sequence
  Description of Artificial Sequence: Synthetic oligonucleotide
uguagauagcaaaugagcu

SEQ ID NO: 3283759 - RNA, 19 nt, Artificial Sequence
  Description of Artificial Sequence: Synthetic oligonucleotide
uuguagauagcaaaugagc

SEQ ID NO: 3283760 - RNA, 19 nt, Artificial Sequence
  Description of Artificial Sequence: Synthetic oligonucleotide
aaauugcagguucaucagc

SEQ ID NO: 3283761 - RNA, 19 nt, Artificial Sequence
  Description of Artificial Sequence: Synthetic oligonucleotide
cuaacauucguucuucugg

SEQ ID NO: 3283762 - RNA, 19 nt, Artificial Sequence
  Description of Artificial Sequence: Synthetic oligonucleotide
agacuuaagaaggagauag

SEQ ID NO: 3283763 - RNA, 19 nt, Artificial Sequence
  Description of Artificial Sequence: Synthetic oligonucleotide
cuuaagaaggagauagagg

SEQ ID NO: 3283764 - RNA, 19 nt, Artificial Sequence
  Description of Artificial Sequence: Synthetic oligonucleotide
aacaaucaagucuuguuca

SEQ ID NO: 3283765 - RNA, 19 nt, Artificial Sequence
  Description of Artificial Sequence: Synthetic oligonucleotide
acucaaaauaucuggcuac

SEQ ID NO: 3283766 - RNA, 19 nt, Artificial Sequence
  Description of Artificial Sequence: Synthetic oligonucleotide
ucugcuggcaacaaucaag

SEQ ID NO: 3283767 - RNA, 19 nt, Artificial Sequence
  Description of Artificial Sequence: Synthetic oligonucleotide
ucuccuaauaucuccuucg

SEQ ID NO: 3283768 - RNA, 19 nt, Artificial Sequence
  Description of Artificial Sequence: Synthetic oligonucleotide
uuugggaagccucugaaac

SEQ ID NO: 3283769 - RNA, 19 nt, Artificial Sequence
  Description of Artificial Sequence: Synthetic oligonucleotide
ugucuuaagucccagagau

SEQ ID NO: 3283770 - RNA, 19 nt, Artificial Sequence
  Description of Artificial Sequence: Synthetic oligonucleotide
accagauucagauucacug

SEQ ID NO: 3283771 - RNA, 19 nt, Artificial Sequence
  Description of Artificial Sequence: Synthetic oligonucleotide
aauuccuugauagucacgu

SEQ ID NO: 3283772 - RNA, 19 nt, Artificial Sequence
  Description of Artificial Sequence: Synthetic oligonucleotide
gaucauauuggguagccug

SEQ ID NO: 3283773 - RNA, 19 nt, Artificial Sequence
  Description of Artificial Sequence: Synthetic oligonucleotide
ucuguuuuggaaagcaucu

SEQ ID NO: 3283774 - RNA, 19 nt, Artificial Sequence
  Description of Artificial Sequence: Synthetic oligonucleotide
uugauagucacgugguagg

SEQ ID NO: 3283775 - RNA, 19 nt, Artificial Sequence
  Description of Artificial Sequence: Synthetic oligonucleotide
ucuacuucuaaugugaaau

SEQ ID NO: 3283776 - RNA, 19 nt, Artificial Sequence
  Description of Artificial Sequence: Synthetic oligonucleotide
ucaagucuuguucauaaac

SEQ ID NO: 3283777 - RNA, 19 nt, Artificial Sequence
  Description of Artificial Sequence: Synthetic oligonucleotide
uguguguaaaagcuguagc

SEQ ID NO: 3283778 - RNA, 19 nt, Artificial Sequence
  Description of Artificial Sequence: Synthetic oligonucleotide
uucauaaacaggagggccc

SEQ ID NO: 3283779 - RNA, 19 nt, Artificial Sequence
  Description of Artificial Sequence: Synthetic oligonucleotide
aaucauugauugcaguucu

SEQ ID NO: 3283780 - RNA, 19 nt, Artificial Sequence
  Description of Artificial Sequence: Synthetic oligonucleotide
uuuuggugugccuugacug

SEQ ID NO: 3283781 - RNA, 19 nt, Artificial Sequence
  Description of Artificial Sequence: Synthetic oligonucleotide
cacgacuucuuauaggugg

SEQ ID NO: 3283782 - RNA, 19 nt, Artificial Sequence
  Description of Artificial Sequence: Synthetic oligonucleotide
uccucuacauuauaaaacu

SEQ ID NO: 3283783 - RNA, 19 nt, Artificial Sequence
  Description of Artificial Sequence: Synthetic oligonucleotide
guaauuguuaggaacauac

SEQ ID NO: 3283784 - RNA, 19 nt, Artificial Sequence
  Description of Artificial Sequence: Synthetic oligonucleotide
uguaaaagcuguagcagca

SEQ ID NO: 3283785 - RNA, 19 nt, Artificial Sequence
  Description of Artificial Sequence: Synthetic oligonucleotide
uucuguaccagauucagau

SEQ ID NO: 3283786 - RNA, 19 nt, Artificial Sequence
  Description of Artificial Sequence: Synthetic oligonucleotide
cuagguaauuguuaggaac

SEQ ID NO: 3283787 - RNA, 19 nt, Artificial Sequence
  Description of Artificial Sequence: Synthetic oligonucleotide
aauuacuagcuucucuugu

SEQ ID NO: 3283788 - RNA, 19 nt, Artificial Sequence
  Description of Artificial Sequence: Synthetic oligonucleotide
caguucuucaauuacuagc

SEQ ID NO: 3283789 - RNA, 19 nt, Artificial Sequence
  Description of Artificial Sequence: Synthetic oligonucleotide
ugauaacagacucaucugu

SEQ ID NO: 3283790 - RNA, 19 nt, Artificial Sequence
  Description of Artificial Sequence: Synthetic oligonucleotide
uuuguggagcaucacuuag

SEQ ID NO: 3283791 - RNA, 19 nt, Artificial Sequence
  Description of Artificial Sequence: Synthetic oligonucleotide
aagggcagaucuuuucuuc

SEQ ID NO: 3283792 - RNA, 19 nt, Artificial Sequence
  Description of Artificial Sequence: Synthetic oligonucleotide
caggaaaccgcauugaauc

SEQ ID NO: 3283793 - RNA, 19 nt, Artificial Sequence
  Description of Artificial Sequence: Synthetic oligonucleotide
accgcauugaaucccaauc

SEQ ID NO: 3283794 - RNA, 19 nt, Artificial Sequence
  Description of Artificial Sequence: Synthetic oligonucleotide
uguuuuggaaagcaucugu

SEQ ID NO: 3283795 - RNA, 19 nt, Artificial Sequence
  Description of Artificial Sequence: Synthetic oligonucleotide
gaaauugcagguucaucag

SEQ ID NO: 3283796 - RNA, 19 nt, Artificial Sequence
  Description of Artificial Sequence: Synthetic oligonucleotide
aauaucuccuucgcccugc

SEQ ID NO: 3283797 - RNA, 19 nt, Artificial Sequence
  Description of Artificial Sequence: Synthetic oligonucleotide
ugcaaggucacaacggaca

SEQ ID NO: 3283798 - RNA, 19 nt, Artificial Sequence
  Description of Artificial Sequence: Synthetic oligonucleotide
guuaggaacauacacaugu

SEQ ID NO: 3283799 - RNA, 19 nt, Artificial Sequence
  Description of Artificial Sequence: Synthetic oligonucleotide
auauuggguagccugagcu

SEQ ID NO: 3283800 - RNA, 19 nt, Artificial Sequence
  Description of Artificial Sequence: Synthetic oligonucleotide
gguacuagguaauuguuag

SEQ ID NO: 3283801 - RNA, 19 nt, Artificial Sequence
  Description of Artificial Sequence: Synthetic oligonucleotide
uuuggugugccuugacugg

SEQ ID NO: 3283802 - RNA, 19 nt, Artificial Sequence
  Description of Artificial Sequence: Synthetic oligonucleotide
uuuuccugaugucacugag

SEQ ID NO: 3283803 - RNA, 19 nt, Artificial Sequence
  Description of Artificial Sequence: Synthetic oligonucleotide
ucaauuacuagcuucucuu

SEQ ID NO: 3283804 - RNA, 19 nt, Artificial Sequence
  Description of Artificial Sequence: Synthetic oligonucleotide
acuuaagaaggagauagag

SEQ ID NO: 3283805 - RNA, 19 nt, Artificial Sequence
  Description of Artificial Sequence: Synthetic oligonucleotide
uacuagguaauuguuagga

SEQ ID NO: 3283806 - RNA, 19 nt, Artificial Sequence
  Description of Artificial Sequence: Synthetic oligonucleotide
cacuuagagauucugugcc

SEQ ID NO: 3283807 - RNA, 19 nt, Artificial Sequence
  Description of Artificial Sequence: Synthetic oligonucleotide
uucaauuacuagcuucucu

SEQ ID NO: 3283808 - RNA, 19 nt, Artificial Sequence
  Description of Artificial Sequence: Synthetic oligonucleotide
agguggguagugcaguugc

SEQ ID NO: 3283809 - RNA, 19 nt, Artificial Sequence
  Description of Artificial Sequence: Synthetic oligonucleotide
auuacuagcuucucuugug

SEQ ID NO: 3283810 - RNA, 19 nt, Artificial Sequence
  Description of Artificial Sequence: Synthetic oligonucleotide
ccuaauaucuccuucgccc

SEQ ID NO: 3283811 - RNA, 19 nt, Artificial Sequence
  Description of Artificial Sequence: Synthetic oligonucleotide
uuauagguggguagugcag

SEQ ID NO: 3283812 - RNA, 19 nt, Artificial Sequence
  Description of Artificial Sequence: Synthetic oligonucleotide
uucugugccgucuugaaau

SEQ ID NO: 3283813 - RNA, 19 nt, Artificial Sequence
  Description of Artificial Sequence: Synthetic oligonucleotide
ugucacugaggcuuuacug

SEQ ID NO: 3283814 - RNA, 19 nt, Artificial Sequence
  Description of Artificial Sequence: Synthetic oligonucleotide
uuacuagcuucucuugugc

SEQ ID NO: 3283815 - RNA, 19 nt, Artificial Sequence
  Description of Artificial Sequence: Synthetic oligonucleotide
uucacuuucuguaccagau

SEQ ID NO: 3283816 - RNA, 19 nt, Artificial Sequence
  Description of Artificial Sequence: Synthetic oligonucleotide
aacauucguucuucuggac

SEQ ID NO: 3283817 - RNA, 19 nt, Artificial Sequence
  Description of Artificial Sequence: Synthetic oligonucleotide
agggaaaggaaacuucuug

SEQ ID NO: 3283818 - RNA, 19 nt, Artificial Sequence
  Description of Artificial Sequence: Synthetic oligonucleotide
cuucuaaugugaaauauaa

SEQ ID NO: 3283819 - RNA, 19 nt, Artificial Sequence
  Description of Artificial Sequence: Synthetic oligonucleotide
acucggucugucuugcccc

SEQ ID NO: 3283820 - RNA, 19 nt, Artificial Sequence
  Description of Artificial Sequence: Synthetic oligonucleotide
ugagcuucucuccuaauau

SEQ ID NO: 3283821 - RNA, 19 nt, Artificial Sequence
  Description of Artificial Sequence: Synthetic oligonucleotide
ugugccgucuugaaauugc

SEQ ID NO: 3283822 - RNA, 19 nt, Artificial Sequence
  Description of Artificial Sequence: Synthetic oligonucleotide
uucuggacccauauuggcc

SEQ ID NO: 3283823 - RNA, 19 nt, Artificial Sequence
  Description of Artificial Sequence: Synthetic oligonucleotide
aucugucacuaguacuucc

SEQ ID NO: 3283824 - RNA, 19 nt, Artificial Sequence
  Description of Artificial Sequence: Synthetic oligonucleotide
uugggcaugacaccauuug

SEQ ID NO: 3283825 - RNA, 19 nt, Artificial Sequence
  Description of Artificial Sequence: Synthetic oligonucleotide
uaucaguugccccauugcu

SEQ ID NO: 3283826 - RNA, 19 nt, Artificial Sequence
  Description of Artificial Sequence: Synthetic oligonucleotide
gggaaaggaaacuucuugg

SEQ ID NO: 3283827 - RNA, 19 nt, Artificial Sequence
  Description of Artificial Sequence: Synthetic oligonucleotide
cauguugaggcuuguacug

SEQ ID NO: 3283828 - RNA, 19 nt, Artificial Sequence
  Description of Artificial Sequence: Synthetic oligonucleotide
cuguaccagauucagauuc

SEQ ID NO: 3283829 - RNA, 19 nt, Artificial Sequence
  Description of Artificial Sequence: Synthetic oligonucleotide
agagauccacuucacuuuc

SEQ ID NO: 3283830 - RNA, 19 nt, Artificial Sequence
  Description of Artificial Sequence: Synthetic oligonucleotide
uguagcagcagcuaacauu

SEQ ID NO: 3283831 - RNA, 19 nt, Artificial Sequence
  Description of Artificial Sequence: Synthetic oligonucleotide
uaacauucguucuucugga

SEQ ID NO: 3283832 - RNA, 19 nt, Artificial Sequence
  Description of Artificial Sequence: Synthetic oligonucleotide
auaacagacucaucuguca

SEQ ID NO: 3283833 - RNA, 19 nt, Artificial Sequence
  Description of Artificial Sequence: Synthetic oligonucleotide
guguaaaagcuguagcagc

SEQ ID NO: 3283834 - RNA, 19 nt, Artificial Sequence
  Description of Artificial Sequence: Synthetic oligonucleotide
auucagauucacugauaac

SEQ ID NO: 3283835 - RNA, 19 nt, Artificial Sequence
  Description of Artificial Sequence: Synthetic oligonucleotide
uaacugaucuagccugggg

SEQ ID NO: 3283836 - RNA, 19 nt, Artificial Sequence
  Description of Artificial Sequence: Synthetic oligonucleotide
caacaaucaagucuuguuc

SEQ ID NO: 3283837 - RNA, 19 nt, Artificial Sequence
  Description of Artificial Sequence: Synthetic oligonucleotide
agcaaaugagcugaucuuc

SEQ ID NO: 3283838 - RNA, 19 nt, Artificial Sequence
  Description of Artificial Sequence: Synthetic oligonucleotide
acugaucuagccuggggag

SEQ ID NO: 3283839 - RNA, 19 nt, Artificial Sequence
  Description of Artificial Sequence: Synthetic oligonucleotide
ucacacgacuucuuauagg

SEQ ID NO: 3283840 - RNA, 19 nt, Artificial Sequence
  Description of Artificial Sequence: Synthetic oligonucleotide
acuuagagauucugugccg

SEQ ID NO: 3283841 - RNA, 19 nt, Artificial Sequence
  Description of Artificial Sequence: Synthetic oligonucleotide
cuugauagucacgugguag

SEQ ID NO: 3283842 - RNA, 19 nt, Artificial Sequence
  Description of Artificial Sequence: Synthetic oligonucleotide
acauguugaggcuuguacu

SEQ ID NO: 3283843 - RNA, 19 nt, Artificial Sequence
  Description of Artificial Sequence: Synthetic oligonucleotide
guagggaucauauugggua

SEQ ID NO: 3283844 - RNA, 19 nt, Artificial Sequence
  Description of Artificial Sequence: Synthetic oligonucleotide
aaacaggagggcccauuuc

SEQ ID NO: 3283845 - RNA, 19 nt, Artificial Sequence
  Description of Artificial Sequence: Synthetic oligonucleotide
uaaucauugauugcaguuc

SEQ ID NO: 3283846 - RNA, 19 nt, Artificial Sequence
  Description of Artificial Sequence: Synthetic oligonucleotide
cagccugugucuuaagucc

SEQ ID NO: 3283847 - RNA, 19 nt, Artificial Sequence
  Description of Artificial Sequence: Synthetic oligonucleotide
uucucaguugguacuaggu

SEQ ID NO: 3283848 - RNA, 19 nt, Artificial Sequence
  Description of Artificial Sequence: Synthetic oligonucleotide
cuuuguagauagcaaauga

SEQ ID NO: 3283849 - RNA, 19 nt, Artificial Sequence
  Description of Artificial Sequence: Synthetic oligonucleotide
uuuuccaaaaucaugauca

SEQ ID NO: 3283850 - RNA, 19 nt, Artificial Sequence
  Description of Artificial Sequence: Synthetic oligonucleotide
aaaaucaugaucagcaagg

SEQ ID NO: 3283851 - RNA, 19 nt, Artificial Sequence
  Description of Artificial Sequence: Synthetic oligonucleotide
aaggauacagaaaauaggg

SEQ ID NO: 3283852 - RNA, 19 nt, Artificial Sequence
  Description of Artificial Sequence: Synthetic oligonucleotide
uccaaaaucaugaucagca

SEQ ID NO: 3283853 - RNA, 19 nt, Artificial Sequence
  Description of Artificial Sequence: Synthetic oligonucleotide
gaagauuugcacaaggugg

SEQ ID NO: 3283854 - RNA, 19 nt, Artificial Sequence
  Description of Artificial Sequence: Synthetic oligonucleotide
agaggcuuguucuugaccc

SEQ ID NO: 3283855 - RNA, 19 nt, Artificial Sequence
  Description of Artificial Sequence: Synthetic oligonucleotide
ugaucuugggguuaugugg

SEQ ID NO: 3283856 - RNA, 19 nt, Artificial Sequence
  Description of Artificial Sequence: Synthetic oligonucleotide
uuguucuugacccggaagg

SEQ ID NO: 3283857 - RNA, 19 nt, Artificial Sequence
  Description of Artificial Sequence: Synthetic oligonucleotide
gauacagaaaauagggugg

SEQ ID NO: 3283858 - RNA, 19 nt, Artificial Sequence
  Description of Artificial Sequence: Synthetic oligonucleotide
aaauaggguggccagagug

SEQ ID NO: 3283859 - RNA, 19 nt, Artificial Sequence
  Description of Artificial Sequence: Synthetic oligonucleotide
ugcacaagguggcagaacg

SEQ ID NO: 3283860 - RNA, 19 nt, Artificial Sequence
  Description of Artificial Sequence: Synthetic oligonucleotide
ugaagauuugcacaaggug

SEQ ID NO: 3283861 - RNA, 19 nt, Artificial Sequence
  Description of Artificial Sequence: Synthetic oligonucleotide
aagauuugcacaagguggc

SEQ ID NO: 3283862 - RNA, 19 nt, Artificial Sequence
  Description of Artificial Sequence: Synthetic oligonucleotide
caaggauacagaaaauagg

SEQ ID NO: 3283863 - RNA, 19 nt, Artificial Sequence
  Description of Artificial Sequence: Synthetic oligonucleotide
aucagcaaggcagagaugg

SEQ ID NO: 3283864 - RNA, 19 nt, Artificial Sequence
  Description of Artificial Sequence: Synthetic oligonucleotide
uuggauuucagcuucugug

SEQ ID NO: 3283865 - RNA, 19 nt, Artificial Sequence
  Description of Artificial Sequence: Synthetic oligonucleotide
aaaucaugaucagcaaggc

SEQ ID NO: 3283866 - RNA, 19 nt, Artificial Sequence
  Description of Artificial Sequence: Synthetic oligonucleotide
aucaugaucagcaaggcag

SEQ ID NO: 3283867 - RNA, 19 nt, Artificial Sequence
  Description of Artificial Sequence: Synthetic oligonucleotide
aaugcagcuacgauguuuc

SEQ ID NO: 3283868 - RNA, 19 nt, Artificial Sequence
  Description of Artificial Sequence: Synthetic oligonucleotide
uuuuccugaaugcagcuac

SEQ ID NO: 3283869 - RNA, 19 nt, Artificial Sequence
  Description of Artificial Sequence: Synthetic oligonucleotide
ugaucagcaaggcagagau

SEQ ID NO: 3283870 - RNA, 19 nt, Artificial Sequence
  Description of Artificial Sequence: Synthetic oligonucleotide
agugguggccaccaguacc

SEQ ID NO: 3283871 - RNA, 19 nt, Artificial Sequence
  Description of Artificial Sequence: Synthetic oligonucleotide
ggauacagaaaauagggug

SEQ ID NO: 3283872 - RNA, 19 nt, Artificial Sequence
  Description of Artificial Sequence: Synthetic oligonucleotide
aagaccaucuuuuccaaaa

SEQ ID NO: 3283873 - RNA, 19 nt, Artificial Sequence
  Description of Artificial Sequence: Synthetic oligonucleotide
cauucucagacccugcugg

SEQ ID NO: 3283874 - RNA, 19 nt, Artificial Sequence
  Description of Artificial Sequence: Synthetic oligonucleotide
uggauuucagcuucugugc

SEQ ID NO: 3283875 - RNA, 19 nt, Artificial Sequence
  Description of Artificial Sequence: Synthetic oligonucleotide
agcaagaccaucuuuucca

SEQ ID NO: 3283876 - RNA, 19 nt, Artificial Sequence
  Description of Artificial Sequence: Synthetic oligonucleotide
caaaaucaugaucagcaag

SEQ ID NO: 3283877 - RNA, 19 nt, Artificial Sequence
  Description of Artificial Sequence: Synthetic oligonucleotide
aucuuuuccaaaaucauga

SEQ ID NO: 3283878 - RNA, 19 nt, Artificial Sequence
  Description of Artificial Sequence: Synthetic oligonucleotide
aauaggguggccagagugg

SEQ ID NO: 3283879 - RNA, 19 nt, Artificial Sequence
  Description of Artificial Sequence: Synthetic oligonucleotide
gacacauuggauuucagcu

SEQ ID NO: 3283880 - RNA, 19 nt, Artificial Sequence
  Description of Artificial Sequence: Synthetic oligonucleotide
guuucugccaaggauacag

SEQ ID NO: 3283881 - RNA, 19 nt, Artificial Sequence
  Description of Artificial Sequence: Synthetic oligonucleotide
auacagaaaauaggguggc

SEQ ID NO: 3283882 - RNA, 19 nt, Artificial Sequence
  Description of Artificial Sequence: Synthetic oligonucleotide
gaaaauaggguggccagag

SEQ ID NO: 3283883 - RNA, 19 nt, Artificial Sequence
  Description of Artificial Sequence: Synthetic oligonucleotide
uucuugacccggaaggcag

SEQ ID NO: 3283884 - RNA, 19 nt, Artificial Sequence
  Description of Artificial Sequence: Synthetic oligonucleotide
aaucaugaucagcaaggca

SEQ ID NO: 3283885 - RNA, 19 nt, Artificial Sequence
  Description of Artificial Sequence: Synthetic oligonucleotide
aaggcaguggugguggugg

SEQ ID NO: 3283886 - RNA, 19 nt, Artificial Sequence
  Description of Artificial Sequence: Synthetic oligonucleotide
ugugguuggaggcaccagc

SEQ ID NO: 3283887 - RNA, 19 nt, Artificial Sequence
  Description of Artificial Sequence: Synthetic oligonucleotide
caucuuuuccaaaaucaug

SEQ ID NO: 3283888 - RNA, 19 nt, Artificial Sequence
  Description of Artificial Sequence: Synthetic oligonucleotide
ggggauuucauucucagac

SEQ ID NO: 3283889 - RNA, 19 nt, Artificial Sequence
  Description of Artificial Sequence: Synthetic oligonucleotide
ugugccugaagauuugcac

SEQ ID NO: 3283890 - RNA, 19 nt, Artificial Sequence
  Description of Artificial Sequence: Synthetic oligonucleotide
uuuccaaaaucaugaucag

SEQ ID NO: 3283891 - RNA, 19 nt, Artificial Sequence
  Description of Artificial Sequence: Synthetic oligonucleotide
uugaucuugggguuaugug

SEQ ID NO: 3283892 - RNA, 19 nt, Artificial Sequence
  Description of Artificial Sequence: Synthetic oligonucleotide
agugagcucagaccgcaac

SEQ ID NO: 3283893 - RNA, 19 nt, Artificial Sequence
  Description of Artificial Sequence: Synthetic oligonucleotide
uacgauguuucugccaagg

SEQ ID NO: 3283894 - RNA, 19 nt, Artificial Sequence
  Description of Artificial Sequence: Synthetic oligonucleotide
cuugggguuaugugguugg

SEQ ID NO: 3283895 - RNA, 19 nt, Artificial Sequence
  Description of Artificial Sequence: Synthetic oligonucleotide
uuuccugaaugcagcuacg

SEQ ID NO: 3283896 - RNA, 19 nt, Artificial Sequence
  Description of Artificial Sequence: Synthetic oligonucleotide
cagaaaauaggguggccag

SEQ ID NO: 3283897 - RNA, 19 nt, Artificial Sequence
  Description of Artificial Sequence: Synthetic oligonucleotide
ucagaccgcaacugggagg

SEQ ID NO: 3283898 - RNA, 19 nt, Artificial Sequence
  Description of Artificial Sequence: Synthetic oligonucleotide
cuuuuccaaaaucaugauc

SEQ ID NO: 3283899 - RNA, 19 nt, Artificial Sequence
  Description of Artificial Sequence: Synthetic oligonucleotide
ccaaggauacagaaaauag

SEQ ID NO: 3283900 - RNA, 19 nt, Artificial Sequence
  Description of Artificial Sequence: Synthetic oligonucleotide
ucucagacccugcuggccc

SEQ ID NO: 3283901 - RNA, 19 nt, Artificial Sequence
  Description of Artificial Sequence: Synthetic oligonucleotide
ucaugaucagcaaggcaga

SEQ ID NO: 3283902 - RNA, 19 nt, Artificial Sequence
  Description of Artificial Sequence: Synthetic oligonucleotide
auucucagacccugcuggc

SEQ ID NO: 3283903 - RNA, 19 nt, Artificial Sequence
  Description of Artificial Sequence: Synthetic oligonucleotide
auuucauucucagacccug

SEQ ID NO: 3283904 - RNA, 19 nt, Artificial Sequence
  Description of Artificial Sequence: Synthetic oligonucleotide
gguacugcccgacacauug

SEQ ID NO: 3283905 - RNA, 19 nt, Artificial Sequence
  Description of Artificial Sequence: Synthetic oligonucleotide
ggauuucauucucagaccc

SEQ ID NO: 3283906 - RNA, 19 nt, Artificial Sequence
  Description of Artificial Sequence: Synthetic oligonucleotide
accaucuuuuccaaaauca

SEQ ID NO: 3283907 - RNA, 19 nt, Artificial Sequence
  Description of Artificial Sequence: Synthetic oligonucleotide
cagagauggguacugcccg

SEQ ID NO: 3283908 - RNA, 19 nt, Artificial Sequence
  Description of Artificial Sequence: Synthetic oligonucleotide
ucugccaaggauacagaaa

SEQ ID NO: 3283909 - RNA, 19 nt, Artificial Sequence
  Description of Artificial Sequence: Synthetic oligonucleotide
uucauucucagacccugcu

SEQ ID NO: 3283910 - RNA, 19 nt, Artificial Sequence
  Description of Artificial Sequence: Synthetic oligonucleotide
gggguuaugugguuggagg

SEQ ID NO: 3283911 - RNA, 19 nt, Artificial Sequence
  Description of Artificial Sequence: Synthetic oligonucleotide
gauguuucugccaaggaua

SEQ ID NO: 3283912 - RNA, 19 nt, Artificial Sequence
  Description of Artificial Sequence: Synthetic oligonucleotide
acagaaaauaggguggcca

SEQ ID NO: 3283913 - RNA, 19 nt, Artificial Sequence
  Description of Artificial Sequence: Synthetic oligonucleotide
ucauucucagacccugcug

SEQ ID NO: 3283914 - RNA, 19 nt, Artificial Sequence
  Description of Artificial Sequence: Synthetic oligonucleotide
uguguggggauuucauucu

SEQ ID NO: 3283915 - RNA, 19 nt, Artificial Sequence
  Description of Artificial Sequence: Synthetic oligonucleotide
aguaccggcagugagcuca

SEQ ID NO: 3283916 - RNA, 19 nt, Artificial Sequence
  Description of Artificial Sequence: Synthetic oligonucleotide
cacauuggauuucagcuuc

SEQ ID NO: 3283917 - RNA, 19 nt, Artificial Sequence
  Description of Artificial Sequence: Synthetic oligonucleotide
ucagcuucugugccugaag

SEQ ID NO: 3283918 - RNA, 19 nt, Artificial Sequence
  Description of Artificial Sequence: Synthetic oligonucleotide
auuugcacaagguggcaga

SEQ ID NO: 3283919 - RNA, 19 nt, Artificial Sequence
  Description of Artificial Sequence: Synthetic oligonucleotide
uagaggcuuguucuugacc

SEQ ID NO: 3283920 - RNA, 19 nt, Artificial Sequence
  Description of Artificial Sequence: Synthetic oligonucleotide
gcagcuacgauguuucugc

SEQ ID NO: 3283921 - RNA, 19 nt, Artificial Sequence
  Description of Artificial Sequence: Synthetic oligonucleotide
gauggguacugcccgacac

SEQ ID NO: 3283922 - RNA, 19 nt, Artificial Sequence
  Description of Artificial Sequence: Synthetic oligonucleotide
gauuugcacaagguggcag

SEQ ID NO: 3283923 - RNA, 19 nt, Artificial Sequence
  Description of Artificial Sequence: Synthetic oligonucleotide
gcagccauugaucuugggg

SEQ ID NO: 3283924 - RNA, 19 nt, Artificial Sequence
  Description of Artificial Sequence: Synthetic oligonucleotide
auuggauuucagcuucugu

SEQ ID NO: 3283925 - RNA, 19 nt, Artificial Sequence
  Description of Artificial Sequence: Synthetic oligonucleotide
uguggggauuucauucuca

SEQ ID NO: 3283926 - RNA, 19 nt, Artificial Sequence
  Description of Artificial Sequence: Synthetic oligonucleotide
ucagcaaggcagagauggg

SEQ ID NO: 3283927 - RNA, 19 nt, Artificial Sequence
  Description of Artificial Sequence: Synthetic oligonucleotide
uuucauucucagacccugc

SEQ ID NO: 3283928 - RNA, 19 nt, Artificial Sequence
  Description of Artificial Sequence: Synthetic oligonucleotide
aaaauaggguggccagagu

SEQ ID NO: 3283929 - RNA, 19 nt, Artificial Sequence
  Description of Artificial Sequence: Synthetic oligonucleotide
cuuguucuugacccggaag

SEQ ID NO: 3283930 - RNA, 19 nt, Artificial Sequence
  Description of Artificial Sequence: Synthetic oligonucleotide
guguguggggauuucauuc

SEQ ID NO: 3283931 - RNA, 19 nt, Artificial Sequence
  Description of Artificial Sequence: Synthetic oligonucleotide
accggcagugagcucagac

SEQ ID NO: 3283932 - RNA, 19 nt, Artificial Sequence
  Description of Artificial Sequence: Synthetic oligonucleotide
uuccaaaaucaugaucagc

SEQ ID NO: 3283933 - RNA, 19 nt, Artificial Sequence
  Description of Artificial Sequence: Synthetic oligonucleotide
ugccugaagauuugcacaa

SEQ ID NO: 3283934 - RNA, 19 nt, Artificial Sequence
  Description of Artificial Sequence: Synthetic oligonucleotide
auguuucugccaaggauac

SEQ ID NO: 3283935 - RNA, 19 nt, Artificial Sequence
  Description of Artificial Sequence: Synthetic oligonucleotide
cugccaaggauacagaaaa

SEQ ID NO: 3283936 - RNA, 19 nt, Artificial Sequence
  Description of Artificial Sequence: Synthetic oligonucleotide
caagguggcagaacgugug

SEQ ID NO: 3283937 - RNA, 19 nt, Artificial Sequence
  Description of Artificial Sequence: Synthetic oligonucleotide
accaguaccggcagugagc

SEQ ID NO: 3283938 - RNA, 19 nt, Artificial Sequence
  Description of Artificial Sequence: Synthetic oligonucleotide
ucuuuuccaaaaucaugau

SEQ ID NO: 3283939 - RNA, 19 nt, Artificial Sequence
  Description of Artificial Sequence: Synthetic oligonucleotide
gaccaucuuuuccaaaauc

SEQ ID NO: 3283940 - RNA, 19 nt, Artificial Sequence
  Description of Artificial Sequence: Synthetic oligonucleotide
ggaggcaccagcaagacca

SEQ ID NO: 3283941 - RNA, 19 nt, Artificial Sequence
  Description of Artificial Sequence: Synthetic oligonucleotide
aggguggccagaguggugg

SEQ ID NO: 3283942 - RNA, 19 nt, Artificial Sequence
  Description of Artificial Sequence: Synthetic oligonucleotide
ccugaaugcagcuacgaug

SEQ ID NO: 3283943 - RNA, 19 nt, Artificial Sequence
  Description of Artificial Sequence: Synthetic oligonucleotide
gagcucagaccgcaacugg

SEQ ID NO: 3283944 - RNA, 19 nt, Artificial Sequence
  Description of Artificial Sequence: Synthetic oligonucleotide
uguucuugacccggaaggc

SEQ ID NO: 3283945 - RNA, 19 nt, Artificial Sequence
  Description of Artificial Sequence: Synthetic oligonucleotide
ugagcucagaccgcaacug

SEQ ID NO: 3283946 - RNA, 19 nt, Artificial Sequence
  Description of Artificial Sequence: Synthetic oligonucleotide
uucugccaaggauacagaa

SEQ ID NO: 3283947 - RNA, 19 nt, Artificial Sequence
  Description of Artificial Sequence: Synthetic oligonucleotide
guggggauuucauucucag

SEQ ID NO: 3283948 - RNA, 19 nt, Artificial Sequence
  Description of Artificial Sequence: Synthetic oligonucleotide
auugaucuugggguuaugu

SEQ ID NO: 3283949 - RNA, 19 nt, Artificial Sequence
  Description of Artificial Sequence: Synthetic oligonucleotide
uuguauaacaucaacaacg

SEQ ID NO: 3283950 - RNA, 19 nt, Artificial Sequence
  Description of Artificial Sequence: Synthetic oligonucleotide
aaaucuauggacuuuagag

SEQ ID NO: 3283951 - RNA, 19 nt, Artificial Sequence
  Description of Artificial Sequence: Synthetic oligonucleotide
uauaacaucaacaacguca

SEQ ID NO: 3283952 - RNA, 19 nt, Artificial Sequence
  Description of Artificial Sequence: Synthetic oligonucleotide
aagauagggaaccaggcuc

SEQ ID NO: 3283953 - RNA, 19 nt, Artificial Sequence
  Description of Artificial Sequence: Synthetic oligonucleotide
uuaguaagcuucaauagcu

SEQ ID NO: 3283954 - RNA, 19 nt, Artificial Sequence
  Description of Artificial Sequence: Synthetic oligonucleotide
aacgucaagauagggaacc

SEQ ID NO: 3283955 - RNA, 19 nt, Artificial Sequence
  Description of Artificial Sequence: Synthetic oligonucleotide
aucuauggacuuuagaguc

SEQ ID NO: 3283956 - RNA, 19 nt, Artificial Sequence
  Description of Artificial Sequence: Synthetic oligonucleotide
aucaacaacgucaagauag

SEQ ID NO: 3283957 - RNA, 19 nt, Artificial Sequence
  Description of Artificial Sequence: Synthetic oligonucleotide
aaucuauggacuuuagagu

SEQ ID NO: 3283958 - RNA, 19 nt, Artificial Sequence
  Description of Artificial Sequence: Synthetic oligonucleotide
gcuucaauagcucugaggg

SEQ ID NO: 3283959 - RNA, 19 nt, Artificial Sequence
  Description of Artificial Sequence: Synthetic oligonucleotide
acuuuagagucgcagaggg

SEQ ID NO: 3283960 - RNA, 19 nt, Artificial Sequence
  Description of Artificial Sequence: Synthetic oligonucleotide
auacaggaaaaccaggguc

SEQ ID NO: 3283961 - RNA, 19 nt, Artificial Sequence
  Description of Artificial Sequence: Synthetic oligonucleotide
aacaucaacaacgucaaga

SEQ ID NO: 3283962 - RNA, 19 nt, Artificial Sequence
  Description of Artificial Sequence: Synthetic oligonucleotide
uguauaacaucaacaacgu

SEQ ID NO: 3283963 - RNA, 19 nt, Artificial Sequence
  Description of Artificial Sequence: Synthetic oligonucleotide
cuuaguaagcuucaauagc

SEQ ID NO: 3283964 - RNA, 19 nt, Artificial Sequence
  Description of Artificial Sequence: Synthetic oligonucleotide
uuggaagaugcuuaguaag

SEQ ID NO: 3283965 - RNA, 19 nt, Artificial Sequence
  Description of Artificial Sequence: Synthetic oligonucleotide
uucaauagcucugagggcc

SEQ ID NO: 3283966 - RNA, 19 nt, Artificial Sequence
  Description of Artificial Sequence: Synthetic oligonucleotide
uacaggaaaaccaggguca

SEQ ID NO: 3283967 - RNA, 19 nt, Artificial Sequence
  Description of Artificial Sequence: Synthetic oligonucleotide
gaaaaccagggucagagac

SEQ ID NO: 3283968 - RNA, 19 nt, Artificial Sequence
  Description of Artificial Sequence: Synthetic oligonucleotide
aaaccagggucagagacac

SEQ ID NO: 3283969 - RNA, 19 nt, Artificial Sequence
  Description of Artificial Sequence: Synthetic oligonucleotide
ucaagauagggaaccaggc

SEQ ID NO: 3283970 - RNA, 19 nt, Artificial Sequence
  Description of Artificial Sequence: Synthetic oligonucleotide
uuuuggaagaugcuuagua

SEQ ID NO: 3283971 - RNA, 19 nt, Artificial Sequence
  Description of Artificial Sequence: Synthetic oligonucleotide
cauacuguaccugaagugg

SEQ ID NO: 3283972 - RNA, 19 nt, Artificial Sequence
  Description of Artificial Sequence: Synthetic oligonucleotide
aaaaucuauggacuuuaga

SEQ ID NO: 3283973 - RNA, 19 nt, Artificial Sequence
  Description of Artificial Sequence: Synthetic oligonucleotide
ucaacaacgucaagauagg

SEQ ID NO: 3283974 - RNA, 19 nt, Artificial Sequence
  Description of Artificial Sequence: Synthetic oligonucleotide
aagaugcuuaguaagcuuc

SEQ ID NO: 3283975 - RNA, 19 nt, Artificial Sequence
  Description of Artificial Sequence: Synthetic oligonucleotide
ucuauggacuuuagagucg

SEQ ID NO: 3283976 - RNA, 19 nt, Artificial Sequence
  Description of Artificial Sequence: Synthetic oligonucleotide
acaacgucaagauagggaa

SEQ ID NO: 3283977 - RNA, 19 nt, Artificial Sequence
  Description of Artificial Sequence: Synthetic oligonucleotide
ugaaguggcuuguauaaca

SEQ ID NO: 3283978 - RNA, 19 nt, Artificial Sequence
  Description of Artificial Sequence: Synthetic oligonucleotide
uggaagaugcuuaguaagc

SEQ ID NO: 3283979 - RNA, 19 nt, Artificial Sequence
  Description of Artificial Sequence: Synthetic oligonucleotide
ucagacauacaggaaaacc

SEQ ID NO: 3283980 - RNA, 19 nt, Artificial Sequence
  Description of Artificial Sequence: Synthetic oligonucleotide
auaggcguggcccugguag

SEQ ID NO: 3283981 - RNA, 19 nt, Artificial Sequence
  Description of Artificial Sequence: Synthetic oligonucleotide
ugcuuaguaagcuucaaua

SEQ ID NO: 3283982 - RNA, 19 nt, Artificial Sequence
  Description of Artificial Sequence: Synthetic oligonucleotide
uuuagagucgcagaggguc

SEQ ID NO: 3283983 - RNA, 19 nt, Artificial Sequence
  Description of Artificial Sequence: Synthetic oligonucleotide
guugcccugagucauaggc

SEQ ID NO: 3283984 - RNA, 19 nt, Artificial Sequence
  Description of Artificial Sequence: Synthetic oligonucleotide
uagggaaccaggcucagac

SEQ ID NO: 3283985 - RNA, 19 nt, Artificial Sequence
  Description of Artificial Sequence: Synthetic oligonucleotide
ugagucauaggcguggccc

SEQ ID NO: 3283986 - RNA, 19 nt, Artificial Sequence
  Description of Artificial Sequence: Synthetic oligonucleotide
acauacaggaaaaccaggg

SEQ ID NO: 3283987 - RNA, 19 nt, Artificial Sequence
  Description of Artificial Sequence: Synthetic oligonucleotide
aggaaaaccagggucagag

SEQ ID NO: 3283988 - RNA, 19 nt, Artificial Sequence
  Description of Artificial Sequence: Synthetic oligonucleotide
uuuggaagaugcuuaguaa

SEQ ID NO: 3283989 - RNA, 19 nt, Artificial Sequence
  Description of Artificial Sequence: Synthetic oligonucleotide
gucagagacacacacacca

SEQ ID NO: 3283990 - RNA, 19 nt, Artificial Sequence
  Description of Artificial Sequence: Synthetic oligonucleotide
acaucaacaacgucaagau

SEQ ID NO: 3283991 - RNA, 19 nt, Artificial Sequence
  Description of Artificial Sequence: Synthetic oligonucleotide
agcuucaauagcucugagg

SEQ ID NO: 3283992 - RNA, 19 nt, Artificial Sequence
  Description of Artificial Sequence: Synthetic oligonucleotide
cuuguauaacaucaacaac

SEQ ID NO: 3283993 - RNA, 19 nt, Artificial Sequence
  Description of Artificial Sequence: Synthetic oligonucleotide
accagggucagagacacac

SEQ ID NO: 3283994 - RNA, 19 nt, Artificial Sequence
  Description of Artificial Sequence: Synthetic oligonucleotide
aguaagcuucaauagcucu

SEQ ID NO: 3283995 - RNA, 19 nt, Artificial Sequence
  Description of Artificial Sequence: Synthetic oligonucleotide
aacaacgucaagauaggga

SEQ ID NO: 3283996 - RNA, 19 nt, Artificial Sequence
  Description of Artificial Sequence: Synthetic oligonucleotide
aaguggcuuguauaacauc

SEQ ID NO: 3283997 - RNA, 19 nt, Artificial Sequence
  Description of Artificial Sequence: Synthetic oligonucleotide
accaggcucagacauacag

SEQ ID NO: 3283998 - RNA, 19 nt, Artificial Sequence
  Description of Artificial Sequence: Synthetic oligonucleotide
gacacacacaccagcaugg

SEQ ID NO: 3283999 - RNA, 19 nt, Artificial Sequence
  Description of Artificial Sequence: Synthetic oligonucleotide
cagacauacaggaaaacca

SEQ ID NO: 3284000 - RNA, 19 nt, Artificial Sequence
  Description of Artificial Sequence: Synthetic oligonucleotide
gucaagauagggaaccagg

SEQ ID NO: 3284001 - RNA, 19 nt, Artificial Sequence
  Description of Artificial Sequence: Synthetic oligonucleotide
aguggcuuguauaacauca

SEQ ID NO: 3284002 - RNA, 19 nt, Artificial Sequence
  Description of Artificial Sequence: Synthetic oligonucleotide
uugcccugagucauaggcg

SEQ ID NO: 3284003 - RNA, 19 nt, Artificial Sequence
  Description of Artificial Sequence: Synthetic oligonucleotide
ugguaggacaacuugccgu

SEQ ID NO: 3284004 - RNA, 19 nt, Artificial Sequence
  Description of Artificial Sequence: Synthetic oligonucleotide
gcuuaguaagcuucaauag

SEQ ID NO: 3284005 - RNA, 19 nt, Artificial Sequence
  Description of Artificial Sequence: Synthetic oligonucleotide
agacacacacaccagcaug

SEQ ID NO: 3284006 - RNA, 19 nt, Artificial Sequence
  Description of Artificial Sequence: Synthetic oligonucleotide
gacauacaggaaaaccagg

SEQ ID NO: 3284007 - RNA, 19 nt, Artificial Sequence
  Description of Artificial Sequence: Synthetic oligonucleotide
gagaccagcuggcuggagg

SEQ ID NO: 3284008 - RNA, 19 nt, Artificial Sequence
  Description of Artificial Sequence: Synthetic oligonucleotide
uggacuuuagagucgcaga

SEQ ID NO: 3284009 - RNA, 19 nt, Artificial Sequence
  Description of Artificial Sequence: Synthetic oligonucleotide
agacauacaggaaaaccag

SEQ ID NO: 3284010 - RNA, 19 nt, Artificial Sequence
  Description of Artificial Sequence: Synthetic oligonucleotide
ucagagacacacacaccag

SEQ ID NO: 3284011 - RNA, 19 nt, Artificial Sequence
  Description of Artificial Sequence: Synthetic oligonucleotide
auacuguaccugaaguggc

SEQ ID NO: 3284012 - RNA, 19 nt, Artificial Sequence
  Description of Artificial Sequence: Synthetic oligonucleotide
uaagcuucaauagcucuga

SEQ ID NO: 3284013 - RNA, 19 nt, Artificial Sequence
  Description of Artificial Sequence: Synthetic oligonucleotide
gacuuuagagucgcagagg

SEQ ID NO: 3284014 - RNA, 19 nt, Artificial Sequence
  Description of Artificial Sequence: Synthetic oligonucleotide
uuagagucgcagaggguca

SEQ ID NO: 3284015 - RNA, 19 nt, Artificial Sequence
  Description of Artificial Sequence: Synthetic oligonucleotide
acacacaccagcaugggug

SEQ ID NO: 3284016 - RNA, 19 nt, Artificial Sequence
  Description of Artificial Sequence: Synthetic oligonucleotide
gcuuguauaacaucaacaa

SEQ ID NO: 3284017 - RNA, 19 nt, Artificial Sequence
  Description of Artificial Sequence: Synthetic oligonucleotide
auaacaucaacaacgucaa

SEQ ID NO: 3284018 - RNA, 19 nt, Artificial Sequence
  Description of Artificial Sequence: Synthetic oligonucleotide
aaaaccagggucagagaca

SEQ ID NO: 3284019 - RNA, 19 nt, Artificial Sequence
  Description of Artificial Sequence: Synthetic oligonucleotide
uggcuuguauaacaucaac

SEQ ID NO: 3284020 - RNA, 19 nt, Artificial Sequence
  Description of Artificial Sequence: Synthetic oligonucleotide
aggacaacuugccgucccc

SEQ ID NO: 3284021 - RNA, 19 nt, Artificial Sequence
  Description of Artificial Sequence: Synthetic oligonucleotide
gucgcagagggucaguggc

SEQ ID NO: 3284022 - RNA, 19 nt, Artificial Sequence
  Description of Artificial Sequence: Synthetic oligonucleotide
cuucaauagcucugagggc

SEQ ID NO: 3284023 - RNA, 19 nt, Artificial Sequence
  Description of Artificial Sequence: Synthetic oligonucleotide
ggacuuuagagucgcagag

SEQ ID NO: 3284024 - RNA, 19 nt, Artificial Sequence
  Description of Artificial Sequence: Synthetic oligonucleotide
cagagacacacacaccagc

SEQ ID NO: 3284025 - RNA, 19 nt, Artificial Sequence
  Description of Artificial Sequence: Synthetic oligonucleotide
guaagcuucaauagcucug

SEQ ID NO: 3284026 - RNA, 19 nt, Artificial Sequence
  Description of Artificial Sequence: Synthetic oligonucleotide
cacacaccagcaugggugg

SEQ ID NO: 3284027 - RNA, 19 nt, Artificial Sequence
  Description of Artificial Sequence: Synthetic oligonucleotide
ugcccugagucauaggcgu

SEQ ID NO: 3284028 - RNA, 19 nt, Artificial Sequence
  Description of Artificial Sequence: Synthetic oligonucleotide
auggacuuuagagucgcag

SEQ ID NO: 3284029 - RNA, 19 nt, Artificial Sequence
  Description of Artificial Sequence: Synthetic oligonucleotide
caggcucagacauacagga

SEQ ID NO: 3284030 - RNA, 19 nt, Artificial Sequence
  Description of Artificial Sequence: Synthetic oligonucleotide
cuauggacuuuagagucgc

SEQ ID NO: 3284031 - RNA, 19 nt, Artificial Sequence
  Description of Artificial Sequence: Synthetic oligonucleotide
uaguaagcuucaauagcuc

SEQ ID NO: 3284032 - RNA, 19 nt, Artificial Sequence
  Description of Artificial Sequence: Synthetic oligonucleotide
uaggacaacuugccguccc

SEQ ID NO: 3284033 - RNA, 19 nt, Artificial Sequence
  Description of Artificial Sequence: Synthetic oligonucleotide
gcuguaggcauacuguacc

SEQ ID NO: 3284034 - RNA, 19 nt, Artificial Sequence
  Description of Artificial Sequence: Synthetic oligonucleotide
guaggcauacuguaccuga

SEQ ID NO: 3284035 - RNA, 19 nt, Artificial Sequence
  Description of Artificial Sequence: Synthetic oligonucleotide
gaaccaggcucagacauac

SEQ ID NO: 3284036 - RNA, 19 nt, Artificial Sequence
  Description of Artificial Sequence: Synthetic oligonucleotide
gggucagagacacacacac

SEQ ID NO: 3284037 - RNA, 19 nt, Artificial Sequence
  Description of Artificial Sequence: Synthetic oligonucleotide
uacuguaccugaaguggcu

SEQ ID NO: 3284038 - RNA, 19 nt, Artificial Sequence
  Description of Artificial Sequence: Synthetic oligonucleotide
cagggucagagacacacac

SEQ ID NO: 3284039 - RNA, 19 nt, Artificial Sequence
  Description of Artificial Sequence: Synthetic oligonucleotide
accagcauggguggggugg

SEQ ID NO: 3284040 - RNA, 19 nt, Artificial Sequence
  Description of Artificial Sequence: Synthetic oligonucleotide
aggcauacuguaccugaag

SEQ ID NO: 3284041 - RNA, 19 nt, Artificial Sequence
  Description of Artificial Sequence: Synthetic oligonucleotide
ucgcagagggucaguggcg

SEQ ID NO: 3284042 - RNA, 19 nt, Artificial Sequence
  Description of Artificial Sequence: Synthetic oligonucleotide
ucccgcuguaggcauacug

SEQ ID NO: 3284043 - RNA, 19 nt, Artificial Sequence
  Description of Artificial Sequence: Synthetic oligonucleotide
agucgcagagggucagugg

SEQ ID NO: 3284044 - RNA, 19 nt, Artificial Sequence
  Description of Artificial Sequence: Synthetic oligonucleotide
aagcuucaauagcucugag

SEQ ID NO: 3284045 - RNA, 19 nt, Artificial Sequence
  Description of Artificial Sequence: Synthetic oligonucleotide
ucaauagcucugagggccu

SEQ ID NO: 3284046 - RNA, 19 nt, Artificial Sequence
  Description of Artificial Sequence: Synthetic oligonucleotide
cugguaggacaacuugccg

SEQ ID NO: 3284047 - RNA, 19 nt, Artificial Sequence
  Description of Artificial Sequence: Synthetic oligonucleotide
ggggagaccagcuggcugg

SEQ ID NO: 3284048 - RNA, 19 nt, Artificial Sequence
  Description of Artificial Sequence: Synthetic oligonucleotide
uguaggcauacuguaccug

SEQ ID NO: 3284049 - RNA, 19 nt, Artificial Sequence
  Description of Artificial Sequence: Synthetic oligonucleotide
aaaaucaucuagcagauag

SEQ ID NO: 3284050 - RNA, 19 nt, Artificial Sequence
  Description of Artificial Sequence: Synthetic oligonucleotide
aaauuuaccaaauauuuca

SEQ ID NO: 3284051 - RNA, 19 nt, Artificial Sequence
  Description of Artificial Sequence: Synthetic oligonucleotide
uuuaccaaauauuucaugg

SEQ ID NO: 3284052 - RNA, 19 nt, Artificial Sequence
  Description of Artificial Sequence: Synthetic oligonucleotide
guuauaguuauuuacaugc

SEQ ID NO: 3284053 - RNA, 19 nt, Artificial Sequence
  Description of Artificial Sequence: Synthetic oligonucleotide
uguaauaaaagccagugac

SEQ ID NO: 3284054 - RNA, 19 nt, Artificial Sequence
  Description of Artificial Sequence: Synthetic oligonucleotide
agaccuuuacauuauaugc

SEQ ID NO: 3284055 - RNA, 19 nt, Artificial Sequence
  Description of Artificial Sequence: Synthetic oligonucleotide
aguaugugagucuagaaac

SEQ ID NO: 3284056 - RNA, 19 nt, Artificial Sequence
  Description of Artificial Sequence: Synthetic oligonucleotide
agaaguuauaguuauuuac

SEQ ID NO: 3284057 - RNA, 19 nt, Artificial Sequence
  Description of Artificial Sequence: Synthetic oligonucleotide
aauacaagacaacugucgg

SEQ ID NO: 3284058 - RNA, 19 nt, Artificial Sequence
  Description of Artificial Sequence: Synthetic oligonucleotide
agucuagaaacucuaaacc

SEQ ID NO: 3284059 - RNA, 19 nt, Artificial Sequence
  Description of Artificial Sequence: Synthetic oligonucleotide
aagguaguauucuaaaauc

SEQ ID NO: 3284060 - RNA, 19 nt, Artificial Sequence
  Description of Artificial Sequence: Synthetic oligonucleotide
uggcuuaaaacaaugacag

SEQ ID NO: 3284061 - RNA, 19 nt, Artificial Sequence
  Description of Artificial Sequence: Synthetic oligonucleotide
uaagugaagagacuuacag

SEQ ID NO: 3284062 - RNA, 19 nt, Artificial Sequence
  Description of Artificial Sequence: Synthetic oligonucleotide
aacaacagaguucaauuuc

SEQ ID NO: 3284063 - RNA, 19 nt, Artificial Sequence
  Description of Artificial Sequence: Synthetic oligonucleotide
uacgcuucuauuaagacug

SEQ ID NO: 3284064 - RNA, 19 nt, Artificial Sequence
  Description of Artificial Sequence: Synthetic oligonucleotide
aauguuuuauugcagagaa

SEQ ID NO: 3284065 - RNA, 19 nt, Artificial Sequence
  Description of Artificial Sequence: Synthetic oligonucleotide
ugaaguguaauaaaagcca

SEQ ID NO: 3284066 - RNA, 19 nt, Artificial Sequence
  Description of Artificial Sequence: Synthetic oligonucleotide
aaagaccauaaguauuugc

SEQ ID NO: 3284067 - RNA, 19 nt, Artificial Sequence
  Description of Artificial Sequence: Synthetic oligonucleotide
ucuacuuauuuauaaaccc

SEQ ID NO: 3284068 - RNA, 19 nt, Artificial Sequence
  Description of Artificial Sequence: Synthetic oligonucleotide
uagguuuugauccaaagga

SEQ ID NO: 3284069 - RNA, 19 nt, Artificial Sequence
  Description of Artificial Sequence: Synthetic oligonucleotide
aaaugcuagaagucaaagg

SEQ ID NO: 3284070 - RNA, 19 nt, Artificial Sequence
  Description of Artificial Sequence: Synthetic oligonucleotide
uagguaaugacaaugaaau

SEQ ID NO: 3284071 - RNA, 19 nt, Artificial Sequence
  Description of Artificial Sequence: Synthetic oligonucleotide
agugaagagacuuacagcu

SEQ ID NO: 3284072 - RNA, 19 nt, Artificial Sequence
  Description of Artificial Sequence: Synthetic oligonucleotide
uuauuuauaaacccuggcu

SEQ ID NO: 3284073 - RNA, 19 nt, Artificial Sequence
  Description of Artificial Sequence: Synthetic oligonucleotide
cuuucaauuguucucagcc

SEQ ID NO: 3284074 - RNA, 19 nt, Artificial Sequence
  Description of Artificial Sequence: Synthetic oligonucleotide
aaauacaagacaacugucg

SEQ ID NO: 3284075 - RNA, 19 nt, Artificial Sequence
  Description of Artificial Sequence: Synthetic oligonucleotide
aacaaugacaggaugcagc

SEQ ID NO: 3284076 - RNA, 19 nt, Artificial Sequence
  Description of Artificial Sequence: Synthetic oligonucleotide
uaguauucuaaaaucaucu

SEQ ID NO: 3284077 - RNA, 19 nt, Artificial Sequence
  Description of Artificial Sequence: Synthetic oligonucleotide
aagugaaacaaguauguga

SEQ ID NO: 3284078 - RNA, 19 nt, Artificial Sequence
  Description of Artificial Sequence: Synthetic oligonucleotide
uguagauucagauaauagu

SEQ ID NO: 3284079 - RNA, 19 nt, Artificial Sequence
  Description of Artificial Sequence: Synthetic oligonucleotide
ucagauaauaguuuuagua

SEQ ID NO: 3284080 - RNA, 19 nt, Artificial Sequence
  Description of Artificial Sequence: Synthetic oligonucleotide
agauaauaguuuuaguaag

SEQ ID NO: 3284081 - RNA, 19 nt, Artificial Sequence
  Description of Artificial Sequence: Synthetic oligonucleotide
cugaaguguaauaaaagcc

SEQ ID NO: 3284082 - RNA, 19 nt, Artificial Sequence
  Description of Artificial Sequence: Synthetic oligonucleotide
uauaaauguuuuauugcag

SEQ ID NO: 3284083 - RNA, 19 nt, Artificial Sequence
  Description of Artificial Sequence: Synthetic oligonucleotide
acaaugacaggaugcagcc

SEQ ID NO: 3284084 - RNA, 19 nt, Artificial Sequence
  Description of Artificial Sequence: Synthetic oligonucleotide
ugcacaugcauugaaaagg

SEQ ID NO: 3284085 - RNA, 19 nt, Artificial Sequence
  Description of Artificial Sequence: Synthetic oligonucleotide
uaaguauuugcacugauuu

SEQ ID NO: 3284086 - RNA, 19 nt, Artificial Sequence
  Description of Artificial Sequence: Synthetic oligonucleotide
ugauaguggagaauaaucu

SEQ ID NO: 3284087 - RNA, 19 nt, Artificial Sequence
  Description of Artificial Sequence: Synthetic oligonucleotide
uauuuauaaacccuggcuu

SEQ ID NO: 3284088 - RNA, 19 nt, Artificial Sequence
  Description of Artificial Sequence: Synthetic oligonucleotide
augacaaugaaaugcuagg

SEQ ID NO: 3284089 - RNA, 19 nt, Artificial Sequence
  Description of Artificial Sequence: Synthetic oligonucleotide
accaaguucacaaauacuc

SEQ ID NO: 3284090 - RNA, 19 nt, Artificial Sequence
  Description of Artificial Sequence: Synthetic oligonucleotide
aaauauuucauggugggau

SEQ ID NO: 3284091 - RNA, 19 nt, Artificial Sequence
  Description of Artificial Sequence: Synthetic oligonucleotide
uaaauguuuuauugcagag

SEQ ID NO: 3284092 - RNA, 19 nt, Artificial Sequence
  Description of Artificial Sequence: Synthetic oligonucleotide
aucuacuuauuuauaaacc

SEQ ID NO: 3284093 - RNA, 19 nt, Artificial Sequence
  Description of Artificial Sequence: Synthetic oligonucleotide
uuauaugcacuuucaauug

SEQ ID NO: 3284094 - RNA, 19 nt, Artificial Sequence
  Description of Artificial Sequence: Synthetic oligonucleotide
uguguugucaguccuaccu

SEQ ID NO: 3284095 - RNA, 19 nt, Artificial Sequence
  Description of Artificial Sequence: Synthetic oligonucleotide
uucacaaauacuccucaag

SEQ ID NO: 3284096 - RNA, 19 nt, Artificial Sequence
  Description of Artificial Sequence: Synthetic oligonucleotide
agugaaacaaguaugugag

SEQ ID NO: 3284097 - RNA, 19 nt, Artificial Sequence
  Description of Artificial Sequence: Synthetic oligonucleotide
aauauuucauggugggaug

SEQ ID NO: 3284098 - RNA, 19 nt, Artificial Sequence
  Description of Artificial Sequence: Synthetic oligonucleotide
ugcuagaagucaaaggcag

SEQ ID NO: 3284099 - RNA, 19 nt, Artificial Sequence
  Description of Artificial Sequence: Synthetic oligonucleotide
auaaauguuuuauugcaga

SEQ ID NO: 3284100 - RNA, 19 nt, Artificial Sequence
  Description of Artificial Sequence: Synthetic oligonucleotide
aacacaucacaacauaaau

SEQ ID NO: 3284101 - RNA, 19 nt, Artificial Sequence
  Description of Artificial Sequence: Synthetic oligonucleotide
aaaaggagcuucccgaaca

SEQ ID NO: 3284102 - RNA, 19 nt, Artificial Sequence
  Description of Artificial Sequence: Synthetic oligonucleotide
guuauuuacaugcugcaac

SEQ ID NO: 3284103 - RNA, 19 nt, Artificial Sequence
  Description of Artificial Sequence: Synthetic oligonucleotide
agaaccacagguuaaguga

SEQ ID NO: 3284104 - RNA, 19 nt, Artificial Sequence
  Description of Artificial Sequence: Synthetic oligonucleotide
caucacaacauaaauuuac

SEQ ID NO: 3284105 - RNA, 19 nt, Artificial Sequence
  Description of Artificial Sequence: Synthetic oligonucleotide
augucaagcaggaucaucc

SEQ ID NO: 3284106 - RNA, 19 nt, Artificial Sequence
  Description of Artificial Sequence: Synthetic oligonucleotide
uacugaauucucagaagcg

SEQ ID NO: 3284107 - RNA, 19 nt, Artificial Sequence
  Description of Artificial Sequence: Synthetic oligonucleotide
ucuagaaacucuaaaccaa

SEQ ID NO: 3284108 - RNA, 19 nt, Artificial Sequence
  Description of Artificial Sequence: Synthetic oligonucleotide
acuaaaguauaauuuggca

SEQ ID NO: 3284109 - RNA, 19 nt, Artificial Sequence
  Description of Artificial Sequence: Synthetic oligonucleotide
agacuuacagcuuuguuga

SEQ ID NO: 3284110 - RNA, 19 nt, Artificial Sequence
  Description of Artificial Sequence: Synthetic oligonucleotide
cuacugaauucucagaagc

SEQ ID NO: 3284111 - RNA, 19 nt, Artificial Sequence
  Description of Artificial Sequence: Synthetic oligonucleotide
aagaaccacagguuaagug

SEQ ID NO: 3284112 - RNA, 19 nt, Artificial Sequence
  Description of Artificial Sequence: Synthetic oligonucleotide
caaauacuccucaagguag

SEQ ID NO: 3284113 - RNA, 19 nt, Artificial Sequence
  Description of Artificial Sequence: Synthetic oligonucleotide
agaccauaaguauuugcac

SEQ ID NO: 3284114 - RNA, 19 nt, Artificial Sequence
  Description of Artificial Sequence: Synthetic oligonucleotide
ugcauugaaaaggacaacc

SEQ ID NO: 3284115 - RNA, 19 nt, Artificial Sequence
  Description of Artificial Sequence: Synthetic oligonucleotide
uauugcagagaaguuauag

SEQ ID NO: 3284116 - RNA, 19 nt, Artificial Sequence
  Description of Artificial Sequence: Synthetic oligonucleotide
ugauuugugauaguggaga

SEQ ID NO: 3284117 - RNA, 19 nt, Artificial Sequence
  Description of Artificial Sequence: Synthetic oligonucleotide
aagaccauaaguauuugca

SEQ ID NO: 3284118 - RNA, 19 nt, Artificial Sequence
  Description of Artificial Sequence: Synthetic oligonucleotide
gagaccuuuacauuauaug

SEQ ID NO: 3284119 - RNA, 19 nt, Artificial Sequence
  Description of Artificial Sequence: Synthetic oligonucleotide
cuuauuuauaaacccuggc

SEQ ID NO: 3284120 - RNA, 19 nt, Artificial Sequence
  Description of Artificial Sequence: Synthetic oligonucleotide
gauagguuuugauccaaag

SEQ ID NO: 3284121 - RNA, 19 nt, Artificial Sequence
  Description of Artificial Sequence: Synthetic oligonucleotide
aauucucagaagcgaauca

SEQ ID NO: 3284122 - RNA, 19 nt, Artificial Sequence
  Description of Artificial Sequence: Synthetic oligonucleotide
acucucgguugcuaaaugc

SEQ ID NO: 3284123 - RNA, 19 nt, Artificial Sequence
  Description of Artificial Sequence: Synthetic oligonucleotide
aguuauaguuauuuacaug

SEQ ID NO: 3284124 - RNA, 19 nt, Artificial Sequence
  Description of Artificial Sequence: Synthetic oligonucleotide
uuucaauccguauugccac

SEQ ID NO: 3284125 - RNA, 19 nt, Artificial Sequence
  Description of Artificial Sequence: Synthetic oligonucleotide
aucacaacauaaauuuacc

SEQ ID NO: 3284126 - RNA, 19 nt, Artificial Sequence
  Description of Artificial Sequence: Synthetic oligonucleotide
auguuugugagaccuuuac

SEQ ID NO: 3284127 - RNA, 19 nt, Artificial Sequence
  Description of Artificial Sequence: Synthetic oligonucleotide
aaguauuugcacugauuug

SEQ ID NO: 3284128 - RNA, 19 nt, Artificial Sequence
  Description of Artificial Sequence: Synthetic oligonucleotide
cacuaaaguauaauuuggc

SEQ ID NO: 3284129 - RNA, 19 nt, Artificial Sequence
  Description of Artificial Sequence: Synthetic oligonucleotide
cuagaaacucuaaaccaag

SEQ ID NO: 3284130 - RNA, 19 nt, Artificial Sequence
  Description of Artificial Sequence: Synthetic oligonucleotide
aagcuuacaagggguauac

SEQ ID NO: 3284131 - RNA, 19 nt, Artificial Sequence
  Description of Artificial Sequence: Synthetic oligonucleotide
aauuucuuuuggugauagg

SEQ ID NO: 3284132 - RNA, 19 nt, Artificial Sequence
  Description of Artificial Sequence: Synthetic oligonucleotide
auacaagacaacugucggg

SEQ ID NO: 3284133 - RNA, 19 nt, Artificial Sequence
  Description of Artificial Sequence: Synthetic oligonucleotide
uaaaugcuagaagucaaag

SEQ ID NO: 3284134 - RNA, 19 nt, Artificial Sequence
  Description of Artificial Sequence: Synthetic oligonucleotide
guugcuaaaugcuagaagu

SEQ ID NO: 3284135 - RNA, 19 nt, Artificial Sequence
  Description of Artificial Sequence: Synthetic oligonucleotide
acuuucaauuguucucagc

SEQ ID NO: 3284136 - RNA, 19 nt, Artificial Sequence
  Description of Artificial Sequence: Synthetic oligonucleotide
uggugauagguaaugacaa

SEQ ID NO: 3284137 - RNA, 19 nt, Artificial Sequence
  Description of Artificial Sequence: Synthetic oligonucleotide
cuguagauucagauaauag

SEQ ID NO: 3284138 - RNA, 19 nt, Artificial Sequence
  Description of Artificial Sequence: Synthetic oligonucleotide
gaaguguaauaaaagccag

SEQ ID NO: 3284139 - RNA, 19 nt, Artificial Sequence
  Description of Artificial Sequence: Synthetic oligonucleotide
aaaucaucuagcagauagg

SEQ ID NO: 3284140 - RNA, 19 nt, Artificial Sequence
  Description of Artificial Sequence: Synthetic oligonucleotide
uucucagaagcgaaucaag

SEQ ID NO: 3284141 - RNA, 19 nt, Artificial Sequence
  Description of Artificial Sequence: Synthetic oligonucleotide
aaaagccagugacagguga

SEQ ID NO: 3284142 - RNA, 19 nt, Artificial Sequence
  Description of Artificial Sequence: Synthetic oligonucleotide
aggacaaccuagcaaaugu

SEQ ID NO: 3284143 - RNA, 19 nt, Artificial Sequence
  Description of Artificial Sequence: Synthetic oligonucleotide
uacaugcugcaacacauca

SEQ ID NO: 3284144 - RNA, 19 nt, Artificial Sequence
  Description of Artificial Sequence: Synthetic oligonucleotide
uccguauugccaccgaagc

SEQ ID NO: 3284145 - RNA, 19 nt, Artificial Sequence
  Description of Artificial Sequence: Synthetic oligonucleotide
agaucucagacacaaguga

SEQ ID NO: 3284146 - RNA, 19 nt, Artificial Sequence
  Description of Artificial Sequence: Synthetic oligonucleotide
augaaaugcuaggaaagac

SEQ ID NO: 3284147 - RNA, 19 nt, Artificial Sequence
  Description of Artificial Sequence: Synthetic oligonucleotide
agaguucaauuucuuuugg

SEQ ID NO: 3284148 - RNA, 19 nt, Artificial Sequence
  Description of Artificial Sequence: Synthetic oligonucleotide
gaaaugcuaggaaagacca

SEQ ID NO: 3284149 - RNA, 19 nt, Artificial Sequence
  Description of Artificial Sequence: Synthetic oligonucleotide
gauagauuuaucuugacug

SEQ ID NO: 3284150 - RNA, 19 nt, Artificial Sequence
  Description of Artificial Sequence: Synthetic oligonucleotide
agaaaucuuagccugaugg

SEQ ID NO: 3284151 - RNA, 19 nt, Artificial Sequence
  Description of Artificial Sequence: Synthetic oligonucleotide
uuuacuauuuuccauagaa

SEQ ID NO: 3284152 - RNA, 19 nt, Artificial Sequence
  Description of Artificial Sequence: Synthetic oligonucleotide
gauuuaucuugacugaugg

SEQ ID NO: 3284153 - RNA, 19 nt, Artificial Sequence
  Description of Artificial Sequence: Synthetic oligonucleotide
uuccauagaaaucuuagcc

SEQ ID NO: 3284154 - RNA, 19 nt, Artificial Sequence
  Description of Artificial Sequence: Synthetic oligonucleotide
uuuuccauagaaaucuuag

SEQ ID NO: 3284155 - RNA, 19 nt, Artificial Sequence
  Description of Artificial Sequence: Synthetic oligonucleotide
ucugccuuauucuugauag

SEQ ID NO: 3284156 - RNA, 19 nt, Artificial Sequence
  Description of Artificial Sequence: Synthetic oligonucleotide
aaaucuuagccugaugggc

SEQ ID NO: 3284157 - RNA, 19 nt, Artificial Sequence
  Description of Artificial Sequence: Synthetic oligonucleotide
ucuugauagauuuaucuug

SEQ ID NO: 3284158 - RNA, 19 nt, Artificial Sequence
  Description of Artificial Sequence: Synthetic oligonucleotide
uagauuugugaucugaugu

SEQ ID NO: 3284159 - RNA, 19 nt, Artificial Sequence
  Description of Artificial Sequence: Synthetic oligonucleotide
uuuaucuugacugauggcu

SEQ ID NO: 3284160 - RNA, 19 nt, Artificial Sequence
  Description of Artificial Sequence: Synthetic oligonucleotide
uguugaucauuucugacca

SEQ ID NO: 3284161 - RNA, 19 nt, Artificial Sequence
  Description of Artificial Sequence: Synthetic oligonucleotide
ucuuuucuuucuuagaaac

SEQ ID NO: 3284162 - RNA, 19 nt, Artificial Sequence
  Description of Artificial Sequence: Synthetic oligonucleotide
uguucaugagcguugauga

SEQ ID NO: 3284163 - RNA, 19 nt, Artificial Sequence
  Description of Artificial Sequence: Synthetic oligonucleotide
auucuugauagauuuaucu

SEQ ID NO: 3284164 - RNA, 19 nt, Artificial Sequence
  Description of Artificial Sequence: Synthetic oligonucleotide
uuucuuuucuuucuuagaa

SEQ ID NO: 3284165 - RNA, 19 nt, Artificial Sequence
  Description of Artificial Sequence: Synthetic oligonucleotide
uacuauuuuccauagaaau

SEQ ID NO: 3284166 - RNA, 19 nt, Artificial Sequence
  Description of Artificial Sequence: Synthetic oligonucleotide
augagagagcuucagcugc

SEQ ID NO: 3284167 - RNA, 19 nt, Artificial Sequence
  Description of Artificial Sequence: Synthetic oligonucleotide
gaaaucuuagccugauggg

SEQ ID NO: 3284168 - RNA, 19 nt, Artificial Sequence
  Description of Artificial Sequence: Synthetic oligonucleotide
ugaguguugaucauuucug

SEQ ID NO: 3284169 - RNA, 19 nt, Artificial Sequence
  Description of Artificial Sequence: Synthetic oligonucleotide
ucaugagagagcuucagcu

SEQ ID NO: 3284170 - RNA, 19 nt, Artificial Sequence
  Description of Artificial Sequence: Synthetic oligonucleotide
uucucagcagcucacacug

SEQ ID NO: 3284171 - RNA, 19 nt, Artificial Sequence
  Description of Artificial Sequence: Synthetic oligonucleotide
aaucucuugaccuuagauu

SEQ ID NO: 3284172 - RNA, 19 nt, Artificial Sequence
  Description of Artificial Sequence: Synthetic oligonucleotide
agauuugugaucugauguc

SEQ ID NO: 3284173 - RNA, 19 nt, Artificial Sequence
  Description of Artificial Sequence: Synthetic oligonucleotide
gauggcuuuacuauuuucc

SEQ ID NO: 3284174 - RNA, 19 nt, Artificial Sequence
  Description of Artificial Sequence: Synthetic oligonucleotide
uugaugagcagcuuucuca

SEQ ID NO: 3284175 - RNA, 19 nt, Artificial Sequence
  Description of Artificial Sequence: Synthetic oligonucleotide
ugauagauuuaucuugacu

SEQ ID NO: 3284176 - RNA, 19 nt, Artificial Sequence
  Description of Artificial Sequence: Synthetic oligonucleotide
uccauagaaaucuuagccu

SEQ ID NO: 3284177 - RNA, 19 nt, Artificial Sequence
  Description of Artificial Sequence: Synthetic oligonucleotide
aguguugaucauuucugac

SEQ ID NO: 3284178 - RNA, 19 nt, Artificial Sequence
  Description of Artificial Sequence: Synthetic oligonucleotide
auuuaucuugacugauggc

SEQ ID NO: 3284179 - RNA, 19 nt, Artificial Sequence
  Description of Artificial Sequence: Synthetic oligonucleotide
cuuuucuuuucuuucuuag

SEQ ID NO: 3284180 - RNA, 19 nt, Artificial Sequence
  Description of Artificial Sequence: Synthetic oligonucleotide
uuagauuugugaucugaug

SEQ ID NO: 3284181 - RNA, 19 nt, Artificial Sequence
  Description of Artificial Sequence: Synthetic oligonucleotide
uuugugaucugaugucagg

SEQ ID NO: 3284182 - RNA, 19 nt, Artificial Sequence
  Description of Artificial Sequence: Synthetic oligonucleotide
uuuccauagaaaucuuagc

SEQ ID NO: 3284183 - RNA, 19 nt, Artificial Sequence
  Description of Artificial Sequence: Synthetic oligonucleotide
acuauuuuccauagaaauc

SEQ ID NO: 3284184 - RNA, 19 nt, Artificial Sequence
  Description of Artificial Sequence: Synthetic oligonucleotide
ugaugagcagcuuucucag

SEQ ID NO: 3284185 - RNA, 19 nt, Artificial Sequence
  Description of Artificial Sequence: Synthetic oligonucleotide
aucucuugaccuuagauuu

SEQ ID NO: 3284186 - RNA, 19 nt, Artificial Sequence
  Description of Artificial Sequence: Synthetic oligonucleotide
uuaguguugcugcuguuca

SEQ ID NO: 3284187 - RNA, 19 nt, Artificial Sequence
  Description of Artificial Sequence: Synthetic oligonucleotide
ucaugagcguugaugagca

SEQ ID NO: 3284188 - RNA, 19 nt, Artificial Sequence
  Description of Artificial Sequence: Synthetic oligonucleotide
uugaccuuagauuugugau

SEQ ID NO: 3284189 - RNA, 19 nt, Artificial Sequence
  Description of Artificial Sequence: Synthetic oligonucleotide
uguucaacucccugacucg

SEQ ID NO: 3284190 - RNA, 19 nt, Artificial Sequence
  Description of Artificial Sequence: Synthetic oligonucleotide
guguugaucauuucugacc

SEQ ID NO: 3284191 - RNA, 19 nt, Artificial Sequence
  Description of Artificial Sequence: Synthetic oligonucleotide
acacugcugguucaagugc

SEQ ID NO: 3284192 - RNA, 19 nt, Artificial Sequence
  Description of Artificial Sequence: Synthetic oligonucleotide
augaguguugaucauuucu

SEQ ID NO: 3284193 - RNA, 19 nt, Artificial Sequence
  Description of Artificial Sequence: Synthetic oligonucleotide
auagauuuaucuugacuga

SEQ ID NO: 3284194 - RNA, 19 nt, Artificial Sequence
  Description of Artificial Sequence: Synthetic oligonucleotide
uugugaucugaugucaggg

SEQ ID NO: 3284195 - RNA, 19 nt, Artificial Sequence
  Description of Artificial Sequence: Synthetic oligonucleotide
uuauucuugauagauuuau

SEQ ID NO: 3284196 - RNA, 19 nt, Artificial Sequence
  Description of Artificial Sequence: Synthetic oligonucleotide
uuucugaccacuccuuugu

SEQ ID NO: 3284197 - RNA, 19 nt, Artificial Sequence
  Description of Artificial Sequence: Synthetic oligonucleotide
uuuucuuucuuagaaacuu

SEQ ID NO: 3284198 - RNA, 19 nt, Artificial Sequence
  Description of Artificial Sequence: Synthetic oligonucleotide
uuuucuuuucuuucuuaga

SEQ ID NO: 3284199 - RNA, 19 nt, Artificial Sequence
  Description of Artificial Sequence: Synthetic oligonucleotide
guugcugcuguucaacucc

SEQ ID NO: 3284200 - RNA, 19 nt, Artificial Sequence
  Description of Artificial Sequence: Synthetic oligonucleotide
uuacuauuuuccauagaaa

SEQ ID NO: 3284201 - RNA, 19 nt, Artificial Sequence
  Description of Artificial Sequence: Synthetic oligonucleotide
gagagcuucagcugcuggg

SEQ ID NO: 3284202 - RNA, 19 nt, Artificial Sequence
  Description of Artificial Sequence: Synthetic oligonucleotide
augagcguugaugagcagc

SEQ ID NO: 3284203 - RNA, 19 nt, Artificial Sequence
  Description of Artificial Sequence: Synthetic oligonucleotide
cugguucaagugcagaucc

SEQ ID NO: 3284204 - RNA, 19 nt, Artificial Sequence
  Description of Artificial Sequence: Synthetic oligonucleotide
aucauuucugaccacuccu

SEQ ID NO: 3284205 - RNA, 19 nt, Artificial Sequence
  Description of Artificial Sequence: Synthetic oligonucleotide
uucaugagcguugaugagc

SEQ ID NO: 3284206 - RNA, 19 nt, Artificial Sequence
  Description of Artificial Sequence: Synthetic oligonucleotide
ugagcguugaugagcagcu

SEQ ID NO: 3284207 - RNA, 19 nt, Artificial Sequence
  Description of Artificial Sequence: Synthetic oligonucleotide
gaucauuucugaccacucc

SEQ ID NO: 3284208 - RNA, 19 nt, Artificial Sequence
  Description of Artificial Sequence: Synthetic oligonucleotide
aucucuugcuccucggcac

SEQ ID NO: 3284209 - RNA, 19 nt, Artificial Sequence
  Description of Artificial Sequence: Synthetic oligonucleotide
aagugcagaucccggaucu

SEQ ID NO: 3284210 - RNA, 19 nt, Artificial Sequence
  Description of Artificial Sequence: Synthetic oligonucleotide
ugugccacaaucucuugac

SEQ ID NO: 3284211 - RNA, 19 nt, Artificial Sequence
  Description of Artificial Sequence: Synthetic oligonucleotide
cuugauagauuuaucuuga

SEQ ID NO: 3284212 - RNA, 19 nt, Artificial Sequence
  Description of Artificial Sequence: Synthetic oligonucleotide
ugacugauggcuuuacuau

SEQ ID NO: 3284213 - RNA, 19 nt, Artificial Sequence
  Description of Artificial Sequence: Synthetic oligonucleotide
ugaucugaugucagggucu

SEQ ID NO: 3284214 - RNA, 19 nt, Artificial Sequence
  Description of Artificial Sequence: Synthetic oligonucleotide
uuucccugucaugagagag

SEQ ID NO: 3284215 - RNA, 19 nt, Artificial Sequence
  Description of Artificial Sequence: Synthetic oligonucleotide
uugacugauggcuuuacua

SEQ ID NO: 3284216 - RNA, 19 nt, Artificial Sequence
  Description of Artificial Sequence: Synthetic oligonucleotide
ucucuuuucuuuucuuucu

SEQ ID NO: 3284217 - RNA, 19 nt, Artificial Sequence
  Description of Artificial Sequence: Synthetic oligonucleotide
uucuugauagauuuaucuu

SEQ ID NO: 3284218 - RNA, 19 nt, Artificial Sequence
  Description of Artificial Sequence: Synthetic oligonucleotide
cuccucggcacuaugagug

SEQ ID NO: 3284219 - RNA, 19 nt, Artificial Sequence
  Description of Artificial Sequence: Synthetic oligonucleotide
ugccacaaucucuugaccu

SEQ ID NO: 3284220 - RNA, 19 nt, Artificial Sequence
  Description of Artificial Sequence: Synthetic oligonucleotide
ugugcugugccacaaucuc

SEQ ID NO: 3284221 - RNA, 19 nt, Artificial Sequence
  Description of Artificial Sequence: Synthetic oligonucleotide
augagcagcuuucucagca

SEQ ID NO: 3284222 - RNA, 19 nt, Artificial Sequence
  Description of Artificial Sequence: Synthetic oligonucleotide
aaucuuagccugaugggcu

SEQ ID NO: 3284223 - RNA, 19 nt, Artificial Sequence
  Description of Artificial Sequence: Synthetic oligonucleotide
aucccggaucucuugcucc

SEQ ID NO: 3284224 - RNA, 19 nt, Artificial Sequence
  Description of Artificial Sequence: Synthetic oligonucleotide
uauucuugauagauuuauc

SEQ ID NO: 3284225 - RNA, 19 nt, Artificial Sequence
  Description of Artificial Sequence: Synthetic oligonucleotide
auuucugaccacuccuuug

SEQ ID NO: 3284226 - RNA, 19 nt, Artificial Sequence
  Description of Artificial Sequence: Synthetic oligonucleotide
cuguucaacucccugacuc

SEQ ID NO: 3284227 - RNA, 19 nt, Artificial Sequence
  Description of Artificial Sequence: Synthetic oligonucleotide
auggcuuuacuauuuucca

SEQ ID NO: 3284228 - RNA, 19 nt, Artificial Sequence
  Description of Artificial Sequence: Synthetic oligonucleotide
uucuuucuuagaaacuuuu

SEQ ID NO: 3284229 - RNA, 19 nt, Artificial Sequence
  Description of Artificial Sequence: Synthetic oligonucleotide
uucuuuucuuucuuagaaa

SEQ ID NO: 3284230 - RNA, 19 nt, Artificial Sequence
  Description of Artificial Sequence: Synthetic oligonucleotide
aguguugcugcuguucaac

SEQ ID NO: 3284231 - RNA, 19 nt, Artificial Sequence
  Description of Artificial Sequence: Synthetic oligonucleotide
cuauuuuccauagaaaucu

SEQ ID NO: 3284232 - RNA, 19 nt, Artificial Sequence
  Description of Artificial Sequence: Synthetic oligonucleotide
ugaccuuagauuugugauc

SEQ ID NO: 3284233 - RNA, 19 nt, Artificial Sequence
  Description of Artificial Sequence: Synthetic oligonucleotide
uugaucauuucugaccacu

SEQ ID NO: 3284234 - RNA, 19 nt, Artificial Sequence
  Description of Artificial Sequence: Synthetic oligonucleotide
ugugaucugaugucagggu

SEQ ID NO: 3284235 - RNA, 19 nt, Artificial Sequence
  Description of Artificial Sequence: Synthetic oligonucleotide
cugaccacuccuuugugug

SEQ ID NO: 3284236 - RNA, 19 nt, Artificial Sequence
  Description of Artificial Sequence: Synthetic oligonucleotide
caugagagagcuucagcug

SEQ ID NO: 3284237 - RNA, 19 nt, Artificial Sequence
  Description of Artificial Sequence: Synthetic oligonucleotide
uuaucuugacugauggcuu

SEQ ID NO: 3284238 - RNA, 19 nt, Artificial Sequence
  Description of Artificial Sequence: Synthetic oligonucleotide
ugcuccucggcacuaugag

SEQ ID NO: 3284239 - RNA, 19 nt, Artificial Sequence
  Description of Artificial Sequence: Synthetic oligonucleotide
uuucucagcagcucacacu

SEQ ID NO: 3284240 - RNA, 19 nt, Artificial Sequence
  Description of Artificial Sequence: Synthetic oligonucleotide
ugcuguucaacucccugac

SEQ ID NO: 3284241 - RNA, 19 nt, Artificial Sequence
  Description of Artificial Sequence: Synthetic oligonucleotide
uucaucgccagucucuuuu

SEQ ID NO: 3284242 - RNA, 19 nt, Artificial Sequence
  Description of Artificial Sequence: Synthetic oligonucleotide
uucccguucugccuuauuc

SEQ ID NO: 3284243 - RNA, 19 nt, Artificial Sequence
  Description of Artificial Sequence: Synthetic oligonucleotide
cuugcuuucccugucauga

SEQ ID NO: 3284244 - RNA, 19 nt, Artificial Sequence
  Description of Artificial Sequence: Synthetic oligonucleotide
uuuaguguugcugcuguuc

SEQ ID NO: 3284245 - RNA, 19 nt, Artificial Sequence
  Description of Artificial Sequence: Synthetic oligonucleotide
uucaagugcagaucccgga

SEQ ID NO: 3284246 - RNA, 19 nt, Artificial Sequence
  Description of Artificial Sequence: Synthetic oligonucleotide
ugugugcugugccacaauc

SEQ ID NO: 3284247 - RNA, 19 nt, Artificial Sequence
  Description of Artificial Sequence: Synthetic oligonucleotide
acuccuuugugugcugugc

SEQ ID NO: 3284248 - RNA, 19 nt, Artificial Sequence
  Description of Artificial Sequence: Synthetic oligonucleotide
uucccugucaugagagagc

SEQ ID NO: 3284249 - RNA, 19 nt, Artificial Sequence
  Description of Artificial Sequence: Synthetic oligonucleotide
ugcaaggcaaucuucaugg

SEQ ID NO: 3284250 - RNA, 19 nt, Artificial Sequence
  Description of Artificial Sequence: Synthetic oligonucleotide
aaggcgguaggccacagcc

SEQ ID NO: 3284251 - RNA, 19 nt, Artificial Sequence
  Description of Artificial Sequence: Synthetic oligonucleotide
aagcagagcagacagagug

SEQ ID NO: 3284252 - RNA, 19 nt, Artificial Sequence
  Description of Artificial Sequence: Synthetic oligonucleotide
auaucagcaaagcagagca

SEQ ID NO: 3284253 - RNA, 19 nt, Artificial Sequence
  Description of Artificial Sequence: Synthetic oligonucleotide
ucggucaugaugcucauag

SEQ ID NO: 3284254 - RNA, 19 nt, Artificial Sequence
  Description of Artificial Sequence: Synthetic oligonucleotide
gauacuugaggcuccagcc

SEQ ID NO: 3284255 - RNA, 19 nt, Artificial Sequence
  Description of Artificial Sequence: Synthetic oligonucleotide
agcaaagcagagcagacag

SEQ ID NO: 3284256 - RNA, 19 nt, Artificial Sequence
  Description of Artificial Sequence: Synthetic oligonucleotide
agcagagucauaccuaggg

SEQ ID NO: 3284257 - RNA, 19 nt, Artificial Sequence
  Description of Artificial Sequence: Synthetic oligonucleotide
uggauaucagcaaagcaga

SEQ ID NO: 3284258 - RNA, 19 nt, Artificial Sequence
  Description of Artificial Sequence: Synthetic oligonucleotide
uugcagggaaagaacaggg

SEQ ID NO: 3284259 - RNA, 19 nt, Artificial Sequence
  Description of Artificial Sequence: Synthetic oligonucleotide
guggauaucagcaaagcag

SEQ ID NO: 3284260 - RNA, 19 nt, Artificial Sequence
  Description of Artificial Sequence: Synthetic oligonucleotide
ucauagcagagucauaccu

SEQ ID NO: 3284261 - RNA, 19 nt, Artificial Sequence
  Description of Artificial Sequence: Synthetic oligonucleotide
acagccaugugguacuggc

SEQ ID NO: 3284262 - RNA, 19 nt, Artificial Sequence
  Description of Artificial Sequence: Synthetic oligonucleotide
auagcagagucauaccuag

SEQ ID NO: 3284263 - RNA, 19 nt, Artificial Sequence
  Description of Artificial Sequence: Synthetic oligonucleotide
ucauggacuccucacaaca

SEQ ID NO: 3284264 - RNA, 19 nt, Artificial Sequence
  Description of Artificial Sequence: Synthetic oligonucleotide
uggucggucaccaugcugc

SEQ ID NO: 3284265 - RNA, 19 nt, Artificial Sequence
  Description of Artificial Sequence: Synthetic oligonucleotide
cucacaacacuccauggcg

SEQ ID NO: 3284266 - RNA, 19 nt, Artificial Sequence
  Description of Artificial Sequence: Synthetic oligonucleotide
aaagaacagggcuuucuca

SEQ ID NO: 3284267 - RNA, 19 nt, Artificial Sequence
  Description of Artificial Sequence: Synthetic oligonucleotide
uuugccauagucguugacc

SEQ ID NO: 3284268 - RNA, 19 nt, Artificial Sequence
  Description of Artificial Sequence: Synthetic oligonucleotide
agcucugcagccuugcagg

SEQ ID NO: 3284269 - RNA, 19 nt, Artificial Sequence
  Description of Artificial Sequence: Synthetic oligonucleotide
auagucguugaccagcucu

SEQ ID NO: 3284270 - RNA, 19 nt, Artificial Sequence
  Description of Artificial Sequence: Synthetic oligonucleotide
aagaacagggcuuucucau

SEQ ID NO: 3284271 - RNA, 19 nt, Artificial Sequence
  Description of Artificial Sequence: Synthetic oligonucleotide
aaggcaaucuucauggacu

SEQ ID NO: 3284272 - RNA, 19 nt, Artificial Sequence
  Description of Artificial Sequence: Synthetic oligonucleotide
aucuucauggacuccucac

SEQ ID NO: 3284273 - RNA, 19 nt, Artificial Sequence
  Description of Artificial Sequence: Synthetic oligonucleotide
ucaugaugcucauagcaga

SEQ ID NO: 3284274 - RNA, 19 nt, Artificial Sequence
  Description of Artificial Sequence: Synthetic oligonucleotide
ucggucaccaugcugcaag

SEQ ID NO: 3284275 - RNA, 19 nt, Artificial Sequence
  Description of Artificial Sequence: Synthetic oligonucleotide
gaacagggcuuucucauag

SEQ ID NO: 3284276 - RNA, 19 nt, Artificial Sequence
  Description of Artificial Sequence: Synthetic oligonucleotide
ugaggcuccagccuuugcc

SEQ ID NO: 3284277 - RNA, 19 nt, Artificial Sequence
  Description of Artificial Sequence: Synthetic oligonucleotide
caaagcagagcagacagag

SEQ ID NO: 3284278 - RNA, 19 nt, Artificial Sequence
  Description of Artificial Sequence: Synthetic oligonucleotide
ugaugcucauagcagaguc

SEQ ID NO: 3284279 - RNA, 19 nt, Artificial Sequence
  Description of Artificial Sequence: Synthetic oligonucleotide
ucuucauggacuccucaca

SEQ ID NO: 3284280 - RNA, 19 nt, Artificial Sequence
  Description of Artificial Sequence: Synthetic oligonucleotide
agccaugugguacuggcuc

SEQ ID NO: 3284281 - RNA, 19 nt, Artificial Sequence
  Description of Artificial Sequence: Synthetic oligonucleotide
auggcccgauacuugaggc

SEQ ID NO: 3284282 - RNA, 19 nt, Artificial Sequence
  Description of Artificial Sequence: Synthetic oligonucleotide
gauaucagcaaagcagagc

SEQ ID NO: 3284283 - RNA, 19 nt, Artificial Sequence
  Description of Artificial Sequence: Synthetic oligonucleotide
ucauaccuagggaaggcug

SEQ ID NO: 3284284 - RNA, 19 nt, Artificial Sequence
  Description of Artificial Sequence: Synthetic oligonucleotide
aaggcugucuccagguccc

SEQ ID NO: 3284285 - RNA, 19 nt, Artificial Sequence
  Description of Artificial Sequence: Synthetic oligonucleotide
gaaggcugucuccaggucc

SEQ ID NO: 3284286 - RNA, 19 nt, Artificial Sequence
  Description of Artificial Sequence: Synthetic oligonucleotide
uugccauagucguugacca

SEQ ID NO: 3284287 - RNA, 19 nt, Artificial Sequence
  Description of Artificial Sequence: Synthetic oligonucleotide
uaggccacagccauguggu

SEQ ID NO: 3284288 - RNA, 19 nt, Artificial Sequence
  Description of Artificial Sequence: Synthetic oligonucleotide
cauggcgcugcccaggugg

SEQ ID NO: 3284289 - RNA, 19 nt, Artificial Sequence
  Description of Artificial Sequence: Synthetic oligonucleotide
ugcugcaaggcaaucuuca

SEQ ID NO: 3284290 - RNA, 19 nt, Artificial Sequence
  Description of Artificial Sequence: Synthetic oligonucleotide
guaggccacagccaugugg

SEQ ID NO: 3284291 - RNA, 19 nt, Artificial Sequence
  Description of Artificial Sequence: Synthetic oligonucleotide
acagggcuuucucauaguc

SEQ ID NO: 3284292 - RNA, 19 nt, Artificial Sequence
  Description of Artificial Sequence: Synthetic oligonucleotide
cuugcagggaaagaacagg

SEQ ID NO: 3284293 - RNA, 19 nt, Artificial Sequence
  Description of Artificial Sequence: Synthetic oligonucleotide
augugguacuggcucaugg

SEQ ID NO: 3284294 - RNA, 19 nt, Artificial Sequence
  Description of Artificial Sequence: Synthetic oligonucleotide
ucguugaccagcucugcag

SEQ ID NO: 3284295 - RNA, 19 nt, Artificial Sequence
  Description of Artificial Sequence: Synthetic oligonucleotide
gaaagaacagggcuuucuc

SEQ ID NO: 3284296 - RNA, 19 nt, Artificial Sequence
  Description of Artificial Sequence: Synthetic oligonucleotide
ugugguacuggcucauggc

SEQ ID NO: 3284297 - RNA, 19 nt, Artificial Sequence
  Description of Artificial Sequence: Synthetic oligonucleotide
caugaugcucauagcagag

SEQ ID NO: 3284298 - RNA, 19 nt, Artificial Sequence
  Description of Artificial Sequence: Synthetic oligonucleotide
ucacaacacuccauggcgc

SEQ ID NO: 3284299 - RNA, 19 nt, Artificial Sequence
  Description of Artificial Sequence: Synthetic oligonucleotide
ucgguggauaucagcaaag

SEQ ID NO: 3284300 - RNA, 19 nt, Artificial Sequence
  Description of Artificial Sequence: Synthetic oligonucleotide
aaucuucauggacuccuca

SEQ ID NO: 3284301 - RNA, 19 nt, Artificial Sequence
  Description of Artificial Sequence: Synthetic oligonucleotide
agucauaccuagggaaggc

SEQ ID NO: 3284302 - RNA, 19 nt, Artificial Sequence
  Description of Artificial Sequence: Synthetic oligonucleotide
ucagcaaagcagagcagac

SEQ ID NO: 3284303 - RNA, 19 nt, Artificial Sequence
  Description of Artificial Sequence: Synthetic oligonucleotide
uccucacaacacuccaugg

SEQ ID NO: 3284304 - RNA, 19 nt, Artificial Sequence
  Description of Artificial Sequence: Synthetic oligonucleotide
ugguacuggcucauggccc

SEQ ID NO: 3284305 - RNA, 19 nt, Artificial Sequence
  Description of Artificial Sequence: Synthetic oligonucleotide
uagucguugaccagcucug

SEQ ID NO: 3284306 - RNA, 19 nt, Artificial Sequence
  Description of Artificial Sequence: Synthetic oligonucleotide
ugcagggaaagaacagggc

SEQ ID NO: 3284307 - RNA, 19 nt, Artificial Sequence
  Description of Artificial Sequence: Synthetic oligonucleotide
ucugcagccuugcagggaa

SEQ ID NO: 3284308 - RNA, 19 nt, Artificial Sequence
  Description of Artificial Sequence: Synthetic oligonucleotide
gagucauaccuagggaagg

SEQ ID NO: 3284309 - RNA, 19 nt, Artificial Sequence
  Description of Artificial Sequence: Synthetic oligonucleotide
gucaugaugcucauagcag

SEQ ID NO: 3284310 - RNA, 19 nt, Artificial Sequence
  Description of Artificial Sequence: Synthetic oligonucleotide
aggcaaucuucauggacuc

SEQ ID NO: 3284311 - RNA, 19 nt, Artificial Sequence
  Description of Artificial Sequence: Synthetic oligonucleotide
ucaccaugcugcaaggcaa

SEQ ID NO: 3284312 - RNA, 19 nt, Artificial Sequence
  Description of Artificial Sequence: Synthetic oligonucleotide
gcccagguggccuagaagg

SEQ ID NO: 3284313 - RNA, 19 nt, Artificial Sequence
  Description of Artificial Sequence: Synthetic oligonucleotide
uucgguggauaucagcaaa

SEQ ID NO: 3284314 - RNA, 19 nt, Artificial Sequence
  Description of Artificial Sequence: Synthetic oligonucleotide
uggccuagaaggcgguagg

SEQ ID NO: 3284315 - RNA, 19 nt, Artificial Sequence
  Description of Artificial Sequence: Synthetic oligonucleotide
aacacuccauggcgcugcc

SEQ ID NO: 3284316 - RNA, 19 nt, Artificial Sequence
  Description of Artificial Sequence: Synthetic oligonucleotide
uaucagcaaagcagagcag

SEQ ID NO: 3284317 - RNA, 19 nt, Artificial Sequence
  Description of Artificial Sequence: Synthetic oligonucleotide
caaggcaaucuucauggac

SEQ ID NO: 3284318 - RNA, 19 nt, Artificial Sequence
  Description of Artificial Sequence: Synthetic oligonucleotide
guccccacggcuucggugg

SEQ ID NO: 3284319 - RNA, 19 nt, Artificial Sequence
  Description of Artificial Sequence: Synthetic oligonucleotide
agagucauaccuagggaag

SEQ ID NO: 3284320 - RNA, 19 nt, Artificial Sequence
  Description of Artificial Sequence: Synthetic oligonucleotide
aucagcaaagcagagcaga

SEQ ID NO: 3284321 - RNA, 19 nt, Artificial Sequence
  Description of Artificial Sequence: Synthetic oligonucleotide
gugguacuggcucauggcc

SEQ ID NO: 3284322 - RNA, 19 nt, Artificial Sequence
  Description of Artificial Sequence: Synthetic oligonucleotide
ggucaugaugcucauagca

SEQ ID NO: 3284323 - RNA, 19 nt, Artificial Sequence
  Description of Artificial Sequence: Synthetic oligonucleotide
agagcagacagagugccug

SEQ ID NO: 3284324 - RNA, 19 nt, Artificial Sequence
  Description of Artificial Sequence: Synthetic oligonucleotide
agacagagugccugcagug

SEQ ID NO: 3284325 - RNA, 19 nt, Artificial Sequence
  Description of Artificial Sequence: Synthetic oligonucleotide
ugucuccagguccccacgg

SEQ ID NO: 3284326 - RNA, 19 nt, Artificial Sequence
  Description of Artificial Sequence: Synthetic oligonucleotide
cauggcccgauacuugagg

SEQ ID NO: 3284327 - RNA, 19 nt, Artificial Sequence
  Description of Artificial Sequence: Synthetic oligonucleotide
accuagggaaggcugucuc

SEQ ID NO: 3284328 - RNA, 19 nt, Artificial Sequence
  Description of Artificial Sequence: Synthetic oligonucleotide
gacagagugccugcagugg

SEQ ID NO: 3284329 - RNA, 19 nt, Artificial Sequence
  Description of Artificial Sequence: Synthetic oligonucleotide
cucauagcagagucauacc

SEQ ID NO: 3284330 - RNA, 19 nt, Artificial Sequence
  Description of Artificial Sequence: Synthetic oligonucleotide
cagggcuuucucauagucc

SEQ ID NO: 3284331 - RNA, 19 nt, Artificial Sequence
  Description of Artificial Sequence: Synthetic oligonucleotide
uggacuccucacaacacuc

SEQ ID NO: 3284332 - RNA, 19 nt, Artificial Sequence
  Description of Artificial Sequence: Synthetic oligonucleotide
auacuugaggcuccagccu

SEQ ID NO: 3284333 - RNA, 19 nt, Artificial Sequence
  Description of Artificial Sequence: Synthetic oligonucleotide
ccagccuuugccauagucg

SEQ ID NO: 3284334 - RNA, 19 nt, Artificial Sequence
  Description of Artificial Sequence: Synthetic oligonucleotide
agcagagcagacagagugc

SEQ ID NO: 3284335 - RNA, 19 nt, Artificial Sequence
  Description of Artificial Sequence: Synthetic oligonucleotide
caguggucggucaccaugc

SEQ ID NO: 3284336 - RNA, 19 nt, Artificial Sequence
  Description of Artificial Sequence: Synthetic oligonucleotide
auggacuccucacaacacu

SEQ ID NO: 3284337 - RNA, 19 nt, Artificial Sequence
  Description of Artificial Sequence: Synthetic oligonucleotide
cagguggccuagaaggcgg

SEQ ID NO: 3284338 - RNA, 19 nt, Artificial Sequence
  Description of Artificial Sequence: Synthetic oligonucleotide
cuccucacaacacuccaug

SEQ ID NO: 3284339 - RNA, 19 nt, Artificial Sequence
  Description of Artificial Sequence: Synthetic oligonucleotide
agggaaggcugucuccagg

SEQ ID NO: 3284340 - RNA, 19 nt, Artificial Sequence
  Description of Artificial Sequence: Synthetic oligonucleotide
uagcagagucauaccuagg

SEQ ID NO: 3284341 - RNA, 19 nt, Artificial Sequence
  Description of Artificial Sequence: Synthetic oligonucleotide
gguacuggcucauggcccg

SEQ ID NO: 3284342 - RNA, 19 nt, Artificial Sequence
  Description of Artificial Sequence: Synthetic oligonucleotide
cuagaaggcgguaggccac

SEQ ID NO: 3284343 - RNA, 19 nt, Artificial Sequence
  Description of Artificial Sequence: Synthetic oligonucleotide
cagagucauaccuagggaa

SEQ ID NO: 3284344 - RNA, 19 nt, Artificial Sequence
  Description of Artificial Sequence: Synthetic oligonucleotide
gcucauagcagagucauac

SEQ ID NO: 3284345 - RNA, 19 nt, Artificial Sequence
  Description of Artificial Sequence: Synthetic oligonucleotide
agagugccugcaguggucg

SEQ ID NO: 3284346 - RNA, 19 nt, Artificial Sequence
  Description of Artificial Sequence: Synthetic oligonucleotide
gucaccaugcugcaaggca

SEQ ID NO: 3284347 - RNA, 19 nt, Artificial Sequence
  Description of Artificial Sequence: Synthetic oligonucleotide
cauggacuccucacaacac

SEQ ID NO: 3284348 - RNA, 19 nt, Artificial Sequence
  Description of Artificial Sequence: Synthetic oligonucleotide
cugcaaggcaaucuucaug

SEQ ID NO: 3284349 - RNA, 19 nt, Artificial Sequence
  Description of Artificial Sequence: Synthetic oligonucleotide
gaugcuuagauuuaaaaug

SEQ ID NO: 3284350 - RNA, 19 nt, Artificial Sequence
  Description of Artificial Sequence: Synthetic oligonucleotide
ugcauagucacacacaggg

SEQ ID NO: 3284351 - RNA, 19 nt, Artificial Sequence
  Description of Artificial Sequence: Synthetic oligonucleotide
aaauaguugcacuugcuac

SEQ ID NO: 3284352 - RNA, 19 nt, Artificial Sequence
  Description of Artificial Sequence: Synthetic oligonucleotide
uuucuuuccagacauaucc

SEQ ID NO: 3284353 - RNA, 19 nt, Artificial Sequence
  Description of Artificial Sequence: Synthetic oligonucleotide
uuuaguuucacuuuugaga

SEQ ID NO: 3284354 - RNA, 19 nt, Artificial Sequence
  Description of Artificial Sequence: Synthetic oligonucleotide
uuuguagucacagugaggg

SEQ ID NO: 3284355 - RNA, 19 nt, Artificial Sequence
  Description of Artificial Sequence: Synthetic oligonucleotide
ugguauuauagccacagcg

SEQ ID NO: 3284356 - RNA, 19 nt, Artificial Sequence
  Description of Artificial Sequence: Synthetic oligonucleotide
aaaaugauacuguagauua

SEQ ID NO: 3284357 - RNA, 19 nt, Artificial Sequence
  Description of Artificial Sequence: Synthetic oligonucleotide
uguagauuacacuucuugg

SEQ ID NO: 3284358 - RNA, 19 nt, Artificial Sequence
  Description of Artificial Sequence: Synthetic oligonucleotide
agaugauacacuuguagac

SEQ ID NO: 3284359 - RNA, 19 nt, Artificial Sequence
  Description of Artificial Sequence: Synthetic oligonucleotide
uagauuuaaaaugauacug

SEQ ID NO: 3284360 - RNA, 19 nt, Artificial Sequence
  Description of Artificial Sequence: Synthetic oligonucleotide
ucgaaugggacccuuagag

SEQ ID NO: 3284361 - RNA, 19 nt, Artificial Sequence
  Description of Artificial Sequence: Synthetic oligonucleotide
uacuaugcaagucagcagc

SEQ ID NO: 3284362 - RNA, 19 nt, Artificial Sequence
  Description of Artificial Sequence: Synthetic oligonucleotide
auuggugacauuacuaugc

SEQ ID NO: 3284363 - RNA, 19 nt, Artificial Sequence
  Description of Artificial Sequence: Synthetic oligonucleotide
aguucugguaguuaccugg

SEQ ID NO: 3284364 - RNA, 19 nt, Artificial Sequence
  Description of Artificial Sequence: Synthetic oligonucleotide
ugaauuauuuccuguaugu

SEQ ID NO: 3284365 - RNA, 19 nt, Artificial Sequence
  Description of Artificial Sequence: Synthetic oligonucleotide
aaugagugcgcaugugucg

SEQ ID NO: 3284366 - RNA, 19 nt, Artificial Sequence
  Description of Artificial Sequence: Synthetic oligonucleotide
accgguugguauuauagcc

SEQ ID NO: 3284367 - RNA, 19 nt, Artificial Sequence
  Description of Artificial Sequence: Synthetic oligonucleotide
aauaguugcacuugcuaca

SEQ ID NO: 3284368 - RNA, 19 nt, Artificial Sequence
  Description of Artificial Sequence: Synthetic oligonucleotide
cuaacuguuguguacgugc

SEQ ID NO: 3284369 - RNA, 19 nt, Artificial Sequence
  Description of Artificial Sequence: Synthetic oligonucleotide
aaguucacauuuauaaggg

SEQ ID NO: 3284370 - RNA, 19 nt, Artificial Sequence
  Description of Artificial Sequence: Synthetic oligonucleotide
gauuacacuucuuggaagc

SEQ ID NO: 3284371 - RNA, 19 nt, Artificial Sequence
  Description of Artificial Sequence: Synthetic oligonucleotide
caauuaagagguuuaggcc

SEQ ID NO: 3284372 - RNA, 19 nt, Artificial Sequence
  Description of Artificial Sequence: Synthetic oligonucleotide
uuaggugagucuuucuggg

SEQ ID NO: 3284373 - RNA, 19 nt, Artificial Sequence
  Description of Artificial Sequence: Synthetic oligonucleotide
ugaaguugcuucuaucugc

SEQ ID NO: 3284374 - RNA, 19 nt, Artificial Sequence
  Description of Artificial Sequence: Synthetic oligonucleotide
ugaggaaugggcuucagaa

SEQ ID NO: 3284375 - RNA, 19 nt, Artificial Sequence
  Description of Artificial Sequence: Synthetic oligonucleotide
aguucgaacauguuggaca

SEQ ID NO: 3284376 - RNA, 19 nt, Artificial Sequence
  Description of Artificial Sequence: Synthetic oligonucleotide
aaugauacuguagauuaca

SEQ ID NO: 3284377 - RNA, 19 nt, Artificial Sequence
  Description of Artificial Sequence: Synthetic oligonucleotide
caucguuuuauuaaggcuc

SEQ ID NO: 3284378 - RNA, 19 nt, Artificial Sequence
  Description of Artificial Sequence: Synthetic oligonucleotide
gacauuacuaugcaaguca

SEQ ID NO: 3284379 - RNA, 19 nt, Artificial Sequence
  Description of Artificial Sequence: Synthetic oligonucleotide
cuucgugcugauuugaagc

SEQ ID NO: 3284380 - RNA, 19 nt, Artificial Sequence
  Description of Artificial Sequence: Synthetic oligonucleotide
accacugagacauugccag

SEQ ID NO: 3284381 - RNA, 19 nt, Artificial Sequence
  Description of Artificial Sequence: Synthetic oligonucleotide
gcaauuaagagguuuaggc

SEQ ID NO: 3284382 - RNA, 19 nt, Artificial Sequence
  Description of Artificial Sequence: Synthetic oligonucleotide
uuaacaugcaguucaacau

SEQ ID NO: 3284383 - RNA, 19 nt, Artificial Sequence
  Description of Artificial Sequence: Synthetic oligonucleotide
auuacuaugcaagucagca

SEQ ID NO: 3284384 - RNA, 19 nt, Artificial Sequence
  Description of Artificial Sequence: Synthetic oligonucleotide
aaaauaguugcacuugcua

SEQ ID NO: 3284385 - RNA, 19 nt, Artificial Sequence
  Description of Artificial Sequence: Synthetic oligonucleotide
augauacacuuguagacuc

SEQ ID NO: 3284386 - RNA, 19 nt, Artificial Sequence
  Description of Artificial Sequence: Synthetic oligonucleotide
aacuugaguaaggacaaag

SEQ ID NO: 3284387 - RNA, 19 nt, Artificial Sequence
  Description of Artificial Sequence: Synthetic oligonucleotide
guuaggugagucuuucugg

SEQ ID NO: 3284388 - RNA, 19 nt, Artificial Sequence
  Description of Artificial Sequence: Synthetic oligonucleotide
uuuuguagucacagugagg

SEQ ID NO: 3284389 - RNA, 19 nt, Artificial Sequence
  Description of Artificial Sequence: Synthetic oligonucleotide
uguguagacuuuucugggg

SEQ ID NO: 3284390 - RNA, 19 nt, Artificial Sequence
  Description of Artificial Sequence: Synthetic oligonucleotide
uccaucguuuuauuaaggc

SEQ ID NO: 3284391 - RNA, 19 nt, Artificial Sequence
  Description of Artificial Sequence: Synthetic oligonucleotide
cugaucacauuuaaauggc

SEQ ID NO: 3284392 - RNA, 19 nt, Artificial Sequence
  Description of Artificial Sequence: Synthetic oligonucleotide
aguuaggugagucuuucug

SEQ ID NO: 3284393 - RNA, 19 nt, Artificial Sequence
  Description of Artificial Sequence: Synthetic oligonucleotide
uuucacuuuugagacaucc

SEQ ID NO: 3284394 - RNA, 19 nt, Artificial Sequence
  Description of Artificial Sequence: Synthetic oligonucleotide
cuguuuuguagucacagug

SEQ ID NO: 3284395 - RNA, 19 nt, Artificial Sequence
  Description of Artificial Sequence: Synthetic oligonucleotide
agugauacucgcuaacugu

SEQ ID NO: 3284396 - RNA, 19 nt, Artificial Sequence
  Description of Artificial Sequence: Synthetic oligonucleotide
uuuucucuacuuuuaggga

SEQ ID NO: 3284397 - RNA, 19 nt, Artificial Sequence
  Description of Artificial Sequence: Synthetic oligonucleotide
acuuuuagggauuucucgu

SEQ ID NO: 3284398 - RNA, 19 nt, Artificial Sequence
  Description of Artificial Sequence: Synthetic oligonucleotide
auguguagacuuuucuggg

SEQ ID NO: 3284399 - RNA, 19 nt, Artificial Sequence
  Description of Artificial Sequence: Synthetic oligonucleotide
cugccuuggguuaacaugc

SEQ ID NO: 3284400 - RNA, 19 nt, Artificial Sequence
  Description of Artificial Sequence: Synthetic oligonucleotide
ucuuuccagacauaucccc

SEQ ID NO: 3284401 - RNA, 19 nt, Artificial Sequence
  Description of Artificial Sequence: Synthetic oligonucleotide
guugguauuauagccacag

SEQ ID NO: 3284402 - RNA, 19 nt, Artificial Sequence
  Description of Artificial Sequence: Synthetic oligonucleotide
cuuuaguuucacuuuugag

SEQ ID NO: 3284403 - RNA, 19 nt, Artificial Sequence
  Description of Artificial Sequence: Synthetic oligonucleotide
ugauacacuuguagacucg

SEQ ID NO: 3284404 - RNA, 19 nt, Artificial Sequence
  Description of Artificial Sequence: Synthetic oligonucleotide
uacugguuccucauucacg

SEQ ID NO: 3284405 - RNA, 19 nt, Artificial Sequence
  Description of Artificial Sequence: Synthetic oligonucleotide
acauguguagacuuuucug

SEQ ID NO: 3284406 - RNA, 19 nt, Artificial Sequence
  Description of Artificial Sequence: Synthetic oligonucleotide
uuuucuggggaaaugguuu

SEQ ID NO: 3284407 - RNA, 19 nt, Artificial Sequence
  Description of Artificial Sequence: Synthetic oligonucleotide
ucugggaacuugaguaagg

SEQ ID NO: 3284408 - RNA, 19 nt, Artificial Sequence
  Description of Artificial Sequence: Synthetic oligonucleotide
agauuacacuucuuggaag

SEQ ID NO: 3284409 - RNA, 19 nt, Artificial Sequence
  Description of Artificial Sequence: Synthetic oligonucleotide
gagguuuaggcccauugug

SEQ ID NO: 3284410 - RNA, 19 nt, Artificial Sequence
  Description of Artificial Sequence: Synthetic oligonucleotide
aaaugauacuguagauuac

SEQ ID NO: 3284411 - RNA, 19 nt, Artificial Sequence
  Description of Artificial Sequence: Synthetic oligonucleotide
gaaugggacccuuagagaa

SEQ ID NO: 3284412 - RNA, 19 nt, Artificial Sequence
  Description of Artificial Sequence: Synthetic oligonucleotide
gguauuauagccacagcgg

SEQ ID NO: 3284413 - RNA, 19 nt, Artificial Sequence
  Description of Artificial Sequence: Synthetic oligonucleotide
uucauuggugacauuacua

SEQ ID NO: 3284414 - RNA, 19 nt, Artificial Sequence
  Description of Artificial Sequence: Synthetic oligonucleotide
cuuucugggaacuugagua

SEQ ID NO: 3284415 - RNA, 19 nt, Artificial Sequence
  Description of Artificial Sequence: Synthetic oligonucleotide
uuucauuggugacauuacu

SEQ ID NO: 3284416 - RNA, 19 nt, Artificial Sequence
  Description of Artificial Sequence: Synthetic oligonucleotide
uuucucagguguuuccucc

SEQ ID NO: 3284417 - RNA, 19 nt, Artificial Sequence
  Description of Artificial Sequence: Synthetic oligonucleotide
uuacuaugcaagucagcag

SEQ ID NO: 3284418 - RNA, 19 nt, Artificial Sequence
  Description of Artificial Sequence: Synthetic oligonucleotide
aguugcuucuaucugcugu

SEQ ID NO: 3284419 - RNA, 19 nt, Artificial Sequence
  Description of Artificial Sequence: Synthetic oligonucleotide
auuauagccacagcgguca

SEQ ID NO: 3284420 - RNA, 19 nt, Artificial Sequence
  Description of Artificial Sequence: Synthetic oligonucleotide
gauuugaagccacauaacu

SEQ ID NO: 3284421 - RNA, 19 nt, Artificial Sequence
  Description of Artificial Sequence: Synthetic oligonucleotide
uuucugaauuauuuccugu

SEQ ID NO: 3284422 - RNA, 19 nt, Artificial Sequence
  Description of Artificial Sequence: Synthetic oligonucleotide
ugcuguuuuguagucacag

SEQ ID NO: 3284423 - RNA, 19 nt, Artificial Sequence
  Description of Artificial Sequence: Synthetic oligonucleotide
agacucgcucauuaucccc

SEQ ID NO: 3284424 - RNA, 19 nt, Artificial Sequence
  Description of Artificial Sequence: Synthetic oligonucleotide
agcuauguguuucaucucu

SEQ ID NO: 3284425 - RNA, 19 nt, Artificial Sequence
  Description of Artificial Sequence: Synthetic oligonucleotide
ucagguguuuccuccagug

SEQ ID NO: 3284426 - RNA, 19 nt, Artificial Sequence
  Description of Artificial Sequence: Synthetic oligonucleotide
uucgugcugauuugaagcc

SEQ ID NO: 3284427 - RNA, 19 nt, Artificial Sequence
  Description of Artificial Sequence: Synthetic oligonucleotide
uacacuuguagacucgcuc

SEQ ID NO: 3284428 - RNA, 19 nt, Artificial Sequence
  Description of Artificial Sequence: Synthetic oligonucleotide
cauagucacacacagggca

SEQ ID NO: 3284429 - RNA, 19 nt, Artificial Sequence
  Description of Artificial Sequence: Synthetic oligonucleotide
gagauuuccucucuuuuga

SEQ ID NO: 3284430 - RNA, 19 nt, Artificial Sequence
  Description of Artificial Sequence: Synthetic oligonucleotide
aguuaccuggaccacugag

SEQ ID NO: 3284431 - RNA, 19 nt, Artificial Sequence
  Description of Artificial Sequence: Synthetic oligonucleotide
ugcaugccgggucacuucg

SEQ ID NO: 3284432 - RNA, 19 nt, Artificial Sequence
  Description of Artificial Sequence: Synthetic oligonucleotide
ugggcuucagaauccaucu

SEQ ID NO: 3284433 - RNA, 19 nt, Artificial Sequence
  Description of Artificial Sequence: Synthetic oligonucleotide
uauuauagccacagcgguc

SEQ ID NO: 3284434 - RNA, 19 nt, Artificial Sequence
  Description of Artificial Sequence: Synthetic oligonucleotide
ugguuccucauucacggga

SEQ ID NO: 3284435 - RNA, 19 nt, Artificial Sequence
  Description of Artificial Sequence: Synthetic oligonucleotide
gcugcuuuagucuccgucg

SEQ ID NO: 3284436 - RNA, 19 nt, Artificial Sequence
  Description of Artificial Sequence: Synthetic oligonucleotide
gucacaucgaaugggaccc

SEQ ID NO: 3284437 - RNA, 19 nt, Artificial Sequence
  Description of Artificial Sequence: Synthetic oligonucleotide
acacuuguagacucgcuca

SEQ ID NO: 3284438 - RNA, 19 nt, Artificial Sequence
  Description of Artificial Sequence: Synthetic oligonucleotide
ugauacucgcuaacuguug

SEQ ID NO: 3284439 - RNA, 19 nt, Artificial Sequence
  Description of Artificial Sequence: Synthetic oligonucleotide
ucgcuaacuguuguguacg

SEQ ID NO: 3284440 - RNA, 19 nt, Artificial Sequence
  Description of Artificial Sequence: Synthetic oligonucleotide
uguacgugcagaugauaca

SEQ ID NO: 3284441 - RNA, 19 nt, Artificial Sequence
  Description of Artificial Sequence: Synthetic oligonucleotide
ugaucauaccgguugguau

SEQ ID NO: 3284442 - RNA, 19 nt, Artificial Sequence
  Description of Artificial Sequence: Synthetic oligonucleotide
uccgaguucugguaguuac

SEQ ID NO: 3284443 - RNA, 19 nt, Artificial Sequence
  Description of Artificial Sequence: Synthetic oligonucleotide
uuuccucucuuuugaaaca

SEQ ID NO: 3284444 - RNA, 19 nt, Artificial Sequence
  Description of Artificial Sequence: Synthetic oligonucleotide
ucgaacauguuggacauaa

SEQ ID NO: 3284445 - RNA, 19 nt, Artificial Sequence
  Description of Artificial Sequence: Synthetic oligonucleotide
aucguuuuauuaaggcucg

SEQ ID NO: 3284446 - RNA, 19 nt, Artificial Sequence
  Description of Artificial Sequence: Synthetic oligonucleotide
uaugcaagucagcagccuc

SEQ ID NO: 3284447 - RNA, 19 nt, Artificial Sequence
  Description of Artificial Sequence: Synthetic oligonucleotide
uaacuguuguguacgugca

SEQ ID NO: 3284448 - RNA, 19 nt, Artificial Sequence
  Description of Artificial Sequence: Synthetic oligonucleotide
auaccgguugguauuauag

SEQ ID NO: 3284449 - RNA, 19 nt, Artificial Sequence
  Description of Artificial Sequence: Synthetic oligonucleotide
agaaaauauaaauuaaugc

SEQ ID NO: 3284450 - RNA, 19 nt, Artificial Sequence
  Description of Artificial Sequence: Synthetic oligonucleotide
aauuauaaggcagccaucc

SEQ ID NO: 3284451 - RNA, 19 nt, Artificial Sequence
  Description of Artificial Sequence: Synthetic oligonucleotide
aauuaaaguggaaagagac

SEQ ID NO: 3284452 - RNA, 19 nt, Artificial Sequence
  Description of Artificial Sequence: Synthetic oligonucleotide
uuugagauuaccauucagg

SEQ ID NO: 3284453 - RNA, 19 nt, Artificial Sequence
  Description of Artificial Sequence: Synthetic oligonucleotide
auuuguuccucacugaagc

SEQ ID NO: 3284454 - RNA, 19 nt, Artificial Sequence
  Description of Artificial Sequence: Synthetic oligonucleotide
aacauaaagaaaugucccg

SEQ ID NO: 3284455 - RNA, 19 nt, Artificial Sequence
  Description of Artificial Sequence: Synthetic oligonucleotide
caaaacaggauuuaggcag

SEQ ID NO: 3284456 - RNA, 19 nt, Artificial Sequence
  Description of Artificial Sequence: Synthetic oligonucleotide
ucuaauucgauuccgcucc

SEQ ID NO: 3284457 - RNA, 19 nt, Artificial Sequence
  Description of Artificial Sequence: Synthetic oligonucleotide
aggcauguggcacagaugc

SEQ ID NO: 3284458 - RNA, 19 nt, Artificial Sequence
  Description of Artificial Sequence: Synthetic oligonucleotide
aauuaggagagaaauaaag

SEQ ID NO: 3284459 - RNA, 19 nt, Artificial Sequence
  Description of Artificial Sequence: Synthetic oligonucleotide
uauaaauuaaugcaguauu

SEQ ID NO: 3284460 - RNA, 19 nt, Artificial Sequence
  Description of Artificial Sequence: Synthetic oligonucleotide
cuaaccucaaaucaguugc

SEQ ID NO: 3284461 - RNA, 19 nt, Artificial Sequence
  Description of Artificial Sequence: Synthetic oligonucleotide
uauuggaagacacaaccag

SEQ ID NO: 3284462 - RNA, 19 nt, Artificial Sequence
  Description of Artificial Sequence: Synthetic oligonucleotide
gagauuaccauucaggcca

SEQ ID NO: 3284463 - RNA, 19 nt, Artificial Sequence
  Description of Artificial Sequence: Synthetic oligonucleotide
ugaguuuauguguacaaag

SEQ ID NO: 3284464 - RNA, 19 nt, Artificial Sequence
  Description of Artificial Sequence: Synthetic oligonucleotide
aguauuauacacuuaucug

SEQ ID NO: 3284465 - RNA, 19 nt, Artificial Sequence
  Description of Artificial Sequence: Synthetic oligonucleotide
aacugcuuaaauuaucaga

SEQ ID NO: 3284466 - RNA, 19 nt, Artificial Sequence
  Description of Artificial Sequence: Synthetic oligonucleotide
cacaaccagacaaagagcg

SEQ ID NO: 3284467 - RNA, 19 nt, Artificial Sequence
  Description of Artificial Sequence: Synthetic oligonucleotide
acuagugaugugucaaucc

SEQ ID NO: 3284468 - RNA, 19 nt, Artificial Sequence
  Description of Artificial Sequence: Synthetic oligonucleotide
aaugcaguauuauacacuu

SEQ ID NO: 3284469 - RNA, 19 nt, Artificial Sequence
  Description of Artificial Sequence: Synthetic oligonucleotide
agugguagagccucuaaac

SEQ ID NO: 3284470 - RNA, 19 nt, Artificial Sequence
  Description of Artificial Sequence: Synthetic oligonucleotide
uugagauuaccauucaggc

SEQ ID NO: 3284471 - RNA, 19 nt, Artificial Sequence
  Description of Artificial Sequence: Synthetic oligonucleotide
ucuaaagaaacuagucuug

SEQ ID NO: 3284472 - RNA, 19 nt, Artificial Sequence
  Description of Artificial Sequence: Synthetic oligonucleotide
ucaacugcuuaaauuauca

SEQ ID NO: 3284473 - RNA, 19 nt, Artificial Sequence
  Description of Artificial Sequence: Synthetic oligonucleotide
uauuauacacuuaucugac

SEQ ID NO: 3284474 - RNA, 19 nt, Artificial Sequence
  Description of Artificial Sequence: Synthetic oligonucleotide
auucucuguguuuagcagc

SEQ ID NO: 3284475 - RNA, 19 nt, Artificial Sequence
  Description of Artificial Sequence: Synthetic oligonucleotide
caacauaaagaaauguccc

SEQ ID NO: 3284476 - RNA, 19 nt, Artificial Sequence
  Description of Artificial Sequence: Synthetic oligonucleotide
accauucacaauuaaagug

SEQ ID NO: 3284477 - RNA, 19 nt, Artificial Sequence
  Description of Artificial Sequence: Synthetic oligonucleotide
ucucucuuuauguaaagug

SEQ ID NO: 3284478 - RNA, 19 nt, Artificial Sequence
  Description of Artificial Sequence: Synthetic oligonucleotide
acaauuaaaguggaaagag

SEQ ID NO: 3284479 - RNA, 19 nt, Artificial Sequence
  Description of Artificial Sequence: Synthetic oligonucleotide
uuaaaguggaaagagacaa

SEQ ID NO: 3284480 - RNA, 19 nt, Artificial Sequence
  Description of Artificial Sequence: Synthetic oligonucleotide
aauuccgcagcuguugacc

SEQ ID NO: 3284481 - RNA, 19 nt, Artificial Sequence
  Description of Artificial Sequence: Synthetic oligonucleotide
aaagcaccagucuuacacg

SEQ ID NO: 3284482 - RNA, 19 nt, Artificial Sequence
  Description of Artificial Sequence: Synthetic oligonucleotide
guauuauacacuuaucuga

SEQ ID NO: 3284483 - RNA, 19 nt, Artificial Sequence
  Description of Artificial Sequence: Synthetic oligonucleotide
cauggaaugaguuuaugug

SEQ ID NO: 3284484 - RNA, 19 nt, Artificial Sequence
  Description of Artificial Sequence: Synthetic oligonucleotide
uuacuuaguccuaaguaug

SEQ ID NO: 3284485 - RNA, 19 nt, Artificial Sequence
  Description of Artificial Sequence: Synthetic oligonucleotide
uacucuaaccucaaaucag

SEQ ID NO: 3284486 - RNA, 19 nt, Artificial Sequence
  Description of Artificial Sequence: Synthetic oligonucleotide
cauuauugccacaaaacac

SEQ ID NO: 3284487 - RNA, 19 nt, Artificial Sequence
  Description of Artificial Sequence: Synthetic oligonucleotide
uggguaaagugguagagcc

SEQ ID NO: 3284488 - RNA, 19 nt, Artificial Sequence
  Description of Artificial Sequence: Synthetic oligonucleotide
uuacacggugauaauaacc

SEQ ID NO: 3284489 - RNA, 19 nt, Artificial Sequence
  Description of Artificial Sequence: Synthetic oligonucleotide
agacaaagagcgaagaaac

SEQ ID NO: 3284490 - RNA, 19 nt, Artificial Sequence
  Description of Artificial Sequence: Synthetic oligonucleotide
aaccauucacaauuaaagu

SEQ ID NO: 3284491 - RNA, 19 nt, Artificial Sequence
  Description of Artificial Sequence: Synthetic oligonucleotide
ucuuacuuaguccuaagua

SEQ ID NO: 3284492 - RNA, 19 nt, Artificial Sequence
  Description of Artificial Sequence: Synthetic oligonucleotide
ucuuacacggugauaauaa

SEQ ID NO: 3284493 - RNA, 19 nt, Artificial Sequence
  Description of Artificial Sequence: Synthetic oligonucleotide
acacuuaucugacaaaaca

SEQ ID NO: 3284494 - RNA, 19 nt, Artificial Sequence
  Description of Artificial Sequence: Synthetic oligonucleotide
ucagcauggacauggcugg

SEQ ID NO: 3284495 - RNA, 19 nt, Artificial Sequence
  Description of Artificial Sequence: Synthetic oligonucleotide
uacagaaaauauaaauuaa

SEQ ID NO: 3284496 - RNA, 19 nt, Artificial Sequence
  Description of Artificial Sequence: Synthetic oligonucleotide
aaugaguuuauguguacaa

SEQ ID NO: 3284497 - RNA, 19 nt, Artificial Sequence
  Description of Artificial Sequence: Synthetic oligonucleotide
ugcuuaaauuaucagagua

SEQ ID NO: 3284498 - RNA, 19 nt, Artificial Sequence
  Description of Artificial Sequence: Synthetic oligonucleotide
uauaaggcagccauccaug

SEQ ID NO: 3284499 - RNA, 19 nt, Artificial Sequence
  Description of Artificial Sequence: Synthetic oligonucleotide
gaguuuauguguacaaagg

SEQ ID NO: 3284500 - RNA, 19 nt, Artificial Sequence
  Description of Artificial Sequence: Synthetic oligonucleotide
uaucugacaaaacaggauu

SEQ ID NO: 3284501 - RNA, 19 nt, Artificial Sequence
  Description of Artificial Sequence: Synthetic oligonucleotide
agaaguaaguacaacaugu

SEQ ID NO: 3284502 - RNA, 19 nt, Artificial Sequence
  Description of Artificial Sequence: Synthetic oligonucleotide
aauaaccauguuaaaacca

SEQ ID NO: 3284503 - RNA, 19 nt, Artificial Sequence
  Description of Artificial Sequence: Synthetic oligonucleotide
gagacaaaauuauaaggca

SEQ ID NO: 3284504 - RNA, 19 nt, Artificial Sequence
  Description of Artificial Sequence: Synthetic oligonucleotide
cacuuaucugacaaaacag

SEQ ID NO: 3284505 - RNA, 19 nt, Artificial Sequence
  Description of Artificial Sequence: Synthetic oligonucleotide
guacaaaggauccagagaa

SEQ ID NO: 3284506 - RNA, 19 nt, Artificial Sequence
  Description of Artificial Sequence: Synthetic oligonucleotide
ugcaaauaccagcaagugc

SEQ ID NO: 3284507 - RNA, 19 nt, Artificial Sequence
  Description of Artificial Sequence: Synthetic oligonucleotide
ugaaagggcuucuuuacug

SEQ ID NO: 3284508 - RNA, 19 nt, Artificial Sequence
  Description of Artificial Sequence: Synthetic oligonucleotide
caaaccaggagaacugugg

SEQ ID NO: 3284509 - RNA, 19 nt, Artificial Sequence
  Description of Artificial Sequence: Synthetic oligonucleotide
guugccgucaccuuuagca

SEQ ID NO: 3284510 - RNA, 19 nt, Artificial Sequence
  Description of Artificial Sequence: Synthetic oligonucleotide
aaaucaguugccgucaccu

SEQ ID NO: 3284511 - RNA, 19 nt, Artificial Sequence
  Description of Artificial Sequence: Synthetic oligonucleotide
acuccaguggcauugaccu

SEQ ID NO: 3284512 - RNA, 19 nt, Artificial Sequence
  Description of Artificial Sequence: Synthetic oligonucleotide
uaaugcaguauuauacacu

SEQ ID NO: 3284513 - RNA, 19 nt, Artificial Sequence
  Description of Artificial Sequence: Synthetic oligonucleotide
aauggguaaagugguagag

SEQ ID NO: 3284514 - RNA, 19 nt, Artificial Sequence
  Description of Artificial Sequence: Synthetic oligonucleotide
aacgacugcacccacugcu

SEQ ID NO: 3284515 - RNA, 19 nt, Artificial Sequence
  Description of Artificial Sequence: Synthetic oligonucleotide
uuauuggaagacacaacca

SEQ ID NO: 3284516 - RNA, 19 nt, Artificial Sequence
  Description of Artificial Sequence: Synthetic oligonucleotide
auuauugccacaaaacaca

SEQ ID NO: 3284517 - RNA, 19 nt, Artificial Sequence
  Description of Artificial Sequence: Synthetic oligonucleotide
aacuaccuuuguugaauac

SEQ ID NO: 3284518 - RNA, 19 nt, Artificial Sequence
  Description of Artificial Sequence: Synthetic oligonucleotide
uccuaaguaugucagcaug

SEQ ID NO: 3284519 - RNA, 19 nt, Artificial Sequence
  Description of Artificial Sequence: Synthetic oligonucleotide
ccauucacaauuaaagugg

SEQ ID NO: 3284520 - RNA, 19 nt, Artificial Sequence
  Description of Artificial Sequence: Synthetic oligonucleotide
auucgauuccgcuccagac

SEQ ID NO: 3284521 - RNA, 19 nt, Artificial Sequence
  Description of Artificial Sequence: Synthetic oligonucleotide
accacacccauucugcuac

SEQ ID NO: 3284522 - RNA, 19 nt, Artificial Sequence
  Description of Artificial Sequence: Synthetic oligonucleotide
cacaaaaccacacccauuc

SEQ ID NO: 3284523 - RNA, 19 nt, Artificial Sequence
  Description of Artificial Sequence: Synthetic oligonucleotide
uuuaauuccgcagcuguug

SEQ ID NO: 3284524 - RNA, 19 nt, Artificial Sequence
  Description of Artificial Sequence: Synthetic oligonucleotide
cauucugcuacauuuguuc

SEQ ID NO: 3284525 - RNA, 19 nt, Artificial Sequence
  Description of Artificial Sequence: Synthetic oligonucleotide
aauacuuuugcugucucaa

SEQ ID NO: 3284526 - RNA, 19 nt, Artificial Sequence
  Description of Artificial Sequence: Synthetic oligonucleotide
ugagauuaccauucaggcc

SEQ ID NO: 3284527 - RNA, 19 nt, Artificial Sequence
  Description of Artificial Sequence: Synthetic oligonucleotide
uuuaggcagauuuuggcaa

SEQ ID NO: 3284528 - RNA, 19 nt, Artificial Sequence
  Description of Artificial Sequence: Synthetic oligonucleotide
uuagcaucuaagaggguga

SEQ ID NO: 3284529 - RNA, 19 nt, Artificial Sequence
  Description of Artificial Sequence: Synthetic oligonucleotide
cuagugaugugucaauccc

SEQ ID NO: 3284530 - RNA, 19 nt, Artificial Sequence
  Description of Artificial Sequence: Synthetic oligonucleotide
uuauaaggcagccauccau

SEQ ID NO: 3284531 - RNA, 19 nt, Artificial Sequence
  Description of Artificial Sequence: Synthetic oligonucleotide
cuacauuuguuccucacug

SEQ ID NO: 3284532 - RNA, 19 nt, Artificial Sequence
  Description of Artificial Sequence: Synthetic oligonucleotide
uacuuuugcugucucaacu

SEQ ID NO: 3284533 - RNA, 19 nt, Artificial Sequence
  Description of Artificial Sequence: Synthetic oligonucleotide
aucuaaagaaguaaguaca

SEQ ID NO: 3284534 - RNA, 19 nt, Artificial Sequence
  Description of Artificial Sequence: Synthetic oligonucleotide
ugacaauuaggagagaaau

SEQ ID NO: 3284535 - RNA, 19 nt, Artificial Sequence
  Description of Artificial Sequence: Synthetic oligonucleotide
aaaagcauggccacuccag

SEQ ID NO: 3284536 - RNA, 19 nt, Artificial Sequence
  Description of Artificial Sequence: Synthetic oligonucleotide
aagagggugagugcaugcc

SEQ ID NO: 3284537 - RNA, 19 nt, Artificial Sequence
  Description of Artificial Sequence: Synthetic oligonucleotide
gugauaauaaccauguuaa

SEQ ID NO: 3284538 - RNA, 19 nt, Artificial Sequence
  Description of Artificial Sequence: Synthetic oligonucleotide
cuaaagaaacuagucuugg

SEQ ID NO: 3284539 - RNA, 19 nt, Artificial Sequence
  Description of Artificial Sequence: Synthetic oligonucleotide
caaaggauccagagaaagg

SEQ ID NO: 3284540 - RNA, 19 nt, Artificial Sequence
  Description of Artificial Sequence: Synthetic oligonucleotide
augucugccaguccuuccc

SEQ ID NO: 3284541 - RNA, 19 nt, Artificial Sequence
  Description of Artificial Sequence: Synthetic oligonucleotide
uaaagaaacuagucuuggc

SEQ ID NO: 3284542 - RNA, 19 nt, Artificial Sequence
  Description of Artificial Sequence: Synthetic oligonucleotide
cagagaaaggacauuugag

SEQ ID NO: 3284543 - RNA, 19 nt, Artificial Sequence
  Description of Artificial Sequence: Synthetic oligonucleotide
uucgauuccgcuccagacc

SEQ ID NO: 3284544 - RNA, 19 nt, Artificial Sequence
  Description of Artificial Sequence: Synthetic oligonucleotide
cauguuaaaaccaaugggu

SEQ ID NO: 3284545 - RNA, 19 nt, Artificial Sequence
  Description of Artificial Sequence: Synthetic oligonucleotide
agaaaagcauggccacucc

SEQ ID NO: 3284546 - RNA, 19 nt, Artificial Sequence
  Description of Artificial Sequence: Synthetic oligonucleotide
aaaccaggagaacuguggu

SEQ ID NO: 3284547 - RNA, 19 nt, Artificial Sequence
  Description of Artificial Sequence: Synthetic oligonucleotide
auuugagauuaccauucag

SEQ ID NO: 3284548 - RNA, 19 nt, Artificial Sequence
  Description of Artificial Sequence: Synthetic oligonucleotide
acaaaggauccagagaaag

SEQ ID NO: 3284549 - RNA, 19 nt, Artificial Sequence
  Description of Artificial Sequence: Synthetic oligonucleotide
gaaacaaccaaacauaucc

SEQ ID NO: 3284550 - RNA, 19 nt, Artificial Sequence
  Description of Artificial Sequence: Synthetic oligonucleotide
uucugaaugacgcugacgg

SEQ ID NO: 3284551 - RNA, 19 nt, Artificial Sequence
  Description of Artificial Sequence: Synthetic oligonucleotide
uuucccuaaaccuagggag

SEQ ID NO: 3284552 - RNA, 19 nt, Artificial Sequence
  Description of Artificial Sequence: Synthetic oligonucleotide
guaagagccauucuuaggc

SEQ ID NO: 3284553 - RNA, 19 nt, Artificial Sequence
  Description of Artificial Sequence: Synthetic oligonucleotide
aacuguuucuggcagucgg

SEQ ID NO: 3284554 - RNA, 19 nt, Artificial Sequence
  Description of Artificial Sequence: Synthetic oligonucleotide
auuucuaaugcuguuuccc

SEQ ID NO: 3284555 - RNA, 19 nt, Artificial Sequence
  Description of Artificial Sequence: Synthetic oligonucleotide
cuuuggacauucuucaugc

SEQ ID NO: 3284556 - RNA, 19 nt, Artificial Sequence
  Description of Artificial Sequence: Synthetic oligonucleotide
uucaucucagagauguagg

SEQ ID NO: 3284557 - RNA, 19 nt, Artificial Sequence
  Description of Artificial Sequence: Synthetic oligonucleotide
aaaaccuccagguccaagu

SEQ ID NO: 3284558 - RNA, 19 nt, Artificial Sequence
  Description of Artificial Sequence: Synthetic oligonucleotide
ugacacagcaggaaugggg

SEQ ID NO: 3284559 - RNA, 19 nt, Artificial Sequence
  Description of Artificial Sequence: Synthetic oligonucleotide
ugucgcaagagccacuggg

SEQ ID NO: 3284560 - RNA, 19 nt, Artificial Sequence
  Description of Artificial Sequence: Synthetic oligonucleotide
aucucagagauguaggcag

SEQ ID NO: 3284561 - RNA, 19 nt, Artificial Sequence
  Description of Artificial Sequence: Synthetic oligonucleotide
agcaucucuucauaggagg

SEQ ID NO: 3284562 - RNA, 19 nt, Artificial Sequence
  Description of Artificial Sequence: Synthetic oligonucleotide
acuccucacagcuuucucc

SEQ ID NO: 3284563 - RNA, 19 nt, Artificial Sequence
  Description of Artificial Sequence: Synthetic oligonucleotide
guggccuuugcucacaugg

SEQ ID NO: 3284564 - RNA, 19 nt, Artificial Sequence
  Description of Artificial Sequence: Synthetic oligonucleotide
aaccuccagguccaagucc

SEQ ID NO: 3284565 - RNA, 19 nt, Artificial Sequence
  Description of Artificial Sequence: Synthetic oligonucleotide
agcgaaggagcauuggagg

SEQ ID NO: 3284566 - RNA, 19 nt, Artificial Sequence
  Description of Artificial Sequence: Synthetic oligonucleotide
gucaauuaccuucugugcc

SEQ ID NO: 3284567 - RNA, 19 nt, Artificial Sequence
  Description of Artificial Sequence: Synthetic oligonucleotide
ucugacacagcaggaaugg

SEQ ID NO: 3284568 - RNA, 19 nt, Artificial Sequence
  Description of Artificial Sequence: Synthetic oligonucleotide
uucccuaaaccuagggagg

SEQ ID NO: 3284569 - RNA, 19 nt, Artificial Sequence
  Description of Artificial Sequence: Synthetic oligonucleotide
ugucaauuaccuucugugc

SEQ ID NO: 3284570 - RNA, 19 nt, Artificial Sequence
  Description of Artificial Sequence: Synthetic oligonucleotide
uguuucccuaaaccuaggg

SEQ ID NO: 3284571 - RNA, 19 nt, Artificial Sequence
  Description of Artificial Sequence: Synthetic oligonucleotide
ucagggaucaccugguaca

SEQ ID NO: 3284572 - RNA, 19 nt, Artificial Sequence
  Description of Artificial Sequence: Synthetic oligonucleotide
agaagguggggucuugugg

SEQ ID NO: 3284573 - RNA, 19 nt, Artificial Sequence
  Description of Artificial Sequence: Synthetic oligonucleotide
aagagccauucuuaggcag

SEQ ID NO: 3284574 - RNA, 19 nt, Artificial Sequence
  Description of Artificial Sequence: Synthetic oligonucleotide
uccauugcuagagacaccc

SEQ ID NO: 3284575 - RNA, 19 nt, Artificial Sequence
  Description of Artificial Sequence: Synthetic oligonucleotide
uaaagaagagcagcgcggg

SEQ ID NO: 3284576 - RNA, 19 nt, Artificial Sequence
  Description of Artificial Sequence: Synthetic oligonucleotide
ucaauuaccuucugugcca

SEQ ID NO: 3284577 - RNA, 19 nt, Artificial Sequence
  Description of Artificial Sequence: Synthetic oligonucleotide
aucgucaucucugugcagc

SEQ ID NO: 3284578 - RNA, 19 nt, Artificial Sequence
  Description of Artificial Sequence: Synthetic oligonucleotide
aguuaggcugccuuccaac

SEQ ID NO: 3284579 - RNA, 19 nt, Artificial Sequence
  Description of Artificial Sequence: Synthetic oligonucleotide
cacugugucaauuaccuuc

SEQ ID NO: 3284580 - RNA, 19 nt, Artificial Sequence
  Description of Artificial Sequence: Synthetic oligonucleotide
uggacuuggaggaacuggc

SEQ ID NO: 3284581 - RNA, 19 nt, Artificial Sequence
  Description of Artificial Sequence: Synthetic oligonucleotide
cucuggaguccucugaucg

SEQ ID NO: 3284582 - RNA, 19 nt, Artificial Sequence
  Description of Artificial Sequence: Synthetic oligonucleotide
cagggagucacagaaaacc

SEQ ID NO: 3284583 - RNA, 19 nt, Artificial Sequence
  Description of Artificial Sequence: Synthetic oligonucleotide
aauuaccuucugugccacc

SEQ ID NO: 3284584 - RNA, 19 nt, Artificial Sequence
  Description of Artificial Sequence: Synthetic oligonucleotide
uuucuaaugcuguuucccu

SEQ ID NO: 3284585 - RNA, 19 nt, Artificial Sequence
  Description of Artificial Sequence: Synthetic oligonucleotide
caggauaaagaagagcagc

SEQ ID NO: 3284586 - RNA, 19 nt, Artificial Sequence
  Description of Artificial Sequence: Synthetic oligonucleotide
ugugucaauuaccuucugu

SEQ ID NO: 3284587 - RNA, 19 nt, Artificial Sequence
  Description of Artificial Sequence: Synthetic oligonucleotide
aaggccgaguccugggugg

SEQ ID NO: 3284588 - RNA, 19 nt, Artificial Sequence
  Description of Artificial Sequence: Synthetic oligonucleotide
ugucaccucgcccaggggc

SEQ ID NO: 3284589 - RNA, 19 nt, Artificial Sequence
  Description of Artificial Sequence: Synthetic oligonucleotide
cuuaggcagguucugaaug

SEQ ID NO: 3284590 - RNA, 19 nt, Artificial Sequence
  Description of Artificial Sequence: Synthetic oligonucleotide
gauuucuaaugcuguuucc

SEQ ID NO: 3284591 - RNA, 19 nt, Artificial Sequence
  Description of Artificial Sequence: Synthetic oligonucleotide
caucccacuuguaacgucc

SEQ ID NO: 3284592 - RNA, 19 nt, Artificial Sequence
  Description of Artificial Sequence: Synthetic oligonucleotide
ugggcuccuacuuuggagc

SEQ ID NO: 3284593 - RNA, 19 nt, Artificial Sequence
  Description of Artificial Sequence: Synthetic oligonucleotide
uuaggcagguucugaauga

SEQ ID NO: 3284594 - RNA, 19 nt, Artificial Sequence
  Description of Artificial Sequence: Synthetic oligonucleotide
cuugcgucaccucuucugg

SEQ ID NO: 3284595 - RNA, 19 nt, Artificial Sequence
  Description of Artificial Sequence: Synthetic oligonucleotide
ucuucuggguccgaaacug

SEQ ID NO: 3284596 - RNA, 19 nt, Artificial Sequence
  Description of Artificial Sequence: Synthetic oligonucleotide
aaccuagggaggcucagga

SEQ ID NO: 3284597 - RNA, 19 nt, Artificial Sequence
  Description of Artificial Sequence: Synthetic oligonucleotide
caaccaucuguccaauucc

SEQ ID NO: 3284598 - RNA, 19 nt, Artificial Sequence
  Description of Artificial Sequence: Synthetic oligonucleotide
ucugcucugcccaaaccug

SEQ ID NO: 3284599 - RNA, 19 nt, Artificial Sequence
  Description of Artificial Sequence: Synthetic oligonucleotide
gugcgaacugcagagaagg

SEQ ID NO: 3284600 - RNA, 19 nt, Artificial Sequence
  Description of Artificial Sequence: Synthetic oligonucleotide
aaugacgcugacggcugcc

SEQ ID NO: 3284601 - RNA, 19 nt, Artificial Sequence
  Description of Artificial Sequence: Synthetic oligonucleotide
augcuguuucccuaaaccu

SEQ ID NO: 3284602 - RNA, 19 nt, Artificial Sequence
  Description of Artificial Sequence: Synthetic oligonucleotide
caugguagcuugcuuguag

SEQ ID NO: 3284603 - RNA, 19 nt, Artificial Sequence
  Description of Artificial Sequence: Synthetic oligonucleotide
ugguacaggggcucgaaac

SEQ ID NO: 3284604 - RNA, 19 nt, Artificial Sequence
  Description of Artificial Sequence: Synthetic oligonucleotide
cucuuucucacuaggggac

SEQ ID NO: 3284605 - RNA, 19 nt, Artificial Sequence
  Description of Artificial Sequence: Synthetic oligonucleotide
uguaacguccaaugggguc

SEQ ID NO: 3284606 - RNA, 19 nt, Artificial Sequence
  Description of Artificial Sequence: Synthetic oligonucleotide
ucucgagucuccuuuggac

SEQ ID NO: 3284607 - RNA, 19 nt, Artificial Sequence
  Description of Artificial Sequence: Synthetic oligonucleotide
ggugggacaguucugacac

SEQ ID NO: 3284608 - RNA, 19 nt, Artificial Sequence
  Description of Artificial Sequence: Synthetic oligonucleotide
gucggugcgaacugcagag

SEQ ID NO: 3284609 - RNA, 19 nt, Artificial Sequence
  Description of Artificial Sequence: Synthetic oligonucleotide
aaccugugacccuucucag

SEQ ID NO: 3284610 - RNA, 19 nt, Artificial Sequence
  Description of Artificial Sequence: Synthetic oligonucleotide
acugucgccaccaaccauc

SEQ ID NO: 3284611 - RNA, 19 nt, Artificial Sequence
  Description of Artificial Sequence: Synthetic oligonucleotide
aacgaagggccacaggaua

SEQ ID NO: 3284612 - RNA, 19 nt, Artificial Sequence
  Description of Artificial Sequence: Synthetic oligonucleotide
uccgaaacugucgcaagag

SEQ ID NO: 3284613 - RNA, 19 nt, Artificial Sequence
  Description of Artificial Sequence: Synthetic oligonucleotide
accuccagguccaaguccc

SEQ ID NO: 3284614 - RNA, 19 nt, Artificial Sequence
  Description of Artificial Sequence: Synthetic oligonucleotide
cacuuguaacguccaaugg

SEQ ID NO: 3284615 - RNA, 19 nt, Artificial Sequence
  Description of Artificial Sequence: Synthetic oligonucleotide
agguccaagucccugggug

SEQ ID NO: 3284616 - RNA, 19 nt, Artificial Sequence
  Description of Artificial Sequence: Synthetic oligonucleotide
agagcgaaggagcauugga

SEQ ID NO: 3284617 - RNA, 19 nt, Artificial Sequence
  Description of Artificial Sequence: Synthetic oligonucleotide
gguaagagccauucuuagg

SEQ ID NO: 3284618 - RNA, 19 nt, Artificial Sequence
  Description of Artificial Sequence: Synthetic oligonucleotide
ucaucucugugcagcacug

SEQ ID NO: 3284619 - RNA, 19 nt, Artificial Sequence
  Description of Artificial Sequence: Synthetic oligonucleotide
guuaggcugccuuccaacc

SEQ ID NO: 3284620 - RNA, 19 nt, Artificial Sequence
  Description of Artificial Sequence: Synthetic oligonucleotide
uugcuuuccaggcucucga

SEQ ID NO: 3284621 - RNA, 19 nt, Artificial Sequence
  Description of Artificial Sequence: Synthetic oligonucleotide
gacgcugacggcugccugg

SEQ ID NO: 3284622 - RNA, 19 nt, Artificial Sequence
  Description of Artificial Sequence: Synthetic oligonucleotide
gagcgaaggagcauuggag

SEQ ID NO: 3284623 - RNA, 19 nt, Artificial Sequence
  Description of Artificial Sequence: Synthetic oligonucleotide
uccucugaucgucaucucu

SEQ ID NO: 3284624 - RNA, 19 nt, Artificial Sequence
  Description of Artificial Sequence: Synthetic oligonucleotide
gaaacugucgcaagagcca

SEQ ID NO: 3284625 - RNA, 19 nt, Artificial Sequence
  Description of Artificial Sequence: Synthetic oligonucleotide
ugcccaaaccugcugagau

SEQ ID NO: 3284626 - RNA, 19 nt, Artificial Sequence
  Description of Artificial Sequence: Synthetic oligonucleotide
aaaccuagggaggcucagg

SEQ ID NO: 3284627 - RNA, 19 nt, Artificial Sequence
  Description of Artificial Sequence: Synthetic oligonucleotide
ucucaggaaggugucuggg

SEQ ID NO: 3284628 - RNA, 19 nt, Artificial Sequence
  Description of Artificial Sequence: Synthetic oligonucleotide
aggucucaccaacucuggc

SEQ ID NO: 3284629 - RNA, 19 nt, Artificial Sequence
  Description of Artificial Sequence: Synthetic oligonucleotide
cgaacugcagagaaggugg

SEQ ID NO: 3284630 - RNA, 19 nt, Artificial Sequence
  Description of Artificial Sequence: Synthetic oligonucleotide
cuaaaggagggcgugccag

SEQ ID NO: 3284631 - RNA, 19 nt, Artificial Sequence
  Description of Artificial Sequence: Synthetic oligonucleotide
auuaccuucugugccacca

SEQ ID NO: 3284632 - RNA, 19 nt, Artificial Sequence
  Description of Artificial Sequence: Synthetic oligonucleotide
guuucccuaaaccuaggga

SEQ ID NO: 3284633 - RNA, 19 nt, Artificial Sequence
  Description of Artificial Sequence: Synthetic oligonucleotide
aguagcuguagaaucucag

SEQ ID NO: 3284634 - RNA, 19 nt, Artificial Sequence
  Description of Artificial Sequence: Synthetic oligonucleotide
uucuuaggcagguucugaa

SEQ ID NO: 3284635 - RNA, 19 nt, Artificial Sequence
  Description of Artificial Sequence: Synthetic oligonucleotide
ucgcaagagccacugggca

SEQ ID NO: 3284636 - RNA, 19 nt, Artificial Sequence
  Description of Artificial Sequence: Synthetic oligonucleotide
ucugaucgucaucucugug

SEQ ID NO: 3284637 - RNA, 19 nt, Artificial Sequence
  Description of Artificial Sequence: Synthetic oligonucleotide
caggcaucccacuuguaac

SEQ ID NO: 3284638 - RNA, 19 nt, Artificial Sequence
  Description of Artificial Sequence: Synthetic oligonucleotide
ucugaaugacgcugacggc

SEQ ID NO: 3284639 - RNA, 19 nt, Artificial Sequence
  Description of Artificial Sequence: Synthetic oligonucleotide
ucucugugcagcacuggcu

SEQ ID NO: 3284640 - RNA, 19 nt, Artificial Sequence
  Description of Artificial Sequence: Synthetic oligonucleotide
auccucugucaccucgccc

SEQ ID NO: 3284641 - RNA, 19 nt, Artificial Sequence
  Description of Artificial Sequence: Synthetic oligonucleotide
aaaggagggcgugccagag

SEQ ID NO: 3284642 - RNA, 19 nt, Artificial Sequence
  Description of Artificial Sequence: Synthetic oligonucleotide
cuagggaggcucaggacac

SEQ ID NO: 3284643 - RNA, 19 nt, Artificial Sequence
  Description of Artificial Sequence: Synthetic oligonucleotide
ggagucacagaaaaccucc

SEQ ID NO: 3284644 - RNA, 19 nt, Artificial Sequence
  Description of Artificial Sequence: Synthetic oligonucleotide
auauccucugucaccucgc

SEQ ID NO: 3284645 - RNA, 19 nt, Artificial Sequence
  Description of Artificial Sequence: Synthetic oligonucleotide
auaggaggggcgguaagag

SEQ ID NO: 3284646 - RNA, 19 nt, Artificial Sequence
  Description of Artificial Sequence: Synthetic oligonucleotide
ugcuagagacaccccuucc

SEQ ID NO: 3284647 - RNA, 19 nt, Artificial Sequence
  Description of Artificial Sequence: Synthetic oligonucleotide
aggcagacauggcuucccc

SEQ ID NO: 3284648 - RNA, 19 nt, Artificial Sequence
  Description of Artificial Sequence: Synthetic oligonucleotide
ucuagcuguuccagggagu

SEQ ID NO: 3284649 - RNA, 19 nt, Artificial Sequence
  Description of Artificial Sequence: Synthetic oligonucleotide
aauauuuauauuuagcuca

SEQ ID NO: 3284650 - RNA, 19 nt, Artificial Sequence
  Description of Artificial Sequence: Synthetic oligonucleotide
uuauauuuagcucagguug

SEQ ID NO: 3284651 - RNA, 19 nt, Artificial Sequence
  Description of Artificial Sequence: Synthetic oligonucleotide
auauuuucaaugccgaucc

SEQ ID NO: 3284652 - RNA, 19 nt, Artificial Sequence
  Description of Artificial Sequence: Synthetic oligonucleotide
cugagcacaaauuugaugg

SEQ ID NO: 3284653 - RNA, 19 nt, Artificial Sequence
  Description of Artificial Sequence: Synthetic oligonucleotide
uugugaaguaaucuuagcg

SEQ ID NO: 3284654 - RNA, 19 nt, Artificial Sequence
  Description of Artificial Sequence: Synthetic oligonucleotide
acaauauuuauauuuagcu

SEQ ID NO: 3284655 - RNA, 19 nt, Artificial Sequence
  Description of Artificial Sequence: Synthetic oligonucleotide
agauguuaaaccuggacac

SEQ ID NO: 3284656 - RNA, 19 nt, Artificial Sequence
  Description of Artificial Sequence: Synthetic oligonucleotide
aucuucaugacuccgacac

SEQ ID NO: 3284657 - RNA, 19 nt, Artificial Sequence
  Description of Artificial Sequence: Synthetic oligonucleotide
uuauaugucuucaugugcc

SEQ ID NO: 3284658 - RNA, 19 nt, Artificial Sequence
  Description of Artificial Sequence: Synthetic oligonucleotide
uagauaauggauauuuuca

SEQ ID NO: 3284659 - RNA, 19 nt, Artificial Sequence
  Description of Artificial Sequence: Synthetic oligonucleotide
aaaagguccuuuucucugc

SEQ ID NO: 3284660 - RNA, 19 nt, Artificial Sequence
  Description of Artificial Sequence: Synthetic oligonucleotide
uuugauggcuccuuugucg

SEQ ID NO: 3284661 - RNA, 19 nt, Artificial Sequence
  Description of Artificial Sequence: Synthetic oligonucleotide
uacaacacaauauuuauau

SEQ ID NO: 3284662 - RNA, 19 nt, Artificial Sequence
  Description of Artificial Sequence: Synthetic oligonucleotide
ugauauuugcaccacugag

SEQ ID NO: 3284663 - RNA, 19 nt, Artificial Sequence
  Description of Artificial Sequence: Synthetic oligonucleotide
uucccuucugccaugaccg

SEQ ID NO: 3284664 - RNA, 19 nt, Artificial Sequence
  Description of Artificial Sequence: Synthetic oligonucleotide
acagccgucauuuagauaa

SEQ ID NO: 3284665 - RNA, 19 nt, Artificial Sequence
  Description of Artificial Sequence: Synthetic oligonucleotide
uugauuuucucaaugucug

SEQ ID NO: 3284666 - RNA, 19 nt, Artificial Sequence
  Description of Artificial Sequence: Synthetic oligonucleotide
aaaacaguaauucuccguu

SEQ ID NO: 3284667 - RNA, 19 nt, Artificial Sequence
  Description of Artificial Sequence: Synthetic oligonucleotide
uccuuugucgaccugcugg

SEQ ID NO: 3284668 - RNA, 19 nt, Artificial Sequence
  Description of Artificial Sequence: Synthetic oligonucleotide
ugugaaguaaucuuagcgu

SEQ ID NO: 3284669 - RNA, 19 nt, Artificial Sequence
  Description of Artificial Sequence: Synthetic oligonucleotide
aguaauucuccguugacug

SEQ ID NO: 3284670 - RNA, 19 nt, Artificial Sequence
  Description of Artificial Sequence: Synthetic oligonucleotide
uuagauaauggauauuuuc

SEQ ID NO: 3284671 - RNA, 19 nt, Artificial Sequence
  Description of Artificial Sequence: Synthetic oligonucleotide
augacuccgacacacaggg

SEQ ID NO: 3284672 - RNA, 19 nt, Artificial Sequence
  Description of Artificial Sequence: Synthetic oligonucleotide
auuuauauuuagcucaggu

SEQ ID NO: 3284673 - RNA, 19 nt, Artificial Sequence
  Description of Artificial Sequence: Synthetic oligonucleotide
uauauuuagcucagguugc

SEQ ID NO: 3284674 - RNA, 19 nt, Artificial Sequence
  Description of Artificial Sequence: Synthetic oligonucleotide
aauuugauggcuccuuugu

SEQ ID NO: 3284675 - RNA, 19 nt, Artificial Sequence
  Description of Artificial Sequence: Synthetic oligonucleotide
auuuccauguguucauggc

SEQ ID NO: 3284676 - RNA, 19 nt, Artificial Sequence
  Description of Artificial Sequence: Synthetic oligonucleotide
cacaauauuuauauuuagc

SEQ ID NO: 3284677 - RNA, 19 nt, Artificial Sequence
  Description of Artificial Sequence: Synthetic oligonucleotide
acuguaaggauuuccaugu

SEQ ID NO: 3284678 - RNA, 19 nt, Artificial Sequence
  Description of Artificial Sequence: Synthetic oligonucleotide
auauuugcaccacugagca

SEQ ID NO: 3284679 - RNA, 19 nt, Artificial Sequence
  Description of Artificial Sequence: Synthetic oligonucleotide
aaagguccuuuucucugcc

SEQ ID NO: 3284680 - RNA, 19 nt, Artificial Sequence
  Description of Artificial Sequence: Synthetic oligonucleotide
ucagguugcaucuaaggcu

SEQ ID NO: 3284681 - RNA, 19 nt, Artificial Sequence
  Description of Artificial Sequence: Synthetic oligonucleotide
gagauguuaaaccuggaca

SEQ ID NO: 3284682 - RNA, 19 nt, Artificial Sequence
  Description of Artificial Sequence: Synthetic oligonucleotide
auuuucaaugccgaucccc

SEQ ID NO: 3284683 - RNA, 19 nt, Artificial Sequence
  Description of Artificial Sequence: Synthetic oligonucleotide
caucgcacuauuuugacug

SEQ ID NO: 3284684 - RNA, 19 nt, Artificial Sequence
  Description of Artificial Sequence: Synthetic oligonucleotide
ugguguggcaggauaaacg

SEQ ID NO: 3284685 - RNA, 19 nt, Artificial Sequence
  Description of Artificial Sequence: Synthetic oligonucleotide
cuuauaugucuucaugugc

SEQ ID NO: 3284686 - RNA, 19 nt, Artificial Sequence
  Description of Artificial Sequence: Synthetic oligonucleotide
caauauuuauauuuagcuc

SEQ ID NO: 3284687 - RNA, 19 nt, Artificial Sequence
  Description of Artificial Sequence: Synthetic oligonucleotide
gacacaugauauuugcacc

SEQ ID NO: 3284688 - RNA, 19 nt, Artificial Sequence
  Description of Artificial Sequence: Synthetic oligonucleotide
gauauuugcaccacugagc

SEQ ID NO: 3284689 - RNA, 19 nt, Artificial Sequence
  Description of Artificial Sequence: Synthetic oligonucleotide
uugacuguaaggauuucca

SEQ ID NO: 3284690 - RNA, 19 nt, Artificial Sequence
  Description of Artificial Sequence: Synthetic oligonucleotide
gauuuccauguguucaugg

SEQ ID NO: 3284691 - RNA, 19 nt, Artificial Sequence
  Description of Artificial Sequence: Synthetic oligonucleotide
aaauuugauggcuccuuug

SEQ ID NO: 3284692 - RNA, 19 nt, Artificial Sequence
  Description of Artificial Sequence: Synthetic oligonucleotide
aacaguaauucuccguuga

SEQ ID NO: 3284693 - RNA, 19 nt, Artificial Sequence
  Description of Artificial Sequence: Synthetic oligonucleotide
acuuauaugucuucaugug

SEQ ID NO: 3284694 - RNA, 19 nt, Artificial Sequence
  Description of Artificial Sequence: Synthetic oligonucleotide
auuuagcucagguugcauc

SEQ ID NO: 3284695 - RNA, 19 nt, Artificial Sequence
  Description of Artificial Sequence: Synthetic oligonucleotide
gaaguaaucuuagcguugg

SEQ ID NO: 3284696 - RNA, 19 nt, Artificial Sequence
  Description of Artificial Sequence: Synthetic oligonucleotide
ucacuuauaugucuucaug

SEQ ID NO: 3284697 - RNA, 19 nt, Artificial Sequence
  Description of Artificial Sequence: Synthetic oligonucleotide
uauuugugaaguaaucuua

SEQ ID NO: 3284698 - RNA, 19 nt, Artificial Sequence
  Description of Artificial Sequence: Synthetic oligonucleotide
acugcagcagcguagagcu

SEQ ID NO: 3284699 - RNA, 19 nt, Artificial Sequence
  Description of Artificial Sequence: Synthetic oligonucleotide
uuuucucaaugucugcugc

SEQ ID NO: 3284700 - RNA, 19 nt, Artificial Sequence
  Description of Artificial Sequence: Synthetic oligonucleotide
auuuagauaauggauauuu

SEQ ID NO: 3284701 - RNA, 19 nt, Artificial Sequence
  Description of Artificial Sequence: Synthetic oligonucleotide
uguggcaggauaaacgggu

SEQ ID NO: 3284702 - RNA, 19 nt, Artificial Sequence
  Description of Artificial Sequence: Synthetic oligonucleotide
uuuauauuuagcucagguu

SEQ ID NO: 3284703 - RNA, 19 nt, Artificial Sequence
  Description of Artificial Sequence: Synthetic oligonucleotide
auggauauuuucaaugccg

SEQ ID NO: 3284704 - RNA, 19 nt, Artificial Sequence
  Description of Artificial Sequence: Synthetic oligonucleotide
uuuagcucagguugcaucu

SEQ ID NO: 3284705 - RNA, 19 nt, Artificial Sequence
  Description of Artificial Sequence: Synthetic oligonucleotide
gacuguaaggauuuccaug

SEQ ID NO: 3284706 - RNA, 19 nt, Artificial Sequence
  Description of Artificial Sequence: Synthetic oligonucleotide
uaaaccuggacacaugaua

SEQ ID NO: 3284707 - RNA, 19 nt, Artificial Sequence
  Description of Artificial Sequence: Synthetic oligonucleotide
gaugguaucuacugcagca

SEQ ID NO: 3284708 - RNA, 19 nt, Artificial Sequence
  Description of Artificial Sequence: Synthetic oligonucleotide
ucauuuagauaauggauau

SEQ ID NO: 3284709 - RNA, 19 nt, Artificial Sequence
  Description of Artificial Sequence: Synthetic oligonucleotide
uaaucuuagcguuggauaa

SEQ ID NO: 3284710 - RNA, 19 nt, Artificial Sequence
  Description of Artificial Sequence: Synthetic oligonucleotide
uguaaggauuuccaugugu

SEQ ID NO: 3284711 - RNA, 19 nt, Artificial Sequence
  Description of Artificial Sequence: Synthetic oligonucleotide
uuuucaaugccgauccccu

SEQ ID NO: 3284712 - RNA, 19 nt, Artificial Sequence
  Description of Artificial Sequence: Synthetic oligonucleotide
uggauauuuucaaugccga

SEQ ID NO: 3284713 - RNA, 19 nt, Artificial Sequence
  Description of Artificial Sequence: Synthetic oligonucleotide
ucugcugcagccaucuuca

SEQ ID NO: 3284714 - RNA, 19 nt, Artificial Sequence
  Description of Artificial Sequence: Synthetic oligonucleotide
uuucccuucugccaugacc

SEQ ID NO: 3284715 - RNA, 19 nt, Artificial Sequence
  Description of Artificial Sequence: Synthetic oligonucleotide
caugauauuugcaccacug

SEQ ID NO: 3284716 - RNA, 19 nt, Artificial Sequence
  Description of Artificial Sequence: Synthetic oligonucleotide
ugaaguaaucuuagcguug

SEQ ID NO: 3284717 - RNA, 19 nt, Artificial Sequence
  Description of Artificial Sequence: Synthetic oligonucleotide
aaggauuuccauguguuca

SEQ ID NO: 3284718 - RNA, 19 nt, Artificial Sequence
  Description of Artificial Sequence: Synthetic oligonucleotide
acacaauauuuauauuuag

SEQ ID NO: 3284719 - RNA, 19 nt, Artificial Sequence
  Description of Artificial Sequence: Synthetic oligonucleotide
caggagauguuaaaccugg

SEQ ID NO: 3284720 - RNA, 19 nt, Artificial Sequence
  Description of Artificial Sequence: Synthetic oligonucleotide
gauauuuucaaugccgauc

SEQ ID NO: 3284721 - RNA, 19 nt, Artificial Sequence
  Description of Artificial Sequence: Synthetic oligonucleotide
uuuccauguguucauggca

SEQ ID NO: 3284722 - RNA, 19 nt, Artificial Sequence
  Description of Artificial Sequence: Synthetic oligonucleotide
ucuucaugugccacagccg

SEQ ID NO: 3284723 - RNA, 19 nt, Artificial Sequence
  Description of Artificial Sequence: Synthetic oligonucleotide
aaacaguaauucuccguug

SEQ ID NO: 3284724 - RNA, 19 nt, Artificial Sequence
  Description of Artificial Sequence: Synthetic oligonucleotide
ucaugacuccgacacacag

SEQ ID NO: 3284725 - RNA, 19 nt, Artificial Sequence
  Description of Artificial Sequence: Synthetic oligonucleotide
gucuucaugugccacagcc

SEQ ID NO: 3284726 - RNA, 19 nt, Artificial Sequence
  Description of Artificial Sequence: Synthetic oligonucleotide
uguugauuuucucaauguc

SEQ ID NO: 3284727 - RNA, 19 nt, Artificial Sequence
  Description of Artificial Sequence: Synthetic oligonucleotide
aaugccgauccccuuguug

SEQ ID NO: 3284728 - RNA, 19 nt, Artificial Sequence
  Description of Artificial Sequence: Synthetic oligonucleotide
cuuguugauuuucucaaug

SEQ ID NO: 3284729 - RNA, 19 nt, Artificial Sequence
  Description of Artificial Sequence: Synthetic oligonucleotide
auuugcaccacugagcaca

SEQ ID NO: 3284730 - RNA, 19 nt, Artificial Sequence
  Description of Artificial Sequence: Synthetic oligonucleotide
cucaaugucugcugcagcc

SEQ ID NO: 3284731 - RNA, 19 nt, Artificial Sequence
  Description of Artificial Sequence: Synthetic oligonucleotide
uucuccguugacuguaagg

SEQ ID NO: 3284732 - RNA, 19 nt, Artificial Sequence
  Description of Artificial Sequence: Synthetic oligonucleotide
uccaggagauguuaaaccu

SEQ ID NO: 3284733 - RNA, 19 nt, Artificial Sequence
  Description of Artificial Sequence: Synthetic oligonucleotide
aggauaaacggguauuugu

SEQ ID NO: 3284734 - RNA, 19 nt, Artificial Sequence
  Description of Artificial Sequence: Synthetic oligonucleotide
ucuccguugacuguaagga

SEQ ID NO: 3284735 - RNA, 19 nt, Artificial Sequence
  Description of Artificial Sequence: Synthetic oligonucleotide
uaaacggguauuugugaag

SEQ ID NO: 3284736 - RNA, 19 nt, Artificial Sequence
  Description of Artificial Sequence: Synthetic oligonucleotide
agauaauggauauuuucaa

SEQ ID NO: 3284737 - RNA, 19 nt, Artificial Sequence
  Description of Artificial Sequence: Synthetic oligonucleotide
aaggcucacuuauaugucu

SEQ ID NO: 3284738 - RNA, 19 nt, Artificial Sequence
  Description of Artificial Sequence: Synthetic oligonucleotide
uuugugaaguaaucuuagc

SEQ ID NO: 3284739 - RNA, 19 nt, Artificial Sequence
  Description of Artificial Sequence: Synthetic oligonucleotide
cucagguugcaucuaaggc

SEQ ID NO: 3284740 - RNA, 19 nt, Artificial Sequence
  Description of Artificial Sequence: Synthetic oligonucleotide
uuguugauuuucucaaugu

SEQ ID NO: 3284741 - RNA, 19 nt, Artificial Sequence
  Description of Artificial Sequence: Synthetic oligonucleotide
uucaaugccgauccccuug

SEQ ID NO: 3284742 - RNA, 19 nt, Artificial Sequence
  Description of Artificial Sequence: Synthetic oligonucleotide
cuggacacaugauauuugc

SEQ ID NO: 3284743 - RNA, 19 nt, Artificial Sequence
  Description of Artificial Sequence: Synthetic oligonucleotide
gguguggcaggauaaacgg

SEQ ID NO: 3284744 - RNA, 19 nt, Artificial Sequence
  Description of Artificial Sequence: Synthetic oligonucleotide
gauaaacggguauuuguga

SEQ ID NO: 3284745 - RNA, 19 nt, Artificial Sequence
  Description of Artificial Sequence: Synthetic oligonucleotide
uagagcuucgcuccaggag

SEQ ID NO: 3284746 - RNA, 19 nt, Artificial Sequence
  Description of Artificial Sequence: Synthetic oligonucleotide
aacacaauauuuauauuua

SEQ ID NO: 3284747 - RNA, 19 nt, Artificial Sequence
  Description of Artificial Sequence: Synthetic oligonucleotide
auuugauggcuccuuuguc

SEQ ID NO: 3284748 - RNA, 19 nt, Artificial Sequence
  Description of Artificial Sequence: Synthetic oligonucleotide
auuuucucaaugucugcug

SEQ ID NO: 3284749 - RNA, 19 nt, Artificial Sequence
  Description of Artificial Sequence: Synthetic oligonucleotide
  modified_base (18)..(18): a, c, u, g, unknown or other
aauaguaaauaauaaaana

SEQ ID NO: 3284750 - RNA, 19 nt, Artificial Sequence
  Description of Artificial Sequence: Synthetic oligonucleotide
aauaauaguaaauaauaaa

SEQ ID NO: 3284751 - RNA, 19 nt, Artificial Sequence
  Description of Artificial Sequence: Synthetic oligonucleotide
  modified_base (16)..(16): a, c, u, g, unknown or other
uaguaaauaauaaaanaaa

SEQ ID NO: 3284752 - RNA, 19 nt, Artificial Sequence
  Description of Artificial Sequence: Synthetic oligonucleotide
aaaauaauaguaaauaaua

SEQ ID NO: 3284753 - RNA, 19 nt, Artificial Sequence
  Description of Artificial Sequence: Synthetic oligonucleotide
  modified_base (19)..(19): a, c, u, g, unknown or other
uaauaguaaauaauaaaan

SEQ ID NO: 3284754 - RNA, 19 nt, Artificial Sequence
  Description of Artificial Sequence: Synthetic oligonucleotide
acacauaaucaucuguucc

SEQ ID NO: 3284755 - RNA, 19 nt, Artificial Sequence
  Description of Artificial Sequence: Synthetic oligonucleotide
auaauaguaaauaauaaaa

SEQ ID NO: 3284756 - RNA, 19 nt, Artificial Sequence
  Description of Artificial Sequence: Synthetic oligonucleotide
aucuguuccucacuguugc

SEQ ID NO: 3284757 - RNA, 19 nt, Artificial Sequence
  Description of Artificial Sequence: Synthetic oligonucleotide
auaaucaucuguuccucac

SEQ ID NO: 3284758 - RNA, 19 nt, Artificial Sequence
  Description of Artificial Sequence: Synthetic oligonucleotide
ucucuggagagcaagauuc

SEQ ID NO: 3284759 - RNA, 19 nt, Artificial Sequence
  Description of Artificial Sequence: Synthetic oligonucleotide
  modified_base (17)..(17): a, c, u, g, unknown or other
auaguaaauaauaaaanaa

SEQ ID NO: 3284760 - RNA, 19 nt, Artificial Sequence
  Description of Artificial Sequence: Synthetic oligonucleotide
aaucaucuguuccucacug

SEQ ID NO: 3284761 - RNA, 19 nt, Artificial Sequence
  Description of Artificial Sequence: Synthetic oligonucleotide
aaauaauaguaaauaauaa

SEQ ID NO: 3284762 - RNA, 19 nt, Artificial Sequence
  Description of Artificial Sequence: Synthetic oligonucleotide
auuccugccaucuccugcc

SEQ ID NO: 3284763 - RNA, 19 nt, Artificial Sequence
  Description of Artificial Sequence: Synthetic oligonucleotide
ugcucagcaucccacacag

SEQ ID NO: 3284764 - RNA, 19 nt, Artificial Sequence
  Description of Artificial Sequence: Synthetic oligonucleotide
  modified_base (15)..(15): a, c, u, g, unknown or other
aguaaauaauaaaanaaaa

SEQ ID NO: 3284765 - RNA, 19 nt, Artificial Sequence
  Description of Artificial Sequence: Synthetic oligonucleotide
caagauuccugccaucucc

SEQ ID NO: 3284766 - RNA, 19 nt, Artificial Sequence
  Description of Artificial Sequence: Synthetic oligonucleotide
aguguccgggcacagauag

SEQ ID NO: 3284767 - RNA, 19 nt, Artificial Sequence
  Description of Artificial Sequence: Synthetic oligonucleotide
uugacacauaaucaucugu

SEQ ID NO: 3284768 - RNA, 19 nt, Artificial Sequence
  Description of Artificial Sequence: Synthetic oligonucleotide
uggagagcaagauuccugc

SEQ ID NO: 3284769 - RNA, 19 nt, Artificial Sequence
  Description of Artificial Sequence: Synthetic oligonucleotide
ugacacauaaucaucuguu

SEQ ID NO: 3284770 - RNA, 19 nt, Artificial Sequence
  Description of Artificial Sequence: Synthetic oligonucleotide
uguccgggcacagauaggg

SEQ ID NO: 3284771 - RNA, 19 nt, Artificial Sequence
  Description of Artificial Sequence: Synthetic oligonucleotide
ugauugacacauaaucauc

SEQ ID NO: 3284772 - RNA, 19 nt, Artificial Sequence
  Description of Artificial Sequence: Synthetic oligonucleotide
acaguggucggugagagug

SEQ ID NO: 3284773 - RNA, 19 nt, Artificial Sequence
  Description of Artificial Sequence: Synthetic oligonucleotide
cucacuguugcucagcauc

SEQ ID NO: 3284774 - RNA, 19 nt, Artificial Sequence
  Description of Artificial Sequence: Synthetic oligonucleotide
ucacuguugcucagcaucc

SEQ ID NO: 3284775 - RNA, 19 nt, Artificial Sequence
  Description of Artificial Sequence: Synthetic oligonucleotide
gauagggucagugucucug

SEQ ID NO: 3284776 - RNA, 19 nt, Artificial Sequence
  Description of Artificial Sequence: Synthetic oligonucleotide
auugacacauaaucaucug

SEQ ID NO: 3284777 - RNA, 19 nt, Artificial Sequence
  Description of Artificial Sequence: Synthetic oligonucleotide
uguuccucacuguugcuca

SEQ ID NO: 3284778 - RNA, 19 nt, Artificial Sequence
  Description of Artificial Sequence: Synthetic oligonucleotide
ucagcaucccacacaggag

SEQ ID NO: 3284779 - RNA, 19 nt, Artificial Sequence
  Description of Artificial Sequence: Synthetic oligonucleotide
gauuccugccaucuccugc

SEQ ID NO: 3284780 - RNA, 19 nt, Artificial Sequence
  Description of Artificial Sequence: Synthetic oligonucleotide
cacacaggaggccuaaggc

SEQ ID NO: 3284781 - RNA, 19 nt, Artificial Sequence
  Description of Artificial Sequence: Synthetic oligonucleotide
cagcaucccacacaggagg

SEQ ID NO: 3284782 - RNA, 19 nt, Artificial Sequence
  Description of Artificial Sequence: Synthetic oligonucleotide
uaaucaucuguuccucacu

SEQ ID NO: 3284783 - RNA, 19 nt, Artificial Sequence
  Description of Artificial Sequence: Synthetic oligonucleotide
uggucggugagaguguccg

SEQ ID NO: 3284784 - RNA, 19 nt, Artificial Sequence
  Description of Artificial Sequence: Synthetic oligonucleotide
gacacauaaucaucuguuc

SEQ ID NO: 3284785 - RNA, 19 nt, Artificial Sequence
  Description of Artificial Sequence: Synthetic oligonucleotide
acauaaucaucuguuccuc

SEQ ID NO: 3284786 - RNA, 19 nt, Artificial Sequence
  Description of Artificial Sequence: Synthetic oligonucleotide
uugcuggagggccucacag

SEQ ID NO: 3284787 - RNA, 19 nt, Artificial Sequence
  Description of Artificial Sequence: Synthetic oligonucleotide
auagggucagugucucugg

SEQ ID NO: 3284788 - RNA, 19 nt, Artificial Sequence
  Description of Artificial Sequence: Synthetic oligonucleotide
cacagauagggucaguguc

SEQ ID NO: 3284789 - RNA, 19 nt, Artificial Sequence
  Description of Artificial Sequence: Synthetic oligonucleotide
cacaggaggccuaaggcug

SEQ ID NO: 3284790 - RNA, 19 nt, Artificial Sequence
  Description of Artificial Sequence: Synthetic oligonucleotide
gagggccucacaguggucg

SEQ ID NO: 3284791 - RNA, 19 nt, Artificial Sequence
  Description of Artificial Sequence: Synthetic oligonucleotide
ucaucuguuccucacuguu

SEQ ID NO: 3284792 - RNA, 19 nt, Artificial Sequence
  Description of Artificial Sequence: Synthetic oligonucleotide
acacaggaggccuaaggcu

SEQ ID NO: 3284793 - RNA, 19 nt, Artificial Sequence
  Description of Artificial Sequence: Synthetic oligonucleotide
gagagcaagauuccugcca

SEQ ID NO: 3284794 - RNA, 19 nt, Artificial Sequence
  Description of Artificial Sequence: Synthetic oligonucleotide
cucagcaucccacacagga

SEQ ID NO: 3284795 - RNA, 19 nt, Artificial Sequence
  Description of Artificial Sequence: Synthetic oligonucleotide
agagcaagauuccugccau

SEQ ID NO: 3284796 - RNA, 19 nt, Artificial Sequence
  Description of Artificial Sequence: Synthetic oligonucleotide
ucagugucucuggagagca

SEQ ID NO: 3284797 - RNA, 19 nt, Artificial Sequence
  Description of Artificial Sequence: Synthetic oligonucleotide
gauugacacauaaucaucu

SEQ ID NO: 3284798 - RNA, 19 nt, Artificial Sequence
  Description of Artificial Sequence: Synthetic oligonucleotide
agaguguccgggcacagau

SEQ ID NO: 3284799 - RNA, 19 nt, Artificial Sequence
  Description of Artificial Sequence: Synthetic oligonucleotide
cuggagagcaagauuccug

SEQ ID NO: 3284800 - RNA, 19 nt, Artificial Sequence
  Description of Artificial Sequence: Synthetic oligonucleotide
agugucucuggagagcaag

SEQ ID NO: 3284801 - RNA, 19 nt, Artificial Sequence
  Description of Artificial Sequence: Synthetic oligonucleotide
uguugcucagcaucccaca

SEQ ID NO: 3284802 - RNA, 19 nt, Artificial Sequence
  Description of Artificial Sequence: Synthetic oligonucleotide
ucacaguggucggugagag

SEQ ID NO: 3284803 - RNA, 19 nt, Artificial Sequence
  Description of Artificial Sequence: Synthetic oligonucleotide
uggagggccucacaguggu

SEQ ID NO: 3284804 - RNA, 19 nt, Artificial Sequence
  Description of Artificial Sequence: Synthetic oligonucleotide
uccucacuguugcucagca

SEQ ID NO: 3284805 - RNA, 19 nt, Artificial Sequence
  Description of Artificial Sequence: Synthetic oligonucleotide
agcaagauuccugccaucu

SEQ ID NO: 3284806 - RNA, 19 nt, Artificial Sequence
  Description of Artificial Sequence: Synthetic oligonucleotide
gugauugacacauaaucau

SEQ ID NO: 3284807 - RNA, 19 nt, Artificial Sequence
  Description of Artificial Sequence: Synthetic oligonucleotide
uugcucagcaucccacaca

SEQ ID NO: 3284808 - RNA, 19 nt, Artificial Sequence
  Description of Artificial Sequence: Synthetic oligonucleotide
ggugauugacacauaauca

SEQ ID NO: 3284809 - RNA, 19 nt, Artificial Sequence
  Description of Artificial Sequence: Synthetic oligonucleotide
caucuguuccucacuguug

SEQ ID NO: 3284810 - RNA, 19 nt, Artificial Sequence
  Description of Artificial Sequence: Synthetic oligonucleotide
gucggugagaguguccggg

SEQ ID NO: 3284811 - RNA, 19 nt, Artificial Sequence
  Description of Artificial Sequence: Synthetic oligonucleotide
uuugcuggagggccucaca

SEQ ID NO: 3284812 - RNA, 19 nt, Artificial Sequence
  Description of Artificial Sequence: Synthetic oligonucleotide
cucuggagagcaagauucc

SEQ ID NO: 3284813 - RNA, 19 nt, Artificial Sequence
  Description of Artificial Sequence: Synthetic oligonucleotide
aagauuccugccaucuccu

SEQ ID NO: 3284814 - RNA, 19 nt, Artificial Sequence
  Description of Artificial Sequence: Synthetic oligonucleotide
uccgggcacagauaggguc

SEQ ID NO: 3284815 - RNA, 19 nt, Artificial Sequence
  Description of Artificial Sequence: Synthetic oligonucleotide
agggucagugucucuggag

SEQ ID NO: 3284816 - RNA, 19 nt, Artificial Sequence
  Description of Artificial Sequence: Synthetic oligonucleotide
ugccaucuccugcccacgg

SEQ ID NO: 3284817 - RNA, 19 nt, Artificial Sequence
  Description of Artificial Sequence: Synthetic oligonucleotide
acuguugcucagcauccca

SEQ ID NO: 3284818 - RNA, 19 nt, Artificial Sequence
  Description of Artificial Sequence: Synthetic oligonucleotide
cacauaaucaucuguuccu

SEQ ID NO: 3284819 - RNA, 19 nt, Artificial Sequence
  Description of Artificial Sequence: Synthetic oligonucleotide
acagauagggucagugucu

SEQ ID NO: 3284820 - RNA, 19 nt, Artificial Sequence
  Description of Artificial Sequence: Synthetic oligonucleotide
cuguugcucagcaucccac

SEQ ID NO: 3284821 - RNA, 19 nt, Artificial Sequence
  Description of Artificial Sequence: Synthetic oligonucleotide
ucuggagagcaagauuccu

SEQ ID NO: 3284822 - RNA, 19 nt, Artificial Sequence
  Description of Artificial Sequence: Synthetic oligonucleotide
agcaucccacacaggaggc

SEQ ID NO: 3284823 - RNA, 19 nt, Artificial Sequence
  Description of Artificial Sequence: Synthetic oligonucleotide
cauaaucaucuguuccuca

SEQ ID NO: 3284824 - RNA, 19 nt, Artificial Sequence
  Description of Artificial Sequence: Synthetic oligonucleotide
aucaucuguuccucacugu

SEQ ID NO: 3284825 - RNA, 19 nt, Artificial Sequence
  Description of Artificial Sequence: Synthetic oligonucleotide
guugcucagcaucccacac

SEQ ID NO: 3284826 - RNA, 19 nt, Artificial Sequence
  Description of Artificial Sequence: Synthetic oligonucleotide
ucggugagaguguccgggc

SEQ ID NO: 3284827 - RNA, 19 nt, Artificial Sequence
  Description of Artificial Sequence: Synthetic oligonucleotide
uagggucagugucucugga

SEQ ID NO: 3284828 - RNA, 19 nt, Artificial Sequence
  Description of Artificial Sequence: Synthetic oligonucleotide
cuggagggccucacagugg

SEQ ID NO: 3284829 - RNA, 19 nt, Artificial Sequence
  Description of Artificial Sequence: Synthetic oligonucleotide
aguggucggugagaguguc

SEQ ID NO: 3284830 - RNA, 19 nt, Artificial Sequence
  Description of Artificial Sequence: Synthetic oligonucleotide
gcuggagggccucacagug

SEQ ID NO: 3284831 - RNA, 19 nt, Artificial Sequence
  Description of Artificial Sequence: Synthetic oligonucleotide
ugcccacggugauugacac

SEQ ID NO: 3284832 - RNA, 19 nt, Artificial Sequence
  Description of Artificial Sequence: Synthetic oligonucleotide
cggugauugacacauaauc

SEQ ID NO: 3284833 - RNA, 19 nt, Artificial Sequence
  Description of Artificial Sequence: Synthetic oligonucleotide
gaggccuaaggcuggagcu

SEQ ID NO: 3284834 - RNA, 19 nt, Artificial Sequence
  Description of Artificial Sequence: Synthetic oligonucleotide
ggucagugucucuggagag

SEQ ID NO: 3284835 - RNA, 19 nt, Artificial Sequence
  Description of Artificial Sequence: Synthetic oligonucleotide
ugucucuggagagcaagau

SEQ ID NO: 3284836 - RNA, 19 nt, Artificial Sequence
  Description of Artificial Sequence: Synthetic oligonucleotide
agauuccugccaucuccug

SEQ ID NO: 3284837 - RNA, 19 nt, Artificial Sequence
  Description of Artificial Sequence: Synthetic oligonucleotide
ggaggccuaaggcuggagc

SEQ ID NO: 3284838 - RNA, 19 nt, Artificial Sequence
  Description of Artificial Sequence: Synthetic oligonucleotide
agggccucacaguggucgg

SEQ ID NO: 3284839 - RNA, 19 nt, Artificial Sequence
  Description of Artificial Sequence: Synthetic oligonucleotide
gucagugucucuggagagc

SEQ ID NO: 3284840 - RNA, 19 nt, Artificial Sequence
  Description of Artificial Sequence: Synthetic oligonucleotide
ugcuggagggccucacagu

SEQ ID NO: 3284841 - RNA, 19 nt, Artificial Sequence
  Description of Artificial Sequence: Synthetic oligonucleotide
cacggugauugacacauaa

SEQ ID NO: 3284842 - RNA, 19 nt, Artificial Sequence
  Description of Artificial Sequence: Synthetic oligonucleotide
ucuguuccucacuguugcu

SEQ ID NO: 3284843 - RNA, 19 nt, Artificial Sequence
  Description of Artificial Sequence: Synthetic oligonucleotide
ggcacagauagggucagug

SEQ ID NO: 3284844 - RNA, 19 nt, Artificial Sequence
  Description of Artificial Sequence: Synthetic oligonucleotide
cuguuccucacuguugcuc

SEQ ID NO: 3284845 - RNA, 19 nt, Artificial Sequence
  Description of Artificial Sequence: Synthetic oligonucleotide
acaggaggccuaaggcugg

SEQ ID NO: 3284846 - RNA, 19 nt, Artificial Sequence
  Description of Artificial Sequence: Synthetic oligonucleotide
gggucagugucucuggaga

SEQ ID NO: 3284847 - RNA, 19 nt, Artificial Sequence
  Description of Artificial Sequence: Synthetic oligonucleotide
cuccugcccacggugauug

SEQ ID NO: 3284848 - RNA, 19 nt, Artificial Sequence
  Description of Artificial Sequence: Synthetic oligonucleotide
ugagaguguccgggcacag

SEQ ID NO: 3284849 - RNA, 19 nt, Artificial Sequence
  Description of Artificial Sequence: Synthetic oligonucleotide
cuguggcaagacuacucuu

SEQ ID NO: 3284850 - RNA, 19 nt, Artificial Sequence
  Description of Artificial Sequence: Synthetic oligonucleotide
aagaguagucuugccacag

SEQ ID NO: 3284851 - RNA, 19 nt, Artificial Sequence
  Description of Artificial Sequence: Synthetic oligonucleotide
ccuacacaggcaacgaggu

SEQ ID NO: 3284852 - RNA, 19 nt, Artificial Sequence
  Description of Artificial Sequence: Synthetic oligonucleotide
accucguugccuguguagg

SEQ ID NO: 3284853 - RNA, 19 nt, Artificial Sequence
  Description of Artificial Sequence: Synthetic oligonucleotide
gaaucaaauuucacagaau

SEQ ID NO: 3284854 - RNA, 19 nt, Artificial Sequence
  Description of Artificial Sequence: Synthetic oligonucleotide
auucugugaaauuugauuc

SEQ ID NO: 3284855 - RNA, 19 nt, Artificial Sequence
  Description of Artificial Sequence: Synthetic oligonucleotide
gaguugcgaccuguggaua

SEQ ID NO: 3284856 - RNA, 19 nt, Artificial Sequence
  Description of Artificial Sequence: Synthetic oligonucleotide
uauccacaggucgcaacuc

SEQ ID NO: 3284857 - RNA, 19 nt, Artificial Sequence
  Description of Artificial Sequence: Synthetic oligonucleotide
caagugggauucaacucaa

SEQ ID NO: 3284858 - RNA, 19 nt, Artificial Sequence
  Description of Artificial Sequence: Synthetic oligonucleotide
uugaguugaaucccacuug

SEQ ID NO: 3284859 - RNA, 19 nt, Artificial Sequence
  Description of Artificial Sequence: Synthetic oligonucleotide
ggaacaucuacgauuacau

SEQ ID NO: 3284860 - RNA, 19 nt, Artificial Sequence
  Description of Artificial Sequence: Synthetic oligonucleotide
auguaaucguagauguucc

SEQ ID NO: 3284861 - RNA, 19 nt, Artificial Sequence
  Description of Artificial Sequence: Synthetic oligonucleotide
ggcaagacuacucuugcuu

SEQ ID NO: 3284862 - RNA, 19 nt, Artificial Sequence
  Description of Artificial Sequence: Synthetic oligonucleotide
aagcaagaguagucuugcc

SEQ ID NO: 3284863 - RNA, 19 nt, Artificial Sequence
  Description of Artificial Sequence: Synthetic oligonucleotide
caggcaacgaggugugcau

SEQ ID NO: 3284864 - RNA, 19 nt, Artificial Sequence
  Description of Artificial Sequence: Synthetic oligonucleotide
augcacaccucguugccug

SEQ ID NO: 3284865 - RNA, 19 nt, Artificial Sequence
  Description of Artificial Sequence: Synthetic oligonucleotide
guugagaugguaaauacaa

SEQ ID NO: 3284866 - RNA, 19 nt, Artificial Sequence
  Description of Artificial Sequence: Synthetic oligonucleotide
uuguauuuaccaucucaac

SEQ ID NO: 3284867 - RNA, 19 nt, Artificial Sequence
  Description of Artificial Sequence: Synthetic oligonucleotide
gcuaagagaagacucauuu

SEQ ID NO: 3284868 - RNA, 19 nt, Artificial Sequence
  Description of Artificial Sequence: Synthetic oligonucleotide
aaaugagucuucucuuagc

SEQ ID NO: 3284869 - RNA, 19 nt, Artificial Sequence
  Description of Artificial Sequence: Synthetic oligonucleotide
caaccaccaaacguaacaa

SEQ ID NO: 3284870 - RNA, 19 nt, Artificial Sequence
  Description of Artificial Sequence: Synthetic oligonucleotide
uuguuacguuuggugguug

SEQ ID NO: 3284871 - RNA, 19 nt, Artificial Sequence
  Description of Artificial Sequence: Synthetic oligonucleotide
cauguucaccuauggugau

SEQ ID NO: 3284872 - RNA, 19 nt, Artificial Sequence
  Description of Artificial Sequence: Synthetic oligonucleotide
aucaccauaggugaacaug

SEQ ID NO: 3284873 - RNA, 19 nt, Artificial Sequence
  Description of Artificial Sequence: Synthetic oligonucleotide
caagacuacucuugcuuau

SEQ ID NO: 3284874 - RNA, 19 nt, Artificial Sequence
  Description of Artificial Sequence: Synthetic oligonucleotide
auaagcaagaguagucuug

SEQ ID NO: 3284875 - RNA, 19 nt, Artificial Sequence
  Description of Artificial Sequence: Synthetic oligonucleotide
gcaucauugaugaauucga

SEQ ID NO: 3284876 - RNA, 19 nt, Artificial Sequence
  Description of Artificial Sequence: Synthetic oligonucleotide
ucgaauucaucaaugaugc

SEQ ID NO: 3284877 - RNA, 19 nt, Artificial Sequence
  Description of Artificial Sequence: Synthetic oligonucleotide
ggaaagguguucuccucca

SEQ ID NO: 3284878 - RNA, 19 nt, Artificial Sequence
  Description of Artificial Sequence: Synthetic oligonucleotide
uggaggagaacaccuuucc

SEQ ID NO: 3284879 - RNA, 19 nt, Artificial Sequence
  Description of Artificial Sequence: Synthetic oligonucleotide
gauguuucugaugccauua

SEQ ID NO: 3284880 - RNA, 19 nt, Artificial Sequence
  Description of Artificial Sequence: Synthetic oligonucleotide
uaauggcaucagaaacauc

SEQ ID NO: 3284881 - RNA, 19 nt, Artificial Sequence
  Description of Artificial Sequence: Synthetic oligonucleotide
gcuguugcuacgcuuucuu

SEQ ID NO: 3284882 - RNA, 19 nt, Artificial Sequence
  Description of Artificial Sequence: Synthetic oligonucleotide
aagaaagcguagcaacagc

SEQ ID NO: 3284883 - RNA, 19 nt, Artificial Sequence
  Description of Artificial Sequence: Synthetic oligonucleotide
gugaugauggcguguacau

SEQ ID NO: 3284884 - RNA, 19 nt, Artificial Sequence
  Description of Artificial Sequence: Synthetic oligonucleotide
auguacacgccaucaucac

SEQ ID NO: 3284885 - RNA, 19 nt, Artificial Sequence
  Description of Artificial Sequence: Synthetic oligonucleotide
cuacucuugcuuaugccau

SEQ ID NO: 3284886 - RNA, 19 nt, Artificial Sequence
  Description of Artificial Sequence: Synthetic oligonucleotide
auggcauaagcaagaguag

SEQ ID NO: 3284887 - RNA, 19 nt, Artificial Sequence
  Description of Artificial Sequence: Synthetic oligonucleotide
cgacucuaauccggaauca

SEQ ID NO: 3284888 - RNA, 19 nt, Artificial Sequence
  Description of Artificial Sequence: Synthetic oligonucleotide
ugauuccggauuagagucg

SEQ ID NO: 3284889 - RNA, 19 nt, Artificial Sequence
  Description of Artificial Sequence: Synthetic oligonucleotide
ccuccaaauacgugauuau

SEQ ID NO: 3284890 - RNA, 19 nt, Artificial Sequence
  Description of Artificial Sequence: Synthetic oligonucleotide
auaaucacguauuuggagg

SEQ ID NO: 3284891 - RNA, 19 nt, Artificial Sequence
  Description of Artificial Sequence: Synthetic oligonucleotide
cugaugccauuaugucuau

SEQ ID NO: 3284892 - RNA, 19 nt, Artificial Sequence
  Description of Artificial Sequence: Synthetic oligonucleotide
auagacauaauggcaucag

SEQ ID NO: 3284893 - RNA, 19 nt, Artificial Sequence
  Description of Artificial Sequence: Synthetic oligonucleotide
gguaugccacuaaccucua

SEQ ID NO: 3284894 - RNA, 19 nt, Artificial Sequence
  Description of Artificial Sequence: Synthetic oligonucleotide
uagagguuaguggcauacc

SEQ ID NO: 3284895 - RNA, 19 nt, Artificial Sequence
  Description of Artificial Sequence: Synthetic oligonucleotide
gcguguacaucguaccaaa

SEQ ID NO: 3284896 - RNA, 19 nt, Artificial Sequence
  Description of Artificial Sequence: Synthetic oligonucleotide
uuugguacgauguacacgc

SEQ ID NO: 3284897 - RNA, 19 nt, Artificial Sequence
  Description of Artificial Sequence: Synthetic oligonucleotide
cuucuguucucaaucucaa

SEQ ID NO: 3284898 - RNA, 19 nt, Artificial Sequence
  Description of Artificial Sequence: Synthetic oligonucleotide
uugagauugagaacagaag

SEQ ID NO: 3284899 - RNA, 19 nt, Artificial Sequence
  Description of Artificial Sequence: Synthetic oligonucleotide
gacucuaauccggaaucaa

SEQ ID NO: 3284900 - RNA, 19 nt, Artificial Sequence
  Description of Artificial Sequence: Synthetic oligonucleotide
uugauuccggauuagaguc

SEQ ID NO: 3284901 - RNA, 19 nt, Artificial Sequence
  Description of Artificial Sequence: Synthetic oligonucleotide
caaauacgugauuaugaca

SEQ ID NO: 3284902 - RNA, 19 nt, Artificial Sequence
  Description of Artificial Sequence: Synthetic oligonucleotide
ugucauaaucacguauuug

SEQ ID NO: 3284903 - RNA, 19 nt, Artificial Sequence
  Description of Artificial Sequence: Synthetic oligonucleotide
gcaugaauucggcuucauu

SEQ ID NO: 3284904 - RNA, 19 nt, Artificial Sequence
  Description of Artificial Sequence: Synthetic oligonucleotide
aaugaagccgaauucaugc

SEQ ID NO: 3284905 - RNA, 19 nt, Artificial Sequence
  Description of Artificial Sequence: Synthetic oligonucleotide
cguguacaucguaccaaau

SEQ ID NO: 3284906 - RNA, 19 nt, Artificial Sequence
  Description of Artificial Sequence: Synthetic oligonucleotide
auuugguacgauguacacg

SEQ ID NO: 3284907 - RNA, 19 nt, Artificial Sequence
  Description of Artificial Sequence: Synthetic oligonucleotide
cuguucucaaucucaauau

SEQ ID NO: 3284908 - RNA, 19 nt, Artificial Sequence
  Description of Artificial Sequence: Synthetic oligonucleotide
auauugagauugagaacag

SEQ ID NO: 3284909 - RNA, 19 nt, Artificial Sequence
  Description of Artificial Sequence: Synthetic oligonucleotide
cucuaauccggaaucaaau

SEQ ID NO: 3284910 - RNA, 19 nt, Artificial Sequence
  Description of Artificial Sequence: Synthetic oligonucleotide
auuugauuccggauuagag

SEQ ID NO: 3284911 - RNA, 19 nt, Artificial Sequence
  Description of Artificial Sequence: Synthetic oligonucleotide
cgugauuaugacaucaaau

SEQ ID NO: 3284912 - RNA, 19 nt, Artificial Sequence
  Description of Artificial Sequence: Synthetic oligonucleotide
auuugaugucauaaucacg

SEQ ID NO: 3284913 - RNA, 19 nt, Artificial Sequence
  Description of Artificial Sequence: Synthetic oligonucleotide
guaccgcaagggaaugcau

SEQ ID NO: 3284914 - RNA, 19 nt, Artificial Sequence
  Description of Artificial Sequence: Synthetic oligonucleotide
augcauucccuugcgguac

SEQ ID NO: 3284915 - RNA, 19 nt, Artificial Sequence
  Description of Artificial Sequence: Synthetic oligonucleotide
caaccacugccucuuaguu

SEQ ID NO: 3284916 - RNA, 19 nt, Artificial Sequence
  Description of Artificial Sequence: Synthetic oligonucleotide
aacuaagaggcagugguug

SEQ ID NO: 3284917 - RNA, 19 nt, Artificial Sequence
  Description of Artificial Sequence: Synthetic oligonucleotide
cuguuaugccuaaugucuu

SEQ ID NO: 3284918 - RNA, 19 nt, Artificial Sequence
  Description of Artificial Sequence: Synthetic oligonucleotide
aagacauuaggcauaacag

SEQ ID NO: 3284919 - RNA, 19 nt, Artificial Sequence
  Description of Artificial Sequence: Synthetic oligonucleotide
caauauugaccaccacgau

SEQ ID NO: 3284920 - RNA, 19 nt, Artificial Sequence
  Description of Artificial Sequence: Synthetic oligonucleotide
aucgugguggucaauauug

SEQ ID NO: 3284921 - RNA, 19 nt, Artificial Sequence
  Description of Artificial Sequence: Synthetic oligonucleotide
cggaaucaaauuucacaga

SEQ ID NO: 3284922 - RNA, 19 nt, Artificial Sequence
  Description of Artificial Sequence: Synthetic oligonucleotide
ucugugaaauuugauuccg

SEQ ID NO: 3284923 - RNA, 19 nt, Artificial Sequence
  Description of Artificial Sequence: Synthetic oligonucleotide
gugauuaugacaucaaaua

SEQ ID NO: 3284924 - RNA, 19 nt, Artificial Sequence
  Description of Artificial Sequence: Synthetic oligonucleotide
uauuugaugucauaaucac

SEQ ID NO: 3284925 - RNA, 19 nt, Artificial Sequence
  Description of Artificial Sequence: Synthetic oligonucleotide
caagggaaugcaucgguau

SEQ ID NO: 3284926 - RNA, 19 nt, Artificial Sequence
  Description of Artificial Sequence: Synthetic oligonucleotide
auaccgaugcauucccuug

SEQ ID NO: 3284927 - RNA, 19 nt, Artificial Sequence
  Description of Artificial Sequence: Synthetic oligonucleotide
gggugugcacucauccaau

SEQ ID NO: 3284928 - RNA, 19 nt, Artificial Sequence
  Description of Artificial Sequence: Synthetic oligonucleotide
auuggaugagugcacaccc

SEQ ID NO: 3284929 - RNA, 19 nt, Artificial Sequence
  Description of Artificial Sequence: Synthetic oligonucleotide
cuuucuuccuauggacuaa

SEQ ID NO: 3284930 - RNA, 19 nt, Artificial Sequence
  Description of Artificial Sequence: Synthetic oligonucleotide
uuaguccauaggaagaaag

SEQ ID NO: 3284931 - RNA, 19 nt, Artificial Sequence
  Description of Artificial Sequence: Synthetic oligonucleotide
cacgaugccuacacaggca

SEQ ID NO: 3284932 - RNA, 19 nt, Artificial Sequence
  Description of Artificial Sequence: Synthetic oligonucleotide
ugccuguguaggcaucgug

SEQ ID NO: 3284933 - RNA, 19 nt, Artificial Sequence
  Description of Artificial Sequence: Synthetic oligonucleotide
ggaaucaaauuucacagaa

SEQ ID NO: 3284934 - RNA, 19 nt, Artificial Sequence
  Description of Artificial Sequence: Synthetic oligonucleotide
uucugugaaauuugauucc

SEQ ID NO: 3284935 - RNA, 19 nt, Artificial Sequence
  Description of Artificial Sequence: Synthetic oligonucleotide
gauuaugacaucaaauaau

SEQ ID NO: 3284936 - RNA, 19 nt, Artificial Sequence
  Description of Artificial Sequence: Synthetic oligonucleotide
auuauuugaugucauaauc

SEQ ID NO: 3284937 - RNA, 19 nt, Artificial Sequence
  Description of Artificial Sequence: Synthetic oligonucleotide
gcaucgguauugcguugau

SEQ ID NO: 3284938 - RNA, 19 nt, Artificial Sequence
  Description of Artificial Sequence: Synthetic oligonucleotide
aucaacgcaauaccgaugc

SEQ ID NO: 3284939 - RNA, 19 nt, Artificial Sequence
  Description of Artificial Sequence: Synthetic oligonucleotide
ggagaaggguguugauguu

SEQ ID NO: 3284940 - RNA, 19 nt, Artificial Sequence
  Description of Artificial Sequence: Synthetic oligonucleotide
aacaucaacacccuucucc

SEQ ID NO: 3284941 - RNA, 19 nt, Artificial Sequence
  Description of Artificial Sequence: Synthetic oligonucleotide
gcgcuucuugacagaaauu

SEQ ID NO: 3284942 - RNA, 19 nt, Artificial Sequence
  Description of Artificial Sequence: Synthetic oligonucleotide
aauuucugucaagaagcgc

SEQ ID NO: 3284943 - protein, 16 aa, Artificial Sequence
  Description of Artificial Sequence: Synthetic peptide
RQIKIWFQNRRMKWKK

SEQ ID NO: 3284944 - protein, 14 aa, Artificial Sequence
  Description of Artificial Sequence: Synthetic peptide
GRKKRRQRRRPPQC

SEQ ID NO: 3284945 - protein, 27 aa, Artificial Sequence
  Description of Artificial Sequence: Synthetic peptide
GALFLGWLGAAGSTMGAWSQPKKKRKV

SEQ ID NO: 3284946 - protein, 18 aa, Artificial Sequence
  Description of Artificial Sequence: Synthetic peptide
LLIILRRRIRKQAHAHSK

SEQ ID NO: 3284947 - protein, 26 aa, Artificial Sequence
  Description of Artificial Sequence: Synthetic peptide
GWTLNSAGYLLKINLKALAALAKKIL

SEQ ID NO: 3284948 - protein, 18 aa, Artificial Sequence
  Description of Artificial Sequence: Synthetic peptide
KLALKLALKALKAALKLA

SEQ ID NO: 3284949 - protein, 9 aa, Artificial Sequence
  Description of Artificial Sequence: Synthetic peptide
RRRRRRRRR

SEQ ID NO: 3284950 - protein, 10 aa, Artificial Sequence
  Description of Artificial Sequence: Synthetic peptide
KFFKFFKFFK

SEQ ID NO: 3284951 - protein, 37 aa, Artificial Sequence
  Description of Artificial Sequence: Synthetic polypeptide
LLGDFFRKSKEKIGKEFKRIVQRIKDFLRNLVPRTES

SEQ ID NO: 3284952 - protein, 31 aa, Artificial Sequence
  Description of Artificial Sequence: Synthetic polypeptide
SWLSKTAKKLENSAKKRISEGIAIAIQGGPR

SEQ ID NO: 3284953 - protein, 30 aa, Artificial Sequence
  Description of Artificial Sequence: Synthetic polypeptide
ACYCRIPACIAGERRYGTCIYQGRLWAFCC

SEQ ID NO: 3284954 - protein, 36 aa, Artificial Sequence
  Description of Artificial Sequence: Synthetic polypeptide
DHYNCVSSGGQCLYSACPIFTKIQGTCYRGKAKCCK

SEQ ID NO: 3284955 - protein, 12 aa, Artificial Sequence
  Description of Artificial Sequence: Synthetic peptide
RKCRIVVIRVCR

SEQ ID NO: 3284956 - protein, 42 aa, Artificial Sequence
  Description of Artificial Sequence: Synthetic polypeptide
RRRPRPPYLPRPRPPPFFPPRLPPRIPPGFPPRFPPRFPGKR

SEQ ID NO: 3284957 - protein, 13 aa, Artificial Sequence
  Description of Artificial Sequence: Synthetic peptide
ILPWKWPWWPWRR

SEQ ID NO: 3284958 - protein, 16 aa, Artificial Sequence
  Description of Artificial Sequence: Synthetic peptide
AAVALLPAVLLALLAP

SEQ ID NO: 3284959 - protein, 11 aa, Artificial Sequence
  Description of Artificial Sequence: Synthetic peptide
AALLPVLLAAP

SEQ ID NO: 3284960 - protein, 13 aa, Artificial Sequence
  Description of Artificial Sequence: Synthetic peptide
GRKKRRQRRRPPQ

SEQ ID NO: 3284961 - protein, 16 aa, Artificial Sequence
  Description of Artificial Sequence: Synthetic peptide
RQIKIWFQNRRMKWKK

SEQ ID NO: 3284962 - RNA, 19 nt, Artificial Sequence
  Description of Artificial Sequence: Synthetic oligonucleotide
uaaaguuccuaugcagcuc

SEQ ID NO: 3284963 - RNA, 19 nt, Artificial Sequence
  Description of Artificial Sequence: Synthetic oligonucleotide
aaaguuccuaugcagcucc

SEQ ID NO: 3284964 - RNA, 19 nt, Artificial Sequence
  Description of Artificial Sequence: Synthetic oligonucleotide
aaguuccuaugcagcuccg

SEQ ID NO: 3284965 - RNA, 19 nt, Artificial Sequence
  Description of Artificial Sequence: Synthetic oligonucleotide
aguuccuaugcagcuccgc

SEQ ID NO: 3284966 - RNA, 19 nt, Artificial Sequence
  Description of Artificial Sequence: Synthetic oligonucleotide
ggccucauuuccucggaaa

SEQ ID NO: 3284967 - RNA, 19 nt, Artificial Sequence
  Description of Artificial Sequence: Synthetic oligonucleotide
gccucauuuccucggaaaa

SEQ ID NO: 3284968 - RNA, 19 nt, Artificial Sequence
  Description of Artificial Sequence: Synthetic oligonucleotide
ccucauuuccucggaaaau

SEQ ID NO: 3284969 - RNA, 19 nt, Artificial Sequence
  Description of Artificial Sequence: Synthetic oligonucleotide
ucgccacgcccuccuccua

SEQ ID NO: 3284970 - RNA, 19 nt, Artificial Sequence
  Description of Artificial Sequence: Synthetic oligonucleotide
ccuacccggcuuuaaagcu

SEQ ID NO: 3284971 - RNA, 19 nt, Artificial Sequence
  Description of Artificial Sequence: Synthetic oligonucleotide
ugcggggaacguagcuagc

SEQ ID NO: 3284972 - RNA, 19 nt, Artificial Sequence
  Description of Artificial Sequence: Synthetic oligonucleotide
gcggggaacguagcuagcu

SEQ ID NO: 3284973 - RNA, 19 nt, Artificial Sequence
  Description of Artificial Sequence: Synthetic oligonucleotide
cggggaacguagcuagcug

SEQ ID NO: 3284974 - RNA, 19 nt, Artificial Sequence
  Description of Artificial Sequence: Synthetic oligonucleotide
ggggaacguagcuagcugc

SEQ ID NO: 3284975 - RNA, 19 nt, Artificial Sequence
  Description of Artificial Sequence: Synthetic oligonucleotide
agcuacauggcccccuggu

SEQ ID NO: 3284976 - RNA, 19 nt, Artificial Sequence
  Description of Artificial Sequence: Synthetic oligonucleotide
caugcagguuauucuggac

SEQ ID NO: 3284977 - RNA, 19 nt, Artificial Sequence
  Description of Artificial Sequence: Synthetic oligonucleotide
uggacuuuaugaagccauu

SEQ ID NO: 3284978 - RNA, 19 nt, Artificial Sequence
  Description of Artificial Sequence: Synthetic oligonucleotide
aguugggauuucaaaaaaa

SEQ ID NO: 3284979 - RNA, 19 nt, Artificial Sequence
  Description of Artificial Sequence: Synthetic oligonucleotide
guugggauuucaaaaaaau

SEQ ID NO: 3284980 - RNA, 19 nt, Artificial Sequence
  Description of Artificial Sequence: Synthetic oligonucleotide
uugggauuucaaaaaaauu

SEQ ID NO: 3284981 - RNA, 19 nt, Artificial Sequence
  Description of Artificial Sequence: Synthetic oligonucleotide
ugggauuucaaaaaaauug

SEQ ID NO: 3284982 - RNA, 19 nt, Artificial Sequence
  Description of Artificial Sequence: Synthetic oligonucleotide
gggauuucaaaaaaauuga

SEQ ID NO: 3284983 - RNA, 19 nt, Artificial Sequence
  Description of Artificial Sequence: Synthetic oligonucleotide
caaaaaaauugaaaaguug

SEQ ID NO: 3284984 - RNA, 19 nt, Artificial Sequence
  Description of Artificial Sequence: Synthetic oligonucleotide
aaaaaaauugaaaaguugg

SEQ ID NO: 3284985 - RNA, 19 nt, Artificial Sequence
  Description of Artificial Sequence: Synthetic oligonucleotide
aaaaguuggaggaguauag

SEQ ID NO: 3284986 - RNA, 19 nt, Artificial Sequence
  Description of Artificial Sequence: Synthetic oligonucleotide
uuucugaucugucugaaug

SEQ ID NO: 3284987 - RNA, 19 nt, Artificial Sequence
  Description of Artificial Sequence: Synthetic oligonucleotide
uucugaucugucugaaugu

SEQ ID NO: 3284988 - RNA, 19 nt, Artificial Sequence
  Description of Artificial Sequence: Synthetic oligonucleotide
ucugaucugucugaauguu

SEQ ID NO: 3284989 - RNA, 19 nt, Artificial Sequence
  Description of Artificial Sequence: Synthetic oligonucleotide
cugaucugucugaauguuu

SEQ ID NO: 3284990 - RNA, 19 nt, Artificial Sequence
  Description of Artificial Sequence: Synthetic oligonucleotide
ugaucugucugaauguuua

SEQ ID NO: 3284991 - RNA, 19 nt, Artificial Sequence
  Description of Artificial Sequence: Synthetic oligonucleotide
gaucugucugaauguuuaa

SEQ ID NO: 3284992 - RNA, 19 nt, Artificial Sequence
  Description of Artificial Sequence: Synthetic oligonucleotide
aucugucugaauguuuaau

SEQ ID NO: 3284993 - RNA, 19 nt, Artificial Sequence
  Description of Artificial Sequence: Synthetic oligonucleotide
gauuugcucuacuaagggg

SEQ ID NO: 3284994 - RNA, 19 nt, Artificial Sequence
  Description of Artificial Sequence: Synthetic oligonucleotide
auuugcucuacuaagggga

SEQ ID NO: 3284995 - RNA, 19 nt, Artificial Sequence
  Description of Artificial Sequence: Synthetic oligonucleotide
gcccaaaacuuugaaacuu

SEQ ID NO: 3284996 - RNA, 19 nt, Artificial Sequence
  Description of Artificial Sequence: Synthetic oligonucleotide
uugaaacuugcuuuggaga

SEQ ID NO: 3284997 - RNA, 19 nt, Artificial Sequence
  Description of Artificial Sequence: Synthetic oligonucleotide
ugaaacuugcuuuggagaa

SEQ ID NO: 3284998 - RNA, 19 nt, Artificial Sequence
  Description of Artificial Sequence: Synthetic oligonucleotide
ggauuguagagaaagguau

SEQ ID NO: 3284999 - RNA, 19 nt, Artificial Sequence
  Description of Artificial Sequence: Synthetic oligonucleotide
gauuguagagaaagguaua

SEQ ID NO: 3285000 - RNA, 19 nt, Artificial Sequence
  Description of Artificial Sequence: Synthetic oligonucleotide
aacagaagaucuugaggau

SEQ ID NO: 3285001 - RNA, 19 nt, Artificial Sequence
  Description of Artificial Sequence: Synthetic oligonucleotide
aaucuuagugagaauucau

SEQ ID NO: 3285002 - RNA, 19 nt, Artificial Sequence
  Description of Artificial Sequence: Synthetic oligonucleotide
agugagaauucauguccac

SEQ ID NO: 3285003 - RNA, 19 nt, Artificial Sequence
  Description of Artificial Sequence: Synthetic oligonucleotide
cuucagaagugucugauac

SEQ ID NO: 3285004 - RNA, 19 nt, Artificial Sequence
  Description of Artificial Sequence: Synthetic oligonucleotide
uucagaagugucugauaca

SEQ ID NO: 3285005 - RNA, 19 nt, Artificial Sequence
  Description of Artificial Sequence: Synthetic oligonucleotide
accaauuagagcuugcuuu

SEQ ID NO: 3285006 - RNA, 19 nt, Artificial Sequence
  Description of Artificial Sequence: Synthetic oligonucleotide
agcuugcuuugccugcuau

SEQ ID NO: 3285007 - RNA, 19 nt, Artificial Sequence
  Description of Artificial Sequence: Synthetic oligonucleotide
gcuugcuuugccugcuaug

SEQ ID NO: 3285008 - RNA, 19 nt, Artificial Sequence
  Description of Artificial Sequence: Synthetic oligonucleotide
ugaaaggaaaaaacacaau

SEQ ID NO: 3285009 - RNA, 19 nt, Artificial Sequence
  Description of Artificial Sequence: Synthetic oligonucleotide
gaaaggaaaaaacacaaua

SEQ ID NO: 3285010 - RNA, 19 nt, Artificial Sequence
  Description of Artificial Sequence: Synthetic oligonucleotide
auaauaugugcuccuacag

SEQ ID NO: 3285011 - RNA, 19 nt, Artificial Sequence
  Description of Artificial Sequence: Synthetic oligonucleotide
ugaacaucaucuuaaaaaa

SEQ ID NO: 3285012 - RNA, 19 nt, Artificial Sequence
  Description of Artificial Sequence: Synthetic oligonucleotide
gaacaucaucuuaaaaaau

SEQ ID NO: 3285013 - RNA, 19 nt, Artificial Sequence
  Description of Artificial Sequence: Synthetic oligonucleotide
aaguugucuuuuuugcgaa

SEQ ID NO: 3285014 - RNA, 19 nt, Artificial Sequence
  Description of Artificial Sequence: Synthetic oligonucleotide
uuuuuugcgaaucagaucc

SEQ ID NO: 3285015 - RNA, 19 nt, Artificial Sequence
  Description of Artificial Sequence: Synthetic oligonucleotide
uuuuugcgaaucagauccc

SEQ ID NO: 3285016 - RNA, 19 nt, Artificial Sequence
  Description of Artificial Sequence: Synthetic oligonucleotide
cgaaucagaucccagugua

SEQ ID NO: 3285017 - RNA, 19 nt, Artificial Sequence
  Description of Artificial Sequence: Synthetic oligonucleotide
gaaucagaucccaguguau

SEQ ID NO: 3285018 - RNA, 19 nt, Artificial Sequence
  Description of Artificial Sequence: Synthetic oligonucleotide
ucccaguguaugaacagca

SEQ ID NO: 3285019 - RNA, 19 nt, Artificial Sequence
  Description of Artificial Sequence: Synthetic oligonucleotide
cccaguguaugaacagcag

SEQ ID NO: 3285020 - RNA, 19 nt, Artificial Sequence
  Description of Artificial Sequence: Synthetic oligonucleotide
ccaguguaugaacagcaga

SEQ ID NO: 3285021 - RNA, 19 nt, Artificial Sequence
  Description of Artificial Sequence: Synthetic oligonucleotide
gaaugucccaguggaacag

SEQ ID NO: 3285022 - RNA, 19 nt, Artificial Sequence
  Description of Artificial Sequence: Synthetic oligonucleotide
aaugucccaguggaacaga

SEQ ID NO: 3285023 - RNA, 19 nt, Artificial Sequence
  Description of Artificial Sequence: Synthetic oligonucleotide
accuuaaaaagggaacgau

SEQ ID NO: 3285024 - RNA, 19 nt, Artificial Sequence
  Description of Artificial Sequence: Synthetic oligonucleotide
ccuuaaaaagggaacgauu

SEQ ID NO: 3285025 - RNA, 19 nt, Artificial Sequence
  Description of Artificial Sequence: Synthetic oligonucleotide
cacuaguaaacaacacccg

SEQ ID NO: 3285026 - RNA, 19 nt, Artificial Sequence
  Description of Artificial Sequence: Synthetic oligonucleotide
acuaguaaacaacacccgu

SEQ ID NO: 3285027 - RNA, 19 nt, Artificial Sequence
  Description of Artificial Sequence: Synthetic oligonucleotide
cuaguaaacaacacccgua

SEQ ID NO: 3285028 - RNA, 19 nt, Artificial Sequence
  Description of Artificial Sequence: Synthetic oligonucleotide
uaguaaacaacacccguac

SEQ ID NO: 3285029 - RNA, 19 nt, Artificial Sequence
  Description of Artificial Sequence: Synthetic oligonucleotide
acacccguacaauaugauc

SEQ ID NO: 3285030 - RNA, 19 nt, Artificial Sequence
  Description of Artificial Sequence: Synthetic oligonucleotide
ugccucgguugguguuggg

SEQ ID NO: 3285031 - RNA, 19 nt, Artificial Sequence
  Description of Artificial Sequence: Synthetic oligonucleotide
gaacuggagcaaguuguuu

SEQ ID NO: 3285032 - RNA, 19 nt, Artificial Sequence
  Description of Artificial Sequence: Synthetic oligonucleotide
aacuggagcaaguuguuua

SEQ ID NO: 3285033 - RNA, 19 nt, Artificial Sequence
  Description of Artificial Sequence: Synthetic oligonucleotide
ggagcaaguuguuuauaag

SEQ ID NO: 3285034 - RNA, 19 nt, Artificial Sequence
  Description of Artificial Sequence: Synthetic oligonucleotide
gagcaaguuguuuauaagc

SEQ ID NO: 3285035 - RNA, 19 nt, Artificial Sequence
  Description of Artificial Sequence: Synthetic oligonucleotide
gcaaguuguuuauaagccc

SEQ ID NO: 3285036 - RNA, 19 nt, Artificial Sequence
  Description of Artificial Sequence: Synthetic oligonucleotide
guuuauaagccccagaagu

SEQ ID NO: 3285037 - RNA, 19 nt, Artificial Sequence
  Description of Artificial Sequence: Synthetic oligonucleotide
uuuauaagccccagaaguu

SEQ ID NO: 3285038 - RNA, 19 nt, Artificial Sequence
  Description of Artificial Sequence: Synthetic oligonucleotide
cgacaaauuuaaauacauc

SEQ ID NO: 3285039 - RNA, 19 nt, Artificial Sequence
  Description of Artificial Sequence: Synthetic oligonucleotide
gacaaauuuaaauacauca

SEQ ID NO: 3285040 - RNA, 19 nt, Artificial Sequence
  Description of Artificial Sequence: Synthetic oligonucleotide
uacaucauagcucagcuga

SEQ ID NO: 3285041 - RNA, 19 nt, Artificial Sequence
  Description of Artificial Sequence: Synthetic oligonucleotide
gcugaugagggacacagag

SEQ ID NO: 3285042 - RNA, 19 nt, Artificial Sequence
  Description of Artificial Sequence: Synthetic oligonucleotide
aagaccucgaaaacuuauc

SEQ ID NO: 3285043 - RNA, 19 nt, Artificial Sequence
  Description of Artificial Sequence: Synthetic oligonucleotide
agaccucgaaaacuuaucu

SEQ ID NO: 3285044 - RNA, 19 nt, Artificial Sequence
  Description of Artificial Sequence: Synthetic oligonucleotide
aacuuaucucaaauucaaa

SEQ ID NO: 3285045 - RNA, 19 nt, Artificial Sequence
  Description of Artificial Sequence: Synthetic oligonucleotide
acuuaucucaaauucaaaa

SEQ ID NO: 3285046 - RNA, 19 nt, Artificial Sequence
  Description of Artificial Sequence: Synthetic oligonucleotide
ucaaauucaaaauagggaa

SEQ ID NO: 3285047 - RNA, 19 nt, Artificial Sequence
  Description of Artificial Sequence: Synthetic oligonucleotide
uggauuacuugaaagacuu

SEQ ID NO: 3285048 - RNA, 19 nt, Artificial Sequence
  Description of Artificial Sequence: Synthetic oligonucleotide
ucuucagcaauguccgagc

SEQ ID NO: 3285049 - RNA, 19 nt, Artificial Sequence
  Description of Artificial Sequence: Synthetic oligonucleotide
gcaggauucgaugagauug

SEQ ID NO: 3285050 - RNA, 19 nt, Artificial Sequence
  Description of Artificial Sequence: Synthetic oligonucleotide
gcaagaucuuacucagaga

SEQ ID NO: 3285051 - RNA, 19 nt, Artificial Sequence
  Description of Artificial Sequence: Synthetic oligonucleotide
caagaucuuacucagagau

SEQ ID NO: 3285052 - RNA, 19 nt, Artificial Sequence
  Description of Artificial Sequence: Synthetic oligonucleotide
aagaucuuacucagagauu

SEQ ID NO: 3285053 - RNA, 19 nt, Artificial Sequence
  Description of Artificial Sequence: Synthetic oligonucleotide
cagagauuugaagaaaagc

SEQ ID NO: 3285054 - RNA, 19 nt, Artificial Sequence
  Description of Artificial Sequence: Synthetic oligonucleotide
agagauuugaagaaaagcu

SEQ ID NO: 3285055 - RNA, 19 nt, Artificial Sequence
  Description of Artificial Sequence: Synthetic oligonucleotide
cugcaggaacuagaaagug

SEQ ID NO: 3285056 - RNA, 19 nt, Artificial Sequence
  Description of Artificial Sequence: Synthetic oligonucleotide
ccagcaaugagaauccuaa

SEQ ID NO: 3285057 - RNA, 19 nt, Artificial Sequence
  Description of Artificial Sequence: Synthetic oligonucleotide
agcaaugagaauccuaaac

SEQ ID NO: 3285058 - RNA, 19 nt, Artificial Sequence
  Description of Artificial Sequence: Synthetic oligonucleotide
gcuucaucuuacaagaaga

SEQ ID NO: 3285059 - RNA, 19 nt, Artificial Sequence
  Description of Artificial Sequence: Synthetic oligonucleotide
ucucuuugugaaaaccaga

SEQ ID NO: 3285060 - RNA, 19 nt, Artificial Sequence
  Description of Artificial Sequence: Synthetic oligonucleotide
cucuuugugaaaaccagag

SEQ ID NO: 3285061 - RNA, 19 nt, Artificial Sequence
  Description of Artificial Sequence: Synthetic oligonucleotide
agagcacuuguggacgcuu

SEQ ID NO: 3285062 - RNA, 19 nt, Artificial Sequence
  Description of Artificial Sequence: Synthetic oligonucleotide
gagcacuuguggacgcuuu

SEQ ID NO: 3285063 - RNA, 19 nt, Artificial Sequence
  Description of Artificial Sequence: Synthetic oligonucleotide
aacucaguuuucuaaaacc

SEQ ID NO: 3285064 - RNA, 19 nt, Artificial Sequence
  Description of Artificial Sequence: Synthetic oligonucleotide
acucaguuuucuaaaaccu

SEQ ID NO: 3285065 - RNA, 19 nt, Artificial Sequence
  Description of Artificial Sequence: Synthetic oligonucleotide
cuggcauauugacuggacg

SEQ ID NO: 3285066 - RNA, 19 nt, Artificial Sequence
  Description of Artificial Sequence: Synthetic oligonucleotide
uggcauauugacuggacgu

SEQ ID NO: 3285067 - RNA, 19 nt, Artificial Sequence
  Description of Artificial Sequence: Synthetic oligonucleotide
ggcauauugacuggacgug

SEQ ID NO: 3285068 - RNA, 19 nt, Artificial Sequence
  Description of Artificial Sequence: Synthetic oligonucleotide
caggaaugacccucccggc

SEQ ID NO: 3285069 - RNA, 19 nt, Artificial Sequence
  Description of Artificial Sequence: Synthetic oligonucleotide
ggaaugacccucccggcac

SEQ ID NO: 3285070 - RNA, 19 nt, Artificial Sequence
  Description of Artificial Sequence: Synthetic oligonucleotide
gaaugacccucccggcaca

SEQ ID NO: 3285071 - RNA, 19 nt, Artificial Sequence
  Description of Artificial Sequence: Synthetic oligonucleotide
acagaaguguauauuggau

SEQ ID NO: 3285072 - RNA, 19 nt, Artificial Sequence
  Description of Artificial Sequence: Synthetic oligonucleotide
gacauugcacagugcaauc

SEQ ID NO: 3285073 - RNA, 19 nt, Artificial Sequence
  Description of Artificial Sequence: Synthetic oligonucleotide
cagugcaaucuugucaucc

SEQ ID NO: 3285074 - RNA, 19 nt, Artificial Sequence
  Description of Artificial Sequence: Synthetic oligonucleotide
ucuugucauccuuuaugag

SEQ ID NO: 3285075 - RNA, 19 nt, Artificial Sequence
  Description of Artificial Sequence: Synthetic oligonucleotide
gggcaaugucaucaaaaug

SEQ ID NO: 3285076 - RNA, 19 nt, Artificial Sequence
  Description of Artificial Sequence: Synthetic oligonucleotide
ggcaaugucaucaaaauga

SEQ ID NO: 3285077 - RNA, 19 nt, Artificial Sequence
  Description of Artificial Sequence: Synthetic oligonucleotide
gcaagugcuuccuucugac

SEQ ID NO: 3285078 - RNA, 19 nt, Artificial Sequence
  Description of Artificial Sequence: Synthetic oligonucleotide
aguaaugcugguguaauug

SEQ ID NO: 3285079 - RNA, 19 nt, Artificial Sequence
  Description of Artificial Sequence: Synthetic oligonucleotide
cuucagacaugggacgaag

SEQ ID NO: 3285080 - RNA, 19 nt, Artificial Sequence
  Description of Artificial Sequence: Synthetic oligonucleotide
gacgaagcaguauuuaggg

SEQ ID NO: 3285081 - RNA, 19 nt, Artificial Sequence
  Description of Artificial Sequence: Synthetic oligonucleotide
acgaagcaguauuuaggga

SEQ ID NO: 3285082 - RNA, 19 nt, Artificial Sequence
  Description of Artificial Sequence: Synthetic oligonucleotide
augaaaaauucaucagaga

SEQ ID NO: 3285083 - RNA, 19 nt, Artificial Sequence
  Description of Artificial Sequence: Synthetic oligonucleotide
ugaaaaauucaucagagau

SEQ ID NO: 3285084 - RNA, 19 nt, Artificial Sequence
  Description of Artificial Sequence: Synthetic oligonucleotide
gaaaaauucaucagagaua

SEQ ID NO: 3285085 - RNA, 19 nt, Artificial Sequence
  Description of Artificial Sequence: Synthetic oligonucleotide
aaaaauucaucagagauag

SEQ ID NO: 3285086 - RNA, 19 nt, Artificial Sequence
  Description of Artificial Sequence: Synthetic oligonucleotide
uguaccugauaaggaaaau

SEQ ID NO: 3285087 - RNA, 19 nt, Artificial Sequence
  Description of Artificial Sequence: Synthetic oligonucleotide
guaccugauaaggaaaaua

SEQ ID NO: 3285088 - RNA, 19 nt, Artificial Sequence
  Description of Artificial Sequence: Synthetic oligonucleotide
gcugacguaagagugauag

SEQ ID NO: 3285089 - RNA, 19 nt, Artificial Sequence
  Description of Artificial Sequence: Synthetic oligonucleotide
cugacguaagagugauaga

SEQ ID NO: 3285090 - RNA, 19 nt, Artificial Sequence
  Description of Artificial Sequence: Synthetic oligonucleotide
ugacguaagagugauagag

SEQ ID NO: 3285091 - RNA, 19 nt, Artificial Sequence
  Description of Artificial Sequence: Synthetic oligonucleotide
ugccauuacacugugcuug

SEQ ID NO: 3285092 - RNA, 19 nt, Artificial Sequence
  Description of Artificial Sequence: Synthetic oligonucleotide
aaaaaagagcaaagauauu

SEQ ID NO: 3285093 - RNA, 19 nt, Artificial Sequence
  Description of Artificial Sequence: Synthetic oligonucleotide
aaaaagagcaaagauauuc

SEQ ID NO: 3285094 - RNA, 19 nt, Artificial Sequence
  Description of Artificial Sequence: Synthetic oligonucleotide
aagauauucugugcccgac

SEQ ID NO: 3285095 - RNA, 19 nt, Artificial Sequence
  Description of Artificial Sequence: Synthetic oligonucleotide
ccaugacuggggaauccau

SEQ ID NO: 3285096 - RNA, 19 nt, Artificial Sequence
  Description of Artificial Sequence: Synthetic oligonucleotide
ugaaaguuuugugguggag

SEQ ID NO: 3285097 - RNA, 19 nt, Artificial Sequence
  Description of Artificial Sequence: Synthetic oligonucleotide
gaaaguuuugugguggagg

SEQ ID NO: 3285098 - RNA, 19 nt, Artificial Sequence
  Description of Artificial Sequence: Synthetic oligonucleotide
uugugguggaggauauugc

SEQ ID NO: 3285099 - RNA, 19 nt, Artificial Sequence
  Description of Artificial Sequence: Synthetic oligonucleotide
cacuguacucgaaguggaa

SEQ ID NO: 3285100 - RNA, 19 nt, Artificial Sequence
  Description of Artificial Sequence: Synthetic oligonucleotide
acuguacucgaaguggaag

SEQ ID NO: 3285101 - RNA, 19 nt, Artificial Sequence
  Description of Artificial Sequence: Synthetic oligonucleotide
cuguacucgaaguggaagg

SEQ ID NO: 3285102 - RNA, 19 nt, Artificial Sequence
  Description of Artificial Sequence: Synthetic oligonucleotide
uguacucgaaguggaagga

SEQ ID NO: 3285103 - RNA, 19 nt, Artificial Sequence
  Description of Artificial Sequence: Synthetic oligonucleotide
auuuugagaagauaccauu

SEQ ID NO: 3285104 - RNA, 19 nt, Artificial Sequence
  Description of Artificial Sequence: Synthetic oligonucleotide
ccauuugauccagcagaaa

SEQ ID NO: 3285105 - RNA, 19 nt, Artificial Sequence
  Description of Artificial Sequence: Synthetic oligonucleotide
acaaacauaguggguauaa

SEQ ID NO: 3285106 - RNA, 19 nt, Artificial Sequence
  Description of Artificial Sequence: Synthetic oligonucleotide
ggguauaaucauggaucgc

SEQ ID NO: 3285107 - RNA, 19 nt, Artificial Sequence
  Description of Artificial Sequence: Synthetic oligonucleotide
gguauaaucauggaucgcu

SEQ ID NO: 3285108 - RNA, 19 nt, Artificial Sequence
  Description of Artificial Sequence: Synthetic oligonucleotide
ucauggaucgcuuguaccc

SEQ ID NO: 3285109 - RNA, 19 nt, Artificial Sequence
  Description of Artificial Sequence: Synthetic oligonucleotide
cauggaucgcuuguacccc

SEQ ID NO: 3285110 - RNA, 19 nt, Artificial Sequence
  Description of Artificial Sequence: Synthetic oligonucleotide
auggaucgcuuguaccccu

SEQ ID NO: 3285111 - RNA, 19 nt, Artificial Sequence
  Description of Artificial Sequence: Synthetic oligonucleotide
uggaucgcuuguaccccug

SEQ ID NO: 3285112 - RNA, 19 nt, Artificial Sequence
  Description of Artificial Sequence: Synthetic oligonucleotide
ggaucgcuuguaccccugu

SEQ ID NO: 3285113 - RNA, 19 nt, Artificial Sequence
  Description of Artificial Sequence: Synthetic oligonucleotide
agcaguuuguacuauauua

SEQ ID NO: 3285114 - RNA, 19 nt, Artificial Sequence
  Description of Artificial Sequence: Synthetic oligonucleotide
gcaguuuguacuauauuau

SEQ ID NO: 3285115 - RNA, 19 nt, Artificial Sequence
  Description of Artificial Sequence: Synthetic oligonucleotide
caguuuguacuauauuaua

SEQ ID NO: 3285116 - RNA, 19 nt, Artificial Sequence
  Description of Artificial Sequence: Synthetic oligonucleotide
gcaaagcacaaaugaguga

SEQ ID NO: 3285117 - RNA, 19 nt, Artificial Sequence
  Description of Artificial Sequence: Synthetic oligonucleotide
auaguacuugggaaaaauu

SEQ ID NO: 3285118 - RNA, 19 nt, Artificial Sequence
  Description of Artificial Sequence: Synthetic oligonucleotide
aaagccucauuucuagccu

SEQ ID NO: 3285119 - RNA, 19 nt, Artificial Sequence
  Description of Artificial Sequence: Synthetic oligonucleotide
uuuagagucaacugccaac

SEQ ID NO: 3285120 - RNA, 19 nt, Artificial Sequence
  Description of Artificial Sequence: Synthetic oligonucleotide
uuagagucaacugccaaca

SEQ ID NO: 3285121 - RNA, 19 nt, Artificial Sequence
  Description of Artificial Sequence: Synthetic oligonucleotide
aacugccaacaaacacaca

SEQ ID NO: 3285122 - RNA, 19 nt, Artificial Sequence
  Description of Artificial Sequence: Synthetic oligonucleotide
auagaugaaugaauggaau

SEQ ID NO: 3285123 - RNA, 19 nt, Artificial Sequence
  Description of Artificial Sequence: Synthetic oligonucleotide
uagaugaaugaauggaaug

SEQ ID NO: 3285124 - RNA, 19 nt, Artificial Sequence
  Description of Artificial Sequence: Synthetic oligonucleotide
acuggcuuuugcccuuaac

SEQ ID NO: 3285125 - RNA, 19 nt, Artificial Sequence
  Description of Artificial Sequence: Synthetic oligonucleotide
cuggcuuuugcccuuaaca

SEQ ID NO: 3285126 - RNA, 19 nt, Artificial Sequence
  Description of Artificial Sequence: Synthetic oligonucleotide
cccuuaacaaucuacugaa

SEQ ID NO: 3285127 - RNA, 19 nt, Artificial Sequence
  Description of Artificial Sequence: Synthetic oligonucleotide
aauccacugggcacuucuu

SEQ ID NO: 3285128 - RNA, 19 nt, Artificial Sequence
  Description of Artificial Sequence: Synthetic oligonucleotide
auccacugggcacuucuua

SEQ ID NO: 3285129 - RNA, 19 nt, Artificial Sequence
  Description of Artificial Sequence: Synthetic oligonucleotide
uccacugggcacuucuuaa

SEQ ID NO: 3285130 - RNA, 19 nt, Artificial Sequence
  Description of Artificial Sequence: Synthetic oligonucleotide
gcacuucuuaaccuucuau

SEQ ID NO: 3285131 - RNA, 19 nt, Artificial Sequence
  Description of Artificial Sequence: Synthetic oligonucleotide
ucuauuugaccucugcgca

SEQ ID NO: 3285132 - RNA, 19 nt, Artificial Sequence
  Description of Artificial Sequence: Synthetic oligonucleotide
cuauuugaccucugcgcau

SEQ ID NO: 3285133 - RNA, 19 nt, Artificial Sequence
  Description of Artificial Sequence: Synthetic oligonucleotide
ucuauucuagucuuuuuuu

SEQ ID NO: 3285134 - RNA, 19 nt, Artificial Sequence
  Description of Artificial Sequence: Synthetic oligonucleotide
cuauucuagucuuuuuuua

SEQ ID NO: 3285135 - RNA, 19 nt, Artificial Sequence
  Description of Artificial Sequence: Synthetic oligonucleotide
uucuagucuuuuuuuauug

SEQ ID NO: 3285136 - RNA, 19 nt, Artificial Sequence
  Description of Artificial Sequence: Synthetic oligonucleotide
ucuagucuuuuuuuauuga

SEQ ID NO: 3285137 - RNA, 19 nt, Artificial Sequence
  Description of Artificial Sequence: Synthetic oligonucleotide
cuagucuuuuuuuauugag

SEQ ID NO: 3285138 - RNA, 19 nt, Artificial Sequence
  Description of Artificial Sequence: Synthetic oligonucleotide
uagucuuuuuuuauugagu

SEQ ID NO: 3285139 - RNA, 19 nt, Artificial Sequence
  Description of Artificial Sequence: Synthetic oligonucleotide
agucuuuuuuuauugaguc

SEQ ID NO: 3285140 - RNA, 19 nt, Artificial Sequence
  Description of Artificial Sequence: Synthetic oligonucleotide
gucuuuuuuuauugagucc

SEQ ID NO: 3285141 - RNA, 19 nt, Artificial Sequence
  Description of Artificial Sequence: Synthetic oligonucleotide
ucuuuuuuuauugaguccu

SEQ ID NO: 3285142 - RNA, 19 nt, Artificial Sequence
  Description of Artificial Sequence: Synthetic oligonucleotide
cuuuuuuuauugaguccuc

SEQ ID NO: 3285143 - RNA, 19 nt, Artificial Sequence
  Description of Artificial Sequence: Synthetic oligonucleotide
uuuuuuuauugaguccucc

SEQ ID NO: 3285144 - RNA, 19 nt, Artificial Sequence
  Description of Artificial Sequence: Synthetic oligonucleotide
uuuuuauugaguccuccuc

SEQ ID NO: 3285145 - RNA, 19 nt, Artificial Sequence
  Description of Artificial Sequence: Synthetic oligonucleotide
aucccuuccaaggguucaa

SEQ ID NO: 3285146 - RNA, 19 nt, Artificial Sequence
  Description of Artificial Sequence: Synthetic oligonucleotide
ucccuuccaaggguucaau

SEQ ID NO: 3285147 - RNA, 19 nt, Artificial Sequence
  Description of Artificial Sequence: Synthetic oligonucleotide
uguaaugguuauauguacu

SEQ ID NO: 3285148 - RNA, 19 nt, Artificial Sequence
  Description of Artificial Sequence: Synthetic oligonucleotide
guaaugguuauauguacuc

SEQ ID NO: 3285149 - RNA, 19 nt, Artificial Sequence
  Description of Artificial Sequence: Synthetic oligonucleotide
uaaugguuauauguacuca

SEQ ID NO: 3285150 - RNA, 19 nt, Artificial Sequence
  Description of Artificial Sequence: Synthetic oligonucleotide
guuccugguguagcaacgu

SEQ ID NO: 3285151 - RNA, 19 nt, Artificial Sequence
  Description of Artificial Sequence: Synthetic oligonucleotide
uuccugguguagcaacgug

SEQ ID NO: 3285152 - RNA, 19 nt, Artificial Sequence
  Description of Artificial Sequence: Synthetic oligonucleotide
uccugguguagcaacgugu

SEQ ID NO: 3285153 - RNA, 19 nt, Artificial Sequence
  Description of Artificial Sequence: Synthetic oligonucleotide
gguauggcuacacagagaa

SEQ ID NO: 3285154 - RNA, 19 nt, Artificial Sequence
  Description of Artificial Sequence: Synthetic oligonucleotide
guauggcuacacagagaac

SEQ ID NO: 3285155 - RNA, 19 nt, Artificial Sequence
  Description of Artificial Sequence: Synthetic oligonucleotide
auaaagccauuuuuaugcu

SEQ ID NO: 3285156 - RNA, 19 nt, Artificial Sequence
  Description of Artificial Sequence: Synthetic oligonucleotide
uaaagccauuuuuaugcuu

SEQ ID NO: 3285157 - RNA, 19 nt, Artificial Sequence
  Description of Artificial Sequence: Synthetic oligonucleotide
agaguugcuguauguagca

SEQ ID NO: 3285158 - RNA, 19 nt, Artificial Sequence
  Description of Artificial Sequence: Synthetic oligonucleotide
gaguugcuguauguagcaa

SEQ ID NO: 3285159 - RNA, 19 nt, Artificial Sequence
  Description of Artificial Sequence: Synthetic oligonucleotide
aguugcuguauguagcaau

SEQ ID NO: 3285160 - RNA, 19 nt, Artificial Sequence
  Description of Artificial Sequence: Synthetic oligonucleotide
uccacucuacaguggucag

SEQ ID NO: 3285161 - RNA, 19 nt, Artificial Sequence
  Description of Artificial Sequence: Synthetic oligonucleotide
ccacucuacaguggucagc

SEQ ID NO: 3285162 - RNA, 19 nt, Artificial Sequence
  Description of Artificial Sequence: Synthetic oligonucleotide
uacaguggucagcuuuuag

SEQ ID NO: 3285163 - RNA, 19 nt, Artificial Sequence
  Description of Artificial Sequence: Synthetic oligonucleotide
aguggucagcuuuuaguag

SEQ ID NO: 3285164 - RNA, 19 nt, Artificial Sequence
  Description of Artificial Sequence: Synthetic oligonucleotide
gcuuuuaguagagagcaua

SEQ ID NO: 3285165 - RNA, 19 nt, Artificial Sequence
  Description of Artificial Sequence: Synthetic oligonucleotide
cuuuuaguagagagcauaa

SEQ ID NO: 3285166 - RNA, 19 nt, Artificial Sequence
  Description of Artificial Sequence: Synthetic oligonucleotide
uaguagagagcauaaaaau

SEQ ID NO: 3285167 - RNA, 19 nt, Artificial Sequence
  Description of Artificial Sequence: Synthetic oligonucleotide
aguagagagcauaaaaaug

SEQ ID NO: 3285168 - RNA, 19 nt, Artificial Sequence
  Description of Artificial Sequence: Synthetic oligonucleotide
guagagagcauaaaaauga

SEQ ID NO: 3285169 - RNA, 19 nt, Artificial Sequence
  Description of Artificial Sequence: Synthetic oligonucleotide
uagagagcauaaaaaugau

SEQ ID NO: 3285170 - RNA, 19 nt, Artificial Sequence
  Description of Artificial Sequence: Synthetic oligonucleotide
agagagcauaaaaaugaua

SEQ ID NO: 3285171 - RNA, 19 nt, Artificial Sequence
  Description of Artificial Sequence: Synthetic oligonucleotide
gagagcauaaaaaugauaa

SEQ ID NO: 3285172 - RNA, 19 nt, Artificial Sequence
  Description of Artificial Sequence: Synthetic oligonucleotide
ugaccauuuuccuauaaug

SEQ ID NO: 3285173 - RNA, 19 nt, Artificial Sequence
  Description of Artificial Sequence: Synthetic oligonucleotide
cuguucucagaucccuugg

SEQ ID NO: 3285174 - RNA, 19 nt, Artificial Sequence
  Description of Artificial Sequence: Synthetic oligonucleotide
uguucucagaucccuugga

SEQ ID NO: 3285175 - RNA, 19 nt, Artificial Sequence
  Description of Artificial Sequence: Synthetic oligonucleotide
guucucagaucccuuggau

SEQ ID NO: 3285176 - RNA, 19 nt, Artificial Sequence
  Description of Artificial Sequence: Synthetic oligonucleotide
acagaugaggcagucugac

SEQ ID NO: 3285177 - RNA, 19 nt, Artificial Sequence
  Description of Artificial Sequence: Synthetic oligonucleotide
cagaugaggcagucugacu

SEQ ID NO: 3285178 - RNA, 19 nt, Artificial Sequence
  Description of Artificial Sequence: Synthetic oligonucleotide
agaugaggcagucugacug

SEQ ID NO: 3285179 - RNA, 19 nt, Artificial Sequence
  Description of Artificial Sequence: Synthetic oligonucleotide
agucugacuguccuuucua

SEQ ID NO: 3285180 - RNA, 19 nt, Artificial Sequence
  Description of Artificial Sequence: Synthetic oligonucleotide
gucugacuguccuuucuac

SEQ ID NO: 3285181 - RNA, 19 nt, Artificial Sequence
  Description of Artificial Sequence: Synthetic oligonucleotide
uucuacuugaaagauuaga

SEQ ID NO: 3285182 - RNA, 19 nt, Artificial Sequence
  Description of Artificial Sequence: Synthetic oligonucleotide
gauuagaauauguauccaa

SEQ ID NO: 3285183 - RNA, 19 nt, Artificial Sequence
  Description of Artificial Sequence: Synthetic oligonucleotide
aauauguauccaaauggca

SEQ ID NO: 3285184 - RNA, 19 nt, Artificial Sequence
  Description of Artificial Sequence: Synthetic oligonucleotide
auauguauccaaauggcau

SEQ ID NO: 3285185 - RNA, 19 nt, Artificial Sequence
  Description of Artificial Sequence: Synthetic oligonucleotide
auucacgugucacuuagca

SEQ ID NO: 3285186 - RNA, 19 nt, Artificial Sequence
  Description of Artificial Sequence: Synthetic oligonucleotide
agagcuuaguuugcgguuu

SEQ ID NO: 3285187 - RNA, 19 nt, Artificial Sequence
  Description of Artificial Sequence: Synthetic oligonucleotide
gagcuuaguuugcgguuuc

SEQ ID NO: 3285188 - RNA, 19 nt, Artificial Sequence
  Description of Artificial Sequence: Synthetic oligonucleotide
gacguggaaacaaguaucu

SEQ ID NO: 3285189 - RNA, 19 nt, Artificial Sequence
  Description of Artificial Sequence: Synthetic oligonucleotide
ucaacgggaugagguguua

SEQ ID NO: 3285190 - RNA, 19 nt, Artificial Sequence
  Description of Artificial Sequence: Synthetic oligonucleotide
caacgggaugagguguuac

SEQ ID NO: 3285191 - RNA, 19 nt, Artificial Sequence
  Description of Artificial Sequence: Synthetic oligonucleotide
cucccucuucaugcaaucu

SEQ ID NO: 3285192 - RNA, 19 nt, Artificial Sequence
  Description of Artificial Sequence: Synthetic oligonucleotide
ucccucuucaugcaaucug

SEQ ID NO: 3285193 - RNA, 19 nt, Artificial Sequence
  Description of Artificial Sequence: Synthetic oligonucleotide
ccucuucaugcaaucuggu

SEQ ID NO: 3285194 - RNA, 19 nt, Artificial Sequence
  Description of Artificial Sequence: Synthetic oligonucleotide
ucuggugagcaguggugca

SEQ ID NO: 3285195 - RNA, 19 nt, Artificial Sequence
  Description of Artificial Sequence: Synthetic oligonucleotide
cuggugagcaguggugcag

SEQ ID NO: 3285196 - RNA, 19 nt, Artificial Sequence
  Description of Artificial Sequence: Synthetic oligonucleotide
ugccaguuauauaacuucu

SEQ ID NO: 3285197 - RNA, 19 nt, Artificial Sequence
  Description of Artificial Sequence: Synthetic oligonucleotide
gccaguuauauaacuucuc

SEQ ID NO: 3285198 - RNA, 19 nt, Artificial Sequence
  Description of Artificial Sequence: Synthetic oligonucleotide
ccaguuauauaacuucucu

SEQ ID NO: 3285199 - RNA, 19 nt, Artificial Sequence
  Description of Artificial Sequence: Synthetic oligonucleotide
uaaaacaaggauaauacug

SEQ ID NO: 3285200 - RNA, 19 nt, Artificial Sequence
  Description of Artificial Sequence: Synthetic oligonucleotide
aaaacaaggauaauacuga

SEQ ID NO: 3285201 - RNA, 19 nt, Artificial Sequence
  Description of Artificial Sequence: Synthetic oligonucleotide
auacugaacuguaaggguu

SEQ ID NO: 3285202 - RNA, 19 nt, Artificial Sequence
  Description of Artificial Sequence: Synthetic oligonucleotide
uacugaacuguaaggguua

SEQ ID NO: 3285203 - RNA, 19 nt, Artificial Sequence
  Description of Artificial Sequence: Synthetic oligonucleotide
acugaacuguaaggguuag

SEQ ID NO: 3285204 - RNA, 19 nt, Artificial Sequence
  Description of Artificial Sequence: Synthetic oligonucleotide
gaaaaguacaugacacagu

SEQ ID NO: 3285205 - RNA, 19 nt, Artificial Sequence
  Description of Artificial Sequence: Synthetic oligonucleotide
aaaguacaugacacaguag

SEQ ID NO: 3285206 - RNA, 19 nt, Artificial Sequence
  Description of Artificial Sequence: Synthetic oligonucleotide
acaugacacaguaguugcu

SEQ ID NO: 3285207 - RNA, 19 nt, Artificial Sequence
  Description of Artificial Sequence: Synthetic oligonucleotide
guaguugcuugauaauagu

SEQ ID NO: 3285208 - RNA, 19 nt, Artificial Sequence
  Description of Artificial Sequence: Synthetic oligonucleotide
uuuaugaguugguuuuuuu

SEQ ID NO: 3285209 - RNA, 19 nt, Artificial Sequence
  Description of Artificial Sequence: Synthetic oligonucleotide
uuguauuuuauuaagagug

SEQ ID NO: 3285210 - RNA, 19 nt, Artificial Sequence
  Description of Artificial Sequence: Synthetic oligonucleotide
uaugguuuggcuauauguc

SEQ ID NO: 3285211 - RNA, 19 nt, Artificial Sequence
  Description of Artificial Sequence: Synthetic oligonucleotide
augguuuggcuauaugucc

SEQ ID NO: 3285212 - RNA, 19 nt, Artificial Sequence
  Description of Artificial Sequence: Synthetic oligonucleotide
ugguuuggcuauauguccc

SEQ ID NO: 3285213 - RNA, 19 nt, Artificial Sequence
  Description of Artificial Sequence: Synthetic oligonucleotide
gguuuggcuauaugucccc

SEQ ID NO: 3285214 - RNA, 19 nt, Artificial Sequence
  Description of Artificial Sequence: Synthetic oligonucleotide
aucucaucuugaauuauaa

SEQ ID NO: 3285215 - RNA, 19 nt, Artificial Sequence
  Description of Artificial Sequence: Synthetic oligonucleotide
cucaucuugaauuauaauc

SEQ ID NO: 3285216 - RNA, 19 nt, Artificial Sequence
  Description of Artificial Sequence: Synthetic oligonucleotide
ucaucuugaauuauaaucc

SEQ ID NO: 3285217 - RNA, 19 nt, Artificial Sequence
  Description of Artificial Sequence: Synthetic oligonucleotide
caucuugaauuauaauccc

SEQ ID NO: 3285218 - RNA, 19 nt, Artificial Sequence
  Description of Artificial Sequence: Synthetic oligonucleotide
aucuugaauuauaaucccc

SEQ ID NO: 3285219 - RNA, 19 nt, Artificial Sequence
  Description of Artificial Sequence: Synthetic oligonucleotide
ucuugaauuauaaucccca

SEQ ID NO: 3285220 - RNA, 19 nt, Artificial Sequence
  Description of Artificial Sequence: Synthetic oligonucleotide
cuugaauuauaauccccau

SEQ ID NO: 3285221 - RNA, 19 nt, Artificial Sequence
  Description of Artificial Sequence: Synthetic oligonucleotide
gacgggaggugauuggauc

SEQ ID NO: 3285222 - RNA, 19 nt, Artificial Sequence
  Description of Artificial Sequence: Synthetic oligonucleotide
acgggaggugauuggauca

SEQ ID NO: 3285223 - RNA, 19 nt, Artificial Sequence
  Description of Artificial Sequence: Synthetic oligonucleotide
gggaggugauuggaucacg

SEQ ID NO: 3285224 - RNA, 19 nt, Artificial Sequence
  Description of Artificial Sequence: Synthetic oligonucleotide
ggaggugauuggaucacgg

SEQ ID NO: 3285225 - RNA, 19 nt, Artificial Sequence
  Description of Artificial Sequence: Synthetic oligonucleotide
gaggugauuggaucacggg

SEQ ID NO: 3285226 - RNA, 19 nt, Artificial Sequence
  Description of Artificial Sequence: Synthetic oligonucleotide
aggugauuggaucacgggg

SEQ ID NO: 3285227 - RNA, 19 nt, Artificial Sequence
  Description of Artificial Sequence: Synthetic oligonucleotide
ggugauuggaucacggggg

SEQ ID NO: 3285228 - RNA, 19 nt, Artificial Sequence
  Description of Artificial Sequence: Synthetic oligonucleotide
gugauuggaucacgggggc

SEQ ID NO: 3285229 - RNA, 19 nt, Artificial Sequence
  Description of Artificial Sequence: Synthetic oligonucleotide
gaucacgggggcaguuguc

SEQ ID NO: 3285230 - RNA, 19 nt, Artificial Sequence
  Description of Artificial Sequence: Synthetic oligonucleotide
aucacgggggcaguugucc

SEQ ID NO: 3285231 - RNA, 19 nt, Artificial Sequence
  Description of Artificial Sequence: Synthetic oligonucleotide
ucacgggggcaguuguccc

SEQ ID NO: 3285232 - RNA, 19 nt, Artificial Sequence
  Description of Artificial Sequence: Synthetic oligonucleotide
caguuguccccaugcuguu

SEQ ID NO: 3285233 - RNA, 19 nt, Artificial Sequence
  Description of Artificial Sequence: Synthetic oligonucleotide
aguuguccccaugcuguuc

SEQ ID NO: 3285234 - RNA, 19 nt, Artificial Sequence
  Description of Artificial Sequence: Synthetic oligonucleotide
caugcuguucuugggauag

SEQ ID NO: 3285235 - RNA, 19 nt, Artificial Sequence
  Description of Artificial Sequence: Synthetic oligonucleotide
augcuguucuugggauagu

SEQ ID NO: 3285236 - RNA, 19 nt, Artificial Sequence
  Description of Artificial Sequence: Synthetic oligonucleotide
ugggauagugaguuaguuc

SEQ ID NO: 3285237 - RNA, 19 nt, Artificial Sequence
  Description of Artificial Sequence: Synthetic oligonucleotide
guguuugacaauuccuccu

SEQ ID NO: 3285238 - RNA, 19 nt, Artificial Sequence
  Description of Artificial Sequence: Synthetic oligonucleotide
uguuugacaauuccuccuu

SEQ ID NO: 3285239 - RNA, 19 nt, Artificial Sequence
  Description of Artificial Sequence: Synthetic oligonucleotide
guuuccugaggccuccuca

SEQ ID NO: 3285240 - RNA, 19 nt, Artificial Sequence
  Description of Artificial Sequence: Synthetic oligonucleotide
uuuccugaggccuccucag

SEQ ID NO: 3285241 - RNA, 19 nt, Artificial Sequence
  Description of Artificial Sequence: Synthetic oligonucleotide
uuccugaggccuccucagc

SEQ ID NO: 3285242 - RNA, 19 nt, Artificial Sequence
  Description of Artificial Sequence: Synthetic oligonucleotide
uauuaagccucuuuucuuu

SEQ ID NO: 3285243 - RNA, 19 nt, Artificial Sequence
  Description of Artificial Sequence: Synthetic oligonucleotide
gagcugcauaggaacuuua

SEQ ID NO: 3285244 - RNA, 19 nt, Artificial Sequence
  Description of Artificial Sequence: Synthetic oligonucleotide
ggagcugcauaggaacuuu

SEQ ID NO: 3285245 - RNA, 19 nt, Artificial Sequence
  Description of Artificial Sequence: Synthetic oligonucleotide
cggagcugcauaggaacuu

SEQ ID NO: 3285246 - RNA, 19 nt, Artificial Sequence
  Description of Artificial Sequence: Synthetic oligonucleotide
gcggagcugcauaggaacu

SEQ ID NO: 3285247 - RNA, 19 nt, Artificial Sequence
  Description of Artificial Sequence: Synthetic oligonucleotide
uuuccgaggaaaugaggcc

SEQ ID NO: 3285248 - RNA, 19 nt, Artificial Sequence
  Description of Artificial Sequence: Synthetic oligonucleotide
uuuuccgaggaaaugaggc

SEQ ID NO: 3285249 - RNA, 19 nt, Artificial Sequence
  Description of Artificial Sequence: Synthetic oligonucleotide
auuuuccgaggaaaugagg

SEQ ID NO: 3285250 - RNA, 19 nt, Artificial Sequence
  Description of Artificial Sequence: Synthetic oligonucleotide
uaggaggagggcguggcga

SEQ ID NO: 3285251 - RNA, 19 nt, Artificial Sequence
  Description of Artificial Sequence: Synthetic oligonucleotide
agcuuuaaagccggguagg

SEQ ID NO: 3285252 - RNA, 19 nt, Artificial Sequence
  Description of Artificial Sequence: Synthetic oligonucleotide
gcuagcuacguuccccgca

SEQ ID NO: 3285253 - RNA, 19 nt, Artificial Sequence
  Description of Artificial Sequence: Synthetic oligonucleotide
agcuagcuacguuccccgc

SEQ ID NO: 3285254 - RNA, 19 nt, Artificial Sequence
  Description of Artificial Sequence: Synthetic oligonucleotide
cagcuagcuacguuccccg

SEQ ID NO: 3285255 - RNA, 19 nt, Artificial Sequence
  Description of Artificial Sequence: Synthetic oligonucleotide
gcagcuagcuacguucccc

SEQ ID NO: 3285256 - RNA, 19 nt, Artificial Sequence
  Description of Artificial Sequence: Synthetic oligonucleotide
accagggggccauguagcu

SEQ ID NO: 3285257 - RNA, 19 nt, Artificial Sequence
  Description of Artificial Sequence: Synthetic oligonucleotide
guccagaauaaccugcaug

SEQ ID NO: 3285258 - RNA, 19 nt, Artificial Sequence
  Description of Artificial Sequence: Synthetic oligonucleotide
aauggcuucauaaagucca

SEQ ID NO: 3285259 - RNA, 19 nt, Artificial Sequence
  Description of Artificial Sequence: Synthetic oligonucleotide
uuuuuuugaaaucccaacu

SEQ ID NO: 3285260 - RNA, 19 nt, Artificial Sequence
  Description of Artificial Sequence: Synthetic oligonucleotide
auuuuuuugaaaucccaac

SEQ ID NO: 3285261 - RNA, 19 nt, Artificial Sequence
  Description of Artificial Sequence: Synthetic oligonucleotide
aauuuuuuugaaaucccaa

SEQ ID NO: 3285262 - RNA, 19 nt, Artificial Sequence
  Description of Artificial Sequence: Synthetic oligonucleotide
caauuuuuuugaaauccca

SEQ ID NO: 3285263 - RNA, 19 nt, Artificial Sequence
  Description of Artificial Sequence: Synthetic oligonucleotide
ucaauuuuuuugaaauccc

SEQ ID NO: 3285264 - RNA, 19 nt, Artificial Sequence
  Description of Artificial Sequence: Synthetic oligonucleotide
caacuuuucaauuuuuuug

SEQ ID NO: 3285265 - RNA, 19 nt, Artificial Sequence
  Description of Artificial Sequence: Synthetic oligonucleotide
ccaacuuuucaauuuuuuu

SEQ ID NO: 3285266 - RNA, 19 nt, Artificial Sequence
  Description of Artificial Sequence: Synthetic oligonucleotide
cuauacuccuccaacuuuu

SEQ ID NO: 3285267 - RNA, 19 nt, Artificial Sequence
  Description of Artificial Sequence: Synthetic oligonucleotide
cauucagacagaucagaaa

SEQ ID NO: 3285268 - RNA, 19 nt, Artificial Sequence
  Description of Artificial Sequence: Synthetic oligonucleotide
acauucagacagaucagaa

SEQ ID NO: 3285269 - RNA, 19 nt, Artificial Sequence
  Description of Artificial Sequence: Synthetic oligonucleotide
aacauucagacagaucaga

SEQ ID NO: 3285270 - RNA, 19 nt, Artificial Sequence
  Description of Artificial Sequence: Synthetic oligonucleotide
aaacauucagacagaucag

SEQ ID NO: 3285271 - RNA, 19 nt, Artificial Sequence
  Description of Artificial Sequence: Synthetic oligonucleotide
uaaacauucagacagauca

SEQ ID NO: 3285272 - RNA, 19 nt, Artificial Sequence
  Description of Artificial Sequence: Synthetic oligonucleotide
uuaaacauucagacagauc

SEQ ID NO: 3285273 - RNA, 19 nt, Artificial Sequence
  Description of Artificial Sequence: Synthetic oligonucleotide
auuaaacauucagacagau

SEQ ID NO: 3285274 - RNA, 19 nt, Artificial Sequence
  Description of Artificial Sequence: Synthetic oligonucleotide
ccccuuaguagagcaaauc

SEQ ID NO: 3285275 - RNA, 19 nt, Artificial Sequence
  Description of Artificial Sequence: Synthetic oligonucleotide
uccccuuaguagagcaaau

SEQ ID NO: 3285276 - RNA, 19 nt, Artificial Sequence
  Description of Artificial Sequence: Synthetic oligonucleotide
aaguuucaaaguuuugggc

SEQ ID NO: 3285277 - RNA, 19 nt, Artificial Sequence
  Description of Artificial Sequence: Synthetic oligonucleotide
ucuccaaagcaaguuucaa

SEQ ID NO: 3285278 - RNA, 19 nt, Artificial Sequence
  Description of Artificial Sequence: Synthetic oligonucleotide
uucuccaaagcaaguuuca

SEQ ID NO: 3285279 - RNA, 19 nt, Artificial Sequence
  Description of Artificial Sequence: Synthetic oligonucleotide
auaccuuucucuacaaucc

SEQ ID NO: 3285280 - RNA, 19 nt, Artificial Sequence
  Description of Artificial Sequence: Synthetic oligonucleotide
uauaccuuucucuacaauc

SEQ ID NO: 3285281 - RNA, 19 nt, Artificial Sequence
  Description of Artificial Sequence: Synthetic oligonucleotide
auccucaagaucuucuguu

SEQ ID NO: 3285282 - RNA, 19 nt, Artificial Sequence
  Description of Artificial Sequence: Synthetic oligonucleotide
augaauucucacuaagauu

SEQ ID NO: 3285283 - RNA, 19 nt, Artificial Sequence
  Description of Artificial Sequence: Synthetic oligonucleotide
guggacaugaauucucacu

SEQ ID NO: 3285284 - RNA, 19 nt, Artificial Sequence
  Description of Artificial Sequence: Synthetic oligonucleotide
guaucagacacuucugaag

SEQ ID NO: 3285285 - RNA, 19 nt, Artificial Sequence
  Description of Artificial Sequence: Synthetic oligonucleotide
uguaucagacacuucugaa

SEQ ID NO: 3285286 - RNA, 19 nt, Artificial Sequence
  Description of Artificial Sequence: Synthetic oligonucleotide
aaagcaagcucuaauuggu

SEQ ID NO: 3285287 - RNA, 19 nt, Artificial Sequence
  Description of Artificial Sequence: Synthetic oligonucleotide
auagcaggcaaagcaagcu

SEQ ID NO: 3285288 - RNA, 19 nt, Artificial Sequence
  Description of Artificial Sequence: Synthetic oligonucleotide
cauagcaggcaaagcaagc

SEQ ID NO: 3285289 - RNA, 19 nt, Artificial Sequence
  Description of Artificial Sequence: Synthetic oligonucleotide
auuguguuuuuuccuuuca

SEQ ID NO: 3285290 - RNA, 19 nt, Artificial Sequence
  Description of Artificial Sequence: Synthetic oligonucleotide
uauuguguuuuuuccuuuc

SEQ ID NO: 3285291 - RNA, 19 nt, Artificial Sequence
  Description of Artificial Sequence: Synthetic oligonucleotide
cuguaggagcacauauuau

SEQ ID NO: 3285292 - RNA, 19 nt, Artificial Sequence
  Description of Artificial Sequence: Synthetic oligonucleotide
uuuuuuaagaugauguuca

SEQ ID NO: 3285293 - RNA, 19 nt, Artificial Sequence
  Description of Artificial Sequence: Synthetic oligonucleotide
auuuuuuaagaugauguuc

SEQ ID NO: 3285294 - RNA, 19 nt, Artificial Sequence
  Description of Artificial Sequence: Synthetic oligonucleotide
uucgcaaaaaagacaacuu

SEQ ID NO: 3285295 - RNA, 19 nt, Artificial Sequence
  Description of Artificial Sequence: Synthetic oligonucleotide
ggaucugauucgcaaaaaa

SEQ ID NO: 3285296 - RNA, 19 nt, Artificial Sequence
  Description of Artificial Sequence: Synthetic oligonucleotide
gggaucugauucgcaaaaa

SEQ ID NO: 3285297 - RNA, 19 nt, Artificial Sequence
  Description of Artificial Sequence: Synthetic oligonucleotide
uacacugggaucugauucg

SEQ ID NO: 3285298 - RNA, 19 nt, Artificial Sequence
  Description of Artificial Sequence: Synthetic oligonucleotide
auacacugggaucugauuc

SEQ ID NO: 3285299 - RNA, 19 nt, Artificial Sequence
  Description of Artificial Sequence: Synthetic oligonucleotide
ugcuguucauacacuggga

SEQ ID NO: 3285300 - RNA, 19 nt, Artificial Sequence
  Description of Artificial Sequence: Synthetic oligonucleotide
cugcuguucauacacuggg

SEQ ID NO: 3285301 - RNA, 19 nt, Artificial Sequence
  Description of Artificial Sequence: Synthetic oligonucleotide
ucugcuguucauacacugg

SEQ ID NO: 3285302 - RNA, 19 nt, Artificial Sequence
  Description of Artificial Sequence: Synthetic oligonucleotide
cuguuccacugggacauuc

SEQ ID NO: 3285303 - RNA, 19 nt, Artificial Sequence
  Description of Artificial Sequence: Synthetic oligonucleotide
ucuguuccacugggacauu

SEQ ID NO: 3285304 - RNA, 19 nt, Artificial Sequence
  Description of Artificial Sequence: Synthetic oligonucleotide
aucguucccuuuuuaaggu

SEQ ID NO: 3285305 - RNA, 19 nt, Artificial Sequence
  Description of Artificial Sequence: Synthetic oligonucleotide
aaucguucccuuuuuaagg

SEQ ID NO: 3285306 - RNA, 19 nt, Artificial Sequence
  Description of Artificial Sequence: Synthetic oligonucleotide
cggguguuguuuacuagug

SEQ ID NO: 3285307 - RNA, 19 nt, Artificial Sequence
  Description of Artificial Sequence: Synthetic oligonucleotide
acggguguuguuuacuagu

SEQ ID NO: 3285308 - RNA, 19 nt, Artificial Sequence
  Description of Artificial Sequence: Synthetic oligonucleotide
uacggguguuguuuacuag

SEQ ID NO: 3285309 - RNA, 19 nt, Artificial Sequence
  Description of Artificial Sequence: Synthetic oligonucleotide
guacggguguuguuuacua

SEQ ID NO: 3285310 - RNA, 19 nt, Artificial Sequence
  Description of Artificial Sequence: Synthetic oligonucleotide
gaucauauuguacgggugu

SEQ ID NO: 3285311 - RNA, 19 nt, Artificial Sequence
  Description of Artificial Sequence: Synthetic oligonucleotide
cccaacaccaaccgaggca

SEQ ID NO: 3285312 - RNA, 19 nt, Artificial Sequence
  Description of Artificial Sequence: Synthetic oligonucleotide
aaacaacuugcuccaguuc

SEQ ID NO: 3285313 - RNA, 19 nt, Artificial Sequence
  Description of Artificial Sequence: Synthetic oligonucleotide
uaaacaacuugcuccaguu

SEQ ID NO: 3285314 - RNA, 19 nt, Artificial Sequence
  Description of Artificial Sequence: Synthetic oligonucleotide
cuuauaaacaacuugcucc

SEQ ID NO: 3285315 - RNA, 19 nt, Artificial Sequence
  Description of Artificial Sequence: Synthetic oligonucleotide
gcuuauaaacaacuugcuc

SEQ ID NO: 3285316 - RNA, 19 nt, Artificial Sequence
  Description of Artificial Sequence: Synthetic oligonucleotide
gggcuuauaaacaacuugc

SEQ ID NO: 3285317 - RNA, 19 nt, Artificial Sequence
  Description of Artificial Sequence: Synthetic oligonucleotide
acuucuggggcuuauaaac

SEQ ID NO: 3285318 - RNA, 19 nt, Artificial Sequence
  Description of Artificial Sequence: Synthetic oligonucleotide
aacuucuggggcuuauaaa

SEQ ID NO: 3285319 - RNA, 19 nt, Artificial Sequence
  Description of Artificial Sequence: Synthetic oligonucleotide
gauguauuuaaauuugucg

SEQ ID NO: 3285320 - RNA, 19 nt, Artificial Sequence
  Description of Artificial Sequence: Synthetic oligonucleotide
ugauguauuuaaauuuguc

SEQ ID NO: 3285321 - RNA, 19 nt, Artificial Sequence
  Description of Artificial Sequence: Synthetic oligonucleotide
ucagcugagcuaugaugua

SEQ ID NO: 3285322 - RNA, 19 nt, Artificial Sequence
  Description of Artificial Sequence: Synthetic oligonucleotide
cucugugucccucaucagc

SEQ ID NO: 3285323 - RNA, 19 nt, Artificial Sequence
  Description of Artificial Sequence: Synthetic oligonucleotide
gauaaguuuucgaggucuu

SEQ ID NO: 3285324 - RNA, 19 nt, Artificial Sequence
  Description of Artificial Sequence: Synthetic oligonucleotide
agauaaguuuucgaggucu

SEQ ID NO: 3285325 - RNA, 19 nt, Artificial Sequence
  Description of Artificial Sequence: Synthetic oligonucleotide
uuugaauuugagauaaguu

SEQ ID NO: 3285326 - RNA, 19 nt, Artificial Sequence
  Description of Artificial Sequence: Synthetic oligonucleotide
uuuugaauuugagauaagu

SEQ ID NO: 3285327 - RNA, 19 nt, Artificial Sequence
  Description of Artificial Sequence: Synthetic oligonucleotide
uucccuauuuugaauuuga

SEQ ID NO: 3285328 - RNA, 19 nt, Artificial Sequence
  Description of Artificial Sequence: Synthetic oligonucleotide
aagucuuucaaguaaucca

SEQ ID NO: 3285329 - RNA, 19 nt, Artificial Sequence
  Description of Artificial Sequence: Synthetic oligonucleotide
gcucggacauugcugaaga

SEQ ID NO: 3285330 - RNA, 19 nt, Artificial Sequence
  Description of Artificial Sequence: Synthetic oligonucleotide
caaucucaucgaauccugc

SEQ ID NO: 3285331 - RNA, 19 nt, Artificial Sequence
  Description of Artificial Sequence: Synthetic oligonucleotide
ucucugaguaagaucuugc

SEQ ID NO: 3285332 - RNA, 19 nt, Artificial Sequence
  Description of Artificial Sequence: Synthetic oligonucleotide
aucucugaguaagaucuug

SEQ ID NO: 3285333 - RNA, 19 nt, Artificial Sequence
  Description of Artificial Sequence: Synthetic oligonucleotide
aaucucugaguaagaucuu

SEQ ID NO: 3285334 - RNA, 19 nt, Artificial Sequence
  Description of Artificial Sequence: Synthetic oligonucleotide
gcuuuucuucaaaucucug

SEQ ID NO: 3285335 - RNA, 19 nt, Artificial Sequence
  Description of Artificial Sequence: Synthetic oligonucleotide
agcuuuucuucaaaucucu

SEQ ID NO: 3285336 - RNA, 19 nt, Artificial Sequence
  Description of Artificial Sequence: Synthetic oligonucleotide
cacuuucuaguuccugcag

SEQ ID NO: 3285337 - RNA, 19 nt, Artificial Sequence
  Description of Artificial Sequence: Synthetic oligonucleotide
uuaggauucucauugcugg

SEQ ID NO: 3285338 - RNA, 19 nt, Artificial Sequence
  Description of Artificial Sequence: Synthetic oligonucleotide
guuuaggauucucauugcu

SEQ ID NO: 3285339 - RNA, 19 nt, Artificial Sequence
  Description of Artificial Sequence: Synthetic oligonucleotide
ucuucuuguaagaugaagc

SEQ ID NO: 3285340 - RNA, 19 nt, Artificial Sequence
  Description of Artificial Sequence: Synthetic oligonucleotide
ucugguuuucacaaagaga

SEQ ID NO: 3285341 - RNA, 19 nt, Artificial Sequence
  Description of Artificial Sequence: Synthetic oligonucleotide
cucugguuuucacaaagag

SEQ ID NO: 3285342 - RNA, 19 nt, Artificial Sequence
  Description of Artificial Sequence: Synthetic oligonucleotide
aagcguccacaagugcucu

SEQ ID NO: 3285343 - RNA, 19 nt, Artificial Sequence
  Description of Artificial Sequence: Synthetic oligonucleotide
aaagcguccacaagugcuc

SEQ ID NO: 3285344 - RNA, 19 nt, Artificial Sequence
  Description of Artificial Sequence: Synthetic oligonucleotide
gguuuuagaaaacugaguu

SEQ ID NO: 3285345 - RNA, 19 nt, Artificial Sequence
  Description of Artificial Sequence: Synthetic oligonucleotide
agguuuuagaaaacugagu

SEQ ID NO: 3285346 - RNA, 19 nt, Artificial Sequence
  Description of Artificial Sequence: Synthetic oligonucleotide
cguccagucaauaugccag

SEQ ID NO: 3285347 - RNA, 19 nt, Artificial Sequence
  Description of Artificial Sequence: Synthetic oligonucleotide
acguccagucaauaugcca

SEQ ID NO: 3285348 - RNA, 19 nt, Artificial Sequence
  Description of Artificial Sequence: Synthetic oligonucleotide
cacguccagucaauaugcc

SEQ ID NO: 3285349 - RNA, 19 nt, Artificial Sequence
  Description of Artificial Sequence: Synthetic oligonucleotide
gccgggagggucauuccug

SEQ ID NO: 3285350 - RNA, 19 nt, Artificial Sequence
  Description of Artificial Sequence: Synthetic oligonucleotide
gugccgggagggucauucc

SEQ ID NO: 3285351 - RNA, 19 nt, Artificial Sequence
  Description of Artificial Sequence: Synthetic oligonucleotide
ugugccgggagggucauuc

SEQ ID NO: 3285352 - RNA, 19 nt, Artificial Sequence
  Description of Artificial Sequence: Synthetic oligonucleotide
auccaauauacacuucugu

SEQ ID NO: 3285353 - RNA, 19 nt, Artificial Sequence
  Description of Artificial Sequence: Synthetic oligonucleotide
gauugcacugugcaauguc

SEQ ID NO: 3285354 - RNA, 19 nt, Artificial Sequence
  Description of Artificial Sequence: Synthetic oligonucleotide
ggaugacaagauugcacug

SEQ ID NO: 3285355 - RNA, 19 nt, Artificial Sequence
  Description of Artificial Sequence: Synthetic oligonucleotide
cucauaaaggaugacaaga

SEQ ID NO: 3285356 - RNA, 19 nt, Artificial Sequence
  Description of Artificial Sequence: Synthetic oligonucleotide
cauuuugaugacauugccc

SEQ ID NO: 3285357 - RNA, 19 nt, Artificial Sequence
  Description of Artificial Sequence: Synthetic oligonucleotide
ucauuuugaugacauugcc

SEQ ID NO: 3285358 - RNA, 19 nt, Artificial Sequence
  Description of Artificial Sequence: Synthetic oligonucleotide
gucagaaggaagcacuugc

SEQ ID NO: 3285359 - RNA, 19 nt, Artificial Sequence
  Description of Artificial Sequence: Synthetic oligonucleotide
caauuacaccagcauuacu

SEQ ID NO: 3285360 - RNA, 19 nt, Artificial Sequence
  Description of Artificial Sequence: Synthetic oligonucleotide
cuucgucccaugucugaag

SEQ ID NO: 3285361 - RNA, 19 nt, Artificial Sequence
  Description of Artificial Sequence: Synthetic oligonucleotide
cccuaaauacugcuucguc

SEQ ID NO: 3285362 - RNA, 19 nt, Artificial Sequence
  Description of Artificial Sequence: Synthetic oligonucleotide
ucccuaaauacugcuucgu

SEQ ID NO: 3285363 - RNA, 19 nt, Artificial Sequence
  Description of Artificial Sequence: Synthetic oligonucleotide
ucucugaugaauuuuucau

SEQ ID NO: 3285364 - RNA, 19 nt, Artificial Sequence
  Description of Artificial Sequence: Synthetic oligonucleotide
aucucugaugaauuuuuca

SEQ ID NO: 3285365 - RNA, 19 nt, Artificial Sequence
  Description of Artificial Sequence: Synthetic oligonucleotide
uaucucugaugaauuuuuc

SEQ ID NO: 3285366 - RNA, 19 nt, Artificial Sequence
  Description of Artificial Sequence: Synthetic oligonucleotide
cuaucucugaugaauuuuu

SEQ ID NO: 3285367 - RNA, 19 nt, Artificial Sequence
  Description of Artificial Sequence: Synthetic oligonucleotide
auuuuccuuaucagguaca

SEQ ID NO: 3285368 - RNA, 19 nt, Artificial Sequence
  Description of Artificial Sequence: Synthetic oligonucleotide
uauuuuccuuaucagguac

SEQ ID NO: 3285369 - RNA, 19 nt, Artificial Sequence
  Description of Artificial Sequence: Synthetic oligonucleotide
cuaucacucuuacgucagc

SEQ ID NO: 3285370 - RNA, 19 nt, Artificial Sequence
  Description of Artificial Sequence: Synthetic oligonucleotide
ucuaucacucuuacgucag

SEQ ID NO: 3285371 - RNA, 19 nt, Artificial Sequence
  Description of Artificial Sequence: Synthetic oligonucleotide
cucuaucacucuuacguca

SEQ ID NO: 3285372 - RNA, 19 nt, Artificial Sequence
  Description of Artificial Sequence: Synthetic oligonucleotide
caagcacaguguaauggca

SEQ ID NO: 3285373 - RNA, 19 nt, Artificial Sequence
  Description of Artificial Sequence: Synthetic oligonucleotide
aauaucuuugcucuuuuuu

SEQ ID NO: 3285374 - RNA, 19 nt, Artificial Sequence
  Description of Artificial Sequence: Synthetic oligonucleotide
gaauaucuuugcucuuuuu

SEQ ID NO: 3285375 - RNA, 19 nt, Artificial Sequence
  Description of Artificial Sequence: Synthetic oligonucleotide
gucgggcacagaauaucuu

SEQ ID NO: 3285376 - RNA, 19 nt, Artificial Sequence
  Description of Artificial Sequence: Synthetic oligonucleotide
auggauuccccagucaugg

SEQ ID NO: 3285377 - RNA, 19 nt, Artificial Sequence
  Description of Artificial Sequence: Synthetic oligonucleotide
cuccaccacaaaacuuuca

SEQ ID NO: 3285378 - RNA, 19 nt, Artificial Sequence
  Description of Artificial Sequence: Synthetic oligonucleotide
ccuccaccacaaaacuuuc

SEQ ID NO: 3285379 - RNA, 19 nt, Artificial Sequence
  Description of Artificial Sequence: Synthetic oligonucleotide
gcaauauccuccaccacaa

SEQ ID NO: 3285380 - RNA, 19 nt, Artificial Sequence
  Description of Artificial Sequence: Synthetic oligonucleotide
uuccacuucgaguacagug

SEQ ID NO: 3285381 - RNA, 19 nt, Artificial Sequence
  Description of Artificial Sequence: Synthetic oligonucleotide
cuuccacuucgaguacagu

SEQ ID NO: 3285382 - RNA, 19 nt, Artificial Sequence
  Description of Artificial Sequence: Synthetic oligonucleotide
ccuuccacuucgaguacag

SEQ ID NO: 3285383 - RNA, 19 nt, Artificial Sequence
  Description of Artificial Sequence: Synthetic oligonucleotide
uccuuccacuucgaguaca

SEQ ID NO: 3285384 - RNA, 19 nt, Artificial Sequence
  Description of Artificial Sequence: Synthetic oligonucleotide
aaugguaucuucucaaaau

SEQ ID NO: 3285385 - RNA, 19 nt, Artificial Sequence
  Description of Artificial Sequence: Synthetic oligonucleotide
uuucugcuggaucaaaugg

SEQ ID NO: 3285386 - RNA, 19 nt, Artificial Sequence
  Description of Artificial Sequence: Synthetic oligonucleotide
uuauacccacuauguuugu

SEQ ID NO: 3285387 - RNA, 19 nt, Artificial Sequence
  Description of Artificial Sequence: Synthetic oligonucleotide
gcgauccaugauuauaccc

SEQ ID NO: 3285388 - RNA, 19 nt, Artificial Sequence
  Description of Artificial Sequence: Synthetic oligonucleotide
agcgauccaugauuauacc

SEQ ID NO: 3285389 - RNA, 19 nt, Artificial Sequence
  Description of Artificial Sequence: Synthetic oligonucleotide
ggguacaagcgauccauga

SEQ ID NO: 3285390 - RNA, 19 nt, Artificial Sequence
  Description of Artificial Sequence: Synthetic oligonucleotide
gggguacaagcgauccaug

SEQ ID NO: 3285391 - RNA, 19 nt, Artificial Sequence
  Description of Artificial Sequence: Synthetic oligonucleotide
agggguacaagcgauccau

SEQ ID NO: 3285392 - RNA, 19 nt, Artificial Sequence
  Description of Artificial Sequence: Synthetic oligonucleotide
cagggguacaagcgaucca

SEQ ID NO: 3285393 - RNA, 19 nt, Artificial Sequence
  Description of Artificial Sequence: Synthetic oligonucleotide
acagggguacaagcgaucc

SEQ ID NO: 3285394 - RNA, 19 nt, Artificial Sequence
  Description of Artificial Sequence: Synthetic oligonucleotide
uaauauaguacaaacugcu

SEQ ID NO: 3285395 - RNA, 19 nt, Artificial Sequence
  Description of Artificial Sequence: Synthetic oligonucleotide
auaauauaguacaaacugc

SEQ ID NO: 3285396 - RNA, 19 nt, Artificial Sequence
  Description of Artificial Sequence: Synthetic oligonucleotide
uauaauauaguacaaacug

SEQ ID NO: 3285397 - RNA, 19 nt, Artificial Sequence
  Description of Artificial Sequence: Synthetic oligonucleotide
ucacucauuugugcuuugc

SEQ ID NO: 3285398 - RNA, 19 nt, Artificial Sequence
  Description of Artificial Sequence: Synthetic oligonucleotide
aauuuuucccaaguacuau

SEQ ID NO: 3285399 - RNA, 19 nt, Artificial Sequence
  Description of Artificial Sequence: Synthetic oligonucleotide
aggcuagaaaugaggcuuu

SEQ ID NO: 3285400 - RNA, 19 nt, Artificial Sequence
  Description of Artificial Sequence: Synthetic oligonucleotide
guuggcaguugacucuaaa

SEQ ID NO: 3285401 - RNA, 19 nt, Artificial Sequence
  Description of Artificial Sequence: Synthetic oligonucleotide
uguuggcaguugacucuaa

SEQ ID NO: 3285402 - RNA, 19 nt, Artificial Sequence
  Description of Artificial Sequence: Synthetic oligonucleotide
uguguguuuguuggcaguu

SEQ ID NO: 3285403 - RNA, 19 nt, Artificial Sequence
  Description of Artificial Sequence: Synthetic oligonucleotide
auuccauucauucaucuau

SEQ ID NO: 3285404 - RNA, 19 nt, Artificial Sequence
  Description of Artificial Sequence: Synthetic oligonucleotide
cauuccauucauucaucua

SEQ ID NO: 3285405 - RNA, 19 nt, Artificial Sequence
  Description of Artificial Sequence: Synthetic oligonucleotide
guuaagggcaaaagccagu

SEQ ID NO: 3285406 - RNA, 19 nt, Artificial Sequence
  Description of Artificial Sequence: Synthetic oligonucleotide
uguuaagggcaaaagccag

SEQ ID NO: 3285407 - RNA, 19 nt, Artificial Sequence
  Description of Artificial Sequence: Synthetic oligonucleotide
uucaguagauuguuaaggg

SEQ ID NO: 3285408 - RNA, 19 nt, Artificial Sequence
  Description of Artificial Sequence: Synthetic oligonucleotide
aagaagugcccaguggauu

SEQ ID NO: 3285409 - RNA, 19 nt, Artificial Sequence
  Description of Artificial Sequence: Synthetic oligonucleotide
uaagaagugcccaguggau

SEQ ID NO: 3285410 - RNA, 19 nt, Artificial Sequence
  Description of Artificial Sequence: Synthetic oligonucleotide
uuaagaagugcccagugga

SEQ ID NO: 3285411 - RNA, 19 nt, Artificial Sequence
  Description of Artificial Sequence: Synthetic oligonucleotide
auagaagguuaagaagugc

SEQ ID NO: 3285412 - RNA, 19 nt, Artificial Sequence
  Description of Artificial Sequence: Synthetic oligonucleotide
ugcgcagaggucaaauaga

SEQ ID NO: 3285413 - RNA, 19 nt, Artificial Sequence
  Description of Artificial Sequence: Synthetic oligonucleotide
augcgcagaggucaaauag

SEQ ID NO: 3285414 - RNA, 19 nt, Artificial Sequence
  Description of Artificial Sequence: Synthetic oligonucleotide
aaaaaaagacuagaauaga

SEQ ID NO: 3285415 - RNA, 19 nt, Artificial Sequence
  Description of Artificial Sequence: Synthetic oligonucleotide
uaaaaaaagacuagaauag

SEQ ID NO: 3285416 - RNA, 19 nt, Artificial Sequence
  Description of Artificial Sequence: Synthetic oligonucleotide
caauaaaaaaagacuagaa

SEQ ID NO: 3285417 - RNA, 19 nt, Artificial Sequence
  Description of Artificial Sequence: Synthetic oligonucleotide
ucaauaaaaaaagacuaga

SEQ ID NO: 3285418 - RNA, 19 nt, Artificial Sequence
  Description of Artificial Sequence: Synthetic oligonucleotide
cucaauaaaaaaagacuag

SEQ ID NO: 3285419 - RNA, 19 nt, Artificial Sequence
  Description of Artificial Sequence: Synthetic oligonucleotide
acucaauaaaaaaagacua

SEQ ID NO: 3285420 - RNA, 19 nt, Artificial Sequence
  Description of Artificial Sequence: Synthetic oligonucleotide
gacucaauaaaaaaagacu

SEQ ID NO: 3285421 - RNA, 19 nt, Artificial Sequence
  Description of Artificial Sequence: Synthetic oligonucleotide
ggacucaauaaaaaaagac

SEQ ID NO: 3285422 - RNA, 19 nt, Artificial Sequence
  Description of Artificial Sequence: Synthetic oligonucleotide
aggacucaauaaaaaaaga

SEQ ID NO: 3285423 - RNA, 19 nt, Artificial Sequence
  Description of Artificial Sequence: Synthetic oligonucleotide
gaggacucaauaaaaaaag

SEQ ID NO: 3285424 - RNA, 19 nt, Artificial Sequence
  Description of Artificial Sequence: Synthetic oligonucleotide
ggaggacucaauaaaaaaa

SEQ ID NO: 3285425 - RNA, 19 nt, Artificial Sequence
  Description of Artificial Sequence: Synthetic oligonucleotide
gaggaggacucaauaaaaa

SEQ ID NO: 3285426 - RNA, 19 nt, Artificial Sequence
  Description of Artificial Sequence: Synthetic oligonucleotide
uugaacccuuggaagggau

SEQ ID NO: 3285427 - RNA, 19 nt, Artificial Sequence
  Description of Artificial Sequence: Synthetic oligonucleotide
auugaacccuuggaaggga

SEQ ID NO: 3285428 - RNA, 19 nt, Artificial Sequence
  Description of Artificial Sequence: Synthetic oligonucleotide
aguacauauaaccauuaca

SEQ ID NO: 3285429 - RNA, 19 nt, Artificial Sequence
  Description of Artificial Sequence: Synthetic oligonucleotide
gaguacauauaaccauuac

SEQ ID NO: 3285430 - RNA, 19 nt, Artificial Sequence
  Description of Artificial Sequence: Synthetic oligonucleotide
ugaguacauauaaccauua

SEQ ID NO: 3285431 - RNA, 19 nt, Artificial Sequence
  Description of Artificial Sequence: Synthetic oligonucleotide
acguugcuacaccaggaac

SEQ ID NO: 3285432 - RNA, 19 nt, Artificial Sequence
  Description of Artificial Sequence: Synthetic oligonucleotide
cacguugcuacaccaggaa

SEQ ID NO: 3285433 - RNA, 19 nt, Artificial Sequence
  Description of Artificial Sequence: Synthetic oligonucleotide
acacguugcuacaccagga

SEQ ID NO: 3285434 - RNA, 19 nt, Artificial Sequence
  Description of Artificial Sequence: Synthetic oligonucleotide
uucucuguguagccauacc

SEQ ID NO: 3285435 - RNA, 19 nt, Artificial Sequence
  Description of Artificial Sequence: Synthetic oligonucleotide
guucucuguguagccauac

SEQ ID NO: 3285436 - RNA, 19 nt, Artificial Sequence
  Description of Artificial Sequence: Synthetic oligonucleotide
agcauaaaaauggcuuuau

SEQ ID NO: 3285437 - RNA, 19 nt, Artificial Sequence
  Description of Artificial Sequence: Synthetic oligonucleotide
aagcauaaaaauggcuuua

SEQ ID NO: 3285438 - RNA, 19 nt, Artificial Sequence
  Description of Artificial Sequence: Synthetic oligonucleotide
ugcuacauacagcaacucu

SEQ ID NO: 3285439 - RNA, 19 nt, Artificial Sequence
  Description of Artificial Sequence: Synthetic oligonucleotide
uugcuacauacagcaacuc

SEQ ID NO: 3285440 - RNA, 19 nt, Artificial Sequence
  Description of Artificial Sequence: Synthetic oligonucleotide
auugcuacauacagcaacu

SEQ ID NO: 3285441 - RNA, 19 nt, Artificial Sequence
  Description of Artificial Sequence: Synthetic oligonucleotide
cugaccacuguagagugga

SEQ ID NO: 3285442 - RNA, 19 nt, Artificial Sequence
  Description of Artificial Sequence: Synthetic oligonucleotide
gcugaccacuguagagugg

SEQ ID NO: 3285443 - RNA, 19 nt, Artificial Sequence
  Description of Artificial Sequence: Synthetic oligonucleotide
cuaaaagcugaccacugua

SEQ ID NO: 3285444 - RNA, 19 nt, Artificial Sequence
  Description of Artificial Sequence: Synthetic oligonucleotide
cuacuaaaagcugaccacu

SEQ ID NO: 3285445 - RNA, 19 nt, Artificial Sequence
  Description of Artificial Sequence: Synthetic oligonucleotide
uaugcucucuacuaaaagc

SEQ ID NO: 3285446 - RNA, 19 nt, Artificial Sequence
  Description of Artificial Sequence: Synthetic oligonucleotide
uuaugcucucuacuaaaag

SEQ ID NO: 3285447 - RNA, 19 nt, Artificial Sequence
  Description of Artificial Sequence: Synthetic oligonucleotide
auuuuuaugcucucuacua

SEQ ID NO: 3285448 - RNA, 19 nt, Artificial Sequence
  Description of Artificial Sequence: Synthetic oligonucleotide
cauuuuuaugcucucuacu

SEQ ID NO: 3285449 - RNA, 19 nt, Artificial Sequence
  Description of Artificial Sequence: Synthetic oligonucleotide
ucauuuuuaugcucucuac

SEQ ID NO: 3285450 - RNA, 19 nt, Artificial Sequence
  Description of Artificial Sequence: Synthetic oligonucleotide
aucauuuuuaugcucucua

SEQ ID NO: 3285451 - RNA, 19 nt, Artificial Sequence
  Description of Artificial Sequence: Synthetic oligonucleotide
uaucauuuuuaugcucucu

SEQ ID NO: 3285452 - RNA, 19 nt, Artificial Sequence
  Description of Artificial Sequence: Synthetic oligonucleotide
uuaucauuuuuaugcucuc

SEQ ID NO: 3285453 - RNA, 19 nt, Artificial Sequence
  Description of Artificial Sequence: Synthetic oligonucleotide
cauuauaggaaaaugguca

SEQ ID NO: 3285454 - RNA, 19 nt, Artificial Sequence
  Description of Artificial Sequence: Synthetic oligonucleotide
ccaagggaucugagaacag

SEQ ID NO: 3285455 - RNA, 19 nt, Artificial Sequence
  Description of Artificial Sequence: Synthetic oligonucleotide
uccaagggaucugagaaca

SEQ ID NO: 3285456 - RNA, 19 nt, Artificial Sequence
  Description of Artificial Sequence: Synthetic oligonucleotide
auccaagggaucugagaac

SEQ ID NO: 3285457 - RNA, 19 nt, Artificial Sequence
  Description of Artificial Sequence: Synthetic oligonucleotide
gucagacugccucaucugu

SEQ ID NO: 3285458 - RNA, 19 nt, Artificial Sequence
  Description of Artificial Sequence: Synthetic oligonucleotide
agucagacugccucaucug

SEQ ID NO: 3285459 - RNA, 19 nt, Artificial Sequence
  Description of Artificial Sequence: Synthetic oligonucleotide
cagucagacugccucaucu

SEQ ID NO: 3285460 - RNA, 19 nt, Artificial Sequence
  Description of Artificial Sequence: Synthetic oligonucleotide
uagaaaggacagucagacu

SEQ ID NO: 3285461 - RNA, 19 nt, Artificial Sequence
  Description of Artificial Sequence: Synthetic oligonucleotide
guagaaaggacagucagac

SEQ ID NO: 3285462 - RNA, 19 nt, Artificial Sequence
  Description of Artificial Sequence: Synthetic oligonucleotide
ucuaaucuuucaaguagaa

SEQ ID NO: 3285463 - RNA, 19 nt, Artificial Sequence
  Description of Artificial Sequence: Synthetic oligonucleotide
uuggauacauauucuaauc

SEQ ID NO: 3285464 - RNA, 19 nt, Artificial Sequence
  Description of Artificial Sequence: Synthetic oligonucleotide
ugccauuuggauacauauu

SEQ ID NO: 3285465 - RNA, 19 nt, Artificial Sequence
  Description of Artificial Sequence: Synthetic oligonucleotide
augccauuuggauacauau

SEQ ID NO: 3285466 - RNA, 19 nt, Artificial Sequence
  Description of Artificial Sequence: Synthetic oligonucleotide
ugcuaagugacacgugaau

SEQ ID NO: 3285467 - RNA, 19 nt, Artificial Sequence
  Description of Artificial Sequence: Synthetic oligonucleotide
aaaccgcaaacuaagcucu

SEQ ID NO: 3285468 - RNA, 19 nt, Artificial Sequence
  Description of Artificial Sequence: Synthetic oligonucleotide
gaaaccgcaaacuaagcuc

SEQ ID NO: 3285469 - RNA, 19 nt, Artificial Sequence
  Description of Artificial Sequence: Synthetic oligonucleotide
agauacuuguuuccacguc

SEQ ID NO: 3285470 - RNA, 19 nt, Artificial Sequence
  Description of Artificial Sequence: Synthetic oligonucleotide
uaacaccucaucccguuga

SEQ ID NO: 3285471 - RNA, 19 nt, Artificial Sequence
  Description of Artificial Sequence: Synthetic oligonucleotide
guaacaccucaucccguug

SEQ ID NO: 3285472 - RNA, 19 nt, Artificial Sequence
  Description of Artificial Sequence: Synthetic oligonucleotide
agauugcaugaagagggag

SEQ ID NO: 3285473 - RNA, 19 nt, Artificial Sequence
  Description of Artificial Sequence: Synthetic oligonucleotide
cagauugcaugaagaggga

SEQ ID NO: 3285474 - RNA, 19 nt, Artificial Sequence
  Description of Artificial Sequence: Synthetic oligonucleotide
accagauugcaugaagagg

SEQ ID NO: 3285475 - RNA, 19 nt, Artificial Sequence
  Description of Artificial Sequence: Synthetic oligonucleotide
ugcaccacugcucaccaga

SEQ ID NO: 3285476 - RNA, 19 nt, Artificial Sequence
  Description of Artificial Sequence: Synthetic oligonucleotide
cugcaccacugcucaccag

SEQ ID NO: 3285477 - RNA, 19 nt, Artificial Sequence
  Description of Artificial Sequence: Synthetic oligonucleotide
agaaguuauauaacuggca

SEQ ID NO: 3285478 - RNA, 19 nt, Artificial Sequence
  Description of Artificial Sequence: Synthetic oligonucleotide
gagaaguuauauaacuggc

SEQ ID NO: 3285479 - RNA, 19 nt, Artificial Sequence
  Description of Artificial Sequence: Synthetic oligonucleotide
agagaaguuauauaacugg

SEQ ID NO: 3285480 - RNA, 19 nt, Artificial Sequence
  Description of Artificial Sequence: Synthetic oligonucleotide
caguauuauccuuguuuua

SEQ ID NO: 3285481 - RNA, 19 nt, Artificial Sequence
  Description of Artificial Sequence: Synthetic oligonucleotide
ucaguauuauccuuguuuu

SEQ ID NO: 3285482 - RNA, 19 nt, Artificial Sequence
  Description of Artificial Sequence: Synthetic oligonucleotide
aacccuuacaguucaguau

SEQ ID NO: 3285483 - RNA, 19 nt, Artificial Sequence
  Description of Artificial Sequence: Synthetic oligonucleotide
uaacccuuacaguucagua

SEQ ID NO: 3285484 - RNA, 19 nt, Artificial Sequence
  Description of Artificial Sequence: Synthetic oligonucleotide
cuaacccuuacaguucagu

SEQ ID NO: 3285485 - RNA, 19 nt, Artificial Sequence
  Description of Artificial Sequence: Synthetic oligonucleotide
acugugucauguacuuuuc

SEQ ID NO: 3285486 - RNA, 19 nt, Artificial Sequence
  Description of Artificial Sequence: Synthetic oligonucleotide
cuacugugucauguacuuu

SEQ ID NO: 3285487 - RNA, 19 nt, Artificial Sequence
  Description of Artificial Sequence: Synthetic oligonucleotide
agcaacuacugugucaugu

SEQ ID NO: 3285488 - RNA, 19 nt, Artificial Sequence
  Description of Artificial Sequence: Synthetic oligonucleotide
acuauuaucaagcaacuac

SEQ ID NO: 3285489 - RNA, 19 nt, Artificial Sequence
  Description of Artificial Sequence: Synthetic oligonucleotide
aaaaaaaccaacucauaaa

SEQ ID NO: 3285490 - RNA, 19 nt, Artificial Sequence
  Description of Artificial Sequence: Synthetic oligonucleotide
cacucuuaauaaaauacaa

SEQ ID NO: 3285491 - RNA, 19 nt, Artificial Sequence
  Description of Artificial Sequence: Synthetic oligonucleotide
gacauauagccaaaccaua

SEQ ID NO: 3285492 - RNA, 19 nt, Artificial Sequence
  Description of Artificial Sequence: Synthetic oligonucleotide
ggacauauagccaaaccau

SEQ ID NO: 3285493 - RNA, 19 nt, Artificial Sequence
  Description of Artificial Sequence: Synthetic oligonucleotide
gggacauauagccaaacca

SEQ ID NO: 3285494 - RNA, 19 nt, Artificial Sequence
  Description of Artificial Sequence: Synthetic oligonucleotide
ggggacauauagccaaacc

SEQ ID NO: 3285495 - RNA, 19 nt, Artificial Sequence
  Description of Artificial Sequence: Synthetic oligonucleotide
uuauaauucaagaugagau

SEQ ID NO: 3285496 - RNA, 19 nt, Artificial Sequence
  Description of Artificial Sequence: Synthetic oligonucleotide
gauuauaauucaagaugag

SEQ ID NO: 3285497 - RNA, 19 nt, Artificial Sequence
  Description of Artificial Sequence: Synthetic oligonucleotide
ggauuauaauucaagauga

SEQ ID NO: 3285498 - RNA, 19 nt, Artificial Sequence
  Description of Artificial Sequence: Synthetic oligonucleotide
gggauuauaauucaagaug

SEQ ID NO: 3285499 - RNA, 19 nt, Artificial Sequence
  Description of Artificial Sequence: Synthetic oligonucleotide
ggggauuauaauucaagau

SEQ ID NO: 3285500 - RNA, 19 nt, Artificial Sequence
  Description of Artificial Sequence: Synthetic oligonucleotide
uggggauuauaauucaaga

SEQ ID NO: 3285501 - RNA, 19 nt, Artificial Sequence
  Description of Artificial Sequence: Synthetic oligonucleotide
auggggauuauaauucaag

SEQ ID NO: 3285502 - RNA, 19 nt, Artificial Sequence
  Description of Artificial Sequence: Synthetic oligonucleotide
gauccaaucaccucccguc

SEQ ID NO: 3285503 - RNA, 19 nt, Artificial Sequence
  Description of Artificial Sequence: Synthetic oligonucleotide
ugauccaaucaccucccgu

SEQ ID NO: 3285504 - RNA, 19 nt, Artificial Sequence
  Description of Artificial Sequence: Synthetic oligonucleotide
cgugauccaaucaccuccc

SEQ ID NO: 3285505 - RNA, 19 nt, Artificial Sequence
  Description of Artificial Sequence: Synthetic oligonucleotide
ccgugauccaaucaccucc

SEQ ID NO: 3285506 - RNA, 19 nt, Artificial Sequence
  Description of Artificial Sequence: Synthetic oligonucleotide
cccgugauccaaucaccuc

SEQ ID NO: 3285507 - RNA, 19 nt, Artificial Sequence
  Description of Artificial Sequence: Synthetic oligonucleotide
ccccgugauccaaucaccu

SEQ ID NO: 3285508 - RNA, 19 nt, Artificial Sequence
  Description of Artificial Sequence: Synthetic oligonucleotide
cccccgugauccaaucacc

SEQ ID NO: 3285509 - RNA, 19 nt, Artificial Sequence
  Description of Artificial Sequence: Synthetic oligonucleotide
gcccccgugauccaaucac

SEQ ID NO: 3285510 - RNA, 19 nt, Artificial Sequence
  Description of Artificial Sequence: Synthetic oligonucleotide
gacaacugcccccgugauc

SEQ ID NO: 3285511 - RNA, 19 nt, Artificial Sequence
  Description of Artificial Sequence: Synthetic oligonucleotide
ggacaacugcccccgugau

SEQ ID NO: 3285512 - RNA, 19 nt, Artificial Sequence
  Description of Artificial Sequence: Synthetic oligonucleotide
gggacaacugcccccguga

SEQ ID NO: 3285513 - RNA, 19 nt, Artificial Sequence
  Description of Artificial Sequence: Synthetic oligonucleotide
aacagcauggggacaacug

SEQ ID NO: 3285514 - RNA, 19 nt, Artificial Sequence
  Description of Artificial Sequence: Synthetic oligonucleotide
gaacagcauggggacaacu

SEQ ID NO: 3285515 - RNA, 19 nt, Artificial Sequence
  Description of Artificial Sequence: Synthetic oligonucleotide
cuaucccaagaacagcaug

SEQ ID NO: 3285516 - RNA, 19 nt, Artificial Sequence
  Description of Artificial Sequence: Synthetic oligonucleotide
acuaucccaagaacagcau

SEQ ID NO: 3285517 - RNA, 19 nt, Artificial Sequence
  Description of Artificial Sequence: Synthetic oligonucleotide
gaacuaacucacuauccca

SEQ ID NO: 3285518 - RNA, 19 nt, Artificial Sequence
  Description of Artificial Sequence: Synthetic oligonucleotide
aggaggaauugucaaacac

SEQ ID NO: 3285519 - RNA, 19 nt, Artificial Sequence
  Description of Artificial Sequence: Synthetic oligonucleotide
aaggaggaauugucaaaca

SEQ ID NO: 3285520 - RNA, 19 nt, Artificial Sequence
  Description of Artificial Sequence: Synthetic oligonucleotide
ugaggaggccucaggaaac

SEQ ID NO: 3285521 - RNA, 19 nt, Artificial Sequence
  Description of Artificial Sequence: Synthetic oligonucleotide
cugaggaggccucaggaaa

SEQ ID NO: 3285522 - RNA, 19 nt, Artificial Sequence
  Description of Artificial Sequence: Synthetic oligonucleotide
gcugaggaggccucaggaa

SEQ ID NO: 3285523 - RNA, 19 nt, Artificial Sequence
  Description of Artificial Sequence: Synthetic oligonucleotide
aaagaaaagaggcuuaaua

SEQ ID NO: 3285524 - RNA, 19 nt, Artificial Sequence
  Description of Artificial Sequence: Synthetic oligonucleotide
auggcuggaaaugcuuacu

SEQ ID NO: 3285525 - RNA, 19 nt, Artificial Sequence
  Description of Artificial Sequence: Synthetic oligonucleotide
uggcuggaaaugcuuacuc

SEQ ID NO: 3285526 - RNA, 19 nt, Artificial Sequence
  Description of Artificial Sequence: Synthetic oligonucleotide
ggcuggaaaugcuuacucu

SEQ ID NO: 3285527 - RNA, 19 nt, Artificial Sequence
  Description of Artificial Sequence: Synthetic oligonucleotide
gcuggaaaugcuuacucug

SEQ ID NO: 3285528 - RNA, 19 nt, Artificial Sequence
  Description of Artificial Sequence: Synthetic oligonucleotide
cuggaaaugcuuacucuga

SEQ ID NO: 3285529 - RNA, 19 nt, Artificial Sequence
  Description of Artificial Sequence: Synthetic oligonucleotide
ggaaaugcuuacucugaug

SEQ ID NO: 3285530 - RNA, 19 nt, Artificial Sequence
  Description of Artificial Sequence: Synthetic oligonucleotide
gaaaugcuuacucugauga

SEQ ID NO: 3285531 - RNA, 19 nt, Artificial Sequence
  Description of Artificial Sequence: Synthetic oligonucleotide
aaaugcuuacucugaugag

SEQ ID NO: 3285532 - RNA, 19 nt, Artificial Sequence
  Description of Artificial Sequence: Synthetic oligonucleotide
augcuuacucugaugaggu

SEQ ID NO: 3285533 - RNA, 19 nt, Artificial Sequence
  Description of Artificial Sequence: Synthetic oligonucleotide
ugcuuacucugaugagguu

SEQ ID NO: 3285534 - RNA, 19 nt, Artificial Sequence
  Description of Artificial Sequence: Synthetic oligonucleotide
gcuuacucugaugagguuu

SEQ ID NO: 3285535 - RNA, 19 nt, Artificial Sequence
  Description of Artificial Sequence: Synthetic oligonucleotide
uuacucugaugagguuuug

SEQ ID NO: 3285536 - RNA, 19 nt, Artificial Sequence
  Description of Artificial Sequence: Synthetic oligonucleotide
acucugaugagguuuuggg

SEQ ID NO: 3285537 - RNA, 19 nt, Artificial Sequence
  Description of Artificial Sequence: Synthetic oligonucleotide
cucugaugagguuuuggga

SEQ ID NO: 3285538 - RNA, 19 nt, Artificial Sequence
  Description of Artificial Sequence: Synthetic oligonucleotide
ucugaugagguuuugggag

SEQ ID NO: 3285539 - RNA, 19 nt, Artificial Sequence
  Description of Artificial Sequence: Synthetic oligonucleotide
cugaugagguuuugggagc

SEQ ID NO: 3285540 - RNA, 19 nt, Artificial Sequence
  Description of Artificial Sequence: Synthetic oligonucleotide
ugaugagguuuugggagca

SEQ ID NO: 3285541 - RNA, 19 nt, Artificial Sequence
  Description of Artificial Sequence: Synthetic oligonucleotide
gaugagguuuugggagcaa

SEQ ID NO: 3285542 - RNA, 19 nt, Artificial Sequence
  Description of Artificial Sequence: Synthetic oligonucleotide
ugagguuuugggagcaacc

SEQ ID NO: 3285543 - RNA, 19 nt, Artificial Sequence
  Description of Artificial Sequence: Synthetic oligonucleotide
gagguuuugggagcaacca

SEQ ID NO: 3285544 - RNA, 19 nt, Artificial Sequence
  Description of Artificial Sequence: Synthetic oligonucleotide
agguuuugggagcaaccaa

SEQ ID NO: 3285545 - RNA, 19 nt, Artificial Sequence
  Description of Artificial Sequence: Synthetic oligonucleotide
gguuuugggagcaaccaac

SEQ ID NO: 3285546 - RNA, 19 nt, Artificial Sequence
  Description of Artificial Sequence: Synthetic oligonucleotide
guuuugggagcaaccaacu

SEQ ID NO: 3285547 - RNA, 19 nt, Artificial Sequence
  Description of Artificial Sequence: Synthetic oligonucleotide
ugggagcaaccaacugguu

SEQ ID NO: 3285548 - RNA, 19 nt, Artificial Sequence
  Description of Artificial Sequence: Synthetic oligonucleotide
gggagcaaccaacugguua

SEQ ID NO: 3285549 - RNA, 19 nt, Artificial Sequence
  Description of Artificial Sequence: Synthetic oligonucleotide
ggagcaaccaacugguuaa

SEQ ID NO: 3285550 - RNA, 19 nt, Artificial Sequence
  Description of Artificial Sequence: Synthetic oligonucleotide
gagcaaccaacugguuaaa

SEQ ID NO: 3285551 - RNA, 19 nt, Artificial Sequence
  Description of Artificial Sequence: Synthetic oligonucleotide
gcaaccaacugguuaaagg

SEQ ID NO: 3285552 - RNA, 19 nt, Artificial Sequence
  Description of Artificial Sequence: Synthetic oligonucleotide
ccaacugguuaaaggaaaa

SEQ ID NO: 3285553 - RNA, 19 nt, Artificial Sequence
  Description of Artificial Sequence: Synthetic oligonucleotide
aaaaguaaccaguuaguau

SEQ ID NO: 3285554 - RNA, 19 nt, Artificial Sequence
  Description of Artificial Sequence: Synthetic oligonucleotide
aaaguaaccaguuaguauu

SEQ ID NO: 3285555 - RNA, 19 nt, Artificial Sequence
  Description of Artificial Sequence: Synthetic oligonucleotide
aaguaaccaguuaguauuc

SEQ ID NO: 3285556 - RNA, 19 nt, Artificial Sequence
  Description of Artificial Sequence: Synthetic oligonucleotide
aguaaccaguuaguauucu

SEQ ID NO: 3285557 - RNA, 19 nt, Artificial Sequence
  Description of Artificial Sequence: Synthetic oligonucleotide
guaaccaguuaguauucuc

SEQ ID NO: 3285558 - RNA, 19 nt, Artificial Sequence
  Description of Artificial Sequence: Synthetic oligonucleotide
uaaccaguuaguauucuca

SEQ ID NO: 3285559 - RNA, 19 nt, Artificial Sequence
  Description of Artificial Sequence: Synthetic oligonucleotide
aaccaguuaguauucucau

SEQ ID NO: 3285560 - RNA, 19 nt, Artificial Sequence
  Description of Artificial Sequence: Synthetic oligonucleotide
aaugaagauguucaauuga

SEQ ID NO: 3285561 - RNA, 19 nt, Artificial Sequence
  Description of Artificial Sequence: Synthetic oligonucleotide
augaagauguucaauugaa

SEQ ID NO: 3285562 - RNA, 19 nt, Artificial Sequence
  Description of Artificial Sequence: Synthetic oligonucleotide
agauguucaauugaaugga

SEQ ID NO: 3285563 - RNA, 19 nt, Artificial Sequence
  Description of Artificial Sequence: Synthetic oligonucleotide
gauguucaauugaauggaa

SEQ ID NO: 3285564 - RNA, 19 nt, Artificial Sequence
  Description of Artificial Sequence: Synthetic oligonucleotide
auguucaauugaauggaaa

SEQ ID NO: 3285565 - RNA, 19 nt, Artificial Sequence
  Description of Artificial Sequence: Synthetic oligonucleotide
uucaauugaauggaaaaga

SEQ ID NO: 3285566 - RNA, 19 nt, Artificial Sequence
  Description of Artificial Sequence: Synthetic oligonucleotide
caauugaauggaaaagaua

SEQ ID NO: 3285567 - RNA, 19 nt, Artificial Sequence
  Description of Artificial Sequence: Synthetic oligonucleotide
uugaauggaaaagauaucg

SEQ ID NO: 3285568 - RNA, 19 nt, Artificial Sequence
  Description of Artificial Sequence: Synthetic oligonucleotide
ugaauggaaaagauaucgg

SEQ ID NO: 3285569 - RNA, 19 nt, Artificial Sequence
  Description of Artificial Sequence: Synthetic oligonucleotide
gaauggaaaagauaucgga

SEQ ID NO: 3285570 - RNA, 19 nt, Artificial Sequence
  Description of Artificial Sequence: Synthetic oligonucleotide
aauggaaaagauaucggau

SEQ ID NO: 3285571 - RNA, 19 nt, Artificial Sequence
  Description of Artificial Sequence: Synthetic oligonucleotide
auggaaaagauaucggaug

SEQ ID NO: 3285572 - RNA, 19 nt, Artificial Sequence
  Description of Artificial Sequence: Synthetic oligonucleotide
uggaaaagauaucggaugg

SEQ ID NO: 3285573 - RNA, 19 nt, Artificial Sequence
  Description of Artificial Sequence: Synthetic oligonucleotide
gaaaagauaucggauggaa

SEQ ID NO: 3285574 - RNA, 19 nt, Artificial Sequence
  Description of Artificial Sequence: Synthetic oligonucleotide
aaaagauaucggauggaau

SEQ ID NO: 3285575 - RNA, 19 nt, Artificial Sequence
  Description of Artificial Sequence: Synthetic oligonucleotide
aaagauaucggauggaaua

SEQ ID NO: 3285576 - RNA, 19 nt, Artificial Sequence
  Description of Artificial Sequence: Synthetic oligonucleotide
aagauaucggauggaauag

SEQ ID NO: 3285577 - RNA, 19 nt, Artificial Sequence
  Description of Artificial Sequence: Synthetic oligonucleotide
agauaucggauggaauagu

SEQ ID NO: 3285578 - RNA, 19 nt, Artificial Sequence
  Description of Artificial Sequence: Synthetic oligonucleotide
gauaucggauggaauaguu

SEQ ID NO: 3285579 - RNA, 19 nt, Artificial Sequence
  Description of Artificial Sequence: Synthetic oligonucleotide
auaucggauggaauaguua

SEQ ID NO: 3285580 - RNA, 19 nt, Artificial Sequence
  Description of Artificial Sequence: Synthetic oligonucleotide
uaucggauggaauaguuac

SEQ ID NO: 3285581 - RNA, 19 nt, Artificial Sequence
  Description of Artificial Sequence: Synthetic oligonucleotide
aucggauggaauaguuaca

SEQ ID NO: 3285582 - RNA, 19 nt, Artificial Sequence
  Description of Artificial Sequence: Synthetic oligonucleotide
ucggauggaauaguuacag

SEQ ID NO: 3285583 - RNA, 19 nt, Artificial Sequence
  Description of Artificial Sequence: Synthetic oligonucleotide
cggauggaauaguuacaga

SEQ ID NO: 3285584 - RNA, 19 nt, Artificial Sequence
  Description of Artificial Sequence: Synthetic oligonucleotide
ggauggaauaguuacagaa

SEQ ID NO: 3285585 - RNA, 19 nt, Artificial Sequence
  Description of Artificial Sequence: Synthetic oligonucleotide
gauggaauaguuacagaaa

SEQ ID NO: 3285586 - RNA, 19 nt, Artificial Sequence
  Description of Artificial Sequence: Synthetic oligonucleotide
auggaauaguuacagaaag

SEQ ID NO: 3285587 - RNA, 19 nt, Artificial Sequence
  Description of Artificial Sequence: Synthetic oligonucleotide
gaauaguuacagaaaggag

SEQ ID NO: 3285588 - RNA, 19 nt, Artificial Sequence
  Description of Artificial Sequence: Synthetic oligonucleotide
uuacagaaaggagcugcaa

SEQ ID NO: 3285589 - RNA, 19 nt, Artificial Sequence
  Description of Artificial Sequence: Synthetic oligonucleotide
uacagaaaggagcugcaag

SEQ ID NO: 3285590 - RNA, 19 nt, Artificial Sequence
  Description of Artificial Sequence: Synthetic oligonucleotide
agaaaggagcugcaagagg

SEQ ID NO: 3285591 - RNA, 19 nt, Artificial Sequence
  Description of Artificial Sequence: Synthetic oligonucleotide
gaaaggagcugcaagagga

SEQ ID NO: 3285592 - RNA, 19 nt, Artificial Sequence
  Description of Artificial Sequence: Synthetic oligonucleotide
aggagcugcaagaggacga

SEQ ID NO: 3285593 - RNA, 19 nt, Artificial Sequence
  Description of Artificial Sequence: Synthetic oligonucleotide
cugcaagaggacgagcuaa

SEQ ID NO: 3285594 - RNA, 19 nt, Artificial Sequence
  Description of Artificial Sequence: Synthetic oligonucleotide
ugcaagaggacgagcuaaa

SEQ ID NO: 3285595 - RNA, 19 nt, Artificial Sequence
  Description of Artificial Sequence: Synthetic oligonucleotide
caagaggacgagcuaaaau

SEQ ID NO: 3285596 - RNA, 19 nt, Artificial Sequence
  Description of Artificial Sequence: Synthetic oligonucleotide
aagaggacgagcuaaaauc

SEQ ID NO: 3285597 - RNA, 19 nt, Artificial Sequence
  Description of Artificial Sequence: Synthetic oligonucleotide
agaggacgagcuaaaaucu

SEQ ID NO: 3285598 - RNA, 19 nt, Artificial Sequence
  Description of Artificial Sequence: Synthetic oligonucleotide
gaggacgagcuaaaaucuu

SEQ ID NO: 3285599 - RNA, 19 nt, Artificial Sequence
  Description of Artificial Sequence: Synthetic oligonucleotide
aggacgagcuaaaaucuuu

SEQ ID NO: 3285600 - RNA, 19 nt, Artificial Sequence
  Description of Artificial Sequence: Synthetic oligonucleotide
ggacgagcuaaaaucuuua

SEQ ID NO: 3285601 - RNA, 19 nt, Artificial Sequence
  Description of Artificial Sequence: Synthetic oligonucleotide
gacgagcuaaaaucuuuac

SEQ ID NO: 3285602 - RNA, 19 nt, Artificial Sequence
  Description of Artificial Sequence: Synthetic oligonucleotide
acgagcuaaaaucuuuaca

SEQ ID NO: 3285603 - RNA, 19 nt, Artificial Sequence
  Description of Artificial Sequence: Synthetic oligonucleotide
cgagcuaaaaucuuuacaa

SEQ ID NO: 3285604 - RNA, 19 nt, Artificial Sequence
  Description of Artificial Sequence: Synthetic oligonucleotide
gagcuaaaaucuuuacaac

SEQ ID NO: 3285605 - RNA, 19 nt, Artificial Sequence
  Description of Artificial Sequence: Synthetic oligonucleotide
agcuaaaaucuuuacaacg

SEQ ID NO: 3285606 - RNA, 19 nt, Artificial Sequence
  Description of Artificial Sequence: Synthetic oligonucleotide
gcuaaaaucuuuacaacga

SEQ ID NO: 3285607 - RNA, 19 nt, Artificial Sequence
  Description of Artificial Sequence: Synthetic oligonucleotide
cuaaaaucuuuacaacgag

SEQ ID NO: 3285608 - RNA, 19 nt, Artificial Sequence
  Description of Artificial Sequence: Synthetic oligonucleotide
uaaaaucuuuacaacgagg

SEQ ID NO: 3285609 - RNA, 19 nt, Artificial Sequence
  Description of Artificial Sequence: Synthetic oligonucleotide
aaaaucuuuacaacgagga

SEQ ID NO: 3285610 - RNA, 19 nt, Artificial Sequence
  Description of Artificial Sequence: Synthetic oligonucleotide
aaaucuuuacaacgaggag

SEQ ID NO: 3285611 - RNA, 19 nt, Artificial Sequence
  Description of Artificial Sequence: Synthetic oligonucleotide
aaucuuuacaacgaggagc

SEQ ID NO: 3285612 - RNA, 19 nt, Artificial Sequence
  Description of Artificial Sequence: Synthetic oligonucleotide
aucuuuacaacgaggagcg

SEQ ID NO: 3285613 - RNA, 19 nt, Artificial Sequence
  Description of Artificial Sequence: Synthetic oligonucleotide
ucuuuacaacgaggagcgg

SEQ ID NO: 3285614 - RNA, 19 nt, Artificial Sequence
  Description of Artificial Sequence: Synthetic oligonucleotide
cuuuacaacgaggagcgga

SEQ ID NO: 3285615 - RNA, 19 nt, Artificial Sequence
  Description of Artificial Sequence: Synthetic oligonucleotide
uuuacaacgaggagcggaa

SEQ ID NO: 3285616 - RNA, 19 nt, Artificial Sequence
  Description of Artificial Sequence: Synthetic oligonucleotide
acaacgaggagcggaaacu

SEQ ID NO: 3285617 - RNA, 19 nt, Artificial Sequence
  Description of Artificial Sequence: Synthetic oligonucleotide
cgaggagcggaaacuaccu

SEQ ID NO: 3285618 - RNA, 19 nt, Artificial Sequence
  Description of Artificial Sequence: Synthetic oligonucleotide
gaggagcggaaacuaccug

SEQ ID NO: 3285619 - RNA, 19 nt, Artificial Sequence
  Description of Artificial Sequence: Synthetic oligonucleotide
aggagcggaaacuaccugg

SEQ ID NO: 3285620 - RNA, 19 nt, Artificial Sequence
  Description of Artificial Sequence: Synthetic oligonucleotide
gagcggaaacuaccuggga

SEQ ID NO: 3285621 - RNA, 19 nt, Artificial Sequence
  Description of Artificial Sequence: Synthetic oligonucleotide
agcggaaacuaccugggac

SEQ ID NO: 3285622 - RNA, 19 nt, Artificial Sequence
  Description of Artificial Sequence: Synthetic oligonucleotide
ggaaacuaccugggaccag

SEQ ID NO: 3285623 - RNA, 19 nt, Artificial Sequence
  Description of Artificial Sequence: Synthetic oligonucleotide
gaaacuaccugggaccaga

SEQ ID NO: 3285624 - RNA, 19 nt, Artificial Sequence
  Description of Artificial Sequence: Synthetic oligonucleotide
aaacuaccugggaccagag

SEQ ID NO: 3285625 - RNA, 19 nt, Artificial Sequence
  Description of Artificial Sequence: Synthetic oligonucleotide
aacuaccugggaccagagc

SEQ ID NO: 3285626 - RNA, 19 nt, Artificial Sequence
  Description of Artificial Sequence: Synthetic oligonucleotide
agagcgaggacauggaaug

SEQ ID NO: 3285627 - RNA, 19 nt, Artificial Sequence
  Description of Artificial Sequence: Synthetic oligonucleotide
gagcgaggacauggaaugg

SEQ ID NO: 3285628 - RNA, 19 nt, Artificial Sequence
  Description of Artificial Sequence: Synthetic oligonucleotide
agcgaggacauggaauggg

SEQ ID NO: 3285629 - RNA, 19 nt, Artificial Sequence
  Description of Artificial Sequence: Synthetic oligonucleotide
gcgaggacauggaauggga

SEQ ID NO: 3285630 - RNA, 19 nt, Artificial Sequence
  Description of Artificial Sequence: Synthetic oligonucleotide
cgaggacauggaaugggaa

SEQ ID NO: 3285631 - RNA, 19 nt, Artificial Sequence
  Description of Artificial Sequence: Synthetic oligonucleotide
ggacauggaaugggaaucu

SEQ ID NO: 3285632 - RNA, 19 nt, Artificial Sequence
  Description of Artificial Sequence: Synthetic oligonucleotide
gacauggaaugggaaucuu

SEQ ID NO: 3285633 - RNA, 19 nt, Artificial Sequence
  Description of Artificial Sequence: Synthetic oligonucleotide
acauggaaugggaaucuuc

SEQ ID NO: 3285634 - RNA, 19 nt, Artificial Sequence
  Description of Artificial Sequence: Synthetic oligonucleotide
uggaaugggaaucuucagu

SEQ ID NO: 3285635 - RNA, 19 nt, Artificial Sequence
  Description of Artificial Sequence: Synthetic oligonucleotide
ggaaugggaaucuucagug

SEQ ID NO: 3285636 - RNA, 19 nt, Artificial Sequence
  Description of Artificial Sequence: Synthetic oligonucleotide
augggaaucuucaguggau

SEQ ID NO: 3285637 - RNA, 19 nt, Artificial Sequence
  Description of Artificial Sequence: Synthetic oligonucleotide
gggaaucuucaguggauga

SEQ ID NO: 3285638 - RNA, 19 nt, Artificial Sequence
  Description of Artificial Sequence: Synthetic oligonucleotide
ggaaucuucaguggaugaa

SEQ ID NO: 3285639 - RNA, 19 nt, Artificial Sequence
  Description of Artificial Sequence: Synthetic oligonucleotide
ucuucaguggaugaacuaa

SEQ ID NO: 3285640 - RNA, 19 nt, Artificial Sequence
  Description of Artificial Sequence: Synthetic oligonucleotide
cuucaguggaugaacuaac

SEQ ID NO: 3285641 - RNA, 19 nt, Artificial Sequence
  Description of Artificial Sequence: Synthetic oligonucleotide
uucaguggaugaacuaacc

SEQ ID NO: 3285642 - RNA, 19 nt, Artificial Sequence
  Description of Artificial Sequence: Synthetic oligonucleotide
ucaguggaugaacuaacca

SEQ ID NO: 3285643 - RNA, 19 nt, Artificial Sequence
  Description of Artificial Sequence: Synthetic oligonucleotide
caguggaugaacuaaccac

SEQ ID NO: 3285644 - RNA, 19 nt, Artificial Sequence
  Description of Artificial Sequence: Synthetic oligonucleotide
aguggaugaacuaaccaca

SEQ ID NO: 3285645 - RNA, 19 nt, Artificial Sequence
  Description of Artificial Sequence: Synthetic oligonucleotide
guggaugaacuaaccacaa

SEQ ID NO: 3285646 - RNA, 19 nt, Artificial Sequence
  Description of Artificial Sequence: Synthetic oligonucleotide
uggaugaacuaaccacaaa

SEQ ID NO: 3285647 - RNA, 19 nt, Artificial Sequence
  Description of Artificial Sequence: Synthetic oligonucleotide
ggaugaacuaaccacaaag

SEQ ID NO: 3285648 - RNA, 19 nt, Artificial Sequence
  Description of Artificial Sequence: Synthetic oligonucleotide
gaugaacuaaccacaaagu

SEQ ID NO: 3285649 - RNA, 19 nt, Artificial Sequence
  Description of Artificial Sequence: Synthetic oligonucleotide
ugaacuaaccacaaaguuc

SEQ ID NO: 3285650 - RNA, 19 nt, Artificial Sequence
  Description of Artificial Sequence: Synthetic oligonucleotide
gaacuaaccacaaaguucg

SEQ ID NO: 3285651 - RNA, 19 nt, Artificial Sequence
  Description of Artificial Sequence: Synthetic oligonucleotide
aacuaaccacaaaguucgg

SEQ ID NO: 3285652 - RNA, 19 nt, Artificial Sequence
  Description of Artificial Sequence: Synthetic oligonucleotide
acuaaccacaaaguucggc

SEQ ID NO: 3285653 - RNA, 19 nt, Artificial Sequence
  Description of Artificial Sequence: Synthetic oligonucleotide
uaaccacaaaguucggcac

SEQ ID NO: 3285654 - RNA, 19 nt, Artificial Sequence
  Description of Artificial Sequence: Synthetic oligonucleotide
aaccacaaaguucggcacg

SEQ ID NO: 3285655 - RNA, 19 nt, Artificial Sequence
  Description of Artificial Sequence: Synthetic oligonucleotide
accacaaaguucggcacgc

SEQ ID NO: 3285656 - RNA, 19 nt, Artificial Sequence
  Description of Artificial Sequence: Synthetic oligonucleotide
ccacaaaguucggcacgcu

SEQ ID NO: 3285657 - RNA, 19 nt, Artificial Sequence
  Description of Artificial Sequence: Synthetic oligonucleotide
cacaaaguucggcacgcuc

SEQ ID NO: 3285658 - RNA, 19 nt, Artificial Sequence
  Description of Artificial Sequence: Synthetic oligonucleotide
caaaguucggcacgcucac

SEQ ID NO: 3285659 - RNA, 19 nt, Artificial Sequence
  Description of Artificial Sequence: Synthetic oligonucleotide
aaaguucggcacgcucacc

SEQ ID NO: 3285660 - RNA, 19 nt, Artificial Sequence
  Description of Artificial Sequence: Synthetic oligonucleotide
aaguucggcacgcucacca

SEQ ID NO: 3285661 - RNA, 19 nt, Artificial Sequence
  Description of Artificial Sequence: Synthetic oligonucleotide
aguucggcacgcucaccau

SEQ ID NO: 3285662 - RNA, 19 nt, Artificial Sequence
  Description of Artificial Sequence: Synthetic oligonucleotide
guucggcacgcucaccauu

SEQ ID NO: 3285663 - RNA, 19 nt, Artificial Sequence
  Description of Artificial Sequence: Synthetic oligonucleotide
uucggcacgcucaccauuc

SEQ ID NO: 3285664 - RNA, 19 nt, Artificial Sequence
  Description of Artificial Sequence: Synthetic oligonucleotide
ucggcacgcucaccauuca

SEQ ID NO: 3285665 - RNA, 19 nt, Artificial Sequence
  Description of Artificial Sequence: Synthetic oligonucleotide
gcacgcucaccauucacga

SEQ ID NO: 3285666 - RNA, 19 nt, Artificial Sequence
  Description of Artificial Sequence: Synthetic oligonucleotide
cacgcucaccauucacgac

SEQ ID NO: 3285667 - RNA, 19 nt, Artificial Sequence
  Description of Artificial Sequence: Synthetic oligonucleotide
acgcucaccauucacgaca

SEQ ID NO: 3285668 - RNA, 19 nt, Artificial Sequence
  Description of Artificial Sequence: Synthetic oligonucleotide
cgcucaccauucacgacac

SEQ ID NO: 3285669 - RNA, 19 nt, Artificial Sequence
  Description of Artificial Sequence: Synthetic oligonucleotide
gcucaccauucacgacacc

SEQ ID NO: 3285670 - RNA, 19 nt, Artificial Sequence
  Description of Artificial Sequence: Synthetic oligonucleotide
cucaccauucacgacaccg

SEQ ID NO: 3285671 - RNA, 19 nt, Artificial Sequence
  Description of Artificial Sequence: Synthetic oligonucleotide
ucaccauucacgacaccga

SEQ ID NO: 3285672 - RNA, 19 nt, Artificial Sequence
  Description of Artificial Sequence: Synthetic oligonucleotide
caccauucacgacaccgaa

SEQ ID NO: 3285673 - RNA, 19 nt, Artificial Sequence
  Description of Artificial Sequence: Synthetic oligonucleotide
accauucacgacaccgaaa

SEQ ID NO: 3285674 - RNA, 19 nt, Artificial Sequence
  Description of Artificial Sequence: Synthetic oligonucleotide
ccauucacgacaccgaaaa

SEQ ID NO: 3285675 - RNA, 19 nt, Artificial Sequence
  Description of Artificial Sequence: Synthetic oligonucleotide
cauucacgacaccgaaaag

SEQ ID NO: 3285676 - RNA, 19 nt, Artificial Sequence
  Description of Artificial Sequence: Synthetic oligonucleotide
auucacgacaccgaaaagu

SEQ ID NO: 3285677 - RNA, 19 nt, Artificial Sequence
  Description of Artificial Sequence: Synthetic oligonucleotide
uucacgacaccgaaaagua

SEQ ID NO: 3285678 - RNA, 19 nt, Artificial Sequence
  Description of Artificial Sequence: Synthetic oligonucleotide
ucacgacaccgaaaaguac

SEQ ID NO: 3285679 - RNA, 19 nt, Artificial Sequence
  Description of Artificial Sequence: Synthetic oligonucleotide
cacgacaccgaaaaguacg

SEQ ID NO: 3285680 - RNA, 19 nt, Artificial Sequence
  Description of Artificial Sequence: Synthetic oligonucleotide
acgacaccgaaaaguacgc

SEQ ID NO: 3285681 - RNA, 19 nt, Artificial Sequence
  Description of Artificial Sequence: Synthetic oligonucleotide
cgacaccgaaaaguacgcc

SEQ ID NO: 3285682 - RNA, 19 nt, Artificial Sequence
  Description of Artificial Sequence: Synthetic oligonucleotide
gacaccgaaaaguacgccu

SEQ ID NO: 3285683 - RNA, 19 nt, Artificial Sequence
  Description of Artificial Sequence: Synthetic oligonucleotide
acaccgaaaaguacgccuc

SEQ ID NO: 3285684 - RNA, 19 nt, Artificial Sequence
  Description of Artificial Sequence: Synthetic oligonucleotide
caccgaaaaguacgccucu

SEQ ID NO: 3285685 - RNA, 19 nt, Artificial Sequence
  Description of Artificial Sequence: Synthetic oligonucleotide
accgaaaaguacgccucuc

SEQ ID NO: 3285686 - RNA, 19 nt, Artificial Sequence
  Description of Artificial Sequence: Synthetic oligonucleotide
ccgaaaaguacgccucuca

SEQ ID NO: 3285687 - RNA, 19 nt, Artificial Sequence
  Description of Artificial Sequence: Synthetic oligonucleotide
cgaaaaguacgccucucag

SEQ ID NO: 3285688 - RNA, 19 nt, Artificial Sequence
  Description of Artificial Sequence: Synthetic oligonucleotide
aaaaguacgccucucagcc

SEQ ID NO: 3285689 - RNA, 19 nt, Artificial Sequence
  Description of Artificial Sequence: Synthetic oligonucleotide
aaaguacgccucucagcca

SEQ ID NO: 3285690 - RNA, 19 nt, Artificial Sequence
  Description of Artificial Sequence: Synthetic oligonucleotide
aaguacgccucucagccag

SEQ ID NO: 3285691 - RNA, 19 nt, Artificial Sequence
  Description of Artificial Sequence: Synthetic oligonucleotide
guacgccucucagccagaa

SEQ ID NO: 3285692 - RNA, 19 nt, Artificial Sequence
  Description of Artificial Sequence: Synthetic oligonucleotide
ccucucagccagaacuaug

SEQ ID NO: 3285693 - RNA, 19 nt, Artificial Sequence
  Description of Artificial Sequence: Synthetic oligonucleotide
cucagccagaacuaugcac

SEQ ID NO: 3285694 - RNA, 19 nt, Artificial Sequence
  Description of Artificial Sequence: Synthetic oligonucleotide
ucagccagaacuaugcacu

SEQ ID NO: 3285695 - RNA, 19 nt, Artificial Sequence
  Description of Artificial Sequence: Synthetic oligonucleotide
cagccagaacuaugcacua

SEQ ID NO: 3285696 - RNA, 19 nt, Artificial Sequence
  Description of Artificial Sequence: Synthetic oligonucleotide
agccagaacuaugcacuaa

SEQ ID NO: 3285697 - RNA, 19 nt, Artificial Sequence
  Description of Artificial Sequence: Synthetic oligonucleotide
gccagaacuaugcacuaac

SEQ ID NO: 3285698 - RNA, 19 nt, Artificial Sequence
  Description of Artificial Sequence: Synthetic oligonucleotide
ccagaacuaugcacuaacu

SEQ ID NO: 3285699 - RNA, 19 nt, Artificial Sequence
  Description of Artificial Sequence: Synthetic oligonucleotide
gaacuaugcacuaacucca

SEQ ID NO: 3285700 - RNA, 19 nt, Artificial Sequence
  Description of Artificial Sequence: Synthetic oligonucleotide
aacuaugcacuaacuccac

SEQ ID NO: 3285701 - RNA, 19 nt, Artificial Sequence
  Description of Artificial Sequence: Synthetic oligonucleotide
acuaugcacuaacuccacu

SEQ ID NO: 3285702 - RNA, 19 nt, Artificial Sequence
  Description of Artificial Sequence: Synthetic oligonucleotide
cuaugcacuaacuccacuu

SEQ ID NO: 3285703 - RNA, 19 nt, Artificial Sequence
  Description of Artificial Sequence: Synthetic oligonucleotide
uaugcacuaacuccacuug

SEQ ID NO: 3285704 - RNA, 19 nt, Artificial Sequence
  Description of Artificial Sequence: Synthetic oligonucleotide
augcacuaacuccacuugc

SEQ ID NO: 3285705 - RNA, 19 nt, Artificial Sequence
  Description of Artificial Sequence: Synthetic oligonucleotide
cacuaacuccacuugcauc

SEQ ID NO: 3285706 - RNA, 19 nt, Artificial Sequence
  Description of Artificial Sequence: Synthetic oligonucleotide
acuaacuccacuugcaucg

SEQ ID NO: 3285707 - RNA, 19 nt, Artificial Sequence
  Description of Artificial Sequence: Synthetic oligonucleotide
cuaacuccacuugcaucgg

SEQ ID NO: 3285708 - RNA, 19 nt, Artificial Sequence
  Description of Artificial Sequence: Synthetic oligonucleotide
uaacuccacuugcaucgga

SEQ ID NO: 3285709 - RNA, 19 nt, Artificial Sequence
  Description of Artificial Sequence: Synthetic oligonucleotide
aacuccacuugcaucggau

SEQ ID NO: 3285710 - RNA, 19 nt, Artificial Sequence
  Description of Artificial Sequence: Synthetic oligonucleotide
acuccacuugcaucggauc

SEQ ID NO: 3285711 - RNA, 19 nt, Artificial Sequence
  Description of Artificial Sequence: Synthetic oligonucleotide
cuccacuugcaucggaucu

SEQ ID NO: 3285712 - RNA, 19 nt, Artificial Sequence
  Description of Artificial Sequence: Synthetic oligonucleotide
uccacuugcaucggaucuc

SEQ ID NO: 3285713 - RNA, 19 nt, Artificial Sequence
  Description of Artificial Sequence: Synthetic oligonucleotide
ccacuugcaucggaucucg

SEQ ID NO: 3285714 - RNA, 19 nt, Artificial Sequence
  Description of Artificial Sequence: Synthetic oligonucleotide
cacuugcaucggaucucga

SEQ ID NO: 3285715 - RNA, 19 nt, Artificial Sequence
  Description of Artificial Sequence: Synthetic oligonucleotide
cuugcaucggaucucgagg

SEQ ID NO: 3285716 - RNA, 19 nt, Artificial Sequence
  Description of Artificial Sequence: Synthetic oligonucleotide
uugcaucggaucucgagga

SEQ ID NO: 3285717 - RNA, 19 nt, Artificial Sequence
  Description of Artificial Sequence: Synthetic oligonucleotide
ugcaucggaucucgaggac

SEQ ID NO: 3285718 - RNA, 19 nt, Artificial Sequence
  Description of Artificial Sequence: Synthetic oligonucleotide
caucggaucucgaggaccu

SEQ ID NO: 3285719 - RNA, 19 nt, Artificial Sequence
  Description of Artificial Sequence: Synthetic oligonucleotide
aucggaucucgaggaccug

SEQ ID NO: 3285720 - RNA, 19 nt, Artificial Sequence
  Description of Artificial Sequence: Synthetic oligonucleotide
cucgaggaccuggcuuuag

SEQ ID NO: 3285721 - RNA, 19 nt, Artificial Sequence
  Description of Artificial Sequence: Synthetic oligonucleotide
ucgaggaccuggcuuuaga

SEQ ID NO: 3285722 - RNA, 19 nt, Artificial Sequence
  Description of Artificial Sequence: Synthetic oligonucleotide
gaccuggcuuuagagccuu

SEQ ID NO: 3285723 - RNA, 19 nt, Artificial Sequence
  Description of Artificial Sequence: Synthetic oligonucleotide
cuggcuuuagagccuugga

SEQ ID NO: 3285724 - RNA, 19 nt, Artificial Sequence
  Description of Artificial Sequence: Synthetic oligonucleotide
uggcuuuagagccuuggag

SEQ ID NO: 3285725 - RNA, 19 nt, Artificial Sequence
  Description of Artificial Sequence: Synthetic oligonucleotide
cuuuagagccuuggagcac

SEQ ID NO: 3285726 - RNA, 19 nt, Artificial Sequence
  Description of Artificial Sequence: Synthetic oligonucleotide
uuuagagccuuggagcaca

SEQ ID NO: 3285727 - RNA, 19 nt, Artificial Sequence
  Description of Artificial Sequence: Synthetic oligonucleotide
agagccuuggagcacacca

SEQ ID NO: 3285728 - RNA, 19 nt, Artificial Sequence
  Description of Artificial Sequence: Synthetic oligonucleotide
gccuuggagcacaccaaau

SEQ ID NO: 3285729 - RNA, 19 nt, Artificial Sequence
  Description of Artificial Sequence: Synthetic oligonucleotide
cuuggagcacaccaaauac

SEQ ID NO: 3285730 - RNA, 19 nt, Artificial Sequence
  Description of Artificial Sequence: Synthetic oligonucleotide
uuggagcacaccaaauacu

SEQ ID NO: 3285731 - RNA, 19 nt, Artificial Sequence
  Description of Artificial Sequence: Synthetic oligonucleotide
uggagcacaccaaauacuc

SEQ ID NO: 3285732 - RNA, 19 nt, Artificial Sequence
  Description of Artificial Sequence: Synthetic oligonucleotide
ggagcacaccaaauacucc

SEQ ID NO: 3285733 - RNA, 19 nt, Artificial Sequence
  Description of Artificial Sequence: Synthetic oligonucleotide
agcacaccaaauacuccug

SEQ ID NO: 3285734 - RNA, 19 nt, Artificial Sequence
  Description of Artificial Sequence: Synthetic oligonucleotide
gcacaccaaauacuccugu

SEQ ID NO: 3285735 - RNA, 19 nt, Artificial Sequence
  Description of Artificial Sequence: Synthetic oligonucleotide
cacaccaaauacuccuguu

SEQ ID NO: 3285736 - RNA, 19 nt, Artificial Sequence
  Description of Artificial Sequence: Synthetic oligonucleotide
acaccaaauacuccuguug

SEQ ID NO: 3285737 - RNA, 19 nt, Artificial Sequence
  Description of Artificial Sequence: Synthetic oligonucleotide
caccaaauacuccuguugc

SEQ ID NO: 3285738 - RNA, 19 nt, Artificial Sequence
  Description of Artificial Sequence: Synthetic oligonucleotide
accaaauacuccuguugcg

SEQ ID NO: 3285739 - RNA, 19 nt, Artificial Sequence
  Description of Artificial Sequence: Synthetic oligonucleotide
ccaaauacuccuguugcgg

SEQ ID NO: 3285740 - RNA, 19 nt, Artificial Sequence
  Description of Artificial Sequence: Synthetic oligonucleotide
caaauacuccuguugcggg

SEQ ID NO: 3285741 - RNA, 19 nt, Artificial Sequence
  Description of Artificial Sequence: Synthetic oligonucleotide
aaauacuccuguugcgggc

SEQ ID NO: 3285742 - RNA, 19 nt, Artificial Sequence
  Description of Artificial Sequence: Synthetic oligonucleotide
aauacuccuguugcgggca

SEQ ID NO: 3285743 - RNA, 19 nt, Artificial Sequence
  Description of Artificial Sequence: Synthetic oligonucleotide
auacuccuguugcgggcac

SEQ ID NO: 3285744 - RNA, 19 nt, Artificial Sequence
  Description of Artificial Sequence: Synthetic oligonucleotide
uacuccuguugcgggcacu

SEQ ID NO: 3285745 - RNA, 19 nt, Artificial Sequence
  Description of Artificial Sequence: Synthetic oligonucleotide
uguugcgggcacugcagaa

SEQ ID NO: 3285746 - RNA, 19 nt, Artificial Sequence
  Description of Artificial Sequence: Synthetic oligonucleotide
guugcgggcacugcagaaa

SEQ ID NO: 3285747 - RNA, 19 nt, Artificial Sequence
  Description of Artificial Sequence: Synthetic oligonucleotide
cacugcagaaacccagaac

SEQ ID NO: 3285748 - RNA, 19 nt, Artificial Sequence
  Description of Artificial Sequence: Synthetic oligonucleotide
agaaacccagaacacuggg

SEQ ID NO: 3285749 - RNA, 19 nt, Artificial Sequence
  Description of Artificial Sequence: Synthetic oligonucleotide
aaacccagaacacugggga

SEQ ID NO: 3285750 - RNA, 19 nt, Artificial Sequence
  Description of Artificial Sequence: Synthetic oligonucleotide
aacccagaacacuggggaa

SEQ ID NO: 3285751 - RNA, 19 nt, Artificial Sequence
  Description of Artificial Sequence: Synthetic oligonucleotide
acccagaacacuggggaag

SEQ ID NO: 3285752 - RNA, 19 nt, Artificial Sequence
  Description of Artificial Sequence: Synthetic oligonucleotide
aacacuggggaagcugguu

SEQ ID NO: 3285753 - RNA, 19 nt, Artificial Sequence
  Description of Artificial Sequence: Synthetic oligonucleotide
acacuggggaagcugguuc

SEQ ID NO: 3285754 - RNA, 19 nt, Artificial Sequence
  Description of Artificial Sequence: Synthetic oligonucleotide
cuggggaagcugguuccaa

SEQ ID NO: 3285755 - RNA, 19 nt, Artificial Sequence
  Description of Artificial Sequence: Synthetic oligonucleotide
uggggaagcugguuccaaa

SEQ ID NO: 3285756 - RNA, 19 nt, Artificial Sequence
  Description of Artificial Sequence: Synthetic oligonucleotide
gggaagcugguuccaaagc

SEQ ID NO: 3285757 - RNA, 19 nt, Artificial Sequence
  Description of Artificial Sequence: Synthetic oligonucleotide
ggaagcugguuccaaagcc

SEQ ID NO: 3285758 - RNA, 19 nt, Artificial Sequence
  Description of Artificial Sequence: Synthetic oligonucleotide
gguuccaaagccugccaag

SEQ ID NO: 3285759 - RNA, 19 nt, Artificial Sequence
  Description of Artificial Sequence: Synthetic oligonucleotide
aagccugccaagaugguca

SEQ ID NO: 3285760 - RNA, 19 nt, Artificial Sequence
  Description of Artificial Sequence: Synthetic oligonucleotide
agccugccaagauggucaa

SEQ ID NO: 3285761 - RNA, 19 nt, Artificial Sequence
  Description of Artificial Sequence: Synthetic oligonucleotide
ccaagauggucaacugagc

SEQ ID NO: 3285762 - RNA, 19 nt, Artificial Sequence
  Description of Artificial Sequence: Synthetic oligonucleotide
caagauggucaacugagcc

SEQ ID NO: 3285763 - RNA, 19 nt, Artificial Sequence
  Description of Artificial Sequence: Synthetic oligonucleotide
aagauggucaacugagccc

SEQ ID NO: 3285764 - RNA, 19 nt, Artificial Sequence
  Description of Artificial Sequence: Synthetic oligonucleotide
agauggucaacugagccca

SEQ ID NO: 3285765 - RNA, 19 nt, Artificial Sequence
  Description of Artificial Sequence: Synthetic oligonucleotide
gauggucaacugagcccaa

SEQ ID NO: 3285766 - RNA, 19 nt, Artificial Sequence
  Description of Artificial Sequence: Synthetic oligonucleotide
ggucaacugagcccaacuu

SEQ ID NO: 3285767 - RNA, 19 nt, Artificial Sequence
  Description of Artificial Sequence: Synthetic oligonucleotide
gucaacugagcccaacuug

SEQ ID NO: 3285768 - RNA, 19 nt, Artificial Sequence
  Description of Artificial Sequence: Synthetic oligonucleotide
caacugagcccaacuuggu

SEQ ID NO: 3285769 - RNA, 19 nt, Artificial Sequence
  Description of Artificial Sequence: Synthetic oligonucleotide
aacugagcccaacuugguc

SEQ ID NO: 3285770 - RNA, 19 nt, Artificial Sequence
  Description of Artificial Sequence: Synthetic oligonucleotide
acugagcccaacuugguca

SEQ ID NO: 3285771 - RNA, 19 nt, Artificial Sequence
  Description of Artificial Sequence: Synthetic oligonucleotide
cugagcccaacuuggucag

SEQ ID NO: 3285772 - RNA, 19 nt, Artificial Sequence
  Description of Artificial Sequence: Synthetic oligonucleotide
ugagcccaacuuggucaga

SEQ ID NO: 3285773 - RNA, 19 nt, Artificial Sequence
  Description of Artificial Sequence: Synthetic oligonucleotide
gagcccaacuuggucagag

SEQ ID NO: 3285774 - RNA, 19 nt, Artificial Sequence
  Description of Artificial Sequence: Synthetic oligonucleotide
agcccaacuuggucagaga

SEQ ID NO: 3285775 - RNA, 19 nt, Artificial Sequence
  Description of Artificial Sequence: Synthetic oligonucleotide
cccaacuuggucagagauc

SEQ ID NO: 3285776 - RNA, 19 nt, Artificial Sequence
  Description of Artificial Sequence: Synthetic oligonucleotide
ccaacuuggucagagaucg

SEQ ID NO: 3285777 - RNA, 19 nt, Artificial Sequence
  Description of Artificial Sequence: Synthetic oligonucleotide
caacuuggucagagaucga

SEQ ID NO: 3285778 - RNA, 19 nt, Artificial Sequence
  Description of Artificial Sequence: Synthetic oligonucleotide
aacuuggucagagaucgag

SEQ ID NO: 3285779 - RNA, 19 nt, Artificial Sequence
  Description of Artificial Sequence: Synthetic oligonucleotide
acuuggucagagaucgagg

SEQ ID NO: 3285780 - RNA, 19 nt, Artificial Sequence
  Description of Artificial Sequence: Synthetic oligonucleotide
cuuggucagagaucgagga

SEQ ID NO: 3285781 - RNA, 19 nt, Artificial Sequence
  Description of Artificial Sequence: Synthetic oligonucleotide
uuggucagagaucgaggag

SEQ ID NO: 3285782 - RNA, 19 nt, Artificial Sequence
  Description of Artificial Sequence: Synthetic oligonucleotide
uggucagagaucgaggagg

SEQ ID NO: 3285783 - RNA, 19 nt, Artificial Sequence
  Description of Artificial Sequence: Synthetic oligonucleotide
cagagaucgaggaggauuu

SEQ ID NO: 3285784 - RNA, 19 nt, Artificial Sequence
  Description of Artificial Sequence: Synthetic oligonucleotide
agagaucgaggaggauuug

SEQ ID NO: 3285785 - RNA, 19 nt, Artificial Sequence
  Description of Artificial Sequence: Synthetic oligonucleotide
gagaucgaggaggauuuga

SEQ ID NO: 3285786 - RNA, 19 nt, Artificial Sequence
  Description of Artificial Sequence: Synthetic oligonucleotide
agaucgaggaggauuugag

SEQ ID NO: 3285787 - RNA, 19 nt, Artificial Sequence
  Description of Artificial Sequence: Synthetic oligonucleotide
gaucgaggaggauuugaga

SEQ ID NO: 3285788 - RNA, 19 nt, Artificial Sequence
  Description of Artificial Sequence: Synthetic oligonucleotide
aucgaggaggauuugagag

SEQ ID NO: 3285789 - RNA, 19 nt, Artificial Sequence
  Description of Artificial Sequence: Synthetic oligonucleotide
ucgaggaggauuugagagc

SEQ ID NO: 3285790 - RNA, 19 nt, Artificial Sequence
  Description of Artificial Sequence: Synthetic oligonucleotide
cgaggaggauuugagagcg

SEQ ID NO: 3285791 - RNA, 19 nt, Artificial Sequence
  Description of Artificial Sequence: Synthetic oligonucleotide
gaggaggauuugagagcgu

SEQ ID NO: 3285792 - RNA, 19 nt, Artificial Sequence
  Description of Artificial Sequence: Synthetic oligonucleotide
aggaggauuugagagcgug

SEQ ID NO: 3285793 - RNA, 19 nt, Artificial Sequence
  Description of Artificial Sequence: Synthetic oligonucleotide
ggaggauuugagagcgugc

SEQ ID NO: 3285794 - RNA, 19 nt, Artificial Sequence
  Description of Artificial Sequence: Synthetic oligonucleotide
aggauuugagagcgugcuu

SEQ ID NO: 3285795 - RNA, 19 nt, Artificial Sequence
  Description of Artificial Sequence: Synthetic oligonucleotide
ggauuugagagcgugcuuc

SEQ ID NO: 3285796 - RNA, 19 nt, Artificial Sequence
  Description of Artificial Sequence: Synthetic oligonucleotide
gauuugagagcgugcuucg

SEQ ID NO: 3285797 - RNA, 19 nt, Artificial Sequence
  Description of Artificial Sequence: Synthetic oligonucleotide
auuugagagcgugcuucgg

SEQ ID NO: 3285798 - RNA, 19 nt, Artificial Sequence
  Description of Artificial Sequence: Synthetic oligonucleotide
uuugagagcgugcuucggu

SEQ ID NO: 3285799 - RNA, 19 nt, Artificial Sequence
  Description of Artificial Sequence: Synthetic oligonucleotide
uugagagcgugcuucggug

SEQ ID NO: 3285800 - RNA, 19 nt, Artificial Sequence
  Description of Artificial Sequence: Synthetic oligonucleotide
uucggugcggaaccguuga

SEQ ID NO: 3285801 - RNA, 19 nt, Artificial Sequence
  Description of Artificial Sequence: Synthetic oligonucleotide
ucggugcggaaccguugaa

SEQ ID NO: 3285802 - RNA, 19 nt, Artificial Sequence
  Description of Artificial Sequence: Synthetic oligonucleotide
ggugcggaaccguugaaga

SEQ ID NO: 3285803 - RNA, 19 nt, Artificial Sequence
  Description of Artificial Sequence: Synthetic oligonucleotide
gugcggaaccguugaagaa

SEQ ID NO: 3285804 - RNA, 19 nt, Artificial Sequence
  Description of Artificial Sequence: Synthetic oligonucleotide
ugcggaaccguugaagaaa

SEQ ID NO: 3285805 - RNA, 19 nt, Artificial Sequence
  Description of Artificial Sequence: Synthetic oligonucleotide
cggaaccguugaagaaaga

SEQ ID NO: 3285806 - RNA, 19 nt, Artificial Sequence
  Description of Artificial Sequence: Synthetic oligonucleotide
ggaaccguugaagaaagac

SEQ ID NO: 3285807 - RNA, 19 nt, Artificial Sequence
  Description of Artificial Sequence: Synthetic oligonucleotide
aaccguugaagaaagacuu

SEQ ID NO: 3285808 - RNA, 19 nt, Artificial Sequence
  Description of Artificial Sequence: Synthetic oligonucleotide
accguugaagaaagacuuc

SEQ ID NO: 3285809 - RNA, 19 nt, Artificial Sequence
  Description of Artificial Sequence: Synthetic oligonucleotide
ccguugaagaaagacuuca

SEQ ID NO: 3285810 - RNA, 19 nt, Artificial Sequence
  Description of Artificial Sequence: Synthetic oligonucleotide
aagacuucagcgagccgcu

SEQ ID NO: 3285811 - RNA, 19 nt, Artificial Sequence
  Description of Artificial Sequence: Synthetic oligonucleotide
acuucagcgagccgcugaa

SEQ ID NO: 3285812 - RNA, 19 nt, Artificial Sequence
  Description of Artificial Sequence: Synthetic oligonucleotide
uucagcgagccgcugaacu

SEQ ID NO: 3285813 - RNA, 19 nt, Artificial Sequence
  Description of Artificial Sequence: Synthetic oligonucleotide
ucagcgagccgcugaacuu

SEQ ID NO: 3285814 - RNA, 19 nt, Artificial Sequence
  Description of Artificial Sequence: Synthetic oligonucleotide
agccgcugaacuuggacua

SEQ ID NO: 3285815 - RNA, 19 nt, Artificial Sequence
  Description of Artificial Sequence: Synthetic oligonucleotide
gccgcugaacuuggacuaa

SEQ ID NO: 3285816 - RNA, 19 nt, Artificial Sequence
  Description of Artificial Sequence: Synthetic oligonucleotide
ccgcugaacuuggacuaag

SEQ ID NO: 3285817 - RNA, 19 nt, Artificial Sequence
  Description of Artificial Sequence: Synthetic oligonucleotide
cgcugaacuuggacuaagg

SEQ ID NO: 3285818 - RNA, 19 nt, Artificial Sequence
  Description of Artificial Sequence: Synthetic oligonucleotide
gcugaacuuggacuaaggg

SEQ ID NO: 3285819 - RNA, 19 nt, Artificial Sequence
  Description of Artificial Sequence: Synthetic oligonucleotide
cugaacuuggacuaagggc

SEQ ID NO: 3285820 - RNA, 19 nt, Artificial Sequence
  Description of Artificial Sequence: Synthetic oligonucleotide
ugaacuuggacuaagggcc

SEQ ID NO: 3285821 - RNA, 19 nt, Artificial Sequence
  Description of Artificial Sequence: Synthetic oligonucleotide
gaacuuggacuaagggccu

SEQ ID NO: 3285822 - RNA, 19 nt, Artificial Sequence
  Description of Artificial Sequence: Synthetic oligonucleotide
aacuuggacuaagggccug

SEQ ID NO: 3285823 - RNA, 19 nt, Artificial Sequence
  Description of Artificial Sequence: Synthetic oligonucleotide
acuuggacuaagggccuga

SEQ ID NO: 3285824 - RNA, 19 nt, Artificial Sequence
  Description of Artificial Sequence: Synthetic oligonucleotide
cuuggacuaagggccugaa

SEQ ID NO: 3285825 - RNA, 19 nt, Artificial Sequence
  Description of Artificial Sequence: Synthetic oligonucleotide
acuaagggccugaaaucac

SEQ ID NO: 3285826 - RNA, 19 nt, Artificial Sequence
  Description of Artificial Sequence: Synthetic oligonucleotide
cuaagggccugaaaucacu

SEQ ID NO: 3285827 - RNA, 19 nt, Artificial Sequence
  Description of Artificial Sequence: Synthetic oligonucleotide
cugaaaucacuugguuuua

SEQ ID NO: 3285828 - RNA, 19 nt, Artificial Sequence
  Description of Artificial Sequence: Synthetic oligonucleotide
aguaagcauuuccagccau

SEQ ID NO: 3285829 - RNA, 19 nt, Artificial Sequence
  Description of Artificial Sequence: Synthetic oligonucleotide
gaguaagcauuuccagcca

SEQ ID NO: 3285830 - RNA, 19 nt, Artificial Sequence
  Description of Artificial Sequence: Synthetic oligonucleotide
agaguaagcauuuccagcc

SEQ ID NO: 3285831 - RNA, 19 nt, Artificial Sequence
  Description of Artificial Sequence: Synthetic oligonucleotide
cagaguaagcauuuccagc

SEQ ID NO: 3285832 - RNA, 19 nt, Artificial Sequence
  Description of Artificial Sequence: Synthetic oligonucleotide
ucagaguaagcauuuccag

SEQ ID NO: 3285833 - RNA, 19 nt, Artificial Sequence
  Description of Artificial Sequence: Synthetic oligonucleotide
caucagaguaagcauuucc

SEQ ID NO: 3285834 - RNA, 19 nt, Artificial Sequence
  Description of Artificial Sequence: Synthetic oligonucleotide
ucaucagaguaagcauuuc

SEQ ID NO: 3285835 - RNA, 19 nt, Artificial Sequence
  Description of Artificial Sequence: Synthetic oligonucleotide
cucaucagaguaagcauuu

SEQ ID NO: 3285836 - RNA, 19 nt, Artificial Sequence
  Description of Artificial Sequence: Synthetic oligonucleotide
accucaucagaguaagcau

SEQ ID NO: 3285837 - RNA, 19 nt, Artificial Sequence
  Description of Artificial Sequence: Synthetic oligonucleotide
aaccucaucagaguaagca

SEQ ID NO: 3285838 - RNA, 19 nt, Artificial Sequence
  Description of Artificial Sequence: Synthetic oligonucleotide
aaaccucaucagaguaagc

SEQ ID NO: 3285839 - RNA, 19 nt, Artificial Sequence
  Description of Artificial Sequence: Synthetic oligonucleotide
caaaaccucaucagaguaa

SEQ ID NO: 3285840 - RNA, 19 nt, Artificial Sequence
  Description of Artificial Sequence: Synthetic oligonucleotide
cccaaaaccucaucagagu

SEQ ID NO: 3285841 - RNA, 19 nt, Artificial Sequence
  Description of Artificial Sequence: Synthetic oligonucleotide
ucccaaaaccucaucagag

SEQ ID NO: 3285842 - RNA, 19 nt, Artificial Sequence
  Description of Artificial Sequence: Synthetic oligonucleotide
cucccaaaaccucaucaga

SEQ ID NO: 3285843 - RNA, 19 nt, Artificial Sequence
  Description of Artificial Sequence: Synthetic oligonucleotide
gcucccaaaaccucaucag

SEQ ID NO: 3285844 - RNA, 19 nt, Artificial Sequence
  Description of Artificial Sequence: Synthetic oligonucleotide
ugcucccaaaaccucauca

SEQ ID NO: 3285845 - RNA, 19 nt, Artificial Sequence
  Description of Artificial Sequence: Synthetic oligonucleotide
uugcucccaaaaccucauc

SEQ ID NO: 3285846 - RNA, 19 nt, Artificial Sequence
  Description of Artificial Sequence: Synthetic oligonucleotide
gguugcucccaaaaccuca

SEQ ID NO: 3285847 - RNA, 19 nt, Artificial Sequence
  Description of Artificial Sequence: Synthetic oligonucleotide
ugguugcucccaaaaccuc

SEQ ID NO: 3285848 - RNA, 19 nt, Artificial Sequence
  Description of Artificial Sequence: Synthetic oligonucleotide
uugguugcucccaaaaccu

SEQ ID NO: 3285849 - RNA, 19 nt, Artificial Sequence
  Description of Artificial Sequence: Synthetic oligonucleotide
guugguugcucccaaaacc

SEQ ID NO: 3285850 - RNA, 19 nt, Artificial Sequence
  Description of Artificial Sequence: Synthetic oligonucleotide
aguugguugcucccaaaac

SEQ ID NO: 3285851 - RNA, 19 nt, Artificial Sequence
  Description of Artificial Sequence: Synthetic oligonucleotide
aaccaguugguugcuccca

SEQ ID NO: 3285852 - RNA, 19 nt, Artificial Sequence
  Description of Artificial Sequence: Synthetic oligonucleotide
uaaccaguugguugcuccc

SEQ ID NO: 3285853 - RNA, 19 nt, Artificial Sequence
  Description of Artificial Sequence: Synthetic oligonucleotide
uuaaccaguugguugcucc

SEQ ID NO: 3285854 - RNA, 19 nt, Artificial Sequence
  Description of Artificial Sequence: Synthetic oligonucleotide
uuuaaccaguugguugcuc

SEQ ID NO: 3285855 - RNA, 19 nt, Artificial Sequence
  Description of Artificial Sequence: Synthetic oligonucleotide
ccuuuaaccaguugguugc

SEQ ID NO: 3285856 - RNA, 19 nt, Artificial Sequence
  Description of Artificial Sequence: Synthetic oligonucleotide
uuuuccuuuaaccaguugg

SEQ ID NO: 3285857 - RNA, 19 nt, Artificial Sequence
  Description of Artificial Sequence: Synthetic oligonucleotide
auacuaacugguuacuuuu

SEQ ID NO: 3285858 - RNA, 19 nt, Artificial Sequence
  Description of Artificial Sequence: Synthetic oligonucleotide
aauacuaacugguuacuuu

SEQ ID NO: 3285859 - RNA, 19 nt, Artificial Sequence
  Description of Artificial Sequence: Synthetic oligonucleotide
gaauacuaacugguuacuu

SEQ ID NO: 3285860 - RNA, 19 nt, Artificial Sequence
  Description of Artificial Sequence: Synthetic oligonucleotide
agaauacuaacugguuacu

SEQ ID NO: 3285861 - RNA, 19 nt, Artificial Sequence
  Description of Artificial Sequence: Synthetic oligonucleotide
gagaauacuaacugguuac

SEQ ID NO: 3285862 - RNA, 19 nt, Artificial Sequence
  Description of Artificial Sequence: Synthetic oligonucleotide
ugagaauacuaacugguua

SEQ ID NO: 3285863 - RNA, 19 nt, Artificial Sequence
  Description of Artificial Sequence: Synthetic oligonucleotide
augagaauacuaacugguu

SEQ ID NO: 3285864 - RNA, 19 nt, Artificial Sequence
  Description of Artificial Sequence: Synthetic oligonucleotide
ucaauugaacaucuucauu

SEQ ID NO: 3285865 - RNA, 19 nt, Artificial Sequence
  Description of Artificial Sequence: Synthetic oligonucleotide
uucaauugaacaucuucau

SEQ ID NO: 3285866 - RNA, 19 nt, Artificial Sequence
  Description of Artificial Sequence: Synthetic oligonucleotide
uccauucaauugaacaucu

SEQ ID NO: 3285867 - RNA, 19 nt, Artificial Sequence
  Description of Artificial Sequence: Synthetic oligonucleotide
uuccauucaauugaacauc

SEQ ID NO: 3285868 - RNA, 19 nt, Artificial Sequence
  Description of Artificial Sequence: Synthetic oligonucleotide
uuuccauucaauugaacau

SEQ ID NO: 3285869 - RNA, 19 nt, Artificial Sequence
  Description of Artificial Sequence: Synthetic oligonucleotide
ucuuuuccauucaauugaa

SEQ ID NO: 3285870 - RNA, 19 nt, Artificial Sequence
  Description of Artificial Sequence: Synthetic oligonucleotide
uaucuuuuccauucaauug

SEQ ID NO: 3285871 - RNA, 19 nt, Artificial Sequence
  Description of Artificial Sequence: Synthetic oligonucleotide
cgauaucuuuuccauucaa

SEQ ID NO: 3285872 - RNA, 19 nt, Artificial Sequence
  Description of Artificial Sequence: Synthetic oligonucleotide
ccgauaucuuuuccauuca

SEQ ID NO: 3285873 - RNA, 19 nt, Artificial Sequence
  Description of Artificial Sequence: Synthetic oligonucleotide
uccgauaucuuuuccauuc

SEQ ID NO: 3285874 - RNA, 19 nt, Artificial Sequence
  Description of Artificial Sequence: Synthetic oligonucleotide
auccgauaucuuuuccauu

SEQ ID NO: 3285875 - RNA, 19 nt, Artificial Sequence
  Description of Artificial Sequence: Synthetic oligonucleotide
cauccgauaucuuuuccau

SEQ ID NO: 3285876 - RNA, 19 nt, Artificial Sequence
  Description of Artificial Sequence: Synthetic oligonucleotide
ccauccgauaucuuuucca

SEQ ID NO: 3285877 - RNA, 19 nt, Artificial Sequence
  Description of Artificial Sequence: Synthetic oligonucleotide
uuccauccgauaucuuuuc

SEQ ID NO: 3285878 - RNA, 19 nt, Artificial Sequence
  Description of Artificial Sequence: Synthetic oligonucleotide
auuccauccgauaucuuuu

SEQ ID NO: 3285879 - RNA, 19 nt, Artificial Sequence
  Description of Artificial Sequence: Synthetic oligonucleotide
uauuccauccgauaucuuu

SEQ ID NO: 3285880 - RNA, 19 nt, Artificial Sequence
  Description of Artificial Sequence: Synthetic oligonucleotide
cuauuccauccgauaucuu

SEQ ID NO: 3285881 - RNA, 19 nt, Artificial Sequence
  Description of Artificial Sequence: Synthetic oligonucleotide
acuauuccauccgauaucu

SEQ ID NO: 3285882 - RNA, 19 nt, Artificial Sequence
  Description of Artificial Sequence: Synthetic oligonucleotide
aacuauuccauccgauauc

SEQ ID NO: 3285883 - RNA, 19 nt, Artificial Sequence
  Description of Artificial Sequence: Synthetic oligonucleotide
uaacuauuccauccgauau

SEQ ID NO: 3285884 - RNA, 19 nt, Artificial Sequence
  Description of Artificial Sequence: Synthetic oligonucleotide
guaacuauuccauccgaua

SEQ ID NO: 3285885 - RNA, 19 nt, Artificial Sequence
  Description of Artificial Sequence: Synthetic oligonucleotide
uguaacuauuccauccgau

SEQ ID NO: 3285886 - RNA, 19 nt, Artificial Sequence
  Description of Artificial Sequence: Synthetic oligonucleotide
cuguaacuauuccauccga

SEQ ID NO: 3285887 - RNA, 19 nt, Artificial Sequence
  Description of Artificial Sequence: Synthetic oligonucleotide
ucuguaacuauuccauccg

SEQ ID NO: 3285888 - RNA, 19 nt, Artificial Sequence
  Description of Artificial Sequence: Synthetic oligonucleotide
uucuguaacuauuccaucc

SEQ ID NO: 3285889 - RNA, 19 nt, Artificial Sequence
  Description of Artificial Sequence: Synthetic oligonucleotide
uuucuguaacuauuccauc

SEQ ID NO: 3285890 - RNA, 19 nt, Artificial Sequence
  Description of Artificial Sequence: Synthetic oligonucleotide
cuuucuguaacuauuccau

SEQ ID NO: 3285891 - RNA, 19 nt, Artificial Sequence
  Description of Artificial Sequence: Synthetic oligonucleotide
cuccuuucuguaacuauuc

SEQ ID NO: 3285892 - RNA, 19 nt, Artificial Sequence
  Description of Artificial Sequence: Synthetic oligonucleotide
uugcagcuccuuucuguaa

SEQ ID NO: 3285893 - RNA, 19 nt, Artificial Sequence
  Description of Artificial Sequence: Synthetic oligonucleotide
cuugcagcuccuuucugua

SEQ ID NO: 3285894 - RNA, 19 nt, Artificial Sequence
  Description of Artificial Sequence: Synthetic oligonucleotide
ccucuugcagcuccuuucu

SEQ ID NO: 3285895 - RNA, 19 nt, Artificial Sequence
  Description of Artificial Sequence: Synthetic oligonucleotide
uccucuugcagcuccuuuc

SEQ ID NO: 3285896 - RNA, 19 nt, Artificial Sequence
  Description of Artificial Sequence: Synthetic oligonucleotide
ucguccucuugcagcuccu

SEQ ID NO: 3285897 - RNA, 19 nt, Artificial Sequence
  Description of Artificial Sequence: Synthetic oligonucleotide
uuagcucguccucuugcag

SEQ ID NO: 3285898 - RNA, 19 nt, Artificial Sequence
  Description of Artificial Sequence: Synthetic oligonucleotide
uuuagcucguccucuugca

SEQ ID NO: 3285899 - RNA, 19 nt, Artificial Sequence
  Description of Artificial Sequence: Synthetic oligonucleotide
auuuuagcucguccucuug

SEQ ID NO: 3285900 - RNA, 19 nt, Artificial Sequence
  Description of Artificial Sequence: Synthetic oligonucleotide
gauuuuagcucguccucuu

SEQ ID NO: 3285901 - RNA, 19 nt, Artificial Sequence
  Description of Artificial Sequence: Synthetic oligonucleotide
agauuuuagcucguccucu

SEQ ID NO: 3285902 - RNA, 19 nt, Artificial Sequence
  Description of Artificial Sequence: Synthetic oligonucleotide
aagauuuuagcucguccuc

SEQ ID NO: 3285903 - RNA, 19 nt, Artificial Sequence
  Description of Artificial Sequence: Synthetic oligonucleotide
aaagauuuuagcucguccu

SEQ ID NO: 3285904 - RNA, 19 nt, Artificial Sequence
  Description of Artificial Sequence: Synthetic oligonucleotide
uaaagauuuuagcucgucc

SEQ ID NO: 3285905 - RNA, 19 nt, Artificial Sequence
  Description of Artificial Sequence: Synthetic oligonucleotide
guaaagauuuuagcucguc

SEQ ID NO: 3285906 - RNA, 19 nt, Artificial Sequence
  Description of Artificial Sequence: Synthetic oligonucleotide
uguaaagauuuuagcucgu

SEQ ID NO: 3285907 - RNA, 19 nt, Artificial Sequence
  Description of Artificial Sequence: Synthetic oligonucleotide
uuguaaagauuuuagcucg

SEQ ID NO: 3285908 - RNA, 19 nt, Artificial Sequence
  Description of Artificial Sequence: Synthetic oligonucleotide
guuguaaagauuuuagcuc

SEQ ID NO: 3285909 - RNA, 19 nt, Artificial Sequence
  Description of Artificial Sequence: Synthetic oligonucleotide
cguuguaaagauuuuagcu

SEQ ID NO: 3285910 - RNA, 19 nt, Artificial Sequence
  Description of Artificial Sequence: Synthetic oligonucleotide
ucguuguaaagauuuuagc

SEQ ID NO: 3285911 - RNA, 19 nt, Artificial Sequence
  Description of Artificial Sequence: Synthetic oligonucleotide
cucguuguaaagauuuuag

SEQ ID NO: 3285912 - RNA, 19 nt, Artificial Sequence
  Description of Artificial Sequence: Synthetic oligonucleotide
ccucguuguaaagauuuua

SEQ ID NO: 3285913 - RNA, 19 nt, Artificial Sequence
  Description of Artificial Sequence: Synthetic oligonucleotide
uccucguuguaaagauuuu

SEQ ID NO: 3285914 - RNA, 19 nt, Artificial Sequence
  Description of Artificial Sequence: Synthetic oligonucleotide
cuccucguuguaaagauuu

SEQ ID NO: 3285915 - RNA, 19 nt, Artificial Sequence
  Description of Artificial Sequence: Synthetic oligonucleotide
gcuccucguuguaaagauu

SEQ ID NO: 3285916 - RNA, 19 nt, Artificial Sequence
  Description of Artificial Sequence: Synthetic oligonucleotide
cgcuccucguuguaaagau

SEQ ID NO: 3285917 - RNA, 19 nt, Artificial Sequence
  Description of Artificial Sequence: Synthetic oligonucleotide
ccgcuccucguuguaaaga

SEQ ID NO: 3285918 - RNA, 19 nt, Artificial Sequence
  Description of Artificial Sequence: Synthetic oligonucleotide
uccgcuccucguuguaaag

SEQ ID NO: 3285919 - RNA, 19 nt, Artificial Sequence
  Description of Artificial Sequence: Synthetic oligonucleotide
uuccgcuccucguuguaaa

SEQ ID NO: 3285920 - RNA, 19 nt, Artificial Sequence
  Description of Artificial Sequence: Synthetic oligonucleotide
aguuuccgcuccucguugu

SEQ ID NO: 3285921 - RNA, 19 nt, Artificial Sequence
  Description of Artificial Sequence: Synthetic oligonucleotide
agguaguuuccgcuccucg

SEQ ID NO: 3285922 - RNA, 19 nt, Artificial Sequence
  Description of Artificial Sequence: Synthetic oligonucleotide
cagguaguuuccgcuccuc

SEQ ID NO: 3285923 - RNA, 19 nt, Artificial Sequence
  Description of Artificial Sequence: Synthetic oligonucleotide
ccagguaguuuccgcuccu

SEQ ID NO: 3285924 - RNA, 19 nt, Artificial Sequence
  Description of Artificial Sequence: Synthetic oligonucleotide
ucccagguaguuuccgcuc

SEQ ID NO: 3285925 - RNA, 19 nt, Artificial Sequence
  Description of Artificial Sequence: Synthetic oligonucleotide
gucccagguaguuuccgcu

SEQ ID NO: 3285926 - RNA, 19 nt, Artificial Sequence
  Description of Artificial Sequence: Synthetic oligonucleotide
cuggucccagguaguuucc

SEQ ID NO: 3285927 - RNA, 19 nt, Artificial Sequence
  Description of Artificial Sequence: Synthetic oligonucleotide
ucuggucccagguaguuuc

SEQ ID NO: 3285928 - RNA, 19 nt, Artificial Sequence
  Description of Artificial Sequence: Synthetic oligonucleotide
cucuggucccagguaguuu

SEQ ID NO: 3285929 - RNA, 19 nt, Artificial Sequence
  Description of Artificial Sequence: Synthetic oligonucleotide
gcucuggucccagguaguu

SEQ ID NO: 3285930 - RNA, 19 nt, Artificial Sequence
  Description of Artificial Sequence: Synthetic oligonucleotide
cauuccauguccucgcucu

SEQ ID NO: 3285931 - RNA, 19 nt, Artificial Sequence
  Description of Artificial Sequence: Synthetic oligonucleotide
ccauuccauguccucgcuc

SEQ ID NO: 3285932 - RNA, 19 nt, Artificial Sequence
  Description of Artificial Sequence: Synthetic oligonucleotide
cccauuccauguccucgcu

SEQ ID NO: 3285933 - RNA, 19 nt, Artificial Sequence
  Description of Artificial Sequence: Synthetic oligonucleotide
ucccauuccauguccucgc

SEQ ID NO: 3285934 - RNA, 19 nt, Artificial Sequence
  Description of Artificial Sequence: Synthetic oligonucleotide
uucccauuccauguccucg

SEQ ID NO: 3285935 - RNA, 19 nt, Artificial Sequence
  Description of Artificial Sequence: Synthetic oligonucleotide
agauucccauuccaugucc

SEQ ID NO: 3285936 - RNA, 19 nt, Artificial Sequence
  Description of Artificial Sequence: Synthetic oligonucleotide
aagauucccauuccauguc

SEQ ID NO: 3285937 - RNA, 19 nt, Artificial Sequence
  Description of Artificial Sequence: Synthetic oligonucleotide
gaagauucccauuccaugu

SEQ ID NO: 3285938 - RNA, 19 nt, Artificial Sequence
  Description of Artificial Sequence: Synthetic oligonucleotide
acugaagauucccauucca

SEQ ID NO: 3285939 - RNA, 19 nt, Artificial Sequence
  Description of Artificial Sequence: Synthetic oligonucleotide
cacugaagauucccauucc

SEQ ID NO: 3285940 - RNA, 19 nt, Artificial Sequence
  Description of Artificial Sequence: Synthetic oligonucleotide
auccacugaagauucccau

SEQ ID NO: 3285941 - RNA, 19 nt, Artificial Sequence
  Description of Artificial Sequence: Synthetic oligonucleotide
ucauccacugaagauuccc

SEQ ID NO: 3285942 - RNA, 19 nt, Artificial Sequence
  Description of Artificial Sequence: Synthetic oligonucleotide
uucauccacugaagauucc

SEQ ID NO: 3285943 - RNA, 19 nt, Artificial Sequence
  Description of Artificial Sequence: Synthetic oligonucleotide
uuaguucauccacugaaga

SEQ ID NO: 3285944 - RNA, 19 nt, Artificial Sequence
  Description of Artificial Sequence: Synthetic oligonucleotide
guuaguucauccacugaag

SEQ ID NO: 3285945 - RNA, 19 nt, Artificial Sequence
  Description of Artificial Sequence: Synthetic oligonucleotide
gguuaguucauccacugaa

SEQ ID NO: 3285946 - RNA, 19 nt, Artificial Sequence
  Description of Artificial Sequence: Synthetic oligonucleotide
ugguuaguucauccacuga

SEQ ID NO: 3285947 - RNA, 19 nt, Artificial Sequence
  Description of Artificial Sequence: Synthetic oligonucleotide
gugguuaguucauccacug

SEQ ID NO: 3285948 - RNA, 19 nt, Artificial Sequence
  Description of Artificial Sequence: Synthetic oligonucleotide
ugugguuaguucauccacu

SEQ ID NO: 3285949 - RNA, 19 nt, Artificial Sequence
  Description of Artificial Sequence: Synthetic oligonucleotide
uugugguuaguucauccac

SEQ ID NO: 3285950 - RNA, 19 nt, Artificial Sequence
  Description of Artificial Sequence: Synthetic oligonucleotide
uuugugguuaguucaucca

SEQ ID NO: 3285951 - RNA, 19 nt, Artificial Sequence
  Description of Artificial Sequence: Synthetic oligonucleotide
cuuugugguuaguucaucc

SEQ ID NO: 3285952 - RNA, 19 nt, Artificial Sequence
  Description of Artificial Sequence: Synthetic oligonucleotide
acuuugugguuaguucauc

SEQ ID NO: 3285953 - RNA, 19 nt, Artificial Sequence
  Description of Artificial Sequence: Synthetic oligonucleotide
gaacuuugugguuaguuca

SEQ ID NO: 3285954 - RNA, 19 nt, Artificial Sequence
  Description of Artificial Sequence: Synthetic oligonucleotide
cgaacuuugugguuaguuc

SEQ ID NO: 3285955 - RNA, 19 nt, Artificial Sequence
  Description of Artificial Sequence: Synthetic oligonucleotide
ccgaacuuugugguuaguu

SEQ ID NO: 3285956 - RNA, 19 nt, Artificial Sequence
  Description of Artificial Sequence: Synthetic oligonucleotide
gccgaacuuugugguuagu

SEQ ID NO: 3285957 - RNA, 19 nt, Artificial Sequence
  Description of Artificial Sequence: Synthetic oligonucleotide
gugccgaacuuugugguua

SEQ ID NO: 3285958 - RNA, 19 nt, Artificial Sequence
  Description of Artificial Sequence: Synthetic oligonucleotide
cgugccgaacuuugugguu

SEQ ID NO: 3285959 - RNA, 19 nt, Artificial Sequence
  Description of Artificial Sequence: Synthetic oligonucleotide
gcgugccgaacuuuguggu

SEQ ID NO: 3285960 - RNA, 19 nt, Artificial Sequence
  Description of Artificial Sequence: Synthetic oligonucleotide
agcgugccgaacuuugugg

SEQ ID NO: 3285961 - RNA, 19 nt, Artificial Sequence
  Description of Artificial Sequence: Synthetic oligonucleotide
gagcgugccgaacuuugug

SEQ ID NO: 3285962 - RNA, 19 nt, Artificial Sequence
  Description of Artificial Sequence: Synthetic oligonucleotide
gugagcgugccgaacuuug

SEQ ID NO: 3285963 - RNA, 19 nt, Artificial Sequence
  Description of Artificial Sequence: Synthetic oligonucleotide
ggugagcgugccgaacuuu

SEQ ID NO: 3285964 - RNA, 19 nt, Artificial Sequence
  Description of Artificial Sequence: Synthetic oligonucleotide
uggugagcgugccgaacuu

SEQ ID NO: 3285965 - RNA, 19 nt, Artificial Sequence
  Description of Artificial Sequence: Synthetic oligonucleotide
auggugagcgugccgaacu

SEQ ID NO: 3285966 - RNA, 19 nt, Artificial Sequence
  Description of Artificial Sequence: Synthetic oligonucleotide
aauggugagcgugccgaac

SEQ ID NO: 3285967 - RNA, 19 nt, Artificial Sequence
  Description of Artificial Sequence: Synthetic oligonucleotide
gaauggugagcgugccgaa

SEQ ID NO: 3285968 - RNA, 19 nt, Artificial Sequence
  Description of Artificial Sequence: Synthetic oligonucleotide
ugaauggugagcgugccga

SEQ ID NO: 3285969 - RNA, 19 nt, Artificial Sequence
  Description of Artificial Sequence: Synthetic oligonucleotide
ucgugaauggugagcgugc

SEQ ID NO: 3285970 - RNA, 19 nt, Artificial Sequence
  Description of Artificial Sequence: Synthetic oligonucleotide
gucgugaauggugagcgug

SEQ ID NO: 3285971 - RNA, 19 nt, Artificial Sequence
  Description of Artificial Sequence: Synthetic oligonucleotide
ugucgugaauggugagcgu

SEQ ID NO: 3285972 - RNA, 19 nt, Artificial Sequence
  Description of Artificial Sequence: Synthetic oligonucleotide
gugucgugaauggugagcg

SEQ ID NO: 3285973 - RNA, 19 nt, Artificial Sequence
  Description of Artificial Sequence: Synthetic oligonucleotide
ggugucgugaauggugagc

SEQ ID NO: 3285974 - RNA, 19 nt, Artificial Sequence
  Description of Artificial Sequence: Synthetic oligonucleotide
cggugucgugaauggugag

SEQ ID NO: 3285975 - RNA, 19 nt, Artificial Sequence
  Description of Artificial Sequence: Synthetic oligonucleotide
ucggugucgugaaugguga

SEQ ID NO: 3285976 - RNA, 19 nt, Artificial Sequence
  Description of Artificial Sequence: Synthetic oligonucleotide
uucggugucgugaauggug

SEQ ID NO: 3285977 - RNA, 19 nt, Artificial Sequence
  Description of Artificial Sequence: Synthetic oligonucleotide
uuucggugucgugaauggu

SEQ ID NO: 3285978 - RNA, 19 nt, Artificial Sequence
  Description of Artificial Sequence: Synthetic oligonucleotide
uuuucggugucgugaaugg

SEQ ID NO: 3285979 - RNA, 19 nt, Artificial Sequence
  Description of Artificial Sequence: Synthetic oligonucleotide
cuuuucggugucgugaaug

SEQ ID NO: 3285980 - RNA, 19 nt, Artificial Sequence
  Description of Artificial Sequence: Synthetic oligonucleotide
acuuuucggugucgugaau

SEQ ID NO: 3285981 - RNA, 19 nt, Artificial Sequence
  Description of Artificial Sequence: Synthetic oligonucleotide
uacuuuucggugucgugaa

SEQ ID NO: 3285982 - RNA, 19 nt, Artificial Sequence
  Description of Artificial Sequence: Synthetic oligonucleotide
guacuuuucggugucguga

SEQ ID NO: 3285983 - RNA, 19 nt, Artificial Sequence
  Description of Artificial Sequence: Synthetic oligonucleotide
cguacuuuucggugucgug

SEQ ID NO: 3285984 - RNA, 19 nt, Artificial Sequence
  Description of Artificial Sequence: Synthetic oligonucleotide
gcguacuuuucggugucgu

SEQ ID NO: 3285985 - RNA, 19 nt, Artificial Sequence
  Description of Artificial Sequence: Synthetic oligonucleotide
ggcguacuuuucggugucg

SEQ ID NO: 3285986 - RNA, 19 nt, Artificial Sequence
  Description of Artificial Sequence: Synthetic oligonucleotide
aggcguacuuuucgguguc

SEQ ID NO: 3285987 - RNA, 19 nt, Artificial Sequence
  Description of Artificial Sequence: Synthetic oligonucleotide
gaggcguacuuuucggugu

SEQ ID NO: 3285988 - RNA, 19 nt, Artificial Sequence
  Description of Artificial Sequence: Synthetic oligonucleotide
agaggcguacuuuucggug

SEQ ID NO: 3285989 - RNA, 19 nt, Artificial Sequence
  Description of Artificial Sequence: Synthetic oligonucleotide
gagaggcguacuuuucggu

SEQ ID NO: 3285990 - RNA, 19 nt, Artificial Sequence
  Description of Artificial Sequence: Synthetic oligonucleotide
ugagaggcguacuuuucgg

SEQ ID NO: 3285991 - RNA, 19 nt, Artificial Sequence
  Description of Artificial Sequence: Synthetic oligonucleotide
cugagaggcguacuuuucg

SEQ ID NO: 3285992 - RNA, 19 nt, Artificial Sequence
  Description of Artificial Sequence: Synthetic oligonucleotide
ggcugagaggcguacuuuu

SEQ ID NO: 3285993 - RNA, 19 nt, Artificial Sequence
  Description of Artificial Sequence: Synthetic oligonucleotide
uggcugagaggcguacuuu

SEQ ID NO: 3285994 - RNA, 19 nt, Artificial Sequence
  Description of Artificial Sequence: Synthetic oligonucleotide
cuggcugagaggcguacuu

SEQ ID NO: 3285995 - RNA, 19 nt, Artificial Sequence
  Description of Artificial Sequence: Synthetic oligonucleotide
uucuggcugagaggcguac

SEQ ID NO: 3285996 - RNA, 19 nt, Artificial Sequence
  Description of Artificial Sequence: Synthetic oligonucleotide
cauaguucuggcugagagg

SEQ ID NO: 3285997 - RNA, 19 nt, Artificial Sequence
  Description of Artificial Sequence: Synthetic oligonucleotide
gugcauaguucuggcugag

SEQ ID NO: 3285998 - RNA, 19 nt, Artificial Sequence
  Description of Artificial Sequence: Synthetic oligonucleotide
agugcauaguucuggcuga

SEQ ID NO: 3285999 - RNA, 19 nt, Artificial Sequence
  Description of Artificial Sequence: Synthetic oligonucleotide
uagugcauaguucuggcug

SEQ ID NO: 3286000 - RNA, 19 nt, Artificial Sequence
  Description of Artificial Sequence: Synthetic oligonucleotide
uuagugcauaguucuggcu

SEQ ID NO: 3286001 - RNA, 19 nt, Artificial Sequence
  Description of Artificial Sequence: Synthetic oligonucleotide
guuagugcauaguucuggc

SEQ ID NO: 3286002 - RNA, 19 nt, Artificial Sequence
  Description of Artificial Sequence: Synthetic oligonucleotide
aguuagugcauaguucugg

SEQ ID NO: 3286003 - RNA, 19 nt, Artificial Sequence
  Description of Artificial Sequence: Synthetic oligonucleotide
uggaguuagugcauaguuc

SEQ ID NO: 3286004 - RNA, 19 nt, Artificial Sequence
  Description of Artificial Sequence: Synthetic oligonucleotide
guggaguuagugcauaguu

SEQ ID NO: 3286005 - RNA, 19 nt, Artificial Sequence
  Description of Artificial Sequence: Synthetic oligonucleotide
aguggaguuagugcauagu

SEQ ID NO: 3286006 - RNA, 19 nt, Artificial Sequence
  Description of Artificial Sequence: Synthetic oligonucleotide
aaguggaguuagugcauag

SEQ ID NO: 3286007 - RNA, 19 nt, Artificial Sequence
  Description of Artificial Sequence: Synthetic oligonucleotide
caaguggaguuagugcaua

SEQ ID NO: 3286008 - RNA, 19 nt, Artificial Sequence
  Description of Artificial Sequence: Synthetic oligonucleotide
gcaaguggaguuagugcau

SEQ ID NO: 3286009 - RNA, 19 nt, Artificial Sequence
  Description of Artificial Sequence: Synthetic oligonucleotide
gaugcaaguggaguuagug

SEQ ID NO: 3286010 - RNA, 19 nt, Artificial Sequence
  Description of Artificial Sequence: Synthetic oligonucleotide
cgaugcaaguggaguuagu

SEQ ID NO: 3286011 - RNA, 19 nt, Artificial Sequence
  Description of Artificial Sequence: Synthetic oligonucleotide
ccgaugcaaguggaguuag

SEQ ID NO: 3286012 - RNA, 19 nt, Artificial Sequence
  Description of Artificial Sequence: Synthetic oligonucleotide
uccgaugcaaguggaguua

SEQ ID NO: 3286013 - RNA, 19 nt, Artificial Sequence
  Description of Artificial Sequence: Synthetic oligonucleotide
auccgaugcaaguggaguu

SEQ ID NO: 3286014 - RNA, 19 nt, Artificial Sequence
  Description of Artificial Sequence: Synthetic oligonucleotide
gauccgaugcaaguggagu

SEQ ID NO: 3286015 - RNA, 19 nt, Artificial Sequence
  Description of Artificial Sequence: Synthetic oligonucleotide
agauccgaugcaaguggag

SEQ ID NO: 3286016 - RNA, 19 nt, Artificial Sequence
  Description of Artificial Sequence: Synthetic oligonucleotide
gagauccgaugcaagugga

SEQ ID NO: 3286017 - RNA, 19 nt, Artificial Sequence
  Description of Artificial Sequence: Synthetic oligonucleotide
cgagauccgaugcaagugg

SEQ ID NO: 3286018 - RNA, 19 nt, Artificial Sequence
  Description of Artificial Sequence: Synthetic oligonucleotide
ucgagauccgaugcaagug

SEQ ID NO: 3286019 - RNA, 19 nt, Artificial Sequence
  Description of Artificial Sequence: Synthetic oligonucleotide
ccucgagauccgaugcaag

SEQ ID NO: 3286020 - RNA, 19 nt, Artificial Sequence
  Description of Artificial Sequence: Synthetic oligonucleotide
uccucgagauccgaugcaa

SEQ ID NO: 3286021 - RNA, 19 nt, Artificial Sequence
  Description of Artificial Sequence: Synthetic oligonucleotide
guccucgagauccgaugca

SEQ ID NO: 3286022 - RNA, 19 nt, Artificial Sequence
  Description of Artificial Sequence: Synthetic oligonucleotide
agguccucgagauccgaug

SEQ ID NO: 3286023 - RNA, 19 nt, Artificial Sequence
  Description of Artificial Sequence: Synthetic oligonucleotide
cagguccucgagauccgau

SEQ ID NO: 3286024 - RNA, 19 nt, Artificial Sequence
  Description of Artificial Sequence: Synthetic oligonucleotide
cuaaagccagguccucgag

SEQ ID NO: 3286025 - RNA, 19 nt, Artificial Sequence
  Description of Artificial Sequence: Synthetic oligonucleotide
ucuaaagccagguccucga

SEQ ID NO: 3286026 - RNA, 19 nt, Artificial Sequence
  Description of Artificial Sequence: Synthetic oligonucleotide
aaggcucuaaagccagguc

SEQ ID NO: 3286027 - RNA, 19 nt, Artificial Sequence
  Description of Artificial Sequence: Synthetic oligonucleotide
uccaaggcucuaaagccag

SEQ ID NO: 3286028 - RNA, 19 nt, Artificial Sequence
  Description of Artificial Sequence: Synthetic oligonucleotide
cuccaaggcucuaaagcca

SEQ ID NO: 3286029 - RNA, 19 nt, Artificial Sequence
  Description of Artificial Sequence: Synthetic oligonucleotide
gugcuccaaggcucuaaag

SEQ ID NO: 3286030 - RNA, 19 nt, Artificial Sequence
  Description of Artificial Sequence: Synthetic oligonucleotide
ugugcuccaaggcucuaaa

SEQ ID NO: 3286031 - RNA, 19 nt, Artificial Sequence
  Description of Artificial Sequence: Synthetic oligonucleotide
uggugugcuccaaggcucu

SEQ ID NO: 3286032 - RNA, 19 nt, Artificial Sequence
  Description of Artificial Sequence: Synthetic oligonucleotide
auuuggugugcuccaaggc

SEQ ID NO: 3286033 - RNA, 19 nt, Artificial Sequence
  Description of Artificial Sequence: Synthetic oligonucleotide
guauuuggugugcuccaag

SEQ ID NO: 3286034 - RNA, 19 nt, Artificial Sequence
  Description of Artificial Sequence: Synthetic oligonucleotide
aguauuuggugugcuccaa

SEQ ID NO: 3286035 - RNA, 19 nt, Artificial Sequence
  Description of Artificial Sequence: Synthetic oligonucleotide
gaguauuuggugugcucca

SEQ ID NO: 3286036 - RNA, 19 nt, Artificial Sequence
  Description of Artificial Sequence: Synthetic oligonucleotide
ggaguauuuggugugcucc

SEQ ID NO: 3286037 - RNA, 19 nt, Artificial Sequence
  Description of Artificial Sequence: Synthetic oligonucleotide
caggaguauuuggugugcu

SEQ ID NO: 3286038 - RNA, 19 nt, Artificial Sequence
  Description of Artificial Sequence: Synthetic oligonucleotide
acaggaguauuuggugugc

SEQ ID NO: 3286039 - RNA, 19 nt, Artificial Sequence
  Description of Artificial Sequence: Synthetic oligonucleotide
aacaggaguauuuggugug

SEQ ID NO: 3286040 - RNA, 19 nt, Artificial Sequence
  Description of Artificial Sequence: Synthetic oligonucleotide
caacaggaguauuuggugu

SEQ ID NO: 3286041 - RNA, 19 nt, Artificial Sequence
  Description of Artificial Sequence: Synthetic oligonucleotide
gcaacaggaguauuuggug

SEQ ID NO: 3286042 - RNA, 19 nt, Artificial Sequence
  Description of Artificial Sequence: Synthetic oligonucleotide
cgcaacaggaguauuuggu

SEQ ID NO: 3286043 - RNA, 19 nt, Artificial Sequence
  Description of Artificial Sequence: Synthetic oligonucleotide
ccgcaacaggaguauuugg

SEQ ID NO: 3286044 - RNA, 19 nt, Artificial Sequence
  Description of Artificial Sequence: Synthetic oligonucleotide
cccgcaacaggaguauuug

SEQ ID NO: 3286045 - RNA, 19 nt, Artificial Sequence
  Description of Artificial Sequence: Synthetic oligonucleotide
gcccgcaacaggaguauuu

SEQ ID NO: 3286046 - RNA, 19 nt, Artificial Sequence
  Description of Artificial Sequence: Synthetic oligonucleotide
ugcccgcaacaggaguauu

SEQ ID NO: 3286047 - RNA, 19 nt, Artificial Sequence
  Description of Artificial Sequence: Synthetic oligonucleotide
gugcccgcaacaggaguau

SEQ ID NO: 3286048 - RNA, 19 nt, Artificial Sequence
  Description of Artificial Sequence: Synthetic oligonucleotide
agugcccgcaacaggagua

SEQ ID NO: 3286049 - RNA, 19 nt, Artificial Sequence
  Description of Artificial Sequence: Synthetic oligonucleotide
uucugcagugcccgcaaca

SEQ ID NO: 3286050 - RNA, 19 nt, Artificial Sequence
  Description of Artificial Sequence: Synthetic oligonucleotide
uuucugcagugcccgcaac

SEQ ID NO: 3286051 - RNA, 19 nt, Artificial Sequence
  Description of Artificial Sequence: Synthetic oligonucleotide
guucuggguuucugcagug

SEQ ID NO: 3286052 - RNA, 19 nt, Artificial Sequence
  Description of Artificial Sequence: Synthetic oligonucleotide
cccaguguucuggguuucu

SEQ ID NO: 3286053 - RNA, 19 nt, Artificial Sequence
  Description of Artificial Sequence: Synthetic oligonucleotide
uccccaguguucuggguuu

SEQ ID NO: 3286054 - RNA, 19 nt, Artificial Sequence
  Description of Artificial Sequence: Synthetic oligonucleotide
uuccccaguguucuggguu

SEQ ID NO: 3286055 - RNA, 19 nt, Artificial Sequence
  Description of Artificial Sequence: Synthetic oligonucleotide
cuuccccaguguucugggu

SEQ ID NO: 3286056 - RNA, 19 nt, Artificial Sequence
  Description of Artificial Sequence: Synthetic oligonucleotide
aaccagcuuccccaguguu

SEQ ID NO: 3286057 - RNA, 19 nt, Artificial Sequence
  Description of Artificial Sequence: Synthetic oligonucleotide
gaaccagcuuccccagugu

SEQ ID NO: 3286058 - RNA, 19 nt, Artificial Sequence
  Description of Artificial Sequence: Synthetic oligonucleotide
uuggaaccagcuuccccag

SEQ ID NO: 3286059 - RNA, 19 nt, Artificial Sequence
  Description of Artificial Sequence: Synthetic oligonucleotide
uuuggaaccagcuucccca

SEQ ID NO: 3286060 - RNA, 19 nt, Artificial Sequence
  Description of Artificial Sequence: Synthetic oligonucleotide
gcuuuggaaccagcuuccc

SEQ ID NO: 3286061 - RNA, 19 nt, Artificial Sequence
  Description of Artificial Sequence: Synthetic oligonucleotide
ggcuuuggaaccagcuucc

SEQ ID NO: 3286062 - RNA, 19 nt, Artificial Sequence
  Description of Artificial Sequence: Synthetic oligonucleotide
cuuggcaggcuuuggaacc

SEQ ID NO: 3286063 - RNA, 19 nt, Artificial Sequence
  Description of Artificial Sequence: Synthetic oligonucleotide
ugaccaucuuggcaggcuu

SEQ ID NO: 3286064 - RNA, 19 nt, Artificial Sequence
  Description of Artificial Sequence: Synthetic oligonucleotide
uugaccaucuuggcaggcu

SEQ ID NO: 3286065 - RNA, 19 nt, Artificial Sequence
  Description of Artificial Sequence: Synthetic oligonucleotide
gcucaguugaccaucuugg

SEQ ID NO: 3286066 - RNA, 19 nt, Artificial Sequence
  Description of Artificial Sequence: Synthetic oligonucleotide
ggcucaguugaccaucuug

SEQ ID NO: 3286067 - RNA, 19 nt, Artificial Sequence
  Description of Artificial Sequence: Synthetic oligonucleotide
gggcucaguugaccaucuu

SEQ ID NO: 3286068 - RNA, 19 nt, Artificial Sequence
  Description of Artificial Sequence: Synthetic oligonucleotide
ugggcucaguugaccaucu

SEQ ID NO: 3286069 - RNA, 19 nt, Artificial Sequence
  Description of Artificial Sequence: Synthetic oligonucleotide
uugggcucaguugaccauc

SEQ ID NO: 3286070 - RNA, 19 nt, Artificial Sequence
  Description of Artificial Sequence: Synthetic oligonucleotide
aaguugggcucaguugacc

SEQ ID NO: 3286071 - RNA, 19 nt, Artificial Sequence
  Description of Artificial Sequence: Synthetic oligonucleotide
caaguugggcucaguugac

SEQ ID NO: 3286072 - RNA, 19 nt, Artificial Sequence
  Description of Artificial Sequence: Synthetic oligonucleotide
accaaguugggcucaguug

SEQ ID NO: 3286073 - RNA, 19 nt, Artificial Sequence
  Description of Artificial Sequence: Synthetic oligonucleotide
gaccaaguugggcucaguu

SEQ ID NO: 3286074 - RNA, 19 nt, Artificial Sequence
  Description of Artificial Sequence: Synthetic oligonucleotide
ugaccaaguugggcucagu

SEQ ID NO: 3286075 - RNA, 19 nt, Artificial Sequence
  Description of Artificial Sequence: Synthetic oligonucleotide
cugaccaaguugggcucag

SEQ ID NO: 3286076 - RNA, 19 nt, Artificial Sequence
  Description of Artificial Sequence: Synthetic oligonucleotide
ucugaccaaguugggcuca

SEQ ID NO: 3286077 - RNA, 19 nt, Artificial Sequence
  Description of Artificial Sequence: Synthetic oligonucleotide
cucugaccaaguugggcuc

SEQ ID NO: 3286078 - RNA, 19 nt, Artificial Sequence
  Description of Artificial Sequence: Synthetic oligonucleotide
ucucugaccaaguugggcu

SEQ ID NO: 3286079 - RNA, 19 nt, Artificial Sequence
  Description of Artificial Sequence: Synthetic oligonucleotide
gaucucugaccaaguuggg

SEQ ID NO: 3286080 - RNA, 19 nt, Artificial Sequence
  Description of Artificial Sequence: Synthetic oligonucleotide
cgaucucugaccaaguugg

SEQ ID NO: 3286081 - RNA, 19 nt, Artificial Sequence
  Description of Artificial Sequence: Synthetic oligonucleotide
ucgaucucugaccaaguug

SEQ ID NO: 3286082 - RNA, 19 nt, Artificial Sequence
  Description of Artificial Sequence: Synthetic oligonucleotide
cucgaucucugaccaaguu

SEQ ID NO: 3286083 - RNA, 19 nt, Artificial Sequence
  Description of Artificial Sequence: Synthetic oligonucleotide
ccucgaucucugaccaagu

SEQ ID NO: 3286084 - RNA, 19 nt, Artificial Sequence
  Description of Artificial Sequence: Synthetic oligonucleotide
uccucgaucucugaccaag

SEQ ID NO: 3286085 - RNA, 19 nt, Artificial Sequence
  Description of Artificial Sequence: Synthetic oligonucleotide
cuccucgaucucugaccaa

SEQ ID NO: 3286086 - RNA, 19 nt, Artificial Sequence
  Description of Artificial Sequence: Synthetic oligonucleotide
ccuccucgaucucugacca

SEQ ID NO: 3286087 - RNA, 19 nt, Artificial Sequence
  Description of Artificial Sequence: Synthetic oligonucleotide
aaauccuccucgaucucug

SEQ ID NO: 3286088 - RNA, 19 nt, Artificial Sequence
  Description of Artificial Sequence: Synthetic oligonucleotide
caaauccuccucgaucucu

SEQ ID NO: 3286089 - RNA, 19 nt, Artificial Sequence
  Description of Artificial Sequence: Synthetic oligonucleotide
ucaaauccuccucgaucuc

SEQ ID NO: 3286090 - RNA, 19 nt, Artificial Sequence
  Description of Artificial Sequence: Synthetic oligonucleotide
cucaaauccuccucgaucu

SEQ ID NO: 3286091 - RNA, 19 nt, Artificial Sequence
  Description of Artificial Sequence: Synthetic oligonucleotide
ucucaaauccuccucgauc

SEQ ID NO: 3286092 - RNA, 19 nt, Artificial Sequence
  Description of Artificial Sequence: Synthetic oligonucleotide
cucucaaauccuccucgau

SEQ ID NO: 3286093 - RNA, 19 nt, Artificial Sequence
  Description of Artificial Sequence: Synthetic oligonucleotide
gcucucaaauccuccucga

SEQ ID NO: 3286094 - RNA, 19 nt, Artificial Sequence
  Description of Artificial Sequence: Synthetic oligonucleotide
cgcucucaaauccuccucg

SEQ ID NO: 3286095 - RNA, 19 nt, Artificial Sequence
  Description of Artificial Sequence: Synthetic oligonucleotide
acgcucucaaauccuccuc

SEQ ID NO: 3286096 - RNA, 19 nt, Artificial Sequence
  Description of Artificial Sequence: Synthetic oligonucleotide
cacgcucucaaauccuccu

SEQ ID NO: 3286097 - RNA, 19 nt, Artificial Sequence
  Description of Artificial Sequence: Synthetic oligonucleotide
gcacgcucucaaauccucc

SEQ ID NO: 3286098 - RNA, 19 nt, Artificial Sequence
  Description of Artificial Sequence: Synthetic oligonucleotide
aagcacgcucucaaauccu

SEQ ID NO: 3286099 - RNA, 19 nt, Artificial Sequence
  Description of Artificial Sequence: Synthetic oligonucleotide
gaagcacgcucucaaaucc

SEQ ID NO: 3286100 - RNA, 19 nt, Artificial Sequence
  Description of Artificial Sequence: Synthetic oligonucleotide
cgaagcacgcucucaaauc

SEQ ID NO: 3286101 - RNA, 19 nt, Artificial Sequence
  Description of Artificial Sequence: Synthetic oligonucleotide
ccgaagcacgcucucaaau

SEQ ID NO: 3286102 - RNA, 19 nt, Artificial Sequence
  Description of Artificial Sequence: Synthetic oligonucleotide
accgaagcacgcucucaaa

SEQ ID NO: 3286103 - RNA, 19 nt, Artificial Sequence
  Description of Artificial Sequence: Synthetic oligonucleotide
caccgaagcacgcucucaa

SEQ ID NO: 3286104 - RNA, 19 nt, Artificial Sequence
  Description of Artificial Sequence: Synthetic oligonucleotide
ucaacgguuccgcaccgaa

SEQ ID NO: 3286105 - RNA, 19 nt, Artificial Sequence
  Description of Artificial Sequence: Synthetic oligonucleotide
uucaacgguuccgcaccga

SEQ ID NO: 3286106 - RNA, 19 nt, Artificial Sequence
  Description of Artificial Sequence: Synthetic oligonucleotide
ucuucaacgguuccgcacc

SEQ ID NO: 3286107 - RNA, 19 nt, Artificial Sequence
  Description of Artificial Sequence: Synthetic oligonucleotide
uucuucaacgguuccgcac

SEQ ID NO: 3286108 - RNA, 19 nt, Artificial Sequence
  Description of Artificial Sequence: Synthetic oligonucleotide
uuucuucaacgguuccgca

SEQ ID NO: 3286109 - RNA, 19 nt, Artificial Sequence
  Description of Artificial Sequence: Synthetic oligonucleotide
ucuuucuucaacgguuccg

SEQ ID NO: 3286110 - RNA, 19 nt, Artificial Sequence
  Description of Artificial Sequence: Synthetic oligonucleotide
gucuuucuucaacgguucc

SEQ ID NO: 3286111 - RNA, 19 nt, Artificial Sequence
  Description of Artificial Sequence: Synthetic oligonucleotide
aagucuuucuucaacgguu

SEQ ID NO: 3286112 - RNA, 19 nt, Artificial Sequence
  Description of Artificial Sequence: Synthetic oligonucleotide
gaagucuuucuucaacggu

SEQ ID NO: 3286113 - RNA, 19 nt, Artificial Sequence
  Description of Artificial Sequence: Synthetic oligonucleotide
ugaagucuuucuucaacgg

SEQ ID NO: 3286114 - RNA, 19 nt, Artificial Sequence
  Description of Artificial Sequence: Synthetic oligonucleotide
agcggcucgcugaagucuu

SEQ ID NO: 3286115 - RNA, 19 nt, Artificial Sequence
  Description of Artificial Sequence: Synthetic oligonucleotide
uucagcggcucgcugaagu

SEQ ID NO: 3286116 - RNA, 19 nt, Artificial Sequence
  Description of Artificial Sequence: Synthetic oligonucleotide
aguucagcggcucgcugaa

SEQ ID NO: 3286117 - RNA, 19 nt, Artificial Sequence
  Description of Artificial Sequence: Synthetic oligonucleotide
aaguucagcggcucgcuga

SEQ ID NO: 3286118 - RNA, 19 nt, Artificial Sequence
  Description of Artificial Sequence: Synthetic oligonucleotide
uaguccaaguucagcggcu

SEQ ID NO: 3286119 - RNA, 19 nt, Artificial Sequence
  Description of Artificial Sequence: Synthetic oligonucleotide
uuaguccaaguucagcggc

SEQ ID NO: 3286120 - RNA, 19 nt, Artificial Sequence
  Description of Artificial Sequence: Synthetic oligonucleotide
cuuaguccaaguucagcgg

SEQ ID NO: 3286121 - RNA, 19 nt, Artificial Sequence
  Description of Artificial Sequence: Synthetic oligonucleotide
ccuuaguccaaguucagcg

SEQ ID NO: 3286122 - RNA, 19 nt, Artificial Sequence
  Description of Artificial Sequence: Synthetic oligonucleotide
cccuuaguccaaguucagc

SEQ ID NO: 3286123 - RNA, 19 nt, Artificial Sequence
  Description of Artificial Sequence: Synthetic oligonucleotide
gcccuuaguccaaguucag

SEQ ID NO: 3286124 - RNA, 19 nt, Artificial Sequence
  Description of Artificial Sequence: Synthetic oligonucleotide
ggcccuuaguccaaguuca

SEQ ID NO: 3286125 - RNA, 19 nt, Artificial Sequence
  Description of Artificial Sequence: Synthetic oligonucleotide
aggcccuuaguccaaguuc

SEQ ID NO: 3286126 - RNA, 19 nt, Artificial Sequence
  Description of Artificial Sequence: Synthetic oligonucleotide
caggcccuuaguccaaguu

SEQ ID NO: 3286127 - RNA, 19 nt, Artificial Sequence
  Description of Artificial Sequence: Synthetic oligonucleotide
ucaggcccuuaguccaagu

SEQ ID NO: 3286128 - RNA, 19 nt, Artificial Sequence
  Description of Artificial Sequence: Synthetic oligonucleotide
uucaggcccuuaguccaag

SEQ ID NO: 3286129 - RNA, 19 nt, Artificial Sequence
  Description of Artificial Sequence: Synthetic oligonucleotide
gugauuucaggcccuuagu

SEQ ID NO: 3286130 - RNA, 19 nt, Artificial Sequence
  Description of Artificial Sequence: Synthetic oligonucleotide
agugauuucaggcccuuag

SEQ ID NO: 3286131 - RNA, 19 nt, Artificial Sequence
  Description of Artificial Sequence: Synthetic oligonucleotide
uaaaaccaagugauuucag

SEQ ID NO: 3286132 - RNA, 19 nt, Artificial Sequence
  Description of Artificial Sequence: Synthetic oligonucleotide
gaguggucaccgggcguga

SEQ ID NO: 3286133 - RNA, 19 nt, Artificial Sequence
  Description of Artificial Sequence: Synthetic oligonucleotide
caccgggcgugagagaacg

SEQ ID NO: 3286134 - RNA, 19 nt, Artificial Sequence
  Description of Artificial Sequence: Synthetic oligonucleotide
accgggcgugagagaacgg

SEQ ID NO: 3286135 - RNA, 19 nt, Artificial Sequence
  Description of Artificial Sequence: Synthetic oligonucleotide
agaacggcucugugauuca

SEQ ID NO: 3286136 - RNA, 19 nt, Artificial Sequence
  Description of Artificial Sequence: Synthetic oligonucleotide
ugauucaguccagcuaguc

SEQ ID NO: 3286137 - RNA, 19 nt, Artificial Sequence
  Description of Artificial Sequence: Synthetic oligonucleotide
uucaguccagcuagucagc

SEQ ID NO: 3286138 - RNA, 19 nt, Artificial Sequence
  Description of Artificial Sequence: Synthetic oligonucleotide
caguccagcuagucagcgc

SEQ ID NO: 3286139 - RNA, 19 nt, Artificial Sequence
  Description of Artificial Sequence: Synthetic oligonucleotide
ccagcuagucagcgcuacg

SEQ ID NO: 3286140 - RNA, 19 nt, Artificial Sequence
  Description of Artificial Sequence: Synthetic oligonucleotide
cagcuagucagcgcuacgu

SEQ ID NO: 3286141 - RNA, 19 nt, Artificial Sequence
  Description of Artificial Sequence: Synthetic oligonucleotide
agcuagucagcgcuacguc

SEQ ID NO: 3286142 - RNA, 19 nt, Artificial Sequence
  Description of Artificial Sequence: Synthetic oligonucleotide
gcuagucagcgcuacgucg

SEQ ID NO: 3286143 - RNA, 19 nt, Artificial Sequence
  Description of Artificial Sequence: Synthetic oligonucleotide
cuagucagcgcuacgucgu

SEQ ID NO: 3286144 - RNA, 19 nt, Artificial Sequence
  Description of Artificial Sequence: Synthetic oligonucleotide
uagucagcgcuacgucguc

SEQ ID NO: 3286145 - RNA, 19 nt, Artificial Sequence
  Description of Artificial Sequence: Synthetic oligonucleotide
agucagcgcuacgucguca

SEQ ID NO: 3286146 - RNA, 19 nt, Artificial Sequence
  Description of Artificial Sequence: Synthetic oligonucleotide
gucagcgcuacgucgucaa

SEQ ID NO: 3286147 - RNA, 19 nt, Artificial Sequence
  Description of Artificial Sequence: Synthetic oligonucleotide
cgcuacgucgucaaguuaa

SEQ ID NO: 3286148 - RNA, 19 nt, Artificial Sequence
  Description of Artificial Sequence: Synthetic oligonucleotide
gcuacgucgucaaguuaaa

SEQ ID NO: 3286149 - RNA, 19 nt, Artificial Sequence
  Description of Artificial Sequence: Synthetic oligonucleotide
cuacgucgucaaguuaaaa

SEQ ID NO: 3286150 - RNA, 19 nt, Artificial Sequence
  Description of Artificial Sequence: Synthetic oligonucleotide
uacgucgucaaguuaaaag

SEQ ID NO: 3286151 - RNA, 19 nt, Artificial Sequence
  Description of Artificial Sequence: Synthetic oligonucleotide
uuaaaaggaaguuguguug

SEQ ID NO: 3286152 - RNA, 19 nt, Artificial Sequence
  Description of Artificial Sequence: Synthetic oligonucleotide
uguuggaggcugcauugau

SEQ ID NO: 3286153 - RNA, 19 nt, Artificial Sequence
  Description of Artificial Sequence: Synthetic oligonucleotide
guuggaggcugcauugaua

SEQ ID NO: 3286154 - RNA, 19 nt, Artificial Sequence
  Description of Artificial Sequence: Synthetic oligonucleotide
aagaugguuaauucacaag

SEQ ID NO: 3286155 - RNA, 19 nt, Artificial Sequence
  Description of Artificial Sequence: Synthetic oligonucleotide
aggaaaaaucacugacucg

SEQ ID NO: 3286156 - RNA, 19 nt, Artificial Sequence
  Description of Artificial Sequence: Synthetic oligonucleotide
aaaaaucacugacucgaau

SEQ ID NO: 3286157 - RNA, 19 nt, Artificial Sequence
  Description of Artificial Sequence: Synthetic oligonucleotide
aaaucacugacucgaaucc

SEQ ID NO: 3286158 - RNA, 19 nt, Artificial Sequence
  Description of Artificial Sequence: Synthetic oligonucleotide
aaucacugacucgaauccu

SEQ ID NO: 3286159 - RNA, 19 nt, Artificial Sequence
  Description of Artificial Sequence: Synthetic oligonucleotide
aucacugacucgaauccug

SEQ ID NO: 3286160 - RNA, 19 nt, Artificial Sequence
  Description of Artificial Sequence: Synthetic oligonucleotide
acugacucgaauccuguac

SEQ ID NO: 3286161 - RNA, 19 nt, Artificial Sequence
  Description of Artificial Sequence: Synthetic oligonucleotide
ucgaauccuguacccaauc

SEQ ID NO: 3286162 - RNA, 19 nt, Artificial Sequence
  Description of Artificial Sequence: Synthetic oligonucleotide
cgaauccuguacccaauca

SEQ ID NO: 3286163 - RNA, 19 nt, Artificial Sequence
  Description of Artificial Sequence: Synthetic oligonucleotide
aauccuguacccaaucaug

SEQ ID NO: 3286164 - RNA, 19 nt, Artificial Sequence
  Description of Artificial Sequence: Synthetic oligonucleotide
cccaaucauguguuacuaa

SEQ ID NO: 3286165 - RNA, 19 nt, Artificial Sequence
  Description of Artificial Sequence: Synthetic oligonucleotide
ccaaucauguguuacuaaa

SEQ ID NO: 3286166 - RNA, 19 nt, Artificial Sequence
  Description of Artificial Sequence: Synthetic oligonucleotide
aaucauguguuacuaaacg

SEQ ID NO: 3286167 - RNA, 19 nt, Artificial Sequence
  Description of Artificial Sequence: Synthetic oligonucleotide
aucauguguuacuaaacgg

SEQ ID NO: 3286168 - RNA, 19 nt, Artificial Sequence
  Description of Artificial Sequence: Synthetic oligonucleotide
auguguuacuaaacggacu

SEQ ID NO: 3286169 - RNA, 19 nt, Artificial Sequence
  Description of Artificial Sequence: Synthetic oligonucleotide
uguguuacuaaacggacuu

SEQ ID NO: 3286170 - RNA, 19 nt, Artificial Sequence
  Description of Artificial Sequence: Synthetic oligonucleotide
uguuacuaaacggacuuac

SEQ ID NO: 3286171 - RNA, 19 nt, Artificial Sequence
  Description of Artificial Sequence: Synthetic oligonucleotide
guuacuaaacggacuuacu

SEQ ID NO: 3286172 - RNA, 19 nt, Artificial Sequence
  Description of Artificial Sequence: Synthetic oligonucleotide
cuaaacggacuuacugaua

SEQ ID NO: 3286173 - RNA, 19 nt, Artificial Sequence
  Description of Artificial Sequence: Synthetic oligonucleotide
aacggacuuacugauaagg

SEQ ID NO: 3286174 - RNA, 19 nt, Artificial Sequence
  Description of Artificial Sequence: Synthetic oligonucleotide
acggacuuacugauaaggc

SEQ ID NO: 3286175 - RNA, 19 nt, Artificial Sequence
  Description of Artificial Sequence: Synthetic oligonucleotide
cggacuuacugauaaggca

SEQ ID NO: 3286176 - RNA, 19 nt, Artificial Sequence
  Description of Artificial Sequence: Synthetic oligonucleotide
ggacuuacugauaaggcag

SEQ ID NO: 3286177 - RNA, 19 nt, Artificial Sequence
  Description of Artificial Sequence: Synthetic oligonucleotide
gacuuacugauaaggcaga

SEQ ID NO: 3286178 - RNA, 19 nt, Artificial Sequence
  Description of Artificial Sequence: Synthetic oligonucleotide
gggaacagccuguguagcc

SEQ ID NO: 3286179 - RNA, 19 nt, Artificial Sequence
  Description of Artificial Sequence: Synthetic oligonucleotide
ggaacagccuguguagcca

SEQ ID NO: 3286180 - RNA, 19 nt, Artificial Sequence
  Description of Artificial Sequence: Synthetic oligonucleotide
aacagccuguguagccaau

SEQ ID NO: 3286181 - RNA, 19 nt, Artificial Sequence
  Description of Artificial Sequence: Synthetic oligonucleotide
uguguagccaauaugagga

SEQ ID NO: 3286182 - RNA, 19 nt, Artificial Sequence
  Description of Artificial Sequence: Synthetic oligonucleotide
guguagccaauaugaggag

SEQ ID NO: 3286183 - RNA, 19 nt, Artificial Sequence
  Description of Artificial Sequence: Synthetic oligonucleotide
gaggagaagguacgcccau

SEQ ID NO: 3286184 - RNA, 19 nt, Artificial Sequence
  Description of Artificial Sequence: Synthetic oligonucleotide
aggagaagguacgcccaug

SEQ ID NO: 3286185 - RNA, 19 nt, Artificial Sequence
  Description of Artificial Sequence: Synthetic oligonucleotide
ggagaagguacgcccaugc

SEQ ID NO: 3286186 - RNA, 19 nt, Artificial Sequence
  Description of Artificial Sequence: Synthetic oligonucleotide
gaagguacgcccaugcauc

SEQ ID NO: 3286187 - RNA, 19 nt, Artificial Sequence
  Description of Artificial Sequence: Synthetic oligonucleotide
aucgacuccuugcgggcgc

SEQ ID NO: 3286188 - RNA, 19 nt, Artificial Sequence
  Description of Artificial Sequence: Synthetic oligonucleotide
ggcucugucaggaguugcc

SEQ ID NO: 3286189 - RNA, 19 nt, Artificial Sequence
  Description of Artificial Sequence: Synthetic oligonucleotide
gcagugguauuguuacaag

SEQ ID NO: 3286190 - RNA, 19 nt, Artificial Sequence
  Description of Artificial Sequence: Synthetic oligonucleotide
auaaaugaggaugagugga

SEQ ID NO: 3286191 - RNA, 19 nt, Artificial Sequence
  Description of Artificial Sequence: Synthetic oligonucleotide
uggagaggcaaagucaguu

SEQ ID NO: 3286192 - RNA, 19 nt, Artificial Sequence
  Description of Artificial Sequence: Synthetic oligonucleotide
caguuaccaggauacugag

SEQ ID NO: 3286193 - RNA, 19 nt, Artificial Sequence
  Description of Artificial Sequence: Synthetic oligonucleotide
gacccuucagagguggaag

SEQ ID NO: 3286194 - RNA, 19 nt, Artificial Sequence
  Description of Artificial Sequence: Synthetic oligonucleotide
cggggaaggacaggggauc

SEQ ID NO: 3286195 - RNA, 19 nt, Artificial Sequence
  Description of Artificial Sequence: Synthetic oligonucleotide
ggacaggggaucagucaug

SEQ ID NO: 3286196 - RNA, 19 nt, Artificial Sequence
  Description of Artificial Sequence: Synthetic oligonucleotide
gacaggggaucagucauga

SEQ ID NO: 3286197 - RNA, 19 nt, Artificial Sequence
  Description of Artificial Sequence: Synthetic oligonucleotide
agucaugagcuaaucagcc

SEQ ID NO: 3286198 - RNA, 19 nt, Artificial Sequence
  Description of Artificial Sequence: Synthetic oligonucleotide
gucaugagcuaaucagccu

SEQ ID NO: 3286199 - RNA, 19 nt, Artificial Sequence
  Description of Artificial Sequence: Synthetic oligonucleotide
agcucuccucaugucccgg

SEQ ID NO: 3286200 - RNA, 19 nt, Artificial Sequence
  Description of Artificial Sequence: Synthetic oligonucleotide
ucaugucccggaucugacc

SEQ ID NO: 3286201 - RNA, 19 nt, Artificial Sequence
  Description of Artificial Sequence: Synthetic oligonucleotide
gaucugacccugauagacc

SEQ ID NO: 3286202 - RNA, 19 nt, Artificial Sequence
  Description of Artificial Sequence: Synthetic oligonucleotide
aucugacccugauagaccu

SEQ ID NO: 3286203 - RNA, 19 nt, Artificial Sequence
  Description of Artificial Sequence: Synthetic oligonucleotide
aucagccagcugacaucgg

SEQ ID NO: 3286204 - RNA, 19 nt, Artificial Sequence
  Description of Artificial Sequence: Synthetic oligonucleotide
gccagcugacaucggacgc

SEQ ID NO: 3286205 - RNA, 19 nt, Artificial Sequence
  Description of Artificial Sequence: Synthetic oligonucleotide
cugacaucggacgccagac

SEQ ID NO: 3286206 - RNA, 19 nt, Artificial Sequence
  Description of Artificial Sequence: Synthetic oligonucleotide
caucggacgccagaccaag

SEQ ID NO: 3286207 - RNA, 19 nt, Artificial Sequence
  Description of Artificial Sequence: Synthetic oligonucleotide
gaccaagcaacucauuagg

SEQ ID NO: 3286208 - RNA, 19 nt, Artificial Sequence
  Description of Artificial Sequence: Synthetic oligonucleotide
accaagcaacucauuagga

SEQ ID NO: 3286209 - RNA, 19 nt, Artificial Sequence
  Description of Artificial Sequence: Synthetic oligonucleotide
ccaagcaacucauuaggaa

SEQ ID NO: 3286210 - RNA, 19 nt, Artificial Sequence
  Description of Artificial Sequence: Synthetic oligonucleotide
caagcaacucauuaggaag

SEQ ID NO: 3286211 - RNA, 19 nt, Artificial Sequence
  Description of Artificial Sequence: Synthetic oligonucleotide
aagcaacucauuaggaagu

SEQ ID NO: 3286212 - RNA, 19 nt, Artificial Sequence
  Description of Artificial Sequence: Synthetic oligonucleotide
gcaacucauuaggaaguac

SEQ ID NO: 3286213 - RNA, 19 nt, Artificial Sequence
  Description of Artificial Sequence: Synthetic oligonucleotide
auuaggaaguacauccuua

SEQ ID NO: 3286214 - RNA, 19 nt, Artificial Sequence
  Description of Artificial Sequence: Synthetic oligonucleotide
aaguacauccuuaagcagg

SEQ ID NO: 3286215 - RNA, 19 nt, Artificial Sequence
  Description of Artificial Sequence: Synthetic oligonucleotide
aggaccauaggaaucuuga

SEQ ID NO: 3286216 - RNA, 19 nt, Artificial Sequence
  Description of Artificial Sequence: Synthetic oligonucleotide
ggaccauaggaaucuugac

SEQ ID NO: 3286217 - RNA, 19 nt, Artificial Sequence
  Description of Artificial Sequence: Synthetic oligonucleotide
aaucuugacaaagccugac

SEQ ID NO: 3286218 - RNA, 19 nt, Artificial Sequence
  Description of Artificial Sequence: Synthetic oligonucleotide
ggacguggcacaaaaccuc

SEQ ID NO: 3286219 - RNA, 19 nt, Artificial Sequence
  Description of Artificial Sequence: Synthetic oligonucleotide
acguggcacaaaaccucgu

SEQ ID NO: 3286220 - RNA, 19 nt, Artificial Sequence
  Description of Artificial Sequence: Synthetic oligonucleotide
cguggcacaaaaccucguc

SEQ ID NO: 3286221 - RNA, 19 nt, Artificial Sequence
  Description of Artificial Sequence: Synthetic oligonucleotide
guggcacaaaaccucgucu

SEQ ID NO: 3286222 - RNA, 19 nt, Artificial Sequence
  Description of Artificial Sequence: Synthetic oligonucleotide
uggcacaaaaccucgucug

SEQ ID NO: 3286223 - RNA, 19 nt, Artificial Sequence
  Description of Artificial Sequence: Synthetic oligonucleotide
ggcacaaaaccucgucugu

SEQ ID NO: 3286224 - RNA, 19 nt, Artificial Sequence
  Description of Artificial Sequence: Synthetic oligonucleotide
gcacaaaaccucgucuguc

SEQ ID NO: 3286225 - RNA, 19 nt, Artificial Sequence
  Description of Artificial Sequence: Synthetic oligonucleotide
aagggcuacaugaucguca

SEQ ID NO: 3286226 - RNA, 19 nt, Artificial Sequence
  Description of Artificial Sequence: Synthetic oligonucleotide
agggcuacaugaucgucaa

SEQ ID NO: 3286227 - RNA, 19 nt, Artificial Sequence
  Description of Artificial Sequence: Synthetic oligonucleotide
cacccacauuucaggguuc

SEQ ID NO: 3286228 - RNA, 19 nt, Artificial Sequence
  Description of Artificial Sequence: Synthetic oligonucleotide
cccacauuucaggguucuu

SEQ ID NO: 3286229 - RNA, 19 nt, Artificial Sequence
  Description of Artificial Sequence: Synthetic oligonucleotide
aaacccugccucuguuaga

SEQ ID NO: 3286230 - RNA, 19 nt, Artificial Sequence
  Description of Artificial Sequence: Synthetic oligonucleotide
uuacaaaaguacggcucag

SEQ ID NO: 3286231 - RNA, 19 nt, Artificial Sequence
  Description of Artificial Sequence: Synthetic oligonucleotide
uacaaaaguacggcucaga

SEQ ID NO: 3286232 - RNA, 19 nt, Artificial Sequence
  Description of Artificial Sequence: Synthetic oligonucleotide
acaaaaguacggcucagau

SEQ ID NO: 3286233 - RNA, 19 nt, Artificial Sequence
  Description of Artificial Sequence: Synthetic oligonucleotide
caaaaguacggcucagaug

SEQ ID NO: 3286234 - RNA, 19 nt, Artificial Sequence
  Description of Artificial Sequence: Synthetic oligonucleotide
aguacggcucagaugugcc

SEQ ID NO: 3286235 - RNA, 19 nt, Artificial Sequence
  Description of Artificial Sequence: Synthetic oligonucleotide
guacggcucagaugugccc

SEQ ID NO: 3286236 - RNA, 19 nt, Artificial Sequence
  Description of Artificial Sequence: Synthetic oligonucleotide
uguuuuuccugauagauaa

SEQ ID NO: 3286237 - RNA, 19 nt, Artificial Sequence
  Description of Artificial Sequence: Synthetic oligonucleotide
guuuuuccugauagauaaa

SEQ ID NO: 3286238 - RNA, 19 nt, Artificial Sequence
  Description of Artificial Sequence: Synthetic oligonucleotide
uuuccugauagauaaacug

SEQ ID NO: 3286239 - RNA, 19 nt, Artificial Sequence
  Description of Artificial Sequence: Synthetic oligonucleotide
uuccugauagauaaacuga

SEQ ID NO: 3286240 - RNA, 19 nt, Artificial Sequence
  Description of Artificial Sequence: Synthetic oligonucleotide
aaugccuuuaaccaagaca

SEQ ID NO: 3286241 - RNA, 19 nt, Artificial Sequence
  Description of Artificial Sequence: Synthetic oligonucleotide
ucagcuccuuaauccaagg

SEQ ID NO: 3286242 - RNA, 19 nt, Artificial Sequence
  Description of Artificial Sequence: Synthetic oligonucleotide
cggcuguucaccaaaaucc

SEQ ID NO: 3286243 - RNA, 19 nt, Artificial Sequence
  Description of Artificial Sequence: Synthetic oligonucleotide
uguucaccaaaauccgaaa

SEQ ID NO: 3286244 - RNA, 19 nt, Artificial Sequence
  Description of Artificial Sequence: Synthetic oligonucleotide
uucaccaaaauccgaaaug

SEQ ID NO: 3286245 - RNA, 19 nt, Artificial Sequence
  Description of Artificial Sequence: Synthetic oligonucleotide
aaauccgaaaugaguucca

SEQ ID NO: 3286246 - RNA, 19 nt, Artificial Sequence
  Description of Artificial Sequence: Synthetic oligonucleotide
aauccgaaaugaguuccac

SEQ ID NO: 3286247 - RNA, 19 nt, Artificial Sequence
  Description of Artificial Sequence: Synthetic oligonucleotide
aguuccacaaauggagcgc

SEQ ID NO: 3286248 - RNA, 19 nt, Artificial Sequence
  Description of Artificial Sequence: Synthetic oligonucleotide
guuccacaaauggagcgcu

SEQ ID NO: 3286249 - RNA, 19 nt, Artificial Sequence
  Description of Artificial Sequence: Synthetic oligonucleotide
uuccacaaauggagcgcug

SEQ ID NO: 3286250 - RNA, 19 nt, Artificial Sequence
  Description of Artificial Sequence: Synthetic oligonucleotide
uccacaaauggagcgcugu

SEQ ID NO: 3286251 - RNA, 19 nt, Artificial Sequence
  Description of Artificial Sequence: Synthetic oligonucleotide
agagguuacaaagcuauau

SEQ ID NO: 3286252 - RNA, 19 nt, Artificial Sequence
  Description of Artificial Sequence: Synthetic oligonucleotide
agguuacaaagcuauauau

SEQ ID NO: 3286253 - RNA, 19 nt, Artificial Sequence
  Description of Artificial Sequence: Synthetic oligonucleotide
gguuacaaagcuauauaua

SEQ ID NO: 3286254 - RNA, 19 nt, Artificial Sequence
  Description of Artificial Sequence: Synthetic oligonucleotide
acaaagcuauauauaaaca

SEQ ID NO: 3286255 - RNA, 19 nt, Artificial Sequence
  Description of Artificial Sequence: Synthetic oligonucleotide
aaauuugaaaaucgguauc

SEQ ID NO: 3286256 - RNA, 19 nt, Artificial Sequence
  Description of Artificial Sequence: Synthetic oligonucleotide
aauuugaaaaucgguaucg

SEQ ID NO: 3286257 - RNA, 19 nt, Artificial Sequence
  Description of Artificial Sequence: Synthetic oligonucleotide
auuugaaaaucgguaucgu

SEQ ID NO: 3286258 - RNA, 19 nt, Artificial Sequence
  Description of Artificial Sequence: Synthetic oligonucleotide
ugaaaaucgguaucguggc

SEQ ID NO: 3286259 - RNA, 19 nt, Artificial Sequence
  Description of Artificial Sequence: Synthetic oligonucleotide
gaaaaucgguaucguggca

SEQ ID NO: 3286260 - RNA, 19 nt, Artificial Sequence
  Description of Artificial Sequence: Synthetic oligonucleotide
aaaaucgguaucguggcag

SEQ ID NO: 3286261 - RNA, 19 nt, Artificial Sequence
  Description of Artificial Sequence: Synthetic oligonucleotide
cgguaucguggcagagagc

SEQ ID NO: 3286262 - RNA, 19 nt, Artificial Sequence
  Description of Artificial Sequence: Synthetic oligonucleotide
gguaucguggcagagagcu

SEQ ID NO: 3286263 - RNA, 19 nt, Artificial Sequence
  Description of Artificial Sequence: Synthetic oligonucleotide
ugccaggauuuguaaauua

SEQ ID NO: 3286264 - RNA, 19 nt, Artificial Sequence
  Description of Artificial Sequence: Synthetic oligonucleotide
gccaggauuuguaaauuac

SEQ ID NO: 3286265 - RNA, 19 nt, Artificial Sequence
  Description of Artificial Sequence: Synthetic oligonucleotide
uuuguaaauuacaagacgu

SEQ ID NO: 3286266 - RNA, 19 nt, Artificial Sequence
  Description of Artificial Sequence: Synthetic oligonucleotide
uuguaaauuacaagacguu

SEQ ID NO: 3286267 - RNA, 19 nt, Artificial Sequence
  Description of Artificial Sequence: Synthetic oligonucleotide
guaaauuacaagacguucg

SEQ ID NO: 3286268 - RNA, 19 nt, Artificial Sequence
  Description of Artificial Sequence: Synthetic oligonucleotide
uaaauuacaagacguucga

SEQ ID NO: 3286269 - RNA, 19 nt, Artificial Sequence
  Description of Artificial Sequence: Synthetic oligonucleotide
aaauuacaagacguucgaa

SEQ ID NO: 3286270 - RNA, 19 nt, Artificial Sequence
  Description of Artificial Sequence: Synthetic oligonucleotide
aauuacaagacguucgaaa

SEQ ID NO: 3286271 - RNA, 19 nt, Artificial Sequence
  Description of Artificial Sequence: Synthetic oligonucleotide
acaagacguucgaaauuau

SEQ ID NO: 3286272 - RNA, 19 nt, Artificial Sequence
  Description of Artificial Sequence: Synthetic oligonucleotide
gacguucgaaauuauuaua

SEQ ID NO: 3286273 - RNA, 19 nt, Artificial Sequence
  Description of Artificial Sequence: Synthetic oligonucleotide
acguucgaaauuauuauaa

SEQ ID NO: 3286274 - RNA, 19 nt, Artificial Sequence
  Description of Artificial Sequence: Synthetic oligonucleotide
cguucgaaauuauuauaaa

SEQ ID NO: 3286275 - RNA, 19 nt, Artificial Sequence
  Description of Artificial Sequence: Synthetic oligonucleotide
agagccagcuguugauaug

SEQ ID NO: 3286276 - RNA, 19 nt, Artificial Sequence
  Description of Artificial Sequence: Synthetic oligonucleotide
guugauaugcugcacacga

SEQ ID NO: 3286277 - RNA, 19 nt, Artificial Sequence
  Description of Artificial Sequence: Synthetic oligonucleotide
auaugcugcacacgauaac

SEQ ID NO: 3286278 - RNA, 19 nt, Artificial Sequence
  Description of Artificial Sequence: Synthetic oligonucleotide
uaugcugcacacgauaacu

SEQ ID NO: 3286279 - RNA, 19 nt, Artificial Sequence
  Description of Artificial Sequence: Synthetic oligonucleotide
augcugcacacgauaacug

SEQ ID NO: 3286280 - RNA, 19 nt, Artificial Sequence
  Description of Artificial Sequence: Synthetic oligonucleotide
gcugcacacgauaacugau

SEQ ID NO: 3286281 - RNA, 19 nt, Artificial Sequence
  Description of Artificial Sequence: Synthetic oligonucleotide
cacacgauaacugauaugg

SEQ ID NO: 3286282 - RNA, 19 nt, Artificial Sequence
  Description of Artificial Sequence: Synthetic oligonucleotide
acacgauaacugauauggu

SEQ ID NO: 3286283 - RNA, 19 nt, Artificial Sequence
  Description of Artificial Sequence: Synthetic oligonucleotide
acgauaacugauauggucc

SEQ ID NO: 3286284 - RNA, 19 nt, Artificial Sequence
  Description of Artificial Sequence: Synthetic oligonucleotide
cgauaacugauauggucca

SEQ ID NO: 3286285 - RNA, 19 nt, Artificial Sequence
  Description of Artificial Sequence: Synthetic oligonucleotide
gauaacugauaugguccag

SEQ ID NO: 3286286 - RNA, 19 nt, Artificial Sequence
  Description of Artificial Sequence: Synthetic oligonucleotide
aacugauaugguccagguu

SEQ ID NO: 3286287 - RNA, 19 nt, Artificial Sequence
  Description of Artificial Sequence: Synthetic oligonucleotide
acugauaugguccagguug

SEQ ID NO: 3286288 - RNA, 19 nt, Artificial Sequence
  Description of Artificial Sequence: Synthetic oligonucleotide
cagguugccuucggagaua

SEQ ID NO: 3286289 - RNA, 19 nt, Artificial Sequence
  Description of Artificial Sequence: Synthetic oligonucleotide
caaccucuacagaacuacc

SEQ ID NO: 3286290 - RNA, 19 nt, Artificial Sequence
  Description of Artificial Sequence: Synthetic oligonucleotide
aaccucuacagaacuacca

SEQ ID NO: 3286291 - RNA, 19 nt, Artificial Sequence
  Description of Artificial Sequence: Synthetic oligonucleotide
ccucuacagaacuaccaag

SEQ ID NO: 3286292 - RNA, 19 nt, Artificial Sequence
  Description of Artificial Sequence: Synthetic oligonucleotide
ucgaagacauuaaauucga

SEQ ID NO: 3286293 - RNA, 19 nt, Artificial Sequence
  Description of Artificial Sequence: Synthetic oligonucleotide
cgaagacauuaaauucgag

SEQ ID NO: 3286294 - RNA, 19 nt, Artificial Sequence
  Description of Artificial Sequence: Synthetic oligonucleotide
gacauuaaauucgagcuag

SEQ ID NO: 3286295 - RNA, 19 nt, Artificial Sequence
  Description of Artificial Sequence: Synthetic oligonucleotide
acauuaaauucgagcuaga

SEQ ID NO: 3286296 - RNA, 19 nt, Artificial Sequence
  Description of Artificial Sequence: Synthetic oligonucleotide
cauuaaauucgagcuagag

SEQ ID NO: 3286297 - RNA, 19 nt, Artificial Sequence
  Description of Artificial Sequence: Synthetic oligonucleotide
auuaaauucgagcuagaga

SEQ ID NO: 3286298 - RNA, 19 nt, Artificial Sequence
  Description of Artificial Sequence: Synthetic oligonucleotide
agcugagaaguccauccga

SEQ ID NO: 3286299 - RNA, 19 nt, Artificial Sequence
  Description of Artificial Sequence: Synthetic oligonucleotide
gaaguccauccgacuucac

SEQ ID NO: 3286300 - RNA, 19 nt, Artificial Sequence
  Description of Artificial Sequence: Synthetic oligonucleotide
ggaccacgucuaucagcgg

SEQ ID NO: 3286301 - RNA, 19 nt, Artificial Sequence
  Description of Artificial Sequence: Synthetic oligonucleotide
ccacgucuaucagcgggcc

SEQ ID NO: 3286302 - RNA, 19 nt, Artificial Sequence
  Description of Artificial Sequence: Synthetic oligonucleotide
cacgucuaucagcgggccc

SEQ ID NO: 3286303 - RNA, 19 nt, Artificial Sequence
  Description of Artificial Sequence: Synthetic oligonucleotide
gggagaaggauucggacga

SEQ ID NO: 3286304 - RNA, 19 nt, Artificial Sequence
  Description of Artificial Sequence: Synthetic oligonucleotide
augagccaugacgagguuu

SEQ ID NO: 3286305 - RNA, 19 nt, Artificial Sequence
  Description of Artificial Sequence: Synthetic oligonucleotide
ugagccaugacgagguuuc

SEQ ID NO: 3286306 - RNA, 19 nt, Artificial Sequence
  Description of Artificial Sequence: Synthetic oligonucleotide
gagccaugacgagguuucu

SEQ ID NO: 3286307 - RNA, 19 nt, Artificial Sequence
  Description of Artificial Sequence: Synthetic oligonucleotide
ccaugacgagguuucuucc

SEQ ID NO: 3286308 - RNA, 19 nt, Artificial Sequence
  Description of Artificial Sequence: Synthetic oligonucleotide
caugacgagguuucuuccg

SEQ ID NO: 3286309 - RNA, 19 nt, Artificial Sequence
  Description of Artificial Sequence: Synthetic oligonucleotide
ugacgagguuucuuccguc

SEQ ID NO: 3286310 - RNA, 19 nt, Artificial Sequence
  Description of Artificial Sequence: Synthetic oligonucleotide
gacgagguuucuuccguca

SEQ ID NO: 3286311 - RNA, 19 nt, Artificial Sequence
  Description of Artificial Sequence: Synthetic oligonucleotide
acgagguuucuuccgucaa

SEQ ID NO: 3286312 - RNA, 19 nt, Artificial Sequence
  Description of Artificial Sequence: Synthetic oligonucleotide
cgagguuucuuccgucaac

SEQ ID NO: 3286313 - RNA, 19 nt, Artificial Sequence
  Description of Artificial Sequence: Synthetic oligonucleotide
gagguuucuuccgucaaca

SEQ ID NO: 3286314 - RNA, 19 nt, Artificial Sequence
  Description of Artificial Sequence: Synthetic oligonucleotide
cagccacauccccuugauc

SEQ ID NO: 3286315 - RNA, 19 nt, Artificial Sequence
  Description of Artificial Sequence: Synthetic oligonucleotide
agccacauccccuugauca

SEQ ID NO: 3286316 - RNA, 19 nt, Artificial Sequence
  Description of Artificial Sequence: Synthetic oligonucleotide
gccacauccccuugaucau

SEQ ID NO: 3286317 - RNA, 19 nt, Artificial Sequence
  Description of Artificial Sequence: Synthetic oligonucleotide
ugcaaguguacggccagaa

SEQ ID NO: 3286318 - RNA, 19 nt, Artificial Sequence
  Description of Artificial Sequence: Synthetic oligonucleotide
gcaaguguacggccagaag

SEQ ID NO: 3286319 - RNA, 19 nt, Artificial Sequence
  Description of Artificial Sequence: Synthetic oligonucleotide
gcgccgcuuagccaaauuc

SEQ ID NO: 3286320 - RNA, 19 nt, Artificial Sequence
  Description of Artificial Sequence: Synthetic oligonucleotide
gccgcuuagccaaauuccc

SEQ ID NO: 3286321 - RNA, 19 nt, Artificial Sequence
  Description of Artificial Sequence: Synthetic oligonucleotide
ccgcuuagccaaauucccu

SEQ ID NO: 3286322 - RNA, 19 nt, Artificial Sequence
  Description of Artificial Sequence: Synthetic oligonucleotide
ccaaauucccugguuaagg

SEQ ID NO: 3286323 - RNA, 19 nt, Artificial Sequence
  Description of Artificial Sequence: Synthetic oligonucleotide
ucccugguuaaggccggcu

SEQ ID NO: 3286324 - RNA, 19 nt, Artificial Sequence
  Description of Artificial Sequence: Synthetic oligonucleotide
caucuccagggcacgucug

SEQ ID NO: 3286325 - RNA, 19 nt, Artificial Sequence
  Description of Artificial Sequence: Synthetic oligonucleotide
agggcacgucugcagggag

SEQ ID NO: 3286326 - RNA, 19 nt, Artificial Sequence
  Description of Artificial Sequence: Synthetic oligonucleotide
ccaaacccacaucgcagau

SEQ ID NO: 3286327 - RNA, 19 nt, Artificial Sequence
  Description of Artificial Sequence: Synthetic oligonucleotide
aaacccacaucgcagauac

SEQ ID NO: 3286328 - RNA, 19 nt, Artificial Sequence
  Description of Artificial Sequence: Synthetic oligonucleotide
ccacaucgcagauacucga

SEQ ID NO: 3286329 - RNA, 19 nt, Artificial Sequence
  Description of Artificial Sequence: Synthetic oligonucleotide
cacaucgcagauacucgag

SEQ ID NO: 3286330 - RNA, 19 nt, Artificial Sequence
  Description of Artificial Sequence: Synthetic oligonucleotide
caucgcagauacucgagga

SEQ ID NO: 3286331 - RNA, 19 nt, Artificial Sequence
  Description of Artificial Sequence: Synthetic oligonucleotide
aucgcagauacucgaggag

SEQ ID NO: 3286332 - RNA, 19 nt, Artificial Sequence
  Description of Artificial Sequence: Synthetic oligonucleotide
cgcagauacucgaggaguu

SEQ ID NO: 3286333 - RNA, 19 nt, Artificial Sequence
  Description of Artificial Sequence: Synthetic oligonucleotide
gcagauacucgaggaguua

SEQ ID NO: 3286334 - RNA, 19 nt, Artificial Sequence
  Description of Artificial Sequence: Synthetic oligonucleotide
ucgaggaguuaguagccag

SEQ ID NO: 3286335 - RNA, 19 nt, Artificial Sequence
  Description of Artificial Sequence: Synthetic oligonucleotide
gaggaguuaguagccaguc

SEQ ID NO: 3286336 - RNA, 19 nt, Artificial Sequence
  Description of Artificial Sequence: Synthetic oligonucleotide
ggaguuaguagccagucuu

SEQ ID NO: 3286337 - RNA, 19 nt, Artificial Sequence
  Description of Artificial Sequence: Synthetic oligonucleotide
aguuaguagccagucuucc

SEQ ID NO: 3286338 - RNA, 19 nt, Artificial Sequence
  Description of Artificial Sequence: Synthetic oligonucleotide
caccauccaugcuuguccc

SEQ ID NO: 3286339 - RNA, 19 nt, Artificial Sequence
  Description of Artificial Sequence: Synthetic oligonucleotide
accauccaugcuugucccu

SEQ ID NO: 3286340 - RNA, 19 nt, Artificial Sequence
  Description of Artificial Sequence: Synthetic oligonucleotide
cauccaugcuugucccuga

SEQ ID NO: 3286341 - RNA, 19 nt, Artificial Sequence
  Description of Artificial Sequence: Synthetic oligonucleotide
auccaugcuugucccugag

SEQ ID NO: 3286342 - RNA, 19 nt, Artificial Sequence
  Description of Artificial Sequence: Synthetic oligonucleotide
gugggcaaggaccuccuaa

SEQ ID NO: 3286343 - RNA, 19 nt, Artificial Sequence
  Description of Artificial Sequence: Synthetic oligonucleotide
ugggcaaggaccuccuaag

SEQ ID NO: 3286344 - RNA, 19 nt, Artificial Sequence
  Description of Artificial Sequence: Synthetic oligonucleotide
cuccuaagaagacgcaggu

SEQ ID NO: 3286345 - RNA, 19 nt, Artificial Sequence
  Description of Artificial Sequence: Synthetic oligonucleotide
uccuaagaagacgcagguc

SEQ ID NO: 3286346 - RNA, 19 nt, Artificial Sequence
  Description of Artificial Sequence: Synthetic oligonucleotide
ccuaagaagacgcagguca

SEQ ID NO: 3286347 - RNA, 19 nt, Artificial Sequence
  Description of Artificial Sequence: Synthetic oligonucleotide
agacgcaggucaugauuaa

SEQ ID NO: 3286348 - RNA, 19 nt, Artificial Sequence
  Description of Artificial Sequence: Synthetic oligonucleotide
gacgcaggucaugauuaag

SEQ ID NO: 3286349 - RNA, 19 nt, Artificial Sequence
  Description of Artificial Sequence: Synthetic oligonucleotide
acgcaggucaugauuaaga

SEQ ID NO: 3286350 - RNA, 19 nt, Artificial Sequence
  Description of Artificial Sequence: Synthetic oligonucleotide
caggucaugauuaagaucg

SEQ ID NO: 3286351 - RNA, 19 nt, Artificial Sequence
  Description of Artificial Sequence: Synthetic oligonucleotide
gauuaagaucgagacuuag

SEQ ID NO: 3286352 - RNA, 19 nt, Artificial Sequence
  Description of Artificial Sequence: Synthetic oligonucleotide
agaucgagacuuagggauu

SEQ ID NO: 3286353 - RNA, 19 nt, Artificial Sequence
  Description of Artificial Sequence: Synthetic oligonucleotide
gaucgagacuuagggauug

SEQ ID NO: 3286354 - RNA, 19 nt, Artificial Sequence
  Description of Artificial Sequence: Synthetic oligonucleotide
aucgagacuuagggauuga

SEQ ID NO: 3286355 - RNA, 19 nt, Artificial Sequence
  Description of Artificial Sequence: Synthetic oligonucleotide
ucgagacuuagggauugag

SEQ ID NO: 3286356 - RNA, 19 nt, Artificial Sequence
  Description of Artificial Sequence: Synthetic oligonucleotide
cgagacuuagggauugagu

SEQ ID NO: 3286357 - RNA, 19 nt, Artificial Sequence
  Description of Artificial Sequence: Synthetic oligonucleotide
gagacuuagggauugaguc

SEQ ID NO: 3286358 - RNA, 19 nt, Artificial Sequence
  Description of Artificial Sequence: Synthetic oligonucleotide
agacuuagggauugagucc

SEQ ID NO: 3286359 - RNA, 19 nt, Artificial Sequence
  Description of Artificial Sequence: Synthetic oligonucleotide
gacuuagggauugaguccc

SEQ ID NO: 3286360 - RNA, 19 nt, Artificial Sequence
  Description of Artificial Sequence: Synthetic oligonucleotide
acuuagggauugaguccca

SEQ ID NO: 3286361 - RNA, 19 nt, Artificial Sequence
  Description of Artificial Sequence: Synthetic oligonucleotide
aaaaaaagaacgagauuca

SEQ ID NO: 3286362 - RNA, 19 nt, Artificial Sequence
  Description of Artificial Sequence: Synthetic oligonucleotide
aacgagauucagauugggg

SEQ ID NO: 3286363 - RNA, 19 nt, Artificial Sequence
  Description of Artificial Sequence: Synthetic oligonucleotide
uucagauuggggguggacg

SEQ ID NO: 3286364 - RNA, 19 nt, Artificial Sequence
  Description of Artificial Sequence: Synthetic oligonucleotide
ucagauuggggguggacgc

SEQ ID NO: 3286365 - RNA, 19 nt, Artificial Sequence
  Description of Artificial Sequence: Synthetic oligonucleotide
cagauuggggguggacgcc

SEQ ID NO: 3286366 - RNA, 19 nt, Artificial Sequence
  Description of Artificial Sequence: Synthetic oligonucleotide
agauuggggguggacgccg

SEQ ID NO: 3286367 - RNA, 19 nt, Artificial Sequence
  Description of Artificial Sequence: Synthetic oligonucleotide
cgcccuccugguuaggaga

SEQ ID NO: 3286368 - RNA, 19 nt, Artificial Sequence
  Description of Artificial Sequence: Synthetic oligonucleotide
cugguuaggagaaaugauu

SEQ ID NO: 3286369 - RNA, 19 nt, Artificial Sequence
  Description of Artificial Sequence: Synthetic oligonucleotide
aaugauuuucugcccucgg

SEQ ID NO: 3286370 - RNA, 19 nt, Artificial Sequence
  Description of Artificial Sequence: Synthetic oligonucleotide
augauuuucugcccucggg

SEQ ID NO: 3286371 - RNA, 19 nt, Artificial Sequence
  Description of Artificial Sequence: Synthetic oligonucleotide
auuuucugcccucgggguu

SEQ ID NO: 3286372 - RNA, 19 nt, Artificial Sequence
  Description of Artificial Sequence: Synthetic oligonucleotide
uuucugcccucgggguugu

SEQ ID NO: 3286373 - RNA, 19 nt, Artificial Sequence
  Description of Artificial Sequence: Synthetic oligonucleotide
uucugcccucgggguuguu

SEQ ID NO: 3286374 - RNA, 19 nt, Artificial Sequence
  Description of Artificial Sequence: Synthetic oligonucleotide
cugcccucgggguuguucc

SEQ ID NO: 3286375 - RNA, 19 nt, Artificial Sequence
  Description of Artificial Sequence: Synthetic oligonucleotide
ggguuguuccccuuaaacc

SEQ ID NO: 3286376 - RNA, 19 nt, Artificial Sequence
  Description of Artificial Sequence: Synthetic oligonucleotide
gguuguuccccuuaaaccc

SEQ ID NO: 3286377 - RNA, 19 nt, Artificial Sequence
  Description of Artificial Sequence: Synthetic oligonucleotide
uuguuccccuuaaacccuc

SEQ ID NO: 3286378 - RNA, 19 nt, Artificial Sequence
  Description of Artificial Sequence: Synthetic oligonucleotide
uguuccccuuaaacccucu

SEQ ID NO: 3286379 - RNA, 19 nt, Artificial Sequence
  Description of Artificial Sequence: Synthetic oligonucleotide
cuuaaacccucuccaucuu

SEQ ID NO: 3286380 - RNA, 19 nt, Artificial Sequence
  Description of Artificial Sequence: Synthetic oligonucleotide
ccaggggaccagugcaugc

SEQ ID NO: 3286381 - RNA, 19 nt, Artificial Sequence
  Description of Artificial Sequence: Synthetic oligonucleotide
ugcaugcaaagcauuguag

SEQ ID NO: 3286382 - RNA, 19 nt, Artificial Sequence
  Description of Artificial Sequence: Synthetic oligonucleotide
uuguagaaggauuaguucc

SEQ ID NO: 3286383 - RNA, 19 nt, Artificial Sequence
  Description of Artificial Sequence: Synthetic oligonucleotide
aguuccugcuuuugugcaa

SEQ ID NO: 3286384 - RNA, 19 nt, Artificial Sequence
  Description of Artificial Sequence: Synthetic oligonucleotide
gugcaacuucuuucaugca

SEQ ID NO: 3286385 - RNA, 19 nt, Artificial Sequence
  Description of Artificial Sequence: Synthetic oligonucleotide
ugcaacuucuuucaugcac

SEQ ID NO: 3286386 - RNA, 19 nt, Artificial Sequence
  Description of Artificial Sequence: Synthetic oligonucleotide
caacuucuuucaugcaccu

SEQ ID NO: 3286387 - RNA, 19 nt, Artificial Sequence
  Description of Artificial Sequence: Synthetic oligonucleotide
uucuuucaugcaccuguuu

SEQ ID NO: 3286388 - RNA, 19 nt, Artificial Sequence
  Description of Artificial Sequence: Synthetic oligonucleotide
ccuguuuugggagcauuag

SEQ ID NO: 3286389 - RNA, 19 nt, Artificial Sequence
  Description of Artificial Sequence: Synthetic oligonucleotide
guuuugggagcauuagcgc

SEQ ID NO: 3286390 - RNA, 19 nt, Artificial Sequence
  Description of Artificial Sequence: Synthetic oligonucleotide
uuuugggagcauuagcgcc

SEQ ID NO: 3286391 - RNA, 19 nt, Artificial Sequence
  Description of Artificial Sequence: Synthetic oligonucleotide
uuugggagcauuagcgcca

SEQ ID NO: 3286392 - RNA, 19 nt, Artificial Sequence
  Description of Artificial Sequence: Synthetic oligonucleotide
uugggagcauuagcgccac

SEQ ID NO: 3286393 - RNA, 19 nt, Artificial Sequence
  Description of Artificial Sequence: Synthetic oligonucleotide
gggagcauuagcgccacgu

SEQ ID NO: 3286394 - RNA, 19 nt, Artificial Sequence
  Description of Artificial Sequence: Synthetic oligonucleotide
agcauuagcgccacgugug

SEQ ID NO: 3286395 - RNA, 19 nt, Artificial Sequence
  Description of Artificial Sequence: Synthetic oligonucleotide
gcauuagcgccacgugugg

SEQ ID NO: 3286396 - RNA, 19 nt, Artificial Sequence
  Description of Artificial Sequence: Synthetic oligonucleotide
cauuagcgccacguguggg

SEQ ID NO: 3286397 - RNA, 19 nt, Artificial Sequence
  Description of Artificial Sequence: Synthetic oligonucleotide
uuagcgccacgugugggug

SEQ ID NO: 3286398 - RNA, 19 nt, Artificial Sequence
  Description of Artificial Sequence: Synthetic oligonucleotide
cacgugugggugcucuuag

SEQ ID NO: 3286399 - RNA, 19 nt, Artificial Sequence
  Description of Artificial Sequence: Synthetic oligonucleotide
acgugugggugcucuuaga

SEQ ID NO: 3286400 - RNA, 19 nt, Artificial Sequence
  Description of Artificial Sequence: Synthetic oligonucleotide
gugcucuuagaagcuguau

SEQ ID NO: 3286401 - RNA, 19 nt, Artificial Sequence
  Description of Artificial Sequence: Synthetic oligonucleotide
ugcucuuagaagcuguauu

SEQ ID NO: 3286402 - RNA, 19 nt, Artificial Sequence
  Description of Artificial Sequence: Synthetic oligonucleotide
agcuguauuucacugauuu

SEQ ID NO: 3286403 - RNA, 19 nt, Artificial Sequence
  Description of Artificial Sequence: Synthetic oligonucleotide
cacugauuuguaauaaacu

SEQ ID NO: 3286404 - RNA, 19 nt, Artificial Sequence
  Description of Artificial Sequence: Synthetic oligonucleotide
acuuguuuauccccggaaa

SEQ ID NO: 3286405 - RNA, 19 nt, Artificial Sequence
  Description of Artificial Sequence: Synthetic oligonucleotide
uuguuuauccccggaaaaa

SEQ ID NO: 3286406 - RNA, 19 nt, Artificial Sequence
  Description of Artificial Sequence: Synthetic oligonucleotide
guuuauccccggaaaaaaa

SEQ ID NO: 3286407 - RNA, 19 nt, Artificial Sequence
  Description of Artificial Sequence: Synthetic oligonucleotide
ucacgcccggugaccacuc

SEQ ID NO: 3286408 - RNA, 19 nt, Artificial Sequence
  Description of Artificial Sequence: Synthetic oligonucleotide
cguucucucacgcccggug

SEQ ID NO: 3286409 - RNA, 19 nt, Artificial Sequence
  Description of Artificial Sequence: Synthetic oligonucleotide
ccguucucucacgcccggu

SEQ ID NO: 3286410 - RNA, 19 nt, Artificial Sequence
  Description of Artificial Sequence: Synthetic oligonucleotide
ugaaucacagagccguucu

SEQ ID NO: 3286411 - RNA, 19 nt, Artificial Sequence
  Description of Artificial Sequence: Synthetic oligonucleotide
gacuagcuggacugaauca

SEQ ID NO: 3286412 - RNA, 19 nt, Artificial Sequence
  Description of Artificial Sequence: Synthetic oligonucleotide
gcugacuagcuggacugaa

SEQ ID NO: 3286413 - RNA, 19 nt, Artificial Sequence
  Description of Artificial Sequence: Synthetic oligonucleotide
gcgcugacuagcuggacug

SEQ ID NO: 3286414 - RNA, 19 nt, Artificial Sequence
  Description of Artificial Sequence: Synthetic oligonucleotide
cguagcgcugacuagcugg

SEQ ID NO: 3286415 - RNA, 19 nt, Artificial Sequence
  Description of Artificial Sequence: Synthetic oligonucleotide
acguagcgcugacuagcug

SEQ ID NO: 3286416 - RNA, 19 nt, Artificial Sequence
  Description of Artificial Sequence: Synthetic oligonucleotide
gacguagcgcugacuagcu

SEQ ID NO: 3286417 - RNA, 19 nt, Artificial Sequence
  Description of Artificial Sequence: Synthetic oligonucleotide
cgacguagcgcugacuagc

SEQ ID NO: 3286418 - RNA, 19 nt, Artificial Sequence
  Description of Artificial Sequence: Synthetic oligonucleotide
acgacguagcgcugacuag

SEQ ID NO: 3286419 - RNA, 19 nt, Artificial Sequence
  Description of Artificial Sequence: Synthetic oligonucleotide
gacgacguagcgcugacua

SEQ ID NO: 3286420 - RNA, 19 nt, Artificial Sequence
  Description of Artificial Sequence: Synthetic oligonucleotide
ugacgacguagcgcugacu

SEQ ID NO: 3286421 - RNA, 19 nt, Artificial Sequence
  Description of Artificial Sequence: Synthetic oligonucleotide
uugacgacguagcgcugac

SEQ ID NO: 3286422 - RNA, 19 nt, Artificial Sequence
  Description of Artificial Sequence: Synthetic oligonucleotide
uuaacuugacgacguagcg

SEQ ID NO: 3286423 - RNA, 19 nt, Artificial Sequence
  Description of Artificial Sequence: Synthetic oligonucleotide
uuuaacuugacgacguagc

SEQ ID NO: 3286424 - RNA, 19 nt, Artificial Sequence
  Description of Artificial Sequence: Synthetic oligonucleotide
uuuuaacuugacgacguag

SEQ ID NO: 3286425 - RNA, 19 nt, Artificial Sequence
  Description of Artificial Sequence: Synthetic oligonucleotide
cuuuuaacuugacgacgua

SEQ ID NO: 3286426 - RNA, 19 nt, Artificial Sequence
  Description of Artificial Sequence: Synthetic oligonucleotide
caacacaacuuccuuuuaa

SEQ ID NO: 3286427 - RNA, 19 nt, Artificial Sequence
  Description of Artificial Sequence: Synthetic oligonucleotide
aucaaugcagccuccaaca

SEQ ID NO: 3286428 - RNA, 19 nt, Artificial Sequence
  Description of Artificial Sequence: Synthetic oligonucleotide
uaucaaugcagccuccaac

SEQ ID NO: 3286429 - RNA, 19 nt, Artificial Sequence
  Description of Artificial Sequence: Synthetic oligonucleotide
cuugugaauuaaccaucuu

SEQ ID NO: 3286430 - RNA, 19 nt, Artificial Sequence
  Description of Artificial Sequence: Synthetic oligonucleotide
cgagucagugauuuuuccu

SEQ ID NO: 3286431 - RNA, 19 nt, Artificial Sequence
  Description of Artificial Sequence: Synthetic oligonucleotide
auucgagucagugauuuuu

SEQ ID NO: 3286432 - RNA, 19 nt, Artificial Sequence
  Description of Artificial Sequence: Synthetic oligonucleotide
ggauucgagucagugauuu

SEQ ID NO: 3286433 - RNA, 19 nt, Artificial Sequence
  Description of Artificial Sequence: Synthetic oligonucleotide
aggauucgagucagugauu

SEQ ID NO: 3286434 - RNA, 19 nt, Artificial Sequence
  Description of Artificial Sequence: Synthetic oligonucleotide
caggauucgagucagugau

SEQ ID NO: 3286435 - RNA, 19 nt, Artificial Sequence
  Description of Artificial Sequence: Synthetic oligonucleotide
guacaggauucgagucagu

SEQ ID NO: 3286436 - RNA, 19 nt, Artificial Sequence
  Description of Artificial Sequence: Synthetic oligonucleotide
gauuggguacaggauucga

SEQ ID NO: 3286437 - RNA, 19 nt, Artificial Sequence
  Description of Artificial Sequence: Synthetic oligonucleotide
ugauuggguacaggauucg

SEQ ID NO: 3286438 - RNA, 19 nt, Artificial Sequence
  Description of Artificial Sequence: Synthetic oligonucleotide
caugauuggguacaggauu

SEQ ID NO: 3286439 - RNA, 19 nt, Artificial Sequence
  Description of Artificial Sequence: Synthetic oligonucleotide
uuaguaacacaugauuggg

SEQ ID NO: 3286440 - RNA, 19 nt, Artificial Sequence
  Description of Artificial Sequence: Synthetic oligonucleotide
uuuaguaacacaugauugg

SEQ ID NO: 3286441 - RNA, 19 nt, Artificial Sequence
  Description of Artificial Sequence: Synthetic oligonucleotide
cguuuaguaacacaugauu

SEQ ID NO: 3286442 - RNA, 19 nt, Artificial Sequence
  Description of Artificial Sequence: Synthetic oligonucleotide
ccguuuaguaacacaugau

SEQ ID NO: 3286443 - RNA, 19 nt, Artificial Sequence
  Description of Artificial Sequence: Synthetic oligonucleotide
aguccguuuaguaacacau

SEQ ID NO: 3286444 - RNA, 19 nt, Artificial Sequence
  Description of Artificial Sequence: Synthetic oligonucleotide
aaguccguuuaguaacaca

SEQ ID NO: 3286445 - RNA, 19 nt, Artificial Sequence
  Description of Artificial Sequence: Synthetic oligonucleotide
guaaguccguuuaguaaca

SEQ ID NO: 3286446 - RNA, 19 nt, Artificial Sequence
  Description of Artificial Sequence: Synthetic oligonucleotide
aguaaguccguuuaguaac

SEQ ID NO: 3286447 - RNA, 19 nt, Artificial Sequence
  Description of Artificial Sequence: Synthetic oligonucleotide
uaucaguaaguccguuuag

SEQ ID NO: 3286448 - RNA, 19 nt, Artificial Sequence
  Description of Artificial Sequence: Synthetic oligonucleotide
ccuuaucaguaaguccguu

SEQ ID NO: 3286449 - RNA, 19 nt, Artificial Sequence
  Description of Artificial Sequence: Synthetic oligonucleotide
gccuuaucaguaaguccgu

SEQ ID NO: 3286450 - RNA, 19 nt, Artificial Sequence
  Description of Artificial Sequence: Synthetic oligonucleotide
ugccuuaucaguaaguccg

SEQ ID NO: 3286451 - RNA, 19 nt, Artificial Sequence
  Description of Artificial Sequence: Synthetic oligonucleotide
cugccuuaucaguaagucc

SEQ ID NO: 3286452 - RNA, 19 nt, Artificial Sequence
  Description of Artificial Sequence: Synthetic oligonucleotide
ucugccuuaucaguaaguc

SEQ ID NO: 3286453 - RNA, 19 nt, Artificial Sequence
  Description of Artificial Sequence: Synthetic oligonucleotide
ggcuacacaggcuguuccc

SEQ ID NO: 3286454 - RNA, 19 nt, Artificial Sequence
  Description of Artificial Sequence: Synthetic oligonucleotide
uggcuacacaggcuguucc

SEQ ID NO: 3286455 - RNA, 19 nt, Artificial Sequence
  Description of Artificial Sequence: Synthetic oligonucleotide
auuggcuacacaggcuguu

SEQ ID NO: 3286456 - RNA, 19 nt, Artificial Sequence
  Description of Artificial Sequence: Synthetic oligonucleotide
uccucauauuggcuacaca

SEQ ID NO: 3286457 - RNA, 19 nt, Artificial Sequence
  Description of Artificial Sequence: Synthetic oligonucleotide
cuccucauauuggcuacac

SEQ ID NO: 3286458 - RNA, 19 nt, Artificial Sequence
  Description of Artificial Sequence: Synthetic oligonucleotide
augggcguaccuucuccuc

SEQ ID NO: 3286459 - RNA, 19 nt, Artificial Sequence
  Description of Artificial Sequence: Synthetic oligonucleotide
caugggcguaccuucuccu

SEQ ID NO: 3286460 - RNA, 19 nt, Artificial Sequence
  Description of Artificial Sequence: Synthetic oligonucleotide
gcaugggcguaccuucucc

SEQ ID NO: 3286461 - RNA, 19 nt, Artificial Sequence
  Description of Artificial Sequence: Synthetic oligonucleotide
gaugcaugggcguaccuuc

SEQ ID NO: 3286462 - RNA, 19 nt, Artificial Sequence
  Description of Artificial Sequence: Synthetic oligonucleotide
gcgcccgcaaggagucgau

SEQ ID NO: 3286463 - RNA, 19 nt, Artificial Sequence
  Description of Artificial Sequence: Synthetic oligonucleotide
ggcaacuccugacagagcc

SEQ ID NO: 3286464 - RNA, 19 nt, Artificial Sequence
  Description of Artificial Sequence: Synthetic oligonucleotide
cuuguaacaauaccacugc

SEQ ID NO: 3286465 - RNA, 19 nt, Artificial Sequence
  Description of Artificial Sequence: Synthetic oligonucleotide
uccacucauccucauuuau

SEQ ID NO: 3286466 - RNA, 19 nt, Artificial Sequence
  Description of Artificial Sequence: Synthetic oligonucleotide
aacugacuuugccucucca

SEQ ID NO: 3286467 - RNA, 19 nt, Artificial Sequence
  Description of Artificial Sequence: Synthetic oligonucleotide
cucaguauccugguaacug

SEQ ID NO: 3286468 - RNA, 19 nt, Artificial Sequence
  Description of Artificial Sequence: Synthetic oligonucleotide
cuuccaccucugaaggguc

SEQ ID NO: 3286469 - RNA, 19 nt, Artificial Sequence
  Description of Artificial Sequence: Synthetic oligonucleotide
gauccccuguccuuccccg

SEQ ID NO: 3286470 - RNA, 19 nt, Artificial Sequence
  Description of Artificial Sequence: Synthetic oligonucleotide
caugacugauccccugucc

SEQ ID NO: 3286471 - RNA, 19 nt, Artificial Sequence
  Description of Artificial Sequence: Synthetic oligonucleotide
ucaugacugauccccuguc

SEQ ID NO: 3286472 - RNA, 19 nt, Artificial Sequence
  Description of Artificial Sequence: Synthetic oligonucleotide
ggcugauuagcucaugacu

SEQ ID NO: 3286473 - RNA, 19 nt, Artificial Sequence
  Description of Artificial Sequence: Synthetic oligonucleotide
aggcugauuagcucaugac

SEQ ID NO: 3286474 - RNA, 19 nt, Artificial Sequence
  Description of Artificial Sequence: Synthetic oligonucleotide
ccgggacaugaggagagcu

SEQ ID NO: 3286475 - RNA, 19 nt, Artificial Sequence
  Description of Artificial Sequence: Synthetic oligonucleotide
ggucagauccgggacauga

SEQ ID NO: 3286476 - RNA, 19 nt, Artificial Sequence
  Description of Artificial Sequence: Synthetic oligonucleotide
ggucuaucagggucagauc

SEQ ID NO: 3286477 - RNA, 19 nt, Artificial Sequence
  Description of Artificial Sequence: Synthetic oligonucleotide
aggucuaucagggucagau

SEQ ID NO: 3286478 - RNA, 19 nt, Artificial Sequence
  Description of Artificial Sequence: Synthetic oligonucleotide
ccgaugucagcuggcugau

SEQ ID NO: 3286479 - RNA, 19 nt, Artificial Sequence
  Description of Artificial Sequence: Synthetic oligonucleotide
gcguccgaugucagcuggc

SEQ ID NO: 3286480 - RNA, 19 nt, Artificial Sequence
  Description of Artificial Sequence: Synthetic oligonucleotide
gucuggcguccgaugucag

SEQ ID NO: 3286481 - RNA, 19 nt, Artificial Sequence
  Description of Artificial Sequence: Synthetic oligonucleotide
cuuggucuggcguccgaug

SEQ ID NO: 3286482 - RNA, 19 nt, Artificial Sequence
  Description of Artificial Sequence: Synthetic oligonucleotide
ccuaaugaguugcuugguc

SEQ ID NO: 3286483 - RNA, 19 nt, Artificial Sequence
  Description of Artificial Sequence: Synthetic oligonucleotide
uccuaaugaguugcuuggu

SEQ ID NO: 3286484 - RNA, 19 nt, Artificial Sequence
  Description of Artificial Sequence: Synthetic oligonucleotide
uuccuaaugaguugcuugg

SEQ ID NO: 3286485 - RNA, 19 nt, Artificial Sequence
  Description of Artificial Sequence: Synthetic oligonucleotide
cuuccuaaugaguugcuug

SEQ ID NO: 3286486 - RNA, 19 nt, Artificial Sequence
  Description of Artificial Sequence: Synthetic oligonucleotide
acuuccuaaugaguugcuu

SEQ ID NO: 3286487 - RNA, 19 nt, Artificial Sequence
  Description of Artificial Sequence: Synthetic oligonucleotide
guacuuccuaaugaguugc

SEQ ID NO: 3286488 - RNA, 19 nt, Artificial Sequence
  Description of Artificial Sequence: Synthetic oligonucleotide
uaaggauguacuuccuaau

SEQ ID NO: 3286489 - RNA, 19 nt, Artificial Sequence
  Description of Artificial Sequence: Synthetic oligonucleotide
ccugcuuaaggauguacuu

SEQ ID NO: 3286490 - RNA, 19 nt, Artificial Sequence
  Description of Artificial Sequence: Synthetic oligonucleotide
ucaagauuccuaugguccu

SEQ ID NO: 3286491 - RNA, 19 nt, Artificial Sequence
  Description of Artificial Sequence: Synthetic oligonucleotide
gucaagauuccuauggucc

SEQ ID NO: 3286492 - RNA, 19 nt, Artificial Sequence
  Description of Artificial Sequence: Synthetic oligonucleotide
gucaggcuuugucaagauu

SEQ ID NO: 3286493 - RNA, 19 nt, Artificial Sequence
  Description of Artificial Sequence: Synthetic oligonucleotide
gagguuuugugccacgucc

SEQ ID NO: 3286494 - RNA, 19 nt, Artificial Sequence
  Description of Artificial Sequence: Synthetic oligonucleotide
acgagguuuugugccacgu

SEQ ID NO: 3286495 - RNA, 19 nt, Artificial Sequence
  Description of Artificial Sequence: Synthetic oligonucleotide
gacgagguuuugugccacg

SEQ ID NO: 3286496 - RNA, 19 nt, Artificial Sequence
  Description of Artificial Sequence: Synthetic oligonucleotide
agacgagguuuugugccac

SEQ ID NO: 3286497 - RNA, 19 nt, Artificial Sequence
  Description of Artificial Sequence: Synthetic oligonucleotide
cagacgagguuuugugcca

SEQ ID NO: 3286498 - RNA, 19 nt, Artificial Sequence
  Description of Artificial Sequence: Synthetic oligonucleotide
acagacgagguuuugugcc

SEQ ID NO: 3286499 - RNA, 19 nt, Artificial Sequence
  Description of Artificial Sequence: Synthetic oligonucleotide
gacagacgagguuuugugc

SEQ ID NO: 3286500 - RNA, 19 nt, Artificial Sequence
  Description of Artificial Sequence: Synthetic oligonucleotide
ugacgaucauguagcccuu

SEQ ID NO: 3286501 - RNA, 19 nt, Artificial Sequence
  Description of Artificial Sequence: Synthetic oligonucleotide
uugacgaucauguagcccu

SEQ ID NO: 3286502 - RNA, 19 nt, Artificial Sequence
  Description of Artificial Sequence: Synthetic oligonucleotide
gaacccugaaaugugggug

SEQ ID NO: 3286503 - RNA, 19 nt, Artificial Sequence
  Description of Artificial Sequence: Synthetic oligonucleotide
aagaacccugaaauguggg

SEQ ID NO: 3286504 - RNA, 19 nt, Artificial Sequence
  Description of Artificial Sequence: Synthetic oligonucleotide
ucuaacagaggcaggguuu

SEQ ID NO: 3286505 - RNA, 19 nt, Artificial Sequence
  Description of Artificial Sequence: Synthetic oligonucleotide
cugagccguacuuuuguaa

SEQ ID NO: 3286506 - RNA, 19 nt, Artificial Sequence
  Description of Artificial Sequence: Synthetic oligonucleotide
ucugagccguacuuuugua

SEQ ID NO: 3286507 - RNA, 19 nt, Artificial Sequence
  Description of Artificial Sequence: Synthetic oligonucleotide
aucugagccguacuuuugu

SEQ ID NO: 3286508 - RNA, 19 nt, Artificial Sequence
  Description of Artificial Sequence: Synthetic oligonucleotide
caucugagccguacuuuug

SEQ ID NO: 3286509 - RNA, 19 nt, Artificial Sequence
  Description of Artificial Sequence: Synthetic oligonucleotide
ggcacaucugagccguacu

SEQ ID NO: 3286510 - RNA, 19 nt, Artificial Sequence
  Description of Artificial Sequence: Synthetic oligonucleotide
gggcacaucugagccguac

SEQ ID NO: 3286511 - RNA, 19 nt, Artificial Sequence
  Description of Artificial Sequence: Synthetic oligonucleotide
uuaucuaucaggaaaaaca

SEQ ID NO: 3286512 - RNA, 19 nt, Artificial Sequence
  Description of Artificial Sequence: Synthetic oligonucleotide
uuuaucuaucaggaaaaac

SEQ ID NO: 3286513 - RNA, 19 nt, Artificial Sequence
  Description of Artificial Sequence: Synthetic oligonucleotide
caguuuaucuaucaggaaa

SEQ ID NO: 3286514 - RNA, 19 nt, Artificial Sequence
  Description of Artificial Sequence: Synthetic oligonucleotide
ucaguuuaucuaucaggaa

SEQ ID NO: 3286515 - RNA, 19 nt, Artificial Sequence
  Description of Artificial Sequence: Synthetic oligonucleotide
ugucuugguuaaaggcauu

SEQ ID NO: 3286516 - RNA, 19 nt, Artificial Sequence
  Description of Artificial Sequence: Synthetic oligonucleotide
ccuuggauuaaggagcuga

SEQ ID NO: 3286517 - RNA, 19 nt, Artificial Sequence
  Description of Artificial Sequence: Synthetic oligonucleotide
ggauuuuggugaacagccg

SEQ ID NO: 3286518 - RNA, 19 nt, Artificial Sequence
  Description of Artificial Sequence: Synthetic oligonucleotide
uuucggauuuuggugaaca

SEQ ID NO: 3286519 - RNA, 19 nt, Artificial Sequence
  Description of Artificial Sequence: Synthetic oligonucleotide
cauuucggauuuuggugaa

SEQ ID NO: 3286520 - RNA, 19 nt, Artificial Sequence
  Description of Artificial Sequence: Synthetic oligonucleotide
uggaacucauuucggauuu

SEQ ID NO: 3286521 - RNA, 19 nt, Artificial Sequence
  Description of Artificial Sequence: Synthetic oligonucleotide
guggaacucauuucggauu

SEQ ID NO: 3286522 - RNA, 19 nt, Artificial Sequence
  Description of Artificial Sequence: Synthetic oligonucleotide
gcgcuccauuuguggaacu

SEQ ID NO: 3286523 - RNA, 19 nt, Artificial Sequence
  Description of Artificial Sequence: Synthetic oligonucleotide
agcgcuccauuuguggaac

SEQ ID NO: 3286524 - RNA, 19 nt, Artificial Sequence
  Description of Artificial Sequence: Synthetic oligonucleotide
cagcgcuccauuuguggaa

SEQ ID NO: 3286525 - RNA, 19 nt, Artificial Sequence
  Description of Artificial Sequence: Synthetic oligonucleotide
acagcgcuccauuugugga

SEQ ID NO: 3286526 - RNA, 19 nt, Artificial Sequence
  Description of Artificial Sequence: Synthetic oligonucleotide
auauagcuuuguaaccucu

SEQ ID NO: 3286527 - RNA, 19 nt, Artificial Sequence
  Description of Artificial Sequence: Synthetic oligonucleotide
auauauagcuuuguaaccu

SEQ ID NO: 3286528 - RNA, 19 nt, Artificial Sequence
  Description of Artificial Sequence: Synthetic oligonucleotide
uauauauagcuuuguaacc

SEQ ID NO: 3286529 - RNA, 19 nt, Artificial Sequence
  Description of Artificial Sequence: Synthetic oligonucleotide
uguuuauauauagcuuugu

SEQ ID NO: 3286530 - RNA, 19 nt, Artificial Sequence
  Description of Artificial Sequence: Synthetic oligonucleotide
gauaccgauuuucaaauuu

SEQ ID NO: 3286531 - RNA, 19 nt, Artificial Sequence
  Description of Artificial Sequence: Synthetic oligonucleotide
cgauaccgauuuucaaauu

SEQ ID NO: 3286532 - RNA, 19 nt, Artificial Sequence
  Description of Artificial Sequence: Synthetic oligonucleotide
acgauaccgauuuucaaau

SEQ ID NO: 3286533 - RNA, 19 nt, Artificial Sequence
  Description of Artificial Sequence: Synthetic oligonucleotide
gccacgauaccgauuuuca

SEQ ID NO: 3286534 - RNA, 19 nt, Artificial Sequence
  Description of Artificial Sequence: Synthetic oligonucleotide
ugccacgauaccgauuuuc

SEQ ID NO: 3286535 - RNA, 19 nt, Artificial Sequence
  Description of Artificial Sequence: Synthetic oligonucleotide
cugccacgauaccgauuuu

SEQ ID NO: 3286536 - RNA, 19 nt, Artificial Sequence
  Description of Artificial Sequence: Synthetic oligonucleotide
gcucucugccacgauaccg

SEQ ID NO: 3286537 - RNA, 19 nt, Artificial Sequence
  Description of Artificial Sequence: Synthetic oligonucleotide
agcucucugccacgauacc

SEQ ID NO: 3286538 - RNA, 19 nt, Artificial Sequence
  Description of Artificial Sequence: Synthetic oligonucleotide
uaauuuacaaauccuggca

SEQ ID NO: 3286539 - RNA, 19 nt, Artificial Sequence
  Description of Artificial Sequence: Synthetic oligonucleotide
guaauuuacaaauccuggc

SEQ ID NO: 3286540 - RNA, 19 nt, Artificial Sequence
  Description of Artificial Sequence: Synthetic oligonucleotide
acgucuuguaauuuacaaa

SEQ ID NO: 3286541 - RNA, 19 nt, Artificial Sequence
  Description of Artificial Sequence: Synthetic oligonucleotide
aacgucuuguaauuuacaa

SEQ ID NO: 3286542 - RNA, 19 nt, Artificial Sequence
  Description of Artificial Sequence: Synthetic oligonucleotide
cgaacgucuuguaauuuac

SEQ ID NO: 3286543 - RNA, 19 nt, Artificial Sequence
  Description of Artificial Sequence: Synthetic oligonucleotide
ucgaacgucuuguaauuua

SEQ ID NO: 3286544 - RNA, 19 nt, Artificial Sequence
  Description of Artificial Sequence: Synthetic oligonucleotide
uucgaacgucuuguaauuu

SEQ ID NO: 3286545 - RNA, 19 nt, Artificial Sequence
  Description of Artificial Sequence: Synthetic oligonucleotide
uuucgaacgucuuguaauu

SEQ ID NO: 3286546 - RNA, 19 nt, Artificial Sequence
  Description of Artificial Sequence: Synthetic oligonucleotide
auaauuucgaacgucuugu

SEQ ID NO: 3286547 - RNA, 19 nt, Artificial Sequence
  Description of Artificial Sequence: Synthetic oligonucleotide
uauaauaauuucgaacguc

SEQ ID NO: 3286548 - RNA, 19 nt, Artificial Sequence
  Description of Artificial Sequence: Synthetic oligonucleotide
uuauaauaauuucgaacgu

SEQ ID NO: 3286549 - RNA, 19 nt, Artificial Sequence
  Description of Artificial Sequence: Synthetic oligonucleotide
uuuauaauaauuucgaacg

SEQ ID NO: 3286550 - RNA, 19 nt, Artificial Sequence
  Description of Artificial Sequence: Synthetic oligonucleotide
cauaucaacagcuggcucu

SEQ ID NO: 3286551 - RNA, 19 nt, Artificial Sequence
  Description of Artificial Sequence: Synthetic oligonucleotide
ucgugugcagcauaucaac

SEQ ID NO: 3286552 - RNA, 19 nt, Artificial Sequence
  Description of Artificial Sequence: Synthetic oligonucleotide
guuaucgugugcagcauau

SEQ ID NO: 3286553 - RNA, 19 nt, Artificial Sequence
  Description of Artificial Sequence: Synthetic oligonucleotide
aguuaucgugugcagcaua

SEQ ID NO: 3286554 - RNA, 19 nt, Artificial Sequence
  Description of Artificial Sequence: Synthetic oligonucleotide
caguuaucgugugcagcau

SEQ ID NO: 3286555 - RNA, 19 nt, Artificial Sequence
  Description of Artificial Sequence: Synthetic oligonucleotide
aucaguuaucgugugcagc

SEQ ID NO: 3286556 - RNA, 19 nt, Artificial Sequence
  Description of Artificial Sequence: Synthetic oligonucleotide
ccauaucaguuaucgugug

SEQ ID NO: 3286557 - RNA, 19 nt, Artificial Sequence
  Description of Artificial Sequence: Synthetic oligonucleotide
accauaucaguuaucgugu

SEQ ID NO: 3286558 - RNA, 19 nt, Artificial Sequence
  Description of Artificial Sequence: Synthetic oligonucleotide
ggaccauaucaguuaucgu

SEQ ID NO: 3286559 - RNA, 19 nt, Artificial Sequence
  Description of Artificial Sequence: Synthetic oligonucleotide
uggaccauaucaguuaucg

SEQ ID NO: 3286560 - RNA, 19 nt, Artificial Sequence
  Description of Artificial Sequence: Synthetic oligonucleotide
cuggaccauaucaguuauc

SEQ ID NO: 3286561 - RNA, 19 nt, Artificial Sequence
  Description of Artificial Sequence: Synthetic oligonucleotide
aaccuggaccauaucaguu

SEQ ID NO: 3286562 - RNA, 19 nt, Artificial Sequence
  Description of Artificial Sequence: Synthetic oligonucleotide
caaccuggaccauaucagu

SEQ ID NO: 3286563 - RNA, 19 nt, Artificial Sequence
  Description of Artificial Sequence: Synthetic oligonucleotide
uaucuccgaaggcaaccug

SEQ ID NO: 3286564 - RNA, 19 nt, Artificial Sequence
  Description of Artificial Sequence: Synthetic oligonucleotide
gguaguucuguagagguug

SEQ ID NO: 3286565 - RNA, 19 nt, Artificial Sequence
  Description of Artificial Sequence: Synthetic oligonucleotide
ugguaguucuguagagguu

SEQ ID NO: 3286566 - RNA, 19 nt, Artificial Sequence
  Description of Artificial Sequence: Synthetic oligonucleotide
cuugguaguucuguagagg

SEQ ID NO: 3286567 - RNA, 19 nt, Artificial Sequence
  Description of Artificial Sequence: Synthetic oligonucleotide
ucgaauuuaaugucuucga

SEQ ID NO: 3286568 - RNA, 19 nt, Artificial Sequence
  Description of Artificial Sequence: Synthetic oligonucleotide
cucgaauuuaaugucuucg

SEQ ID NO: 3286569 - RNA, 19 nt, Artificial Sequence
  Description of Artificial Sequence: Synthetic oligonucleotide
cuagcucgaauuuaauguc

SEQ ID NO: 3286570 - RNA, 19 nt, Artificial Sequence
  Description of Artificial Sequence: Synthetic oligonucleotide
ucuagcucgaauuuaaugu

SEQ ID NO: 3286571 - RNA, 19 nt, Artificial Sequence
  Description of Artificial Sequence: Synthetic oligonucleotide
cucuagcucgaauuuaaug

SEQ ID NO: 3286572 - RNA, 19 nt, Artificial Sequence
  Description of Artificial Sequence: Synthetic oligonucleotide
ucucuagcucgaauuuaau

SEQ ID NO: 3286573 - RNA, 19 nt, Artificial Sequence
  Description of Artificial Sequence: Synthetic oligonucleotide
ucggauggacuucucagcu

SEQ ID NO: 3286574 - RNA, 19 nt, Artificial Sequence
  Description of Artificial Sequence: Synthetic oligonucleotide
gugaagucggauggacuuc

SEQ ID NO: 3286575 - RNA, 19 nt, Artificial Sequence
  Description of Artificial Sequence: Synthetic oligonucleotide
ccgcugauagacguggucc

SEQ ID NO: 3286576 - RNA, 19 nt, Artificial Sequence
  Description of Artificial Sequence: Synthetic oligonucleotide
ggcccgcugauagacgugg

SEQ ID NO: 3286577 - RNA, 19 nt, Artificial Sequence
  Description of Artificial Sequence: Synthetic oligonucleotide
gggcccgcugauagacgug

SEQ ID NO: 3286578 - RNA, 19 nt, Artificial Sequence
  Description of Artificial Sequence: Synthetic oligonucleotide
ucguccgaauccuucuccc

SEQ ID NO: 3286579 - RNA, 19 nt, Artificial Sequence
  Description of Artificial Sequence: Synthetic oligonucleotide
aaaccucgucauggcucau

SEQ ID NO: 3286580 - RNA, 19 nt, Artificial Sequence
  Description of Artificial Sequence: Synthetic oligonucleotide
gaaaccucgucauggcuca

SEQ ID NO: 3286581 - RNA, 19 nt, Artificial Sequence
  Description of Artificial Sequence: Synthetic oligonucleotide
agaaaccucgucauggcuc

SEQ ID NO: 3286582 - RNA, 19 nt, Artificial Sequence
  Description of Artificial Sequence: Synthetic oligonucleotide
ggaagaaaccucgucaugg

SEQ ID NO: 3286583 - RNA, 19 nt, Artificial Sequence
  Description of Artificial Sequence: Synthetic oligonucleotide
cggaagaaaccucgucaug

SEQ ID NO: 3286584 - RNA, 19 nt, Artificial Sequence
  Description of Artificial Sequence: Synthetic oligonucleotide
gacggaagaaaccucguca

SEQ ID NO: 3286585 - RNA, 19 nt, Artificial Sequence
  Description of Artificial Sequence: Synthetic oligonucleotide
ugacggaagaaaccucguc

SEQ ID NO: 3286586 - RNA, 19 nt, Artificial Sequence
  Description of Artificial Sequence: Synthetic oligonucleotide
uugacggaagaaaccucgu

SEQ ID NO: 3286587 - RNA, 19 nt, Artificial Sequence
  Description of Artificial Sequence: Synthetic oligonucleotide
guugacggaagaaaccucg

SEQ ID NO: 3286588 - RNA, 19 nt, Artificial Sequence
  Description of Artificial Sequence: Synthetic oligonucleotide
uguugacggaagaaaccuc

SEQ ID NO: 3286589 - RNA, 19 nt, Artificial Sequence
  Description of Artificial Sequence: Synthetic oligonucleotide
gaucaaggggauguggcug

SEQ ID NO: 3286590 - RNA, 19 nt, Artificial Sequence
  Description of Artificial Sequence: Synthetic oligonucleotide
ugaucaaggggauguggcu

SEQ ID NO: 3286591 - RNA, 19 nt, Artificial Sequence
  Description of Artificial Sequence: Synthetic oligonucleotide
augaucaaggggauguggc

SEQ ID NO: 3286592 - RNA, 19 nt, Artificial Sequence
  Description of Artificial Sequence: Synthetic oligonucleotide
uucuggccguacacuugca

SEQ ID NO: 3286593 - RNA, 19 nt, Artificial Sequence
  Description of Artificial Sequence: Synthetic oligonucleotide
cuucuggccguacacuugc

SEQ ID NO: 3286594 - RNA, 19 nt, Artificial Sequence
  Description of Artificial Sequence: Synthetic oligonucleotide
gaauuuggcuaagcggcgc

SEQ ID NO: 3286595 - RNA, 19 nt, Artificial Sequence
  Description of Artificial Sequence: Synthetic oligonucleotide
gggaauuuggcuaagcggc

SEQ ID NO: 3286596 - RNA, 19 nt, Artificial Sequence
  Description of Artificial Sequence: Synthetic oligonucleotide
agggaauuuggcuaagcgg

SEQ ID NO: 3286597 - RNA, 19 nt, Artificial Sequence
  Description of Artificial Sequence: Synthetic oligonucleotide
ccuuaaccagggaauuugg

SEQ ID NO: 3286598 - RNA, 19 nt, Artificial Sequence
  Description of Artificial Sequence: Synthetic oligonucleotide
agccggccuuaaccaggga

SEQ ID NO: 3286599 - RNA, 19 nt, Artificial Sequence
  Description of Artificial Sequence: Synthetic oligonucleotide
cagacgugcccuggagaug

SEQ ID NO: 3286600 - RNA, 19 nt, Artificial Sequence
  Description of Artificial Sequence: Synthetic oligonucleotide
cucccugcagacgugcccu

SEQ ID NO: 3286601 - RNA, 19 nt, Artificial Sequence
  Description of Artificial Sequence: Synthetic oligonucleotide
aucugcgauguggguuugg

SEQ ID NO: 3286602 - RNA, 19 nt, Artificial Sequence
  Description of Artificial Sequence: Synthetic oligonucleotide
guaucugcgauguggguuu

SEQ ID NO: 3286603 - RNA, 19 nt, Artificial Sequence
  Description of Artificial Sequence: Synthetic oligonucleotide
ucgaguaucugcgaugugg

SEQ ID NO: 3286604 - RNA, 19 nt, Artificial Sequence
  Description of Artificial Sequence: Synthetic oligonucleotide
cucgaguaucugcgaugug

SEQ ID NO: 3286605 - RNA, 19 nt, Artificial Sequence
  Description of Artificial Sequence: Synthetic oligonucleotide
uccucgaguaucugcgaug

SEQ ID NO: 3286606 - RNA, 19 nt, Artificial Sequence
  Description of Artificial Sequence: Synthetic oligonucleotide
cuccucgaguaucugcgau

SEQ ID NO: 3286607 - RNA, 19 nt, Artificial Sequence
  Description of Artificial Sequence: Synthetic oligonucleotide
aacuccucgaguaucugcg

SEQ ID NO: 3286608 - RNA, 19 nt, Artificial Sequence
  Description of Artificial Sequence: Synthetic oligonucleotide
uaacuccucgaguaucugc

SEQ ID NO: 3286609 - RNA, 19 nt, Artificial Sequence
  Description of Artificial Sequence: Synthetic oligonucleotide
cuggcuacuaacuccucga

SEQ ID NO: 3286610 - RNA, 19 nt, Artificial Sequence
  Description of Artificial Sequence: Synthetic oligonucleotide
gacuggcuacuaacuccuc

SEQ ID NO: 3286611 - RNA, 19 nt, Artificial Sequence
  Description of Artificial Sequence: Synthetic oligonucleotide
aagacuggcuacuaacucc

SEQ ID NO: 3286612 - RNA, 19 nt, Artificial Sequence
  Description of Artificial Sequence: Synthetic oligonucleotide
ggaagacuggcuacuaacu

SEQ ID NO: 3286613 - RNA, 19 nt, Artificial Sequence
  Description of Artificial Sequence: Synthetic oligonucleotide
gggacaagcauggauggug

SEQ ID NO: 3286614 - RNA, 19 nt, Artificial Sequence
  Description of Artificial Sequence: Synthetic oligonucleotide
agggacaagcauggauggu

SEQ ID NO: 3286615 - RNA, 19 nt, Artificial Sequence
  Description of Artificial Sequence: Synthetic oligonucleotide
ucagggacaagcauggaug

SEQ ID NO: 3286616 - RNA, 19 nt, Artificial Sequence
  Description of Artificial Sequence: Synthetic oligonucleotide
cucagggacaagcauggau

SEQ ID NO: 3286617 - RNA, 19 nt, Artificial Sequence
  Description of Artificial Sequence: Synthetic oligonucleotide
uuaggagguccuugcccac

SEQ ID NO: 3286618 - RNA, 19 nt, Artificial Sequence
  Description of Artificial Sequence: Synthetic oligonucleotide
cuuaggagguccuugccca

SEQ ID NO: 3286619 - RNA, 19 nt, Artificial Sequence
  Description of Artificial Sequence: Synthetic oligonucleotide
accugcgucuucuuaggag

SEQ ID NO: 3286620 - RNA, 19 nt, Artificial Sequence
  Description of Artificial Sequence: Synthetic oligonucleotide
gaccugcgucuucuuagga

SEQ ID NO: 3286621 - RNA, 19 nt, Artificial Sequence
  Description of Artificial Sequence: Synthetic oligonucleotide
ugaccugcgucuucuuagg

SEQ ID NO: 3286622 - RNA, 19 nt, Artificial Sequence
  Description of Artificial Sequence: Synthetic oligonucleotide
uuaaucaugaccugcgucu

SEQ ID NO: 3286623 - RNA, 19 nt, Artificial Sequence
  Description of Artificial Sequence: Synthetic oligonucleotide
cuuaaucaugaccugcguc

SEQ ID NO: 3286624 - RNA, 19 nt, Artificial Sequence
  Description of Artificial Sequence: Synthetic oligonucleotide
ucuuaaucaugaccugcgu

SEQ ID NO: 3286625 - RNA, 19 nt, Artificial Sequence
  Description of Artificial Sequence: Synthetic oligonucleotide
cgaucuuaaucaugaccug

SEQ ID NO: 3286626 - RNA, 19 nt, Artificial Sequence
  Description of Artificial Sequence: Synthetic oligonucleotide
cuaagucucgaucuuaauc

SEQ ID NO: 3286627 - RNA, 19 nt, Artificial Sequence
  Description of Artificial Sequence: Synthetic oligonucleotide
aaucccuaagucucgaucu

SEQ ID NO: 3286628 - RNA, 19 nt, Artificial Sequence
  Description of Artificial Sequence: Synthetic oligonucleotide
caaucccuaagucucgauc

SEQ ID NO: 3286629 - RNA, 19 nt, Artificial Sequence
  Description of Artificial Sequence: Synthetic oligonucleotide
ucaaucccuaagucucgau

SEQ ID NO: 3286630 - RNA, 19 nt, Artificial Sequence
  Description of Artificial Sequence: Synthetic oligonucleotide
cucaaucccuaagucucga

SEQ ID NO: 3286631 - RNA, 19 nt, Artificial Sequence
  Description of Artificial Sequence: Synthetic oligonucleotide
acucaaucccuaagucucg

SEQ ID NO: 3286632 - RNA, 19 nt, Artificial Sequence
  Description of Artificial Sequence: Synthetic oligonucleotide
gacucaaucccuaagucuc

SEQ ID NO: 3286633 - RNA, 19 nt, Artificial Sequence
  Description of Artificial Sequence: Synthetic oligonucleotide
ggacucaaucccuaagucu

SEQ ID NO: 3286634 - RNA, 19 nt, Artificial Sequence
  Description of Artificial Sequence: Synthetic oligonucleotide
gggacucaaucccuaaguc

SEQ ID NO: 3286635 - RNA, 19 nt, Artificial Sequence
  Description of Artificial Sequence: Synthetic oligonucleotide
ugggacucaaucccuaagu

SEQ ID NO: 3286636 - RNA, 19 nt, Artificial Sequence
  Description of Artificial Sequence: Synthetic oligonucleotide
ugaaucucguucuuuuuuu

SEQ ID NO: 3286637 - RNA, 19 nt, Artificial Sequence
  Description of Artificial Sequence: Synthetic oligonucleotide
ccccaaucugaaucucguu

SEQ ID NO: 3286638 - RNA, 19 nt, Artificial Sequence
  Description of Artificial Sequence: Synthetic oligonucleotide
cguccacccccaaucugaa

SEQ ID NO: 3286639 - RNA, 19 nt, Artificial Sequence
  Description of Artificial Sequence: Synthetic oligonucleotide
gcguccacccccaaucuga

SEQ ID NO: 3286640 - RNA, 19 nt, Artificial Sequence
  Description of Artificial Sequence: Synthetic oligonucleotide
ggcguccacccccaaucug

SEQ ID NO: 3286641 - RNA, 19 nt, Artificial Sequence
  Description of Artificial Sequence: Synthetic oligonucleotide
cggcguccacccccaaucu

SEQ ID NO: 3286642 - RNA, 19 nt, Artificial Sequence
  Description of Artificial Sequence: Synthetic oligonucleotide
ucuccuaaccaggagggcg

SEQ ID NO: 3286643 - RNA, 19 nt, Artificial Sequence
  Description of Artificial Sequence: Synthetic oligonucleotide
aaucauuucuccuaaccag

SEQ ID NO: 3286644 - RNA, 19 nt, Artificial Sequence
  Description of Artificial Sequence: Synthetic oligonucleotide
ccgagggcagaaaaucauu

SEQ ID NO: 3286645 - RNA, 19 nt, Artificial Sequence
  Description of Artificial Sequence: Synthetic oligonucleotide
cccgagggcagaaaaucau

SEQ ID NO: 3286646 - RNA, 19 nt, Artificial Sequence
  Description of Artificial Sequence: Synthetic oligonucleotide
aaccccgagggcagaaaau

SEQ ID NO: 3286647 - RNA, 19 nt, Artificial Sequence
  Description of Artificial Sequence: Synthetic oligonucleotide
acaaccccgagggcagaaa

SEQ ID NO: 3286648 - RNA, 19 nt, Artificial Sequence
  Description of Artificial Sequence: Synthetic oligonucleotide
aacaaccccgagggcagaa

SEQ ID NO: 3286649 - RNA, 19 nt, Artificial Sequence
  Description of Artificial Sequence: Synthetic oligonucleotide
ggaacaaccccgagggcag

SEQ ID NO: 3286650 - RNA, 19 nt, Artificial Sequence
  Description of Artificial Sequence: Synthetic oligonucleotide
gguuuaaggggaacaaccc

SEQ ID NO: 3286651 - RNA, 19 nt, Artificial Sequence
  Description of Artificial Sequence: Synthetic oligonucleotide
ggguuuaaggggaacaacc

SEQ ID NO: 3286652 - RNA, 19 nt, Artificial Sequence
  Description of Artificial Sequence: Synthetic oligonucleotide
gaggguuuaaggggaacaa

SEQ ID NO: 3286653 - RNA, 19 nt, Artificial Sequence
  Description of Artificial Sequence: Synthetic oligonucleotide
agaggguuuaaggggaaca

SEQ ID NO: 3286654 - RNA, 19 nt, Artificial Sequence
  Description of Artificial Sequence: Synthetic oligonucleotide
aagauggagaggguuuaag

SEQ ID NO: 3286655 - RNA, 19 nt, Artificial Sequence
  Description of Artificial Sequence: Synthetic oligonucleotide
gcaugcacugguccccugg

SEQ ID NO: 3286656 - RNA, 19 nt, Artificial Sequence
  Description of Artificial Sequence: Synthetic oligonucleotide
cuacaaugcuuugcaugca

SEQ ID NO: 3286657 - RNA, 19 nt, Artificial Sequence
  Description of Artificial Sequence: Synthetic oligonucleotide
ggaacuaauccuucuacaa

SEQ ID NO: 3286658 - RNA, 19 nt, Artificial Sequence
  Description of Artificial Sequence: Synthetic oligonucleotide
uugcacaaaagcaggaacu

SEQ ID NO: 3286659 - RNA, 19 nt, Artificial Sequence
  Description of Artificial Sequence: Synthetic oligonucleotide
ugcaugaaagaaguugcac

SEQ ID NO: 3286660 - RNA, 19 nt, Artificial Sequence
  Description of Artificial Sequence: Synthetic oligonucleotide
gugcaugaaagaaguugca

SEQ ID NO: 3286661 - RNA, 19 nt, Artificial Sequence
  Description of Artificial Sequence: Synthetic oligonucleotide
aggugcaugaaagaaguug

SEQ ID NO: 3286662 - RNA, 19 nt, Artificial Sequence
  Description of Artificial Sequence: Synthetic oligonucleotide
aaacaggugcaugaaagaa

SEQ ID NO: 3286663 - RNA, 19 nt, Artificial Sequence
  Description of Artificial Sequence: Synthetic oligonucleotide
cuaaugcucccaaaacagg

SEQ ID NO: 3286664 - RNA, 19 nt, Artificial Sequence
  Description of Artificial Sequence: Synthetic oligonucleotide
gcgcuaaugcucccaaaac

SEQ ID NO: 3286665 - RNA, 19 nt, Artificial Sequence
  Description of Artificial Sequence: Synthetic oligonucleotide
ggcgcuaaugcucccaaaa

SEQ ID NO: 3286666 - RNA, 19 nt, Artificial Sequence
  Description of Artificial Sequence: Synthetic oligonucleotide
uggcgcuaaugcucccaaa

SEQ ID NO: 3286667 - RNA, 19 nt, Artificial Sequence
  Description of Artificial Sequence: Synthetic oligonucleotide
guggcgcuaaugcucccaa

SEQ ID NO: 3286668 - RNA, 19 nt, Artificial Sequence
  Description of Artificial Sequence: Synthetic oligonucleotide
acguggcgcuaaugcuccc

SEQ ID NO: 3286669 - RNA, 19 nt, Artificial Sequence
  Description of Artificial Sequence: Synthetic oligonucleotide
cacacguggcgcuaaugcu

SEQ ID NO: 3286670 - RNA, 19 nt, Artificial Sequence
  Description of Artificial Sequence: Synthetic oligonucleotide
ccacacguggcgcuaaugc

SEQ ID NO: 3286671 - RNA, 19 nt, Artificial Sequence
  Description of Artificial Sequence: Synthetic oligonucleotide
cccacacguggcgcuaaug

SEQ ID NO: 3286672 - RNA, 19 nt, Artificial Sequence
  Description of Artificial Sequence: Synthetic oligonucleotide
cacccacacguggcgcuaa

SEQ ID NO: 3286673 - RNA, 19 nt, Artificial Sequence
  Description of Artificial Sequence: Synthetic oligonucleotide
cuaagagcacccacacgug

SEQ ID NO: 3286674 - RNA, 19 nt, Artificial Sequence
  Description of Artificial Sequence: Synthetic oligonucleotide
ucuaagagcacccacacgu

SEQ ID NO: 3286675 - RNA, 19 nt, Artificial Sequence
  Description of Artificial Sequence: Synthetic oligonucleotide
auacagcuucuaagagcac

SEQ ID NO: 3286676 - RNA, 19 nt, Artificial Sequence
  Description of Artificial Sequence: Synthetic oligonucleotide
aauacagcuucuaagagca

SEQ ID NO: 3286677 - RNA, 19 nt, Artificial Sequence
  Description of Artificial Sequence: Synthetic oligonucleotide
aaaucagugaaauacagcu

SEQ ID NO: 3286678 - RNA, 19 nt, Artificial Sequence
  Description of Artificial Sequence: Synthetic oligonucleotide
aguuuauuacaaaucagug

SEQ ID NO: 3286679 - RNA, 19 nt, Artificial Sequence
  Description of Artificial Sequence: Synthetic oligonucleotide
uuuccggggauaaacaagu

SEQ ID NO: 3286680 - RNA, 19 nt, Artificial Sequence
  Description of Artificial Sequence: Synthetic oligonucleotide
uuuuuccggggauaaacaa

SEQ ID NO: 3286681 - RNA, 19 nt, Artificial Sequence
  Description of Artificial Sequence: Synthetic oligonucleotide
uuuuuuuccggggauaaac

SEQ ID NO: 3286682 - RNA, 19 nt, Artificial Sequence
  Description of Artificial Sequence: Synthetic oligonucleotide
ggcugaauguaguuaauug

SEQ ID NO: 3286683 - RNA, 19 nt, Artificial Sequence
  Description of Artificial Sequence: Synthetic oligonucleotide
guuaauuguuucuccuugc

SEQ ID NO: 3286684 - RNA, 19 nt, Artificial Sequence
  Description of Artificial Sequence: Synthetic oligonucleotide
ugcugugugacucuggcag

SEQ ID NO: 3286685 - RNA, 19 nt, Artificial Sequence
  Description of Artificial Sequence: Synthetic oligonucleotide
gcugugugacucuggcaga

SEQ ID NO: 3286686 - RNA, 19 nt, Artificial Sequence
  Description of Artificial Sequence: Synthetic oligonucleotide
agaggcugucaagaguggu

SEQ ID NO: 3286687 - RNA, 19 nt, Artificial Sequence
  Description of Artificial Sequence: Synthetic oligonucleotide
gcugucaagaguggucggu

SEQ ID NO: 3286688 - RNA, 19 nt, Artificial Sequence
  Description of Artificial Sequence: Synthetic oligonucleotide
cugucaagaguggucggug

SEQ ID NO: 3286689 - RNA, 19 nt, Artificial Sequence
  Description of Artificial Sequence: Synthetic oligonucleotide
agaguggucggugucgaua

SEQ ID NO: 3286690 - RNA, 19 nt, Artificial Sequence
  Description of Artificial Sequence: Synthetic oligonucleotide
uggucggugucgauaauaa

SEQ ID NO: 3286691 - RNA, 19 nt, Artificial Sequence
  Description of Artificial Sequence: Synthetic oligonucleotide
uaauaaucacugcucggug

SEQ ID NO: 3286692 - RNA, 19 nt, Artificial Sequence
  Description of Artificial Sequence: Synthetic oligonucleotide
aauaaucacugcucggugc

SEQ ID NO: 3286693 - RNA, 19 nt, Artificial Sequence
  Description of Artificial Sequence: Synthetic oligonucleotide
auaaucacugcucggugca

SEQ ID NO: 3286694 - RNA, 19 nt, Artificial Sequence
  Description of Artificial Sequence: Synthetic oligonucleotide
uaaucacugcucggugcag

SEQ ID NO: 3286695 - RNA, 19 nt, Artificial Sequence
  Description of Artificial Sequence: Synthetic oligonucleotide
caguaccugcggacaagcc

SEQ ID NO: 3286696 - RNA, 19 nt, Artificial Sequence
  Description of Artificial Sequence: Synthetic oligonucleotide
accugcggacaagccauag

SEQ ID NO: 3286697 - RNA, 19 nt, Artificial Sequence
  Description of Artificial Sequence: Synthetic oligonucleotide
gcagaacaugaacaaucca

SEQ ID NO: 3286698 - RNA, 19 nt, Artificial Sequence
  Description of Artificial Sequence: Synthetic oligonucleotide
acaugaacaauccaugguc

SEQ ID NO: 3286699 - RNA, 19 nt, Artificial Sequence
  Description of Artificial Sequence: Synthetic oligonucleotide
caugaacaauccauggucc

SEQ ID NO: 3286700 - RNA, 19 nt, Artificial Sequence
  Description of Artificial Sequence: Synthetic oligonucleotide
augaacaauccauggucca

SEQ ID NO: 3286701 - RNA, 19 nt, Artificial Sequence
  Description of Artificial Sequence: Synthetic oligonucleotide
ccaacuucagcucagcuuu

SEQ ID NO: 3286702 - RNA, 19 nt, Artificial Sequence
  Description of Artificial Sequence: Synthetic oligonucleotide
cagcucagcuuuuggaugu

SEQ ID NO: 3286703 - RNA, 19 nt, Artificial Sequence
  Description of Artificial Sequence: Synthetic oligonucleotide
ucagcuuuuggauguccca

SEQ ID NO: 3286704 - RNA, 19 nt, Artificial Sequence
  Description of Artificial Sequence: Synthetic oligonucleotide
cagcuuuuggaugucccau

SEQ ID NO: 3286705 - RNA, 19 nt, Artificial Sequence
  Description of Artificial Sequence: Synthetic oligonucleotide
agcuuuuggaugucccauu

SEQ ID NO: 3286706 - RNA, 19 nt, Artificial Sequence
  Description of Artificial Sequence: Synthetic oligonucleotide
gcuuuuggaugucccauuc

SEQ ID NO: 3286707 - RNA, 19 nt, Artificial Sequence
  Description of Artificial Sequence: Synthetic oligonucleotide
cuuuuggaugucccauuca

SEQ ID NO: 3286708 - RNA, 19 nt, Artificial Sequence
  Description of Artificial Sequence: Synthetic oligonucleotide
gaucccaaagcagaauagu

SEQ ID NO: 3286709 - RNA, 19 nt, Artificial Sequence
  Description of Artificial Sequence: Synthetic oligonucleotide
ucccaaagcagaauaguaa

SEQ ID NO: 3286710 - RNA, 19 nt, Artificial Sequence
  Description of Artificial Sequence: Synthetic oligonucleotide
gaauaguaauguaccaccu

SEQ ID NO: 3286711 - RNA, 19 nt, Artificial Sequence
  Description of Artificial Sequence: Synthetic oligonucleotide
auguaccaccuuccuuacc

SEQ ID NO: 3286712 - RNA, 19 nt, Artificial Sequence
  Description of Artificial Sequence: Synthetic oligonucleotide
guaccaccuuccuuaccag

SEQ ID NO: 3286713 - RNA, 19 nt, Artificial Sequence
  Description of Artificial Sequence: Synthetic oligonucleotide
cuuaccaguaccuguagga

SEQ ID NO: 3286714 - RNA, 19 nt, Artificial Sequence
  Description of Artificial Sequence: Synthetic oligonucleotide
uuuggggugccucugcgau

SEQ ID NO: 3286715 - RNA, 19 nt, Artificial Sequence
  Description of Artificial Sequence: Synthetic oligonucleotide
uuggggugccucugcgauc

SEQ ID NO: 3286716 - RNA, 19 nt, Artificial Sequence
  Description of Artificial Sequence: Synthetic oligonucleotide
uggggugccucugcgauca

SEQ ID NO: 3286717 - RNA, 19 nt, Artificial Sequence
  Description of Artificial Sequence: Synthetic oligonucleotide
ugccucugcgaucaggcug

SEQ ID NO: 3286718 - RNA, 19 nt, Artificial Sequence
  Description of Artificial Sequence: Synthetic oligonucleotide
ccucugcgaucaggcugca

SEQ ID NO: 3286719 - RNA, 19 nt, Artificial Sequence
  Description of Artificial Sequence: Synthetic oligonucleotide
aucaggcugcagcaaucag

SEQ ID NO: 3286720 - RNA, 19 nt, Artificial Sequence
  Description of Artificial Sequence: Synthetic oligonucleotide
cugugcaccagaacugacu

SEQ ID NO: 3286721 - RNA, 19 nt, Artificial Sequence
  Description of Artificial Sequence: Synthetic oligonucleotide
ugugcaccagaacugacug

SEQ ID NO: 3286722 - RNA, 19 nt, Artificial Sequence
  Description of Artificial Sequence: Synthetic oligonucleotide
cugacugacagaaagccug

SEQ ID NO: 3286723 - RNA, 19 nt, Artificial Sequence
  Description of Artificial Sequence: Synthetic oligonucleotide
ugacugacagaaagccuga

SEQ ID NO: 3286724 - RNA, 19 nt, Artificial Sequence
  Description of Artificial Sequence: Synthetic oligonucleotide
agaggcugaaugacagaga

SEQ ID NO: 3286725 - RNA, 19 nt, Artificial Sequence
  Description of Artificial Sequence: Synthetic oligonucleotide
agaaagauccaaccuugca

SEQ ID NO: 3286726 - RNA, 19 nt, Artificial Sequence
  Description of Artificial Sequence: Synthetic oligonucleotide
aagauccaaccuugcauug

SEQ ID NO: 3286727 - RNA, 19 nt, Artificial Sequence
  Description of Artificial Sequence: Synthetic oligonucleotide
uugcauugaucuuguugac

SEQ ID NO: 3286728 - RNA, 19 nt, Artificial Sequence
  Description of Artificial Sequence: Synthetic oligonucleotide
uugaucuuguugacagccu

SEQ ID NO: 3286729 - RNA, 19 nt, Artificial Sequence
  Description of Artificial Sequence: Synthetic oligonucleotide
cagccugagaaagcuugau

SEQ ID NO: 3286730 - RNA, 19 nt, Artificial Sequence
  Description of Artificial Sequence: Synthetic oligonucleotide
gcuugauauaggaaacgac

SEQ ID NO: 3286731 - RNA, 19 nt, Artificial Sequence
  Description of Artificial Sequence: Synthetic oligonucleotide
cuugauauaggaaacgacc

SEQ ID NO: 3286732 - RNA, 19 nt, Artificial Sequence
  Description of Artificial Sequence: Synthetic oligonucleotide
ugauguugccugcaauugc

SEQ ID NO: 3286733 - RNA, 19 nt, Artificial Sequence
  Description of Artificial Sequence: Synthetic oligonucleotide
uguugccugcaauugcagu

SEQ ID NO: 3286734 - RNA, 19 nt, Artificial Sequence
  Description of Artificial Sequence: Synthetic oligonucleotide
aaaggugucauuacucgcu

SEQ ID NO: 3286735 - RNA, 19 nt, Artificial Sequence
  Description of Artificial Sequence: Synthetic oligonucleotide
aaggugucauuacucgcug

SEQ ID NO: 3286736 - RNA, 19 nt, Artificial Sequence
  Description of Artificial Sequence: Synthetic oligonucleotide
gugucauuacucgcugucc

SEQ ID NO: 3286737 - RNA, 19 nt, Artificial Sequence
  Description of Artificial Sequence: Synthetic oligonucleotide
aaugacagcuccgcaggaa

SEQ ID NO: 3286738 - RNA, 19 nt, Artificial Sequence
  Description of Artificial Sequence: Synthetic oligonucleotide
augacagcuccgcaggaau

SEQ ID NO: 3286739 - RNA, 19 nt, Artificial Sequence
  Description of Artificial Sequence: Synthetic oligonucleotide
cgcaggaauggaaaggggu

SEQ ID NO: 3286740 - RNA, 19 nt, Artificial Sequence
  Description of Artificial Sequence: Synthetic oligonucleotide
agggguaauuuauuaccgc

SEQ ID NO: 3286741 - RNA, 19 nt, Artificial Sequence
  Description of Artificial Sequence: Synthetic oligonucleotide
gggguaauuuauuaccgca

SEQ ID NO: 3286742 - RNA, 19 nt, Artificial Sequence
  Description of Artificial Sequence: Synthetic oligonucleotide
ggguaauuuauuaccgcaa

SEQ ID NO: 3286743 - RNA, 19 nt, Artificial Sequence
  Description of Artificial Sequence: Synthetic oligonucleotide
guaauuuauuaccgcaaca

SEQ ID NO: 3286744 - RNA, 19 nt, Artificial Sequence
  Description of Artificial Sequence: Synthetic oligonucleotide
auuuauuaccgcaacacag

SEQ ID NO: 3286745 - RNA, 19 nt, Artificial Sequence
  Description of Artificial Sequence: Synthetic oligonucleotide
auuaccgcaacacagaaau

SEQ ID NO: 3286746 - RNA, 19 nt, Artificial Sequence
  Description of Artificial Sequence: Synthetic oligonucleotide
acacagaaauacagcucca

SEQ ID NO: 3286747 - RNA, 19 nt, Artificial Sequence
  Description of Artificial Sequence: Synthetic oligonucleotide
caauaagaaaagcccaaga

SEQ ID NO: 3286748 - RNA, 19 nt, Artificial Sequence
  Description of Artificial Sequence: Synthetic oligonucleotide
aagcccaagauauaguggc

SEQ ID NO: 3286749 - RNA, 19 nt, Artificial Sequence
  Description of Artificial Sequence: Synthetic oligonucleotide
aagauauaguggcuggcac

SEQ ID NO: 3286750 - RNA, 19 nt, Artificial Sequence
  Description of Artificial Sequence: Synthetic oligonucleotide
uggcuggcacuaaugguag

SEQ ID NO: 3286751 - RNA, 19 nt, Artificial Sequence
  Description of Artificial Sequence: Synthetic oligonucleotide
ggcuggcacuaaugguagc

SEQ ID NO: 3286752 - RNA, 19 nt, Artificial Sequence
  Description of Artificial Sequence: Synthetic oligonucleotide
ggcacuaaugguagcauua

SEQ ID NO: 3286753 - RNA, 19 nt, Artificial Sequence
  Description of Artificial Sequence: Synthetic oligonucleotide
aguggagaacuaauuuccc

SEQ ID NO: 3286754 - RNA, 19 nt, Artificial Sequence
  Description of Artificial Sequence: Synthetic oligonucleotide
ggagaacuaauuucccuug

SEQ ID NO: 3286755 - RNA, 19 nt, Artificial Sequence
  Description of Artificial Sequence: Synthetic oligonucleotide
gagaacuaauuucccuuga

SEQ ID NO: 3286756 - RNA, 19 nt, Artificial Sequence
  Description of Artificial Sequence: Synthetic oligonucleotide
uuucccuugaaaucugguc

SEQ ID NO: 3286757 - RNA, 19 nt, Artificial Sequence
  Description of Artificial Sequence: Synthetic oligonucleotide
uucccuugaaaucuggucu

SEQ ID NO: 3286758 - RNA, 19 nt, Artificial Sequence
  Description of Artificial Sequence: Synthetic oligonucleotide
cccuugaaaucuggucucc

SEQ ID NO: 3286759 - RNA, 19 nt, Artificial Sequence
  Description of Artificial Sequence: Synthetic oligonucleotide
ccuugaaaucuggucuccu

SEQ ID NO: 3286760 - RNA, 19 nt, Artificial Sequence
  Description of Artificial Sequence: Synthetic oligonucleotide
gaaaucuggucuccugacg

SEQ ID NO: 3286761 - RNA, 19 nt, Artificial Sequence
  Description of Artificial Sequence: Synthetic oligonucleotide
cuggucuccugacguccca

SEQ ID NO: 3286762 - RNA, 19 nt, Artificial Sequence
  Description of Artificial Sequence: Synthetic oligonucleotide
ccugacacuaauugaucuu

SEQ ID NO: 3286763 - RNA, 19 nt, Artificial Sequence
  Description of Artificial Sequence: Synthetic oligonucleotide
cugacacuaauugaucuuc

SEQ ID NO: 3286764 - RNA, 19 nt, Artificial Sequence
  Description of Artificial Sequence: Synthetic oligonucleotide
ugacacuaauugaucuucc

SEQ ID NO: 3286765 - RNA, 19 nt, Artificial Sequence
  Description of Artificial Sequence: Synthetic oligonucleotide
cuggaauugccagagaggc

SEQ ID NO: 3286766 - RNA, 19 nt, Artificial Sequence
  Description of Artificial Sequence: Synthetic oligonucleotide
ggaauugccagagaggccg

SEQ ID NO: 3286767 - RNA, 19 nt, Artificial Sequence
  Description of Artificial Sequence: Synthetic oligonucleotide
gaauugccagagaggccgu

SEQ ID NO: 3286768 - RNA, 19 nt, Artificial Sequence
  Description of Artificial Sequence: Synthetic oligonucleotide
aauugccagagaggccgug

SEQ ID NO: 3286769 - RNA, 19 nt, Artificial Sequence
  Description of Artificial Sequence: Synthetic oligonucleotide
auugccagagaggccgugg

SEQ ID NO: 3286770 - RNA, 19 nt, Artificial Sequence
  Description of Artificial Sequence: Synthetic oligonucleotide
aaccagccacaagauaaug

SEQ ID NO: 3286771 - RNA, 19 nt, Artificial Sequence
  Description of Artificial Sequence: Synthetic oligonucleotide
aagauaauggccaacagau

SEQ ID NO: 3286772 - RNA, 19 nt, Artificial Sequence
  Description of Artificial Sequence: Synthetic oligonucleotide
auaauggccaacagaucaa

SEQ ID NO: 3286773 - RNA, 19 nt, Artificial Sequence
  Description of Artificial Sequence: Synthetic oligonucleotide
ggccaacagaucaaaacac

SEQ ID NO: 3286774 - RNA, 19 nt, Artificial Sequence
  Description of Artificial Sequence: Synthetic oligonucleotide
gccaacagaucaaaacacu

SEQ ID NO: 3286775 - RNA, 19 nt, Artificial Sequence
  Description of Artificial Sequence: Synthetic oligonucleotide
ccaacagaucaaaacacua

SEQ ID NO: 3286776 - RNA, 19 nt, Artificial Sequence
  Description of Artificial Sequence: Synthetic oligonucleotide
cagaucaaaacacuacuua

SEQ ID NO: 3286777 - RNA, 19 nt, Artificial Sequence
  Description of Artificial Sequence: Synthetic oligonucleotide
ggcugcaaagagacaauca

SEQ ID NO: 3286778 - RNA, 19 nt, Artificial Sequence
  Description of Artificial Sequence: Synthetic oligonucleotide
gagacaaucauugugguag

SEQ ID NO: 3286779 - RNA, 19 nt, Artificial Sequence
  Description of Artificial Sequence: Synthetic oligonucleotide
agacaaucauugugguagu

SEQ ID NO: 3286780 - RNA, 19 nt, Artificial Sequence
  Description of Artificial Sequence: Synthetic oligonucleotide
auugugguagugguaccau

SEQ ID NO: 3286781 - RNA, 19 nt, Artificial Sequence
  Description of Artificial Sequence: Synthetic oligonucleotide
uugugguagugguaccaug

SEQ ID NO: 3286782 - RNA, 19 nt, Artificial Sequence
  Description of Artificial Sequence: Synthetic oligonucleotide
ugugguagugguaccaugu

SEQ ID NO: 3286783 - RNA, 19 nt, Artificial Sequence
  Description of Artificial Sequence: Synthetic oligonucleotide
guagugguaccauguaacg

SEQ ID NO: 3286784 - RNA, 19 nt, Artificial Sequence
  Description of Artificial Sequence: Synthetic oligonucleotide
accauguaacguggauauu

SEQ ID NO: 3286785 - RNA, 19 nt, Artificial Sequence
  Description of Artificial Sequence: Synthetic oligonucleotide
ccauguaacguggauauug

SEQ ID NO: 3286786 - RNA, 19 nt, Artificial Sequence
  Description of Artificial Sequence: Synthetic oligonucleotide
cauguaacguggauauugc

SEQ ID NO: 3286787 - RNA, 19 nt, Artificial Sequence
  Description of Artificial Sequence: Synthetic oligonucleotide
uauugcaacaacagaggcg

SEQ ID NO: 3286788 - RNA, 19 nt, Artificial Sequence
  Description of Artificial Sequence: Synthetic oligonucleotide
auugcaacaacagaggcgc

SEQ ID NO: 3286789 - RNA, 19 nt, Artificial Sequence
  Description of Artificial Sequence: Synthetic oligonucleotide
uugcaacaacagaggcgcu

SEQ ID NO: 3286790 - RNA, 19 nt, Artificial Sequence
  Description of Artificial Sequence: Synthetic oligonucleotide
auggcucaagagguggauc

SEQ ID NO: 3286791 - RNA, 19 nt, Artificial Sequence
  Description of Artificial Sequence: Synthetic oligonucleotide
guggaucccacaggagaaa

SEQ ID NO: 3286792 - RNA, 19 nt, Artificial Sequence
  Description of Artificial Sequence: Synthetic oligonucleotide
ucccacaggagaaaggacg

SEQ ID NO: 3286793 - RNA, 19 nt, Artificial Sequence
  Description of Artificial Sequence: Synthetic oligonucleotide
cccacaggagaaaggacgc

SEQ ID NO: 3286794 - RNA, 19 nt, Artificial Sequence
  Description of Artificial Sequence: Synthetic oligonucleotide
aggagaaaggacgcuuggg

SEQ ID NO: 3286795 - RNA, 19 nt, Artificial Sequence
  Description of Artificial Sequence: Synthetic oligonucleotide
ggagaaaggacgcuugggg

SEQ ID NO: 3286796 - RNA, 19 nt, Artificial Sequence
  Description of Artificial Sequence: Synthetic oligonucleotide
gaaaggacgcuuggggucc

SEQ ID NO: 3286797 - RNA, 19 nt, Artificial Sequence
  Description of Artificial Sequence: Synthetic oligonucleotide
aaaggacgcuugggguccu

SEQ ID NO: 3286798 - RNA, 19 nt, Artificial Sequence
  Description of Artificial Sequence: Synthetic oligonucleotide
gacgcuugggguccucacu

SEQ ID NO: 3286799 - RNA, 19 nt, Artificial Sequence
  Description of Artificial Sequence: Synthetic oligonucleotide
acgcuugggguccucacua

SEQ ID NO: 3286800 - RNA, 19 nt, Artificial Sequence
  Description of Artificial Sequence: Synthetic oligonucleotide
cgcuugggguccucacuaa

SEQ ID NO: 3286801 - RNA, 19 nt, Artificial Sequence
  Description of Artificial Sequence: Synthetic oligonucleotide
cacuaaaccagaccuagug

SEQ ID NO: 3286802 - RNA, 19 nt, Artificial Sequence
  Description of Artificial Sequence: Synthetic oligonucleotide
acuaaaccagaccuaguga

SEQ ID NO: 3286803 - RNA, 19 nt, Artificial Sequence
  Description of Artificial Sequence: Synthetic oligonucleotide
gaccuagugaacgaaggaa

SEQ ID NO: 3286804 - RNA, 19 nt, Artificial Sequence
  Description of Artificial Sequence: Synthetic oligonucleotide
aagagacuguccuuaagau

SEQ ID NO: 3286805 - RNA, 19 nt, Artificial Sequence
  Description of Artificial Sequence: Synthetic oligonucleotide
uuaagauaauacaaaacga

SEQ ID NO: 3286806 - RNA, 19 nt, Artificial Sequence
  Description of Artificial Sequence: Synthetic oligonucleotide
uaagauaauacaaaacgag

SEQ ID NO: 3286807 - RNA, 19 nt, Artificial Sequence
  Description of Artificial Sequence: Synthetic oligonucleotide
aagauaauacaaaacgagg

SEQ ID NO: 3286808 - RNA, 19 nt, Artificial Sequence
  Description of Artificial Sequence: Synthetic oligonucleotide
uaauacaaaacgaggucau

SEQ ID NO: 3286809 - RNA, 19 nt, Artificial Sequence
  Description of Artificial Sequence: Synthetic oligonucleotide
aaaacgaggucaucccacu

SEQ ID NO: 3286810 - RNA, 19 nt, Artificial Sequence
  Description of Artificial Sequence: Synthetic oligonucleotide
cccacucagaaaagguuau

SEQ ID NO: 3286811 - RNA, 19 nt, Artificial Sequence
  Description of Artificial Sequence: Synthetic oligonucleotide
gaaaagguuauaugauugu

SEQ ID NO: 3286812 - RNA, 19 nt, Artificial Sequence
  Description of Artificial Sequence: Synthetic oligonucleotide
agguuauaugauugugaaa

SEQ ID NO: 3286813 - RNA, 19 nt, Artificial Sequence
  Description of Artificial Sequence: Synthetic oligonucleotide
aauggacuucugcaacgaa

SEQ ID NO: 3286814 - RNA, 19 nt, Artificial Sequence
  Description of Artificial Sequence: Synthetic oligonucleotide
acuucugcaacgaauuguc

SEQ ID NO: 3286815 - RNA, 19 nt, Artificial Sequence
  Description of Artificial Sequence: Synthetic oligonucleotide
ccuucaccuccgcaaucca

SEQ ID NO: 3286816 - RNA, 19 nt, Artificial Sequence
  Description of Artificial Sequence: Synthetic oligonucleotide
agcaagagagagaauucuu

SEQ ID NO: 3286817 - RNA, 19 nt, Artificial Sequence
  Description of Artificial Sequence: Synthetic oligonucleotide
aauucuuugagacucacaa

SEQ ID NO: 3286818 - RNA, 19 nt, Artificial Sequence
  Description of Artificial Sequence: Synthetic oligonucleotide
auucuuugagacucacaaa

SEQ ID NO: 3286819 - RNA, 19 nt, Artificial Sequence
  Description of Artificial Sequence: Synthetic oligonucleotide
auuucagcacucuucugga

SEQ ID NO: 3286820 - RNA, 19 nt, Artificial Sequence
  Description of Artificial Sequence: Synthetic oligonucleotide
uggaugaaaauaaggcuac

SEQ ID NO: 3286821 - RNA, 19 nt, Artificial Sequence
  Description of Artificial Sequence: Synthetic oligonucleotide
cccacaucuggcaaauaag

SEQ ID NO: 3286822 - RNA, 19 nt, Artificial Sequence
  Description of Artificial Sequence: Synthetic oligonucleotide
ucuggcaaauaagcuuaca

SEQ ID NO: 3286823 - RNA, 19 nt, Artificial Sequence
  Description of Artificial Sequence: Synthetic oligonucleotide
cuggcaaauaagcuuacag

SEQ ID NO: 3286824 - RNA, 19 nt, Artificial Sequence
  Description of Artificial Sequence: Synthetic oligonucleotide
acuugugggacguauuauu

SEQ ID NO: 3286825 - RNA, 19 nt, Artificial Sequence
  Description of Artificial Sequence: Synthetic oligonucleotide
ugugggacguauuauuaaa

SEQ ID NO: 3286826 - RNA, 19 nt, Artificial Sequence
  Description of Artificial Sequence: Synthetic oligonucleotide
gugggacguauuauuaaaa

SEQ ID NO: 3286827 - RNA, 19 nt, Artificial Sequence
  Description of Artificial Sequence: Synthetic oligonucleotide
aacuuugccugcaauagag

SEQ ID NO: 3286828 - RNA, 19 nt, Artificial Sequence
  Description of Artificial Sequence: Synthetic oligonucleotide
acuuugccugcaauagaga

SEQ ID NO: 3286829 - RNA, 19 nt, Artificial Sequence
  Description of Artificial Sequence: Synthetic oligonucleotide
caaguacaugaugcacugc

SEQ ID NO: 3286830 - RNA, 19 nt, Artificial Sequence
  Description of Artificial Sequence: Synthetic oligonucleotide
acaugaugcacugcaacaa

SEQ ID NO: 3286831 - RNA, 19 nt, Artificial Sequence
  Description of Artificial Sequence: Synthetic oligonucleotide
agcaaagaaggaacuccaa

SEQ ID NO: 3286832 - RNA, 19 nt, Artificial Sequence
  Description of Artificial Sequence: Synthetic oligonucleotide
aacuccaaaaguacacaca

SEQ ID NO: 3286833 - RNA, 19 nt, Artificial Sequence
  Description of Artificial Sequence: Synthetic oligonucleotide
acuccaaaaguacacacaa

SEQ ID NO: 3286834 - RNA, 19 nt, Artificial Sequence
  Description of Artificial Sequence: Synthetic oligonucleotide
cuccaaaaguacacacaaa

SEQ ID NO: 3286835 - RNA, 19 nt, Artificial Sequence
  Description of Artificial Sequence: Synthetic oligonucleotide
acacacaaagcacacaccc

SEQ ID NO: 3286836 - RNA, 19 nt, Artificial Sequence
  Description of Artificial Sequence: Synthetic oligonucleotide
caaagcacacacccaacug

SEQ ID NO: 3286837 - RNA, 19 nt, Artificial Sequence
  Description of Artificial Sequence: Synthetic oligonucleotide
aaagcacacacccaacugu

SEQ ID NO: 3286838 - RNA, 19 nt, Artificial Sequence
  Description of Artificial Sequence: Synthetic oligonucleotide
cacacccaacugucagcga

SEQ ID NO: 3286839 - RNA, 19 nt, Artificial Sequence
  Description of Artificial Sequence: Synthetic oligonucleotide
aacugucagcgauaagacg

SEQ ID NO: 3286840 - RNA, 19 nt, Artificial Sequence
  Description of Artificial Sequence: Synthetic oligonucleotide
ucagcgauaagacgauuuu

SEQ ID NO: 3286841 - RNA, 19 nt, Artificial Sequence
  Description of Artificial Sequence: Synthetic oligonucleotide
cagcgauaagacgauuuuc

SEQ ID NO: 3286842 - RNA, 19 nt, Artificial Sequence
  Description of Artificial Sequence: Synthetic oligonucleotide
auaagacgauuuuccuugu

SEQ ID NO: 3286843 - RNA, 19 nt, Artificial Sequence
  Description of Artificial Sequence: Synthetic oligonucleotide
uuuccuugugggguugauc

SEQ ID NO: 3286844 - RNA, 19 nt, Artificial Sequence
  Description of Artificial Sequence: Synthetic oligonucleotide
uuccuugugggguugauca

SEQ ID NO: 3286845 - RNA, 19 nt, Artificial Sequence
  Description of Artificial Sequence: Synthetic oligonucleotide
cuugugggguugaucaaag

SEQ ID NO: 3286846 - RNA, 19 nt, Artificial Sequence
  Description of Artificial Sequence: Synthetic oligonucleotide
gcguuuaaugaagacaucu

SEQ ID NO: 3286847 - RNA, 19 nt, Artificial Sequence
  Description of Artificial Sequence: Synthetic oligonucleotide
gacaucucucagacaaugc

SEQ ID NO: 3286848 - RNA, 19 nt, Artificial Sequence
  Description of Artificial Sequence: Synthetic oligonucleotide
acaucucucagacaaugca

SEQ ID NO: 3286849 - RNA, 19 nt, Artificial Sequence
  Description of Artificial Sequence: Synthetic oligonucleotide
caucucucagacaaugcau

SEQ ID NO: 3286850 - RNA, 19 nt, Artificial Sequence
  Description of Artificial Sequence: Synthetic oligonucleotide
cugguuuggaaacgaaauc

SEQ ID NO: 3286851 - RNA, 19 nt, Artificial Sequence
  Description of Artificial Sequence: Synthetic oligonucleotide
uuuggaaacgaaaucagac

SEQ ID NO: 3286852 - RNA, 19 nt, Artificial Sequence
  Description of Artificial Sequence: Synthetic oligonucleotide
ccgcagagaguuucggaca

SEQ ID NO: 3286853 - RNA, 19 nt, Artificial Sequence
  Description of Artificial Sequence: Synthetic oligonucleotide
uggagagcucugccaaagu

SEQ ID NO: 3286854 - RNA, 19 nt, Artificial Sequence
  Description of Artificial Sequence: Synthetic oligonucleotide
ccaaaguugaagaaaucgu

SEQ ID NO: 3286855 - RNA, 19 nt, Artificial Sequence
  Description of Artificial Sequence: Synthetic oligonucleotide
caaaguugaagaaaucgua

SEQ ID NO: 3286856 - RNA, 19 nt, Artificial Sequence
  Description of Artificial Sequence: Synthetic oligonucleotide
aaaguugaagaaaucguau

SEQ ID NO: 3286857 - RNA, 19 nt, Artificial Sequence
  Description of Artificial Sequence: Synthetic oligonucleotide
gaaaucguaugcaguaaau

SEQ ID NO: 3286858 - RNA, 19 nt, Artificial Sequence
  Description of Artificial Sequence: Synthetic oligonucleotide
aaaucguaugcaguaaauu

SEQ ID NO: 3286859 - RNA, 19 nt, Artificial Sequence
  Description of Artificial Sequence: Synthetic oligonucleotide
aaucguaugcaguaaauug

SEQ ID NO: 3286860 - RNA, 19 nt, Artificial Sequence
  Description of Artificial Sequence: Synthetic oligonucleotide
aaauugcccaaauaugaag

SEQ ID NO: 3286861 - RNA, 19 nt, Artificial Sequence
  Description of Artificial Sequence: Synthetic oligonucleotide
ugaagaccaguaccgcgga

SEQ ID NO: 3286862 - RNA, 19 nt, Artificial Sequence
  Description of Artificial Sequence: Synthetic oligonucleotide
gaagaccaguaccgcggac

SEQ ID NO: 3286863 - RNA, 19 nt, Artificial Sequence
  Description of Artificial Sequence: Synthetic oligonucleotide
aguaccgcggacgggaguu

SEQ ID NO: 3286864 - RNA, 19 nt, Artificial Sequence
  Description of Artificial Sequence: Synthetic oligonucleotide
gacgggaguucccagacuu

SEQ ID NO: 3286865 - RNA, 19 nt, Artificial Sequence
  Description of Artificial Sequence: Synthetic oligonucleotide
acgggaguucccagacuuu

SEQ ID NO: 3286866 - RNA, 19 nt, Artificial Sequence
  Description of Artificial Sequence: Synthetic oligonucleotide
gaguucccagacuuuauca

SEQ ID NO: 3286867 - RNA, 19 nt, Artificial Sequence
  Description of Artificial Sequence: Synthetic oligonucleotide
ggacauuugaggacauuau

SEQ ID NO: 3286868 - RNA, 19 nt, Artificial Sequence
  Description of Artificial Sequence: Synthetic oligonucleotide
aaaagagcaaauuacgaag

SEQ ID NO: 3286869 - RNA, 19 nt, Artificial Sequence
  Description of Artificial Sequence: Synthetic oligonucleotide
aaauuacgaagcuggagga

SEQ ID NO: 3286870 - RNA, 19 nt, Artificial Sequence
  Description of Artificial Sequence: Synthetic oligonucleotide
acaaagugaucuauauggu

SEQ ID NO: 3286871 - RNA, 19 nt, Artificial Sequence
  Description of Artificial Sequence: Synthetic oligonucleotide
caaagugaucuauaugguu

SEQ ID NO: 3286872 - RNA, 19 nt, Artificial Sequence
  Description of Artificial Sequence: Synthetic oligonucleotide
gugaucuauaugguugaag

SEQ ID NO: 3286873 - RNA, 19 nt, Artificial Sequence
  Description of Artificial Sequence: Synthetic oligonucleotide
gcagcuggcuaacaagcgu

SEQ ID NO: 3286874 - RNA, 19 nt, Artificial Sequence
  Description of Artificial Sequence: Synthetic oligonucleotide
cagcuggcuaacaagcguu

SEQ ID NO: 3286875 - RNA, 19 nt, Artificial Sequence
  Description of Artificial Sequence: Synthetic oligonucleotide
uugcuaauuuucagaacuu

SEQ ID NO: 3286876 - RNA, 19 nt, Artificial Sequence
  Description of Artificial Sequence: Synthetic oligonucleotide
ugcuaauuuucagaacuua

SEQ ID NO: 3286877 - RNA, 19 nt, Artificial Sequence
  Description of Artificial Sequence: Synthetic oligonucleotide
gcuaauuuucagaacuuaa

SEQ ID NO: 3286878 - RNA, 19 nt, Artificial Sequence
  Description of Artificial Sequence: Synthetic oligonucleotide
acuuaaacaacgcugcuca

SEQ ID NO: 3286879 - RNA, 19 nt, Artificial Sequence
  Description of Artificial Sequence: Synthetic oligonucleotide
acgcugcucaggccagaau

SEQ ID NO: 3286880 - RNA, 19 nt, Artificial Sequence
  Description of Artificial Sequence: Synthetic oligonucleotide
cgcugcucaggccagaauu

SEQ ID NO: 3286881 - RNA, 19 nt, Artificial Sequence
  Description of Artificial Sequence: Synthetic oligonucleotide
ucaggccagaauugguugc

SEQ ID NO: 3286882 - RNA, 19 nt, Artificial Sequence
  Description of Artificial Sequence: Synthetic oligonucleotide
caggccagaauugguugca

SEQ ID NO: 3286883 - RNA, 19 nt, Artificial Sequence
  Description of Artificial Sequence: Synthetic oligonucleotide
aggccagaauugguugcau

SEQ ID NO: 3286884 - RNA, 19 nt, Artificial Sequence
  Description of Artificial Sequence: Synthetic oligonucleotide
gacaagcaacgacugcgaa

SEQ ID NO: 3286885 - RNA, 19 nt, Artificial Sequence
  Description of Artificial Sequence: Synthetic oligonucleotide
acaagcaacgacugcgaaa

SEQ ID NO: 3286886 - RNA, 19 nt, Artificial Sequence
  Description of Artificial Sequence: Synthetic oligonucleotide
caagcaacgacugcgaaaa

SEQ ID NO: 3286887 - RNA, 19 nt, Artificial Sequence
  Description of Artificial Sequence: Synthetic oligonucleotide
aaaauugcauccugacuca

SEQ ID NO: 3286888 - RNA, 19 nt, Artificial Sequence
  Description of Artificial Sequence: Synthetic oligonucleotide
aaauugcauccugacucaa

SEQ ID NO: 3286889 - RNA, 19 nt, Artificial Sequence
  Description of Artificial Sequence: Synthetic oligonucleotide
aauugcauccugacucaau

SEQ ID NO: 3286890 - RNA, 19 nt, Artificial Sequence
  Description of Artificial Sequence: Synthetic oligonucleotide
auccugacucaauuuaaaa

SEQ ID NO: 3286891 - RNA, 19 nt, Artificial Sequence
  Description of Artificial Sequence: Synthetic oligonucleotide
uccugacucaauuuaaaau

SEQ ID NO: 3286892 - RNA, 19 nt, Artificial Sequence
  Description of Artificial Sequence: Synthetic oligonucleotide
ucaauuuaaaauggagaga

SEQ ID NO: 3286893 - RNA, 19 nt, Artificial Sequence
  Description of Artificial Sequence: Synthetic oligonucleotide
caauuuaaaauggagagaa

SEQ ID NO: 3286894 - RNA, 19 nt, Artificial Sequence
  Description of Artificial Sequence: Synthetic oligonucleotide
gagaauuauauacugccag

SEQ ID NO: 3286895 - RNA, 19 nt, Artificial Sequence
  Description of Artificial Sequence: Synthetic oligonucleotide
agaauuauauacugccagg

SEQ ID NO: 3286896 - RNA, 19 nt, Artificial Sequence
  Description of Artificial Sequence: Synthetic oligonucleotide
uauauacugccaggauaac

SEQ ID NO: 3286897 - RNA, 19 nt, Artificial Sequence
  Description of Artificial Sequence: Synthetic oligonucleotide
gccaggauaacaucuacgc

SEQ ID NO: 3286898 - RNA, 19 nt, Artificial Sequence
  Description of Artificial Sequence: Synthetic oligonucleotide
ccaggauaacaucuacgca

SEQ ID NO: 3286899 - RNA, 19 nt, Artificial Sequence
  Description of Artificial Sequence: Synthetic oligonucleotide
acaucuacgcagaugauuu

SEQ ID NO: 3286900 - RNA, 19 nt, Artificial Sequence
  Description of Artificial Sequence: Synthetic oligonucleotide
auuuaaaagcugccagggc

SEQ ID NO: 3286901 - RNA, 19 nt, Artificial Sequence
  Description of Artificial Sequence: Synthetic oligonucleotide
uuuaaaagcugccagggca

SEQ ID NO: 3286902 - RNA, 19 nt, Artificial Sequence
  Description of Artificial Sequence: Synthetic oligonucleotide
aggcaucagcaaagauaca

SEQ ID NO: 3286903 - RNA, 19 nt, Artificial Sequence
  Description of Artificial Sequence: Synthetic oligonucleotide
ggcaucagcaaagauacaa

SEQ ID NO: 3286904 - RNA, 19 nt, Artificial Sequence
  Description of Artificial Sequence: Synthetic oligonucleotide
agaccuugcuuuuggaugu

SEQ ID NO: 3286905 - RNA, 19 nt, Artificial Sequence
  Description of Artificial Sequence: Synthetic oligonucleotide
augugcuucacgucaaugu

SEQ ID NO: 3286906 - RNA, 19 nt, Artificial Sequence
  Description of Artificial Sequence: Synthetic oligonucleotide
uucacgucaaugucccagc

SEQ ID NO: 3286907 - RNA, 19 nt, Artificial Sequence
  Description of Artificial Sequence: Synthetic oligonucleotide
ugucccagcuuugcccugg

SEQ ID NO: 3286908 - RNA, 19 nt, Artificial Sequence
  Description of Artificial Sequence: Synthetic oligonucleotide
ggaaaugguuucucacgua

SEQ ID NO: 3286909 - RNA, 19 nt, Artificial Sequence
  Description of Artificial Sequence: Synthetic oligonucleotide
gaaaugguuucucacguaa

SEQ ID NO: 3286910 - RNA, 19 nt, Artificial Sequence
  Description of Artificial Sequence: Synthetic oligonucleotide
aaaugguuucucacguaaa

SEQ ID NO: 3286911 - RNA, 19 nt, Artificial Sequence
  Description of Artificial Sequence: Synthetic oligonucleotide
ugguuucucacguaaaggc

SEQ ID NO: 3286912 - RNA, 19 nt, Artificial Sequence
  Description of Artificial Sequence: Synthetic oligonucleotide
gguuucucacguaaaggcc

SEQ ID NO: 3286913 - RNA, 19 nt, Artificial Sequence
  Description of Artificial Sequence: Synthetic oligonucleotide
guuucucacguaaaggccu

SEQ ID NO: 3286914 - RNA, 19 nt, Artificial Sequence
  Description of Artificial Sequence: Synthetic oligonucleotide
ucucacguaaaggccuauu

SEQ ID NO: 3286915 - RNA, 19 nt, Artificial Sequence
  Description of Artificial Sequence: Synthetic oligonucleotide
acuggagcaaguaaacgcc

SEQ ID NO: 3286916 - RNA, 19 nt, Artificial Sequence
  Description of Artificial Sequence: Synthetic oligonucleotide
gagcaaguaaacgccugag

SEQ ID NO: 3286917 - RNA, 19 nt, Artificial Sequence
  Description of Artificial Sequence: Synthetic oligonucleotide
agcaaguaaacgccugagc

SEQ ID NO: 3286918 - RNA, 19 nt, Artificial Sequence
  Description of Artificial Sequence: Synthetic oligonucleotide
acgccugagcaaucagauu

SEQ ID NO: 3286919 - RNA, 19 nt, Artificial Sequence
  Description of Artificial Sequence: Synthetic oligonucleotide
cucugaucauccucucuac

SEQ ID NO: 3286920 - RNA, 19 nt, Artificial Sequence
  Description of Artificial Sequence: Synthetic oligonucleotide
gaaauuauuugcagaccuc

SEQ ID NO: 3286921 - RNA, 19 nt, Artificial Sequence
  Description of Artificial Sequence: Synthetic oligonucleotide
uuauuugcagaccucaaug

SEQ ID NO: 3286922 - RNA, 19 nt, Artificial Sequence
  Description of Artificial Sequence: Synthetic oligonucleotide
ucaauguugcaucucuugc

SEQ ID NO: 3286923 - RNA, 19 nt, Artificial Sequence
  Description of Artificial Sequence: Synthetic oligonucleotide
caauguugcaucucuugca

SEQ ID NO: 3286924 - RNA, 19 nt, Artificial Sequence
  Description of Artificial Sequence: Synthetic oligonucleotide
gaaauaaacuauuuacucc

SEQ ID NO: 3286925 - RNA, 19 nt, Artificial Sequence
  Description of Artificial Sequence: Synthetic oligonucleotide
uaaccagcagaaguuacug

SEQ ID NO: 3286926 - RNA, 19 nt, Artificial Sequence
  Description of Artificial Sequence: Synthetic oligonucleotide
agaaguuacugaccagcag

SEQ ID NO: 3286927 - RNA, 19 nt, Artificial Sequence
  Description of Artificial Sequence: Synthetic oligonucleotide
aaguuacugaccagcagaa

SEQ ID NO: 3286928 - RNA, 19 nt, Artificial Sequence
  Description of Artificial Sequence: Synthetic oligonucleotide
aguuacugaccagcagaau

SEQ ID NO: 3286929 - RNA, 19 nt, Artificial Sequence
  Description of Artificial Sequence: Synthetic oligonucleotide
guuacugaccagcagaauu

SEQ ID NO: 3286930 - RNA, 19 nt, Artificial Sequence
  Description of Artificial Sequence: Synthetic oligonucleotide
ccagcagaauuagucaccu

SEQ ID NO: 3286931 - RNA, 19 nt, Artificial Sequence
  Description of Artificial Sequence: Synthetic oligonucleotide
cagcagaauuagucaccuc

SEQ ID NO: 3286932 - RNA, 19 nt, Artificial Sequence
  Description of Artificial Sequence: Synthetic oligonucleotide
agcagaauuagucaccuca

SEQ ID NO: 3286933 - RNA, 19 nt, Artificial Sequence
  Description of Artificial Sequence: Synthetic oligonucleotide
agaauuagucaccucaaca

SEQ ID NO: 3286934 - RNA, 19 nt, Artificial Sequence
  Description of Artificial Sequence: Synthetic oligonucleotide
ucaccucaacaaagccuac

SEQ ID NO: 3286935 - RNA, 19 nt, Artificial Sequence
  Description of Artificial Sequence: Synthetic oligonucleotide
aaagccuaccaauaccugg

SEQ ID NO: 3286936 - RNA, 19 nt, Artificial Sequence
  Description of Artificial Sequence: Synthetic oligonucleotide
aagccuaccaauaccuggu

SEQ ID NO: 3286937 - RNA, 19 nt, Artificial Sequence
  Description of Artificial Sequence: Synthetic oligonucleotide
aauaccugguagacuuuaa

SEQ ID NO: 3286938 - RNA, 19 nt, Artificial Sequence
  Description of Artificial Sequence: Synthetic oligonucleotide
ccugguagacuuuaagucu

SEQ ID NO: 3286939 - RNA, 19 nt, Artificial Sequence
  Description of Artificial Sequence: Synthetic oligonucleotide
cugguagacuuuaagucuc

SEQ ID NO: 3286940 - RNA, 19 nt, Artificial Sequence
  Description of Artificial Sequence: Synthetic oligonucleotide
ugguagacuuuaagucucu

SEQ ID NO: 3286941 - RNA, 19 nt, Artificial Sequence
  Description of Artificial Sequence: Synthetic oligonucleotide
agacuuuaagucucuguag

SEQ ID NO: 3286942 - RNA, 19 nt, Artificial Sequence
  Description of Artificial Sequence: Synthetic oligonucleotide
uaagucucuguagauuucu

SEQ ID NO: 3286943 - RNA, 19 nt, Artificial Sequence
  Description of Artificial Sequence: Synthetic oligonucleotide
cuucaucuuucagaaguau

SEQ ID NO: 3286944 - RNA, 19 nt, Artificial Sequence
  Description of Artificial Sequence: Synthetic oligonucleotide
uuucugcuuuugcuuucua

SEQ ID NO: 3286945 - RNA, 19 nt, Artificial Sequence
  Description of Artificial Sequence: Synthetic oligonucleotide
uucugcuuuugcuuucuag

SEQ ID NO: 3286946 - RNA, 19 nt, Artificial Sequence
  Description of Artificial Sequence: Synthetic oligonucleotide
ucugcuuuugcuuucuagc

SEQ ID NO: 3286947 - RNA, 19 nt, Artificial Sequence
  Description of Artificial Sequence: Synthetic oligonucleotide
cugcuuuugcuuucuagca

SEQ ID NO: 3286948 - RNA, 19 nt, Artificial Sequence
  Description of Artificial Sequence: Synthetic oligonucleotide
cauuaaugaggaacuuugc

SEQ ID NO: 3286949 - RNA, 19 nt, Artificial Sequence
  Description of Artificial Sequence: Synthetic oligonucleotide
gaggaacuuugcaaaaucc

SEQ ID NO: 3286950 - RNA, 19 nt, Artificial Sequence
  Description of Artificial Sequence: Synthetic oligonucleotide
aggaacuuugcaaaauccu

SEQ ID NO: 3286951 - RNA, 19 nt, Artificial Sequence
  Description of Artificial Sequence: Synthetic oligonucleotide
uugcaaaauccuccauuag

SEQ ID NO: 3286952 - RNA, 19 nt, Artificial Sequence
  Description of Artificial Sequence: Synthetic oligonucleotide
aaccuuuaauaccaguuuc

SEQ ID NO: 3286953 - RNA, 19 nt, Artificial Sequence
  Description of Artificial Sequence: Synthetic oligonucleotide
accuuuaauaccaguuucu

SEQ ID NO: 3286954 - RNA, 19 nt, Artificial Sequence
  Description of Artificial Sequence: Synthetic oligonucleotide
uucuaaugauuuaguggcc

SEQ ID NO: 3286955 - RNA, 19 nt, Artificial Sequence
  Description of Artificial Sequence: Synthetic oligonucleotide
ucuaaugauuuaguggccu

SEQ ID NO: 3286956 - RNA, 19 nt, Artificial Sequence
  Description of Artificial Sequence: Synthetic oligonucleotide
cuaaugauuuaguggccua

SEQ ID NO: 3286957 - RNA, 19 nt, Artificial Sequence
  Description of Artificial Sequence: Synthetic oligonucleotide
augauuuaguggccuaguu

SEQ ID NO: 3286958 - RNA, 19 nt, Artificial Sequence
  Description of Artificial Sequence: Synthetic oligonucleotide
ugauuuaguggccuaguug

SEQ ID NO: 3286959 - RNA, 19 nt, Artificial Sequence
  Description of Artificial Sequence: Synthetic oligonucleotide
gauuuaguggccuaguugu

SEQ ID NO: 3286960 - RNA, 19 nt, Artificial Sequence
  Description of Artificial Sequence: Synthetic oligonucleotide
auuuaguggccuaguuguc

SEQ ID NO: 3286961 - RNA, 19 nt, Artificial Sequence
  Description of Artificial Sequence: Synthetic oligonucleotide
uuuaguggccuaguugucu

SEQ ID NO: 3286962 - RNA, 19 nt, Artificial Sequence
  Description of Artificial Sequence: Synthetic oligonucleotide
uuaguggccuaguugucuu

SEQ ID NO: 3286963 - RNA, 19 nt, Artificial Sequence
  Description of Artificial Sequence: Synthetic oligonucleotide
ggccuaguugucuuauuuu

SEQ ID NO: 3286964 - RNA, 19 nt, Artificial Sequence
  Description of Artificial Sequence: Synthetic oligonucleotide
auuuuccauagucugauau

SEQ ID NO: 3286965 - RNA, 19 nt, Artificial Sequence
  Description of Artificial Sequence: Synthetic oligonucleotide
uuuuccauagucugauaug

SEQ ID NO: 3286966 - RNA, 19 nt, Artificial Sequence
  Description of Artificial Sequence: Synthetic oligonucleotide
cugauaugccuacccuugu

SEQ ID NO: 3286967 - RNA, 19 nt, Artificial Sequence
  Description of Artificial Sequence: Synthetic oligonucleotide
ugauaugccuacccuuguc

SEQ ID NO: 3286968 - RNA, 19 nt, Artificial Sequence
  Description of Artificial Sequence: Synthetic oligonucleotide
gauaugccuacccuuguca

SEQ ID NO: 3286969 - RNA, 19 nt, Artificial Sequence
  Description of Artificial Sequence: Synthetic oligonucleotide
ugucaaagcugcacuuaua

SEQ ID NO: 3286970 - RNA, 19 nt, Artificial Sequence
  Description of Artificial Sequence: Synthetic oligonucleotide
gucaaagcugcacuuauac

SEQ ID NO: 3286971 - RNA, 19 nt, Artificial Sequence
  Description of Artificial Sequence: Synthetic oligonucleotide
cgcaguagcugugauguua

SEQ ID NO: 3286972 - RNA, 19 nt, Artificial Sequence
  Description of Artificial Sequence: Synthetic oligonucleotide
agcugugauguuaucccac

SEQ ID NO: 3286973 - RNA, 19 nt, Artificial Sequence
  Description of Artificial Sequence: Synthetic oligonucleotide
cugugauguuaucccacuu

SEQ ID NO: 3286974 - RNA, 19 nt, Artificial Sequence
  Description of Artificial Sequence: Synthetic oligonucleotide
ucccacuuucaaacauuca

SEQ ID NO: 3286975 - RNA, 19 nt, Artificial Sequence
  Description of Artificial Sequence: Synthetic oligonucleotide
cccacuuucaaacauucau

SEQ ID NO: 3286976 - RNA, 19 nt, Artificial Sequence
  Description of Artificial Sequence: Synthetic oligonucleotide
caauuaacuacauucagcc

SEQ ID NO: 3286977 - RNA, 19 nt, Artificial Sequence
  Description of Artificial Sequence: Synthetic oligonucleotide
gcaaggagaaacaauuaac

SEQ ID NO: 3286978 - RNA, 19 nt, Artificial Sequence
  Description of Artificial Sequence: Synthetic oligonucleotide
cugccagagucacacagca

SEQ ID NO: 3286979 - RNA, 19 nt, Artificial Sequence
  Description of Artificial Sequence: Synthetic oligonucleotide
ucugccagagucacacagc

SEQ ID NO: 3286980 - RNA, 19 nt, Artificial Sequence
  Description of Artificial Sequence: Synthetic oligonucleotide
accacucuugacagccucu

SEQ ID NO: 3286981 - RNA, 19 nt, Artificial Sequence
  Description of Artificial Sequence: Synthetic oligonucleotide
accgaccacucuugacagc

SEQ ID NO: 3286982 - RNA, 19 nt, Artificial Sequence
  Description of Artificial Sequence: Synthetic oligonucleotide
caccgaccacucuugacag

SEQ ID NO: 3286983 - RNA, 19 nt, Artificial Sequence
  Description of Artificial Sequence: Synthetic oligonucleotide
uaucgacaccgaccacucu

SEQ ID NO: 3286984 - RNA, 19 nt, Artificial Sequence
  Description of Artificial Sequence: Synthetic oligonucleotide
uuauuaucgacaccgacca

SEQ ID NO: 3286985 - RNA, 19 nt, Artificial Sequence
  Description of Artificial Sequence: Synthetic oligonucleotide
caccgagcagugauuauua

SEQ ID NO: 3286986 - RNA, 19 nt, Artificial Sequence
  Description of Artificial Sequence: Synthetic oligonucleotide
gcaccgagcagugauuauu

SEQ ID NO: 3286987 - RNA, 19 nt, Artificial Sequence
  Description of Artificial Sequence: Synthetic oligonucleotide
ugcaccgagcagugauuau

SEQ ID NO: 3286988 - RNA, 19 nt, Artificial Sequence
  Description of Artificial Sequence: Synthetic oligonucleotide
cugcaccgagcagugauua

SEQ ID NO: 3286989 - RNA, 19 nt, Artificial Sequence
  Description of Artificial Sequence: Synthetic oligonucleotide
ggcuuguccgcagguacug

SEQ ID NO: 3286990 - RNA, 19 nt, Artificial Sequence
  Description of Artificial Sequence: Synthetic oligonucleotide
cuauggcuuguccgcaggu

SEQ ID NO: 3286991 - RNA, 19 nt, Artificial Sequence
  Description of Artificial Sequence: Synthetic oligonucleotide
uggauuguucauguucugc

SEQ ID NO: 3286992 - RNA, 19 nt, Artificial Sequence
  Description of Artificial Sequence: Synthetic oligonucleotide
gaccauggauuguucaugu

SEQ ID NO: 3286993 - RNA, 19 nt, Artificial Sequence
  Description of Artificial Sequence: Synthetic oligonucleotide
ggaccauggauuguucaug

SEQ ID NO: 3286994 - RNA, 19 nt, Artificial Sequence
  Description of Artificial Sequence: Synthetic oligonucleotide
uggaccauggauuguucau

SEQ ID NO: 3286995 - RNA, 19 nt, Artificial Sequence
  Description of Artificial Sequence: Synthetic oligonucleotide
aaagcugagcugaaguugg

SEQ ID NO: 3286996 - RNA, 19 nt, Artificial Sequence
  Description of Artificial Sequence: Synthetic oligonucleotide
acauccaaaagcugagcug

SEQ ID NO: 3286997 - RNA, 19 nt, Artificial Sequence
  Description of Artificial Sequence: Synthetic oligonucleotide
ugggacauccaaaagcuga

SEQ ID NO: 3286998 - RNA, 19 nt, Artificial Sequence
  Description of Artificial Sequence: Synthetic oligonucleotide
augggacauccaaaagcug

SEQ ID NO: 3286999 - RNA, 19 nt, Artificial Sequence
  Description of Artificial Sequence: Synthetic oligonucleotide
aaugggacauccaaaagcu

SEQ ID NO: 3287000 - RNA, 19 nt, Artificial Sequence
  Description of Artificial Sequence: Synthetic oligonucleotide
gaaugggacauccaaaagc

SEQ ID NO: 3287001 - RNA, 19 nt, Artificial Sequence
  Description of Artificial Sequence: Synthetic oligonucleotide
ugaaugggacauccaaaag

SEQ ID NO: 3287002 - RNA, 19 nt, Artificial Sequence
  Description of Artificial Sequence: Synthetic oligonucleotide
acuauucugcuuugggauc

SEQ ID NO: 3287003 - RNA, 19 nt, Artificial Sequence
  Description of Artificial Sequence: Synthetic oligonucleotide
uuacuauucugcuuuggga

SEQ ID NO: 3287004 - RNA, 19 nt, Artificial Sequence
  Description of Artificial Sequence: Synthetic oligonucleotide
aggugguacauuacuauuc

SEQ ID NO: 3287005 - RNA, 19 nt, Artificial Sequence
  Description of Artificial Sequence: Synthetic oligonucleotide
gguaaggaaggugguacau

SEQ ID NO: 3287006 - RNA, 19 nt, Artificial Sequence
  Description of Artificial Sequence: Synthetic oligonucleotide
cugguaaggaaggugguac

SEQ ID NO: 3287007 - RNA, 19 nt, Artificial Sequence
  Description of Artificial Sequence: Synthetic oligonucleotide
uccuacagguacugguaag

SEQ ID NO: 3287008 - RNA, 19 nt, Artificial Sequence
  Description of Artificial Sequence: Synthetic oligonucleotide
aucgcagaggcaccccaaa

SEQ ID NO: 3287009 - RNA, 19 nt, Artificial Sequence
  Description of Artificial Sequence: Synthetic oligonucleotide
gaucgcagaggcaccccaa

SEQ ID NO: 3287010 - RNA, 19 nt, Artificial Sequence
  Description of Artificial Sequence: Synthetic oligonucleotide
ugaucgcagaggcacccca

SEQ ID NO: 3287011 - RNA, 19 nt, Artificial Sequence
  Description of Artificial Sequence: Synthetic oligonucleotide
cagccugaucgcagaggca

SEQ ID NO: 3287012 - RNA, 19 nt, Artificial Sequence
  Description of Artificial Sequence: Synthetic oligonucleotide
ugcagccugaucgcagagg

SEQ ID NO: 3287013 - RNA, 19 nt, Artificial Sequence
  Description of Artificial Sequence: Synthetic oligonucleotide
cugauugcugcagccugau

SEQ ID NO: 3287014 - RNA, 19 nt, Artificial Sequence
  Description of Artificial Sequence: Synthetic oligonucleotide
agucaguucuggugcacag

SEQ ID NO: 3287015 - RNA, 19 nt, Artificial Sequence
  Description of Artificial Sequence: Synthetic oligonucleotide
cagucaguucuggugcaca

SEQ ID NO: 3287016 - RNA, 19 nt, Artificial Sequence
  Description of Artificial Sequence: Synthetic oligonucleotide
caggcuuucugucagucag

SEQ ID NO: 3287017 - RNA, 19 nt, Artificial Sequence
  Description of Artificial Sequence: Synthetic oligonucleotide
ucaggcuuucugucaguca

SEQ ID NO: 3287018 - RNA, 19 nt, Artificial Sequence
  Description of Artificial Sequence: Synthetic oligonucleotide
ucucugucauucagccucu

SEQ ID NO: 3287019 - RNA, 19 nt, Artificial Sequence
  Description of Artificial Sequence: Synthetic oligonucleotide
ugcaagguuggaucuuucu

SEQ ID NO: 3287020 - RNA, 19 nt, Artificial Sequence
  Description of Artificial Sequence: Synthetic oligonucleotide
caaugcaagguuggaucuu

SEQ ID NO: 3287021 - RNA, 19 nt, Artificial Sequence
  Description of Artificial Sequence: Synthetic oligonucleotide
gucaacaagaucaaugcaa

SEQ ID NO: 3287022 - RNA, 19 nt, Artificial Sequence
  Description of Artificial Sequence: Synthetic oligonucleotide
aggcugucaacaagaucaa

SEQ ID NO: 3287023 - RNA, 19 nt, Artificial Sequence
  Description of Artificial Sequence: Synthetic oligonucleotide
aucaagcuuucucaggcug

SEQ ID NO: 3287024 - RNA, 19 nt, Artificial Sequence
  Description of Artificial Sequence: Synthetic oligonucleotide
gucguuuccuauaucaagc

SEQ ID NO: 3287025 - RNA, 19 nt, Artificial Sequence
  Description of Artificial Sequence: Synthetic oligonucleotide
ggucguuuccuauaucaag

SEQ ID NO: 3287026 - RNA, 19 nt, Artificial Sequence
  Description of Artificial Sequence: Synthetic oligonucleotide
gcaauugcaggcaacauca

SEQ ID NO: 3287027 - RNA, 19 nt, Artificial Sequence
  Description of Artificial Sequence: Synthetic oligonucleotide
acugcaauugcaggcaaca

SEQ ID NO: 3287028 - RNA, 19 nt, Artificial Sequence
  Description of Artificial Sequence: Synthetic oligonucleotide
agcgaguaaugacaccuuu

SEQ ID NO: 3287029 - RNA, 19 nt, Artificial Sequence
  Description of Artificial Sequence: Synthetic oligonucleotide
cagcgaguaaugacaccuu

SEQ ID NO: 3287030 - RNA, 19 nt, Artificial Sequence
  Description of Artificial Sequence: Synthetic oligonucleotide
ggacagcgaguaaugacac

SEQ ID NO: 3287031 - RNA, 19 nt, Artificial Sequence
  Description of Artificial Sequence: Synthetic oligonucleotide
uuccugcggagcugucauu

SEQ ID NO: 3287032 - RNA, 19 nt, Artificial Sequence
  Description of Artificial Sequence: Synthetic oligonucleotide
auuccugcggagcugucau

SEQ ID NO: 3287033 - RNA, 19 nt, Artificial Sequence
  Description of Artificial Sequence: Synthetic oligonucleotide
accccuuuccauuccugcg

SEQ ID NO: 3287034 - RNA, 19 nt, Artificial Sequence
  Description of Artificial Sequence: Synthetic oligonucleotide
gcgguaauaaauuaccccu

SEQ ID NO: 3287035 - RNA, 19 nt, Artificial Sequence
  Description of Artificial Sequence: Synthetic oligonucleotide
ugcgguaauaaauuacccc

SEQ ID NO: 3287036 - RNA, 19 nt, Artificial Sequence
  Description of Artificial Sequence: Synthetic oligonucleotide
uugcgguaauaaauuaccc

SEQ ID NO: 3287037 - RNA, 19 nt, Artificial Sequence
  Description of Artificial Sequence: Synthetic oligonucleotide
uguugcgguaauaaauuac

SEQ ID NO: 3287038 - RNA, 19 nt, Artificial Sequence
  Description of Artificial Sequence: Synthetic oligonucleotide
cuguguugcgguaauaaau

SEQ ID NO: 3287039 - RNA, 19 nt, Artificial Sequence
  Description of Artificial Sequence: Synthetic oligonucleotide
auuucuguguugcgguaau

SEQ ID NO: 3287040 - RNA, 19 nt, Artificial Sequence
  Description of Artificial Sequence: Synthetic oligonucleotide
uggagcuguauuucugugu

SEQ ID NO: 3287041 - RNA, 19 nt, Artificial Sequence
  Description of Artificial Sequence: Synthetic oligonucleotide
ucuugggcuuuucuuauug

SEQ ID NO: 3287042 - RNA, 19 nt, Artificial Sequence
  Description of Artificial Sequence: Synthetic oligonucleotide
gccacuauaucuugggcuu

SEQ ID NO: 3287043 - RNA, 19 nt, Artificial Sequence
  Description of Artificial Sequence: Synthetic oligonucleotide
gugccagccacuauaucuu

SEQ ID NO: 3287044 - RNA, 19 nt, Artificial Sequence
  Description of Artificial Sequence: Synthetic oligonucleotide
cuaccauuagugccagcca

SEQ ID NO: 3287045 - RNA, 19 nt, Artificial Sequence
  Description of Artificial Sequence: Synthetic oligonucleotide
gcuaccauuagugccagcc

SEQ ID NO: 3287046 - RNA, 19 nt, Artificial Sequence
  Description of Artificial Sequence: Synthetic oligonucleotide
uaaugcuaccauuagugcc

SEQ ID NO: 3287047 - RNA, 19 nt, Artificial Sequence
  Description of Artificial Sequence: Synthetic oligonucleotide
gggaaauuaguucuccacu

SEQ ID NO: 3287048 - RNA, 19 nt, Artificial Sequence
  Description of Artificial Sequence: Synthetic oligonucleotide
caagggaaauuaguucucc

SEQ ID NO: 3287049 - RNA, 19 nt, Artificial Sequence
  Description of Artificial Sequence: Synthetic oligonucleotide
ucaagggaaauuaguucuc

SEQ ID NO: 3287050 - RNA, 19 nt, Artificial Sequence
  Description of Artificial Sequence: Synthetic oligonucleotide
gaccagauuucaagggaaa

SEQ ID NO: 3287051 - RNA, 19 nt, Artificial Sequence
  Description of Artificial Sequence: Synthetic oligonucleotide
agaccagauuucaagggaa

SEQ ID NO: 3287052 - RNA, 19 nt, Artificial Sequence
  Description of Artificial Sequence: Synthetic oligonucleotide
ggagaccagauuucaaggg

SEQ ID NO: 3287053 - RNA, 19 nt, Artificial Sequence
  Description of Artificial Sequence: Synthetic oligonucleotide
aggagaccagauuucaagg

SEQ ID NO: 3287054 - RNA, 19 nt, Artificial Sequence
  Description of Artificial Sequence: Synthetic oligonucleotide
cgucaggagaccagauuuc

SEQ ID NO: 3287055 - RNA, 19 nt, Artificial Sequence
  Description of Artificial Sequence: Synthetic oligonucleotide
ugggacgucaggagaccag

SEQ ID NO: 3287056 - RNA, 19 nt, Artificial Sequence
  Description of Artificial Sequence: Synthetic oligonucleotide
aagaucaauuagugucagg

SEQ ID NO: 3287057 - RNA, 19 nt, Artificial Sequence
  Description of Artificial Sequence: Synthetic oligonucleotide
gaagaucaauuagugucag

SEQ ID NO: 3287058 - RNA, 19 nt, Artificial Sequence
  Description of Artificial Sequence: Synthetic oligonucleotide
ggaagaucaauuaguguca

SEQ ID NO: 3287059 - RNA, 19 nt, Artificial Sequence
  Description of Artificial Sequence: Synthetic oligonucleotide
gccucucuggcaauuccag

SEQ ID NO: 3287060 - RNA, 19 nt, Artificial Sequence
  Description of Artificial Sequence: Synthetic oligonucleotide
cggccucucuggcaauucc

SEQ ID NO: 3287061 - RNA, 19 nt, Artificial Sequence
  Description of Artificial Sequence: Synthetic oligonucleotide
acggccucucuggcaauuc

SEQ ID NO: 3287062 - RNA, 19 nt, Artificial Sequence
  Description of Artificial Sequence: Synthetic oligonucleotide
cacggccucucuggcaauu

SEQ ID NO: 3287063 - RNA, 19 nt, Artificial Sequence
  Description of Artificial Sequence: Synthetic oligonucleotide
ccacggccucucuggcaau

SEQ ID NO: 3287064 - RNA, 19 nt, Artificial Sequence
  Description of Artificial Sequence: Synthetic oligonucleotide
cauuaucuuguggcugguu

SEQ ID NO: 3287065 - RNA, 19 nt, Artificial Sequence
  Description of Artificial Sequence: Synthetic oligonucleotide
aucuguuggccauuaucuu

SEQ ID NO: 3287066 - RNA, 19 nt, Artificial Sequence
  Description of Artificial Sequence: Synthetic oligonucleotide
uugaucuguuggccauuau

SEQ ID NO: 3287067 - RNA, 19 nt, Artificial Sequence
  Description of Artificial Sequence: Synthetic oligonucleotide
guguuuugaucuguuggcc

SEQ ID NO: 3287068 - RNA, 19 nt, Artificial Sequence
  Description of Artificial Sequence: Synthetic oligonucleotide
aguguuuugaucuguuggc

SEQ ID NO: 3287069 - RNA, 19 nt, Artificial Sequence
  Description of Artificial Sequence: Synthetic oligonucleotide
uaguguuuugaucuguugg

SEQ ID NO: 3287070 - RNA, 19 nt, Artificial Sequence
  Description of Artificial Sequence: Synthetic oligonucleotide
uaaguaguguuuugaucug

SEQ ID NO: 3287071 - RNA, 19 nt, Artificial Sequence
  Description of Artificial Sequence: Synthetic oligonucleotide
ugauugucucuuugcagcc

SEQ ID NO: 3287072 - RNA, 19 nt, Artificial Sequence
  Description of Artificial Sequence: Synthetic oligonucleotide
cuaccacaaugauugucuc

SEQ ID NO: 3287073 - RNA, 19 nt, Artificial Sequence
  Description of Artificial Sequence: Synthetic oligonucleotide
acuaccacaaugauugucu

SEQ ID NO: 3287074 - RNA, 19 nt, Artificial Sequence
  Description of Artificial Sequence: Synthetic oligonucleotide
augguaccacuaccacaau

SEQ ID NO: 3287075 - RNA, 19 nt, Artificial Sequence
  Description of Artificial Sequence: Synthetic oligonucleotide
caugguaccacuaccacaa

SEQ ID NO: 3287076 - RNA, 19 nt, Artificial Sequence
  Description of Artificial Sequence: Synthetic oligonucleotide
acaugguaccacuaccaca

SEQ ID NO: 3287077 - RNA, 19 nt, Artificial Sequence
  Description of Artificial Sequence: Synthetic oligonucleotide
cguuacaugguaccacuac

SEQ ID NO: 3287078 - RNA, 19 nt, Artificial Sequence
  Description of Artificial Sequence: Synthetic oligonucleotide
aauauccacguuacauggu

SEQ ID NO: 3287079 - RNA, 19 nt, Artificial Sequence
  Description of Artificial Sequence: Synthetic oligonucleotide
caauauccacguuacaugg

SEQ ID NO: 3287080 - RNA, 19 nt, Artificial Sequence
  Description of Artificial Sequence: Synthetic oligonucleotide
gcaauauccacguuacaug

SEQ ID NO: 3287081 - RNA, 19 nt, Artificial Sequence
  Description of Artificial Sequence: Synthetic oligonucleotide
cgccucuguuguugcaaua

SEQ ID NO: 3287082 - RNA, 19 nt, Artificial Sequence
  Description of Artificial Sequence: Synthetic oligonucleotide
gcgccucuguuguugcaau

SEQ ID NO: 3287083 - RNA, 19 nt, Artificial Sequence
  Description of Artificial Sequence: Synthetic oligonucleotide
agcgccucuguuguugcaa

SEQ ID NO: 3287084 - RNA, 19 nt, Artificial Sequence
  Description of Artificial Sequence: Synthetic oligonucleotide
gauccaccucuugagccau

SEQ ID NO: 3287085 - RNA, 19 nt, Artificial Sequence
  Description of Artificial Sequence: Synthetic oligonucleotide
uuucuccugugggauccac

SEQ ID NO: 3287086 - RNA, 19 nt, Artificial Sequence
  Description of Artificial Sequence: Synthetic oligonucleotide
cguccuuucuccuguggga

SEQ ID NO: 3287087 - RNA, 19 nt, Artificial Sequence
  Description of Artificial Sequence: Synthetic oligonucleotide
gcguccuuucuccuguggg

SEQ ID NO: 3287088 - RNA, 19 nt, Artificial Sequence
  Description of Artificial Sequence: Synthetic oligonucleotide
cccaagcguccuuucuccu

SEQ ID NO: 3287089 - RNA, 19 nt, Artificial Sequence
  Description of Artificial Sequence: Synthetic oligonucleotide
ccccaagcguccuuucucc

SEQ ID NO: 3287090 - RNA, 19 nt, Artificial Sequence
  Description of Artificial Sequence: Synthetic oligonucleotide
ggaccccaagcguccuuuc

SEQ ID NO: 3287091 - RNA, 19 nt, Artificial Sequence
  Description of Artificial Sequence: Synthetic oligonucleotide
aggaccccaagcguccuuu

SEQ ID NO: 3287092 - RNA, 19 nt, Artificial Sequence
  Description of Artificial Sequence: Synthetic oligonucleotide
agugaggaccccaagcguc

SEQ ID NO: 3287093 - RNA, 19 nt, Artificial Sequence
  Description of Artificial Sequence: Synthetic oligonucleotide
uagugaggaccccaagcgu

SEQ ID NO: 3287094 - RNA, 19 nt, Artificial Sequence
  Description of Artificial Sequence: Synthetic oligonucleotide
uuagugaggaccccaagcg

SEQ ID NO: 3287095 - RNA, 19 nt, Artificial Sequence
  Description of Artificial Sequence: Synthetic oligonucleotide
cacuaggucugguuuagug

SEQ ID NO: 3287096 - RNA, 19 nt, Artificial Sequence
  Description of Artificial Sequence: Synthetic oligonucleotide
ucacuaggucugguuuagu

SEQ ID NO: 3287097 - RNA, 19 nt, Artificial Sequence
  Description of Artificial Sequence: Synthetic oligonucleotide
uuccuucguucacuagguc

SEQ ID NO: 3287098 - RNA, 19 nt, Artificial Sequence
  Description of Artificial Sequence: Synthetic oligonucleotide
aucuuaaggacagucucuu

SEQ ID NO: 3287099 - RNA, 19 nt, Artificial Sequence
  Description of Artificial Sequence: Synthetic oligonucleotide
ucguuuuguauuaucuuaa

SEQ ID NO: 3287100 - RNA, 19 nt, Artificial Sequence
  Description of Artificial Sequence: Synthetic oligonucleotide
cucguuuuguauuaucuua

SEQ ID NO: 3287101 - RNA, 19 nt, Artificial Sequence
  Description of Artificial Sequence: Synthetic oligonucleotide
ccucguuuuguauuaucuu

SEQ ID NO: 3287102 - RNA, 19 nt, Artificial Sequence
  Description of Artificial Sequence: Synthetic oligonucleotide
augaccucguuuuguauua

SEQ ID NO: 3287103 - RNA, 19 nt, Artificial Sequence
  Description of Artificial Sequence: Synthetic oligonucleotide
agugggaugaccucguuuu

SEQ ID NO: 3287104 - RNA, 19 nt, Artificial Sequence
  Description of Artificial Sequence: Synthetic oligonucleotide
auaaccuuuucugaguggg

SEQ ID NO: 3287105 - RNA, 19 nt, Artificial Sequence
  Description of Artificial Sequence: Synthetic oligonucleotide
acaaucauauaaccuuuuc

SEQ ID NO: 3287106 - RNA, 19 nt, Artificial Sequence
  Description of Artificial Sequence: Synthetic oligonucleotide
uuucacaaucauauaaccu

SEQ ID NO: 3287107 - RNA, 19 nt, Artificial Sequence
  Description of Artificial Sequence: Synthetic oligonucleotide
uucguugcagaaguccauu

SEQ ID NO: 3287108 - RNA, 19 nt, Artificial Sequence
  Description of Artificial Sequence: Synthetic oligonucleotide
gacaauucguugcagaagu

SEQ ID NO: 3287109 - RNA, 19 nt, Artificial Sequence
  Description of Artificial Sequence: Synthetic oligonucleotide
uggauugcggaggugaagg

SEQ ID NO: 3287110 - RNA, 19 nt, Artificial Sequence
  Description of Artificial Sequence: Synthetic oligonucleotide
aagaauucucucucuugcu

SEQ ID NO: 3287111 - RNA, 19 nt, Artificial Sequence
  Description of Artificial Sequence: Synthetic oligonucleotide
uugugagucucaaagaauu

SEQ ID NO: 3287112 - RNA, 19 nt, Artificial Sequence
  Description of Artificial Sequence: Synthetic oligonucleotide
uuugugagucucaaagaau

SEQ ID NO: 3287113 - RNA, 19 nt, Artificial Sequence
  Description of Artificial Sequence: Synthetic oligonucleotide
uccagaagagugcugaaau

SEQ ID NO: 3287114 - RNA, 19 nt, Artificial Sequence
  Description of Artificial Sequence: Synthetic oligonucleotide
guagccuuauuuucaucca

SEQ ID NO: 3287115 - RNA, 19 nt, Artificial Sequence
  Description of Artificial Sequence: Synthetic oligonucleotide
cuuauuugccagauguggg

SEQ ID NO: 3287116 - RNA, 19 nt, Artificial Sequence
  Description of Artificial Sequence: Synthetic oligonucleotide
uguaagcuuauuugccaga

SEQ ID NO: 3287117 - RNA, 19 nt, Artificial Sequence
  Description of Artificial Sequence: Synthetic oligonucleotide
cuguaagcuuauuugccag

SEQ ID NO: 3287118 - RNA, 19 nt, Artificial Sequence
  Description of Artificial Sequence: Synthetic oligonucleotide
aauaauacgucccacaagu

SEQ ID NO: 3287119 - RNA, 19 nt, Artificial Sequence
  Description of Artificial Sequence: Synthetic oligonucleotide
uuuaauaauacgucccaca

SEQ ID NO: 3287120 - RNA, 19 nt, Artificial Sequence
  Description of Artificial Sequence: Synthetic oligonucleotide
uuuuaauaauacgucccac

SEQ ID NO: 3287121 - RNA, 19 nt, Artificial Sequence
  Description of Artificial Sequence: Synthetic oligonucleotide
cucuauugcaggcaaaguu

SEQ ID NO: 3287122 - RNA, 19 nt, Artificial Sequence
  Description of Artificial Sequence: Synthetic oligonucleotide
ucucuauugcaggcaaagu

SEQ ID NO: 3287123 - RNA, 19 nt, Artificial Sequence
  Description of Artificial Sequence: Synthetic oligonucleotide
gcagugcaucauguacuug

SEQ ID NO: 3287124 - RNA, 19 nt, Artificial Sequence
  Description of Artificial Sequence: Synthetic oligonucleotide
uuguugcagugcaucaugu

SEQ ID NO: 3287125 - RNA, 19 nt, Artificial Sequence
  Description of Artificial Sequence: Synthetic oligonucleotide
uuggaguuccuucuuugcu

SEQ ID NO: 3287126 - RNA, 19 nt, Artificial Sequence
  Description of Artificial Sequence: Synthetic oligonucleotide
uguguguacuuuuggaguu

SEQ ID NO: 3287127 - RNA, 19 nt, Artificial Sequence
  Description of Artificial Sequence: Synthetic oligonucleotide
uuguguguacuuuuggagu

SEQ ID NO: 3287128 - RNA, 19 nt, Artificial Sequence
  Description of Artificial Sequence: Synthetic oligonucleotide
uuuguguguacuuuuggag

SEQ ID NO: 3287129 - RNA, 19 nt, Artificial Sequence
  Description of Artificial Sequence: Synthetic oligonucleotide
gggugugugcuuugugugu

SEQ ID NO: 3287130 - RNA, 19 nt, Artificial Sequence
  Description of Artificial Sequence: Synthetic oligonucleotide
caguugggugugugcuuug

SEQ ID NO: 3287131 - RNA, 19 nt, Artificial Sequence
  Description of Artificial Sequence: Synthetic oligonucleotide
acaguugggugugugcuuu

SEQ ID NO: 3287132 - RNA, 19 nt, Artificial Sequence
  Description of Artificial Sequence: Synthetic oligonucleotide
ucgcugacaguugggugug

SEQ ID NO: 3287133 - RNA, 19 nt, Artificial Sequence
  Description of Artificial Sequence: Synthetic oligonucleotide
cgucuuaucgcugacaguu

SEQ ID NO: 3287134 - RNA, 19 nt, Artificial Sequence
  Description of Artificial Sequence: Synthetic oligonucleotide
aaaaucgucuuaucgcuga

SEQ ID NO: 3287135 - RNA, 19 nt, Artificial Sequence
  Description of Artificial Sequence: Synthetic oligonucleotide
gaaaaucgucuuaucgcug

SEQ ID NO: 3287136 - RNA, 19 nt, Artificial Sequence
  Description of Artificial Sequence: Synthetic oligonucleotide
acaaggaaaaucgucuuau

SEQ ID NO: 3287137 - RNA, 19 nt, Artificial Sequence
  Description of Artificial Sequence: Synthetic oligonucleotide
gaucaaccccacaaggaaa

SEQ ID NO: 3287138 - RNA, 19 nt, Artificial Sequence
  Description of Artificial Sequence: Synthetic oligonucleotide
ugaucaaccccacaaggaa

SEQ ID NO: 3287139 - RNA, 19 nt, Artificial Sequence
  Description of Artificial Sequence: Synthetic oligonucleotide
cuuugaucaaccccacaag

SEQ ID NO: 3287140 - RNA, 19 nt, Artificial Sequence
  Description of Artificial Sequence: Synthetic oligonucleotide
agaugucuucauuaaacgc

SEQ ID NO: 3287141 - RNA, 19 nt, Artificial Sequence
  Description of Artificial Sequence: Synthetic oligonucleotide
gcauugucugagagauguc

SEQ ID NO: 3287142 - RNA, 19 nt, Artificial Sequence
  Description of Artificial Sequence: Synthetic oligonucleotide
ugcauugucugagagaugu

SEQ ID NO: 3287143 - RNA, 19 nt, Artificial Sequence
  Description of Artificial Sequence: Synthetic oligonucleotide
augcauugucugagagaug

SEQ ID NO: 3287144 - RNA, 19 nt, Artificial Sequence
  Description of Artificial Sequence: Synthetic oligonucleotide
gauuucguuuccaaaccag

SEQ ID NO: 3287145 - RNA, 19 nt, Artificial Sequence
  Description of Artificial Sequence: Synthetic oligonucleotide
gucugauuucguuuccaaa

SEQ ID NO: 3287146 - RNA, 19 nt, Artificial Sequence
  Description of Artificial Sequence: Synthetic oligonucleotide
uguccgaaacucucugcgg

SEQ ID NO: 3287147 - RNA, 19 nt, Artificial Sequence
  Description of Artificial Sequence: Synthetic oligonucleotide
acuuuggcagagcucucca

SEQ ID NO: 3287148 - RNA, 19 nt, Artificial Sequence
  Description of Artificial Sequence: Synthetic oligonucleotide
acgauuucuucaacuuugg

SEQ ID NO: 3287149 - RNA, 19 nt, Artificial Sequence
  Description of Artificial Sequence: Synthetic oligonucleotide
uacgauuucuucaacuuug

SEQ ID NO: 3287150 - RNA, 19 nt, Artificial Sequence
  Description of Artificial Sequence: Synthetic oligonucleotide
auacgauuucuucaacuuu

SEQ ID NO: 3287151 - RNA, 19 nt, Artificial Sequence
  Description of Artificial Sequence: Synthetic oligonucleotide
auuuacugcauacgauuuc

SEQ ID NO: 3287152 - RNA, 19 nt, Artificial Sequence
  Description of Artificial Sequence: Synthetic oligonucleotide
aauuuacugcauacgauuu

SEQ ID NO: 3287153 - RNA, 19 nt, Artificial Sequence
  Description of Artificial Sequence: Synthetic oligonucleotide
caauuuacugcauacgauu

SEQ ID NO: 3287154 - RNA, 19 nt, Artificial Sequence
  Description of Artificial Sequence: Synthetic oligonucleotide
cuucauauuugggcaauuu

SEQ ID NO: 3287155 - RNA, 19 nt, Artificial Sequence
  Description of Artificial Sequence: Synthetic oligonucleotide
uccgcgguacuggucuuca

SEQ ID NO: 3287156 - RNA, 19 nt, Artificial Sequence
  Description of Artificial Sequence: Synthetic oligonucleotide
guccgcgguacuggucuuc

SEQ ID NO: 3287157 - RNA, 19 nt, Artificial Sequence
  Description of Artificial Sequence: Synthetic oligonucleotide
aacucccguccgcgguacu

SEQ ID NO: 3287158 - RNA, 19 nt, Artificial Sequence
  Description of Artificial Sequence: Synthetic oligonucleotide
aagucugggaacucccguc

SEQ ID NO: 3287159 - RNA, 19 nt, Artificial Sequence
  Description of Artificial Sequence: Synthetic oligonucleotide
aaagucugggaacucccgu

SEQ ID NO: 3287160 - RNA, 19 nt, Artificial Sequence
  Description of Artificial Sequence: Synthetic oligonucleotide
ugauaaagucugggaacuc

SEQ ID NO: 3287161 - RNA, 19 nt, Artificial Sequence
  Description of Artificial Sequence: Synthetic oligonucleotide
auaauguccucaaaugucc

SEQ ID NO: 3287162 - RNA, 19 nt, Artificial Sequence
  Description of Artificial Sequence: Synthetic oligonucleotide
cuucguaauuugcucuuuu

SEQ ID NO: 3287163 - RNA, 19 nt, Artificial Sequence
  Description of Artificial Sequence: Synthetic oligonucleotide
uccuccagcuucguaauuu

SEQ ID NO: 3287164 - RNA, 19 nt, Artificial Sequence
  Description of Artificial Sequence: Synthetic oligonucleotide
accauauagaucacuuugu

SEQ ID NO: 3287165 - RNA, 19 nt, Artificial Sequence
  Description of Artificial Sequence: Synthetic oligonucleotide
aaccauauagaucacuuug

SEQ ID NO: 3287166 - RNA, 19 nt, Artificial Sequence
  Description of Artificial Sequence: Synthetic oligonucleotide
cuucaaccauauagaucac

SEQ ID NO: 3287167 - RNA, 19 nt, Artificial Sequence
  Description of Artificial Sequence: Synthetic oligonucleotide
acgcuuguuagccagcugc

SEQ ID NO: 3287168 - RNA, 19 nt, Artificial Sequence
  Description of Artificial Sequence: Synthetic oligonucleotide
aacgcuuguuagccagcug

SEQ ID NO: 3287169 - RNA, 19 nt, Artificial Sequence
  Description of Artificial Sequence: Synthetic oligonucleotide
aaguucugaaaauuagcaa

SEQ ID NO: 3287170 - RNA, 19 nt, Artificial Sequence
  Description of Artificial Sequence: Synthetic oligonucleotide
uaaguucugaaaauuagca

SEQ ID NO: 3287171 - RNA, 19 nt, Artificial Sequence
  Description of Artificial Sequence: Synthetic oligonucleotide
uuaaguucugaaaauuagc

SEQ ID NO: 3287172 - RNA, 19 nt, Artificial Sequence
  Description of Artificial Sequence: Synthetic oligonucleotide
ugagcagcguuguuuaagu

SEQ ID NO: 3287173 - RNA, 19 nt, Artificial Sequence
  Description of Artificial Sequence: Synthetic oligonucleotide
auucuggccugagcagcgu

SEQ ID NO: 3287174 - RNA, 19 nt, Artificial Sequence
  Description of Artificial Sequence: Synthetic oligonucleotide
aauucuggccugagcagcg

SEQ ID NO: 3287175 - RNA, 19 nt, Artificial Sequence
  Description of Artificial Sequence: Synthetic oligonucleotide
gcaaccaauucuggccuga

SEQ ID NO: 3287176 - RNA, 19 nt, Artificial Sequence
  Description of Artificial Sequence: Synthetic oligonucleotide
ugcaaccaauucuggccug

SEQ ID NO: 3287177 - RNA, 19 nt, Artificial Sequence
  Description of Artificial Sequence: Synthetic oligonucleotide
augcaaccaauucuggccu

SEQ ID NO: 3287178 - RNA, 19 nt, Artificial Sequence
  Description of Artificial Sequence: Synthetic oligonucleotide
uucgcagucguugcuuguc

SEQ ID NO: 3287179 - RNA, 19 nt, Artificial Sequence
  Description of Artificial Sequence: Synthetic oligonucleotide
uuucgcagucguugcuugu

SEQ ID NO: 3287180 - RNA, 19 nt, Artificial Sequence
  Description of Artificial Sequence: Synthetic oligonucleotide
uuuucgcagucguugcuug

SEQ ID NO: 3287181 - RNA, 19 nt, Artificial Sequence
  Description of Artificial Sequence: Synthetic oligonucleotide
ugagucaggaugcaauuuu

SEQ ID NO: 3287182 - RNA, 19 nt, Artificial Sequence
  Description of Artificial Sequence: Synthetic oligonucleotide
uugagucaggaugcaauuu

SEQ ID NO: 3287183 - RNA, 19 nt, Artificial Sequence
  Description of Artificial Sequence: Synthetic oligonucleotide
auugagucaggaugcaauu

SEQ ID NO: 3287184 - RNA, 19 nt, Artificial Sequence
  Description of Artificial Sequence: Synthetic oligonucleotide
uuuuaaauugagucaggau

SEQ ID NO: 3287185 - RNA, 19 nt, Artificial Sequence
  Description of Artificial Sequence: Synthetic oligonucleotide
auuuuaaauugagucagga

SEQ ID NO: 3287186 - RNA, 19 nt, Artificial Sequence
  Description of Artificial Sequence: Synthetic oligonucleotide
ucucuccauuuuaaauuga

SEQ ID NO: 3287187 - RNA, 19 nt, Artificial Sequence
  Description of Artificial Sequence: Synthetic oligonucleotide
uucucuccauuuuaaauug

SEQ ID NO: 3287188 - RNA, 19 nt, Artificial Sequence
  Description of Artificial Sequence: Synthetic oligonucleotide
cuggcaguauauaauucuc

SEQ ID NO: 3287189 - RNA, 19 nt, Artificial Sequence
  Description of Artificial Sequence: Synthetic oligonucleotide
ccuggcaguauauaauucu

SEQ ID NO: 3287190 - RNA, 19 nt, Artificial Sequence
  Description of Artificial Sequence: Synthetic oligonucleotide
guuauccuggcaguauaua

SEQ ID NO: 3287191 - RNA, 19 nt, Artificial Sequence
  Description of Artificial Sequence: Synthetic oligonucleotide
gcguagauguuauccuggc

SEQ ID NO: 3287192 - RNA, 19 nt, Artificial Sequence
  Description of Artificial Sequence: Synthetic oligonucleotide
ugcguagauguuauccugg

SEQ ID NO: 3287193 - RNA, 19 nt, Artificial Sequence
  Description of Artificial Sequence: Synthetic oligonucleotide
aaaucaucugcguagaugu

SEQ ID NO: 3287194 - RNA, 19 nt, Artificial Sequence
  Description of Artificial Sequence: Synthetic oligonucleotide
gcccuggcagcuuuuaaau

SEQ ID NO: 3287195 - RNA, 19 nt, Artificial Sequence
  Description of Artificial Sequence: Synthetic oligonucleotide
ugcccuggcagcuuuuaaa

SEQ ID NO: 3287196 - RNA, 19 nt, Artificial Sequence
  Description of Artificial Sequence: Synthetic oligonucleotide
uguaucuuugcugaugccu

SEQ ID NO: 3287197 - RNA, 19 nt, Artificial Sequence
  Description of Artificial Sequence: Synthetic oligonucleotide
uuguaucuuugcugaugcc

SEQ ID NO: 3287198 - RNA, 19 nt, Artificial Sequence
  Description of Artificial Sequence: Synthetic oligonucleotide
acauccaaaagcaaggucu

SEQ ID NO: 3287199 - RNA, 19 nt, Artificial Sequence
  Description of Artificial Sequence: Synthetic oligonucleotide
acauugacgugaagcacau

SEQ ID NO: 3287200 - RNA, 19 nt, Artificial Sequence
  Description of Artificial Sequence: Synthetic oligonucleotide
gcugggacauugacgugaa

SEQ ID NO: 3287201 - RNA, 19 nt, Artificial Sequence
  Description of Artificial Sequence: Synthetic oligonucleotide
ccagggcaaagcugggaca

SEQ ID NO: 3287202 - RNA, 19 nt, Artificial Sequence
  Description of Artificial Sequence: Synthetic oligonucleotide
uacgugagaaaccauuucc

SEQ ID NO: 3287203 - RNA, 19 nt, Artificial Sequence
  Description of Artificial Sequence: Synthetic oligonucleotide
uuacgugagaaaccauuuc

SEQ ID NO: 3287204 - RNA, 19 nt, Artificial Sequence
  Description of Artificial Sequence: Synthetic oligonucleotide
uuuacgugagaaaccauuu

SEQ ID NO: 3287205 - RNA, 19 nt, Artificial Sequence
  Description of Artificial Sequence: Synthetic oligonucleotide
gccuuuacgugagaaacca

SEQ ID NO: 3287206 - RNA, 19 nt, Artificial Sequence
  Description of Artificial Sequence: Synthetic oligonucleotide
ggccuuuacgugagaaacc

SEQ ID NO: 3287207 - RNA, 19 nt, Artificial Sequence
  Description of Artificial Sequence: Synthetic oligonucleotide
aggccuuuacgugagaaac

SEQ ID NO: 3287208 - RNA, 19 nt, Artificial Sequence
  Description of Artificial Sequence: Synthetic oligonucleotide
aauaggccuuuacgugaga

SEQ ID NO: 3287209 - RNA, 19 nt, Artificial Sequence
  Description of Artificial Sequence: Synthetic oligonucleotide
ggcguuuacuugcuccagu

SEQ ID NO: 3287210 - RNA, 19 nt, Artificial Sequence
  Description of Artificial Sequence: Synthetic oligonucleotide
cucaggcguuuacuugcuc

SEQ ID NO: 3287211 - RNA, 19 nt, Artificial Sequence
  Description of Artificial Sequence: Synthetic oligonucleotide
gcucaggcguuuacuugcu

SEQ ID NO: 3287212 - RNA, 19 nt, Artificial Sequence
  Description of Artificial Sequence: Synthetic oligonucleotide
aaucugauugcucaggcgu

SEQ ID NO: 3287213 - RNA, 19 nt, Artificial Sequence
  Description of Artificial Sequence: Synthetic oligonucleotide
guagagaggaugaucagag

SEQ ID NO: 3287214 - RNA, 19 nt, Artificial Sequence
  Description of Artificial Sequence: Synthetic oligonucleotide
gaggucugcaaauaauuuc

SEQ ID NO: 3287215 - RNA, 19 nt, Artificial Sequence
  Description of Artificial Sequence: Synthetic oligonucleotide
cauugaggucugcaaauaa

SEQ ID NO: 3287216 - RNA, 19 nt, Artificial Sequence
  Description of Artificial Sequence: Synthetic oligonucleotide
gcaagagaugcaacauuga

SEQ ID NO: 3287217 - RNA, 19 nt, Artificial Sequence
  Description of Artificial Sequence: Synthetic oligonucleotide
ugcaagagaugcaacauug

SEQ ID NO: 3287218 - RNA, 19 nt, Artificial Sequence
  Description of Artificial Sequence: Synthetic oligonucleotide
ggaguaaauaguuuauuuc

SEQ ID NO: 3287219 - RNA, 19 nt, Artificial Sequence
  Description of Artificial Sequence: Synthetic oligonucleotide
caguaacuucugcugguua

SEQ ID NO: 3287220 - RNA, 19 nt, Artificial Sequence
  Description of Artificial Sequence: Synthetic oligonucleotide
cugcuggucaguaacuucu

SEQ ID NO: 3287221 - RNA, 19 nt, Artificial Sequence
  Description of Artificial Sequence: Synthetic oligonucleotide
uucugcuggucaguaacuu

SEQ ID NO: 3287222 - RNA, 19 nt, Artificial Sequence
  Description of Artificial Sequence: Synthetic oligonucleotide
auucugcuggucaguaacu

SEQ ID NO: 3287223 - RNA, 19 nt, Artificial Sequence
  Description of Artificial Sequence: Synthetic oligonucleotide
aauucugcuggucaguaac

SEQ ID NO: 3287224 - RNA, 19 nt, Artificial Sequence
  Description of Artificial Sequence: Synthetic oligonucleotide
aggugacuaauucugcugg

SEQ ID NO: 3287225 - RNA, 19 nt, Artificial Sequence
  Description of Artificial Sequence: Synthetic oligonucleotide
gaggugacuaauucugcug

SEQ ID NO: 3287226 - RNA, 19 nt, Artificial Sequence
  Description of Artificial Sequence: Synthetic oligonucleotide
ugaggugacuaauucugcu

SEQ ID NO: 3287227 - RNA, 19 nt, Artificial Sequence
  Description of Artificial Sequence: Synthetic oligonucleotide
uguugaggugacuaauucu

SEQ ID NO: 3287228 - RNA, 19 nt, Artificial Sequence
  Description of Artificial Sequence: Synthetic oligonucleotide
guaggcuuuguugagguga

SEQ ID NO: 3287229 - RNA, 19 nt, Artificial Sequence
  Description of Artificial Sequence: Synthetic oligonucleotide
ccagguauugguaggcuuu

SEQ ID NO: 3287230 - RNA, 19 nt, Artificial Sequence
  Description of Artificial Sequence: Synthetic oligonucleotide
accagguauugguaggcuu

SEQ ID NO: 3287231 - RNA, 19 nt, Artificial Sequence
  Description of Artificial Sequence: Synthetic oligonucleotide
uuaaagucuaccagguauu

SEQ ID NO: 3287232 - RNA, 19 nt, Artificial Sequence
  Description of Artificial Sequence: Synthetic oligonucleotide
agacuuaaagucuaccagg

SEQ ID NO: 3287233 - RNA, 19 nt, Artificial Sequence
  Description of Artificial Sequence: Synthetic oligonucleotide
gagacuuaaagucuaccag

SEQ ID NO: 3287234 - RNA, 19 nt, Artificial Sequence
  Description of Artificial Sequence: Synthetic oligonucleotide
agagacuuaaagucuacca

SEQ ID NO: 3287235 - RNA, 19 nt, Artificial Sequence
  Description of Artificial Sequence: Synthetic oligonucleotide
cuacagagacuuaaagucu

SEQ ID NO: 3287236 - RNA, 19 nt, Artificial Sequence
  Description of Artificial Sequence: Synthetic oligonucleotide
agaaaucuacagagacuua

SEQ ID NO: 3287237 - RNA, 19 nt, Artificial Sequence
  Description of Artificial Sequence: Synthetic oligonucleotide
auacuucugaaagaugaag

SEQ ID NO: 3287238 - RNA, 19 nt, Artificial Sequence
  Description of Artificial Sequence: Synthetic oligonucleotide
uagaaagcaaaagcagaaa

SEQ ID NO: 3287239 - RNA, 19 nt, Artificial Sequence
  Description of Artificial Sequence: Synthetic oligonucleotide
cuagaaagcaaaagcagaa

SEQ ID NO: 3287240 - RNA, 19 nt, Artificial Sequence
  Description of Artificial Sequence: Synthetic oligonucleotide
gcuagaaagcaaaagcaga

SEQ ID NO: 3287241 - RNA, 19 nt, Artificial Sequence
  Description of Artificial Sequence: Synthetic oligonucleotide
ugcuagaaagcaaaagcag

SEQ ID NO: 3287242 - RNA, 19 nt, Artificial Sequence
  Description of Artificial Sequence: Synthetic oligonucleotide
gcaaaguuccucauuaaug

SEQ ID NO: 3287243 - RNA, 19 nt, Artificial Sequence
  Description of Artificial Sequence: Synthetic oligonucleotide
ggauuuugcaaaguuccuc

SEQ ID NO: 3287244 - RNA, 19 nt, Artificial Sequence
  Description of Artificial Sequence: Synthetic oligonucleotide
aggauuuugcaaaguuccu

SEQ ID NO: 3287245 - RNA, 19 nt, Artificial Sequence
  Description of Artificial Sequence: Synthetic oligonucleotide
cuaauggaggauuuugcaa

SEQ ID NO: 3287246 - RNA, 19 nt, Artificial Sequence
  Description of Artificial Sequence: Synthetic oligonucleotide
gaaacugguauuaaagguu

SEQ ID NO: 3287247 - RNA, 19 nt, Artificial Sequence
  Description of Artificial Sequence: Synthetic oligonucleotide
agaaacugguauuaaaggu

SEQ ID NO: 3287248 - RNA, 19 nt, Artificial Sequence
  Description of Artificial Sequence: Synthetic oligonucleotide
ggccacuaaaucauuagaa

SEQ ID NO: 3287249 - RNA, 19 nt, Artificial Sequence
  Description of Artificial Sequence: Synthetic oligonucleotide
aggccacuaaaucauuaga

SEQ ID NO: 3287250 - RNA, 19 nt, Artificial Sequence
  Description of Artificial Sequence: Synthetic oligonucleotide
uaggccacuaaaucauuag

SEQ ID NO: 3287251 - RNA, 19 nt, Artificial Sequence
  Description of Artificial Sequence: Synthetic oligonucleotide
aacuaggccacuaaaucau

SEQ ID NO: 3287252 - RNA, 19 nt, Artificial Sequence
  Description of Artificial Sequence: Synthetic oligonucleotide
caacuaggccacuaaauca

SEQ ID NO: 3287253 - RNA, 19 nt, Artificial Sequence
  Description of Artificial Sequence: Synthetic oligonucleotide
acaacuaggccacuaaauc

SEQ ID NO: 3287254 - RNA, 19 nt, Artificial Sequence
  Description of Artificial Sequence: Synthetic oligonucleotide
gacaacuaggccacuaaau

SEQ ID NO: 3287255 - RNA, 19 nt, Artificial Sequence
  Description of Artificial Sequence: Synthetic oligonucleotide
agacaacuaggccacuaaa

SEQ ID NO: 3287256 - RNA, 19 nt, Artificial Sequence
  Description of Artificial Sequence: Synthetic oligonucleotide
aagacaacuaggccacuaa

SEQ ID NO: 3287257 - RNA, 19 nt, Artificial Sequence
  Description of Artificial Sequence: Synthetic oligonucleotide
aaaauaagacaacuaggcc

SEQ ID NO: 3287258 - RNA, 19 nt, Artificial Sequence
  Description of Artificial Sequence: Synthetic oligonucleotide
auaucagacuauggaaaau

SEQ ID NO: 3287259 - RNA, 19 nt, Artificial Sequence
  Description of Artificial Sequence: Synthetic oligonucleotide
cauaucagacuauggaaaa

SEQ ID NO: 3287260 - RNA, 19 nt, Artificial Sequence
  Description of Artificial Sequence: Synthetic oligonucleotide
acaaggguaggcauaucag

SEQ ID NO: 3287261 - RNA, 19 nt, Artificial Sequence
  Description of Artificial Sequence: Synthetic oligonucleotide
gacaaggguaggcauauca

SEQ ID NO: 3287262 - RNA, 19 nt, Artificial Sequence
  Description of Artificial Sequence: Synthetic oligonucleotide
ugacaaggguaggcauauc

SEQ ID NO: 3287263 - RNA, 19 nt, Artificial Sequence
  Description of Artificial Sequence: Synthetic oligonucleotide
uauaagugcagcuuugaca

SEQ ID NO: 3287264 - RNA, 19 nt, Artificial Sequence
  Description of Artificial Sequence: Synthetic oligonucleotide
guauaagugcagcuuugac

SEQ ID NO: 3287265 - RNA, 19 nt, Artificial Sequence
  Description of Artificial Sequence: Synthetic oligonucleotide
uaacaucacagcuacugcg

SEQ ID NO: 3287266 - RNA, 19 nt, Artificial Sequence
  Description of Artificial Sequence: Synthetic oligonucleotide
gugggauaacaucacagcu

SEQ ID NO: 3287267 - RNA, 19 nt, Artificial Sequence
  Description of Artificial Sequence: Synthetic oligonucleotide
aagugggauaacaucacag

SEQ ID NO: 3287268 - RNA, 19 nt, Artificial Sequence
  Description of Artificial Sequence: Synthetic oligonucleotide
ugaauguuugaaaguggga

SEQ ID NO: 3287269 - RNA, 19 nt, Artificial Sequence
  Description of Artificial Sequence: Synthetic oligonucleotide
augaauguuugaaaguggg

SEQ ID NO: 3287270 - RNA, 19 nt, Artificial Sequence
  Description of Artificial Sequence: Synthetic oligonucleotide
aaaucuguuccgcuccagg

SEQ ID NO: 3287271 - RNA, 19 nt, Artificial Sequence
  Description of Artificial Sequence: Synthetic oligonucleotide
ccgcuccagguuucgcuug

SEQ ID NO: 3287272 - RNA, 19 nt, Artificial Sequence
  Description of Artificial Sequence: Synthetic oligonucleotide
cgcuccagguuucgcuugc

SEQ ID NO: 3287273 - RNA, 19 nt, Artificial Sequence
  Description of Artificial Sequence: Synthetic oligonucleotide
gcuccagguuucgcuugcu

SEQ ID NO: 3287274 - RNA, 19 nt, Artificial Sequence
  Description of Artificial Sequence: Synthetic oligonucleotide
cuccagguuucgcuugcua

SEQ ID NO: 3287275 - RNA, 19 nt, Artificial Sequence
  Description of Artificial Sequence: Synthetic oligonucleotide
uccagguuucgcuugcuaa

SEQ ID NO: 3287276 - RNA, 19 nt, Artificial Sequence
  Description of Artificial Sequence: Synthetic oligonucleotide
gguuucgcuugcuaacuca

SEQ ID NO: 3287277 - RNA, 19 nt, Artificial Sequence
  Description of Artificial Sequence: Synthetic oligonucleotide
guuucgcuugcuaacucag

SEQ ID NO: 3287278 - RNA, 19 nt, Artificial Sequence
  Description of Artificial Sequence: Synthetic oligonucleotide
uucgcuugcuaacucagcg

SEQ ID NO: 3287279 - RNA, 19 nt, Artificial Sequence
  Description of Artificial Sequence: Synthetic oligonucleotide
ucgcuugcuaacucagcgc

SEQ ID NO: 3287280 - RNA, 19 nt, Artificial Sequence
  Description of Artificial Sequence: Synthetic oligonucleotide
gcuaacucagcgcaccaag

SEQ ID NO: 3287281 - RNA, 19 nt, Artificial Sequence
  Description of Artificial Sequence: Synthetic oligonucleotide
cuaacucagcgcaccaagu

SEQ ID NO: 3287282 - RNA, 19 nt, Artificial Sequence
  Description of Artificial Sequence: Synthetic oligonucleotide
cucacuccaccuuucaauc

SEQ ID NO: 3287283 - RNA, 19 nt, Artificial Sequence
  Description of Artificial Sequence: Synthetic oligonucleotide
cuccaccuuucaaucaaag

SEQ ID NO: 3287284 - RNA, 19 nt, Artificial Sequence
  Description of Artificial Sequence: Synthetic oligonucleotide
cucuaaaacuucuuucuau

SEQ ID NO: 3287285 - RNA, 19 nt, Artificial Sequence
  Description of Artificial Sequence: Synthetic oligonucleotide
uauuucuacaacugcucuu

SEQ ID NO: 3287286 - RNA, 19 nt, Artificial Sequence
  Description of Artificial Sequence: Synthetic oligonucleotide
cuaaaccaaaccuguuguc

SEQ ID NO: 3287287 - RNA, 19 nt, Artificial Sequence
  Description of Artificial Sequence: Synthetic oligonucleotide
gaaggacacugugacagga

SEQ ID NO: 3287288 - RNA, 19 nt, Artificial Sequence
  Description of Artificial Sequence: Synthetic oligonucleotide
acaccucugaggagggauu

SEQ ID NO: 3287289 - RNA, 19 nt, Artificial Sequence
  Description of Artificial Sequence: Synthetic oligonucleotide
cucugaggagggauucccc

SEQ ID NO: 3287290 - RNA, 19 nt, Artificial Sequence
  Description of Artificial Sequence: Synthetic oligonucleotide
ucugaggagggauucccca

SEQ ID NO: 3287291 - RNA, 19 nt, Artificial Sequence
  Description of Artificial Sequence: Synthetic oligonucleotide
cugaggagggauuccccag

SEQ ID NO: 3287292 - RNA, 19 nt, Artificial Sequence
  Description of Artificial Sequence: Synthetic oligonucleotide
cccagucccaccauccaac

SEQ ID NO: 3287293 - RNA, 19 nt, Artificial Sequence
  Description of Artificial Sequence: Synthetic oligonucleotide
aacccaugagcuucucccc

SEQ ID NO: 3287294 - RNA, 19 nt, Artificial Sequence
  Description of Artificial Sequence: Synthetic oligonucleotide
ccagcuaaacaaaugaacg

SEQ ID NO: 3287295 - RNA, 19 nt, Artificial Sequence
  Description of Artificial Sequence: Synthetic oligonucleotide
cagcuaaacaaaugaacga

SEQ ID NO: 3287296 - RNA, 19 nt, Artificial Sequence
  Description of Artificial Sequence: Synthetic oligonucleotide
agcuaaacaaaugaacgau

SEQ ID NO: 3287297 - RNA, 19 nt, Artificial Sequence
  Description of Artificial Sequence: Synthetic oligonucleotide
aaacaaaugaacgauuauc

SEQ ID NO: 3287298 - RNA, 19 nt, Artificial Sequence
  Description of Artificial Sequence: Synthetic oligonucleotide
acaaaugaacgauuaucga

SEQ ID NO: 3287299 - RNA, 19 nt, Artificial Sequence
  Description of Artificial Sequence: Synthetic oligonucleotide
caaaugaacgauuaucgag

SEQ ID NO: 3287300 - RNA, 19 nt, Artificial Sequence
  Description of Artificial Sequence: Synthetic oligonucleotide
aaaugaacgauuaucgaga

SEQ ID NO: 3287301 - RNA, 19 nt, Artificial Sequence
  Description of Artificial Sequence: Synthetic oligonucleotide
augaacgauuaucgagaca

SEQ ID NO: 3287302 - RNA, 19 nt, Artificial Sequence
  Description of Artificial Sequence: Synthetic oligonucleotide
gaacgauuaucgagacaag

SEQ ID NO: 3287303 - RNA, 19 nt, Artificial Sequence
  Description of Artificial Sequence: Synthetic oligonucleotide
cgauuaucgagacaaguca

SEQ ID NO: 3287304 - RNA, 19 nt, Artificial Sequence
  Description of Artificial Sequence: Synthetic oligonucleotide
auuaucgagacaagucacc

SEQ ID NO: 3287305 - RNA, 19 nt, Artificial Sequence
  Description of Artificial Sequence: Synthetic oligonucleotide
uuaucgagacaagucaccc

SEQ ID NO: 3287306 - RNA, 19 nt, Artificial Sequence
  Description of Artificial Sequence: Synthetic oligonucleotide
aagucaccccaaaaccgcu

SEQ ID NO: 3287307 - RNA, 19 nt, Artificial Sequence
  Description of Artificial Sequence: Synthetic oligonucleotide
agucaccccaaaaccgcug

SEQ ID NO: 3287308 - RNA, 19 nt, Artificial Sequence
  Description of Artificial Sequence: Synthetic oligonucleotide
aaaagagcuaaucacaugg

SEQ ID NO: 3287309 - RNA, 19 nt, Artificial Sequence
  Description of Artificial Sequence: Synthetic oligonucleotide
uaaucacauggaggguucu

SEQ ID NO: 3287310 - RNA, 19 nt, Artificial Sequence
  Description of Artificial Sequence: Synthetic oligonucleotide
cacauggaggguucuauau

SEQ ID NO: 3287311 - RNA, 19 nt, Artificial Sequence
  Description of Artificial Sequence: Synthetic oligonucleotide
ggcacacacuguccccaca

SEQ ID NO: 3287312 - RNA, 19 nt, Artificial Sequence
  Description of Artificial Sequence: Synthetic oligonucleotide
gcacacacuguccccacau

SEQ ID NO: 3287313 - RNA, 19 nt, Artificial Sequence
  Description of Artificial Sequence: Synthetic oligonucleotide
aaaaucuacuguuccccug

SEQ ID NO: 3287314 - RNA, 19 nt, Artificial Sequence
  Description of Artificial Sequence: Synthetic oligonucleotide
ucuauccccugcaugcaau

SEQ ID NO: 3287315 - RNA, 19 nt, Artificial Sequence
  Description of Artificial Sequence: Synthetic oligonucleotide
cuauccccugcaugcaauc

SEQ ID NO: 3287316 - RNA, 19 nt, Artificial Sequence
  Description of Artificial Sequence: Synthetic oligonucleotide
uauccccugcaugcaauca

SEQ ID NO: 3287317 - RNA, 19 nt, Artificial Sequence
  Description of Artificial Sequence: Synthetic oligonucleotide
auccccugcaugcaaucaa

SEQ ID NO: 3287318 - RNA, 19 nt, Artificial Sequence
  Description of Artificial Sequence: Synthetic oligonucleotide
cugcaugcaaucaaacuau

SEQ ID NO: 3287319 - RNA, 19 nt, Artificial Sequence
  Description of Artificial Sequence: Synthetic oligonucleotide
ugcaugcaaucaaacuauu

SEQ ID NO: 3287320 - RNA, 19 nt, Artificial Sequence
  Description of Artificial Sequence: Synthetic oligonucleotide
caugcaaucaaacuauucc

SEQ ID NO: 3287321 - RNA, 19 nt, Artificial Sequence
  Description of Artificial Sequence: Synthetic oligonucleotide
augcaaucaaacuauucca

SEQ ID NO: 3287322 - RNA, 19 nt, Artificial Sequence
  Description of Artificial Sequence: Synthetic oligonucleotide
ugcaaucaaacuauuccag

SEQ ID NO: 3287323 - RNA, 19 nt, Artificial Sequence
  Description of Artificial Sequence: Synthetic oligonucleotide
gcaaucaaacuauuccagc

SEQ ID NO: 3287324 - RNA, 19 nt, Artificial Sequence
  Description of Artificial Sequence: Synthetic oligonucleotide
caaucaaacuauuccagca

SEQ ID NO: 3287325 - RNA, 19 nt, Artificial Sequence
  Description of Artificial Sequence: Synthetic oligonucleotide
aaucaaacuauuccagcag

SEQ ID NO: 3287326 - RNA, 19 nt, Artificial Sequence
  Description of Artificial Sequence: Synthetic oligonucleotide
cagcaggguggaaaucgca

SEQ ID NO: 3287327 - RNA, 19 nt, Artificial Sequence
  Description of Artificial Sequence: Synthetic oligonucleotide
caggguggaaaucgcaguu

SEQ ID NO: 3287328 - RNA, 19 nt, Artificial Sequence
  Description of Artificial Sequence: Synthetic oligonucleotide
aggguggaaaucgcaguua

SEQ ID NO: 3287329 - RNA, 19 nt, Artificial Sequence
  Description of Artificial Sequence: Synthetic oligonucleotide
ggguggaaaucgcaguuac

SEQ ID NO: 3287330 - RNA, 19 nt, Artificial Sequence
  Description of Artificial Sequence: Synthetic oligonucleotide
gaaaucgcaguuacacaag

SEQ ID NO: 3287331 - RNA, 19 nt, Artificial Sequence
  Description of Artificial Sequence: Synthetic oligonucleotide
aaucgcaguuacacaagug

SEQ ID NO: 3287332 - RNA, 19 nt, Artificial Sequence
  Description of Artificial Sequence: Synthetic oligonucleotide
cgcaguuacacaagugguu

SEQ ID NO: 3287333 - RNA, 19 nt, Artificial Sequence
  Description of Artificial Sequence: Synthetic oligonucleotide
uaccccuccuggcuaugua

SEQ ID NO: 3287334 - RNA, 19 nt, Artificial Sequence
  Description of Artificial Sequence: Synthetic oligonucleotide
aaaaaaauaaacugcccuu

SEQ ID NO: 3287335 - RNA, 19 nt, Artificial Sequence
  Description of Artificial Sequence: Synthetic oligonucleotide
aaaaaauaaacugcccuuu

SEQ ID NO: 3287336 - RNA, 19 nt, Artificial Sequence
  Description of Artificial Sequence: Synthetic oligonucleotide
aaaaauaaacugcccuuug

SEQ ID NO: 3287337 - RNA, 19 nt, Artificial Sequence
  Description of Artificial Sequence: Synthetic oligonucleotide
gcccuuugauggaaguccu

SEQ ID NO: 3287338 - RNA, 19 nt, Artificial Sequence
  Description of Artificial Sequence: Synthetic oligonucleotide
ccuuugauggaaguccuaa

SEQ ID NO: 3287339 - RNA, 19 nt, Artificial Sequence
  Description of Artificial Sequence: Synthetic oligonucleotide
cuuugauggaaguccuaag

SEQ ID NO: 3287340 - RNA, 19 nt, Artificial Sequence
  Description of Artificial Sequence: Synthetic oligonucleotide
uugauggaaguccuaagau

SEQ ID NO: 3287341 - RNA, 19 nt, Artificial Sequence
  Description of Artificial Sequence: Synthetic oligonucleotide
gauggaaguccuaagauaa

SEQ ID NO: 3287342 - RNA, 19 nt, Artificial Sequence
  Description of Artificial Sequence: Synthetic oligonucleotide
uggaaguccuaagauaacu

SEQ ID NO: 3287343 - RNA, 19 nt, Artificial Sequence
  Description of Artificial Sequence: Synthetic oligonucleotide
aacuuauucaacccccccu

SEQ ID NO: 3287344 - RNA, 19 nt, Artificial Sequence
  Description of Artificial Sequence: Synthetic oligonucleotide
acuuauucaacccccccug

SEQ ID NO: 3287345 - RNA, 19 nt, Artificial Sequence
  Description of Artificial Sequence: Synthetic oligonucleotide
cuuauucaacccccccugu

SEQ ID NO: 3287346 - RNA, 19 nt, Artificial Sequence
  Description of Artificial Sequence: Synthetic oligonucleotide
uuauucaacccccccugug

SEQ ID NO: 3287347 - RNA, 19 nt, Artificial Sequence
  Description of Artificial Sequence: Synthetic oligonucleotide
uauucaacccccccugugg

SEQ ID NO: 3287348 - RNA, 19 nt, Artificial Sequence
  Description of Artificial Sequence: Synthetic oligonucleotide
auucaacccccccuguggc

SEQ ID NO: 3287349 - RNA, 19 nt, Artificial Sequence
  Description of Artificial Sequence: Synthetic oligonucleotide
uucaacccccccuguggca

SEQ ID NO: 3287350 - RNA, 19 nt, Artificial Sequence
  Description of Artificial Sequence: Synthetic oligonucleotide
ucaacccccccuguggcaa

SEQ ID NO: 3287351 - RNA, 19 nt, Artificial Sequence
  Description of Artificial Sequence: Synthetic oligonucleotide
caacccccccuguggcaaa

SEQ ID NO: 3287352 - RNA, 19 nt, Artificial Sequence
  Description of Artificial Sequence: Synthetic oligonucleotide
aacccccccuguggcaaac

SEQ ID NO: 3287353 - RNA, 19 nt, Artificial Sequence
  Description of Artificial Sequence: Synthetic oligonucleotide
uguggcaaaccucuacacu

SEQ ID NO: 3287354 - RNA, 19 nt, Artificial Sequence
  Description of Artificial Sequence: Synthetic oligonucleotide
guggcaaaccucuacacuu

SEQ ID NO: 3287355 - RNA, 19 nt, Artificial Sequence
  Description of Artificial Sequence: Synthetic oligonucleotide
uggcaaaccucuacacuug

SEQ ID NO: 3287356 - RNA, 19 nt, Artificial Sequence
  Description of Artificial Sequence: Synthetic oligonucleotide
uacacuugcauuaauaaca

SEQ ID NO: 3287357 - RNA, 19 nt, Artificial Sequence
  Description of Artificial Sequence: Synthetic oligonucleotide
uuaauaacauccaacauac

SEQ ID NO: 3287358 - RNA, 19 nt, Artificial Sequence
  Description of Artificial Sequence: Synthetic oligonucleotide
uaauaacauccaacauacg

SEQ ID NO: 3287359 - RNA, 19 nt, Artificial Sequence
  Description of Artificial Sequence: Synthetic oligonucleotide
aauaacauccaacauacgg

SEQ ID NO: 3287360 - RNA, 19 nt, Artificial Sequence
  Description of Artificial Sequence: Synthetic oligonucleotide
acauccaacauacgggaga

SEQ ID NO: 3287361 - RNA, 19 nt, Artificial Sequence
  Description of Artificial Sequence: Synthetic oligonucleotide
uccaacauacgggagaaug

SEQ ID NO: 3287362 - RNA, 19 nt, Artificial Sequence
  Description of Artificial Sequence: Synthetic oligonucleotide
agaaugugcugugggacuu

SEQ ID NO: 3287363 - RNA, 19 nt, Artificial Sequence
  Description of Artificial Sequence: Synthetic oligonucleotide
ugcugugggacuuuuggga

SEQ ID NO: 3287364 - RNA, 19 nt, Artificial Sequence
  Description of Artificial Sequence: Synthetic oligonucleotide
gugggacuuuugggaccac

SEQ ID NO: 3287365 - RNA, 19 nt, Artificial Sequence
  Description of Artificial Sequence: Synthetic oligonucleotide
gggacuuuugggaccacgg

SEQ ID NO: 3287366 - RNA, 19 nt, Artificial Sequence
  Description of Artificial Sequence: Synthetic oligonucleotide
ggacuuuugggaccacggg

SEQ ID NO: 3287367 - RNA, 19 nt, Artificial Sequence
  Description of Artificial Sequence: Synthetic oligonucleotide
gacuuuugggaccacgggg

SEQ ID NO: 3287368 - RNA, 19 nt, Artificial Sequence
  Description of Artificial Sequence: Synthetic oligonucleotide
cuuuugggaccacggggga

SEQ ID NO: 3287369 - RNA, 19 nt, Artificial Sequence
  Description of Artificial Sequence: Synthetic oligonucleotide
uuuugggaccacgggggau

SEQ ID NO: 3287370 - RNA, 19 nt, Artificial Sequence
  Description of Artificial Sequence: Synthetic oligonucleotide
uugggaccacgggggauag

SEQ ID NO: 3287371 - RNA, 19 nt, Artificial Sequence
  Description of Artificial Sequence: Synthetic oligonucleotide
accacgggggauaggugug

SEQ ID NO: 3287372 - RNA, 19 nt, Artificial Sequence
  Description of Artificial Sequence: Synthetic oligonucleotide
ccacgggggauagguguga

SEQ ID NO: 3287373 - RNA, 19 nt, Artificial Sequence
  Description of Artificial Sequence: Synthetic oligonucleotide
ugugaccauuuauaacacc

SEQ ID NO: 3287374 - RNA, 19 nt, Artificial Sequence
  Description of Artificial Sequence: Synthetic oligonucleotide
gugaccauuuauaacacca

SEQ ID NO: 3287375 - RNA, 19 nt, Artificial Sequence
  Description of Artificial Sequence: Synthetic oligonucleotide
ugaccauuuauaacaccac

SEQ ID NO: 3287376 - RNA, 19 nt, Artificial Sequence
  Description of Artificial Sequence: Synthetic oligonucleotide
cauuuauaacaccacccaa

SEQ ID NO: 3287377 - RNA, 19 nt, Artificial Sequence
  Description of Artificial Sequence: Synthetic oligonucleotide
uuuauaacaccacccaacc

SEQ ID NO: 3287378 - RNA, 19 nt, Artificial Sequence
  Description of Artificial Sequence: Synthetic oligonucleotide
uuauaacaccacccaaccc

SEQ ID NO: 3287379 - RNA, 19 nt, Artificial Sequence
  Description of Artificial Sequence: Synthetic oligonucleotide
ccacccaacccagacagaa

SEQ ID NO: 3287380 - RNA, 19 nt, Artificial Sequence
  Description of Artificial Sequence: Synthetic oligonucleotide
acccaacccagacagaaaa

SEQ ID NO: 3287381 - RNA, 19 nt, Artificial Sequence
  Description of Artificial Sequence: Synthetic oligonucleotide
cagaaaagagcucuggguc

SEQ ID NO: 3287382 - RNA, 19 nt, Artificial Sequence
  Description of Artificial Sequence: Synthetic oligonucleotide
agaaaagagcucugggucu

SEQ ID NO: 3287383 - RNA, 19 nt, Artificial Sequence
  Description of Artificial Sequence: Synthetic oligonucleotide
aaaagagcucugggucuaa

SEQ ID NO: 3287384 - RNA, 19 nt, Artificial Sequence
  Description of Artificial Sequence: Synthetic oligonucleotide
gagcucugggucuaauacu

SEQ ID NO: 3287385 - RNA, 19 nt, Artificial Sequence
  Description of Artificial Sequence: Synthetic oligonucleotide
gcucugggucuaauacugg

SEQ ID NO: 3287386 - RNA, 19 nt, Artificial Sequence
  Description of Artificial Sequence: Synthetic oligonucleotide
gggucuaauacuggcaggg

SEQ ID NO: 3287387 - RNA, 19 nt, Artificial Sequence
  Description of Artificial Sequence: Synthetic oligonucleotide
gucuaauacuggcagggau

SEQ ID NO: 3287388 - RNA, 19 nt, Artificial Sequence
  Description of Artificial Sequence: Synthetic oligonucleotide
ucuaauacuggcagggaug

SEQ ID NO: 3287389 - RNA, 19 nt, Artificial Sequence
  Description of Artificial Sequence: Synthetic oligonucleotide
uacuggcagggaugggugc

SEQ ID NO: 3287390 - RNA, 19 nt, Artificial Sequence
  Description of Artificial Sequence: Synthetic oligonucleotide
augggugcggccauaggaa

SEQ ID NO: 3287391 - RNA, 19 nt, Artificial Sequence
  Description of Artificial Sequence: Synthetic oligonucleotide
ugggugcggccauaggaau

SEQ ID NO: 3287392 - RNA, 19 nt, Artificial Sequence
  Description of Artificial Sequence: Synthetic oligonucleotide
gggugcggccauaggaaug

SEQ ID NO: 3287393 - RNA, 19 nt, Artificial Sequence
  Description of Artificial Sequence: Synthetic oligonucleotide
ggugcggccauaggaauga

SEQ ID NO: 3287394 - RNA, 19 nt, Artificial Sequence
  Description of Artificial Sequence: Synthetic oligonucleotide
gugcggccauaggaaugau

SEQ ID NO: 3287395 - RNA, 19 nt, Artificial Sequence
  Description of Artificial Sequence: Synthetic oligonucleotide
ugcggccauaggaaugauc

SEQ ID NO: 3287396 - RNA, 19 nt, Artificial Sequence
  Description of Artificial Sequence: Synthetic oligonucleotide
ggccauaggaaugaucgcc

SEQ ID NO: 3287397 - RNA, 19 nt, Artificial Sequence
  Description of Artificial Sequence: Synthetic oligonucleotide
gccauaggaaugaucgccc

SEQ ID NO: 3287398 - RNA, 19 nt, Artificial Sequence
  Description of Artificial Sequence: Synthetic oligonucleotide
ccauaggaaugaucgcccc

SEQ ID NO: 3287399 - RNA, 19 nt, Artificial Sequence
  Description of Artificial Sequence: Synthetic oligonucleotide
auaggaaugaucgccccau

SEQ ID NO: 3287400 - RNA, 19 nt, Artificial Sequence
  Description of Artificial Sequence: Synthetic oligonucleotide
uaggaaugaucgccccaug

SEQ ID NO: 3287401 - RNA, 19 nt, Artificial Sequence
  Description of Artificial Sequence: Synthetic oligonucleotide
cccauggggaggguucacu

SEQ ID NO: 3287402 - RNA, 19 nt, Artificial Sequence
  Description of Artificial Sequence: Synthetic oligonucleotide
gaggguucacuuaucauga

SEQ ID NO: 3287403 - RNA, 19 nt, Artificial Sequence
  Description of Artificial Sequence: Synthetic oligonucleotide
aggguucacuuaucaugau

SEQ ID NO: 3287404 - RNA, 19 nt, Artificial Sequence
  Description of Artificial Sequence: Synthetic oligonucleotide
gguucacuuaucaugaugu

SEQ ID NO: 3287405 - RNA, 19 nt, Artificial Sequence
  Description of Artificial Sequence: Synthetic oligonucleotide
cucuccagacaaauagaca

SEQ ID NO: 3287406 - RNA, 19 nt, Artificial Sequence
  Description of Artificial Sequence: Synthetic oligonucleotide
gacaaauagacaacauagc

SEQ ID NO: 3287407 - RNA, 19 nt, Artificial Sequence
  Description of Artificial Sequence: Synthetic oligonucleotide
uagacaacauagcuaagag

SEQ ID NO: 3287408 - RNA, 19 nt, Artificial Sequence
  Description of Artificial Sequence: Synthetic oligonucleotide
agacaacauagcuaagagu

SEQ ID NO: 3287409 - RNA, 19 nt, Artificial Sequence
  Description of Artificial Sequence: Synthetic oligonucleotide
gacaacauagcuaagagua

SEQ ID NO: 3287410 - RNA, 19 nt, Artificial Sequence
  Description of Artificial Sequence: Synthetic oligonucleotide
acaacauagcuaagaguac

SEQ ID NO: 3287411 - RNA, 19 nt, Artificial Sequence
  Description of Artificial Sequence: Synthetic oligonucleotide
aacauagcuaagaguacca

SEQ ID NO: 3287412 - RNA, 19 nt, Artificial Sequence
  Description of Artificial Sequence: Synthetic oligonucleotide
acauagcuaagaguaccag

SEQ ID NO: 3287413 - RNA, 19 nt, Artificial Sequence
  Description of Artificial Sequence: Synthetic oligonucleotide
auagcuaagaguaccagag

SEQ ID NO: 3287414 - RNA, 19 nt, Artificial Sequence
  Description of Artificial Sequence: Synthetic oligonucleotide
uagcuaagaguaccagaga

SEQ ID NO: 3287415 - RNA, 19 nt, Artificial Sequence
  Description of Artificial Sequence: Synthetic oligonucleotide
gcaucucuaaacucaaggc

SEQ ID NO: 3287416 - RNA, 19 nt, Artificial Sequence
  Description of Artificial Sequence: Synthetic oligonucleotide
caucucuaaacucaaggcc

SEQ ID NO: 3287417 - RNA, 19 nt, Artificial Sequence
  Description of Artificial Sequence: Synthetic oligonucleotide
aucucuaaacucaaggccu

SEQ ID NO: 3287418 - RNA, 19 nt, Artificial Sequence
  Description of Artificial Sequence: Synthetic oligonucleotide
ucucuaaacucaaggccuc

SEQ ID NO: 3287419 - RNA, 19 nt, Artificial Sequence
  Description of Artificial Sequence: Synthetic oligonucleotide
ucuaaacucaaggccucca

SEQ ID NO: 3287420 - RNA, 19 nt, Artificial Sequence
  Description of Artificial Sequence: Synthetic oligonucleotide
cucaaggccuccauagauu

SEQ ID NO: 3287421 - RNA, 19 nt, Artificial Sequence
  Description of Artificial Sequence: Synthetic oligonucleotide
ucaaggccuccauagauuc

SEQ ID NO: 3287422 - RNA, 19 nt, Artificial Sequence
  Description of Artificial Sequence: Synthetic oligonucleotide
aggccuccauagauucucu

SEQ ID NO: 3287423 - RNA, 19 nt, Artificial Sequence
  Description of Artificial Sequence: Synthetic oligonucleotide
cauagauucucuagcaaau

SEQ ID NO: 3287424 - RNA, 19 nt, Artificial Sequence
  Description of Artificial Sequence: Synthetic oligonucleotide
aauguagucaugaacaaca

SEQ ID NO: 3287425 - RNA, 19 nt, Artificial Sequence
  Description of Artificial Sequence: Synthetic oligonucleotide
cagauuggccuuagauuac

SEQ ID NO: 3287426 - RNA, 19 nt, Artificial Sequence
  Description of Artificial Sequence: Synthetic oligonucleotide
cucuuagcagagcagggug

SEQ ID NO: 3287427 - RNA, 19 nt, Artificial Sequence
  Description of Artificial Sequence: Synthetic oligonucleotide
ucuuagcagagcagggugg

SEQ ID NO: 3287428 - RNA, 19 nt, Artificial Sequence
  Description of Artificial Sequence: Synthetic oligonucleotide
uagcagagcaggguggagu

SEQ ID NO: 3287429 - RNA, 19 nt, Artificial Sequence
  Description of Artificial Sequence: Synthetic oligonucleotide
agcagagcaggguggaguc

SEQ ID NO: 3287430 - RNA, 19 nt, Artificial Sequence
  Description of Artificial Sequence: Synthetic oligonucleotide
gcagagcaggguggagucu

SEQ ID NO: 3287431 - RNA, 19 nt, Artificial Sequence
  Description of Artificial Sequence: Synthetic oligonucleotide
cugugcagugaucaguaaa

SEQ ID NO: 3287432 - RNA, 19 nt, Artificial Sequence
  Description of Artificial Sequence: Synthetic oligonucleotide
ugugcagugaucaguaaau

SEQ ID NO: 3287433 - RNA, 19 nt, Artificial Sequence
  Description of Artificial Sequence: Synthetic oligonucleotide
gaucaguaaauccuguugc

SEQ ID NO: 3287434 - RNA, 19 nt, Artificial Sequence
  Description of Artificial Sequence: Synthetic oligonucleotide
ugcauuuaugucaauaaca

SEQ ID NO: 3287435 - RNA, 19 nt, Artificial Sequence
  Description of Artificial Sequence: Synthetic oligonucleotide
gcauuuaugucaauaacag

SEQ ID NO: 3287436 - RNA, 19 nt, Artificial Sequence
  Description of Artificial Sequence: Synthetic oligonucleotide
gucaauaacaguggggcga

SEQ ID NO: 3287437 - RNA, 19 nt, Artificial Sequence
  Description of Artificial Sequence: Synthetic oligonucleotide
ucaauaacaguggggcgau

SEQ ID NO: 3287438 - RNA, 19 nt, Artificial Sequence
  Description of Artificial Sequence: Synthetic oligonucleotide
aauaacaguggggcgauag

SEQ ID NO: 3287439 - RNA, 19 nt, Artificial Sequence
  Description of Artificial Sequence: Synthetic oligonucleotide
uaacaguggggcgauagag

SEQ ID NO: 3287440 - RNA, 19 nt, Artificial Sequence
  Description of Artificial Sequence: Synthetic oligonucleotide
aacaguggggcgauagagg

SEQ ID NO: 3287441 - RNA, 19 nt, Artificial Sequence
  Description of Artificial Sequence: Synthetic oligonucleotide
acaguggggcgauagagga

SEQ ID NO: 3287442 - RNA, 19 nt, Artificial Sequence
  Description of Artificial Sequence: Synthetic oligonucleotide
ggggcgauagaggaggaua

SEQ ID NO: 3287443 - RNA, 19 nt, Artificial Sequence
  Description of Artificial Sequence: Synthetic oligonucleotide
gggcgauagaggaggauau

SEQ ID NO: 3287444 - RNA, 19 nt, Artificial Sequence
  Description of Artificial Sequence: Synthetic oligonucleotide
aucuaugaugagguuacgu

SEQ ID NO: 3287445 - RNA, 19 nt, Artificial Sequence
  Description of Artificial Sequence: Synthetic oligonucleotide
ucuaugaugagguuacgug

SEQ ID NO: 3287446 - RNA, 19 nt, Artificial Sequence
  Description of Artificial Sequence: Synthetic oligonucleotide
cuaugaugagguuacgugg

SEQ ID NO: 3287447 - RNA, 19 nt, Artificial Sequence
  Description of Artificial Sequence: Synthetic oligonucleotide
gaugagguuacguggcucc

SEQ ID NO: 3287448 - RNA, 19 nt, Artificial Sequence
  Description of Artificial Sequence: Synthetic oligonucleotide
gagguuacguggcuccaua

SEQ ID NO: 3287449 - RNA, 19 nt, Artificial Sequence
  Description of Artificial Sequence: Synthetic oligonucleotide
ggcuccauaacuuuggaaa

SEQ ID NO: 3287450 - RNA, 19 nt, Artificial Sequence
  Description of Artificial Sequence: Synthetic oligonucleotide
uuuggaaaaggugauucag

SEQ ID NO: 3287451 - RNA, 19 nt, Artificial Sequence
  Description of Artificial Sequence: Synthetic oligonucleotide
uuggaaaaggugauucagc

SEQ ID NO: 3287452 - RNA, 19 nt, Artificial Sequence
  Description of Artificial Sequence: Synthetic oligonucleotide
agcaggguccauuugggag

SEQ ID NO: 3287453 - RNA, 19 nt, Artificial Sequence
  Description of Artificial Sequence: Synthetic oligonucleotide
caggguccauuugggaggc

SEQ ID NO: 3287454 - RNA, 19 nt, Artificial Sequence
  Description of Artificial Sequence: Synthetic oligonucleotide
aggguccauuugggaggcu

SEQ ID NO: 3287455 - RNA, 19 nt, Artificial Sequence
  Description of Artificial Sequence: Synthetic oligonucleotide
ggguccauuugggaggcug

SEQ ID NO: 3287456 - RNA, 19 nt, Artificial Sequence
  Description of Artificial Sequence: Synthetic oligonucleotide
cauuugggaggcugugaag

SEQ ID NO: 3287457 - RNA, 19 nt, Artificial Sequence
  Description of Artificial Sequence: Synthetic oligonucleotide
ugggaggcugugaagucug

SEQ ID NO: 3287458 - RNA, 19 nt, Artificial Sequence
  Description of Artificial Sequence: Synthetic oligonucleotide
ccucccucacaugguuugu

SEQ ID NO: 3287459 - RNA, 19 nt, Artificial Sequence
  Description of Artificial Sequence: Synthetic oligonucleotide
ccucacaugguuugucccu

SEQ ID NO: 3287460 - RNA, 19 nt, Artificial Sequence
  Description of Artificial Sequence: Synthetic oligonucleotide
cucacaugguuugucccuu

SEQ ID NO: 3287461 - RNA, 19 nt, Artificial Sequence
  Description of Artificial Sequence: Synthetic oligonucleotide
gaccagcugcacuuaauag

SEQ ID NO: 3287462 - RNA, 19 nt, Artificial Sequence
  Description of Artificial Sequence: Synthetic oligonucleotide
ccagcugcacuuaauagcc

SEQ ID NO: 3287463 - RNA, 19 nt, Artificial Sequence
  Description of Artificial Sequence: Synthetic oligonucleotide
cagcugcacuuaauagccu

SEQ ID NO: 3287464 - RNA, 19 nt, Artificial Sequence
  Description of Artificial Sequence: Synthetic oligonucleotide
agcugcacuuaauagccug

SEQ ID NO: 3287465 - RNA, 19 nt, Artificial Sequence
  Description of Artificial Sequence: Synthetic oligonucleotide
gcugcacuuaauagccugc

SEQ ID NO: 3287466 - RNA, 19 nt, Artificial Sequence
  Description of Artificial Sequence: Synthetic oligonucleotide
gcccuugucucuauaauuc

SEQ ID NO: 3287467 - RNA, 19 nt, Artificial Sequence
  Description of Artificial Sequence: Synthetic oligonucleotide
cccuugucucuauaauuca

SEQ ID NO: 3287468 - RNA, 19 nt, Artificial Sequence
  Description of Artificial Sequence: Synthetic oligonucleotide
ucacuaauuaaauaugucu

SEQ ID NO: 3287469 - RNA, 19 nt, Artificial Sequence
  Description of Artificial Sequence: Synthetic oligonucleotide
aggauauggcaauuucaca

SEQ ID NO: 3287470 - RNA, 19 nt, Artificial Sequence
  Description of Artificial Sequence: Synthetic oligonucleotide
acacagagccccuaaaaau

SEQ ID NO: 3287471 - RNA, 19 nt, Artificial Sequence
  Description of Artificial Sequence: Synthetic oligonucleotide
cacagagccccuaaaaaug

SEQ ID NO: 3287472 - RNA, 19 nt, Artificial Sequence
  Description of Artificial Sequence: Synthetic oligonucleotide
agagaucauccaaucuucc

SEQ ID NO: 3287473 - RNA, 19 nt, Artificial Sequence
  Description of Artificial Sequence: Synthetic oligonucleotide
gagaucauccaaucuuccu

SEQ ID NO: 3287474 - RNA, 19 nt, Artificial Sequence
  Description of Artificial Sequence: Synthetic oligonucleotide
agaucauccaaucuuccuu

SEQ ID NO: 3287475 - RNA, 19 nt, Artificial Sequence
  Description of Artificial Sequence: Synthetic oligonucleotide
cuuccuuggaggucccagc

SEQ ID NO: 3287476 - RNA, 19 nt, Artificial Sequence
  Description of Artificial Sequence: Synthetic oligonucleotide
uuccuuggaggucccagca

SEQ ID NO: 3287477 - RNA, 19 nt, Artificial Sequence
  Description of Artificial Sequence: Synthetic oligonucleotide
uuggaggucccagcaccua

SEQ ID NO: 3287478 - RNA, 19 nt, Artificial Sequence
  Description of Artificial Sequence: Synthetic oligonucleotide
ccuacaaguacauaucucc

SEQ ID NO: 3287479 - RNA, 19 nt, Artificial Sequence
  Description of Artificial Sequence: Synthetic oligonucleotide
uacaaguacauaucucccu

SEQ ID NO: 3287480 - RNA, 19 nt, Artificial Sequence
  Description of Artificial Sequence: Synthetic oligonucleotide
auaucucccuuggaugcca

SEQ ID NO: 3287481 - RNA, 19 nt, Artificial Sequence
  Description of Artificial Sequence: Synthetic oligonucleotide
ugccagugggcaaagauuc

SEQ ID NO: 3287482 - RNA, 19 nt, Artificial Sequence
  Description of Artificial Sequence: Synthetic oligonucleotide
gccagugggcaaagauucu

SEQ ID NO: 3287483 - RNA, 19 nt, Artificial Sequence
  Description of Artificial Sequence: Synthetic oligonucleotide
gcaaagauucugcaacuac

SEQ ID NO: 3287484 - RNA, 19 nt, Artificial Sequence
  Description of Artificial Sequence: Synthetic oligonucleotide
gauucugcaacuacggagg

SEQ ID NO: 3287485 - RNA, 19 nt, Artificial Sequence
  Description of Artificial Sequence: Synthetic oligonucleotide
uccuucccugacagagagc

SEQ ID NO: 3287486 - RNA, 19 nt, Artificial Sequence
  Description of Artificial Sequence: Synthetic oligonucleotide
ugacuucuucgucccacgu

SEQ ID NO: 3287487 - RNA, 19 nt, Artificial Sequence
  Description of Artificial Sequence: Synthetic oligonucleotide
acuucuucgucccacguca

SEQ ID NO: 3287488 - RNA, 19 nt, Artificial Sequence
  Description of Artificial Sequence: Synthetic oligonucleotide
ucgucccacgucagcagga

SEQ ID NO: 3287489 - RNA, 19 nt, Artificial Sequence
  Description of Artificial Sequence: Synthetic oligonucleotide
cgucccacgucagcaggaa

SEQ ID NO: 3287490 - RNA, 19 nt, Artificial Sequence
  Description of Artificial Sequence: Synthetic oligonucleotide
gucccacgucagcaggaag

SEQ ID NO: 3287491 - RNA, 19 nt, Artificial Sequence
  Description of Artificial Sequence: Synthetic oligonucleotide
aggaaguaguuacagaaga

SEQ ID NO: 3287492 - RNA, 19 nt, Artificial Sequence
  Description of Artificial Sequence: Synthetic oligonucleotide
gaaguaguuacagaagacc

SEQ ID NO: 3287493 - RNA, 19 nt, Artificial Sequence
  Description of Artificial Sequence: Synthetic oligonucleotide
uuacagaagacccacgacg

SEQ ID NO: 3287494 - RNA, 19 nt, Artificial Sequence
  Description of Artificial Sequence: Synthetic oligonucleotide
cagaagacccacgacgucc

SEQ ID NO: 3287495 - RNA, 19 nt, Artificial Sequence
  Description of Artificial Sequence: Synthetic oligonucleotide
agaagacccacgacguccu

SEQ ID NO: 3287496 - RNA, 19 nt, Artificial Sequence
  Description of Artificial Sequence: Synthetic oligonucleotide
gacccacgacguccuuaug

SEQ ID NO: 3287497 - RNA, 19 nt, Artificial Sequence
  Description of Artificial Sequence: Synthetic oligonucleotide
cccacgacguccuuaugcc

SEQ ID NO: 3287498 - RNA, 19 nt, Artificial Sequence
  Description of Artificial Sequence: Synthetic oligonucleotide
gcccaaagcuuuucagggu

SEQ ID NO: 3287499 - RNA, 19 nt, Artificial Sequence
  Description of Artificial Sequence: Synthetic oligonucleotide
caaagcuuuucagggucuc

SEQ ID NO: 3287500 - RNA, 19 nt, Artificial Sequence
  Description of Artificial Sequence: Synthetic oligonucleotide
uucagggucuccaacucuu

SEQ ID NO: 3287501 - RNA, 19 nt, Artificial Sequence
  Description of Artificial Sequence: Synthetic oligonucleotide
caacucuugagggggaaua

SEQ ID NO: 3287502 - RNA, 19 nt, Artificial Sequence
  Description of Artificial Sequence: Synthetic oligonucleotide
aacucuugagggggaauac

SEQ ID NO: 3287503 - RNA, 19 nt, Artificial Sequence
  Description of Artificial Sequence: Synthetic oligonucleotide
uugagggggaauacuguua

SEQ ID NO: 3287504 - RNA, 19 nt, Artificial Sequence
  Description of Artificial Sequence: Synthetic oligonucleotide
ugagggggaauacuguuag

SEQ ID NO: 3287505 - RNA, 19 nt, Artificial Sequence
  Description of Artificial Sequence: Synthetic oligonucleotide
gagggggaauacuguuagg

SEQ ID NO: 3287506 - RNA, 19 nt, Artificial Sequence
  Description of Artificial Sequence: Synthetic oligonucleotide
agggggaauacuguuaggg

SEQ ID NO: 3287507 - RNA, 19 nt, Artificial Sequence
  Description of Artificial Sequence: Synthetic oligonucleotide
gggggaauacuguuagggu

SEQ ID NO: 3287508 - RNA, 19 nt, Artificial Sequence
  Description of Artificial Sequence: Synthetic oligonucleotide
auacuguuaggguaggcag

SEQ ID NO: 3287509 - RNA, 19 nt, Artificial Sequence
  Description of Artificial Sequence: Synthetic oligonucleotide
uacuguuaggguaggcagg

SEQ ID NO: 3287510 - RNA, 19 nt, Artificial Sequence
  Description of Artificial Sequence: Synthetic oligonucleotide
guuaggguaggcagguagc

SEQ ID NO: 3287511 - RNA, 19 nt, Artificial Sequence
  Description of Artificial Sequence: Synthetic oligonucleotide
uuaggguaggcagguagcc

SEQ ID NO: 3287512 - RNA, 19 nt, Artificial Sequence
  Description of Artificial Sequence: Synthetic oligonucleotide
uaggguaggcagguagcca

SEQ ID NO: 3287513 - RNA, 19 nt, Artificial Sequence
  Description of Artificial Sequence: Synthetic oligonucleotide
ggguaggcagguagccaga

SEQ ID NO: 3287514 - RNA, 19 nt, Artificial Sequence
  Description of Artificial Sequence: Synthetic oligonucleotide
aaucuuuagaaaugcagcc

SEQ ID NO: 3287515 - RNA, 19 nt, Artificial Sequence
  Description of Artificial Sequence: Synthetic oligonucleotide
aucuuuagaaaugcagccc

SEQ ID NO: 3287516 - RNA, 19 nt, Artificial Sequence
  Description of Artificial Sequence: Synthetic oligonucleotide
ucuuuagaaaugcagcccg

SEQ ID NO: 3287517 - RNA, 19 nt, Artificial Sequence
  Description of Artificial Sequence: Synthetic oligonucleotide
uuagaaaugcagcccgcug

SEQ ID NO: 3287518 - RNA, 19 nt, Artificial Sequence
  Description of Artificial Sequence: Synthetic oligonucleotide
gauggccuccuuggaaacg

SEQ ID NO: 3287519 - RNA, 19 nt, Artificial Sequence
  Description of Artificial Sequence: Synthetic oligonucleotide
auggccuccuuggaaacgc

SEQ ID NO: 3287520 - RNA, 19 nt, Artificial Sequence
  Description of Artificial Sequence: Synthetic oligonucleotide
aaacgcugcacgcugaguc

SEQ ID NO: 3287521 - RNA, 19 nt, Artificial Sequence
  Description of Artificial Sequence: Synthetic oligonucleotide
accuggccuuguggcugca

SEQ ID NO: 3287522 - RNA, 19 nt, Artificial Sequence
  Description of Artificial Sequence: Synthetic oligonucleotide
ccuggccuuguggcugcau

SEQ ID NO: 3287523 - RNA, 19 nt, Artificial Sequence
  Description of Artificial Sequence: Synthetic oligonucleotide
cuggccuuguggcugcauu

SEQ ID NO: 3287524 - RNA, 19 nt, Artificial Sequence
  Description of Artificial Sequence: Synthetic oligonucleotide
uggccuuguggcugcauuc

SEQ ID NO: 3287525 - RNA, 19 nt, Artificial Sequence
  Description of Artificial Sequence: Synthetic oligonucleotide
ggccuuguggcugcauucc

SEQ ID NO: 3287526 - RNA, 19 nt, Artificial Sequence
  Description of Artificial Sequence: Synthetic oligonucleotide
cugcauuccucuguuccag

SEQ ID NO: 3287527 - RNA, 19 nt, Artificial Sequence
  Description of Artificial Sequence: Synthetic oligonucleotide
gcauuccucuguuccagaa

SEQ ID NO: 3287528 - RNA, 19 nt, Artificial Sequence
  Description of Artificial Sequence: Synthetic oligonucleotide
gaagggaacuuaucaaggc

SEQ ID NO: 3287529 - RNA, 19 nt, Artificial Sequence
  Description of Artificial Sequence: Synthetic oligonucleotide
agggaacuuaucaaggccc

SEQ ID NO: 3287530 - RNA, 19 nt, Artificial Sequence
  Description of Artificial Sequence: Synthetic oligonucleotide
uaucaaggcccagccagag

SEQ ID NO: 3287531 - RNA, 19 nt, Artificial Sequence
  Description of Artificial Sequence: Synthetic oligonucleotide
guuaccaagguaggagcua

SEQ ID NO: 3287532 - RNA, 19 nt, Artificial Sequence
  Description of Artificial Sequence: Synthetic oligonucleotide
uuaccaagguaggagcuau

SEQ ID NO: 3287533 - RNA, 19 nt, Artificial Sequence
  Description of Artificial Sequence: Synthetic oligonucleotide
ccaagguaggagcuauucc

SEQ ID NO: 3287534 - RNA, 19 nt, Artificial Sequence
  Description of Artificial Sequence: Synthetic oligonucleotide
caagguaggagcuauuccc

SEQ ID NO: 3287535 - RNA, 19 nt, Artificial Sequence
  Description of Artificial Sequence: Synthetic oligonucleotide
uaggagcuauuccccacua

SEQ ID NO: 3287536 - RNA, 19 nt, Artificial Sequence
  Description of Artificial Sequence: Synthetic oligonucleotide
aggagcuauuccccacuaa

SEQ ID NO: 3287537 - RNA, 19 nt, Artificial Sequence
  Description of Artificial Sequence: Synthetic oligonucleotide
uauuccccacuaagaagca

SEQ ID NO: 3287538 - RNA, 19 nt, Artificial Sequence
  Description of Artificial Sequence: Synthetic oligonucleotide
acuaagaagcauguauacu

SEQ ID NO: 3287539 - RNA, 19 nt, Artificial Sequence
  Description of Artificial Sequence: Synthetic oligonucleotide
cauguauacuucucuaaua

SEQ ID NO: 3287540 - RNA, 19 nt, Artificial Sequence
  Description of Artificial Sequence: Synthetic oligonucleotide
ucucuaauaauucacccua

SEQ ID NO: 3287541 - RNA, 19 nt, Artificial Sequence
  Description of Artificial Sequence: Synthetic oligonucleotide
uaauucacccuaauauacc

SEQ ID NO: 3287542 - RNA, 19 nt, Artificial Sequence
  Description of Artificial Sequence: Synthetic oligonucleotide
aauucacccuaauauacca

SEQ ID NO: 3287543 - RNA, 19 nt, Artificial Sequence
  Description of Artificial Sequence: Synthetic oligonucleotide
uucacccuaauauaccauu

SEQ ID NO: 3287544 - RNA, 19 nt, Artificial Sequence
  Description of Artificial Sequence: Synthetic oligonucleotide
ucacccuaauauaccauuu

SEQ ID NO: 3287545 - RNA, 19 nt, Artificial Sequence
  Description of Artificial Sequence: Synthetic oligonucleotide
auaauaaaaaaaccacaca

SEQ ID NO: 3287546 - RNA, 19 nt, Artificial Sequence
  Description of Artificial Sequence: Synthetic oligonucleotide
uaauaaaaaaaccacacac

SEQ ID NO: 3287547 - RNA, 19 nt, Artificial Sequence
  Description of Artificial Sequence: Synthetic oligonucleotide
auaaaaaaaccacacaccu

SEQ ID NO: 3287548 - RNA, 19 nt, Artificial Sequence
  Description of Artificial Sequence: Synthetic oligonucleotide
uaaaaaaaccacacaccug

SEQ ID NO: 3287549 - RNA, 19 nt, Artificial Sequence
  Description of Artificial Sequence: Synthetic oligonucleotide
aaaaaaaccacacaccugu

SEQ ID NO: 3287550 - RNA, 19 nt, Artificial Sequence
  Description of Artificial Sequence: Synthetic oligonucleotide
aaaaaaccacacaccugug

SEQ ID NO: 3287551 - RNA, 19 nt, Artificial Sequence
  Description of Artificial Sequence: Synthetic oligonucleotide
accacacaccuguguggag

SEQ ID NO: 3287552 - RNA, 19 nt, Artificial Sequence
  Description of Artificial Sequence: Synthetic oligonucleotide
ccacacaccuguguggaga

SEQ ID NO: 3287553 - RNA, 19 nt, Artificial Sequence
  Description of Artificial Sequence: Synthetic oligonucleotide
cacacaccuguguggagau

SEQ ID NO: 3287554 - RNA, 19 nt, Artificial Sequence
  Description of Artificial Sequence: Synthetic oligonucleotide
acacaccuguguggagauu

SEQ ID NO: 3287555 - RNA, 19 nt, Artificial Sequence
  Description of Artificial Sequence: Synthetic oligonucleotide
cacaccuguguggagauuu

SEQ ID NO: 3287556 - RNA, 19 nt, Artificial Sequence
  Description of Artificial Sequence: Synthetic oligonucleotide
guggagauuuuauuuuuua

SEQ ID NO: 3287557 - RNA, 19 nt, Artificial Sequence
  Description of Artificial Sequence: Synthetic oligonucleotide
agaaauuccuuguuagacu

SEQ ID NO: 3287558 - RNA, 19 nt, Artificial Sequence
  Description of Artificial Sequence: Synthetic oligonucleotide
gaaauuccuuguuagacuu

SEQ ID NO: 3287559 - RNA, 19 nt, Artificial Sequence
  Description of Artificial Sequence: Synthetic oligonucleotide
cuuguuagacuuuagaucc

SEQ ID NO: 3287560 - RNA, 19 nt, Artificial Sequence
  Description of Artificial Sequence: Synthetic oligonucleotide
auccaaaugacauggcaca

SEQ ID NO: 3287561 - RNA, 19 nt, Artificial Sequence
  Description of Artificial Sequence: Synthetic oligonucleotide
ugugugcccagaccaguuc

SEQ ID NO: 3287562 - RNA, 19 nt, Artificial Sequence
  Description of Artificial Sequence: Synthetic oligonucleotide
caugcuuacuaguaacgcc

SEQ ID NO: 3287563 - RNA, 19 nt, Artificial Sequence
  Description of Artificial Sequence: Synthetic oligonucleotide
uaacgccccugcaugaccc

SEQ ID NO: 3287564 - RNA, 19 nt, Artificial Sequence
  Description of Artificial Sequence: Synthetic oligonucleotide
cugcaugaccccuucauga

SEQ ID NO: 3287565 - RNA, 19 nt, Artificial Sequence
  Description of Artificial Sequence: Synthetic oligonucleotide
ucaugaauaaucauguaaa

SEQ ID NO: 3287566 - RNA, 19 nt, Artificial Sequence
  Description of Artificial Sequence: Synthetic oligonucleotide
uaaaauucucauaagaagc

SEQ ID NO: 3287567 - RNA, 19 nt, Artificial Sequence
  Description of Artificial Sequence: Synthetic oligonucleotide
ucucauaagaagcaucucc

SEQ ID NO: 3287568 - RNA, 19 nt, Artificial Sequence
  Description of Artificial Sequence: Synthetic oligonucleotide
cucauaagaagcaucuccc

SEQ ID NO: 3287569 - RNA, 19 nt, Artificial Sequence
  Description of Artificial Sequence: Synthetic oligonucleotide
aucuccccagccaggugug

SEQ ID NO: 3287570 - RNA, 19 nt, Artificial Sequence
  Description of Artificial Sequence: Synthetic oligonucleotide
ccuggagcggaacagauuu

SEQ ID NO: 3287571 - RNA, 19 nt, Artificial Sequence
  Description of Artificial Sequence: Synthetic oligonucleotide
caagcgaaaccuggagcgg

SEQ ID NO: 3287572 - RNA, 19 nt, Artificial Sequence
  Description of Artificial Sequence: Synthetic oligonucleotide
gcaagcgaaaccuggagcg

SEQ ID NO: 3287573 - RNA, 19 nt, Artificial Sequence
  Description of Artificial Sequence: Synthetic oligonucleotide
agcaagcgaaaccuggagc

SEQ ID NO: 3287574 - RNA, 19 nt, Artificial Sequence
  Description of Artificial Sequence: Synthetic oligonucleotide
uagcaagcgaaaccuggag

SEQ ID NO: 3287575 - RNA, 19 nt, Artificial Sequence
  Description of Artificial Sequence: Synthetic oligonucleotide
uuagcaagcgaaaccugga

SEQ ID NO: 3287576 - RNA, 19 nt, Artificial Sequence
  Description of Artificial Sequence: Synthetic oligonucleotide
ugaguuagcaagcgaaacc

SEQ ID NO: 3287577 - RNA, 19 nt, Artificial Sequence
  Description of Artificial Sequence: Synthetic oligonucleotide
cugaguuagcaagcgaaac

SEQ ID NO: 3287578 - RNA, 19 nt, Artificial Sequence
  Description of Artificial Sequence: Synthetic oligonucleotide
cgcugaguuagcaagcgaa

SEQ ID NO: 3287579 - RNA, 19 nt, Artificial Sequence
  Description of Artificial Sequence: Synthetic oligonucleotide
gcgcugaguuagcaagcga

SEQ ID NO: 3287580 - RNA, 19 nt, Artificial Sequence
  Description of Artificial Sequence: Synthetic oligonucleotide
cuuggugcgcugaguuagc

SEQ ID NO: 3287581 - RNA, 19 nt, Artificial Sequence
  Description of Artificial Sequence: Synthetic oligonucleotide
acuuggugcgcugaguuag

SEQ ID NO: 3287582 - RNA, 19 nt, Artificial Sequence
  Description of Artificial Sequence: Synthetic oligonucleotide
gauugaaagguggagugag

SEQ ID NO: 3287583 - RNA, 19 nt, Artificial Sequence
  Description of Artificial Sequence: Synthetic oligonucleotide
cuuugauugaaagguggag

SEQ ID NO: 3287584 - RNA, 19 nt, Artificial Sequence
  Description of Artificial Sequence: Synthetic oligonucleotide
auagaaagaaguuuuagag

SEQ ID NO: 3287585 - RNA, 19 nt, Artificial Sequence
  Description of Artificial Sequence: Synthetic oligonucleotide
aagagcaguuguagaaaua

SEQ ID NO: 3287586 - RNA, 19 nt, Artificial Sequence
  Description of Artificial Sequence: Synthetic oligonucleotide
gacaacagguuugguuuag

SEQ ID NO: 3287587 - RNA, 19 nt, Artificial Sequence
  Description of Artificial Sequence: Synthetic oligonucleotide
uccugucacaguguccuuc

SEQ ID NO: 3287588 - RNA, 19 nt, Artificial Sequence
  Description of Artificial Sequence: Synthetic oligonucleotide
aaucccuccucagaggugu

SEQ ID NO: 3287589 - RNA, 19 nt, Artificial Sequence
  Description of Artificial Sequence: Synthetic oligonucleotide
ggggaaucccuccucagag

SEQ ID NO: 3287590 - RNA, 19 nt, Artificial Sequence
  Description of Artificial Sequence: Synthetic oligonucleotide
uggggaaucccuccucaga

SEQ ID NO: 3287591 - RNA, 19 nt, Artificial Sequence
  Description of Artificial Sequence: Synthetic oligonucleotide
cuggggaaucccuccucag

SEQ ID NO: 3287592 - RNA, 19 nt, Artificial Sequence
  Description of Artificial Sequence: Synthetic oligonucleotide
guuggauggugggacuggg

SEQ ID NO: 3287593 - RNA, 19 nt, Artificial Sequence
  Description of Artificial Sequence: Synthetic oligonucleotide
ggggagaagcucauggguu

SEQ ID NO: 3287594 - RNA, 19 nt, Artificial Sequence
  Description of Artificial Sequence: Synthetic oligonucleotide
cguucauuuguuuagcugg

SEQ ID NO: 3287595 - RNA, 19 nt, Artificial Sequence
  Description of Artificial Sequence: Synthetic oligonucleotide
ucguucauuuguuuagcug

SEQ ID NO: 3287596 - RNA, 19 nt, Artificial Sequence
  Description of Artificial Sequence: Synthetic oligonucleotide
aucguucauuuguuuagcu

SEQ ID NO: 3287597 - RNA, 19 nt, Artificial Sequence
  Description of Artificial Sequence: Synthetic oligonucleotide
gauaaucguucauuuguuu

SEQ ID NO: 3287598 - RNA, 19 nt, Artificial Sequence
  Description of Artificial Sequence: Synthetic oligonucleotide
ucgauaaucguucauuugu

SEQ ID NO: 3287599 - RNA, 19 nt, Artificial Sequence
  Description of Artificial Sequence: Synthetic oligonucleotide
cucgauaaucguucauuug

SEQ ID NO: 3287600 - RNA, 19 nt, Artificial Sequence
  Description of Artificial Sequence: Synthetic oligonucleotide
ucucgauaaucguucauuu

SEQ ID NO: 3287601 - RNA, 19 nt, Artificial Sequence
  Description of Artificial Sequence: Synthetic oligonucleotide
ugucucgauaaucguucau

SEQ ID NO: 3287602 - RNA, 19 nt, Artificial Sequence
  Description of Artificial Sequence: Synthetic oligonucleotide
cuugucucgauaaucguuc

SEQ ID NO: 3287603 - RNA, 19 nt, Artificial Sequence
  Description of Artificial Sequence: Synthetic oligonucleotide
ugacuugucucgauaaucg

SEQ ID NO: 3287604 - RNA, 19 nt, Artificial Sequence
  Description of Artificial Sequence: Synthetic oligonucleotide
ggugacuugucucgauaau

SEQ ID NO: 3287605 - RNA, 19 nt, Artificial Sequence
  Description of Artificial Sequence: Synthetic oligonucleotide
gggugacuugucucgauaa

SEQ ID NO: 3287606 - RNA, 19 nt, Artificial Sequence
  Description of Artificial Sequence: Synthetic oligonucleotide
agcgguuuuggggugacuu

SEQ ID NO: 3287607 - RNA, 19 nt, Artificial Sequence
  Description of Artificial Sequence: Synthetic oligonucleotide
cagcgguuuuggggugacu

SEQ ID NO: 3287608 - RNA, 19 nt, Artificial Sequence
  Description of Artificial Sequence: Synthetic oligonucleotide
ccaugugauuagcucuuuu

SEQ ID NO: 3287609 - RNA, 19 nt, Artificial Sequence
  Description of Artificial Sequence: Synthetic oligonucleotide
agaacccuccaugugauua

SEQ ID NO: 3287610 - RNA, 19 nt, Artificial Sequence
  Description of Artificial Sequence: Synthetic oligonucleotide
auauagaacccuccaugug

SEQ ID NO: 3287611 - RNA, 19 nt, Artificial Sequence
  Description of Artificial Sequence: Synthetic oligonucleotide
uguggggacagugugugcc

SEQ ID NO: 3287612 - RNA, 19 nt, Artificial Sequence
  Description of Artificial Sequence: Synthetic oligonucleotide
auguggggacagugugugc

SEQ ID NO: 3287613 - RNA, 19 nt, Artificial Sequence
  Description of Artificial Sequence: Synthetic oligonucleotide
caggggaacaguagauuuu

SEQ ID NO: 3287614 - RNA, 19 nt, Artificial Sequence
  Description of Artificial Sequence: Synthetic oligonucleotide
auugcaugcaggggauaga

SEQ ID NO: 3287615 - RNA, 19 nt, Artificial Sequence
  Description of Artificial Sequence: Synthetic oligonucleotide
gauugcaugcaggggauag

SEQ ID NO: 3287616 - RNA, 19 nt, Artificial Sequence
  Description of Artificial Sequence: Synthetic oligonucleotide
ugauugcaugcaggggaua

SEQ ID NO: 3287617 - RNA, 19 nt, Artificial Sequence
  Description of Artificial Sequence: Synthetic oligonucleotide
uugauugcaugcaggggau

SEQ ID NO: 3287618 - RNA, 19 nt, Artificial Sequence
  Description of Artificial Sequence: Synthetic oligonucleotide
auaguuugauugcaugcag

SEQ ID NO: 3287619 - RNA, 19 nt, Artificial Sequence
  Description of Artificial Sequence: Synthetic oligonucleotide
aauaguuugauugcaugca

SEQ ID NO: 3287620 - RNA, 19 nt, Artificial Sequence
  Description of Artificial Sequence: Synthetic oligonucleotide
ggaauaguuugauugcaug

SEQ ID NO: 3287621 - RNA, 19 nt, Artificial Sequence
  Description of Artificial Sequence: Synthetic oligonucleotide
uggaauaguuugauugcau

SEQ ID NO: 3287622 - RNA, 19 nt, Artificial Sequence
  Description of Artificial Sequence: Synthetic oligonucleotide
cuggaauaguuugauugca

SEQ ID NO: 3287623 - RNA, 19 nt, Artificial Sequence
  Description of Artificial Sequence: Synthetic oligonucleotide
gcuggaauaguuugauugc

SEQ ID NO: 3287624 - RNA, 19 nt, Artificial Sequence
  Description of Artificial Sequence: Synthetic oligonucleotide
ugcuggaauaguuugauug

SEQ ID NO: 3287625 - RNA, 19 nt, Artificial Sequence
  Description of Artificial Sequence: Synthetic oligonucleotide
cugcuggaauaguuugauu

SEQ ID NO: 3287626 - RNA, 19 nt, Artificial Sequence
  Description of Artificial Sequence: Synthetic oligonucleotide
ugcgauuuccacccugcug

SEQ ID NO: 3287627 - RNA, 19 nt, Artificial Sequence
  Description of Artificial Sequence: Synthetic oligonucleotide
aacugcgauuuccacccug

SEQ ID NO: 3287628 - RNA, 19 nt, Artificial Sequence
  Description of Artificial Sequence: Synthetic oligonucleotide
uaacugcgauuuccacccu

SEQ ID NO: 3287629 - RNA, 19 nt, Artificial Sequence
  Description of Artificial Sequence: Synthetic oligonucleotide
guaacugcgauuuccaccc

SEQ ID NO: 3287630 - RNA, 19 nt, Artificial Sequence
  Description of Artificial Sequence: Synthetic oligonucleotide
cuuguguaacugcgauuuc

SEQ ID NO: 3287631 - RNA, 19 nt, Artificial Sequence
  Description of Artificial Sequence: Synthetic oligonucleotide
cacuuguguaacugcgauu

SEQ ID NO: 3287632 - RNA, 19 nt, Artificial Sequence
  Description of Artificial Sequence: Synthetic oligonucleotide
aaccacuuguguaacugcg

SEQ ID NO: 3287633 - RNA, 19 nt, Artificial Sequence
  Description of Artificial Sequence: Synthetic oligonucleotide
uacauagccaggaggggua

SEQ ID NO: 3287634 - RNA, 19 nt, Artificial Sequence
  Description of Artificial Sequence: Synthetic oligonucleotide
aagggcaguuuauuuuuuu

SEQ ID NO: 3287635 - RNA, 19 nt, Artificial Sequence
  Description of Artificial Sequence: Synthetic oligonucleotide
aaagggcaguuuauuuuuu

SEQ ID NO: 3287636 - RNA, 19 nt, Artificial Sequence
  Description of Artificial Sequence: Synthetic oligonucleotide
caaagggcaguuuauuuuu

SEQ ID NO: 3287637 - RNA, 19 nt, Artificial Sequence
  Description of Artificial Sequence: Synthetic oligonucleotide
aggacuuccaucaaagggc

SEQ ID NO: 3287638 - RNA, 19 nt, Artificial Sequence
  Description of Artificial Sequence: Synthetic oligonucleotide
uuaggacuuccaucaaagg

SEQ ID NO: 3287639 - RNA, 19 nt, Artificial Sequence
  Description of Artificial Sequence: Synthetic oligonucleotide
cuuaggacuuccaucaaag

SEQ ID NO: 3287640 - RNA, 19 nt, Artificial Sequence
  Description of Artificial Sequence: Synthetic oligonucleotide
aucuuaggacuuccaucaa

SEQ ID NO: 3287641 - RNA, 19 nt, Artificial Sequence
  Description of Artificial Sequence: Synthetic oligonucleotide
uuaucuuaggacuuccauc

SEQ ID NO: 3287642 - RNA, 19 nt, Artificial Sequence
  Description of Artificial Sequence: Synthetic oligonucleotide
aguuaucuuaggacuucca

SEQ ID NO: 3287643 - RNA, 19 nt, Artificial Sequence
  Description of Artificial Sequence: Synthetic oligonucleotide
aggggggguugaauaaguu

SEQ ID NO: 3287644 - RNA, 19 nt, Artificial Sequence
  Description of Artificial Sequence: Synthetic oligonucleotide
caggggggguugaauaagu

SEQ ID NO: 3287645 - RNA, 19 nt, Artificial Sequence
  Description of Artificial Sequence: Synthetic oligonucleotide
acaggggggguugaauaag

SEQ ID NO: 3287646 - RNA, 19 nt, Artificial Sequence
  Description of Artificial Sequence: Synthetic oligonucleotide
cacaggggggguugaauaa

SEQ ID NO: 3287647 - RNA, 19 nt, Artificial Sequence
  Description of Artificial Sequence: Synthetic oligonucleotide
ccacaggggggguugaaua

SEQ ID NO: 3287648 - RNA, 19 nt, Artificial Sequence
  Description of Artificial Sequence: Synthetic oligonucleotide
gccacaggggggguugaau

SEQ ID NO: 3287649 - RNA, 19 nt, Artificial Sequence
  Description of Artificial Sequence: Synthetic oligonucleotide
ugccacaggggggguugaa

SEQ ID NO: 3287650 - RNA, 19 nt, Artificial Sequence
  Description of Artificial Sequence: Synthetic oligonucleotide
uugccacaggggggguuga

SEQ ID NO: 3287651 - RNA, 19 nt, Artificial Sequence
  Description of Artificial Sequence: Synthetic oligonucleotide
uuugccacaggggggguug

SEQ ID NO: 3287652 - RNA, 19 nt, Artificial Sequence
  Description of Artificial Sequence: Synthetic oligonucleotide
guuugccacaggggggguu

SEQ ID NO: 3287653 - RNA, 19 nt, Artificial Sequence
  Description of Artificial Sequence: Synthetic oligonucleotide
aguguagagguuugccaca

SEQ ID NO: 3287654 - RNA, 19 nt, Artificial Sequence
  Description of Artificial Sequence: Synthetic oligonucleotide
aaguguagagguuugccac

SEQ ID NO: 3287655 - RNA, 19 nt, Artificial Sequence
  Description of Artificial Sequence: Synthetic oligonucleotide
caaguguagagguuugcca

SEQ ID NO: 3287656 - RNA, 19 nt, Artificial Sequence
  Description of Artificial Sequence: Synthetic oligonucleotide
uguuauuaaugcaagugua

SEQ ID NO: 3287657 - RNA, 19 nt, Artificial Sequence
  Description of Artificial Sequence: Synthetic oligonucleotide
guauguuggauguuauuaa

SEQ ID NO: 3287658 - RNA, 19 nt, Artificial Sequence
  Description of Artificial Sequence: Synthetic oligonucleotide
cguauguuggauguuauua

SEQ ID NO: 3287659 - RNA, 19 nt, Artificial Sequence
  Description of Artificial Sequence: Synthetic oligonucleotide
ccguauguuggauguuauu

SEQ ID NO: 3287660 - RNA, 19 nt, Artificial Sequence
  Description of Artificial Sequence: Synthetic oligonucleotide
ucucccguauguuggaugu

SEQ ID NO: 3287661 - RNA, 19 nt, Artificial Sequence
  Description of Artificial Sequence: Synthetic oligonucleotide
cauucucccguauguugga

SEQ ID NO: 3287662 - RNA, 19 nt, Artificial Sequence
  Description of Artificial Sequence: Synthetic oligonucleotide
aagucccacagcacauucu

SEQ ID NO: 3287663 - RNA, 19 nt, Artificial Sequence
  Description of Artificial Sequence: Synthetic oligonucleotide
ucccaaaagucccacagca

SEQ ID NO: 3287664 - RNA, 19 nt, Artificial Sequence
  Description of Artificial Sequence: Synthetic oligonucleotide
guggucccaaaagucccac

SEQ ID NO: 3287665 - RNA, 19 nt, Artificial Sequence
  Description of Artificial Sequence: Synthetic oligonucleotide
ccguggucccaaaaguccc

SEQ ID NO: 3287666 - RNA, 19 nt, Artificial Sequence
  Description of Artificial Sequence: Synthetic oligonucleotide
cccguggucccaaaagucc

SEQ ID NO: 3287667 - RNA, 19 nt, Artificial Sequence
  Description of Artificial Sequence: Synthetic oligonucleotide
ccccguggucccaaaaguc

SEQ ID NO: 3287668 - RNA, 19 nt, Artificial Sequence
  Description of Artificial Sequence: Synthetic oligonucleotide
ucccccguggucccaaaag

SEQ ID NO: 3287669 - RNA, 19 nt, Artificial Sequence
  Description of Artificial Sequence: Synthetic oligonucleotide
aucccccguggucccaaaa

SEQ ID NO: 3287670 - RNA, 19 nt, Artificial Sequence
  Description of Artificial Sequence: Synthetic oligonucleotide
cuaucccccguggucccaa

SEQ ID NO: 3287671 - RNA, 19 nt, Artificial Sequence
  Description of Artificial Sequence: Synthetic oligonucleotide
cacaccuaucccccguggu

SEQ ID NO: 3287672 - RNA, 19 nt, Artificial Sequence
  Description of Artificial Sequence: Synthetic oligonucleotide
ucacaccuaucccccgugg

SEQ ID NO: 3287673 - RNA, 19 nt, Artificial Sequence
  Description of Artificial Sequence: Synthetic oligonucleotide
gguguuauaaauggucaca

SEQ ID NO: 3287674 - RNA, 19 nt, Artificial Sequence
  Description of Artificial Sequence: Synthetic oligonucleotide
ugguguuauaaauggucac

SEQ ID NO: 3287675 - RNA, 19 nt, Artificial Sequence
  Description of Artificial Sequence: Synthetic oligonucleotide
gugguguuauaaaugguca

SEQ ID NO: 3287676 - RNA, 19 nt, Artificial Sequence
  Description of Artificial Sequence: Synthetic oligonucleotide
uugggugguguuauaaaug

SEQ ID NO: 3287677 - RNA, 19 nt, Artificial Sequence
  Description of Artificial Sequence: Synthetic oligonucleotide
gguugggugguguuauaaa

SEQ ID NO: 3287678 - RNA, 19 nt, Artificial Sequence
  Description of Artificial Sequence: Synthetic oligonucleotide
ggguugggugguguuauaa

SEQ ID NO: 3287679 - RNA, 19 nt, Artificial Sequence
  Description of Artificial Sequence: Synthetic oligonucleotide
uucugucuggguugggugg

SEQ ID NO: 3287680 - RNA, 19 nt, Artificial Sequence
  Description of Artificial Sequence: Synthetic oligonucleotide
uuuucugucuggguugggu

SEQ ID NO: 3287681 - RNA, 19 nt, Artificial Sequence
  Description of Artificial Sequence: Synthetic oligonucleotide
gacccagagcucuuuucug

SEQ ID NO: 3287682 - RNA, 19 nt, Artificial Sequence
  Description of Artificial Sequence: Synthetic oligonucleotide
agacccagagcucuuuucu

SEQ ID NO: 3287683 - RNA, 19 nt, Artificial Sequence
  Description of Artificial Sequence: Synthetic oligonucleotide
uuagacccagagcucuuuu

SEQ ID NO: 3287684 - RNA, 19 nt, Artificial Sequence
  Description of Artificial Sequence: Synthetic oligonucleotide
aguauuagacccagagcuc

SEQ ID NO: 3287685 - RNA, 19 nt, Artificial Sequence
  Description of Artificial Sequence: Synthetic oligonucleotide
ccaguauuagacccagagc

SEQ ID NO: 3287686 - RNA, 19 nt, Artificial Sequence
  Description of Artificial Sequence: Synthetic oligonucleotide
cccugccaguauuagaccc

SEQ ID NO: 3287687 - RNA, 19 nt, Artificial Sequence
  Description of Artificial Sequence: Synthetic oligonucleotide
aucccugccaguauuagac

SEQ ID NO: 3287688 - RNA, 19 nt, Artificial Sequence
  Description of Artificial Sequence: Synthetic oligonucleotide
caucccugccaguauuaga

SEQ ID NO: 3287689 - RNA, 19 nt, Artificial Sequence
  Description of Artificial Sequence: Synthetic oligonucleotide
gcacccaucccugccagua

SEQ ID NO: 3287690 - RNA, 19 nt, Artificial Sequence
  Description of Artificial Sequence: Synthetic oligonucleotide
uuccuauggccgcacccau

SEQ ID NO: 3287691 - RNA, 19 nt, Artificial Sequence
  Description of Artificial Sequence: Synthetic oligonucleotide
auuccuauggccgcaccca

SEQ ID NO: 3287692 - RNA, 19 nt, Artificial Sequence
  Description of Artificial Sequence: Synthetic oligonucleotide
cauuccuauggccgcaccc

SEQ ID NO: 3287693 - RNA, 19 nt, Artificial Sequence
  Description of Artificial Sequence: Synthetic oligonucleotide
ucauuccuauggccgcacc

SEQ ID NO: 3287694 - RNA, 19 nt, Artificial Sequence
  Description of Artificial Sequence: Synthetic oligonucleotide
aucauuccuauggccgcac

SEQ ID NO: 3287695 - RNA, 19 nt, Artificial Sequence
  Description of Artificial Sequence: Synthetic oligonucleotide
gaucauuccuauggccgca

SEQ ID NO: 3287696 - RNA, 19 nt, Artificial Sequence
  Description of Artificial Sequence: Synthetic oligonucleotide
ggcgaucauuccuauggcc

SEQ ID NO: 3287697 - RNA, 19 nt, Artificial Sequence
  Description of Artificial Sequence: Synthetic oligonucleotide
gggcgaucauuccuauggc

SEQ ID NO: 3287698 - RNA, 19 nt, Artificial Sequence
  Description of Artificial Sequence: Synthetic oligonucleotide
ggggcgaucauuccuaugg

SEQ ID NO: 3287699 - RNA, 19 nt, Artificial Sequence
  Description of Artificial Sequence: Synthetic oligonucleotide
auggggcgaucauuccuau

SEQ ID NO: 3287700 - RNA, 19 nt, Artificial Sequence
  Description of Artificial Sequence: Synthetic oligonucleotide
cauggggcgaucauuccua

SEQ ID NO: 3287701 - RNA, 19 nt, Artificial Sequence
  Description of Artificial Sequence: Synthetic oligonucleotide
agugaacccuccccauggg

SEQ ID NO: 3287702 - RNA, 19 nt, Artificial Sequence
  Description of Artificial Sequence: Synthetic oligonucleotide
ucaugauaagugaacccuc

SEQ ID NO: 3287703 - RNA, 19 nt, Artificial Sequence
  Description of Artificial Sequence: Synthetic oligonucleotide
aucaugauaagugaacccu

SEQ ID NO: 3287704 - RNA, 19 nt, Artificial Sequence
  Description of Artificial Sequence: Synthetic oligonucleotide
acaucaugauaagugaacc

SEQ ID NO: 3287705 - RNA, 19 nt, Artificial Sequence
  Description of Artificial Sequence: Synthetic oligonucleotide
ugucuauuugucuggagag

SEQ ID NO: 3287706 - RNA, 19 nt, Artificial Sequence
  Description of Artificial Sequence: Synthetic oligonucleotide
gcuauguugucuauuuguc

SEQ ID NO: 3287707 - RNA, 19 nt, Artificial Sequence
  Description of Artificial Sequence: Synthetic oligonucleotide
cucuuagcuauguugucua

SEQ ID NO: 3287708 - RNA, 19 nt, Artificial Sequence
  Description of Artificial Sequence: Synthetic oligonucleotide
acucuuagcuauguugucu

SEQ ID NO: 3287709 - RNA, 19 nt, Artificial Sequence
  Description of Artificial Sequence: Synthetic oligonucleotide
uacucuuagcuauguuguc

SEQ ID NO: 3287710 - RNA, 19 nt, Artificial Sequence
  Description of Artificial Sequence: Synthetic oligonucleotide
guacucuuagcuauguugu

SEQ ID NO: 3287711 - RNA, 19 nt, Artificial Sequence
  Description of Artificial Sequence: Synthetic oligonucleotide
ugguacucuuagcuauguu

SEQ ID NO: 3287712 - RNA, 19 nt, Artificial Sequence
  Description of Artificial Sequence: Synthetic oligonucleotide
cugguacucuuagcuaugu

SEQ ID NO: 3287713 - RNA, 19 nt, Artificial Sequence
  Description of Artificial Sequence: Synthetic oligonucleotide
cucugguacucuuagcuau

SEQ ID NO: 3287714 - RNA, 19 nt, Artificial Sequence
  Description of Artificial Sequence: Synthetic oligonucleotide
ucucugguacucuuagcua

SEQ ID NO: 3287715 - RNA, 19 nt, Artificial Sequence
  Description of Artificial Sequence: Synthetic oligonucleotide
gccuugaguuuagagaugc

SEQ ID NO: 3287716 - RNA, 19 nt, Artificial Sequence
  Description of Artificial Sequence: Synthetic oligonucleotide
ggccuugaguuuagagaug

SEQ ID NO: 3287717 - RNA, 19 nt, Artificial Sequence
  Description of Artificial Sequence: Synthetic oligonucleotide
aggccuugaguuuagagau

SEQ ID NO: 3287718 - RNA, 19 nt, Artificial Sequence
  Description of Artificial Sequence: Synthetic oligonucleotide
gaggccuugaguuuagaga

SEQ ID NO: 3287719 - RNA, 19 nt, Artificial Sequence
  Description of Artificial Sequence: Synthetic oligonucleotide
uggaggccuugaguuuaga

SEQ ID NO: 3287720 - RNA, 19 nt, Artificial Sequence
  Description of Artificial Sequence: Synthetic oligonucleotide
aaucuauggaggccuugag

SEQ ID NO: 3287721 - RNA, 19 nt, Artificial Sequence
  Description of Artificial Sequence: Synthetic oligonucleotide
gaaucuauggaggccuuga

SEQ ID NO: 3287722 - RNA, 19 nt, Artificial Sequence
  Description of Artificial Sequence: Synthetic oligonucleotide
agagaaucuauggaggccu

SEQ ID NO: 3287723 - RNA, 19 nt, Artificial Sequence
  Description of Artificial Sequence: Synthetic oligonucleotide
auuugcuagagaaucuaug

SEQ ID NO: 3287724 - RNA, 19 nt, Artificial Sequence
  Description of Artificial Sequence: Synthetic oligonucleotide
uguuguucaugacuacauu

SEQ ID NO: 3287725 - RNA, 19 nt, Artificial Sequence
  Description of Artificial Sequence: Synthetic oligonucleotide
guaaucuaaggccaaucug

SEQ ID NO: 3287726 - RNA, 19 nt, Artificial Sequence
  Description of Artificial Sequence: Synthetic oligonucleotide
cacccugcucugcuaagag

SEQ ID NO: 3287727 - RNA, 19 nt, Artificial Sequence
  Description of Artificial Sequence: Synthetic oligonucleotide
ccacccugcucugcuaaga

SEQ ID NO: 3287728 - RNA, 19 nt, Artificial Sequence
  Description of Artificial Sequence: Synthetic oligonucleotide
acuccacccugcucugcua

SEQ ID NO: 3287729 - RNA, 19 nt, Artificial Sequence
  Description of Artificial Sequence: Synthetic oligonucleotide
gacuccacccugcucugcu

SEQ ID NO: 3287730 - RNA, 19 nt, Artificial Sequence
  Description of Artificial Sequence: Synthetic oligonucleotide
agacuccacccugcucugc

SEQ ID NO: 3287731 - RNA, 19 nt, Artificial Sequence
  Description of Artificial Sequence: Synthetic oligonucleotide
uuuacugaucacugcacag

SEQ ID NO: 3287732 - RNA, 19 nt, Artificial Sequence
  Description of Artificial Sequence: Synthetic oligonucleotide
auuuacugaucacugcaca

SEQ ID NO: 3287733 - RNA, 19 nt, Artificial Sequence
  Description of Artificial Sequence: Synthetic oligonucleotide
gcaacaggauuuacugauc

SEQ ID NO: 3287734 - RNA, 19 nt, Artificial Sequence
  Description of Artificial Sequence: Synthetic oligonucleotide
uguuauugacauaaaugca

SEQ ID NO: 3287735 - RNA, 19 nt, Artificial Sequence
  Description of Artificial Sequence: Synthetic oligonucleotide
cuguuauugacauaaaugc

SEQ ID NO: 3287736 - RNA, 19 nt, Artificial Sequence
  Description of Artificial Sequence: Synthetic oligonucleotide
ucgccccacuguuauugac

SEQ ID NO: 3287737 - RNA, 19 nt, Artificial Sequence
  Description of Artificial Sequence: Synthetic oligonucleotide
aucgccccacuguuauuga

SEQ ID NO: 3287738 - RNA, 19 nt, Artificial Sequence
  Description of Artificial Sequence: Synthetic oligonucleotide
cuaucgccccacuguuauu

SEQ ID NO: 3287739 - RNA, 19 nt, Artificial Sequence
  Description of Artificial Sequence: Synthetic oligonucleotide
cucuaucgccccacuguua

SEQ ID NO: 3287740 - RNA, 19 nt, Artificial Sequence
  Description of Artificial Sequence: Synthetic oligonucleotide
ccucuaucgccccacuguu

SEQ ID NO: 3287741 - RNA, 19 nt, Artificial Sequence
  Description of Artificial Sequence: Synthetic oligonucleotide
uccucuaucgccccacugu

SEQ ID NO: 3287742 - RNA, 19 nt, Artificial Sequence
  Description of Artificial Sequence: Synthetic oligonucleotide
uauccuccucuaucgcccc

SEQ ID NO: 3287743 - RNA, 19 nt, Artificial Sequence
  Description of Artificial Sequence: Synthetic oligonucleotide
auauccuccucuaucgccc

SEQ ID NO: 3287744 - RNA, 19 nt, Artificial Sequence
  Description of Artificial Sequence: Synthetic oligonucleotide
acguaaccucaucauagau

SEQ ID NO: 3287745 - RNA, 19 nt, Artificial Sequence
  Description of Artificial Sequence: Synthetic oligonucleotide
cacguaaccucaucauaga

SEQ ID NO: 3287746 - RNA, 19 nt, Artificial Sequence
  Description of Artificial Sequence: Synthetic oligonucleotide
ccacguaaccucaucauag

SEQ ID NO: 3287747 - RNA, 19 nt, Artificial Sequence
  Description of Artificial Sequence: Synthetic oligonucleotide
ggagccacguaaccucauc

SEQ ID NO: 3287748 - RNA, 19 nt, Artificial Sequence
  Description of Artificial Sequence: Synthetic oligonucleotide
uauggagccacguaaccuc

SEQ ID NO: 3287749 - RNA, 19 nt, Artificial Sequence
  Description of Artificial Sequence: Synthetic oligonucleotide
uuuccaaaguuauggagcc

SEQ ID NO: 3287750 - RNA, 19 nt, Artificial Sequence
  Description of Artificial Sequence: Synthetic oligonucleotide
cugaaucaccuuuuccaaa

SEQ ID NO: 3287751 - RNA, 19 nt, Artificial Sequence
  Description of Artificial Sequence: Synthetic oligonucleotide
gcugaaucaccuuuuccaa

SEQ ID NO: 3287752 - RNA, 19 nt, Artificial Sequence
  Description of Artificial Sequence: Synthetic oligonucleotide
cucccaaauggacccugcu

SEQ ID NO: 3287753 - RNA, 19 nt, Artificial Sequence
  Description of Artificial Sequence: Synthetic oligonucleotide
gccucccaaauggacccug

SEQ ID NO: 3287754 - RNA, 19 nt, Artificial Sequence
  Description of Artificial Sequence: Synthetic oligonucleotide
agccucccaaauggacccu

SEQ ID NO: 3287755 - RNA, 19 nt, Artificial Sequence
  Description of Artificial Sequence: Synthetic oligonucleotide
cagccucccaaauggaccc

SEQ ID NO: 3287756 - RNA, 19 nt, Artificial Sequence
  Description of Artificial Sequence: Synthetic oligonucleotide
cuucacagccucccaaaug

SEQ ID NO: 3287757 - RNA, 19 nt, Artificial Sequence
  Description of Artificial Sequence: Synthetic oligonucleotide
cagacuucacagccuccca

SEQ ID NO: 3287758 - RNA, 19 nt, Artificial Sequence
  Description of Artificial Sequence: Synthetic oligonucleotide
acaaaccaugugagggagg

SEQ ID NO: 3287759 - RNA, 19 nt, Artificial Sequence
  Description of Artificial Sequence: Synthetic oligonucleotide
agggacaaaccaugugagg

SEQ ID NO: 3287760 - RNA, 19 nt, Artificial Sequence
  Description of Artificial Sequence: Synthetic oligonucleotide
aagggacaaaccaugugag

SEQ ID NO: 3287761 - RNA, 19 nt, Artificial Sequence
  Description of Artificial Sequence: Synthetic oligonucleotide
cuauuaagugcagcugguc

SEQ ID NO: 3287762 - RNA, 19 nt, Artificial Sequence
  Description of Artificial Sequence: Synthetic oligonucleotide
ggcuauuaagugcagcugg

SEQ ID NO: 3287763 - RNA, 19 nt, Artificial Sequence
  Description of Artificial Sequence: Synthetic oligonucleotide
aggcuauuaagugcagcug

SEQ ID NO: 3287764 - RNA, 19 nt, Artificial Sequence
  Description of Artificial Sequence: Synthetic oligonucleotide
caggcuauuaagugcagcu

SEQ ID NO: 3287765 - RNA, 19 nt, Artificial Sequence
  Description of Artificial Sequence: Synthetic oligonucleotide
gcaggcuauuaagugcagc

SEQ ID NO: 3287766 - RNA, 19 nt, Artificial Sequence
  Description of Artificial Sequence: Synthetic oligonucleotide
gaauuauagagacaagggc

SEQ ID NO: 3287767 - RNA, 19 nt, Artificial Sequence
  Description of Artificial Sequence: Synthetic oligonucleotide
ugaauuauagagacaaggg

SEQ ID NO: 3287768 - RNA, 19 nt, Artificial Sequence
  Description of Artificial Sequence: Synthetic oligonucleotide
agacauauuuaauuaguga

SEQ ID NO: 3287769 - RNA, 19 nt, Artificial Sequence
  Description of Artificial Sequence: Synthetic oligonucleotide
ugugaaauugccauauccu

SEQ ID NO: 3287770 - RNA, 19 nt, Artificial Sequence
  Description of Artificial Sequence: Synthetic oligonucleotide
auuuuuaggggcucugugu

SEQ ID NO: 3287771 - RNA, 19 nt, Artificial Sequence
  Description of Artificial Sequence: Synthetic oligonucleotide
cauuuuuaggggcucugug

SEQ ID NO: 3287772 - RNA, 19 nt, Artificial Sequence
  Description of Artificial Sequence: Synthetic oligonucleotide
ggaagauuggaugaucucu

SEQ ID NO: 3287773 - RNA, 19 nt, Artificial Sequence
  Description of Artificial Sequence: Synthetic oligonucleotide
aggaagauuggaugaucuc

SEQ ID NO: 3287774 - RNA, 19 nt, Artificial Sequence
  Description of Artificial Sequence: Synthetic oligonucleotide
aaggaagauuggaugaucu

SEQ ID NO: 3287775 - RNA, 19 nt, Artificial Sequence
  Description of Artificial Sequence: Synthetic oligonucleotide
gcugggaccuccaaggaag

SEQ ID NO: 3287776 - RNA, 19 nt, Artificial Sequence
  Description of Artificial Sequence: Synthetic oligonucleotide
ugcugggaccuccaaggaa

SEQ ID NO: 3287777 - RNA, 19 nt, Artificial Sequence
  Description of Artificial Sequence: Synthetic oligonucleotide
uaggugcugggaccuccaa

SEQ ID NO: 3287778 - RNA, 19 nt, Artificial Sequence
  Description of Artificial Sequence: Synthetic oligonucleotide
ggagauauguacuuguagg

SEQ ID NO: 3287779 - RNA, 19 nt, Artificial Sequence
  Description of Artificial Sequence: Synthetic oligonucleotide
agggagauauguacuugua

SEQ ID NO: 3287780 - RNA, 19 nt, Artificial Sequence
  Description of Artificial Sequence: Synthetic oligonucleotide
uggcauccaagggagauau

SEQ ID NO: 3287781 - RNA, 19 nt, Artificial Sequence
  Description of Artificial Sequence: Synthetic oligonucleotide
gaaucuuugcccacuggca

SEQ ID NO: 3287782 - RNA, 19 nt, Artificial Sequence
  Description of Artificial Sequence: Synthetic oligonucleotide
agaaucuuugcccacuggc

SEQ ID NO: 3287783 - RNA, 19 nt, Artificial Sequence
  Description of Artificial Sequence: Synthetic oligonucleotide
guaguugcagaaucuuugc

SEQ ID NO: 3287784 - RNA, 19 nt, Artificial Sequence
  Description of Artificial Sequence: Synthetic oligonucleotide
ccuccguaguugcagaauc

SEQ ID NO: 3287785 - RNA, 19 nt, Artificial Sequence
  Description of Artificial Sequence: Synthetic oligonucleotide
gcucucugucagggaagga

SEQ ID NO: 3287786 - RNA, 19 nt, Artificial Sequence
  Description of Artificial Sequence: Synthetic oligonucleotide
acgugggacgaagaaguca

SEQ ID NO: 3287787 - RNA, 19 nt, Artificial Sequence
  Description of Artificial Sequence: Synthetic oligonucleotide
ugacgugggacgaagaagu

SEQ ID NO: 3287788 - RNA, 19 nt, Artificial Sequence
  Description of Artificial Sequence: Synthetic oligonucleotide
uccugcugacgugggacga

SEQ ID NO: 3287789 - RNA, 19 nt, Artificial Sequence
  Description of Artificial Sequence: Synthetic oligonucleotide
uuccugcugacgugggacg

SEQ ID NO: 3287790 - RNA, 19 nt, Artificial Sequence
  Description of Artificial Sequence: Synthetic oligonucleotide
cuuccugcugacgugggac

SEQ ID NO: 3287791 - RNA, 19 nt, Artificial Sequence
  Description of Artificial Sequence: Synthetic oligonucleotide
ucuucuguaacuacuuccu

SEQ ID NO: 3287792 - RNA, 19 nt, Artificial Sequence
  Description of Artificial Sequence: Synthetic oligonucleotide
ggucuucuguaacuacuuc

SEQ ID NO: 3287793 - RNA, 19 nt, Artificial Sequence
  Description of Artificial Sequence: Synthetic oligonucleotide
cgucgugggucuucuguaa

SEQ ID NO: 3287794 - RNA, 19 nt, Artificial Sequence
  Description of Artificial Sequence: Synthetic oligonucleotide
ggacgucgugggucuucug

SEQ ID NO: 3287795 - RNA, 19 nt, Artificial Sequence
  Description of Artificial Sequence: Synthetic oligonucleotide
aggacgucgugggucuucu

SEQ ID NO: 3287796 - RNA, 19 nt, Artificial Sequence
  Description of Artificial Sequence: Synthetic oligonucleotide
cauaaggacgucguggguc

SEQ ID NO: 3287797 - RNA, 19 nt, Artificial Sequence
  Description of Artificial Sequence: Synthetic oligonucleotide
ggcauaaggacgucguggg

SEQ ID NO: 3287798 - RNA, 19 nt, Artificial Sequence
  Description of Artificial Sequence: Synthetic oligonucleotide
acccugaaaagcuuugggc

SEQ ID NO: 3287799 - RNA, 19 nt, Artificial Sequence
  Description of Artificial Sequence: Synthetic oligonucleotide
gagacccugaaaagcuuug

SEQ ID NO: 3287800 - RNA, 19 nt, Artificial Sequence
  Description of Artificial Sequence: Synthetic oligonucleotide
aagaguuggagacccugaa

SEQ ID NO: 3287801 - RNA, 19 nt, Artificial Sequence
  Description of Artificial Sequence: Synthetic oligonucleotide
uauucccccucaagaguug

SEQ ID NO: 3287802 - RNA, 19 nt, Artificial Sequence
  Description of Artificial Sequence: Synthetic oligonucleotide
guauucccccucaagaguu

SEQ ID NO: 3287803 - RNA, 19 nt, Artificial Sequence
  Description of Artificial Sequence: Synthetic oligonucleotide
uaacaguauucccccucaa

SEQ ID NO: 3287804 - RNA, 19 nt, Artificial Sequence
  Description of Artificial Sequence: Synthetic oligonucleotide
cuaacaguauucccccuca

SEQ ID NO: 3287805 - RNA, 19 nt, Artificial Sequence
  Description of Artificial Sequence: Synthetic oligonucleotide
ccuaacaguauucccccuc

SEQ ID NO: 3287806 - RNA, 19 nt, Artificial Sequence
  Description of Artificial Sequence: Synthetic oligonucleotide
cccuaacaguauucccccu

SEQ ID NO: 3287807 - RNA, 19 nt, Artificial Sequence
  Description of Artificial Sequence: Synthetic oligonucleotide
acccuaacaguauuccccc

SEQ ID NO: 3287808 - RNA, 19 nt, Artificial Sequence
  Description of Artificial Sequence: Synthetic oligonucleotide
cugccuacccuaacaguau

SEQ ID NO: 3287809 - RNA, 19 nt, Artificial Sequence
  Description of Artificial Sequence: Synthetic oligonucleotide
ccugccuacccuaacagua

SEQ ID NO: 3287810 - RNA, 19 nt, Artificial Sequence
  Description of Artificial Sequence: Synthetic oligonucleotide
gcuaccugccuacccuaac

SEQ ID NO: 3287811 - RNA, 19 nt, Artificial Sequence
  Description of Artificial Sequence: Synthetic oligonucleotide
ggcuaccugccuacccuaa

SEQ ID NO: 3287812 - RNA, 19 nt, Artificial Sequence
  Description of Artificial Sequence: Synthetic oligonucleotide
uggcuaccugccuacccua

SEQ ID NO: 3287813 - RNA, 19 nt, Artificial Sequence
  Description of Artificial Sequence: Synthetic oligonucleotide
ucuggcuaccugccuaccc

SEQ ID NO: 3287814 - RNA, 19 nt, Artificial Sequence
  Description of Artificial Sequence: Synthetic oligonucleotide
ggcugcauuucuaaagauu

SEQ ID NO: 3287815 - RNA, 19 nt, Artificial Sequence
  Description of Artificial Sequence: Synthetic oligonucleotide
gggcugcauuucuaaagau

SEQ ID NO: 3287816 - RNA, 19 nt, Artificial Sequence
  Description of Artificial Sequence: Synthetic oligonucleotide
cgggcugcauuucuaaaga

SEQ ID NO: 3287817 - RNA, 19 nt, Artificial Sequence
  Description of Artificial Sequence: Synthetic oligonucleotide
cagcgggcugcauuucuaa

SEQ ID NO: 3287818 - RNA, 19 nt, Artificial Sequence
  Description of Artificial Sequence: Synthetic oligonucleotide
cguuuccaaggaggccauc

SEQ ID NO: 3287819 - RNA, 19 nt, Artificial Sequence
  Description of Artificial Sequence: Synthetic oligonucleotide
gcguuuccaaggaggccau

SEQ ID NO: 3287820 - RNA, 19 nt, Artificial Sequence
  Description of Artificial Sequence: Synthetic oligonucleotide
gacucagcgugcagcguuu

SEQ ID NO: 3287821 - RNA, 19 nt, Artificial Sequence
  Description of Artificial Sequence: Synthetic oligonucleotide
ugcagccacaaggccaggu

SEQ ID NO: 3287822 - RNA, 19 nt, Artificial Sequence
  Description of Artificial Sequence: Synthetic oligonucleotide
augcagccacaaggccagg

SEQ ID NO: 3287823 - RNA, 19 nt, Artificial Sequence
  Description of Artificial Sequence: Synthetic oligonucleotide
aaugcagccacaaggccag

SEQ ID NO: 3287824 - RNA, 19 nt, Artificial Sequence
  Description of Artificial Sequence: Synthetic oligonucleotide
gaaugcagccacaaggcca

SEQ ID NO: 3287825 - RNA, 19 nt, Artificial Sequence
  Description of Artificial Sequence: Synthetic oligonucleotide
ggaaugcagccacaaggcc

SEQ ID NO: 3287826 - RNA, 19 nt, Artificial Sequence
  Description of Artificial Sequence: Synthetic oligonucleotide
cuggaacagaggaaugcag

SEQ ID NO: 3287827 - RNA, 19 nt, Artificial Sequence
  Description of Artificial Sequence: Synthetic oligonucleotide
uucuggaacagaggaaugc

SEQ ID NO: 3287828 - RNA, 19 nt, Artificial Sequence
  Description of Artificial Sequence: Synthetic oligonucleotide
gccuugauaaguucccuuc

SEQ ID NO: 3287829 - RNA, 19 nt, Artificial Sequence
  Description of Artificial Sequence: Synthetic oligonucleotide
gggccuugauaaguucccu

SEQ ID NO: 3287830 - RNA, 19 nt, Artificial Sequence
  Description of Artificial Sequence: Synthetic oligonucleotide
cucuggcugggccuugaua

SEQ ID NO: 3287831 - RNA, 19 nt, Artificial Sequence
  Description of Artificial Sequence: Synthetic oligonucleotide
uagcuccuaccuugguaac

SEQ ID NO: 3287832 - RNA, 19 nt, Artificial Sequence
  Description of Artificial Sequence: Synthetic oligonucleotide
auagcuccuaccuugguaa

SEQ ID NO: 3287833 - RNA, 19 nt, Artificial Sequence
  Description of Artificial Sequence: Synthetic oligonucleotide
ggaauagcuccuaccuugg

SEQ ID NO: 3287834 - RNA, 19 nt, Artificial Sequence
  Description of Artificial Sequence: Synthetic oligonucleotide
gggaauagcuccuaccuug

SEQ ID NO: 3287835 - RNA, 19 nt, Artificial Sequence
  Description of Artificial Sequence: Synthetic oligonucleotide
uaguggggaauagcuccua

SEQ ID NO: 3287836 - RNA, 19 nt, Artificial Sequence
  Description of Artificial Sequence: Synthetic oligonucleotide
uuaguggggaauagcuccu

SEQ ID NO: 3287837 - RNA, 19 nt, Artificial Sequence
  Description of Artificial Sequence: Synthetic oligonucleotide
ugcuucuuaguggggaaua

SEQ ID NO: 3287838 - RNA, 19 nt, Artificial Sequence
  Description of Artificial Sequence: Synthetic oligonucleotide
aguauacaugcuucuuagu

SEQ ID NO: 3287839 - RNA, 19 nt, Artificial Sequence
  Description of Artificial Sequence: Synthetic oligonucleotide
uauuagagaaguauacaug

SEQ ID NO: 3287840 - RNA, 19 nt, Artificial Sequence
  Description of Artificial Sequence: Synthetic oligonucleotide
uagggugaauuauuagaga

SEQ ID NO: 3287841 - RNA, 19 nt, Artificial Sequence
  Description of Artificial Sequence: Synthetic oligonucleotide
gguauauuagggugaauua

SEQ ID NO: 3287842 - RNA, 19 nt, Artificial Sequence
  Description of Artificial Sequence: Synthetic oligonucleotide
ugguauauuagggugaauu

SEQ ID NO: 3287843 - RNA, 19 nt, Artificial Sequence
  Description of Artificial Sequence: Synthetic oligonucleotide
aaugguauauuagggugaa

SEQ ID NO: 3287844 - RNA, 19 nt, Artificial Sequence
  Description of Artificial Sequence: Synthetic oligonucleotide
aaaugguauauuaggguga

SEQ ID NO: 3287845 - RNA, 19 nt, Artificial Sequence
  Description of Artificial Sequence: Synthetic oligonucleotide
ugugugguuuuuuuauuau

SEQ ID NO: 3287846 - RNA, 19 nt, Artificial Sequence
  Description of Artificial Sequence: Synthetic oligonucleotide
gugugugguuuuuuuauua

SEQ ID NO: 3287847 - RNA, 19 nt, Artificial Sequence
  Description of Artificial Sequence: Synthetic oligonucleotide
aggugugugguuuuuuuau

SEQ ID NO: 3287848 - RNA, 19 nt, Artificial Sequence
  Description of Artificial Sequence: Synthetic oligonucleotide
caggugugugguuuuuuua

SEQ ID NO: 3287849 - RNA, 19 nt, Artificial Sequence
  Description of Artificial Sequence: Synthetic oligonucleotide
acaggugugugguuuuuuu

SEQ ID NO: 3287850 - RNA, 19 nt, Artificial Sequence
  Description of Artificial Sequence: Synthetic oligonucleotide
cacaggugugugguuuuuu

SEQ ID NO: 3287851 - RNA, 19 nt, Artificial Sequence
  Description of Artificial Sequence: Synthetic oligonucleotide
cuccacacagguguguggu

SEQ ID NO: 3287852 - RNA, 19 nt, Artificial Sequence
  Description of Artificial Sequence: Synthetic oligonucleotide
ucuccacacaggugugugg

SEQ ID NO: 3287853 - RNA, 19 nt, Artificial Sequence
  Description of Artificial Sequence: Synthetic oligonucleotide
aucuccacacaggugugug

SEQ ID NO: 3287854 - RNA, 19 nt, Artificial Sequence
  Description of Artificial Sequence: Synthetic oligonucleotide
aaucuccacacaggugugu

SEQ ID NO: 3287855 - RNA, 19 nt, Artificial Sequence
  Description of Artificial Sequence: Synthetic oligonucleotide
aaaucuccacacaggugug

SEQ ID NO: 3287856 - RNA, 19 nt, Artificial Sequence
  Description of Artificial Sequence: Synthetic oligonucleotide
uaaaaaauaaaaucuccac

SEQ ID NO: 3287857 - RNA, 19 nt, Artificial Sequence
  Description of Artificial Sequence: Synthetic oligonucleotide
agucuaacaaggaauuucu

SEQ ID NO: 3287858 - RNA, 19 nt, Artificial Sequence
  Description of Artificial Sequence: Synthetic oligonucleotide
aagucuaacaaggaauuuc

SEQ ID NO: 3287859 - RNA, 19 nt, Artificial Sequence
  Description of Artificial Sequence: Synthetic oligonucleotide
ggaucuaaagucuaacaag

SEQ ID NO: 3287860 - RNA, 19 nt, Artificial Sequence
  Description of Artificial Sequence: Synthetic oligonucleotide
ugugccaugucauuuggau

SEQ ID NO: 3287861 - RNA, 19 nt, Artificial Sequence
  Description of Artificial Sequence: Synthetic oligonucleotide
gaacuggucugggcacaca

SEQ ID NO: 3287862 - RNA, 19 nt, Artificial Sequence
  Description of Artificial Sequence: Synthetic oligonucleotide
ggcguuacuaguaagcaug

SEQ ID NO: 3287863 - RNA, 19 nt, Artificial Sequence
  Description of Artificial Sequence: Synthetic oligonucleotide
gggucaugcaggggcguua

SEQ ID NO: 3287864 - RNA, 19 nt, Artificial Sequence
  Description of Artificial Sequence: Synthetic oligonucleotide
ucaugaaggggucaugcag

SEQ ID NO: 3287865 - RNA, 19 nt, Artificial Sequence
  Description of Artificial Sequence: Synthetic oligonucleotide
uuuacaugauuauucauga

SEQ ID NO: 3287866 - RNA, 19 nt, Artificial Sequence
  Description of Artificial Sequence: Synthetic oligonucleotide
gcuucuuaugagaauuuua

SEQ ID NO: 3287867 - RNA, 19 nt, Artificial Sequence
  Description of Artificial Sequence: Synthetic oligonucleotide
ggagaugcuucuuaugaga

SEQ ID NO: 3287868 - RNA, 19 nt, Artificial Sequence
  Description of Artificial Sequence: Synthetic oligonucleotide
gggagaugcuucuuaugag

SEQ ID NO: 3287869 - RNA, 19 nt, Artificial Sequence
  Description of Artificial Sequence: Synthetic oligonucleotide
cacaccuggcuggggagau

SEQ ID NO: 3287870 - RNA, 19 nt, Artificial Sequence
  Description of Artificial Sequence: Synthetic oligonucleotide
gggccagacuguuaccacu

SEQ ID NO: 3287871 - RNA, 19 nt, Artificial Sequence
  Description of Artificial Sequence: Synthetic oligonucleotide
ggccagacuguuaccacuc

SEQ ID NO: 3287872 - RNA, 19 nt, Artificial Sequence
  Description of Artificial Sequence: Synthetic oligonucleotide
gccagacuguuaccacucc

SEQ ID NO: 3287873 - RNA, 19 nt, Artificial Sequence
  Description of Artificial Sequence: Synthetic oligonucleotide
cagacuguuaccacucccu

SEQ ID NO: 3287874 - RNA, 19 nt, Artificial Sequence
  Description of Artificial Sequence: Synthetic oligonucleotide
gacuguuaccacucccuua

SEQ ID NO: 3287875 - RNA, 19 nt, Artificial Sequence
  Description of Artificial Sequence: Synthetic oligonucleotide
acuguuaccacucccuuaa

SEQ ID NO: 3287876 - RNA, 19 nt, Artificial Sequence
  Description of Artificial Sequence: Synthetic oligonucleotide
cuguuaccacucccuuaag

SEQ ID NO: 3287877 - RNA, 19 nt, Artificial Sequence
  Description of Artificial Sequence: Synthetic oligonucleotide
uguuaccacucccuuaagu

SEQ ID NO: 3287878 - RNA, 19 nt, Artificial Sequence
  Description of Artificial Sequence: Synthetic oligonucleotide
guuaccacucccuuaaguu

SEQ ID NO: 3287879 - RNA, 19 nt, Artificial Sequence
  Description of Artificial Sequence: Synthetic oligonucleotide
accacucccuuaaguuuga

SEQ ID NO: 3287880 - RNA, 19 nt, Artificial Sequence
  Description of Artificial Sequence: Synthetic oligonucleotide
ucccuuaaguuugaccuua

SEQ ID NO: 3287881 - RNA, 19 nt, Artificial Sequence
  Description of Artificial Sequence: Synthetic oligonucleotide
ccuuaaguuugaccuuagg

SEQ ID NO: 3287882 - RNA, 19 nt, Artificial Sequence
  Description of Artificial Sequence: Synthetic oligonucleotide
aaguuugaccuuaggucac

SEQ ID NO: 3287883 - RNA, 19 nt, Artificial Sequence
  Description of Artificial Sequence: Synthetic oligonucleotide
ccuuaggucacuggaaaga

SEQ ID NO: 3287884 - RNA, 19 nt, Artificial Sequence
  Description of Artificial Sequence: Synthetic oligonucleotide
uuaggucacuggaaagaug

SEQ ID NO: 3287885 - RNA, 19 nt, Artificial Sequence
  Description of Artificial Sequence: Synthetic oligonucleotide
uaggucacuggaaagaugu

SEQ ID NO: 3287886 - RNA, 19 nt, Artificial Sequence
  Description of Artificial Sequence: Synthetic oligonucleotide
cuggaaagaugucgagcgg

SEQ ID NO: 3287887 - RNA, 19 nt, Artificial Sequence
  Description of Artificial Sequence: Synthetic oligonucleotide
uggaaagaugucgagcgga

SEQ ID NO: 3287888 - RNA, 19 nt, Artificial Sequence
  Description of Artificial Sequence: Synthetic oligonucleotide
ggaaagaugucgagcggau

SEQ ID NO: 3287889 - RNA, 19 nt, Artificial Sequence
  Description of Artificial Sequence: Synthetic oligonucleotide
aagaugucgagcggaucgc

SEQ ID NO: 3287890 - RNA, 19 nt, Artificial Sequence
  Description of Artificial Sequence: Synthetic oligonucleotide
agaugucgagcggaucgcu

SEQ ID NO: 3287891 - RNA, 19 nt, Artificial Sequence
  Description of Artificial Sequence: Synthetic oligonucleotide
ugucgagcggaucgcucac

SEQ ID NO: 3287892 - RNA, 19 nt, Artificial Sequence
  Description of Artificial Sequence: Synthetic oligonucleotide
agcggaucgcucacaacca

SEQ ID NO: 3287893 - RNA, 19 nt, Artificial Sequence
  Description of Artificial Sequence: Synthetic oligonucleotide
ggaucgcucacaaccaguc

SEQ ID NO: 3287894 - RNA, 19 nt, Artificial Sequence
  Description of Artificial Sequence: Synthetic oligonucleotide
cacaaccagucgguagaug

SEQ ID NO: 3287895 - RNA, 19 nt, Artificial Sequence
  Description of Artificial Sequence: Synthetic oligonucleotide
acaaccagucgguagaugu

SEQ ID NO: 3287896 - RNA, 19 nt, Artificial Sequence
  Description of Artificial Sequence: Synthetic oligonucleotide
caaccagucgguagauguc

SEQ ID NO: 3287897 - RNA, 19 nt, Artificial Sequence
  Description of Artificial Sequence: Synthetic oligonucleotide
augucaagaagagacguug

SEQ ID NO: 3287898 - RNA, 19 nt, Artificial Sequence
  Description of Artificial Sequence: Synthetic oligonucleotide
ugucaagaagagacguugg

SEQ ID NO: 3287899 - RNA, 19 nt, Artificial Sequence
  Description of Artificial Sequence: Synthetic oligonucleotide
ucaagaagagacguugggu

SEQ ID NO: 3287900 - RNA, 19 nt, Artificial Sequence
  Description of Artificial Sequence: Synthetic oligonucleotide
caagaagagacguuggguu

SEQ ID NO: 3287901 - RNA, 19 nt, Artificial Sequence
  Description of Artificial Sequence: Synthetic oligonucleotide
aagaagagacguuggguua

SEQ ID NO: 3287902 - RNA, 19 nt, Artificial Sequence
  Description of Artificial Sequence: Synthetic oligonucleotide
gaagagacguuggguuacc

SEQ ID NO: 3287903 - RNA, 19 nt, Artificial Sequence
  Description of Artificial Sequence: Synthetic oligonucleotide
aagagacguuggguuaccu

SEQ ID NO: 3287904 - RNA, 19 nt, Artificial Sequence
  Description of Artificial Sequence: Synthetic oligonucleotide
agagacguuggguuaccuu

SEQ ID NO: 3287905 - RNA, 19 nt, Artificial Sequence
  Description of Artificial Sequence: Synthetic oligonucleotide
gagacguuggguuaccuuc

SEQ ID NO: 3287906 - RNA, 19 nt, Artificial Sequence
  Description of Artificial Sequence: Synthetic oligonucleotide
agacguuggguuaccuucu

SEQ ID NO: 3287907 - RNA, 19 nt, Artificial Sequence
  Description of Artificial Sequence: Synthetic oligonucleotide
gacguuggguuaccuucug

SEQ ID NO: 3287908 - RNA, 19 nt, Artificial Sequence
  Description of Artificial Sequence: Synthetic oligonucleotide
ggguuaccuucugcucugc

SEQ ID NO: 3287909 - RNA, 19 nt, Artificial Sequence
  Description of Artificial Sequence: Synthetic oligonucleotide
cuucugcucugcagaaugg

SEQ ID NO: 3287910 - RNA, 19 nt, Artificial Sequence
  Description of Artificial Sequence: Synthetic oligonucleotide
gaauggccaaccuuuaacg

SEQ ID NO: 3287911 - RNA, 19 nt, Artificial Sequence
  Description of Artificial Sequence: Synthetic oligonucleotide
aauggccaaccuuuaacgu

SEQ ID NO: 3287912 - RNA, 19 nt, Artificial Sequence
  Description of Artificial Sequence: Synthetic oligonucleotide
auggccaaccuuuaacguc

SEQ ID NO: 3287913 - RNA, 19 nt, Artificial Sequence
  Description of Artificial Sequence: Synthetic oligonucleotide
uggccaaccuuuaacgucg

SEQ ID NO: 3287914 - RNA, 19 nt, Artificial Sequence
  Description of Artificial Sequence: Synthetic oligonucleotide
ggccaaccuuuaacgucgg

SEQ ID NO: 3287915 - RNA, 19 nt, Artificial Sequence
  Description of Artificial Sequence: Synthetic oligonucleotide
gccaaccuuuaacgucgga

SEQ ID NO: 3287916 - RNA, 19 nt, Artificial Sequence
  Description of Artificial Sequence: Synthetic oligonucleotide
ccaaccuuuaacgucggau

SEQ ID NO: 3287917 - RNA, 19 nt, Artificial Sequence
  Description of Artificial Sequence: Synthetic oligonucleotide
caaccuuuaacgucggaug

SEQ ID NO: 3287918 - RNA, 19 nt, Artificial Sequence
  Description of Artificial Sequence: Synthetic oligonucleotide
aaccuuuaacgucggaugg

SEQ ID NO: 3287919 - RNA, 19 nt, Artificial Sequence
  Description of Artificial Sequence: Synthetic oligonucleotide
accuuuaacgucggauggc

SEQ ID NO: 3287920 - RNA, 19 nt, Artificial Sequence
  Description of Artificial Sequence: Synthetic oligonucleotide
uaacgucggauggccgcga

SEQ ID NO: 3287921 - RNA, 19 nt, Artificial Sequence
  Description of Artificial Sequence: Synthetic oligonucleotide
aacgucggauggccgcgag

SEQ ID NO: 3287922 - RNA, 19 nt, Artificial Sequence
  Description of Artificial Sequence: Synthetic oligonucleotide
cgucggauggccgcgagac

SEQ ID NO: 3287923 - RNA, 19 nt, Artificial Sequence
  Description of Artificial Sequence: Synthetic oligonucleotide
gucggauggccgcgagacg

SEQ ID NO: 3287924 - RNA, 19 nt, Artificial Sequence
  Description of Artificial Sequence: Synthetic oligonucleotide
ucggauggccgcgagacgg

SEQ ID NO: 3287925 - RNA, 19 nt, Artificial Sequence
  Description of Artificial Sequence: Synthetic oligonucleotide
uggccgcgagacggcaccu

SEQ ID NO: 3287926 - RNA, 19 nt, Artificial Sequence
  Description of Artificial Sequence: Synthetic oligonucleotide
ggccgcgagacggcaccuu

SEQ ID NO: 3287927 - RNA, 19 nt, Artificial Sequence
  Description of Artificial Sequence: Synthetic oligonucleotide
gccgcgagacggcaccuuu

SEQ ID NO: 3287928 - RNA, 19 nt, Artificial Sequence
  Description of Artificial Sequence: Synthetic oligonucleotide
ccgcgagacggcaccuuua

SEQ ID NO: 3287929 - RNA, 19 nt, Artificial Sequence
  Description of Artificial Sequence: Synthetic oligonucleotide
cgcgagacggcaccuuuaa

SEQ ID NO: 3287930 - RNA, 19 nt, Artificial Sequence
  Description of Artificial Sequence: Synthetic oligonucleotide
gcgagacggcaccuuuaac

SEQ ID NO: 3287931 - RNA, 19 nt, Artificial Sequence
  Description of Artificial Sequence: Synthetic oligonucleotide
gacggcaccuuuaaccgag

SEQ ID NO: 3287932 - RNA, 19 nt, Artificial Sequence
  Description of Artificial Sequence: Synthetic oligonucleotide
gcaccuuuaaccgagaccu

SEQ ID NO: 3287933 - RNA, 19 nt, Artificial Sequence
  Description of Artificial Sequence: Synthetic oligonucleotide
caccuuuaaccgagaccuc

SEQ ID NO: 3287934 - RNA, 19 nt, Artificial Sequence
  Description of Artificial Sequence: Synthetic oligonucleotide
accuuuaaccgagaccuca

SEQ ID NO: 3287935 - RNA, 19 nt, Artificial Sequence
  Description of Artificial Sequence: Synthetic oligonucleotide
aaccgagaccucaucaccc

SEQ ID NO: 3287936 - RNA, 19 nt, Artificial Sequence
  Description of Artificial Sequence: Synthetic oligonucleotide
ccgagaccucaucacccag

SEQ ID NO: 3287937 - RNA, 19 nt, Artificial Sequence
  Description of Artificial Sequence: Synthetic oligonucleotide
gguuaagaucaaggucuuu

SEQ ID NO: 3287938 - RNA, 19 nt, Artificial Sequence
  Description of Artificial Sequence: Synthetic oligonucleotide
aucaaggucuuuucaccug

SEQ ID NO: 3287939 - RNA, 19 nt, Artificial Sequence
  Description of Artificial Sequence: Synthetic oligonucleotide
gucuuuucaccuggcccgc

SEQ ID NO: 3287940 - RNA, 19 nt, Artificial Sequence
  Description of Artificial Sequence: Synthetic oligonucleotide
gcauggacacccagaccag

SEQ ID NO: 3287941 - RNA, 19 nt, Artificial Sequence
  Description of Artificial Sequence: Synthetic oligonucleotide
cauggacacccagaccagg

SEQ ID NO: 3287942 - RNA, 19 nt, Artificial Sequence
  Description of Artificial Sequence: Synthetic oligonucleotide
auggacacccagaccaggu

SEQ ID NO: 3287943 - RNA, 19 nt, Artificial Sequence
  Description of Artificial Sequence: Synthetic oligonucleotide
uggacacccagaccagguc

SEQ ID NO: 3287944 - RNA, 19 nt, Artificial Sequence
  Description of Artificial Sequence: Synthetic oligonucleotide
ggacacccagaccaggucc

SEQ ID NO: 3287945 - RNA, 19 nt, Artificial Sequence
  Description of Artificial Sequence: Synthetic oligonucleotide
agaccagguccccuacauc

SEQ ID NO: 3287946 - RNA, 19 nt, Artificial Sequence
  Description of Artificial Sequence: Synthetic oligonucleotide
agguccccuacaucgugac

SEQ ID NO: 3287947 - RNA, 19 nt, Artificial Sequence
  Description of Artificial Sequence: Synthetic oligonucleotide
guccccuacaucgugaccu

SEQ ID NO: 3287948 - RNA, 19 nt, Artificial Sequence
  Description of Artificial Sequence: Synthetic oligonucleotide
ccuuggcuuuugacccccc

SEQ ID NO: 3287949 - RNA, 19 nt, Artificial Sequence
  Description of Artificial Sequence: Synthetic oligonucleotide
gaccccccucccuggguca

SEQ ID NO: 3287950 - RNA, 19 nt, Artificial Sequence
  Description of Artificial Sequence: Synthetic oligonucleotide
accccccucccugggucaa

SEQ ID NO: 3287951 - RNA, 19 nt, Artificial Sequence
  Description of Artificial Sequence: Synthetic oligonucleotide
ccccccucccugggucaag

SEQ ID NO: 3287952 - RNA, 19 nt, Artificial Sequence
  Description of Artificial Sequence: Synthetic oligonucleotide
cccccucccugggucaagc

SEQ ID NO: 3287953 - RNA, 19 nt, Artificial Sequence
  Description of Artificial Sequence: Synthetic oligonucleotide
ccccucccugggucaagcc

SEQ ID NO: 3287954 - RNA, 19 nt, Artificial Sequence
  Description of Artificial Sequence: Synthetic oligonucleotide
cccucccugggucaagccc

SEQ ID NO: 3287955 - RNA, 19 nt, Artificial Sequence
  Description of Artificial Sequence: Synthetic oligonucleotide
ccucccugggucaagcccu

SEQ ID NO: 3287956 - RNA, 19 nt, Artificial Sequence
  Description of Artificial Sequence: Synthetic oligonucleotide
cccgucucucccccuugaa

SEQ ID NO: 3287957 - RNA, 19 nt, Artificial Sequence
  Description of Artificial Sequence: Synthetic oligonucleotide
cgucucucccccuugaacc

SEQ ID NO: 3287958 - RNA, 19 nt, Artificial Sequence
  Description of Artificial Sequence: Synthetic oligonucleotide
cccccuugaaccuccucgu

SEQ ID NO: 3287959 - RNA, 19 nt, Artificial Sequence
  Description of Artificial Sequence: Synthetic oligonucleotide
ccccuugaaccuccucguu

SEQ ID NO: 3287960 - RNA, 19 nt, Artificial Sequence
  Description of Artificial Sequence: Synthetic oligonucleotide
cuugaaccuccucguucga

SEQ ID NO: 3287961 - RNA, 19 nt, Artificial Sequence
  Description of Artificial Sequence: Synthetic oligonucleotide
uugaaccuccucguucgac

SEQ ID NO: 3287962 - RNA, 19 nt, Artificial Sequence
  Description of Artificial Sequence: Synthetic oligonucleotide
ugaaccuccucguucgacc

SEQ ID NO: 3287963 - RNA, 19 nt, Artificial Sequence
  Description of Artificial Sequence: Synthetic oligonucleotide
gaaccuccucguucgaccc

SEQ ID NO: 3287964 - RNA, 19 nt, Artificial Sequence
  Description of Artificial Sequence: Synthetic oligonucleotide
ccuccucguucgaccccgc

SEQ ID NO: 3287965 - RNA, 19 nt, Artificial Sequence
  Description of Artificial Sequence: Synthetic oligonucleotide
cuccucguucgaccccgcc

SEQ ID NO: 3287966 - RNA, 19 nt, Artificial Sequence
  Description of Artificial Sequence: Synthetic oligonucleotide
ucguucgaccccgccucga

SEQ ID NO: 3287967 - RNA, 19 nt, Artificial Sequence
  Description of Artificial Sequence: Synthetic oligonucleotide
cguucgaccccgccucgau

SEQ ID NO: 3287968 - RNA, 19 nt, Artificial Sequence
  Description of Artificial Sequence: Synthetic oligonucleotide
guucgaccccgccucgauc

SEQ ID NO: 3287969 - RNA, 19 nt, Artificial Sequence
  Description of Artificial Sequence: Synthetic oligonucleotide
uucgaccccgccucgaucc

SEQ ID NO: 3287970 - RNA, 19 nt, Artificial Sequence
  Description of Artificial Sequence: Synthetic oligonucleotide
ucgaccccgccucgauccu

SEQ ID NO: 3287971 - RNA, 19 nt, Artificial Sequence
  Description of Artificial Sequence: Synthetic oligonucleotide
cgaccccgccucgauccuc

SEQ ID NO: 3287972 - RNA, 19 nt, Artificial Sequence
  Description of Artificial Sequence: Synthetic oligonucleotide
cgccucgauccucccuuua

SEQ ID NO: 3287973 - RNA, 19 nt, Artificial Sequence
  Description of Artificial Sequence: Synthetic oligonucleotide
cucgauccucccuuuaucc

SEQ ID NO: 3287974 - RNA, 19 nt, Artificial Sequence
  Description of Artificial Sequence: Synthetic oligonucleotide
ucgauccucccuuuaucca

SEQ ID NO: 3287975 - RNA, 19 nt, Artificial Sequence
  Description of Artificial Sequence: Synthetic oligonucleotide
cgauccucccuuuauccag

SEQ ID NO: 3287976 - RNA, 19 nt, Artificial Sequence
  Description of Artificial Sequence: Synthetic oligonucleotide
uuauccagcccucacuccu

SEQ ID NO: 3287977 - RNA, 19 nt, Artificial Sequence
  Description of Artificial Sequence: Synthetic oligonucleotide
uauccagcccucacuccuu

SEQ ID NO: 3287978 - RNA, 19 nt, Artificial Sequence
  Description of Artificial Sequence: Synthetic oligonucleotide
cacuccuucucuaggcgcc

SEQ ID NO: 3287979 - RNA, 19 nt, Artificial Sequence
  Description of Artificial Sequence: Synthetic oligonucleotide
acuccuucucuaggcgcca

SEQ ID NO: 3287980 - RNA, 19 nt, Artificial Sequence
  Description of Artificial Sequence: Synthetic oligonucleotide
cuccuucucuaggcgccaa

SEQ ID NO: 3287981 - RNA, 19 nt, Artificial Sequence
  Description of Artificial Sequence: Synthetic oligonucleotide
aaccuaaaccucaaguucu

SEQ ID NO: 3287982 - RNA, 19 nt, Artificial Sequence
  Description of Artificial Sequence: Synthetic oligonucleotide
caguggggggccgcucauc

SEQ ID NO: 3287983 - RNA, 19 nt, Artificial Sequence
  Description of Artificial Sequence: Synthetic oligonucleotide
guggggggccgcucaucga

SEQ ID NO: 3287984 - RNA, 19 nt, Artificial Sequence
  Description of Artificial Sequence: Synthetic oligonucleotide
uggggggccgcucaucgac

SEQ ID NO: 3287985 - RNA, 19 nt, Artificial Sequence
  Description of Artificial Sequence: Synthetic oligonucleotide
aucgaccuacuuacagaag

SEQ ID NO: 3287986 - RNA, 19 nt, Artificial Sequence
  Description of Artificial Sequence: Synthetic oligonucleotide
gaagaccccccgccuuaua

SEQ ID NO: 3287987 - RNA, 19 nt, Artificial Sequence
  Description of Artificial Sequence: Synthetic oligonucleotide
agaccccccgccuuauagg

SEQ ID NO: 3287988 - RNA, 19 nt, Artificial Sequence
  Description of Artificial Sequence: Synthetic oligonucleotide
accccccgccuuauaggga

SEQ ID NO: 3287989 - RNA, 19 nt, Artificial Sequence
  Description of Artificial Sequence: Synthetic oligonucleotide
ccccgccuuauagggaccc

SEQ ID NO: 3287990 - RNA, 19 nt, Artificial Sequence
  Description of Artificial Sequence: Synthetic oligonucleotide
uuauagggacccaagacca

SEQ ID NO: 3287991 - RNA, 19 nt, Artificial Sequence
  Description of Artificial Sequence: Synthetic oligonucleotide
uauagggacccaagaccac

SEQ ID NO: 3287992 - RNA, 19 nt, Artificial Sequence
  Description of Artificial Sequence: Synthetic oligonucleotide
ccgacagggacggaaaugg

SEQ ID NO: 3287993 - RNA, 19 nt, Artificial Sequence
  Description of Artificial Sequence: Synthetic oligonucleotide
agaagcgaccccugcggga

SEQ ID NO: 3287994 - RNA, 19 nt, Artificial Sequence
  Description of Artificial Sequence: Synthetic oligonucleotide
caccggaccccuccccaau

SEQ ID NO: 3287995 - RNA, 19 nt, Artificial Sequence
  Description of Artificial Sequence: Synthetic oligonucleotide
cuccccaauggcaucucgc

SEQ ID NO: 3287996 - RNA, 19 nt, Artificial Sequence
  Description of Artificial Sequence: Synthetic oligonucleotide
caauggcaucucgccuacg

SEQ ID NO: 3287997 - RNA, 19 nt, Artificial Sequence
  Description of Artificial Sequence: Synthetic oligonucleotide
aauggcaucucgccuacgu

SEQ ID NO: 3287998 - RNA, 19 nt, Artificial Sequence
  Description of Artificial Sequence: Synthetic oligonucleotide
ggcaucucgccuacguggg

SEQ ID NO: 3287999 - RNA, 19 nt, Artificial Sequence
  Description of Artificial Sequence: Synthetic oligonucleotide
gcaucucgccuacguggga

SEQ ID NO: 3288000 - RNA, 19 nt, Artificial Sequence
  Description of Artificial Sequence: Synthetic oligonucleotide
caucucgccuacgugggag

SEQ ID NO: 3288001 - RNA, 19 nt, Artificial Sequence
  Description of Artificial Sequence: Synthetic oligonucleotide
ucgccuacgugggagacgg

SEQ ID NO: 3288002 - RNA, 19 nt, Artificial Sequence
  Description of Artificial Sequence: Synthetic oligonucleotide
gccuacgugggagacggga

SEQ ID NO: 3288003 - RNA, 19 nt, Artificial Sequence
  Description of Artificial Sequence: Synthetic oligonucleotide
ccuacgugggagacgggag

SEQ ID NO: 3288004 - RNA, 19 nt, Artificial Sequence
  Description of Artificial Sequence: Synthetic oligonucleotide
cuacgugggagacgggagc

SEQ ID NO: 3288005 - RNA, 19 nt, Artificial Sequence
  Description of Artificial Sequence: Synthetic oligonucleotide
uacgugggagacgggagcc

SEQ ID NO: 3288006 - RNA, 19 nt, Artificial Sequence
  Description of Artificial Sequence: Synthetic oligonucleotide
acgugggagacgggagccc

SEQ ID NO: 3288007 - RNA, 19 nt, Artificial Sequence
  Description of Artificial Sequence: Synthetic oligonucleotide
guggccgacuccacuaccu

SEQ ID NO: 3288008 - RNA, 19 nt, Artificial Sequence
  Description of Artificial Sequence: Synthetic oligonucleotide
gccgacuccacuaccucgc

SEQ ID NO: 3288009 - RNA, 19 nt, Artificial Sequence
  Description of Artificial Sequence: Synthetic oligonucleotide
ccgacuccacuaccucgca

SEQ ID NO: 3288010 - RNA, 19 nt, Artificial Sequence
  Description of Artificial Sequence: Synthetic oligonucleotide
gacuccacuaccucgcagg

SEQ ID NO: 3288011 - RNA, 19 nt, Artificial Sequence
  Description of Artificial Sequence: Synthetic oligonucleotide
acuccacuaccucgcaggc

SEQ ID NO: 3288012 - RNA, 19 nt, Artificial Sequence
  Description of Artificial Sequence: Synthetic oligonucleotide
cauucccccuccgcgcagg

SEQ ID NO: 3288013 - RNA, 19 nt, Artificial Sequence
  Description of Artificial Sequence: Synthetic oligonucleotide
aacggacagcuucaauacu

SEQ ID NO: 3288014 - RNA, 19 nt, Artificial Sequence
  Description of Artificial Sequence: Synthetic oligonucleotide
acggacagcuucaauacug

SEQ ID NO: 3288015 - RNA, 19 nt, Artificial Sequence
  Description of Artificial Sequence: Synthetic oligonucleotide
gacagcuucaauacuggcc

SEQ ID NO: 3288016 - RNA, 19 nt, Artificial Sequence
  Description of Artificial Sequence: Synthetic oligonucleotide
cucuucugaccuuuacaac

SEQ ID NO: 3288017 - RNA, 19 nt, Artificial Sequence
  Description of Artificial Sequence: Synthetic oligonucleotide
cuucugaccuuuacaacug

SEQ ID NO: 3288018 - RNA, 19 nt, Artificial Sequence
  Description of Artificial Sequence: Synthetic oligonucleotide
uucugaccuuuacaacugg

SEQ ID NO: 3288019 - RNA, 19 nt, Artificial Sequence
  Description of Artificial Sequence: Synthetic oligonucleotide
aacuggaaaaauaauaacc

SEQ ID NO: 3288020 - RNA, 19 nt, Artificial Sequence
  Description of Artificial Sequence: Synthetic oligonucleotide
cuucuuuuucugaagaucc

SEQ ID NO: 3288021 - RNA, 19 nt, Artificial Sequence
  Description of Artificial Sequence: Synthetic oligonucleotide
uucuuuuucugaagaucca

SEQ ID NO: 3288022 - RNA, 19 nt, Artificial Sequence
  Description of Artificial Sequence: Synthetic oligonucleotide
gaagauccagguaaacuga

SEQ ID NO: 3288023 - RNA, 19 nt, Artificial Sequence
  Description of Artificial Sequence: Synthetic oligonucleotide
auccagguaaacugacagc

SEQ ID NO: 3288024 - RNA, 19 nt, Artificial Sequence
  Description of Artificial Sequence: Synthetic oligonucleotide
acugacagcucugaucgag

SEQ ID NO: 3288025 - RNA, 19 nt, Artificial Sequence
  Description of Artificial Sequence: Synthetic oligonucleotide
cugacagcucugaucgagu

SEQ ID NO: 3288026 - RNA, 19 nt, Artificial Sequence
  Description of Artificial Sequence: Synthetic oligonucleotide
ugacagcucugaucgaguc

SEQ ID NO: 3288027 - RNA, 19 nt, Artificial Sequence
  Description of Artificial Sequence: Synthetic oligonucleotide
ucgagucuguucucaucac

SEQ ID NO: 3288028 - RNA, 19 nt, Artificial Sequence
  Description of Artificial Sequence: Synthetic oligonucleotide
cgagucuguucucaucacc

SEQ ID NO: 3288029 - RNA, 19 nt, Artificial Sequence
  Description of Artificial Sequence: Synthetic oligonucleotide
gagucuguucucaucaccc

SEQ ID NO: 3288030 - RNA, 19 nt, Artificial Sequence
  Description of Artificial Sequence: Synthetic oligonucleotide
agucuguucucaucaccca

SEQ ID NO: 3288031 - RNA, 19 nt, Artificial Sequence
  Description of Artificial Sequence: Synthetic oligonucleotide
gucuguucucaucacccau

SEQ ID NO: 3288032 - RNA, 19 nt, Artificial Sequence
  Description of Artificial Sequence: Synthetic oligonucleotide
ucuguucucaucacccauc

SEQ ID NO: 3288033 - RNA, 19 nt, Artificial Sequence
  Description of Artificial Sequence: Synthetic oligonucleotide
agaagaaaaacaacgggug

SEQ ID NO: 3288034 - RNA, 19 nt, Artificial Sequence
  Description of Artificial Sequence: Synthetic oligonucleotide
gaagaaaaacaacgggugc

SEQ ID NO: 3288035 - RNA, 19 nt, Artificial Sequence
  Description of Artificial Sequence: Synthetic oligonucleotide
acaacgggugcucuuagag

SEQ ID NO: 3288036 - RNA, 19 nt, Artificial Sequence
  Description of Artificial Sequence: Synthetic oligonucleotide
aacgggugcucuuagaggc

SEQ ID NO: 3288037 - RNA, 19 nt, Artificial Sequence
  Description of Artificial Sequence: Synthetic oligonucleotide
uagaaaggcggugcggggc

SEQ ID NO: 3288038 - RNA, 19 nt, Artificial Sequence
  Description of Artificial Sequence: Synthetic oligonucleotide
agaaaggcggugcggggcg

SEQ ID NO: 3288039 - RNA, 19 nt, Artificial Sequence
  Description of Artificial Sequence: Synthetic oligonucleotide
aaggcggugcggggcgaug

SEQ ID NO: 3288040 - RNA, 19 nt, Artificial Sequence
  Description of Artificial Sequence: Synthetic oligonucleotide
aggcggugcggggcgauga

SEQ ID NO: 3288041 - RNA, 19 nt, Artificial Sequence
  Description of Artificial Sequence: Synthetic oligonucleotide
gcggugcggggcgaugaug

SEQ ID NO: 3288042 - RNA, 19 nt, Artificial Sequence
  Description of Artificial Sequence: Synthetic oligonucleotide
cggugcggggcgaugaugg

SEQ ID NO: 3288043 - RNA, 19 nt, Artificial Sequence
  Description of Artificial Sequence: Synthetic oligonucleotide
ggugcggggcgaugauggg

SEQ ID NO: 3288044 - RNA, 19 nt, Artificial Sequence
  Description of Artificial Sequence: Synthetic oligonucleotide
augggcgccccacucaacu

SEQ ID NO: 3288045 - RNA, 19 nt, Artificial Sequence
  Description of Artificial Sequence: Synthetic oligonucleotide
cgccccacucaacugccca

SEQ ID NO: 3288046 - RNA, 19 nt, Artificial Sequence
  Description of Artificial Sequence: Synthetic oligonucleotide
acucaacugcccaaugaag

SEQ ID NO: 3288047 - RNA, 19 nt, Artificial Sequence
  Description of Artificial Sequence: Synthetic oligonucleotide
aacugcccaaugaagucga

SEQ ID NO: 3288048 - RNA, 19 nt, Artificial Sequence
  Description of Artificial Sequence: Synthetic oligonucleotide
acugcccaaugaagucgau

SEQ ID NO: 3288049 - RNA, 19 nt, Artificial Sequence
  Description of Artificial Sequence: Synthetic oligonucleotide
cugcccaaugaagucgaug

SEQ ID NO: 3288050 - RNA, 19 nt, Artificial Sequence
  Description of Artificial Sequence: Synthetic oligonucleotide
ccaaugaagucgaugccgc

SEQ ID NO: 3288051 - RNA, 19 nt, Artificial Sequence
  Description of Artificial Sequence: Synthetic oligonucleotide
caaugaagucgaugccgcu

SEQ ID NO: 3288052 - RNA, 19 nt, Artificial Sequence
  Description of Artificial Sequence: Synthetic oligonucleotide
aaugaagucgaugccgcuu

SEQ ID NO: 3288053 - RNA, 19 nt, Artificial Sequence
  Description of Artificial Sequence: Synthetic oligonucleotide
augaagucgaugccgcuuu

SEQ ID NO: 3288054 - RNA, 19 nt, Artificial Sequence
  Description of Artificial Sequence: Synthetic oligonucleotide
ugccgcuuuuccccucgag

SEQ ID NO: 3288055 - RNA, 19 nt, Artificial Sequence
  Description of Artificial Sequence: Synthetic oligonucleotide
gccgcuuuuccccucgagc

SEQ ID NO: 3288056 - RNA, 19 nt, Artificial Sequence
  Description of Artificial Sequence: Synthetic oligonucleotide
ccgcuuuuccccucgagcg

SEQ ID NO: 3288057 - RNA, 19 nt, Artificial Sequence
  Description of Artificial Sequence: Synthetic oligonucleotide
gcuuuuccccucgagcgcc

SEQ ID NO: 3288058 - RNA, 19 nt, Artificial Sequence
  Description of Artificial Sequence: Synthetic oligonucleotide
uuuuccccucgagcgccca

SEQ ID NO: 3288059 - RNA, 19 nt, Artificial Sequence
  Description of Artificial Sequence: Synthetic oligonucleotide
uuuccccucgagcgcccag

SEQ ID NO: 3288060 - RNA, 19 nt, Artificial Sequence
  Description of Artificial Sequence: Synthetic oligonucleotide
gagcgcccagacugggauu

SEQ ID NO: 3288061 - RNA, 19 nt, Artificial Sequence
  Description of Artificial Sequence: Synthetic oligonucleotide
agcgcccagacugggauua

SEQ ID NO: 3288062 - RNA, 19 nt, Artificial Sequence
  Description of Artificial Sequence: Synthetic oligonucleotide
cgcccagacugggauuaca

SEQ ID NO: 3288063 - RNA, 19 nt, Artificial Sequence
  Description of Artificial Sequence: Synthetic oligonucleotide
cccagacugggauuacacc

SEQ ID NO: 3288064 - RNA, 19 nt, Artificial Sequence
  Description of Artificial Sequence: Synthetic oligonucleotide
aagguaaaaggaauaacac

SEQ ID NO: 3288065 - RNA, 19 nt, Artificial Sequence
  Description of Artificial Sequence: Synthetic oligonucleotide
aagggcccaaugagucucc

SEQ ID NO: 3288066 - RNA, 19 nt, Artificial Sequence
  Description of Artificial Sequence: Synthetic oligonucleotide
ccaaugagucucccucggc

SEQ ID NO: 3288067 - RNA, 19 nt, Artificial Sequence
  Description of Artificial Sequence: Synthetic oligonucleotide
cggccuuccuagagagacu

SEQ ID NO: 3288068 - RNA, 19 nt, Artificial Sequence
  Description of Artificial Sequence: Synthetic oligonucleotide
ggccuuccuagagagacuu

SEQ ID NO: 3288069 - RNA, 19 nt, Artificial Sequence
  Description of Artificial Sequence: Synthetic oligonucleotide
gccuuccuagagagacuua

SEQ ID NO: 3288070 - RNA, 19 nt, Artificial Sequence
  Description of Artificial Sequence: Synthetic oligonucleotide
ccuuccuagagagacuuaa

SEQ ID NO: 3288071 - RNA, 19 nt, Artificial Sequence
  Description of Artificial Sequence: Synthetic oligonucleotide
cuuccuagagagacuuaag

SEQ ID NO: 3288072 - RNA, 19 nt, Artificial Sequence
  Description of Artificial Sequence: Synthetic oligonucleotide
uuccuagagagacuuaagg

SEQ ID NO: 3288073 - RNA, 19 nt, Artificial Sequence
  Description of Artificial Sequence: Synthetic oligonucleotide
uuaaggaagccuaucgcag

SEQ ID NO: 3288074 - RNA, 19 nt, Artificial Sequence
  Description of Artificial Sequence: Synthetic oligonucleotide
uaaggaagccuaucgcagg

SEQ ID NO: 3288075 - RNA, 19 nt, Artificial Sequence
  Description of Artificial Sequence: Synthetic oligonucleotide
ugccccagacauugggaga

SEQ ID NO: 3288076 - RNA, 19 nt, Artificial Sequence
  Description of Artificial Sequence: Synthetic oligonucleotide
gccccagacauugggagaa

SEQ ID NO: 3288077 - RNA, 19 nt, Artificial Sequence
  Description of Artificial Sequence: Synthetic oligonucleotide
uugggagaaaguuagagag

SEQ ID NO: 3288078 - RNA, 19 nt, Artificial Sequence
  Description of Artificial Sequence: Synthetic oligonucleotide
ugggagaaaguuagagagg

SEQ ID NO: 3288079 - RNA, 19 nt, Artificial Sequence
  Description of Artificial Sequence: Synthetic oligonucleotide
gagaaaguuagagagguua

SEQ ID NO: 3288080 - RNA, 19 nt, Artificial Sequence
  Description of Artificial Sequence: Synthetic oligonucleotide
aaguuagagagguuagaag

SEQ ID NO: 3288081 - RNA, 19 nt, Artificial Sequence
  Description of Artificial Sequence: Synthetic oligonucleotide
aguuagagagguuagaaga

SEQ ID NO: 3288082 - RNA, 19 nt, Artificial Sequence
  Description of Artificial Sequence: Synthetic oligonucleotide
guuagagagguuagaagau

SEQ ID NO: 3288083 - RNA, 19 nt, Artificial Sequence
  Description of Artificial Sequence: Synthetic oligonucleotide
uuagagagguuagaagauu

SEQ ID NO: 3288084 - RNA, 19 nt, Artificial Sequence
  Description of Artificial Sequence: Synthetic oligonucleotide
uagagagguuagaagauuu

SEQ ID NO: 3288085 - RNA, 19 nt, Artificial Sequence
  Description of Artificial Sequence: Synthetic oligonucleotide
gagagguuagaagauuuaa

SEQ ID NO: 3288086 - RNA, 19 nt, Artificial Sequence
  Description of Artificial Sequence: Synthetic oligonucleotide
uuuaaaaaacaagacgcuu

SEQ ID NO: 3288087 - RNA, 19 nt, Artificial Sequence
  Description of Artificial Sequence: Synthetic oligonucleotide
aaaaaacaagacgcuugga

SEQ ID NO: 3288088 - RNA, 19 nt, Artificial Sequence
  Description of Artificial Sequence: Synthetic oligonucleotide
uggagauuugguuagagag

SEQ ID NO: 3288089 - RNA, 19 nt, Artificial Sequence
  Description of Artificial Sequence: Synthetic oligonucleotide
gauuugguuagagaggcag

SEQ ID NO: 3288090 - RNA, 19 nt, Artificial Sequence
  Description of Artificial Sequence: Synthetic oligonucleotide
agaaagaaagagaucguag

SEQ ID NO: 3288091 - RNA, 19 nt, Artificial Sequence
  Description of Artificial Sequence: Synthetic oligonucleotide
agaaagagaucguaggaga

SEQ ID NO: 3288092 - RNA, 19 nt, Artificial Sequence
  Description of Artificial Sequence: Synthetic oligonucleotide
gaaagagaucguaggagac

SEQ ID NO: 3288093 - RNA, 19 nt, Artificial Sequence
  Description of Artificial Sequence: Synthetic oligonucleotide
aaagagaucguaggagaca

SEQ ID NO: 3288094 - RNA, 19 nt, Artificial Sequence
  Description of Artificial Sequence: Synthetic oligonucleotide
agagaucguaggagacaua

SEQ ID NO: 3288095 - RNA, 19 nt, Artificial Sequence
  Description of Artificial Sequence: Synthetic oligonucleotide
gagaucguaggagacauag

SEQ ID NO: 3288096 - RNA, 19 nt, Artificial Sequence
  Description of Artificial Sequence: Synthetic oligonucleotide
acagggaggagaacgaagg

SEQ ID NO: 3288097 - RNA, 19 nt, Artificial Sequence
  Description of Artificial Sequence: Synthetic oligonucleotide
aacgaaggaggucccaacu

SEQ ID NO: 3288098 - RNA, 19 nt, Artificial Sequence
  Description of Artificial Sequence: Synthetic oligonucleotide
ggaggucccaacucgaucg

SEQ ID NO: 3288099 - RNA, 19 nt, Artificial Sequence
  Description of Artificial Sequence: Synthetic oligonucleotide
aggucccaacucgaucgcg

SEQ ID NO: 3288100 - RNA, 19 nt, Artificial Sequence
  Description of Artificial Sequence: Synthetic oligonucleotide
ggucccaacucgaucgcga

SEQ ID NO: 3288101 - RNA, 19 nt, Artificial Sequence
  Description of Artificial Sequence: Synthetic oligonucleotide
gucccaacucgaucgcgac

SEQ ID NO: 3288102 - RNA, 19 nt, Artificial Sequence
  Description of Artificial Sequence: Synthetic oligonucleotide
ucccaacucgaucgcgacc

SEQ ID NO: 3288103 - RNA, 19 nt, Artificial Sequence
  Description of Artificial Sequence: Synthetic oligonucleotide
cccaacucgaucgcgacca

SEQ ID NO: 3288104 - RNA, 19 nt, Artificial Sequence
  Description of Artificial Sequence: Synthetic oligonucleotide
ccaacucgaucgcgaccag

SEQ ID NO: 3288105 - RNA, 19 nt, Artificial Sequence
  Description of Artificial Sequence: Synthetic oligonucleotide
caacucgaucgcgaccagu

SEQ ID NO: 3288106 - RNA, 19 nt, Artificial Sequence
  Description of Artificial Sequence: Synthetic oligonucleotide
aacucgaucgcgaccagug

SEQ ID NO: 3288107 - RNA, 19 nt, Artificial Sequence
  Description of Artificial Sequence: Synthetic oligonucleotide
acucgaucgcgaccagugu

SEQ ID NO: 3288108 - RNA, 19 nt, Artificial Sequence
  Description of Artificial Sequence: Synthetic oligonucleotide
aggggcacugggcuaaaga

SEQ ID NO: 3288109 - RNA, 19 nt, Artificial Sequence
  Description of Artificial Sequence: Synthetic oligonucleotide
gcacugggcuaaagauugu

SEQ ID NO: 3288110 - RNA, 19 nt, Artificial Sequence
  Description of Artificial Sequence: Synthetic oligonucleotide
cacugggcuaaagauuguc

SEQ ID NO: 3288111 - RNA, 19 nt, Artificial Sequence
  Description of Artificial Sequence: Synthetic oligonucleotide
acugggcuaaagauugucc

SEQ ID NO: 3288112 - RNA, 19 nt, Artificial Sequence
  Description of Artificial Sequence: Synthetic oligonucleotide
cugggcuaaagauuguccc

SEQ ID NO: 3288113 - RNA, 19 nt, Artificial Sequence
  Description of Artificial Sequence: Synthetic oligonucleotide
uugucccaagaaaccacga

SEQ ID NO: 3288114 - RNA, 19 nt, Artificial Sequence
  Description of Artificial Sequence: Synthetic oligonucleotide
gucccaagaaaccacgagg

SEQ ID NO: 3288115 - RNA, 19 nt, Artificial Sequence
  Description of Artificial Sequence: Synthetic oligonucleotide
cucggggaccaagacccca

SEQ ID NO: 3288116 - RNA, 19 nt, Artificial Sequence
  Description of Artificial Sequence: Synthetic oligonucleotide
cggggaccaagaccccaga

SEQ ID NO: 3288117 - RNA, 19 nt, Artificial Sequence
  Description of Artificial Sequence: Synthetic oligonucleotide
cuccugacccuagaugacu

SEQ ID NO: 3288118 - RNA, 19 nt, Artificial Sequence
  Description of Artificial Sequence: Synthetic oligonucleotide
uccugacccuagaugacua

SEQ ID NO: 3288119 - RNA, 19 nt, Artificial Sequence
  Description of Artificial Sequence: Synthetic oligonucleotide
agugguaacagucuggccc

SEQ ID NO: 3288120 - RNA, 19 nt, Artificial Sequence
  Description of Artificial Sequence: Synthetic oligonucleotide
gagugguaacagucuggcc

SEQ ID NO: 3288121 - RNA, 19 nt, Artificial Sequence
  Description of Artificial Sequence: Synthetic oligonucleotide
ggagugguaacagucuggc

SEQ ID NO: 3288122 - RNA, 19 nt, Artificial Sequence
  Description of Artificial Sequence: Synthetic oligonucleotide
agggagugguaacagucug

SEQ ID NO: 3288123 - RNA, 19 nt, Artificial Sequence
  Description of Artificial Sequence: Synthetic oligonucleotide
uaagggagugguaacaguc

SEQ ID NO: 3288124 - RNA, 19 nt, Artificial Sequence
  Description of Artificial Sequence: Synthetic oligonucleotide
uuaagggagugguaacagu

SEQ ID NO: 3288125 - RNA, 19 nt, Artificial Sequence
  Description of Artificial Sequence: Synthetic oligonucleotide
cuuaagggagugguaacag

SEQ ID NO: 3288126 - RNA, 19 nt, Artificial Sequence
  Description of Artificial Sequence: Synthetic oligonucleotide
acuuaagggagugguaaca

SEQ ID NO: 3288127 - RNA, 19 nt, Artificial Sequence
  Description of Artificial Sequence: Synthetic oligonucleotide
aacuuaagggagugguaac

SEQ ID NO: 3288128 - RNA, 19 nt, Artificial Sequence
  Description of Artificial Sequence: Synthetic oligonucleotide
ucaaacuuaagggaguggu

SEQ ID NO: 3288129 - RNA, 19 nt, Artificial Sequence
  Description of Artificial Sequence: Synthetic oligonucleotide
uaaggucaaacuuaaggga

SEQ ID NO: 3288130 - RNA, 19 nt, Artificial Sequence
  Description of Artificial Sequence: Synthetic oligonucleotide
ccuaaggucaaacuuaagg

SEQ ID NO: 3288131 - RNA, 19 nt, Artificial Sequence
  Description of Artificial Sequence: Synthetic oligonucleotide
gugaccuaaggucaaacuu

SEQ ID NO: 3288132 - RNA, 19 nt, Artificial Sequence
  Description of Artificial Sequence: Synthetic oligonucleotide
ucuuuccagugaccuaagg

SEQ ID NO: 3288133 - RNA, 19 nt, Artificial Sequence
  Description of Artificial Sequence: Synthetic oligonucleotide
caucuuuccagugaccuaa

SEQ ID NO: 3288134 - RNA, 19 nt, Artificial Sequence
  Description of Artificial Sequence: Synthetic oligonucleotide
acaucuuuccagugaccua

SEQ ID NO: 3288135 - RNA, 19 nt, Artificial Sequence
  Description of Artificial Sequence: Synthetic oligonucleotide
ccgcucgacaucuuuccag

SEQ ID NO: 3288136 - RNA, 19 nt, Artificial Sequence
  Description of Artificial Sequence: Synthetic oligonucleotide
uccgcucgacaucuuucca

SEQ ID NO: 3288137 - RNA, 19 nt, Artificial Sequence
  Description of Artificial Sequence: Synthetic oligonucleotide
auccgcucgacaucuuucc

SEQ ID NO: 3288138 - RNA, 19 nt, Artificial Sequence
  Description of Artificial Sequence: Synthetic oligonucleotide
gcgauccgcucgacaucuu

SEQ ID NO: 3288139 - RNA, 19 nt, Artificial Sequence
  Description of Artificial Sequence: Synthetic oligonucleotide
agcgauccgcucgacaucu

SEQ ID NO: 3288140 - RNA, 19 nt, Artificial Sequence
  Description of Artificial Sequence: Synthetic oligonucleotide
gugagcgauccgcucgaca

SEQ ID NO: 3288141 - RNA, 19 nt, Artificial Sequence
  Description of Artificial Sequence: Synthetic oligonucleotide
ugguugugagcgauccgcu

SEQ ID NO: 3288142 - RNA, 19 nt, Artificial Sequence
  Description of Artificial Sequence: Synthetic oligonucleotide
gacugguugugagcgaucc

SEQ ID NO: 3288143 - RNA, 19 nt, Artificial Sequence
  Description of Artificial Sequence: Synthetic oligonucleotide
caucuaccgacugguugug

SEQ ID NO: 3288144 - RNA, 19 nt, Artificial Sequence
  Description of Artificial Sequence: Synthetic oligonucleotide
acaucuaccgacugguugu

SEQ ID NO: 3288145 - RNA, 19 nt, Artificial Sequence
  Description of Artificial Sequence: Synthetic oligonucleotide
gacaucuaccgacugguug

SEQ ID NO: 3288146 - RNA, 19 nt, Artificial Sequence
  Description of Artificial Sequence: Synthetic oligonucleotide
caacgucucuucuugacau

SEQ ID NO: 3288147 - RNA, 19 nt, Artificial Sequence
  Description of Artificial Sequence: Synthetic oligonucleotide
ccaacgucucuucuugaca

SEQ ID NO: 3288148 - RNA, 19 nt, Artificial Sequence
  Description of Artificial Sequence: Synthetic oligonucleotide
acccaacgucucuucuuga

SEQ ID NO: 3288149 - RNA, 19 nt, Artificial Sequence
  Description of Artificial Sequence: Synthetic oligonucleotide
aacccaacgucucuucuug

SEQ ID NO: 3288150 - RNA, 19 nt, Artificial Sequence
  Description of Artificial Sequence: Synthetic oligonucleotide
uaacccaacgucucuucuu

SEQ ID NO: 3288151 - RNA, 19 nt, Artificial Sequence
  Description of Artificial Sequence: Synthetic oligonucleotide
gguaacccaacgucucuuc

SEQ ID NO: 3288152 - RNA, 19 nt, Artificial Sequence
  Description of Artificial Sequence: Synthetic oligonucleotide
agguaacccaacgucucuu

SEQ ID NO: 3288153 - RNA, 19 nt, Artificial Sequence
  Description of Artificial Sequence: Synthetic oligonucleotide
aagguaacccaacgucucu

SEQ ID NO: 3288154 - RNA, 19 nt, Artificial Sequence
  Description of Artificial Sequence: Synthetic oligonucleotide
gaagguaacccaacgucuc

SEQ ID NO: 3288155 - RNA, 19 nt, Artificial Sequence
  Description of Artificial Sequence: Synthetic oligonucleotide
agaagguaacccaacgucu

SEQ ID NO: 3288156 - RNA, 19 nt, Artificial Sequence
  Description of Artificial Sequence: Synthetic oligonucleotide
cagaagguaacccaacguc

SEQ ID NO: 3288157 - RNA, 19 nt, Artificial Sequence
  Description of Artificial Sequence: Synthetic oligonucleotide
gcagagcagaagguaaccc

SEQ ID NO: 3288158 - RNA, 19 nt, Artificial Sequence
  Description of Artificial Sequence: Synthetic oligonucleotide
ccauucugcagagcagaag

SEQ ID NO: 3288159 - RNA, 19 nt, Artificial Sequence
  Description of Artificial Sequence: Synthetic oligonucleotide
cguuaaagguuggccauuc

SEQ ID NO: 3288160 - RNA, 19 nt, Artificial Sequence
  Description of Artificial Sequence: Synthetic oligonucleotide
acguuaaagguuggccauu

SEQ ID NO: 3288161 - RNA, 19 nt, Artificial Sequence
  Description of Artificial Sequence: Synthetic oligonucleotide
gacguuaaagguuggccau

SEQ ID NO: 3288162 - RNA, 19 nt, Artificial Sequence
  Description of Artificial Sequence: Synthetic oligonucleotide
cgacguuaaagguuggcca

SEQ ID NO: 3288163 - RNA, 19 nt, Artificial Sequence
  Description of Artificial Sequence: Synthetic oligonucleotide
ccgacguuaaagguuggcc

SEQ ID NO: 3288164 - RNA, 19 nt, Artificial Sequence
  Description of Artificial Sequence: Synthetic oligonucleotide
uccgacguuaaagguuggc

SEQ ID NO: 3288165 - RNA, 19 nt, Artificial Sequence
  Description of Artificial Sequence: Synthetic oligonucleotide
auccgacguuaaagguugg

SEQ ID NO: 3288166 - RNA, 19 nt, Artificial Sequence
  Description of Artificial Sequence: Synthetic oligonucleotide
cauccgacguuaaagguug

SEQ ID NO: 3288167 - RNA, 19 nt, Artificial Sequence
  Description of Artificial Sequence: Synthetic oligonucleotide
ccauccgacguuaaagguu

SEQ ID NO: 3288168 - RNA, 19 nt, Artificial Sequence
  Description of Artificial Sequence: Synthetic oligonucleotide
gccauccgacguuaaaggu

SEQ ID NO: 3288169 - RNA, 19 nt, Artificial Sequence
  Description of Artificial Sequence: Synthetic oligonucleotide
ucgcggccauccgacguua

SEQ ID NO: 3288170 - RNA, 19 nt, Artificial Sequence
  Description of Artificial Sequence: Synthetic oligonucleotide
cucgcggccauccgacguu

SEQ ID NO: 3288171 - RNA, 19 nt, Artificial Sequence
  Description of Artificial Sequence: Synthetic oligonucleotide
gucucgcggccauccgacg

SEQ ID NO: 3288172 - RNA, 19 nt, Artificial Sequence
  Description of Artificial Sequence: Synthetic oligonucleotide
cgucucgcggccauccgac

SEQ ID NO: 3288173 - RNA, 19 nt, Artificial Sequence
  Description of Artificial Sequence: Synthetic oligonucleotide
ccgucucgcggccauccga

SEQ ID NO: 3288174 - RNA, 19 nt, Artificial Sequence
  Description of Artificial Sequence: Synthetic oligonucleotide
aggugccgucucgcggcca

SEQ ID NO: 3288175 - RNA, 19 nt, Artificial Sequence
  Description of Artificial Sequence: Synthetic oligonucleotide
aaggugccgucucgcggcc

SEQ ID NO: 3288176 - RNA, 19 nt, Artificial Sequence
  Description of Artificial Sequence: Synthetic oligonucleotide
aaaggugccgucucgcggc

SEQ ID NO: 3288177 - RNA, 19 nt, Artificial Sequence
  Description of Artificial Sequence: Synthetic oligonucleotide
uaaaggugccgucucgcgg

SEQ ID NO: 3288178 - RNA, 19 nt, Artificial Sequence
  Description of Artificial Sequence: Synthetic oligonucleotide
uuaaaggugccgucucgcg

SEQ ID NO: 3288179 - RNA, 19 nt, Artificial Sequence
  Description of Artificial Sequence: Synthetic oligonucleotide
guuaaaggugccgucucgc

SEQ ID NO: 3288180 - RNA, 19 nt, Artificial Sequence
  Description of Artificial Sequence: Synthetic oligonucleotide
cucgguuaaaggugccguc

SEQ ID NO: 3288181 - RNA, 19 nt, Artificial Sequence
  Description of Artificial Sequence: Synthetic oligonucleotide
aggucucgguuaaaggugc

SEQ ID NO: 3288182 - RNA, 19 nt, Artificial Sequence
  Description of Artificial Sequence: Synthetic oligonucleotide
gaggucucgguuaaaggug

SEQ ID NO: 3288183 - RNA, 19 nt, Artificial Sequence
  Description of Artificial Sequence: Synthetic oligonucleotide
ugaggucucgguuaaaggu

SEQ ID NO: 3288184 - RNA, 19 nt, Artificial Sequence
  Description of Artificial Sequence: Synthetic oligonucleotide
gggugaugaggucucgguu

SEQ ID NO: 3288185 - RNA, 19 nt, Artificial Sequence
  Description of Artificial Sequence: Synthetic oligonucleotide
cugggugaugaggucucgg

SEQ ID NO: 3288186 - RNA, 19 nt, Artificial Sequence
  Description of Artificial Sequence: Synthetic oligonucleotide
aaagaccuugaucuuaacc

SEQ ID NO: 3288187 - RNA, 19 nt, Artificial Sequence
  Description of Artificial Sequence: Synthetic oligonucleotide
caggugaaaagaccuugau

SEQ ID NO: 3288188 - RNA, 19 nt, Artificial Sequence
  Description of Artificial Sequence: Synthetic oligonucleotide
gcgggccaggugaaaagac

SEQ ID NO: 3288189 - RNA, 19 nt, Artificial Sequence
  Description of Artificial Sequence: Synthetic oligonucleotide
cuggucuggguguccaugc

SEQ ID NO: 3288190 - RNA, 19 nt, Artificial Sequence
  Description of Artificial Sequence: Synthetic oligonucleotide
ccuggucuggguguccaug

SEQ ID NO: 3288191 - RNA, 19 nt, Artificial Sequence
  Description of Artificial Sequence: Synthetic oligonucleotide
accuggucuggguguccau

SEQ ID NO: 3288192 - RNA, 19 nt, Artificial Sequence
  Description of Artificial Sequence: Synthetic oligonucleotide
gaccuggucugggugucca

SEQ ID NO: 3288193 - RNA, 19 nt, Artificial Sequence
  Description of Artificial Sequence: Synthetic oligonucleotide
ggaccuggucugggugucc

SEQ ID NO: 3288194 - RNA, 19 nt, Artificial Sequence
  Description of Artificial Sequence: Synthetic oligonucleotide
gauguaggggaccuggucu

SEQ ID NO: 3288195 - RNA, 19 nt, Artificial Sequence
  Description of Artificial Sequence: Synthetic oligonucleotide
gucacgauguaggggaccu

SEQ ID NO: 3288196 - RNA, 19 nt, Artificial Sequence
  Description of Artificial Sequence: Synthetic oligonucleotide
aggucacgauguaggggac

SEQ ID NO: 3288197 - RNA, 19 nt, Artificial Sequence
  Description of Artificial Sequence: Synthetic oligonucleotide
ggggggucaaaagccaagg

SEQ ID NO: 3288198 - RNA, 19 nt, Artificial Sequence
  Description of Artificial Sequence: Synthetic oligonucleotide
ugacccagggagggggguc

SEQ ID NO: 3288199 - RNA, 19 nt, Artificial Sequence
  Description of Artificial Sequence: Synthetic oligonucleotide
uugacccagggaggggggu

SEQ ID NO: 3288200 - RNA, 19 nt, Artificial Sequence
  Description of Artificial Sequence: Synthetic oligonucleotide
cuugacccagggagggggg

SEQ ID NO: 3288201 - RNA, 19 nt, Artificial Sequence
  Description of Artificial Sequence: Synthetic oligonucleotide
gcuugacccagggaggggg

SEQ ID NO: 3288202 - RNA, 19 nt, Artificial Sequence
  Description of Artificial Sequence: Synthetic oligonucleotide
ggcuugacccagggagggg

SEQ ID NO: 3288203 - RNA, 19 nt, Artificial Sequence
  Description of Artificial Sequence: Synthetic oligonucleotide
gggcuugacccagggaggg

SEQ ID NO: 3288204 - RNA, 19 nt, Artificial Sequence
  Description of Artificial Sequence: Synthetic oligonucleotide
agggcuugacccagggagg

SEQ ID NO: 3288205 - RNA, 19 nt, Artificial Sequence
  Description of Artificial Sequence: Synthetic oligonucleotide
uucaagggggagagacggg

SEQ ID NO: 3288206 - RNA, 19 nt, Artificial Sequence
  Description of Artificial Sequence: Synthetic oligonucleotide
gguucaagggggagagacg

SEQ ID NO: 3288207 - RNA, 19 nt, Artificial Sequence
  Description of Artificial Sequence: Synthetic oligonucleotide
acgaggagguucaaggggg

SEQ ID NO: 3288208 - RNA, 19 nt, Artificial Sequence
  Description of Artificial Sequence: Synthetic oligonucleotide
aacgaggagguucaagggg

SEQ ID NO: 3288209 - RNA, 19 nt, Artificial Sequence
  Description of Artificial Sequence: Synthetic oligonucleotide
ucgaacgaggagguucaag

SEQ ID NO: 3288210 - RNA, 19 nt, Artificial Sequence
  Description of Artificial Sequence: Synthetic oligonucleotide
gucgaacgaggagguucaa

SEQ ID NO: 3288211 - RNA, 19 nt, Artificial Sequence
  Description of Artificial Sequence: Synthetic oligonucleotide
ggucgaacgaggagguuca

SEQ ID NO: 3288212 - RNA, 19 nt, Artificial Sequence
  Description of Artificial Sequence: Synthetic oligonucleotide
gggucgaacgaggagguuc

SEQ ID NO: 3288213 - RNA, 19 nt, Artificial Sequence
  Description of Artificial Sequence: Synthetic oligonucleotide
gcggggucgaacgaggagg

SEQ ID NO: 3288214 - RNA, 19 nt, Artificial Sequence
  Description of Artificial Sequence: Synthetic oligonucleotide
ggcggggucgaacgaggag

SEQ ID NO: 3288215 - RNA, 19 nt, Artificial Sequence
  Description of Artificial Sequence: Synthetic oligonucleotide
ucgaggcggggucgaacga

SEQ ID NO: 3288216 - RNA, 19 nt, Artificial Sequence
  Description of Artificial Sequence: Synthetic oligonucleotide
aucgaggcggggucgaacg

SEQ ID NO: 3288217 - RNA, 19 nt, Artificial Sequence
  Description of Artificial Sequence: Synthetic oligonucleotide
gaucgaggcggggucgaac

SEQ ID NO: 3288218 - RNA, 19 nt, Artificial Sequence
  Description of Artificial Sequence: Synthetic oligonucleotide
ggaucgaggcggggucgaa

SEQ ID NO: 3288219 - RNA, 19 nt, Artificial Sequence
  Description of Artificial Sequence: Synthetic oligonucleotide
aggaucgaggcggggucga

SEQ ID NO: 3288220 - RNA, 19 nt, Artificial Sequence
  Description of Artificial Sequence: Synthetic oligonucleotide
gaggaucgaggcggggucg

SEQ ID NO: 3288221 - RNA, 19 nt, Artificial Sequence
  Description of Artificial Sequence: Synthetic oligonucleotide
uaaagggaggaucgaggcg

SEQ ID NO: 3288222 - RNA, 19 nt, Artificial Sequence
  Description of Artificial Sequence: Synthetic oligonucleotide
ggauaaagggaggaucgag

SEQ ID NO: 3288223 - RNA, 19 nt, Artificial Sequence
  Description of Artificial Sequence: Synthetic oligonucleotide
uggauaaagggaggaucga

SEQ ID NO: 3288224 - RNA, 19 nt, Artificial Sequence
  Description of Artificial Sequence: Synthetic oligonucleotide
cuggauaaagggaggaucg

SEQ ID NO: 3288225 - RNA, 19 nt, Artificial Sequence
  Description of Artificial Sequence: Synthetic oligonucleotide
aggagugagggcuggauaa

SEQ ID NO: 3288226 - RNA, 19 nt, Artificial Sequence
  Description of Artificial Sequence: Synthetic oligonucleotide
aaggagugagggcuggaua

SEQ ID NO: 3288227 - RNA, 19 nt, Artificial Sequence
  Description of Artificial Sequence: Synthetic oligonucleotide
ggcgccuagagaaggagug

SEQ ID NO: 3288228 - RNA, 19 nt, Artificial Sequence
  Description of Artificial Sequence: Synthetic oligonucleotide
uggcgccuagagaaggagu

SEQ ID NO: 3288229 - RNA, 19 nt, Artificial Sequence
  Description of Artificial Sequence: Synthetic oligonucleotide
uuggcgccuagagaaggag

SEQ ID NO: 3288230 - RNA, 19 nt, Artificial Sequence
  Description of Artificial Sequence: Synthetic oligonucleotide
agaacuugagguuuagguu

SEQ ID NO: 3288231 - RNA, 19 nt, Artificial Sequence
  Description of Artificial Sequence: Synthetic oligonucleotide
gaugagcggccccccacug

SEQ ID NO: 3288232 - RNA, 19 nt, Artificial Sequence
  Description of Artificial Sequence: Synthetic oligonucleotide
ucgaugagcggccccccac

SEQ ID NO: 3288233 - RNA, 19 nt, Artificial Sequence
  Description of Artificial Sequence: Synthetic oligonucleotide
gucgaugagcggcccccca

SEQ ID NO: 3288234 - RNA, 19 nt, Artificial Sequence
  Description of Artificial Sequence: Synthetic oligonucleotide
cuucuguaaguaggucgau

SEQ ID NO: 3288235 - RNA, 19 nt, Artificial Sequence
  Description of Artificial Sequence: Synthetic oligonucleotide
uauaaggcggggggucuuc

SEQ ID NO: 3288236 - RNA, 19 nt, Artificial Sequence
  Description of Artificial Sequence: Synthetic oligonucleotide
ccuauaaggcggggggucu

SEQ ID NO: 3288237 - RNA, 19 nt, Artificial Sequence
  Description of Artificial Sequence: Synthetic oligonucleotide
ucccuauaaggcggggggu

SEQ ID NO: 3288238 - RNA, 19 nt, Artificial Sequence
  Description of Artificial Sequence: Synthetic oligonucleotide
gggucccuauaaggcgggg

SEQ ID NO: 3288239 - RNA, 19 nt, Artificial Sequence
  Description of Artificial Sequence: Synthetic oligonucleotide
uggucuugggucccuauaa

SEQ ID NO: 3288240 - RNA, 19 nt, Artificial Sequence
  Description of Artificial Sequence: Synthetic oligonucleotide
guggucuugggucccuaua

SEQ ID NO: 3288241 - RNA, 19 nt, Artificial Sequence
  Description of Artificial Sequence: Synthetic oligonucleotide
ccauuuccgucccugucgg

SEQ ID NO: 3288242 - RNA, 19 nt, Artificial Sequence
  Description of Artificial Sequence: Synthetic oligonucleotide
ucccgcaggggucgcuucu

SEQ ID NO: 3288243 - RNA, 19 nt, Artificial Sequence
  Description of Artificial Sequence: Synthetic oligonucleotide
auuggggagggguccggug

SEQ ID NO: 3288244 - RNA, 19 nt, Artificial Sequence
  Description of Artificial Sequence: Synthetic oligonucleotide
gcgagaugccauuggggag

SEQ ID NO: 3288245 - RNA, 19 nt, Artificial Sequence
  Description of Artificial Sequence: Synthetic oligonucleotide
cguaggcgagaugccauug

SEQ ID NO: 3288246 - RNA, 19 nt, Artificial Sequence
  Description of Artificial Sequence: Synthetic oligonucleotide
acguaggcgagaugccauu

SEQ ID NO: 3288247 - RNA, 19 nt, Artificial Sequence
  Description of Artificial Sequence: Synthetic oligonucleotide
cccacguaggcgagaugcc

SEQ ID NO: 3288248 - RNA, 19 nt, Artificial Sequence
  Description of Artificial Sequence: Synthetic oligonucleotide
ucccacguaggcgagaugc

SEQ ID NO: 3288249 - RNA, 19 nt, Artificial Sequence
  Description of Artificial Sequence: Synthetic oligonucleotide
cucccacguaggcgagaug

SEQ ID NO: 3288250 - RNA, 19 nt, Artificial Sequence
  Description of Artificial Sequence: Synthetic oligonucleotide
ccgucucccacguaggcga

SEQ ID NO: 3288251 - RNA, 19 nt, Artificial Sequence
  Description of Artificial Sequence: Synthetic oligonucleotide
ucccgucucccacguaggc

SEQ ID NO: 3288252 - RNA, 19 nt, Artificial Sequence
  Description of Artificial Sequence: Synthetic oligonucleotide
cucccgucucccacguagg

SEQ ID NO: 3288253 - RNA, 19 nt, Artificial Sequence
  Description of Artificial Sequence: Synthetic oligonucleotide
gcucccgucucccacguag

SEQ ID NO: 3288254 - RNA, 19 nt, Artificial Sequence
  Description of Artificial Sequence: Synthetic oligonucleotide
ggcucccgucucccacgua

SEQ ID NO: 3288255 - RNA, 19 nt, Artificial Sequence
  Description of Artificial Sequence: Synthetic oligonucleotide
gggcucccgucucccacgu

SEQ ID NO: 3288256 - RNA, 19 nt, Artificial Sequence
  Description of Artificial Sequence: Synthetic oligonucleotide
agguaguggagucggccac

SEQ ID NO: 3288257 - RNA, 19 nt, Artificial Sequence
  Description of Artificial Sequence: Synthetic oligonucleotide
gcgagguaguggagucggc

SEQ ID NO: 3288258 - RNA, 19 nt, Artificial Sequence
  Description of Artificial Sequence: Synthetic oligonucleotide
ugcgagguaguggagucgg

SEQ ID NO: 3288259 - RNA, 19 nt, Artificial Sequence
  Description of Artificial Sequence: Synthetic oligonucleotide
ccugcgagguaguggaguc

SEQ ID NO: 3288260 - RNA, 19 nt, Artificial Sequence
  Description of Artificial Sequence: Synthetic oligonucleotide
gccugcgagguaguggagu

SEQ ID NO: 3288261 - RNA, 19 nt, Artificial Sequence
  Description of Artificial Sequence: Synthetic oligonucleotide
ccugcgcggagggggaaug

SEQ ID NO: 3288262 - RNA, 19 nt, Artificial Sequence
  Description of Artificial Sequence: Synthetic oligonucleotide
aguauugaagcuguccguu

SEQ ID NO: 3288263 - RNA, 19 nt, Artificial Sequence
  Description of Artificial Sequence: Synthetic oligonucleotide
caguauugaagcuguccgu

SEQ ID NO: 3288264 - RNA, 19 nt, Artificial Sequence
  Description of Artificial Sequence: Synthetic oligonucleotide
ggccaguauugaagcuguc

SEQ ID NO: 3288265 - RNA, 19 nt, Artificial Sequence
  Description of Artificial Sequence: Synthetic oligonucleotide
guuguaaaggucagaagag

SEQ ID NO: 3288266 - RNA, 19 nt, Artificial Sequence
  Description of Artificial Sequence: Synthetic oligonucleotide
caguuguaaaggucagaag

SEQ ID NO: 3288267 - RNA, 19 nt, Artificial Sequence
  Description of Artificial Sequence: Synthetic oligonucleotide
ccaguuguaaaggucagaa

SEQ ID NO: 3288268 - RNA, 19 nt, Artificial Sequence
  Description of Artificial Sequence: Synthetic oligonucleotide
gguuauuauuuuuccaguu

SEQ ID NO: 3288269 - RNA, 19 nt, Artificial Sequence
  Description of Artificial Sequence: Synthetic oligonucleotide
ggaucuucagaaaaagaag

SEQ ID NO: 3288270 - RNA, 19 nt, Artificial Sequence
  Description of Artificial Sequence: Synthetic oligonucleotide
uggaucuucagaaaaagaa

SEQ ID NO: 3288271 - RNA, 19 nt, Artificial Sequence
  Description of Artificial Sequence: Synthetic oligonucleotide
ucaguuuaccuggaucuuc

SEQ ID NO: 3288272 - RNA, 19 nt, Artificial Sequence
  Description of Artificial Sequence: Synthetic oligonucleotide
gcugucaguuuaccuggau

SEQ ID NO: 3288273 - RNA, 19 nt, Artificial Sequence
  Description of Artificial Sequence: Synthetic oligonucleotide
cucgaucagagcugucagu

SEQ ID NO: 3288274 - RNA, 19 nt, Artificial Sequence
  Description of Artificial Sequence: Synthetic oligonucleotide
acucgaucagagcugucag

SEQ ID NO: 3288275 - RNA, 19 nt, Artificial Sequence
  Description of Artificial Sequence: Synthetic oligonucleotide
gacucgaucagagcuguca

SEQ ID NO: 3288276 - RNA, 19 nt, Artificial Sequence
  Description of Artificial Sequence: Synthetic oligonucleotide
gugaugagaacagacucga

SEQ ID NO: 3288277 - RNA, 19 nt, Artificial Sequence
  Description of Artificial Sequence: Synthetic oligonucleotide
ggugaugagaacagacucg

SEQ ID NO: 3288278 - RNA, 19 nt, Artificial Sequence
  Description of Artificial Sequence: Synthetic oligonucleotide
gggugaugagaacagacuc

SEQ ID NO: 3288279 - RNA, 19 nt, Artificial Sequence
  Description of Artificial Sequence: Synthetic oligonucleotide
ugggugaugagaacagacu

SEQ ID NO: 3288280 - RNA, 19 nt, Artificial Sequence
  Description of Artificial Sequence: Synthetic oligonucleotide
augggugaugagaacagac

SEQ ID NO: 3288281 - RNA, 19 nt, Artificial Sequence
  Description of Artificial Sequence: Synthetic oligonucleotide
gaugggugaugagaacaga

SEQ ID NO: 3288282 - RNA, 19 nt, Artificial Sequence
  Description of Artificial Sequence: Synthetic oligonucleotide
cacccguuguuuuucuucu

SEQ ID NO: 3288283 - RNA, 19 nt, Artificial Sequence
  Description of Artificial Sequence: Synthetic oligonucleotide
gcacccguuguuuuucuuc

SEQ ID NO: 3288284 - RNA, 19 nt, Artificial Sequence
  Description of Artificial Sequence: Synthetic oligonucleotide
cucuaagagcacccguugu

SEQ ID NO: 3288285 - RNA, 19 nt, Artificial Sequence
  Description of Artificial Sequence: Synthetic oligonucleotide
gccucuaagagcacccguu

SEQ ID NO: 3288286 - RNA, 19 nt, Artificial Sequence
  Description of Artificial Sequence: Synthetic oligonucleotide
gccccgcaccgccuuucua

SEQ ID NO: 3288287 - RNA, 19 nt, Artificial Sequence
  Description of Artificial Sequence: Synthetic oligonucleotide
cgccccgcaccgccuuucu

SEQ ID NO: 3288288 - RNA, 19 nt, Artificial Sequence
  Description of Artificial Sequence: Synthetic oligonucleotide
caucgccccgcaccgccuu

SEQ ID NO: 3288289 - RNA, 19 nt, Artificial Sequence
  Description of Artificial Sequence: Synthetic oligonucleotide
ucaucgccccgcaccgccu

SEQ ID NO: 3288290 - RNA, 19 nt, Artificial Sequence
  Description of Artificial Sequence: Synthetic oligonucleotide
caucaucgccccgcaccgc

SEQ ID NO: 3288291 - RNA, 19 nt, Artificial Sequence
  Description of Artificial Sequence: Synthetic oligonucleotide
ccaucaucgccccgcaccg

SEQ ID NO: 3288292 - RNA, 19 nt, Artificial Sequence
  Description of Artificial Sequence: Synthetic oligonucleotide
cccaucaucgccccgcacc

SEQ ID NO: 3288293 - RNA, 19 nt, Artificial Sequence
  Description of Artificial Sequence: Synthetic oligonucleotide
aguugaguggggcgcccau

SEQ ID NO: 3288294 - RNA, 19 nt, Artificial Sequence
  Description of Artificial Sequence: Synthetic oligonucleotide
ugggcaguugaguggggcg

SEQ ID NO: 3288295 - RNA, 19 nt, Artificial Sequence
  Description of Artificial Sequence: Synthetic oligonucleotide
cuucauugggcaguugagu

SEQ ID NO: 3288296 - RNA, 19 nt, Artificial Sequence
  Description of Artificial Sequence: Synthetic oligonucleotide
ucgacuucauugggcaguu

SEQ ID NO: 3288297 - RNA, 19 nt, Artificial Sequence
  Description of Artificial Sequence: Synthetic oligonucleotide
aucgacuucauugggcagu

SEQ ID NO: 3288298 - RNA, 19 nt, Artificial Sequence
  Description of Artificial Sequence: Synthetic oligonucleotide
caucgacuucauugggcag

SEQ ID NO: 3288299 - RNA, 19 nt, Artificial Sequence
  Description of Artificial Sequence: Synthetic oligonucleotide
gcggcaucgacuucauugg

SEQ ID NO: 3288300 - RNA, 19 nt, Artificial Sequence
  Description of Artificial Sequence: Synthetic oligonucleotide
agcggcaucgacuucauug

SEQ ID NO: 3288301 - RNA, 19 nt, Artificial Sequence
  Description of Artificial Sequence: Synthetic oligonucleotide
aagcggcaucgacuucauu

SEQ ID NO: 3288302 - RNA, 19 nt, Artificial Sequence
  Description of Artificial Sequence: Synthetic oligonucleotide
aaagcggcaucgacuucau

SEQ ID NO: 3288303 - RNA, 19 nt, Artificial Sequence
  Description of Artificial Sequence: Synthetic oligonucleotide
cucgaggggaaaagcggca

SEQ ID NO: 3288304 - RNA, 19 nt, Artificial Sequence
  Description of Artificial Sequence: Synthetic oligonucleotide
gcucgaggggaaaagcggc

SEQ ID NO: 3288305 - RNA, 19 nt, Artificial Sequence
  Description of Artificial Sequence: Synthetic oligonucleotide
cgcucgaggggaaaagcgg

SEQ ID NO: 3288306 - RNA, 19 nt, Artificial Sequence
  Description of Artificial Sequence: Synthetic oligonucleotide
ggcgcucgaggggaaaagc

SEQ ID NO: 3288307 - RNA, 19 nt, Artificial Sequence
  Description of Artificial Sequence: Synthetic oligonucleotide
ugggcgcucgaggggaaaa

SEQ ID NO: 3288308 - RNA, 19 nt, Artificial Sequence
  Description of Artificial Sequence: Synthetic oligonucleotide
cugggcgcucgaggggaaa

SEQ ID NO: 3288309 - RNA, 19 nt, Artificial Sequence
  Description of Artificial Sequence: Synthetic oligonucleotide
aaucccagucugggcgcuc

SEQ ID NO: 3288310 - RNA, 19 nt, Artificial Sequence
  Description of Artificial Sequence: Synthetic oligonucleotide
uaaucccagucugggcgcu

SEQ ID NO: 3288311 - RNA, 19 nt, Artificial Sequence
  Description of Artificial Sequence: Synthetic oligonucleotide
uguaaucccagucugggcg

SEQ ID NO: 3288312 - RNA, 19 nt, Artificial Sequence
  Description of Artificial Sequence: Synthetic oligonucleotide
gguguaaucccagucuggg

SEQ ID NO: 3288313 - RNA, 19 nt, Artificial Sequence
  Description of Artificial Sequence: Synthetic oligonucleotide
guguuauuccuuuuaccuu

SEQ ID NO: 3288314 - RNA, 19 nt, Artificial Sequence
  Description of Artificial Sequence: Synthetic oligonucleotide
ggagacucauugggcccuu

SEQ ID NO: 3288315 - RNA, 19 nt, Artificial Sequence
  Description of Artificial Sequence: Synthetic oligonucleotide
gccgagggagacucauugg

SEQ ID NO: 3288316 - RNA, 19 nt, Artificial Sequence
  Description of Artificial Sequence: Synthetic oligonucleotide
agucucucuaggaaggccg

SEQ ID NO: 3288317 - RNA, 19 nt, Artificial Sequence
  Description of Artificial Sequence: Synthetic oligonucleotide
aagucucucuaggaaggcc

SEQ ID NO: 3288318 - RNA, 19 nt, Artificial Sequence
  Description of Artificial Sequence: Synthetic oligonucleotide
uaagucucucuaggaaggc

SEQ ID NO: 3288319 - RNA, 19 nt, Artificial Sequence
  Description of Artificial Sequence: Synthetic oligonucleotide
uuaagucucucuaggaagg

SEQ ID NO: 3288320 - RNA, 19 nt, Artificial Sequence
  Description of Artificial Sequence: Synthetic oligonucleotide
cuuaagucucucuaggaag

SEQ ID NO: 3288321 - RNA, 19 nt, Artificial Sequence
  Description of Artificial Sequence: Synthetic oligonucleotide
ccuuaagucucucuaggaa

SEQ ID NO: 3288322 - RNA, 19 nt, Artificial Sequence
  Description of Artificial Sequence: Synthetic oligonucleotide
cugcgauaggcuuccuuaa

SEQ ID NO: 3288323 - RNA, 19 nt, Artificial Sequence
  Description of Artificial Sequence: Synthetic oligonucleotide
ccugcgauaggcuuccuua

SEQ ID NO: 3288324 - RNA, 19 nt, Artificial Sequence
  Description of Artificial Sequence: Synthetic oligonucleotide
ucucccaaugucuggggca

SEQ ID NO: 3288325 - RNA, 19 nt, Artificial Sequence
  Description of Artificial Sequence: Synthetic oligonucleotide
uucucccaaugucuggggc

SEQ ID NO: 3288326 - RNA, 19 nt, Artificial Sequence
  Description of Artificial Sequence: Synthetic oligonucleotide
cucucuaacuuucucccaa

SEQ ID NO: 3288327 - RNA, 19 nt, Artificial Sequence
  Description of Artificial Sequence: Synthetic oligonucleotide
ccucucuaacuuucuccca

SEQ ID NO: 3288328 - RNA, 19 nt, Artificial Sequence
  Description of Artificial Sequence: Synthetic oligonucleotide
uaaccucucuaacuuucuc

SEQ ID NO: 3288329 - RNA, 19 nt, Artificial Sequence
  Description of Artificial Sequence: Synthetic oligonucleotide
cuucuaaccucucuaacuu

SEQ ID NO: 3288330 - RNA, 19 nt, Artificial Sequence
  Description of Artificial Sequence: Synthetic oligonucleotide
ucuucuaaccucucuaacu

SEQ ID NO: 3288331 - RNA, 19 nt, Artificial Sequence
  Description of Artificial Sequence: Synthetic oligonucleotide
aucuucuaaccucucuaac

SEQ ID NO: 3288332 - RNA, 19 nt, Artificial Sequence
  Description of Artificial Sequence: Synthetic oligonucleotide
aaucuucuaaccucucuaa

SEQ ID NO: 3288333 - RNA, 19 nt, Artificial Sequence
  Description of Artificial Sequence: Synthetic oligonucleotide
aaaucuucuaaccucucua

SEQ ID NO: 3288334 - RNA, 19 nt, Artificial Sequence
  Description of Artificial Sequence: Synthetic oligonucleotide
uuaaaucuucuaaccucuc

SEQ ID NO: 3288335 - RNA, 19 nt, Artificial Sequence
  Description of Artificial Sequence: Synthetic oligonucleotide
aagcgucuuguuuuuuaaa

SEQ ID NO: 3288336 - RNA, 19 nt, Artificial Sequence
  Description of Artificial Sequence: Synthetic oligonucleotide
uccaagcgucuuguuuuuu

SEQ ID NO: 3288337 - RNA, 19 nt, Artificial Sequence
  Description of Artificial Sequence: Synthetic oligonucleotide
cucucuaaccaaaucucca

SEQ ID NO: 3288338 - RNA, 19 nt, Artificial Sequence
  Description of Artificial Sequence: Synthetic oligonucleotide
cugccucucuaaccaaauc

SEQ ID NO: 3288339 - RNA, 19 nt, Artificial Sequence
  Description of Artificial Sequence: Synthetic oligonucleotide
cuacgaucucuuucuuucu

SEQ ID NO: 3288340 - RNA, 19 nt, Artificial Sequence
  Description of Artificial Sequence: Synthetic oligonucleotide
ucuccuacgaucucuuucu

SEQ ID NO: 3288341 - RNA, 19 nt, Artificial Sequence
  Description of Artificial Sequence: Synthetic oligonucleotide
gucuccuacgaucucuuuc

SEQ ID NO: 3288342 - RNA, 19 nt, Artificial Sequence
  Description of Artificial Sequence: Synthetic oligonucleotide
ugucuccuacgaucucuuu

SEQ ID NO: 3288343 - RNA, 19 nt, Artificial Sequence
  Description of Artificial Sequence: Synthetic oligonucleotide
uaugucuccuacgaucucu

SEQ ID NO: 3288344 - RNA, 19 nt, Artificial Sequence
  Description of Artificial Sequence: Synthetic oligonucleotide
cuaugucuccuacgaucuc

SEQ ID NO: 3288345 - RNA, 19 nt, Artificial Sequence
  Description of Artificial Sequence: Synthetic oligonucleotide
ccuucguucuccucccugu

SEQ ID NO: 3288346 - RNA, 19 nt, Artificial Sequence
  Description of Artificial Sequence: Synthetic oligonucleotide
aguugggaccuccuucguu

SEQ ID NO: 3288347 - RNA, 19 nt, Artificial Sequence
  Description of Artificial Sequence: Synthetic oligonucleotide
cgaucgaguugggaccucc

SEQ ID NO: 3288348 - RNA, 19 nt, Artificial Sequence
  Description of Artificial Sequence: Synthetic oligonucleotide
cgcgaucgaguugggaccu

SEQ ID NO: 3288349 - RNA, 19 nt, Artificial Sequence
  Description of Artificial Sequence: Synthetic oligonucleotide
ucgcgaucgaguugggacc

SEQ ID NO: 3288350 - RNA, 19 nt, Artificial Sequence
  Description of Artificial Sequence: Synthetic oligonucleotide
gucgcgaucgaguugggac

SEQ ID NO: 3288351 - RNA, 19 nt, Artificial Sequence
  Description of Artificial Sequence: Synthetic oligonucleotide
ggucgcgaucgaguuggga

SEQ ID NO: 3288352 - RNA, 19 nt, Artificial Sequence
  Description of Artificial Sequence: Synthetic oligonucleotide
uggucgcgaucgaguuggg

SEQ ID NO: 3288353 - RNA, 19 nt, Artificial Sequence
  Description of Artificial Sequence: Synthetic oligonucleotide
cuggucgcgaucgaguugg

SEQ ID NO: 3288354 - RNA, 19 nt, Artificial Sequence
  Description of Artificial Sequence: Synthetic oligonucleotide
acuggucgcgaucgaguug

SEQ ID NO: 3288355 - RNA, 19 nt, Artificial Sequence
  Description of Artificial Sequence: Synthetic oligonucleotide
cacuggucgcgaucgaguu

SEQ ID NO: 3288356 - RNA, 19 nt, Artificial Sequence
  Description of Artificial Sequence: Synthetic oligonucleotide
acacuggucgcgaucgagu

SEQ ID NO: 3288357 - RNA, 19 nt, Artificial Sequence
  Description of Artificial Sequence: Synthetic oligonucleotide
ucuuuagcccagugccccu

SEQ ID NO: 3288358 - RNA, 19 nt, Artificial Sequence
  Description of Artificial Sequence: Synthetic oligonucleotide
acaaucuuuagcccagugc

SEQ ID NO: 3288359 - RNA, 19 nt, Artificial Sequence
  Description of Artificial Sequence: Synthetic oligonucleotide
gacaaucuuuagcccagug

SEQ ID NO: 3288360 - RNA, 19 nt, Artificial Sequence
  Description of Artificial Sequence: Synthetic oligonucleotide
ggacaaucuuuagcccagu

SEQ ID NO: 3288361 - RNA, 19 nt, Artificial Sequence
  Description of Artificial Sequence: Synthetic oligonucleotide
gggacaaucuuuagcccag

SEQ ID NO: 3288362 - RNA, 19 nt, Artificial Sequence
  Description of Artificial Sequence: Synthetic oligonucleotide
ucgugguuucuugggacaa

SEQ ID NO: 3288363 - RNA, 19 nt, Artificial Sequence
  Description of Artificial Sequence: Synthetic oligonucleotide
ccucgugguuucuugggac

SEQ ID NO: 3288364 - RNA, 19 nt, Artificial Sequence
  Description of Artificial Sequence: Synthetic oligonucleotide
uggggucuugguccccgag

SEQ ID NO: 3288365 - RNA, 19 nt, Artificial Sequence
  Description of Artificial Sequence: Synthetic oligonucleotide
ucuggggucuugguccccg

SEQ ID NO: 3288366 - RNA, 19 nt, Artificial Sequence
  Description of Artificial Sequence: Synthetic oligonucleotide
agucaucuagggucaggag

SEQ ID NO: 3288367 - RNA, 19 nt, Artificial Sequence
  Description of Artificial Sequence: Synthetic oligonucleotide
uagucaucuagggucagga

SEQ ID NO: 3288368 - RNA, 19 nt, Artificial Sequence
  Description of Artificial Sequence: Synthetic oligonucleotide
cuggcgccacuucaguuuc

SEQ ID NO: 3288369 - RNA, 19 nt, Artificial Sequence
  Description of Artificial Sequence: Synthetic oligonucleotide
uggcgccacuucaguuucu

SEQ ID NO: 3288370 - RNA, 19 nt, Artificial Sequence
  Description of Artificial Sequence: Synthetic oligonucleotide
gcgccacuucaguuucucu

SEQ ID NO: 3288371 - RNA, 19 nt, Artificial Sequence
  Description of Artificial Sequence: Synthetic oligonucleotide
cgccacuucaguuucucuu

SEQ ID NO: 3288372 - RNA, 19 nt, Artificial Sequence
  Description of Artificial Sequence: Synthetic oligonucleotide
ccacuucaguuucucuuua

SEQ ID NO: 3288373 - RNA, 19 nt, Artificial Sequence
  Description of Artificial Sequence: Synthetic oligonucleotide
cuucaguuucucuuuaccu

SEQ ID NO: 3288374 - RNA, 19 nt, Artificial Sequence
  Description of Artificial Sequence: Synthetic oligonucleotide
uucaguuucucuuuaccug

SEQ ID NO: 3288375 - RNA, 19 nt, Artificial Sequence
  Description of Artificial Sequence: Synthetic oligonucleotide
ucaguuucucuuuaccugg

SEQ ID NO: 3288376 - RNA, 19 nt, Artificial Sequence
  Description of Artificial Sequence: Synthetic oligonucleotide
caguuucucuuuaccuggg

SEQ ID NO: 3288377 - RNA, 19 nt, Artificial Sequence
  Description of Artificial Sequence: Synthetic oligonucleotide
uuucucuuuaccugggacu

SEQ ID NO: 3288378 - RNA, 19 nt, Artificial Sequence
  Description of Artificial Sequence: Synthetic oligonucleotide
uucucuuuaccugggacuc

SEQ ID NO: 3288379 - RNA, 19 nt, Artificial Sequence
  Description of Artificial Sequence: Synthetic oligonucleotide
ucucuuuaccugggacucc

SEQ ID NO: 3288380 - RNA, 19 nt, Artificial Sequence
  Description of Artificial Sequence: Synthetic oligonucleotide
cucuuuaccugggacucca

SEQ ID NO: 3288381 - RNA, 19 nt, Artificial Sequence
  Description of Artificial Sequence: Synthetic oligonucleotide
ucuuuaccugggacuccau

SEQ ID NO: 3288382 - RNA, 19 nt, Artificial Sequence
  Description of Artificial Sequence: Synthetic oligonucleotide
cuuuaccugggacuccauu

SEQ ID NO: 3288383 - RNA, 19 nt, Artificial Sequence
  Description of Artificial Sequence: Synthetic oligonucleotide
uuuaccugggacuccauuu

SEQ ID NO: 3288384 - RNA, 19 nt, Artificial Sequence
  Description of Artificial Sequence: Synthetic oligonucleotide
gacuccauuucccggcguu

SEQ ID NO: 3288385 - RNA, 19 nt, Artificial Sequence
  Description of Artificial Sequence: Synthetic oligonucleotide
acuccauuucccggcguuc

SEQ ID NO: 3288386 - RNA, 19 nt, Artificial Sequence
  Description of Artificial Sequence: Synthetic oligonucleotide
cuccauuucccggcguuca

SEQ ID NO: 3288387 - RNA, 19 nt, Artificial Sequence
  Description of Artificial Sequence: Synthetic oligonucleotide
uccauuucccggcguucac

SEQ ID NO: 3288388 - RNA, 19 nt, Artificial Sequence
  Description of Artificial Sequence: Synthetic oligonucleotide
ccauuucccggcguucacu

SEQ ID NO: 3288389 - RNA, 19 nt, Artificial Sequence
  Description of Artificial Sequence: Synthetic oligonucleotide
cauuucccggcguucacug

SEQ ID NO: 3288390 - RNA, 19 nt, Artificial Sequence
  Description of Artificial Sequence: Synthetic oligonucleotide
auuucccggcguucacugc

SEQ ID NO: 3288391 - RNA, 19 nt, Artificial Sequence
  Description of Artificial Sequence: Synthetic oligonucleotide
uuucccggcguucacugcg

SEQ ID NO: 3288392 - RNA, 19 nt, Artificial Sequence
  Description of Artificial Sequence: Synthetic oligonucleotide
uucccggcguucacugcgg

SEQ ID NO: 3288393 - RNA, 19 nt, Artificial Sequence
  Description of Artificial Sequence: Synthetic oligonucleotide
acugcggcgcccgacccuu

SEQ ID NO: 3288394 - RNA, 19 nt, Artificial Sequence
  Description of Artificial Sequence: Synthetic oligonucleotide
cgcccgacccuuggcgcuu

SEQ ID NO: 3288395 - RNA, 19 nt, Artificial Sequence
  Description of Artificial Sequence: Synthetic oligonucleotide
gcccgacccuuggcgcuug

SEQ ID NO: 3288396 - RNA, 19 nt, Artificial Sequence
  Description of Artificial Sequence: Synthetic oligonucleotide
cccgacccuuggcgcuugc

SEQ ID NO: 3288397 - RNA, 19 nt, Artificial Sequence
  Description of Artificial Sequence: Synthetic oligonucleotide
ccgacccuuggcgcuugcg

SEQ ID NO: 3288398 - RNA, 19 nt, Artificial Sequence
  Description of Artificial Sequence: Synthetic oligonucleotide
cgacccuuggcgcuugcgc

SEQ ID NO: 3288399 - RNA, 19 nt, Artificial Sequence
  Description of Artificial Sequence: Synthetic oligonucleotide
gacccuuggcgcuugcgcg

SEQ ID NO: 3288400 - RNA, 19 nt, Artificial Sequence
  Description of Artificial Sequence: Synthetic oligonucleotide
ggcgcuugcgcguugcccu

SEQ ID NO: 3288401 - RNA, 19 nt, Artificial Sequence
  Description of Artificial Sequence: Synthetic oligonucleotide
gcgcuugcgcguugcccuc

SEQ ID NO: 3288402 - RNA, 19 nt, Artificial Sequence
  Description of Artificial Sequence: Synthetic oligonucleotide
cgcuugcgcguugcccucu

SEQ ID NO: 3288403 - RNA, 19 nt, Artificial Sequence
  Description of Artificial Sequence: Synthetic oligonucleotide
gcuugcgcguugcccucuc

SEQ ID NO: 3288404 - RNA, 19 nt, Artificial Sequence
  Description of Artificial Sequence: Synthetic oligonucleotide
cuugcgcguugcccucucc

SEQ ID NO: 3288405 - RNA, 19 nt, Artificial Sequence
  Description of Artificial Sequence: Synthetic oligonucleotide
gcgcguugcccucucccca

SEQ ID NO: 3288406 - RNA, 19 nt, Artificial Sequence
  Description of Artificial Sequence: Synthetic oligonucleotide
cuccccacccuccccaauu

SEQ ID NO: 3288407 - RNA, 19 nt, Artificial Sequence
  Description of Artificial Sequence: Synthetic oligonucleotide
uccccacccuccccaauuu

SEQ ID NO: 3288408 - RNA, 19 nt, Artificial Sequence
  Description of Artificial Sequence: Synthetic oligonucleotide
ccccacccuccccaauuuc

SEQ ID NO: 3288409 - RNA, 19 nt, Artificial Sequence
  Description of Artificial Sequence: Synthetic oligonucleotide
cccacccuccccaauuucc

SEQ ID NO: 3288410 - RNA, 19 nt, Artificial Sequence
  Description of Artificial Sequence: Synthetic oligonucleotide
ccacccuccccaauuucca

SEQ ID NO: 3288411 - RNA, 19 nt, Artificial Sequence
  Description of Artificial Sequence: Synthetic oligonucleotide
cacccuccccaauuuccac

SEQ ID NO: 3288412 - RNA, 19 nt, Artificial Sequence
  Description of Artificial Sequence: Synthetic oligonucleotide
ccuccccaauuuccacaca

SEQ ID NO: 3288413 - RNA, 19 nt, Artificial Sequence
  Description of Artificial Sequence: Synthetic oligonucleotide
cuccccaauuuccacacac

SEQ ID NO: 3288414 - RNA, 19 nt, Artificial Sequence
  Description of Artificial Sequence: Synthetic oligonucleotide
ccccaauuuccacacacac

SEQ ID NO: 3288415 - RNA, 19 nt, Artificial Sequence
  Description of Artificial Sequence: Synthetic oligonucleotide
caauuuccacacacaccgc

SEQ ID NO: 3288416 - RNA, 19 nt, Artificial Sequence
  Description of Artificial Sequence: Synthetic oligonucleotide
uuccacacacaccgccccc

SEQ ID NO: 3288417 - RNA, 19 nt, Artificial Sequence
  Description of Artificial Sequence: Synthetic oligonucleotide
cccccccucgcuacuucgc

SEQ ID NO: 3288418 - RNA, 19 nt, Artificial Sequence
  Description of Artificial Sequence: Synthetic oligonucleotide
cccccucgcuacuucgccu

SEQ ID NO: 3288419 - RNA, 19 nt, Artificial Sequence
  Description of Artificial Sequence: Synthetic oligonucleotide
cccucgcuacuucgccugc

SEQ ID NO: 3288420 - RNA, 19 nt, Artificial Sequence
  Description of Artificial Sequence: Synthetic oligonucleotide
uccgcggccugcgcuguag

SEQ ID NO: 3288421 - RNA, 19 nt, Artificial Sequence
  Description of Artificial Sequence: Synthetic oligonucleotide
cggccugcgcuguagccgu

SEQ ID NO: 3288422 - RNA, 19 nt, Artificial Sequence
  Description of Artificial Sequence: Synthetic oligonucleotide
gccugcgcuguagccgucg

SEQ ID NO: 3288423 - RNA, 19 nt, Artificial Sequence
  Description of Artificial Sequence: Synthetic oligonucleotide
ccugcgcuguagccgucgc

SEQ ID NO: 3288424 - RNA, 19 nt, Artificial Sequence
  Description of Artificial Sequence: Synthetic oligonucleotide
ugcgcuguagccgucgcgg

SEQ ID NO: 3288425 - RNA, 19 nt, Artificial Sequence
  Description of Artificial Sequence: Synthetic oligonucleotide
gcuguagccgucgcgguuc

SEQ ID NO: 3288426 - RNA, 19 nt, Artificial Sequence
  Description of Artificial Sequence: Synthetic oligonucleotide
cuguagccgucgcgguucu

SEQ ID NO: 3288427 - RNA, 19 nt, Artificial Sequence
  Description of Artificial Sequence: Synthetic oligonucleotide
uguagccgucgcgguucuu

SEQ ID NO: 3288428 - RNA, 19 nt, Artificial Sequence
  Description of Artificial Sequence: Synthetic oligonucleotide
guagccgucgcgguucuuu

SEQ ID NO: 3288429 - RNA, 19 nt, Artificial Sequence
  Description of Artificial Sequence: Synthetic oligonucleotide
uagccgucgcgguucuuug

SEQ ID NO: 3288430 - RNA, 19 nt, Artificial Sequence
  Description of Artificial Sequence: Synthetic oligonucleotide
agccgucgcgguucuuugg

SEQ ID NO: 3288431 - RNA, 19 nt, Artificial Sequence
  Description of Artificial Sequence: Synthetic oligonucleotide
gccgucgcgguucuuugga

SEQ ID NO: 3288432 - RNA, 19 nt, Artificial Sequence
  Description of Artificial Sequence: Synthetic oligonucleotide
ccgucgcgguucuuuggaa

SEQ ID NO: 3288433 - RNA, 19 nt, Artificial Sequence
  Description of Artificial Sequence: Synthetic oligonucleotide
gucgcgguucuuuggaagc

SEQ ID NO: 3288434 - RNA, 19 nt, Artificial Sequence
  Description of Artificial Sequence: Synthetic oligonucleotide
uucuuuggaagcagcaacu

SEQ ID NO: 3288435 - RNA, 19 nt, Artificial Sequence
  Description of Artificial Sequence: Synthetic oligonucleotide
gcccagccgcugacgugaa

SEQ ID NO: 3288436 - RNA, 19 nt, Artificial Sequence
  Description of Artificial Sequence: Synthetic oligonucleotide
cagccgcugacgugaagau

SEQ ID NO: 3288437 - RNA, 19 nt, Artificial Sequence
  Description of Artificial Sequence: Synthetic oligonucleotide
agccgcugacgugaagaug

SEQ ID NO: 3288438 - RNA, 19 nt, Artificial Sequence
  Description of Artificial Sequence: Synthetic oligonucleotide
gccgcugacgugaagauga

SEQ ID NO: 3288439 - RNA, 19 nt, Artificial Sequence
  Description of Artificial Sequence: Synthetic oligonucleotide
agaggaggugucuuggaua

SEQ ID NO: 3288440 - RNA, 19 nt, Artificial Sequence
  Description of Artificial Sequence: Synthetic oligonucleotide
gaggaggugucuuggauau

SEQ ID NO: 3288441 - RNA, 19 nt, Artificial Sequence
  Description of Artificial Sequence: Synthetic oligonucleotide
ugucuuggauauccugguu

SEQ ID NO: 3288442 - RNA, 19 nt, Artificial Sequence
  Description of Artificial Sequence: Synthetic oligonucleotide
ucuuggauauccugguucu

SEQ ID NO: 3288443 - RNA, 19 nt, Artificial Sequence
  Description of Artificial Sequence: Synthetic oligonucleotide
ggauauccugguucugugg

SEQ ID NO: 3288444 - RNA, 19 nt, Artificial Sequence
  Description of Artificial Sequence: Synthetic oligonucleotide
gauauccugguucuguggg

SEQ ID NO: 3288445 - RNA, 19 nt, Artificial Sequence
  Description of Artificial Sequence: Synthetic oligonucleotide
auauccugguucugugggc

SEQ ID NO: 3288446 - RNA, 19 nt, Artificial Sequence
  Description of Artificial Sequence: Synthetic oligonucleotide
ucugugggcuccguggcaa

SEQ ID NO: 3288447 - RNA, 19 nt, Artificial Sequence
  Description of Artificial Sequence: Synthetic oligonucleotide
cugugggcuccguggcaau

SEQ ID NO: 3288448 - RNA, 19 nt, Artificial Sequence
  Description of Artificial Sequence: Synthetic oligonucleotide
ugugggcuccguggcaaug

SEQ ID NO: 3288449 - RNA, 19 nt, Artificial Sequence
  Description of Artificial Sequence: Synthetic oligonucleotide
gugggcuccguggcaauga

SEQ ID NO: 3288450 - RNA, 19 nt, Artificial Sequence
  Description of Artificial Sequence: Synthetic oligonucleotide
ggcuccguggcaaugaauu

SEQ ID NO: 3288451 - RNA, 19 nt, Artificial Sequence
  Description of Artificial Sequence: Synthetic oligonucleotide
gcuccguggcaaugaauuc

SEQ ID NO: 3288452 - RNA, 19 nt, Artificial Sequence
  Description of Artificial Sequence: Synthetic oligonucleotide
cuccguggcaaugaauucu

SEQ ID NO: 3288453 - RNA, 19 nt, Artificial Sequence
  Description of Artificial Sequence: Synthetic oligonucleotide
uccguggcaaugaauucuu

SEQ ID NO: 3288454 - RNA, 19 nt, Artificial Sequence
  Description of Artificial Sequence: Synthetic oligonucleotide
guggcaaugaauucuuuug

SEQ ID NO: 3288455 - RNA, 19 nt, Artificial Sequence
  Description of Artificial Sequence: Synthetic oligonucleotide
uucuuuugugaaguggaug

SEQ ID NO: 3288456 - RNA, 19 nt, Artificial Sequence
  Description of Artificial Sequence: Synthetic oligonucleotide
aguggaugaagacuacauc

SEQ ID NO: 3288457 - RNA, 19 nt, Artificial Sequence
  Description of Artificial Sequence: Synthetic oligonucleotide
guggaugaagacuacaucc

SEQ ID NO: 3288458 - RNA, 19 nt, Artificial Sequence
  Description of Artificial Sequence: Synthetic oligonucleotide
aagacuacauccaggauaa

SEQ ID NO: 3288459 - RNA, 19 nt, Artificial Sequence
  Description of Artificial Sequence: Synthetic oligonucleotide
agacuacauccaggauaaa

SEQ ID NO: 3288460 - RNA, 19 nt, Artificial Sequence
  Description of Artificial Sequence: Synthetic oligonucleotide
gacuacauccaggauaaau

SEQ ID NO: 3288461 - RNA, 19 nt, Artificial Sequence
  Description of Artificial Sequence: Synthetic oligonucleotide
acuacauccaggauaaauu

SEQ ID NO: 3288462 - RNA, 19 nt, Artificial Sequence
  Description of Artificial Sequence: Synthetic oligonucleotide
cauccaggauaaauucaau

SEQ ID NO: 3288463 - RNA, 19 nt, Artificial Sequence
  Description of Artificial Sequence: Synthetic oligonucleotide
auccaggauaaauucaauc

SEQ ID NO: 3288464 - RNA, 19 nt, Artificial Sequence
  Description of Artificial Sequence: Synthetic oligonucleotide
uccaggauaaauucaaucu

SEQ ID NO: 3288465 - RNA, 19 nt, Artificial Sequence
  Description of Artificial Sequence: Synthetic oligonucleotide
ccaggauaaauucaaucuc

SEQ ID NO: 3288466 - RNA, 19 nt, Artificial Sequence
  Description of Artificial Sequence: Synthetic oligonucleotide
aggauaaauucaaucucac

SEQ ID NO: 3288467 - RNA, 19 nt, Artificial Sequence
  Description of Artificial Sequence: Synthetic oligonucleotide
ggauaaauucaaucucacu

SEQ ID NO: 3288468 - RNA, 19 nt, Artificial Sequence
  Description of Artificial Sequence: Synthetic oligonucleotide
auaaauucaaucucacugg

SEQ ID NO: 3288469 - RNA, 19 nt, Artificial Sequence
  Description of Artificial Sequence: Synthetic oligonucleotide
aaucucacuggacucaaug

SEQ ID NO: 3288470 - RNA, 19 nt, Artificial Sequence
  Description of Artificial Sequence: Synthetic oligonucleotide
aucucacuggacucaauga

SEQ ID NO: 3288471 - RNA, 19 nt, Artificial Sequence
  Description of Artificial Sequence: Synthetic oligonucleotide
cucacuggacucaaugagc

SEQ ID NO: 3288472 - RNA, 19 nt, Artificial Sequence
  Description of Artificial Sequence: Synthetic oligonucleotide
uggacucaaugagcaggug

SEQ ID NO: 3288473 - RNA, 19 nt, Artificial Sequence
  Description of Artificial Sequence: Synthetic oligonucleotide
ucaaugagcaggugccuca

SEQ ID NO: 3288474 - RNA, 19 nt, Artificial Sequence
  Description of Artificial Sequence: Synthetic oligonucleotide
caaugagcaggugccucac

SEQ ID NO: 3288475 - RNA, 19 nt, Artificial Sequence
  Description of Artificial Sequence: Synthetic oligonucleotide
aaugagcaggugccucacu

SEQ ID NO: 3288476 - RNA, 19 nt, Artificial Sequence
  Description of Artificial Sequence: Synthetic oligonucleotide
augagcaggugccucacua

SEQ ID NO: 3288477 - RNA, 19 nt, Artificial Sequence
  Description of Artificial Sequence: Synthetic oligonucleotide
ugagcaggugccucacuau

SEQ ID NO: 3288478 - RNA, 19 nt, Artificial Sequence
  Description of Artificial Sequence: Synthetic oligonucleotide
gagcaggugccucacuauc

SEQ ID NO: 3288479 - RNA, 19 nt, Artificial Sequence
  Description of Artificial Sequence: Synthetic oligonucleotide
gcaggugccucacuaucga

SEQ ID NO: 3288480 - RNA, 19 nt, Artificial Sequence
  Description of Artificial Sequence: Synthetic oligonucleotide
caggugccucacuaucgac

SEQ ID NO: 3288481 - RNA, 19 nt, Artificial Sequence
  Description of Artificial Sequence: Synthetic oligonucleotide
aggugccucacuaucgaca

SEQ ID NO: 3288482 - RNA, 19 nt, Artificial Sequence
  Description of Artificial Sequence: Synthetic oligonucleotide
gugccucacuaucgacaag

SEQ ID NO: 3288483 - RNA, 19 nt, Artificial Sequence
  Description of Artificial Sequence: Synthetic oligonucleotide
ugccucacuaucgacaagc

SEQ ID NO: 3288484 - RNA, 19 nt, Artificial Sequence
  Description of Artificial Sequence: Synthetic oligonucleotide
acuaucgacaagcucuaga

SEQ ID NO: 3288485 - RNA, 19 nt, Artificial Sequence
  Description of Artificial Sequence: Synthetic oligonucleotide
uaucgacaagcucuagaca

SEQ ID NO: 3288486 - RNA, 19 nt, Artificial Sequence
  Description of Artificial Sequence: Synthetic oligonucleotide
aucgacaagcucuagacau

SEQ ID NO: 3288487 - RNA, 19 nt, Artificial Sequence
  Description of Artificial Sequence: Synthetic oligonucleotide
gacaagcucuagacaugau

SEQ ID NO: 3288488 - RNA, 19 nt, Artificial Sequence
  Description of Artificial Sequence: Synthetic oligonucleotide
cuagacaugaucuuggacc

SEQ ID NO: 3288489 - RNA, 19 nt, Artificial Sequence
  Description of Artificial Sequence: Synthetic oligonucleotide
uagacaugaucuuggaccu

SEQ ID NO: 3288490 - RNA, 19 nt, Artificial Sequence
  Description of Artificial Sequence: Synthetic oligonucleotide
aagagcuggaagacaaccc

SEQ ID NO: 3288491 - RNA, 19 nt, Artificial Sequence
  Description of Artificial Sequence: Synthetic oligonucleotide
agagcuggaagacaacccc

SEQ ID NO: 3288492 - RNA, 19 nt, Artificial Sequence
  Description of Artificial Sequence: Synthetic oligonucleotide
agcuggaagacaaccccaa

SEQ ID NO: 3288493 - RNA, 19 nt, Artificial Sequence
  Description of Artificial Sequence: Synthetic oligonucleotide
aaccccaaccagagcgacc

SEQ ID NO: 3288494 - RNA, 19 nt, Artificial Sequence
  Description of Artificial Sequence: Synthetic oligonucleotide
agcgaccugauugagcagg

SEQ ID NO: 3288495 - RNA, 19 nt, Artificial Sequence
  Description of Artificial Sequence: Synthetic oligonucleotide
cgaccugauugagcaggca

SEQ ID NO: 3288496 - RNA, 19 nt, Artificial Sequence
  Description of Artificial Sequence: Synthetic oligonucleotide
gaccugauugagcaggcag

SEQ ID NO: 3288497 - RNA, 19 nt, Artificial Sequence
  Description of Artificial Sequence: Synthetic oligonucleotide
ccugauugagcaggcagcc

SEQ ID NO: 3288498 - RNA, 19 nt, Artificial Sequence
  Description of Artificial Sequence: Synthetic oligonucleotide
cugauugagcaggcagccg

SEQ ID NO: 3288499 - RNA, 19 nt, Artificial Sequence
  Description of Artificial Sequence: Synthetic oligonucleotide
auugagcaggcagccgaga

SEQ ID NO: 3288500 - RNA, 19 nt, Artificial Sequence
  Description of Artificial Sequence: Synthetic oligonucleotide
ggcagccgagaugcuuuau

SEQ ID NO: 3288501 - RNA, 19 nt, Artificial Sequence
  Description of Artificial Sequence: Synthetic oligonucleotide
agccgagaugcuuuaugga

SEQ ID NO: 3288502 - RNA, 19 nt, Artificial Sequence
  Description of Artificial Sequence: Synthetic oligonucleotide
gaugcuuuauggauugauc

SEQ ID NO: 3288503 - RNA, 19 nt, Artificial Sequence
  Description of Artificial Sequence: Synthetic oligonucleotide
augcuuuauggauugaucc

SEQ ID NO: 3288504 - RNA, 19 nt, Artificial Sequence
  Description of Artificial Sequence: Synthetic oligonucleotide
uuuauggauugauccacgc

SEQ ID NO: 3288505 - RNA, 19 nt, Artificial Sequence
  Description of Artificial Sequence: Synthetic oligonucleotide
uggauugauccacgcccgc

SEQ ID NO: 3288506 - RNA, 19 nt, Artificial Sequence
  Description of Artificial Sequence: Synthetic oligonucleotide
ggauugauccacgcccgcu

SEQ ID NO: 3288507 - RNA, 19 nt, Artificial Sequence
  Description of Artificial Sequence: Synthetic oligonucleotide
gauugauccacgcccgcua

SEQ ID NO: 3288508 - RNA, 19 nt, Artificial Sequence
  Description of Artificial Sequence: Synthetic oligonucleotide
auugauccacgcccgcuau

SEQ ID NO: 3288509 - RNA, 19 nt, Artificial Sequence
  Description of Artificial Sequence: Synthetic oligonucleotide
uugauccacgcccgcuaua

SEQ ID NO: 3288510 - RNA, 19 nt, Artificial Sequence
  Description of Artificial Sequence: Synthetic oligonucleotide
ugauccacgcccgcuauau

SEQ ID NO: 3288511 - RNA, 19 nt, Artificial Sequence
  Description of Artificial Sequence: Synthetic oligonucleotide
acgcccgcuauauccucac

SEQ ID NO: 3288512 - RNA, 19 nt, Artificial Sequence
  Description of Artificial Sequence: Synthetic oligonucleotide
cgcccgcuauauccucacc

SEQ ID NO: 3288513 - RNA, 19 nt, Artificial Sequence
  Description of Artificial Sequence: Synthetic oligonucleotide
gcccgcuauauccucacca

SEQ ID NO: 3288514 - RNA, 19 nt, Artificial Sequence
  Description of Artificial Sequence: Synthetic oligonucleotide
ccucaccaaccguggcauc

SEQ ID NO: 3288515 - RNA, 19 nt, Artificial Sequence
  Description of Artificial Sequence: Synthetic oligonucleotide
cucaccaaccguggcaucg

SEQ ID NO: 3288516 - RNA, 19 nt, Artificial Sequence
  Description of Artificial Sequence: Synthetic oligonucleotide
ucaccaaccguggcaucgc

SEQ ID NO: 3288517 - RNA, 19 nt, Artificial Sequence
  Description of Artificial Sequence: Synthetic oligonucleotide
accguggcaucgcccagau

SEQ ID NO: 3288518 - RNA, 19 nt, Artificial Sequence
  Description of Artificial Sequence: Synthetic oligonucleotide
agauguuggaaaaguacca

SEQ ID NO: 3288519 - RNA, 19 nt, Artificial Sequence
  Description of Artificial Sequence: Synthetic oligonucleotide
gauguuggaaaaguaccag

SEQ ID NO: 3288520 - RNA, 19 nt, Artificial Sequence
  Description of Artificial Sequence: Synthetic oligonucleotide
uaccagcagggagacuuug

SEQ ID NO: 3288521 - RNA, 19 nt, Artificial Sequence
  Description of Artificial Sequence: Synthetic oligonucleotide
ccagcagggagacuuuggc

SEQ ID NO: 3288522 - RNA, 19 nt, Artificial Sequence
  Description of Artificial Sequence: Synthetic oligonucleotide
cagcagggagacuuuggcu

SEQ ID NO: 3288523 - RNA, 19 nt, Artificial Sequence
  Description of Artificial Sequence: Synthetic oligonucleotide
agcagggagacuuuggcua

SEQ ID NO: 3288524 - RNA, 19 nt, Artificial Sequence
  Description of Artificial Sequence: Synthetic oligonucleotide
cagggagacuuuggcuacu

SEQ ID NO: 3288525 - RNA, 19 nt, Artificial Sequence
  Description of Artificial Sequence: Synthetic oligonucleotide
agacuuuggcuacuguccc

SEQ ID NO: 3288526 - RNA, 19 nt, Artificial Sequence
  Description of Artificial Sequence: Synthetic oligonucleotide
uguccccguguguacugug

SEQ ID NO: 3288527 - RNA, 19 nt, Artificial Sequence
  Description of Artificial Sequence: Synthetic oligonucleotide
ccccguguguacugugaga

SEQ ID NO: 3288528 - RNA, 19 nt, Artificial Sequence
  Description of Artificial Sequence: Synthetic oligonucleotide
cccguguguacugugagaa

SEQ ID NO: 3288529 - RNA, 19 nt, Artificial Sequence
  Description of Artificial Sequence: Synthetic oligonucleotide
ccguguguacugugagaac

SEQ ID NO: 3288530 - RNA, 19 nt, Artificial Sequence
  Description of Artificial Sequence: Synthetic oligonucleotide
cugugagaaccagccaaug

SEQ ID NO: 3288531 - RNA, 19 nt, Artificial Sequence
  Description of Artificial Sequence: Synthetic oligonucleotide
ugugagaaccagccaaugc

SEQ ID NO: 3288532 - RNA, 19 nt, Artificial Sequence
  Description of Artificial Sequence: Synthetic oligonucleotide
cagccaaugcuucccaucg

SEQ ID NO: 3288533 - RNA, 19 nt, Artificial Sequence
  Description of Artificial Sequence: Synthetic oligonucleotide
agccaaugcuucccaucgg

SEQ ID NO: 3288534 - RNA, 19 nt, Artificial Sequence
  Description of Artificial Sequence: Synthetic oligonucleotide
gccaaugcuucccaucggc

SEQ ID NO: 3288535 - RNA, 19 nt, Artificial Sequence
  Description of Artificial Sequence: Synthetic oligonucleotide
caaugcuucccaucggccu

SEQ ID NO: 3288536 - RNA, 19 nt, Artificial Sequence
  Description of Artificial Sequence: Synthetic oligonucleotide
augcuucccaucggccuuu

SEQ ID NO: 3288537 - RNA, 19 nt, Artificial Sequence
  Description of Artificial Sequence: Synthetic oligonucleotide
ugcuucccaucggccuuuc

SEQ ID NO: 3288538 - RNA, 19 nt, Artificial Sequence
  Description of Artificial Sequence: Synthetic oligonucleotide
gcuucccaucggccuuucg

SEQ ID NO: 3288539 - RNA, 19 nt, Artificial Sequence
  Description of Artificial Sequence: Synthetic oligonucleotide
cuucccaucggccuuucgg

SEQ ID NO: 3288540 - RNA, 19 nt, Artificial Sequence
  Description of Artificial Sequence: Synthetic oligonucleotide
uucccaucggccuuucgga

SEQ ID NO: 3288541 - RNA, 19 nt, Artificial Sequence
  Description of Artificial Sequence: Synthetic oligonucleotide
ucccaucggccuuucggac

SEQ ID NO: 3288542 - RNA, 19 nt, Artificial Sequence
  Description of Artificial Sequence: Synthetic oligonucleotide
caucggccuuucggacauc

SEQ ID NO: 3288543 - RNA, 19 nt, Artificial Sequence
  Description of Artificial Sequence: Synthetic oligonucleotide
ucggccuuucggacauccc

SEQ ID NO: 3288544 - RNA, 19 nt, Artificial Sequence
  Description of Artificial Sequence: Synthetic oligonucleotide
uucggacaucccaggugag

SEQ ID NO: 3288545 - RNA, 19 nt, Artificial Sequence
  Description of Artificial Sequence: Synthetic oligonucleotide
ucggacaucccaggugagg

SEQ ID NO: 3288546 - RNA, 19 nt, Artificial Sequence
  Description of Artificial Sequence: Synthetic oligonucleotide
cggacaucccaggugaggc

SEQ ID NO: 3288547 - RNA, 19 nt, Artificial Sequence
  Description of Artificial Sequence: Synthetic oligonucleotide
caggugaggccauggugaa

SEQ ID NO: 3288548 - RNA, 19 nt, Artificial Sequence
  Description of Artificial Sequence: Synthetic oligonucleotide
gccauggugaagcucuacu

SEQ ID NO: 3288549 - RNA, 19 nt, Artificial Sequence
  Description of Artificial Sequence: Synthetic oligonucleotide
ccauggugaagcucuacug

SEQ ID NO: 3288550 - RNA, 19 nt, Artificial Sequence
  Description of Artificial Sequence: Synthetic oligonucleotide
cauggugaagcucuacugc

SEQ ID NO: 3288551 - RNA, 19 nt, Artificial Sequence
  Description of Artificial Sequence: Synthetic oligonucleotide
ggugaagcucuacugcccc

SEQ ID NO: 3288552 - RNA, 19 nt, Artificial Sequence
  Description of Artificial Sequence: Synthetic oligonucleotide
gugaagcucuacugcccca

SEQ ID NO: 3288553 - RNA, 19 nt, Artificial Sequence
  Description of Artificial Sequence: Synthetic oligonucleotide
aagcucuacugccccaagu

SEQ ID NO: 3288554 - RNA, 19 nt, Artificial Sequence
  Description of Artificial Sequence: Synthetic oligonucleotide
agcucuacugccccaagug

SEQ ID NO: 3288555 - RNA, 19 nt, Artificial Sequence
  Description of Artificial Sequence: Synthetic oligonucleotide
uacugccccaagugcaugg

SEQ ID NO: 3288556 - RNA, 19 nt, Artificial Sequence
  Description of Artificial Sequence: Synthetic oligonucleotide
cugccccaagugcauggac

SEQ ID NO: 3288557 - RNA, 19 nt, Artificial Sequence
  Description of Artificial Sequence: Synthetic oligonucleotide
ccccaagugcauggacgug

SEQ ID NO: 3288558 - RNA, 19 nt, Artificial Sequence
  Description of Artificial Sequence: Synthetic oligonucleotide
agugcauggacguguacac

SEQ ID NO: 3288559 - RNA, 19 nt, Artificial Sequence
  Description of Artificial Sequence: Synthetic oligonucleotide
gugcauggacguguacaca

SEQ ID NO: 3288560 - RNA, 19 nt, Artificial Sequence
  Description of Artificial Sequence: Synthetic oligonucleotide
cauggacguguacacaccc

SEQ ID NO: 3288561 - RNA, 19 nt, Artificial Sequence
  Description of Artificial Sequence: Synthetic oligonucleotide
auggacguguacacaccca

SEQ ID NO: 3288562 - RNA, 19 nt, Artificial Sequence
  Description of Artificial Sequence: Synthetic oligonucleotide
uggacguguacacacccaa

SEQ ID NO: 3288563 - RNA, 19 nt, Artificial Sequence
  Description of Artificial Sequence: Synthetic oligonucleotide
ggacguguacacacccaag

SEQ ID NO: 3288564 - RNA, 19 nt, Artificial Sequence
  Description of Artificial Sequence: Synthetic oligonucleotide
acguguacacacccaaguc

SEQ ID NO: 3288565 - RNA, 19 nt, Artificial Sequence
  Description of Artificial Sequence: Synthetic oligonucleotide
cguguacacacccaaguca

SEQ ID NO: 3288566 - RNA, 19 nt, Artificial Sequence
  Description of Artificial Sequence: Synthetic oligonucleotide
acacacccaagucaucgag

SEQ ID NO: 3288567 - RNA, 19 nt, Artificial Sequence
  Description of Artificial Sequence: Synthetic oligonucleotide
cacacccaagucaucgagg

SEQ ID NO: 3288568 - RNA, 19 nt, Artificial Sequence
  Description of Artificial Sequence: Synthetic oligonucleotide
acacccaagucaucgaggc

SEQ ID NO: 3288569 - RNA, 19 nt, Artificial Sequence
  Description of Artificial Sequence: Synthetic oligonucleotide
caagucaucgaggcaccau

SEQ ID NO: 3288570 - RNA, 19 nt, Artificial Sequence
  Description of Artificial Sequence: Synthetic oligonucleotide
aagucaucgaggcaccauc

SEQ ID NO: 3288571 - RNA, 19 nt, Artificial Sequence
  Description of Artificial Sequence: Synthetic oligonucleotide
agucaucgaggcaccauca

SEQ ID NO: 3288572 - RNA, 19 nt, Artificial Sequence
  Description of Artificial Sequence: Synthetic oligonucleotide
gucaucgaggcaccaucac

SEQ ID NO: 3288573 - RNA, 19 nt, Artificial Sequence
  Description of Artificial Sequence: Synthetic oligonucleotide
ucgaggcaccaucacacgg

SEQ ID NO: 3288574 - RNA, 19 nt, Artificial Sequence
  Description of Artificial Sequence: Synthetic oligonucleotide
cgaggcaccaucacacgga

SEQ ID NO: 3288575 - RNA, 19 nt, Artificial Sequence
  Description of Artificial Sequence: Synthetic oligonucleotide
caucacacggauggcgccu

SEQ ID NO: 3288576 - RNA, 19 nt, Artificial Sequence
  Description of Artificial Sequence: Synthetic oligonucleotide
cacacggauggcgccuacu

SEQ ID NO: 3288577 - RNA, 19 nt, Artificial Sequence
  Description of Artificial Sequence: Synthetic oligonucleotide
acacggauggcgccuacuu

SEQ ID NO: 3288578 - RNA, 19 nt, Artificial Sequence
  Description of Artificial Sequence: Synthetic oligonucleotide
gcgccuacuucggcaccgg

SEQ ID NO: 3288579 - RNA, 19 nt, Artificial Sequence
  Description of Artificial Sequence: Synthetic oligonucleotide
gcaccgguuucccucacau

SEQ ID NO: 3288580 - RNA, 19 nt, Artificial Sequence
  Description of Artificial Sequence: Synthetic oligonucleotide
ucccucacaugcucuucau

SEQ ID NO: 3288581 - RNA, 19 nt, Artificial Sequence
  Description of Artificial Sequence: Synthetic oligonucleotide
ucacaugcucuucauggug

SEQ ID NO: 3288582 - RNA, 19 nt, Artificial Sequence
  Description of Artificial Sequence: Synthetic oligonucleotide
cuucauggugcaccccgag

SEQ ID NO: 3288583 - RNA, 19 nt, Artificial Sequence
  Description of Artificial Sequence: Synthetic oligonucleotide
uucauggugcaccccgagu

SEQ ID NO: 3288584 - RNA, 19 nt, Artificial Sequence
  Description of Artificial Sequence: Synthetic oligonucleotide
cgaguaccggcccaagcgg

SEQ ID NO: 3288585 - RNA, 19 nt, Artificial Sequence
  Description of Artificial Sequence: Synthetic oligonucleotide
gaguaccggcccaagcggc

SEQ ID NO: 3288586 - RNA, 19 nt, Artificial Sequence
  Description of Artificial Sequence: Synthetic oligonucleotide
caagcggcccgcgaaccag

SEQ ID NO: 3288587 - RNA, 19 nt, Artificial Sequence
  Description of Artificial Sequence: Synthetic oligonucleotide
agcggcccgcgaaccaguu

SEQ ID NO: 3288588 - RNA, 19 nt, Artificial Sequence
  Description of Artificial Sequence: Synthetic oligonucleotide
gcggcccgcgaaccaguuu

SEQ ID NO: 3288589 - RNA, 19 nt, Artificial Sequence
  Description of Artificial Sequence: Synthetic oligonucleotide
cggcccgcgaaccaguuug

SEQ ID NO: 3288590 - RNA, 19 nt, Artificial Sequence
  Description of Artificial Sequence: Synthetic oligonucleotide
gcccgcgaaccaguuugug

SEQ ID NO: 3288591 - RNA, 19 nt, Artificial Sequence
  Description of Artificial Sequence: Synthetic oligonucleotide
cccgcgaaccaguuugugc

SEQ ID NO: 3288592 - RNA, 19 nt, Artificial Sequence
  Description of Artificial Sequence: Synthetic oligonucleotide
ccgcgaaccaguuugugcc

SEQ ID NO: 3288593 - RNA, 19 nt, Artificial Sequence
  Description of Artificial Sequence: Synthetic oligonucleotide
guuugugcccaggcucuac

SEQ ID NO: 3288594 - RNA, 19 nt, Artificial Sequence
  Description of Artificial Sequence: Synthetic oligonucleotide
uuugugcccaggcucuacg

SEQ ID NO: 3288595 - RNA, 19 nt, Artificial Sequence
  Description of Artificial Sequence: Synthetic oligonucleotide
uugugcccaggcucuacgg

SEQ ID NO: 3288596 - RNA, 19 nt, Artificial Sequence
  Description of Artificial Sequence: Synthetic oligonucleotide
ugugcccaggcucuacggu

SEQ ID NO: 3288597 - RNA, 19 nt, Artificial Sequence
  Description of Artificial Sequence: Synthetic oligonucleotide
gugcccaggcucuacgguu

SEQ ID NO: 3288598 - RNA, 19 nt, Artificial Sequence
  Description of Artificial Sequence: Synthetic oligonucleotide
ugcccaggcucuacgguuu

SEQ ID NO: 3288599 - RNA, 19 nt, Artificial Sequence
  Description of Artificial Sequence: Synthetic oligonucleotide
caggcucuacgguuucaag

SEQ ID NO: 3288600 - RNA, 19 nt, Artificial Sequence
  Description of Artificial Sequence: Synthetic oligonucleotide
aggcucuacgguuucaaga

SEQ ID NO: 3288601 - RNA, 19 nt, Artificial Sequence
  Description of Artificial Sequence: Synthetic oligonucleotide
ggcucuacgguuucaagau

SEQ ID NO: 3288602 - RNA, 19 nt, Artificial Sequence
  Description of Artificial Sequence: Synthetic oligonucleotide
gcucuacgguuucaagauc

SEQ ID NO: 3288603 - RNA, 19 nt, Artificial Sequence
  Description of Artificial Sequence: Synthetic oligonucleotide
cuacgguuucaagauccau

SEQ ID NO: 3288604 - RNA, 19 nt, Artificial Sequence
  Description of Artificial Sequence: Synthetic oligonucleotide
uacgguuucaagauccauc

SEQ ID NO: 3288605 - RNA, 19 nt, Artificial Sequence
  Description of Artificial Sequence: Synthetic oligonucleotide
uuucaagauccauccaaug

SEQ ID NO: 3288606 - RNA, 19 nt, Artificial Sequence
  Description of Artificial Sequence: Synthetic oligonucleotide
uucaagauccauccaaugg

SEQ ID NO: 3288607 - RNA, 19 nt, Artificial Sequence
  Description of Artificial Sequence: Synthetic oligonucleotide
ucaagauccauccaauggc

SEQ ID NO: 3288608 - RNA, 19 nt, Artificial Sequence
  Description of Artificial Sequence: Synthetic oligonucleotide
auccauccaauggccuacc

SEQ ID NO: 3288609 - RNA, 19 nt, Artificial Sequence
  Description of Artificial Sequence: Synthetic oligonucleotide
ccauccaauggccuaccag

SEQ ID NO: 3288610 - RNA, 19 nt, Artificial Sequence
  Description of Artificial Sequence: Synthetic oligonucleotide
uaccagcugcagcuccaag

SEQ ID NO: 3288611 - RNA, 19 nt, Artificial Sequence
  Description of Artificial Sequence: Synthetic oligonucleotide
gcagcuccaagccgccagc

SEQ ID NO: 3288612 - RNA, 19 nt, Artificial Sequence
  Description of Artificial Sequence: Synthetic oligonucleotide
aagccgccagcaacuucaa

SEQ ID NO: 3288613 - RNA, 19 nt, Artificial Sequence
  Description of Artificial Sequence: Synthetic oligonucleotide
gccgccagcaacuucaaga

SEQ ID NO: 3288614 - RNA, 19 nt, Artificial Sequence
  Description of Artificial Sequence: Synthetic oligonucleotide
agcaacuucaagagcccag

SEQ ID NO: 3288615 - RNA, 19 nt, Artificial Sequence
  Description of Artificial Sequence: Synthetic oligonucleotide
cuucaagagcccagucaag

SEQ ID NO: 3288616 - RNA, 19 nt, Artificial Sequence
  Description of Artificial Sequence: Synthetic oligonucleotide
agcccagucaagacgauuc

SEQ ID NO: 3288617 - RNA, 19 nt, Artificial Sequence
  Description of Artificial Sequence: Synthetic oligonucleotide
gcccagucaagacgauucg

SEQ ID NO: 3288618 - RNA, 19 nt, Artificial Sequence
  Description of Artificial Sequence: Synthetic oligonucleotide
cccagucaagacgauucgc

SEQ ID NO: 3288619 - RNA, 19 nt, Artificial Sequence
  Description of Artificial Sequence: Synthetic oligonucleotide
cagucaagacgauucgcug

SEQ ID NO: 3288620 - RNA, 19 nt, Artificial Sequence
  Description of Artificial Sequence: Synthetic oligonucleotide
agucaagacgauucgcuga

SEQ ID NO: 3288621 - RNA, 19 nt, Artificial Sequence
  Description of Artificial Sequence: Synthetic oligonucleotide
gucaagacgauucgcugau

SEQ ID NO: 3288622 - RNA, 19 nt, Artificial Sequence
  Description of Artificial Sequence: Synthetic oligonucleotide
ucaagacgauucgcugauu

SEQ ID NO: 3288623 - RNA, 19 nt, Artificial Sequence
  Description of Artificial Sequence: Synthetic oligonucleotide
caagacgauucgcugauuc

SEQ ID NO: 3288624 - RNA, 19 nt, Artificial Sequence
  Description of Artificial Sequence: Synthetic oligonucleotide
aagacgauucgcugauucc

SEQ ID NO: 3288625 - RNA, 19 nt, Artificial Sequence
  Description of Artificial Sequence: Synthetic oligonucleotide
agacgauucgcugauuccc

SEQ ID NO: 3288626 - RNA, 19 nt, Artificial Sequence
  Description of Artificial Sequence: Synthetic oligonucleotide
gacgauucgcugauucccc

SEQ ID NO: 3288627 - RNA, 19 nt, Artificial Sequence
  Description of Artificial Sequence: Synthetic oligonucleotide
uucgcugauuccccacccu

SEQ ID NO: 3288628 - RNA, 19 nt, Artificial Sequence
  Description of Artificial Sequence: Synthetic oligonucleotide
cgcugauuccccacccuac

SEQ ID NO: 3288629 - RNA, 19 nt, Artificial Sequence
  Description of Artificial Sequence: Synthetic oligonucleotide
gcugauuccccacccuacc

SEQ ID NO: 3288630 - RNA, 19 nt, Artificial Sequence
  Description of Artificial Sequence: Synthetic oligonucleotide
cugauuccccacccuaccu

SEQ ID NO: 3288631 - RNA, 19 nt, Artificial Sequence
  Description of Artificial Sequence: Synthetic oligonucleotide
ccuaccugucccucagucu

SEQ ID NO: 3288632 - RNA, 19 nt, Artificial Sequence
  Description of Artificial Sequence: Synthetic oligonucleotide
accugucccucagucuuug

SEQ ID NO: 3288633 - RNA, 19 nt, Artificial Sequence
  Description of Artificial Sequence: Synthetic oligonucleotide
ucccucagucuuugacauc

SEQ ID NO: 3288634 - RNA, 19 nt, Artificial Sequence
  Description of Artificial Sequence: Synthetic oligonucleotide
gucuuugacaucuccgauc

SEQ ID NO: 3288635 - RNA, 19 nt, Artificial Sequence
  Description of Artificial Sequence: Synthetic oligonucleotide
ucuuugacaucuccgaucc

SEQ ID NO: 3288636 - RNA, 19 nt, Artificial Sequence
  Description of Artificial Sequence: Synthetic oligonucleotide
cuuugacaucuccgauccu

SEQ ID NO: 3288637 - RNA, 19 nt, Artificial Sequence
  Description of Artificial Sequence: Synthetic oligonucleotide
uuugacaucuccgauccuu

SEQ ID NO: 3288638 - RNA, 19 nt, Artificial Sequence
  Description of Artificial Sequence: Synthetic oligonucleotide
gacaucuccgauccuuugc

SEQ ID NO: 3288639 - RNA, 19 nt, Artificial Sequence
  Description of Artificial Sequence: Synthetic oligonucleotide
acaucuccgauccuuugcu

SEQ ID NO: 3288640 - RNA, 19 nt, Artificial Sequence
  Description of Artificial Sequence: Synthetic oligonucleotide
aucuccgauccuuugcugc

SEQ ID NO: 3288641 - RNA, 19 nt, Artificial Sequence
  Description of Artificial Sequence: Synthetic oligonucleotide
cuccgauccuuugcugcca

SEQ ID NO: 3288642 - RNA, 19 nt, Artificial Sequence
  Description of Artificial Sequence: Synthetic oligonucleotide
uccgauccuuugcugccac

SEQ ID NO: 3288643 - RNA, 19 nt, Artificial Sequence
  Description of Artificial Sequence: Synthetic oligonucleotide
ccuuugcugccacccuuuc

SEQ ID NO: 3288644 - RNA, 19 nt, Artificial Sequence
  Description of Artificial Sequence: Synthetic oligonucleotide
ugccacccuuucaggaacc

SEQ ID NO: 3288645 - RNA, 19 nt, Artificial Sequence
  Description of Artificial Sequence: Synthetic oligonucleotide
ccuuucaggaacccucuau

SEQ ID NO: 3288646 - RNA, 19 nt, Artificial Sequence
  Description of Artificial Sequence: Synthetic oligonucleotide
uucaggaacccucuauggu

SEQ ID NO: 3288647 - RNA, 19 nt, Artificial Sequence
  Description of Artificial Sequence: Synthetic oligonucleotide
ucaggaacccucuaugguu

SEQ ID NO: 3288648 - RNA, 19 nt, Artificial Sequence
  Description of Artificial Sequence: Synthetic oligonucleotide
caggaacccucuaugguuu

SEQ ID NO: 3288649 - RNA, 19 nt, Artificial Sequence
  Description of Artificial Sequence: Synthetic oligonucleotide
ggaacccucuaugguuuuu

SEQ ID NO: 3288650 - RNA, 19 nt, Artificial Sequence
  Description of Artificial Sequence: Synthetic oligonucleotide
gaacccucuaugguuuuua

SEQ ID NO: 3288651 - RNA, 19 nt, Artificial Sequence
  Description of Artificial Sequence: Synthetic oligonucleotide
aacccucuaugguuuuuag

SEQ ID NO: 3288652 - RNA, 19 nt, Artificial Sequence
  Description of Artificial Sequence: Synthetic oligonucleotide
acccucuaugguuuuuagu

SEQ ID NO: 3288653 - RNA, 19 nt, Artificial Sequence
  Description of Artificial Sequence: Synthetic oligonucleotide
cccucuaugguuuuuaguu

SEQ ID NO: 3288654 - RNA, 19 nt, Artificial Sequence
  Description of Artificial Sequence: Synthetic oligonucleotide
cucuaugguuuuuaguuua

SEQ ID NO: 3288655 - RNA, 19 nt, Artificial Sequence
  Description of Artificial Sequence: Synthetic oligonucleotide
auuauuguggugggaauau

SEQ ID NO: 3288656 - RNA, 19 nt, Artificial Sequence
  Description of Artificial Sequence: Synthetic oligonucleotide
uggugggaauaugaaauaa

SEQ ID NO: 3288657 - RNA, 19 nt, Artificial Sequence
  Description of Artificial Sequence: Synthetic oligonucleotide
ggaauaugaaauaaagugg

SEQ ID NO: 3288658 - RNA, 19 nt, Artificial Sequence
  Description of Artificial Sequence: Synthetic oligonucleotide
gaaacugaaguggcgccag

SEQ ID NO: 3288659 - RNA, 19 nt, Artificial Sequence
  Description of Artificial Sequence: Synthetic oligonucleotide
agaaacugaaguggcgcca

SEQ ID NO: 3288660 - RNA, 19 nt, Artificial Sequence
  Description of Artificial Sequence: Synthetic oligonucleotide
agagaaacugaaguggcgc

SEQ ID NO: 3288661 - RNA, 19 nt, Artificial Sequence
  Description of Artificial Sequence: Synthetic oligonucleotide
aagagaaacugaaguggcg

SEQ ID NO: 3288662 - RNA, 19 nt, Artificial Sequence
  Description of Artificial Sequence: Synthetic oligonucleotide
uaaagagaaacugaagugg

SEQ ID NO: 3288663 - RNA, 19 nt, Artificial Sequence
  Description of Artificial Sequence: Synthetic oligonucleotide
agguaaagagaaacugaag

SEQ ID NO: 3288664 - RNA, 19 nt, Artificial Sequence
  Description of Artificial Sequence: Synthetic oligonucleotide
cagguaaagagaaacugaa

SEQ ID NO: 3288665 - RNA, 19 nt, Artificial Sequence
  Description of Artificial Sequence: Synthetic oligonucleotide
ccagguaaagagaaacuga

SEQ ID NO: 3288666 - RNA, 19 nt, Artificial Sequence
  Description of Artificial Sequence: Synthetic oligonucleotide
cccagguaaagagaaacug

SEQ ID NO: 3288667 - RNA, 19 nt, Artificial Sequence
  Description of Artificial Sequence: Synthetic oligonucleotide
agucccagguaaagagaaa

SEQ ID NO: 3288668 - RNA, 19 nt, Artificial Sequence
  Description of Artificial Sequence: Synthetic oligonucleotide
gagucccagguaaagagaa

SEQ ID NO: 3288669 - RNA, 19 nt, Artificial Sequence
  Description of Artificial Sequence: Synthetic oligonucleotide
ggagucccagguaaagaga

SEQ ID NO: 3288670 - RNA, 19 nt, Artificial Sequence
  Description of Artificial Sequence: Synthetic oligonucleotide
uggagucccagguaaagag

SEQ ID NO: 3288671 - RNA, 19 nt, Artificial Sequence
  Description of Artificial Sequence: Synthetic oligonucleotide
auggagucccagguaaaga

SEQ ID NO: 3288672 - RNA, 19 nt, Artificial Sequence
  Description of Artificial Sequence: Synthetic oligonucleotide
aauggagucccagguaaag

SEQ ID NO: 3288673 - RNA, 19 nt, Artificial Sequence
  Description of Artificial Sequence: Synthetic oligonucleotide
aaauggagucccagguaaa

SEQ ID NO: 3288674 - RNA, 19 nt, Artificial Sequence
  Description of Artificial Sequence: Synthetic oligonucleotide
aacgccgggaaauggaguc

SEQ ID NO: 3288675 - RNA, 19 nt, Artificial Sequence
  Description of Artificial Sequence: Synthetic oligonucleotide
gaacgccgggaaauggagu

SEQ ID NO: 3288676 - RNA, 19 nt, Artificial Sequence
  Description of Artificial Sequence: Synthetic oligonucleotide
ugaacgccgggaaauggag

SEQ ID NO: 3288677 - RNA, 19 nt, Artificial Sequence
  Description of Artificial Sequence: Synthetic oligonucleotide
gugaacgccgggaaaugga

SEQ ID NO: 3288678 - RNA, 19 nt, Artificial Sequence
  Description of Artificial Sequence: Synthetic oligonucleotide
agugaacgccgggaaaugg

SEQ ID NO: 3288679 - RNA, 19 nt, Artificial Sequence
  Description of Artificial Sequence: Synthetic oligonucleotide
cagugaacgccgggaaaug

SEQ ID NO: 3288680 - RNA, 19 nt, Artificial Sequence
  Description of Artificial Sequence: Synthetic oligonucleotide
gcagugaacgccgggaaau

SEQ ID NO: 3288681 - RNA, 19 nt, Artificial Sequence
  Description of Artificial Sequence: Synthetic oligonucleotide
cgcagugaacgccgggaaa

SEQ ID NO: 3288682 - RNA, 19 nt, Artificial Sequence
  Description of Artificial Sequence: Synthetic oligonucleotide
ccgcagugaacgccgggaa

SEQ ID NO: 3288683 - RNA, 19 nt, Artificial Sequence
  Description of Artificial Sequence: Synthetic oligonucleotide
aagggucgggcgccgcagu

SEQ ID NO: 3288684 - RNA, 19 nt, Artificial Sequence
  Description of Artificial Sequence: Synthetic oligonucleotide
aagcgccaagggucgggcg

SEQ ID NO: 3288685 - RNA, 19 nt, Artificial Sequence
  Description of Artificial Sequence: Synthetic oligonucleotide
caagcgccaagggucgggc

SEQ ID NO: 3288686 - RNA, 19 nt, Artificial Sequence
  Description of Artificial Sequence: Synthetic oligonucleotide
gcaagcgccaagggucggg

SEQ ID NO: 3288687 - RNA, 19 nt, Artificial Sequence
  Description of Artificial Sequence: Synthetic oligonucleotide
cgcaagcgccaagggucgg

SEQ ID NO: 3288688 - RNA, 19 nt, Artificial Sequence
  Description of Artificial Sequence: Synthetic oligonucleotide
gcgcaagcgccaagggucg

SEQ ID NO: 3288689 - RNA, 19 nt, Artificial Sequence
  Description of Artificial Sequence: Synthetic oligonucleotide
cgcgcaagcgccaaggguc

SEQ ID NO: 3288690 - RNA, 19 nt, Artificial Sequence
  Description of Artificial Sequence: Synthetic oligonucleotide
agggcaacgcgcaagcgcc

SEQ ID NO: 3288691 - RNA, 19 nt, Artificial Sequence
  Description of Artificial Sequence: Synthetic oligonucleotide
gagggcaacgcgcaagcgc

SEQ ID NO: 3288692 - RNA, 19 nt, Artificial Sequence
  Description of Artificial Sequence: Synthetic oligonucleotide
agagggcaacgcgcaagcg

SEQ ID NO: 3288693 - RNA, 19 nt, Artificial Sequence
  Description of Artificial Sequence: Synthetic oligonucleotide
gagagggcaacgcgcaagc

SEQ ID NO: 3288694 - RNA, 19 nt, Artificial Sequence
  Description of Artificial Sequence: Synthetic oligonucleotide
ggagagggcaacgcgcaag

SEQ ID NO: 3288695 - RNA, 19 nt, Artificial Sequence
  Description of Artificial Sequence: Synthetic oligonucleotide
uggggagagggcaacgcgc

SEQ ID NO: 3288696 - RNA, 19 nt, Artificial Sequence
  Description of Artificial Sequence: Synthetic oligonucleotide
aauuggggaggguggggag

SEQ ID NO: 3288697 - RNA, 19 nt, Artificial Sequence
  Description of Artificial Sequence: Synthetic oligonucleotide
aaauuggggagggugggga

SEQ ID NO: 3288698 - RNA, 19 nt, Artificial Sequence
  Description of Artificial Sequence: Synthetic oligonucleotide
gaaauuggggagggugggg

SEQ ID NO: 3288699 - RNA, 19 nt, Artificial Sequence
  Description of Artificial Sequence: Synthetic oligonucleotide
ggaaauuggggaggguggg

SEQ ID NO: 3288700 - RNA, 19 nt, Artificial Sequence
  Description of Artificial Sequence: Synthetic oligonucleotide
uggaaauuggggagggugg

SEQ ID NO: 3288701 - RNA, 19 nt, Artificial Sequence
  Description of Artificial Sequence: Synthetic oligonucleotide
guggaaauuggggagggug

SEQ ID NO: 3288702 - RNA, 19 nt, Artificial Sequence
  Description of Artificial Sequence: Synthetic oligonucleotide
uguguggaaauuggggagg

SEQ ID NO: 3288703 - RNA, 19 nt, Artificial Sequence
  Description of Artificial Sequence: Synthetic oligonucleotide
guguguggaaauuggggag

SEQ ID NO: 3288704 - RNA, 19 nt, Artificial Sequence
  Description of Artificial Sequence: Synthetic oligonucleotide
guguguguggaaauugggg

SEQ ID NO: 3288705 - RNA, 19 nt, Artificial Sequence
  Description of Artificial Sequence: Synthetic oligonucleotide
gcgguguguguggaaauug

SEQ ID NO: 3288706 - RNA, 19 nt, Artificial Sequence
  Description of Artificial Sequence: Synthetic oligonucleotide
gggggcgguguguguggaa

SEQ ID NO: 3288707 - RNA, 19 nt, Artificial Sequence
  Description of Artificial Sequence: Synthetic oligonucleotide
gcgaaguagcgaggggggg

SEQ ID NO: 3288708 - RNA, 19 nt, Artificial Sequence
  Description of Artificial Sequence: Synthetic oligonucleotide
aggcgaaguagcgaggggg

SEQ ID NO: 3288709 - RNA, 19 nt, Artificial Sequence
  Description of Artificial Sequence: Synthetic oligonucleotide
gcaggcgaaguagcgaggg

SEQ ID NO: 3288710 - RNA, 19 nt, Artificial Sequence
  Description of Artificial Sequence: Synthetic oligonucleotide
cuacagcgcaggccgcgga

SEQ ID NO: 3288711 - RNA, 19 nt, Artificial Sequence
  Description of Artificial Sequence: Synthetic oligonucleotide
acggcuacagcgcaggccg

SEQ ID NO: 3288712 - RNA, 19 nt, Artificial Sequence
  Description of Artificial Sequence: Synthetic oligonucleotide
cgacggcuacagcgcaggc

SEQ ID NO: 3288713 - RNA, 19 nt, Artificial Sequence
  Description of Artificial Sequence: Synthetic oligonucleotide
gcgacggcuacagcgcagg

SEQ ID NO: 3288714 - RNA, 19 nt, Artificial Sequence
  Description of Artificial Sequence: Synthetic oligonucleotide
ccgcgacggcuacagcgca

SEQ ID NO: 3288715 - RNA, 19 nt, Artificial Sequence
  Description of Artificial Sequence: Synthetic oligonucleotide
gaaccgcgacggcuacagc

SEQ ID NO: 3288716 - RNA, 19 nt, Artificial Sequence
  Description of Artificial Sequence: Synthetic oligonucleotide
agaaccgcgacggcuacag

SEQ ID NO: 3288717 - RNA, 19 nt, Artificial Sequence
  Description of Artificial Sequence: Synthetic oligonucleotide
aagaaccgcgacggcuaca

SEQ ID NO: 3288718 - RNA, 19 nt, Artificial Sequence
  Description of Artificial Sequence: Synthetic oligonucleotide
aaagaaccgcgacggcuac

SEQ ID NO: 3288719 - RNA, 19 nt, Artificial Sequence
  Description of Artificial Sequence: Synthetic oligonucleotide
caaagaaccgcgacggcua

SEQ ID NO: 3288720 - RNA, 19 nt, Artificial Sequence
  Description of Artificial Sequence: Synthetic oligonucleotide
ccaaagaaccgcgacggcu

SEQ ID NO: 3288721 - RNA, 19 nt, Artificial Sequence
  Description of Artificial Sequence: Synthetic oligonucleotide
uccaaagaaccgcgacggc

SEQ ID NO: 3288722 - RNA, 19 nt, Artificial Sequence
  Description of Artificial Sequence: Synthetic oligonucleotide
uuccaaagaaccgcgacgg

SEQ ID NO: 3288723 - RNA, 19 nt, Artificial Sequence
  Description of Artificial Sequence: Synthetic oligonucleotide
gcuuccaaagaaccgcgac

SEQ ID NO: 3288724 - RNA, 19 nt, Artificial Sequence
  Description of Artificial Sequence: Synthetic oligonucleotide
aguugcugcuuccaaagaa

SEQ ID NO: 3288725 - RNA, 19 nt, Artificial Sequence
  Description of Artificial Sequence: Synthetic oligonucleotide
uucacgucagcggcugggc

SEQ ID NO: 3288726 - RNA, 19 nt, Artificial Sequence
  Description of Artificial Sequence: Synthetic oligonucleotide
aucuucacgucagcggcug

SEQ ID NO: 3288727 - RNA, 19 nt, Artificial Sequence
  Description of Artificial Sequence: Synthetic oligonucleotide
caucuucacgucagcggcu

SEQ ID NO: 3288728 - RNA, 19 nt, Artificial Sequence
  Description of Artificial Sequence: Synthetic oligonucleotide
ucaucuucacgucagcggc

SEQ ID NO: 3288729 - RNA, 19 nt, Artificial Sequence
  Description of Artificial Sequence: Synthetic oligonucleotide
uauccaagacaccuccucu

SEQ ID NO: 3288730 - RNA, 19 nt, Artificial Sequence
  Description of Artificial Sequence: Synthetic oligonucleotide
auauccaagacaccuccuc

SEQ ID NO: 3288731 - RNA, 19 nt, Artificial Sequence
  Description of Artificial Sequence: Synthetic oligonucleotide
aaccaggauauccaagaca

SEQ ID NO: 3288732 - RNA, 19 nt, Artificial Sequence
  Description of Artificial Sequence: Synthetic oligonucleotide
agaaccaggauauccaaga

SEQ ID NO: 3288733 - RNA, 19 nt, Artificial Sequence
  Description of Artificial Sequence: Synthetic oligonucleotide
ccacagaaccaggauaucc

SEQ ID NO: 3288734 - RNA, 19 nt, Artificial Sequence
  Description of Artificial Sequence: Synthetic oligonucleotide
cccacagaaccaggauauc

SEQ ID NO: 3288735 - RNA, 19 nt, Artificial Sequence
  Description of Artificial Sequence: Synthetic oligonucleotide
gcccacagaaccaggauau

SEQ ID NO: 3288736 - RNA, 19 nt, Artificial Sequence
  Description of Artificial Sequence: Synthetic oligonucleotide
uugccacggagcccacaga

SEQ ID NO: 3288737 - RNA, 19 nt, Artificial Sequence
  Description of Artificial Sequence: Synthetic oligonucleotide
auugccacggagcccacag

SEQ ID NO: 3288738 - RNA, 19 nt, Artificial Sequence
  Description of Artificial Sequence: Synthetic oligonucleotide
cauugccacggagcccaca

SEQ ID NO: 3288739 - RNA, 19 nt, Artificial Sequence
  Description of Artificial Sequence: Synthetic oligonucleotide
ucauugccacggagcccac

SEQ ID NO: 3288740 - RNA, 19 nt, Artificial Sequence
  Description of Artificial Sequence: Synthetic oligonucleotide
aauucauugccacggagcc

SEQ ID NO: 3288741 - RNA, 19 nt, Artificial Sequence
  Description of Artificial Sequence: Synthetic oligonucleotide
gaauucauugccacggagc

SEQ ID NO: 3288742 - RNA, 19 nt, Artificial Sequence
  Description of Artificial Sequence: Synthetic oligonucleotide
agaauucauugccacggag

SEQ ID NO: 3288743 - RNA, 19 nt, Artificial Sequence
  Description of Artificial Sequence: Synthetic oligonucleotide
aagaauucauugccacgga

SEQ ID NO: 3288744 - RNA, 19 nt, Artificial Sequence
  Description of Artificial Sequence: Synthetic oligonucleotide
caaaagaauucauugccac

SEQ ID NO: 3288745 - RNA, 19 nt, Artificial Sequence
  Description of Artificial Sequence: Synthetic oligonucleotide
cauccacuucacaaaagaa

SEQ ID NO: 3288746 - RNA, 19 nt, Artificial Sequence
  Description of Artificial Sequence: Synthetic oligonucleotide
gauguagucuucauccacu

SEQ ID NO: 3288747 - RNA, 19 nt, Artificial Sequence
  Description of Artificial Sequence: Synthetic oligonucleotide
ggauguagucuucauccac

SEQ ID NO: 3288748 - RNA, 19 nt, Artificial Sequence
  Description of Artificial Sequence: Synthetic oligonucleotide
uuauccuggauguagucuu

SEQ ID NO: 3288749 - RNA, 19 nt, Artificial Sequence
  Description of Artificial Sequence: Synthetic oligonucleotide
uuuauccuggauguagucu

SEQ ID NO: 3288750 - RNA, 19 nt, Artificial Sequence
  Description of Artificial Sequence: Synthetic oligonucleotide
auuuauccuggauguaguc

SEQ ID NO: 3288751 - RNA, 19 nt, Artificial Sequence
  Description of Artificial Sequence: Synthetic oligonucleotide
aauuuauccuggauguagu

SEQ ID NO: 3288752 - RNA, 19 nt, Artificial Sequence
  Description of Artificial Sequence: Synthetic oligonucleotide
auugaauuuauccuggaug

SEQ ID NO: 3288753 - RNA, 19 nt, Artificial Sequence
  Description of Artificial Sequence: Synthetic oligonucleotide
gauugaauuuauccuggau

SEQ ID NO: 3288754 - RNA, 19 nt, Artificial Sequence
  Description of Artificial Sequence: Synthetic oligonucleotide
agauugaauuuauccugga

SEQ ID NO: 3288755 - RNA, 19 nt, Artificial Sequence
  Description of Artificial Sequence: Synthetic oligonucleotide
gagauugaauuuauccugg

SEQ ID NO: 3288756 - RNA, 19 nt, Artificial Sequence
  Description of Artificial Sequence: Synthetic oligonucleotide
gugagauugaauuuauccu

SEQ ID NO: 3288757 - RNA, 19 nt, Artificial Sequence
  Description of Artificial Sequence: Synthetic oligonucleotide
agugagauugaauuuaucc

SEQ ID NO: 3288758 - RNA, 19 nt, Artificial Sequence
  Description of Artificial Sequence: Synthetic oligonucleotide
ccagugagauugaauuuau

SEQ ID NO: 3288759 - RNA, 19 nt, Artificial Sequence
  Description of Artificial Sequence: Synthetic oligonucleotide
cauugaguccagugagauu

SEQ ID NO: 3288760 - RNA, 19 nt, Artificial Sequence
  Description of Artificial Sequence: Synthetic oligonucleotide
ucauugaguccagugagau

SEQ ID NO: 3288761 - RNA, 19 nt, Artificial Sequence
  Description of Artificial Sequence: Synthetic oligonucleotide
gcucauugaguccagugag

SEQ ID NO: 3288762 - RNA, 19 nt, Artificial Sequence
  Description of Artificial Sequence: Synthetic oligonucleotide
caccugcucauugagucca

SEQ ID NO: 3288763 - RNA, 19 nt, Artificial Sequence
  Description of Artificial Sequence: Synthetic oligonucleotide
ugaggcaccugcucauuga

SEQ ID NO: 3288764 - RNA, 19 nt, Artificial Sequence
  Description of Artificial Sequence: Synthetic oligonucleotide
gugaggcaccugcucauug

SEQ ID NO: 3288765 - RNA, 19 nt, Artificial Sequence
  Description of Artificial Sequence: Synthetic oligonucleotide
agugaggcaccugcucauu

SEQ ID NO: 3288766 - RNA, 19 nt, Artificial Sequence
  Description of Artificial Sequence: Synthetic oligonucleotide
uagugaggcaccugcucau

SEQ ID NO: 3288767 - RNA, 19 nt, Artificial Sequence
  Description of Artificial Sequence: Synthetic oligonucleotide
auagugaggcaccugcuca

SEQ ID NO: 3288768 - RNA, 19 nt, Artificial Sequence
  Description of Artificial Sequence: Synthetic oligonucleotide
gauagugaggcaccugcuc

SEQ ID NO: 3288769 - RNA, 19 nt, Artificial Sequence
  Description of Artificial Sequence: Synthetic oligonucleotide
ucgauagugaggcaccugc

SEQ ID NO: 3288770 - RNA, 19 nt, Artificial Sequence
  Description of Artificial Sequence: Synthetic oligonucleotide
gucgauagugaggcaccug

SEQ ID NO: 3288771 - RNA, 19 nt, Artificial Sequence
  Description of Artificial Sequence: Synthetic oligonucleotide
ugucgauagugaggcaccu

SEQ ID NO: 3288772 - RNA, 19 nt, Artificial Sequence
  Description of Artificial Sequence: Synthetic oligonucleotide
cuugucgauagugaggcac

SEQ ID NO: 3288773 - RNA, 19 nt, Artificial Sequence
  Description of Artificial Sequence: Synthetic oligonucleotide
gcuugucgauagugaggca

SEQ ID NO: 3288774 - RNA, 19 nt, Artificial Sequence
  Description of Artificial Sequence: Synthetic oligonucleotide
ucuagagcuugucgauagu

SEQ ID NO: 3288775 - RNA, 19 nt, Artificial Sequence
  Description of Artificial Sequence: Synthetic oligonucleotide
ugucuagagcuugucgaua

SEQ ID NO: 3288776 - RNA, 19 nt, Artificial Sequence
  Description of Artificial Sequence: Synthetic oligonucleotide
augucuagagcuugucgau

SEQ ID NO: 3288777 - RNA, 19 nt, Artificial Sequence
  Description of Artificial Sequence: Synthetic oligonucleotide
aucaugucuagagcuuguc

SEQ ID NO: 3288778 - RNA, 19 nt, Artificial Sequence
  Description of Artificial Sequence: Synthetic oligonucleotide
gguccaagaucaugucuag

SEQ ID NO: 3288779 - RNA, 19 nt, Artificial Sequence
  Description of Artificial Sequence: Synthetic oligonucleotide
agguccaagaucaugucua

SEQ ID NO: 3288780 - RNA, 19 nt, Artificial Sequence
  Description of Artificial Sequence: Synthetic oligonucleotide
ggguugucuuccagcucuu

SEQ ID NO: 3288781 - RNA, 19 nt, Artificial Sequence
  Description of Artificial Sequence: Synthetic oligonucleotide
gggguugucuuccagcucu

SEQ ID NO: 3288782 - RNA, 19 nt, Artificial Sequence
  Description of Artificial Sequence: Synthetic oligonucleotide
uugggguugucuuccagcu

SEQ ID NO: 3288783 - RNA, 19 nt, Artificial Sequence
  Description of Artificial Sequence: Synthetic oligonucleotide
ggucgcucugguugggguu

SEQ ID NO: 3288784 - RNA, 19 nt, Artificial Sequence
  Description of Artificial Sequence: Synthetic oligonucleotide
ccugcucaaucaggucgcu

SEQ ID NO: 3288785 - RNA, 19 nt, Artificial Sequence
  Description of Artificial Sequence: Synthetic oligonucleotide
ugccugcucaaucaggucg

SEQ ID NO: 3288786 - RNA, 19 nt, Artificial Sequence
  Description of Artificial Sequence: Synthetic oligonucleotide
cugccugcucaaucagguc

SEQ ID NO: 3288787 - RNA, 19 nt, Artificial Sequence
  Description of Artificial Sequence: Synthetic oligonucleotide
ggcugccugcucaaucagg

SEQ ID NO: 3288788 - RNA, 19 nt, Artificial Sequence
  Description of Artificial Sequence: Synthetic oligonucleotide
cggcugccugcucaaucag

SEQ ID NO: 3288789 - RNA, 19 nt, Artificial Sequence
  Description of Artificial Sequence: Synthetic oligonucleotide
ucucggcugccugcucaau

SEQ ID NO: 3288790 - RNA, 19 nt, Artificial Sequence
  Description of Artificial Sequence: Synthetic oligonucleotide
auaaagcaucucggcugcc

SEQ ID NO: 3288791 - RNA, 19 nt, Artificial Sequence
  Description of Artificial Sequence: Synthetic oligonucleotide
uccauaaagcaucucggcu

SEQ ID NO: 3288792 - RNA, 19 nt, Artificial Sequence
  Description of Artificial Sequence: Synthetic oligonucleotide
gaucaauccauaaagcauc

SEQ ID NO: 3288793 - RNA, 19 nt, Artificial Sequence
  Description of Artificial Sequence: Synthetic oligonucleotide
ggaucaauccauaaagcau

SEQ ID NO: 3288794 - RNA, 19 nt, Artificial Sequence
  Description of Artificial Sequence: Synthetic oligonucleotide
gcguggaucaauccauaaa

SEQ ID NO: 3288795 - RNA, 19 nt, Artificial Sequence
  Description of Artificial Sequence: Synthetic oligonucleotide
gcgggcguggaucaaucca

SEQ ID NO: 3288796 - RNA, 19 nt, Artificial Sequence
  Description of Artificial Sequence: Synthetic oligonucleotide
agcgggcguggaucaaucc

SEQ ID NO: 3288797 - RNA, 19 nt, Artificial Sequence
  Description of Artificial Sequence: Synthetic oligonucleotide
uagcgggcguggaucaauc

SEQ ID NO: 3288798 - RNA, 19 nt, Artificial Sequence
  Description of Artificial Sequence: Synthetic oligonucleotide
auagcgggcguggaucaau

SEQ ID NO: 3288799 - RNA, 19 nt, Artificial Sequence
  Description of Artificial Sequence: Synthetic oligonucleotide
uauagcgggcguggaucaa

SEQ ID NO: 3288800 - RNA, 19 nt, Artificial Sequence
  Description of Artificial Sequence: Synthetic oligonucleotide
auauagcgggcguggauca

SEQ ID NO: 3288801 - RNA, 19 nt, Artificial Sequence
  Description of Artificial Sequence: Synthetic oligonucleotide
gugaggauauagcgggcgu

SEQ ID NO: 3288802 - RNA, 19 nt, Artificial Sequence
  Description of Artificial Sequence: Synthetic oligonucleotide
ggugaggauauagcgggcg

SEQ ID NO: 3288803 - RNA, 19 nt, Artificial Sequence
  Description of Artificial Sequence: Synthetic oligonucleotide
uggugaggauauagcgggc

SEQ ID NO: 3288804 - RNA, 19 nt, Artificial Sequence
  Description of Artificial Sequence: Synthetic oligonucleotide
gaugccacgguuggugagg

SEQ ID NO: 3288805 - RNA, 19 nt, Artificial Sequence
  Description of Artificial Sequence: Synthetic oligonucleotide
cgaugccacgguuggugag

SEQ ID NO: 3288806 - RNA, 19 nt, Artificial Sequence
  Description of Artificial Sequence: Synthetic oligonucleotide
gcgaugccacgguugguga

SEQ ID NO: 3288807 - RNA, 19 nt, Artificial Sequence
  Description of Artificial Sequence: Synthetic oligonucleotide
aucugggcgaugccacggu

SEQ ID NO: 3288808 - RNA, 19 nt, Artificial Sequence
  Description of Artificial Sequence: Synthetic oligonucleotide
ugguacuuuuccaacaucu

SEQ ID NO: 3288809 - RNA, 19 nt, Artificial Sequence
  Description of Artificial Sequence: Synthetic oligonucleotide
cugguacuuuuccaacauc

SEQ ID NO: 3288810 - RNA, 19 nt, Artificial Sequence
  Description of Artificial Sequence: Synthetic oligonucleotide
caaagucucccugcuggua

SEQ ID NO: 3288811 - RNA, 19 nt, Artificial Sequence
  Description of Artificial Sequence: Synthetic oligonucleotide
gccaaagucucccugcugg

SEQ ID NO: 3288812 - RNA, 19 nt, Artificial Sequence
  Description of Artificial Sequence: Synthetic oligonucleotide
agccaaagucucccugcug

SEQ ID NO: 3288813 - RNA, 19 nt, Artificial Sequence
  Description of Artificial Sequence: Synthetic oligonucleotide
uagccaaagucucccugcu

SEQ ID NO: 3288814 - RNA, 19 nt, Artificial Sequence
  Description of Artificial Sequence: Synthetic oligonucleotide
aguagccaaagucucccug

SEQ ID NO: 3288815 - RNA, 19 nt, Artificial Sequence
  Description of Artificial Sequence: Synthetic oligonucleotide
gggacaguagccaaagucu

SEQ ID NO: 3288816 - RNA, 19 nt, Artificial Sequence
  Description of Artificial Sequence: Synthetic oligonucleotide
cacaguacacacggggaca

SEQ ID NO: 3288817 - RNA, 19 nt, Artificial Sequence
  Description of Artificial Sequence: Synthetic oligonucleotide
ucucacaguacacacgggg

SEQ ID NO: 3288818 - RNA, 19 nt, Artificial Sequence
  Description of Artificial Sequence: Synthetic oligonucleotide
uucucacaguacacacggg

SEQ ID NO: 3288819 - RNA, 19 nt, Artificial Sequence
  Description of Artificial Sequence: Synthetic oligonucleotide
guucucacaguacacacgg

SEQ ID NO: 3288820 - RNA, 19 nt, Artificial Sequence
  Description of Artificial Sequence: Synthetic oligonucleotide
cauuggcugguucucacag

SEQ ID NO: 3288821 - RNA, 19 nt, Artificial Sequence
  Description of Artificial Sequence: Synthetic oligonucleotide
gcauuggcugguucucaca

SEQ ID NO: 3288822 - RNA, 19 nt, Artificial Sequence
  Description of Artificial Sequence: Synthetic oligonucleotide
cgaugggaagcauuggcug

SEQ ID NO: 3288823 - RNA, 19 nt, Artificial Sequence
  Description of Artificial Sequence: Synthetic oligonucleotide
ccgaugggaagcauuggcu

SEQ ID NO: 3288824 - RNA, 19 nt, Artificial Sequence
  Description of Artificial Sequence: Synthetic oligonucleotide
gccgaugggaagcauuggc

SEQ ID NO: 3288825 - RNA, 19 nt, Artificial Sequence
  Description of Artificial Sequence: Synthetic oligonucleotide
aggccgaugggaagcauug

SEQ ID NO: 3288826 - RNA, 19 nt, Artificial Sequence
  Description of Artificial Sequence: Synthetic oligonucleotide
aaaggccgaugggaagcau

SEQ ID NO: 3288827 - RNA, 19 nt, Artificial Sequence
  Description of Artificial Sequence: Synthetic oligonucleotide
gaaaggccgaugggaagca

SEQ ID NO: 3288828 - RNA, 19 nt, Artificial Sequence
  Description of Artificial Sequence: Synthetic oligonucleotide
cgaaaggccgaugggaagc

SEQ ID NO: 3288829 - RNA, 19 nt, Artificial Sequence
  Description of Artificial Sequence: Synthetic oligonucleotide
ccgaaaggccgaugggaag

SEQ ID NO: 3288830 - RNA, 19 nt, Artificial Sequence
  Description of Artificial Sequence: Synthetic oligonucleotide
uccgaaaggccgaugggaa

SEQ ID NO: 3288831 - RNA, 19 nt, Artificial Sequence
  Description of Artificial Sequence: Synthetic oligonucleotide
guccgaaaggccgauggga

SEQ ID NO: 3288832 - RNA, 19 nt, Artificial Sequence
  Description of Artificial Sequence: Synthetic oligonucleotide
gauguccgaaaggccgaug

SEQ ID NO: 3288833 - RNA, 19 nt, Artificial Sequence
  Description of Artificial Sequence: Synthetic oligonucleotide
gggauguccgaaaggccga

SEQ ID NO: 3288834 - RNA, 19 nt, Artificial Sequence
  Description of Artificial Sequence: Synthetic oligonucleotide
cucaccugggauguccgaa

SEQ ID NO: 3288835 - RNA, 19 nt, Artificial Sequence
  Description of Artificial Sequence: Synthetic oligonucleotide
ccucaccugggauguccga

SEQ ID NO: 3288836 - RNA, 19 nt, Artificial Sequence
  Description of Artificial Sequence: Synthetic oligonucleotide
gccucaccugggauguccg

SEQ ID NO: 3288837 - RNA, 19 nt, Artificial Sequence
  Description of Artificial Sequence: Synthetic oligonucleotide
uucaccauggccucaccug

SEQ ID NO: 3288838 - RNA, 19 nt, Artificial Sequence
  Description of Artificial Sequence: Synthetic oligonucleotide
aguagagcuucaccauggc

SEQ ID NO: 3288839 - RNA, 19 nt, Artificial Sequence
  Description of Artificial Sequence: Synthetic oligonucleotide
caguagagcuucaccaugg

SEQ ID NO: 3288840 - RNA, 19 nt, Artificial Sequence
  Description of Artificial Sequence: Synthetic oligonucleotide
gcaguagagcuucaccaug

SEQ ID NO: 3288841 - RNA, 19 nt, Artificial Sequence
  Description of Artificial Sequence: Synthetic oligonucleotide
ggggcaguagagcuucacc

SEQ ID NO: 3288842 - RNA, 19 nt, Artificial Sequence
  Description of Artificial Sequence: Synthetic oligonucleotide
uggggcaguagagcuucac

SEQ ID NO: 3288843 - RNA, 19 nt, Artificial Sequence
  Description of Artificial Sequence: Synthetic oligonucleotide
acuuggggcaguagagcuu

SEQ ID NO: 3288844 - RNA, 19 nt, Artificial Sequence
  Description of Artificial Sequence: Synthetic oligonucleotide
cacuuggggcaguagagcu

SEQ ID NO: 3288845 - RNA, 19 nt, Artificial Sequence
  Description of Artificial Sequence: Synthetic oligonucleotide
ccaugcacuuggggcagua

SEQ ID NO: 3288846 - RNA, 19 nt, Artificial Sequence
  Description of Artificial Sequence: Synthetic oligonucleotide
guccaugcacuuggggcag

SEQ ID NO: 3288847 - RNA, 19 nt, Artificial Sequence
  Description of Artificial Sequence: Synthetic oligonucleotide
cacguccaugcacuugggg

SEQ ID NO: 3288848 - RNA, 19 nt, Artificial Sequence
  Description of Artificial Sequence: Synthetic oligonucleotide
guguacacguccaugcacu

SEQ ID NO: 3288849 - RNA, 19 nt, Artificial Sequence
  Description of Artificial Sequence: Synthetic oligonucleotide
uguguacacguccaugcac

SEQ ID NO: 3288850 - RNA, 19 nt, Artificial Sequence
  Description of Artificial Sequence: Synthetic oligonucleotide
ggguguguacacguccaug

SEQ ID NO: 3288851 - RNA, 19 nt, Artificial Sequence
  Description of Artificial Sequence: Synthetic oligonucleotide
uggguguguacacguccau

SEQ ID NO: 3288852 - RNA, 19 nt, Artificial Sequence
  Description of Artificial Sequence: Synthetic oligonucleotide
uuggguguguacacgucca

SEQ ID NO: 3288853 - RNA, 19 nt, Artificial Sequence
  Description of Artificial Sequence: Synthetic oligonucleotide
cuuggguguguacacgucc

SEQ ID NO: 3288854 - RNA, 19 nt, Artificial Sequence
  Description of Artificial Sequence: Synthetic oligonucleotide
gacuuggguguguacacgu

SEQ ID NO: 3288855 - RNA, 19 nt, Artificial Sequence
  Description of Artificial Sequence: Synthetic oligonucleotide
ugacuuggguguguacacg

SEQ ID NO: 3288856 - RNA, 19 nt, Artificial Sequence
  Description of Artificial Sequence: Synthetic oligonucleotide
cucgaugacuugggugugu

SEQ ID NO: 3288857 - RNA, 19 nt, Artificial Sequence
  Description of Artificial Sequence: Synthetic oligonucleotide
ccucgaugacuugggugug

SEQ ID NO: 3288858 - RNA, 19 nt, Artificial Sequence
  Description of Artificial Sequence: Synthetic oligonucleotide
gccucgaugacuugggugu

SEQ ID NO: 3288859 - RNA, 19 nt, Artificial Sequence
  Description of Artificial Sequence: Synthetic oligonucleotide
auggugccucgaugacuug

SEQ ID NO: 3288860 - RNA, 19 nt, Artificial Sequence
  Description of Artificial Sequence: Synthetic oligonucleotide
gauggugccucgaugacuu

SEQ ID NO: 3288861 - RNA, 19 nt, Artificial Sequence
  Description of Artificial Sequence: Synthetic oligonucleotide
ugauggugccucgaugacu

SEQ ID NO: 3288862 - RNA, 19 nt, Artificial Sequence
  Description of Artificial Sequence: Synthetic oligonucleotide
gugauggugccucgaugac

SEQ ID NO: 3288863 - RNA, 19 nt, Artificial Sequence
  Description of Artificial Sequence: Synthetic oligonucleotide
ccgugugauggugccucga

SEQ ID NO: 3288864 - RNA, 19 nt, Artificial Sequence
  Description of Artificial Sequence: Synthetic oligonucleotide
uccgugugauggugccucg

SEQ ID NO: 3288865 - RNA, 19 nt, Artificial Sequence
  Description of Artificial Sequence: Synthetic oligonucleotide
aggcgccauccgugugaug

SEQ ID NO: 3288866 - RNA, 19 nt, Artificial Sequence
  Description of Artificial Sequence: Synthetic oligonucleotide
aguaggcgccauccgugug

SEQ ID NO: 3288867 - RNA, 19 nt, Artificial Sequence
  Description of Artificial Sequence: Synthetic oligonucleotide
aaguaggcgccauccgugu

SEQ ID NO: 3288868 - RNA, 19 nt, Artificial Sequence
  Description of Artificial Sequence: Synthetic oligonucleotide
ccggugccgaaguaggcgc

SEQ ID NO: 3288869 - RNA, 19 nt, Artificial Sequence
  Description of Artificial Sequence: Synthetic oligonucleotide
augugagggaaaccggugc

SEQ ID NO: 3288870 - RNA, 19 nt, Artificial Sequence
  Description of Artificial Sequence: Synthetic oligonucleotide
augaagagcaugugaggga

SEQ ID NO: 3288871 - RNA, 19 nt, Artificial Sequence
  Description of Artificial Sequence: Synthetic oligonucleotide
caccaugaagagcauguga

SEQ ID NO: 3288872 - RNA, 19 nt, Artificial Sequence
  Description of Artificial Sequence: Synthetic oligonucleotide
cucggggugcaccaugaag

SEQ ID NO: 3288873 - RNA, 19 nt, Artificial Sequence
  Description of Artificial Sequence: Synthetic oligonucleotide
acucggggugcaccaugaa

SEQ ID NO: 3288874 - RNA, 19 nt, Artificial Sequence
  Description of Artificial Sequence: Synthetic oligonucleotide
ccgcuugggccgguacucg

SEQ ID NO: 3288875 - RNA, 19 nt, Artificial Sequence
  Description of Artificial Sequence: Synthetic oligonucleotide
gccgcuugggccgguacuc

SEQ ID NO: 3288876 - RNA, 19 nt, Artificial Sequence
  Description of Artificial Sequence: Synthetic oligonucleotide
cugguucgcgggccgcuug

SEQ ID NO: 3288877 - RNA, 19 nt, Artificial Sequence
  Description of Artificial Sequence: Synthetic oligonucleotide
aacugguucgcgggccgcu

SEQ ID NO: 3288878 - RNA, 19 nt, Artificial Sequence
  Description of Artificial Sequence: Synthetic oligonucleotide
aaacugguucgcgggccgc

SEQ ID NO: 3288879 - RNA, 19 nt, Artificial Sequence
  Description of Artificial Sequence: Synthetic oligonucleotide
caaacugguucgcgggccg

SEQ ID NO: 3288880 - RNA, 19 nt, Artificial Sequence
  Description of Artificial Sequence: Synthetic oligonucleotide
cacaaacugguucgcgggc

SEQ ID NO: 3288881 - RNA, 19 nt, Artificial Sequence
  Description of Artificial Sequence: Synthetic oligonucleotide
gcacaaacugguucgcggg

SEQ ID NO: 3288882 - RNA, 19 nt, Artificial Sequence
  Description of Artificial Sequence: Synthetic oligonucleotide
ggcacaaacugguucgcgg

SEQ ID NO: 3288883 - RNA, 19 nt, Artificial Sequence
  Description of Artificial Sequence: Synthetic oligonucleotide
guagagccugggcacaaac

SEQ ID NO: 3288884 - RNA, 19 nt, Artificial Sequence
  Description of Artificial Sequence: Synthetic oligonucleotide
cguagagccugggcacaaa

SEQ ID NO: 3288885 - RNA, 19 nt, Artificial Sequence
  Description of Artificial Sequence: Synthetic oligonucleotide
ccguagagccugggcacaa

SEQ ID NO: 3288886 - RNA, 19 nt, Artificial Sequence
  Description of Artificial Sequence: Synthetic oligonucleotide
accguagagccugggcaca

SEQ ID NO: 3288887 - RNA, 19 nt, Artificial Sequence
  Description of Artificial Sequence: Synthetic oligonucleotide
aaccguagagccugggcac

SEQ ID NO: 3288888 - RNA, 19 nt, Artificial Sequence
  Description of Artificial Sequence: Synthetic oligonucleotide
aaaccguagagccugggca

SEQ ID NO: 3288889 - RNA, 19 nt, Artificial Sequence
  Description of Artificial Sequence: Synthetic oligonucleotide
cuugaaaccguagagccug

SEQ ID NO: 3288890 - RNA, 19 nt, Artificial Sequence
  Description of Artificial Sequence: Synthetic oligonucleotide
ucuugaaaccguagagccu

SEQ ID NO: 3288891 - RNA, 19 nt, Artificial Sequence
  Description of Artificial Sequence: Synthetic oligonucleotide
aucuugaaaccguagagcc

SEQ ID NO: 3288892 - RNA, 19 nt, Artificial Sequence
  Description of Artificial Sequence: Synthetic oligonucleotide
gaucuugaaaccguagagc

SEQ ID NO: 3288893 - RNA, 19 nt, Artificial Sequence
  Description of Artificial Sequence: Synthetic oligonucleotide
auggaucuugaaaccguag

SEQ ID NO: 3288894 - RNA, 19 nt, Artificial Sequence
  Description of Artificial Sequence: Synthetic oligonucleotide
gauggaucuugaaaccgua

SEQ ID NO: 3288895 - RNA, 19 nt, Artificial Sequence
  Description of Artificial Sequence: Synthetic oligonucleotide
cauuggauggaucuugaaa

SEQ ID NO: 3288896 - RNA, 19 nt, Artificial Sequence
  Description of Artificial Sequence: Synthetic oligonucleotide
ccauuggauggaucuugaa

SEQ ID NO: 3288897 - RNA, 19 nt, Artificial Sequence
  Description of Artificial Sequence: Synthetic oligonucleotide
gccauuggauggaucuuga

SEQ ID NO: 3288898 - RNA, 19 nt, Artificial Sequence
  Description of Artificial Sequence: Synthetic oligonucleotide
gguaggccauuggauggau

SEQ ID NO: 3288899 - RNA, 19 nt, Artificial Sequence
  Description of Artificial Sequence: Synthetic oligonucleotide
cugguaggccauuggaugg

SEQ ID NO: 3288900 - RNA, 19 nt, Artificial Sequence
  Description of Artificial Sequence: Synthetic oligonucleotide
cuuggagcugcagcuggua

SEQ ID NO: 3288901 - RNA, 19 nt, Artificial Sequence
  Description of Artificial Sequence: Synthetic oligonucleotide
gcuggcggcuuggagcugc

SEQ ID NO: 3288902 - RNA, 19 nt, Artificial Sequence
  Description of Artificial Sequence: Synthetic oligonucleotide
uugaaguugcuggcggcuu

SEQ ID NO: 3288903 - RNA, 19 nt, Artificial Sequence
  Description of Artificial Sequence: Synthetic oligonucleotide
ucuugaaguugcuggcggc

SEQ ID NO: 3288904 - RNA, 19 nt, Artificial Sequence
  Description of Artificial Sequence: Synthetic oligonucleotide
cugggcucuugaaguugcu

SEQ ID NO: 3288905 - RNA, 19 nt, Artificial Sequence
  Description of Artificial Sequence: Synthetic oligonucleotide
cuugacugggcucuugaag

SEQ ID NO: 3288906 - RNA, 19 nt, Artificial Sequence
  Description of Artificial Sequence: Synthetic oligonucleotide
gaaucgucuugacugggcu

SEQ ID NO: 3288907 - RNA, 19 nt, Artificial Sequence
  Description of Artificial Sequence: Synthetic oligonucleotide
cgaaucgucuugacugggc

SEQ ID NO: 3288908 - RNA, 19 nt, Artificial Sequence
  Description of Artificial Sequence: Synthetic oligonucleotide
gcgaaucgucuugacuggg

SEQ ID NO: 3288909 - RNA, 19 nt, Artificial Sequence
  Description of Artificial Sequence: Synthetic oligonucleotide
cagcgaaucgucuugacug

SEQ ID NO: 3288910 - RNA, 19 nt, Artificial Sequence
  Description of Artificial Sequence: Synthetic oligonucleotide
ucagcgaaucgucuugacu

SEQ ID NO: 3288911 - RNA, 19 nt, Artificial Sequence
  Description of Artificial Sequence: Synthetic oligonucleotide
aucagcgaaucgucuugac

SEQ ID NO: 3288912 - RNA, 19 nt, Artificial Sequence
  Description of Artificial Sequence: Synthetic oligonucleotide
aaucagcgaaucgucuuga

SEQ ID NO: 3288913 - RNA, 19 nt, Artificial Sequence
  Description of Artificial Sequence: Synthetic oligonucleotide
gaaucagcgaaucgucuug

SEQ ID NO: 3288914 - RNA, 19 nt, Artificial Sequence
  Description of Artificial Sequence: Synthetic oligonucleotide
ggaaucagcgaaucgucuu

SEQ ID NO: 3288915 - RNA, 19 nt, Artificial Sequence
  Description of Artificial Sequence: Synthetic oligonucleotide
gggaaucagcgaaucgucu

SEQ ID NO: 3288916 - RNA, 19 nt, Artificial Sequence
  Description of Artificial Sequence: Synthetic oligonucleotide
ggggaaucagcgaaucguc

SEQ ID NO: 3288917 - RNA, 19 nt, Artificial Sequence
  Description of Artificial Sequence: Synthetic oligonucleotide
aggguggggaaucagcgaa

SEQ ID NO: 3288918 - RNA, 19 nt, Artificial Sequence
  Description of Artificial Sequence: Synthetic oligonucleotide
guaggguggggaaucagcg

SEQ ID NO: 3288919 - RNA, 19 nt, Artificial Sequence
  Description of Artificial Sequence: Synthetic oligonucleotide
gguaggguggggaaucagc

SEQ ID NO: 3288920 - RNA, 19 nt, Artificial Sequence
  Description of Artificial Sequence: Synthetic oligonucleotide
agguaggguggggaaucag

SEQ ID NO: 3288921 - RNA, 19 nt, Artificial Sequence
  Description of Artificial Sequence: Synthetic oligonucleotide
agacugagggacagguagg

SEQ ID NO: 3288922 - RNA, 19 nt, Artificial Sequence
  Description of Artificial Sequence: Synthetic oligonucleotide
caaagacugagggacaggu

SEQ ID NO: 3288923 - RNA, 19 nt, Artificial Sequence
  Description of Artificial Sequence: Synthetic oligonucleotide
gaugucaaagacugaggga

SEQ ID NO: 3288924 - RNA, 19 nt, Artificial Sequence
  Description of Artificial Sequence: Synthetic oligonucleotide
gaucggagaugucaaagac

SEQ ID NO: 3288925 - RNA, 19 nt, Artificial Sequence
  Description of Artificial Sequence: Synthetic oligonucleotide
ggaucggagaugucaaaga

SEQ ID NO: 3288926 - RNA, 19 nt, Artificial Sequence
  Description of Artificial Sequence: Synthetic oligonucleotide
aggaucggagaugucaaag

SEQ ID NO: 3288927 - RNA, 19 nt, Artificial Sequence
  Description of Artificial Sequence: Synthetic oligonucleotide
aaggaucggagaugucaaa

SEQ ID NO: 3288928 - RNA, 19 nt, Artificial Sequence
  Description of Artificial Sequence: Synthetic oligonucleotide
gcaaaggaucggagauguc

SEQ ID NO: 3288929 - RNA, 19 nt, Artificial Sequence
  Description of Artificial Sequence: Synthetic oligonucleotide
agcaaaggaucggagaugu

SEQ ID NO: 3288930 - RNA, 19 nt, Artificial Sequence
  Description of Artificial Sequence: Synthetic oligonucleotide
gcagcaaaggaucggagau

SEQ ID NO: 3288931 - RNA, 19 nt, Artificial Sequence
  Description of Artificial Sequence: Synthetic oligonucleotide
uggcagcaaaggaucggag

SEQ ID NO: 3288932 - RNA, 19 nt, Artificial Sequence
  Description of Artificial Sequence: Synthetic oligonucleotide
guggcagcaaaggaucgga

SEQ ID NO: 3288933 - RNA, 19 nt, Artificial Sequence
  Description of Artificial Sequence: Synthetic oligonucleotide
gaaaggguggcagcaaagg

SEQ ID NO: 3288934 - RNA, 19 nt, Artificial Sequence
  Description of Artificial Sequence: Synthetic oligonucleotide
gguuccugaaaggguggca

SEQ ID NO: 3288935 - RNA, 19 nt, Artificial Sequence
  Description of Artificial Sequence: Synthetic oligonucleotide
auagaggguuccugaaagg

SEQ ID NO: 3288936 - RNA, 19 nt, Artificial Sequence
  Description of Artificial Sequence: Synthetic oligonucleotide
accauagaggguuccugaa

SEQ ID NO: 3288937 - RNA, 19 nt, Artificial Sequence
  Description of Artificial Sequence: Synthetic oligonucleotide
aaccauagaggguuccuga

SEQ ID NO: 3288938 - RNA, 19 nt, Artificial Sequence
  Description of Artificial Sequence: Synthetic oligonucleotide
aaaccauagaggguuccug

SEQ ID NO: 3288939 - RNA, 19 nt, Artificial Sequence
  Description of Artificial Sequence: Synthetic oligonucleotide
aaaaaccauagaggguucc

SEQ ID NO: 3288940 - RNA, 19 nt, Artificial Sequence
  Description of Artificial Sequence: Synthetic oligonucleotide
uaaaaaccauagaggguuc

SEQ ID NO: 3288941 - RNA, 19 nt, Artificial Sequence
  Description of Artificial Sequence: Synthetic oligonucleotide
cuaaaaaccauagaggguu

SEQ ID NO: 3288942 - RNA, 19 nt, Artificial Sequence
  Description of Artificial Sequence: Synthetic oligonucleotide
acuaaaaaccauagagggu

SEQ ID NO: 3288943 - RNA, 19 nt, Artificial Sequence
  Description of Artificial Sequence: Synthetic oligonucleotide
aacuaaaaaccauagaggg

SEQ ID NO: 3288944 - RNA, 19 nt, Artificial Sequence
  Description of Artificial Sequence: Synthetic oligonucleotide
uaaacuaaaaaccauagag

SEQ ID NO: 3288945 - RNA, 19 nt, Artificial Sequence
  Description of Artificial Sequence: Synthetic oligonucleotide
auauucccaccacaauaau

SEQ ID NO: 3288946 - RNA, 19 nt, Artificial Sequence
  Description of Artificial Sequence: Synthetic oligonucleotide
uuauuucauauucccacca

SEQ ID NO: 3288947 - RNA, 19 nt, Artificial Sequence
  Description of Artificial Sequence: Synthetic oligonucleotide
ccacuuuauuucauauucc

SEQ ID NO: 3288948 - RNA, 19 nt, Artificial Sequence
  Description of Artificial Sequence: Synthetic oligonucleotide
ggucccguccgugcgcgga

SEQ ID NO: 3288949 - RNA, 19 nt, Artificial Sequence
  Description of Artificial Sequence: Synthetic oligonucleotide
gucccguccgugcgcggag

SEQ ID NO: 3288950 - RNA, 19 nt, Artificial Sequence
  Description of Artificial Sequence: Synthetic oligonucleotide
guccgugcgcggagccgug

SEQ ID NO: 3288951 - RNA, 19 nt, Artificial Sequence
  Description of Artificial Sequence: Synthetic oligonucleotide
ggagccgugcggaagccuc

SEQ ID NO: 3288952 - RNA, 19 nt, Artificial Sequence
  Description of Artificial Sequence: Synthetic oligonucleotide
ccgugcggaagccucggag

SEQ ID NO: 3288953 - RNA, 19 nt, Artificial Sequence
  Description of Artificial Sequence: Synthetic oligonucleotide
gcagcacuggacagcgagg

SEQ ID NO: 3288954 - RNA, 19 nt, Artificial Sequence
  Description of Artificial Sequence: Synthetic oligonucleotide
gacagcgagggggacgccc

SEQ ID NO: 3288955 - RNA, 19 nt, Artificial Sequence
  Description of Artificial Sequence: Synthetic oligonucleotide
gcgagggggacgcccagaa

SEQ ID NO: 3288956 - RNA, 19 nt, Artificial Sequence
  Description of Artificial Sequence: Synthetic oligonucleotide
ccagaagcugcgcuucggg

SEQ ID NO: 3288957 - RNA, 19 nt, Artificial Sequence
  Description of Artificial Sequence: Synthetic oligonucleotide
aagcugcgcuucgggccau

SEQ ID NO: 3288958 - RNA, 19 nt, Artificial Sequence
  Description of Artificial Sequence: Synthetic oligonucleotide
agcugcgcuucgggccaug

SEQ ID NO: 3288959 - RNA, 19 nt, Artificial Sequence
  Description of Artificial Sequence: Synthetic oligonucleotide
gcgcuucgggccauggcug

SEQ ID NO: 3288960 - RNA, 19 nt, Artificial Sequence
  Description of Artificial Sequence: Synthetic oligonucleotide
gcuucgggccauggcugcu

SEQ ID NO: 3288961 - RNA, 19 nt, Artificial Sequence
  Description of Artificial Sequence: Synthetic oligonucleotide
gccauggcugcugaacgcc

SEQ ID NO: 3288962 - RNA, 19 nt, Artificial Sequence
  Description of Artificial Sequence: Synthetic oligonucleotide
cauggcugcugaacgccgu

SEQ ID NO: 3288963 - RNA, 19 nt, Artificial Sequence
  Description of Artificial Sequence: Synthetic oligonucleotide
uguaccgcggccucugcug

SEQ ID NO: 3288964 - RNA, 19 nt, Artificial Sequence
  Description of Artificial Sequence: Synthetic oligonucleotide
uaccgcggccucugcugga

SEQ ID NO: 3288965 - RNA, 19 nt, Artificial Sequence
  Description of Artificial Sequence: Synthetic oligonucleotide
ggccucugcuggaucgacc

SEQ ID NO: 3288966 - RNA, 19 nt, Artificial Sequence
  Description of Artificial Sequence: Synthetic oligonucleotide
ccucugcuggaucgacccg

SEQ ID NO: 3288967 - RNA, 19 nt, Artificial Sequence
  Description of Artificial Sequence: Synthetic oligonucleotide
cucugcuggaucgacccgg

SEQ ID NO: 3288968 - RNA, 19 nt, Artificial Sequence
  Description of Artificial Sequence: Synthetic oligonucleotide
ugcuggaucgacccggacc

SEQ ID NO: 3288969 - RNA, 19 nt, Artificial Sequence
  Description of Artificial Sequence: Synthetic oligonucleotide
gcuggaucgacccggaccg

SEQ ID NO: 3288970 - RNA, 19 nt, Artificial Sequence
  Description of Artificial Sequence: Synthetic oligonucleotide
cuggaucgacccggaccgc

SEQ ID NO: 3288971 - RNA, 19 nt, Artificial Sequence
  Description of Artificial Sequence: Synthetic oligonucleotide
uggaucgacccggaccgcc

SEQ ID NO: 3288972 - RNA, 19 nt, Artificial Sequence
  Description of Artificial Sequence: Synthetic oligonucleotide
ggaucgacccggaccgccg

SEQ ID NO: 3288973 - RNA, 19 nt, Artificial Sequence
  Description of Artificial Sequence: Synthetic oligonucleotide
gaucgacccggaccgccgu

SEQ ID NO: 3288974 - RNA, 19 nt, Artificial Sequence
  Description of Artificial Sequence: Synthetic oligonucleotide
aucgacccggaccgccgua

SEQ ID NO: 3288975 - RNA, 19 nt, Artificial Sequence
  Description of Artificial Sequence: Synthetic oligonucleotide
cgacccggaccgccguauc

SEQ ID NO: 3288976 - RNA, 19 nt, Artificial Sequence
  Description of Artificial Sequence: Synthetic oligonucleotide
gacccggaccgccguaucu

SEQ ID NO: 3288977 - RNA, 19 nt, Artificial Sequence
  Description of Artificial Sequence: Synthetic oligonucleotide
acccggaccgccguaucuu

SEQ ID NO: 3288978 - RNA, 19 nt, Artificial Sequence
  Description of Artificial Sequence: Synthetic oligonucleotide
cccggaccgccguaucuuc

SEQ ID NO: 3288979 - RNA, 19 nt, Artificial Sequence
  Description of Artificial Sequence: Synthetic oligonucleotide
ccggaccgccguaucuucc

SEQ ID NO: 3288980 - RNA, 19 nt, Artificial Sequence
  Description of Artificial Sequence: Synthetic oligonucleotide
cggaccgccguaucuuccg

SEQ ID NO: 3288981 - RNA, 19 nt, Artificial Sequence
  Description of Artificial Sequence: Synthetic oligonucleotide
ggaccgccguaucuuccgc

SEQ ID NO: 3288982 - RNA, 19 nt, Artificial Sequence
  Description of Artificial Sequence: Synthetic oligonucleotide
gaccgccguaucuuccgca

SEQ ID NO: 3288983 - RNA, 19 nt, Artificial Sequence
  Description of Artificial Sequence: Synthetic oligonucleotide
accgccguaucuuccgcau

SEQ ID NO: 3288984 - RNA, 19 nt, Artificial Sequence
  Description of Artificial Sequence: Synthetic oligonucleotide
guaucuuccgcaucccuug

SEQ ID NO: 3288985 - RNA, 19 nt, Artificial Sequence
  Description of Artificial Sequence: Synthetic oligonucleotide
ucccuuggaagcacaacgc

SEQ ID NO: 3288986 - RNA, 19 nt, Artificial Sequence
  Description of Artificial Sequence: Synthetic oligonucleotide
cccuuggaagcacaacgcc

SEQ ID NO: 3288987 - RNA, 19 nt, Artificial Sequence
  Description of Artificial Sequence: Synthetic oligonucleotide
ccuuggaagcacaacgcca

SEQ ID NO: 3288988 - RNA, 19 nt, Artificial Sequence
  Description of Artificial Sequence: Synthetic oligonucleotide
aacgccaggaaggauguca

SEQ ID NO: 3288989 - RNA, 19 nt, Artificial Sequence
  Description of Artificial Sequence: Synthetic oligonucleotide
gccaggaaggaugucacca

SEQ ID NO: 3288990 - RNA, 19 nt, Artificial Sequence
  Description of Artificial Sequence: Synthetic oligonucleotide
ucuucaaggccugggcgaa

SEQ ID NO: 3288991 - RNA, 19 nt, Artificial Sequence
  Description of Artificial Sequence: Synthetic oligonucleotide
cuucaaggccugggcgaag

SEQ ID NO: 3288992 - RNA, 19 nt, Artificial Sequence
  Description of Artificial Sequence: Synthetic oligonucleotide
ggcgaaggccagcggcagg

SEQ ID NO: 3288993 - RNA, 19 nt, Artificial Sequence
  Description of Artificial Sequence: Synthetic oligonucleotide
cgaaggccagcggcaggua

SEQ ID NO: 3288994 - RNA, 19 nt, Artificial Sequence
  Description of Artificial Sequence: Synthetic oligonucleotide
aggccagcggcagguacga

SEQ ID NO: 3288995 - RNA, 19 nt, Artificial Sequence
  Description of Artificial Sequence: Synthetic oligonucleotide
ccagcggcagguacgaggg

SEQ ID NO: 3288996 - RNA, 19 nt, Artificial Sequence
  Description of Artificial Sequence: Synthetic oligonucleotide
cagcggcagguacgagggg

SEQ ID NO: 3288997 - RNA, 19 nt, Artificial Sequence
  Description of Artificial Sequence: Synthetic oligonucleotide
agguacgaggggaacgcug

SEQ ID NO: 3288998 - RNA, 19 nt, Artificial Sequence
  Description of Artificial Sequence: Synthetic oligonucleotide
gguacgaggggaacgcuga

SEQ ID NO: 3288999 - RNA, 19 nt, Artificial Sequence
  Description of Artificial Sequence: Synthetic oligonucleotide
aggggaacgcugaggaucc

SEQ ID NO: 3289000 - RNA, 19 nt, Artificial Sequence
  Description of Artificial Sequence: Synthetic oligonucleotide
gaacgcugaggauccggcc

SEQ ID NO: 3289001 - RNA, 19 nt, Artificial Sequence
  Description of Artificial Sequence: Synthetic oligonucleotide
aacgcugaggauccggcca

SEQ ID NO: 3289002 - RNA, 19 nt, Artificial Sequence
  Description of Artificial Sequence: Synthetic oligonucleotide
acgcugaggauccggccaa

SEQ ID NO: 3289003 - RNA, 19 nt, Artificial Sequence
  Description of Artificial Sequence: Synthetic oligonucleotide
uccggccaaauggaagacc

SEQ ID NO: 3289004 - RNA, 19 nt, Artificial Sequence
  Description of Artificial Sequence: Synthetic oligonucleotide
cggccaaauggaagaccaa

SEQ ID NO: 3289005 - RNA, 19 nt, Artificial Sequence
  Description of Artificial Sequence: Synthetic oligonucleotide
gcgcccugaggagcacuca

SEQ ID NO: 3289006 - RNA, 19 nt, Artificial Sequence
  Description of Artificial Sequence: Synthetic oligonucleotide
gaggagcacucacauguuc

SEQ ID NO: 3289007 - RNA, 19 nt, Artificial Sequence
  Description of Artificial Sequence: Synthetic oligonucleotide
cacucacauguucaugcug

SEQ ID NO: 3289008 - RNA, 19 nt, Artificial Sequence
  Description of Artificial Sequence: Synthetic oligonucleotide
ccgcuccaagugcaacgac

SEQ ID NO: 3289009 - RNA, 19 nt, Artificial Sequence
  Description of Artificial Sequence: Synthetic oligonucleotide
cgcuccaagugcaacgacg

SEQ ID NO: 3289010 - RNA, 19 nt, Artificial Sequence
  Description of Artificial Sequence: Synthetic oligonucleotide
gcuccaagugcaacgacga

SEQ ID NO: 3289011 - RNA, 19 nt, Artificial Sequence
  Description of Artificial Sequence: Synthetic oligonucleotide
cuccaagugcaacgacgac

SEQ ID NO: 3289012 - RNA, 19 nt, Artificial Sequence
  Description of Artificial Sequence: Synthetic oligonucleotide
aagugcaacgacgacccgc

SEQ ID NO: 3289013 - RNA, 19 nt, Artificial Sequence
  Description of Artificial Sequence: Synthetic oligonucleotide
agugcaacgacgacccgca

SEQ ID NO: 3289014 - RNA, 19 nt, Artificial Sequence
  Description of Artificial Sequence: Synthetic oligonucleotide
gugcaacgacgacccgcac

SEQ ID NO: 3289015 - RNA, 19 nt, Artificial Sequence
  Description of Artificial Sequence: Synthetic oligonucleotide
ugcaacgacgacccgcaca

SEQ ID NO: 3289016 - RNA, 19 nt, Artificial Sequence
  Description of Artificial Sequence: Synthetic oligonucleotide
gcaacgacgacccgcacaa

SEQ ID NO: 3289017 - RNA, 19 nt, Artificial Sequence
  Description of Artificial Sequence: Synthetic oligonucleotide
caacgacgacccgcacaag

SEQ ID NO: 3289018 - RNA, 19 nt, Artificial Sequence
  Description of Artificial Sequence: Synthetic oligonucleotide
aacgacgacccgcacaagg

SEQ ID NO: 3289019 - RNA, 19 nt, Artificial Sequence
  Description of Artificial Sequence: Synthetic oligonucleotide
cgacccgcacaaggucuac

SEQ ID NO: 3289020 - RNA, 19 nt, Artificial Sequence
  Description of Artificial Sequence: Synthetic oligonucleotide
gacccgcacaaggucuacg

SEQ ID NO: 3289021 - RNA, 19 nt, Artificial Sequence
  Description of Artificial Sequence: Synthetic oligonucleotide
cccgcacaaggucuacgcg

SEQ ID NO: 3289022 - RNA, 19 nt, Artificial Sequence
  Description of Artificial Sequence: Synthetic oligonucleotide
ccgcacaaggucuacgcgg

SEQ ID NO: 3289023 - RNA, 19 nt, Artificial Sequence
  Description of Artificial Sequence: Synthetic oligonucleotide
cacaaggucuacgcgguug

SEQ ID NO: 3289024 - RNA, 19 nt, Artificial Sequence
  Description of Artificial Sequence: Synthetic oligonucleotide
acaaggucuacgcgguugc

SEQ ID NO: 3289025 - RNA, 19 nt, Artificial Sequence
  Description of Artificial Sequence: Synthetic oligonucleotide
caaggucuacgcgguugcc

SEQ ID NO: 3289026 - RNA, 19 nt, Artificial Sequence
  Description of Artificial Sequence: Synthetic oligonucleotide
aggucuacgcgguugccuc

SEQ ID NO: 3289027 - RNA, 19 nt, Artificial Sequence
  Description of Artificial Sequence: Synthetic oligonucleotide
ggucuacgcgguugccuca

SEQ ID NO: 3289028 - RNA, 19 nt, Artificial Sequence
  Description of Artificial Sequence: Synthetic oligonucleotide
gucuacgcgguugccucag

SEQ ID NO: 3289029 - RNA, 19 nt, Artificial Sequence
  Description of Artificial Sequence: Synthetic oligonucleotide
acgcgguugccucaggcgu

SEQ ID NO: 3289030 - RNA, 19 nt, Artificial Sequence
  Description of Artificial Sequence: Synthetic oligonucleotide
cgcgguugccucaggcguc

SEQ ID NO: 3289031 - RNA, 19 nt, Artificial Sequence
  Description of Artificial Sequence: Synthetic oligonucleotide
gcgguugccucaggcgucc

SEQ ID NO: 3289032 - RNA, 19 nt, Artificial Sequence
  Description of Artificial Sequence: Synthetic oligonucleotide
cgguugccucaggcguccc

SEQ ID NO: 3289033 - RNA, 19 nt, Artificial Sequence
  Description of Artificial Sequence: Synthetic oligonucleotide
gguugccucaggcgucccc

SEQ ID NO: 3289034 - RNA, 19 nt, Artificial Sequence
  Description of Artificial Sequence: Synthetic oligonucleotide
caggcguccccaaugacag

SEQ ID NO: 3289035 - RNA, 19 nt, Artificial Sequence
  Description of Artificial Sequence: Synthetic oligonucleotide
aggcguccccaaugacaga

SEQ ID NO: 3289036 - RNA, 19 nt, Artificial Sequence
  Description of Artificial Sequence: Synthetic oligonucleotide
ggcguccccaaugacagag

SEQ ID NO: 3289037 - RNA, 19 nt, Artificial Sequence
  Description of Artificial Sequence: Synthetic oligonucleotide
gcguccccaaugacagagg

SEQ ID NO: 3289038 - RNA, 19 nt, Artificial Sequence
  Description of Artificial Sequence: Synthetic oligonucleotide
uccccaaugacagagguuc

SEQ ID NO: 3289039 - RNA, 19 nt, Artificial Sequence
  Description of Artificial Sequence: Synthetic oligonucleotide
ccccaaugacagagguucu

SEQ ID NO: 3289040 - RNA, 19 nt, Artificial Sequence
  Description of Artificial Sequence: Synthetic oligonucleotide
ggggcccuguggcaggcgc

SEQ ID NO: 3289041 - RNA, 19 nt, Artificial Sequence
  Description of Artificial Sequence: Synthetic oligonucleotide
ggcccuguggcaggcgccc

SEQ ID NO: 3289042 - RNA, 19 nt, Artificial Sequence
  Description of Artificial Sequence: Synthetic oligonucleotide
uggcaggcgcccugcaaca

SEQ ID NO: 3289043 - RNA, 19 nt, Artificial Sequence
  Description of Artificial Sequence: Synthetic oligonucleotide
ugcucaaccaccacgauuu

SEQ ID NO: 3289044 - RNA, 19 nt, Artificial Sequence
  Description of Artificial Sequence: Synthetic oligonucleotide
aaccaccacgauuuggccu

SEQ ID NO: 3289045 - RNA, 19 nt, Artificial Sequence
  Description of Artificial Sequence: Synthetic oligonucleotide
accaccacgauuuggccuu

SEQ ID NO: 3289046 - RNA, 19 nt, Artificial Sequence
  Description of Artificial Sequence: Synthetic oligonucleotide
ccaccacgauuuggccuug

SEQ ID NO: 3289047 - RNA, 19 nt, Artificial Sequence
  Description of Artificial Sequence: Synthetic oligonucleotide
accacgauuuggccuugga

SEQ ID NO: 3289048 - RNA, 19 nt, Artificial Sequence
  Description of Artificial Sequence: Synthetic oligonucleotide
gcugcagcagcccugacgc

SEQ ID NO: 3289049 - RNA, 19 nt, Artificial Sequence
  Description of Artificial Sequence: Synthetic oligonucleotide
ugcagcagcccugacgcag

SEQ ID NO: 3289050 - RNA, 19 nt, Artificial Sequence
  Description of Artificial Sequence: Synthetic oligonucleotide
gcagcagcccugacgcagg

SEQ ID NO: 3289051 - RNA, 19 nt, Artificial Sequence
  Description of Artificial Sequence: Synthetic oligonucleotide
cagcagcccugacgcaggu

SEQ ID NO: 3289052 - RNA, 19 nt, Artificial Sequence
  Description of Artificial Sequence: Synthetic oligonucleotide
cugacgcagguggauuugg

SEQ ID NO: 3289053 - RNA, 19 nt, Artificial Sequence
  Description of Artificial Sequence: Synthetic oligonucleotide
cgcagguggauuuggaccu

SEQ ID NO: 3289054 - RNA, 19 nt, Artificial Sequence
  Description of Artificial Sequence: Synthetic oligonucleotide
gaccugcugcaguccguac

SEQ ID NO: 3289055 - RNA, 19 nt, Artificial Sequence
  Description of Artificial Sequence: Synthetic oligonucleotide
accugcugcaguccguacu

SEQ ID NO: 3289056 - RNA, 19 nt, Artificial Sequence
  Description of Artificial Sequence: Synthetic oligonucleotide
cugcugcaguccguacugc

SEQ ID NO: 3289057 - RNA, 19 nt, Artificial Sequence
  Description of Artificial Sequence: Synthetic oligonucleotide
ugcugcaguccguacugca

SEQ ID NO: 3289058 - RNA, 19 nt, Artificial Sequence
  Description of Artificial Sequence: Synthetic oligonucleotide
ugcagcacugcaacaucuc

SEQ ID NO: 3289059 - RNA, 19 nt, Artificial Sequence
  Description of Artificial Sequence: Synthetic oligonucleotide
caacaucucugcccucggc

SEQ ID NO: 3289060 - RNA, 19 nt, Artificial Sequence
  Description of Artificial Sequence: Synthetic oligonucleotide
aucucugcccucggcuccc

SEQ ID NO: 3289061 - RNA, 19 nt, Artificial Sequence
  Description of Artificial Sequence: Synthetic oligonucleotide
gcucccagccaacccugug

SEQ ID NO: 3289062 - RNA, 19 nt, Artificial Sequence
  Description of Artificial Sequence: Synthetic oligonucleotide
acacacaggggaugccuug

SEQ ID NO: 3289063 - RNA, 19 nt, Artificial Sequence
  Description of Artificial Sequence: Synthetic oligonucleotide
ggggaugccuugccugagg

SEQ ID NO: 3289064 - RNA, 19 nt, Artificial Sequence
  Description of Artificial Sequence: Synthetic oligonucleotide
gaugcucugcugcuuccug

SEQ ID NO: 3289065 - RNA, 19 nt, Artificial Sequence
  Description of Artificial Sequence: Synthetic oligonucleotide
gauggcugccucccagggc

SEQ ID NO: 3289066 - RNA, 19 nt, Artificial Sequence
  Description of Artificial Sequence: Synthetic oligonucleotide
agggccacaguuucaggau

SEQ ID NO: 3289067 - RNA, 19 nt, Artificial Sequence
  Description of Artificial Sequence: Synthetic oligonucleotide
acaguuucaggauuggagg

SEQ ID NO: 3289068 - RNA, 19 nt, Artificial Sequence
  Description of Artificial Sequence: Synthetic oligonucleotide
caguuucaggauuggaggc

SEQ ID NO: 3289069 - RNA, 19 nt, Artificial Sequence
  Description of Artificial Sequence: Synthetic oligonucleotide
gacggggcuggggcccucc

SEQ ID NO: 3289070 - RNA, 19 nt, Artificial Sequence
  Description of Artificial Sequence: Synthetic oligonucleotide
ggcccucccugugagugag

SEQ ID NO: 3289071 - RNA, 19 nt, Artificial Sequence
  Description of Artificial Sequence: Synthetic oligonucleotide
gugagugaggaaugugcca

SEQ ID NO: 3289072 - RNA, 19 nt, Artificial Sequence
  Description of Artificial Sequence: Synthetic oligonucleotide
aucccugcaccauccccgg

SEQ ID NO: 3289073 - RNA, 19 nt, Artificial Sequence
  Description of Artificial Sequence: Synthetic oligonucleotide
ugcaccauccccggcugag

SEQ ID NO: 3289074 - RNA, 19 nt, Artificial Sequence
  Description of Artificial Sequence: Synthetic oligonucleotide
cggcugaggagcuacucuu

SEQ ID NO: 3289075 - RNA, 19 nt, Artificial Sequence
  Description of Artificial Sequence: Synthetic oligonucleotide
ggagcuacucuuccagucu

SEQ ID NO: 3289076 - RNA, 19 nt, Artificial Sequence
  Description of Artificial Sequence: Synthetic oligonucleotide
cagucugccaaccccgcgc

SEQ ID NO: 3289077 - RNA, 19 nt, Artificial Sequence
  Description of Artificial Sequence: Synthetic oligonucleotide
agucugccaaccccgcgcc

SEQ ID NO: 3289078 - RNA, 19 nt, Artificial Sequence
  Description of Artificial Sequence: Synthetic oligonucleotide
ucugccaaccccgcgccuc

SEQ ID NO: 3289079 - RNA, 19 nt, Artificial Sequence
  Description of Artificial Sequence: Synthetic oligonucleotide
cugccaaccccgcgccucc

SEQ ID NO: 3289080 - RNA, 19 nt, Artificial Sequence
  Description of Artificial Sequence: Synthetic oligonucleotide
ccgccaccggcaggugaca

SEQ ID NO: 3289081 - RNA, 19 nt, Artificial Sequence
  Description of Artificial Sequence: Synthetic oligonucleotide
gccaccggcaggugacaua

SEQ ID NO: 3289082 - RNA, 19 nt, Artificial Sequence
  Description of Artificial Sequence: Synthetic oligonucleotide
caccggcaggugacauagg

SEQ ID NO: 3289083 - RNA, 19 nt, Artificial Sequence
  Description of Artificial Sequence: Synthetic oligonucleotide
accggcaggugacauagga

SEQ ID NO: 3289084 - RNA, 19 nt, Artificial Sequence
  Description of Artificial Sequence: Synthetic oligonucleotide
ccggcaggugacauaggag

SEQ ID NO: 3289085 - RNA, 19 nt, Artificial Sequence
  Description of Artificial Sequence: Synthetic oligonucleotide
cggcaggugacauaggagg

SEQ ID NO: 3289086 - RNA, 19 nt, Artificial Sequence
  Description of Artificial Sequence: Synthetic oligonucleotide
ggcaggugacauaggaggg

SEQ ID NO: 3289087 - RNA, 19 nt, Artificial Sequence
  Description of Artificial Sequence: Synthetic oligonucleotide
gcaggugacauaggagggc

SEQ ID NO: 3289088 - RNA, 19 nt, Artificial Sequence
  Description of Artificial Sequence: Synthetic oligonucleotide
auaggagggcugccccccc

SEQ ID NO: 3289089 - RNA, 19 nt, Artificial Sequence
  Description of Artificial Sequence: Synthetic oligonucleotide
uaggagggcugcccccccu

SEQ ID NO: 3289090 - RNA, 19 nt, Artificial Sequence
  Description of Artificial Sequence: Synthetic oligonucleotide
aggagggcugcccccccuc

SEQ ID NO: 3289091 - RNA, 19 nt, Artificial Sequence
  Description of Artificial Sequence: Synthetic oligonucleotide
ggagggcugcccccccucc

SEQ ID NO: 3289092 - RNA, 19 nt, Artificial Sequence
  Description of Artificial Sequence: Synthetic oligonucleotide
gagggcugcccccccuccu

SEQ ID NO: 3289093 - RNA, 19 nt, Artificial Sequence
  Description of Artificial Sequence: Synthetic oligonucleotide
agggcugcccccccuccug

SEQ ID NO: 3289094 - RNA, 19 nt, Artificial Sequence
  Description of Artificial Sequence: Synthetic oligonucleotide
gggcugcccccccuccugg

SEQ ID NO: 3289095 - RNA, 19 nt, Artificial Sequence
  Description of Artificial Sequence: Synthetic oligonucleotide
ggcugcccccccuccugga

SEQ ID NO: 3289096 - RNA, 19 nt, Artificial Sequence
  Description of Artificial Sequence: Synthetic oligonucleotide
gcugcccccccuccuggac

SEQ ID NO: 3289097 - RNA, 19 nt, Artificial Sequence
  Description of Artificial Sequence: Synthetic oligonucleotide
cugcccccccuccuggaca

SEQ ID NO: 3289098 - RNA, 19 nt, Artificial Sequence
  Description of Artificial Sequence: Synthetic oligonucleotide
ugcccccccuccuggacau

SEQ ID NO: 3289099 - RNA, 19 nt, Artificial Sequence
  Description of Artificial Sequence: Synthetic oligonucleotide
gcccccccuccuggacauc

SEQ ID NO: 3289100 - RNA, 19 nt, Artificial Sequence
  Description of Artificial Sequence: Synthetic oligonucleotide
cccccccuccuggacauca

SEQ ID NO: 3289101 - RNA, 19 nt, Artificial Sequence
  Description of Artificial Sequence: Synthetic oligonucleotide
ccuccuggacaucacuauc

SEQ ID NO: 3289102 - RNA, 19 nt, Artificial Sequence
  Description of Artificial Sequence: Synthetic oligonucleotide
ccuggacaucacuaucuac

SEQ ID NO: 3289103 - RNA, 19 nt, Artificial Sequence
  Description of Artificial Sequence: Synthetic oligonucleotide
cuggacaucacuaucuacu

SEQ ID NO: 3289104 - RNA, 19 nt, Artificial Sequence
  Description of Artificial Sequence: Synthetic oligonucleotide
caucacuaucuacuaccga

SEQ ID NO: 3289105 - RNA, 19 nt, Artificial Sequence
  Description of Artificial Sequence: Synthetic oligonucleotide
aucacuaucuacuaccgag

SEQ ID NO: 3289106 - RNA, 19 nt, Artificial Sequence
  Description of Artificial Sequence: Synthetic oligonucleotide
ucacuaucuacuaccgagg

SEQ ID NO: 3289107 - RNA, 19 nt, Artificial Sequence
  Description of Artificial Sequence: Synthetic oligonucleotide
cacuaucuacuaccgagga

SEQ ID NO: 3289108 - RNA, 19 nt, Artificial Sequence
  Description of Artificial Sequence: Synthetic oligonucleotide
acuaucuacuaccgaggaa

SEQ ID NO: 3289109 - RNA, 19 nt, Artificial Sequence
  Description of Artificial Sequence: Synthetic oligonucleotide
cuaucuacuaccgaggaaa

SEQ ID NO: 3289110 - RNA, 19 nt, Artificial Sequence
  Description of Artificial Sequence: Synthetic oligonucleotide
uaucuacuaccgaggaaag

SEQ ID NO: 3289111 - RNA, 19 nt, Artificial Sequence
  Description of Artificial Sequence: Synthetic oligonucleotide
ccgaggaaagauggucuac

SEQ ID NO: 3289112 - RNA, 19 nt, Artificial Sequence
  Description of Artificial Sequence: Synthetic oligonucleotide
cgaggaaagauggucuacc

SEQ ID NO: 3289113 - RNA, 19 nt, Artificial Sequence
  Description of Artificial Sequence: Synthetic oligonucleotide
gaggaaagauggucuacca

SEQ ID NO: 3289114 - RNA, 19 nt, Artificial Sequence
  Description of Artificial Sequence: Synthetic oligonucleotide
ggagcagguggacgacagc

SEQ ID NO: 3289115 - RNA, 19 nt, Artificial Sequence
  Description of Artificial Sequence: Synthetic oligonucleotide
ugugcuggccuaccagccc

SEQ ID NO: 3289116 - RNA, 19 nt, Artificial Sequence
  Description of Artificial Sequence: Synthetic oligonucleotide
uaccagccccuggacccgg

SEQ ID NO: 3289117 - RNA, 19 nt, Artificial Sequence
  Description of Artificial Sequence: Synthetic oligonucleotide
gcggcuggugcuguucccc

SEQ ID NO: 3289118 - RNA, 19 nt, Artificial Sequence
  Description of Artificial Sequence: Synthetic oligonucleotide
cuacacugaggacuugcug

SEQ ID NO: 3289119 - RNA, 19 nt, Artificial Sequence
  Description of Artificial Sequence: Synthetic oligonucleotide
cuggagcagcgugccggcc

SEQ ID NO: 3289120 - RNA, 19 nt, Artificial Sequence
  Description of Artificial Sequence: Synthetic oligonucleotide
agcuccuggccacgcgccu

SEQ ID NO: 3289121 - RNA, 19 nt, Artificial Sequence
  Description of Artificial Sequence: Synthetic oligonucleotide
gcuccuggccacgcgccug

SEQ ID NO: 3289122 - RNA, 19 nt, Artificial Sequence
  Description of Artificial Sequence: Synthetic oligonucleotide
gcgccugaagaagugcaag

SEQ ID NO: 3289123 - RNA, 19 nt, Artificial Sequence
  Description of Artificial Sequence: Synthetic oligonucleotide
gucuucugggccuugucgc

SEQ ID NO: 3289124 - RNA, 19 nt, Artificial Sequence
  Description of Artificial Sequence: Synthetic oligonucleotide
ucugggccuugucgcagca

SEQ ID NO: 3289125 - RNA, 19 nt, Artificial Sequence
  Description of Artificial Sequence: Synthetic oligonucleotide
cuugucgcagcagcucgag

SEQ ID NO: 3289126 - RNA, 19 nt, Artificial Sequence
  Description of Artificial Sequence: Synthetic oligonucleotide
uugucgcagcagcucgagg

SEQ ID NO: 3289127 - RNA, 19 nt, Artificial Sequence
  Description of Artificial Sequence: Synthetic oligonucleotide
ugucgcagcagcucgaggg

SEQ ID NO: 3289128 - RNA, 19 nt, Artificial Sequence
  Description of Artificial Sequence: Synthetic oligonucleotide
agcucgagggcggggaacc

SEQ ID NO: 3289129 - RNA, 19 nt, Artificial Sequence
  Description of Artificial Sequence: Synthetic oligonucleotide
gcucgagggcggggaaccc

SEQ ID NO: 3289130 - RNA, 19 nt, Artificial Sequence
  Description of Artificial Sequence: Synthetic oligonucleotide
cucgagggcggggaacccc

SEQ ID NO: 3289131 - RNA, 19 nt, Artificial Sequence
  Description of Artificial Sequence: Synthetic oligonucleotide
cgagggcggggaaccccca

SEQ ID NO: 3289132 - RNA, 19 nt, Artificial Sequence
  Description of Artificial Sequence: Synthetic oligonucleotide
cggggaacccccacucaac

SEQ ID NO: 3289133 - RNA, 19 nt, Artificial Sequence
  Description of Artificial Sequence: Synthetic oligonucleotide
ggggaacccccacucaacc

SEQ ID NO: 3289134 - RNA, 19 nt, Artificial Sequence
  Description of Artificial Sequence: Synthetic oligonucleotide
gggaacccccacucaaccu

SEQ ID NO: 3289135 - RNA, 19 nt, Artificial Sequence
  Description of Artificial Sequence: Synthetic oligonucleotide
ggaacccccacucaaccug

SEQ ID NO: 3289136 - RNA, 19 nt, Artificial Sequence
  Description of Artificial Sequence: Synthetic oligonucleotide
acccccacucaaccugcuc

SEQ ID NO: 3289137 - RNA, 19 nt, Artificial Sequence
  Description of Artificial Sequence: Synthetic oligonucleotide
ccacucaaccugcuccacc

SEQ ID NO: 3289138 - RNA, 19 nt, Artificial Sequence
  Description of Artificial Sequence: Synthetic oligonucleotide
cucaaccugcuccaccggg

SEQ ID NO: 3289139 - RNA, 19 nt, Artificial Sequence
  Description of Artificial Sequence: Synthetic oligonucleotide
ucaaccugcuccaccggga

SEQ ID NO: 3289140 - RNA, 19 nt, Artificial Sequence
  Description of Artificial Sequence: Synthetic oligonucleotide
ggaucaggagaccaccauc

SEQ ID NO: 3289141 - RNA, 19 nt, Artificial Sequence
  Description of Artificial Sequence: Synthetic oligonucleotide
ggguguuuugcacagagcu

SEQ ID NO: 3289142 - RNA, 19 nt, Artificial Sequence
  Description of Artificial Sequence: Synthetic oligonucleotide
uguuuugcacagagcuccg

SEQ ID NO: 3289143 - RNA, 19 nt, Artificial Sequence
  Description of Artificial Sequence: Synthetic oligonucleotide
guuuugcacagagcuccgg

SEQ ID NO: 3289144 - RNA, 19 nt, Artificial Sequence
  Description of Artificial Sequence: Synthetic oligonucleotide
uuuugcacagagcuccggg

SEQ ID NO: 3289145 - RNA, 19 nt, Artificial Sequence
  Description of Artificial Sequence: Synthetic oligonucleotide
cuccgggacuuccgcgaca

SEQ ID NO: 3289146 - RNA, 19 nt, Artificial Sequence
  Description of Artificial Sequence: Synthetic oligonucleotide
ccgggacuuccgcgacagc

SEQ ID NO: 3289147 - RNA, 19 nt, Artificial Sequence
  Description of Artificial Sequence: Synthetic oligonucleotide
ccgcgacagccgcagggag

SEQ ID NO: 3289148 - RNA, 19 nt, Artificial Sequence
  Description of Artificial Sequence: Synthetic oligonucleotide
cgcgacagccgcagggagc

SEQ ID NO: 3289149 - RNA, 19 nt, Artificial Sequence
  Description of Artificial Sequence: Synthetic oligonucleotide
caucuuccucugcuucggg

SEQ ID NO: 3289150 - RNA, 19 nt, Artificial Sequence
  Description of Artificial Sequence: Synthetic oligonucleotide
ugaagcugguuccccaguu

SEQ ID NO: 3289151 - RNA, 19 nt, Artificial Sequence
  Description of Artificial Sequence: Synthetic oligonucleotide
uuccccaguucugcgagua

SEQ ID NO: 3289152 - RNA, 19 nt, Artificial Sequence
  Description of Artificial Sequence: Synthetic oligonucleotide
uccccaguucugcgaguac

SEQ ID NO: 3289153 - RNA, 19 nt, Artificial Sequence
  Description of Artificial Sequence: Synthetic oligonucleotide
ccccaguucugcgaguacu

SEQ ID NO: 3289154 - RNA, 19 nt, Artificial Sequence
  Description of Artificial Sequence: Synthetic oligonucleotide
guucugcgaguacugguac

SEQ ID NO: 3289155 - RNA, 19 nt, Artificial Sequence
  Description of Artificial Sequence: Synthetic oligonucleotide
gcgaguacugguacgagca

SEQ ID NO: 3289156 - RNA, 19 nt, Artificial Sequence
  Description of Artificial Sequence: Synthetic oligonucleotide
acugguacgagcaggugca

SEQ ID NO: 3289157 - RNA, 19 nt, Artificial Sequence
  Description of Artificial Sequence: Synthetic oligonucleotide
gaggagccuccucccucaa

SEQ ID NO: 3289158 - RNA, 19 nt, Artificial Sequence
  Description of Artificial Sequence: Synthetic oligonucleotide
aggagccuccucccucaac

SEQ ID NO: 3289159 - RNA, 19 nt, Artificial Sequence
  Description of Artificial Sequence: Synthetic oligonucleotide
cccucaacaguggcaacgu

SEQ ID NO: 3289160 - RNA, 19 nt, Artificial Sequence
  Description of Artificial Sequence: Synthetic oligonucleotide
ccucaacaguggcaacguc

SEQ ID NO: 3289161 - RNA, 19 nt, Artificial Sequence
  Description of Artificial Sequence: Synthetic oligonucleotide
cucaacaguggcaacguca

SEQ ID NO: 3289162 - RNA, 19 nt, Artificial Sequence
  Description of Artificial Sequence: Synthetic oligonucleotide
agccugcagcucucugacu

SEQ ID NO: 3289163 - RNA, 19 nt, Artificial Sequence
  Description of Artificial Sequence: Synthetic oligonucleotide
gccugcagcucucugacuc

SEQ ID NO: 3289164 - RNA, 19 nt, Artificial Sequence
  Description of Artificial Sequence: Synthetic oligonucleotide
cagcucucugacucuuuca

SEQ ID NO: 3289165 - RNA, 19 nt, Artificial Sequence
  Description of Artificial Sequence: Synthetic oligonucleotide
cucugacucuuucaaccuc

SEQ ID NO: 3289166 - RNA, 19 nt, Artificial Sequence
  Description of Artificial Sequence: Synthetic oligonucleotide
cugacucuuucaaccucuu

SEQ ID NO: 3289167 - RNA, 19 nt, Artificial Sequence
  Description of Artificial Sequence: Synthetic oligonucleotide
acucuuucaaccucuucga

SEQ ID NO: 3289168 - RNA, 19 nt, Artificial Sequence
  Description of Artificial Sequence: Synthetic oligonucleotide
cucuuucaaccucuucgag

SEQ ID NO: 3289169 - RNA, 19 nt, Artificial Sequence
  Description of Artificial Sequence: Synthetic oligonucleotide
accucuucgagcuuaucga

SEQ ID NO: 3289170 - RNA, 19 nt, Artificial Sequence
  Description of Artificial Sequence: Synthetic oligonucleotide
ccucuucgagcuuaucgag

SEQ ID NO: 3289171 - RNA, 19 nt, Artificial Sequence
  Description of Artificial Sequence: Synthetic oligonucleotide
cucuucgagcuuaucgagc

SEQ ID NO: 3289172 - RNA, 19 nt, Artificial Sequence
  Description of Artificial Sequence: Synthetic oligonucleotide
ucuucgagcuuaucgagca

SEQ ID NO: 3289173 - RNA, 19 nt, Artificial Sequence
  Description of Artificial Sequence: Synthetic oligonucleotide
cuucgagcuuaucgagcaa

SEQ ID NO: 3289174 - RNA, 19 nt, Artificial Sequence
  Description of Artificial Sequence: Synthetic oligonucleotide
cgagcuuaucgagcaauac

SEQ ID NO: 3289175 - RNA, 19 nt, Artificial Sequence
  Description of Artificial Sequence: Synthetic oligonucleotide
cuuaucgagcaauaccaca

SEQ ID NO: 3289176 - RNA, 19 nt, Artificial Sequence
  Description of Artificial Sequence: Synthetic oligonucleotide
uaucgagcaauaccacaug

SEQ ID NO: 3289177 - RNA, 19 nt, Artificial Sequence
  Description of Artificial Sequence: Synthetic oligonucleotide
acaugcagacagacugaca

SEQ ID NO: 3289178 - RNA, 19 nt, Artificial Sequence
  Description of Artificial Sequence: Synthetic oligonucleotide
gcagacagacugacacucc

SEQ ID NO: 3289179 - RNA, 19 nt, Artificial Sequence
  Description of Artificial Sequence: Synthetic oligonucleotide
cucccuuccugugucccuc

SEQ ID NO: 3289180 - RNA, 19 nt, Artificial Sequence
  Description of Artificial Sequence: Synthetic oligonucleotide
uccugugucccucccccgg

SEQ ID NO: 3289181 - RNA, 19 nt, Artificial Sequence
  Description of Artificial Sequence: Synthetic oligonucleotide
ccugugucccucccccggc

SEQ ID NO: 3289182 - RNA, 19 nt, Artificial Sequence
  Description of Artificial Sequence: Synthetic oligonucleotide
gugucccucccccggccuc

SEQ ID NO: 3289183 - RNA, 19 nt, Artificial Sequence
  Description of Artificial Sequence: Synthetic oligonucleotide
ugucccucccccggccucc

SEQ ID NO: 3289184 - RNA, 19 nt, Artificial Sequence
  Description of Artificial Sequence: Synthetic oligonucleotide
ucccucccccggccuccgc

SEQ ID NO: 3289185 - RNA, 19 nt, Artificial Sequence
  Description of Artificial Sequence: Synthetic oligonucleotide
ccucccccggccuccgcug

SEQ ID NO: 3289186 - RNA, 19 nt, Artificial Sequence
  Description of Artificial Sequence: Synthetic oligonucleotide
ucccccggccuccgcuguc

SEQ ID NO: 3289187 - RNA, 19 nt, Artificial Sequence
  Description of Artificial Sequence: Synthetic oligonucleotide
ccccggccuccgcugucuu

SEQ ID NO: 3289188 - RNA, 19 nt, Artificial Sequence
  Description of Artificial Sequence: Synthetic oligonucleotide
cggccuccgcugucuugca

SEQ ID NO: 3289189 - RNA, 19 nt, Artificial Sequence
  Description of Artificial Sequence: Synthetic oligonucleotide
ccgcugucuugcaaagagc

SEQ ID NO: 3289190 - RNA, 19 nt, Artificial Sequence
  Description of Artificial Sequence: Synthetic oligonucleotide
ucuggcuccacugggucag

SEQ ID NO: 3289191 - RNA, 19 nt, Artificial Sequence
  Description of Artificial Sequence: Synthetic oligonucleotide
uggcuccacugggucaggc

SEQ ID NO: 3289192 - RNA, 19 nt, Artificial Sequence
  Description of Artificial Sequence: Synthetic oligonucleotide
ggcuccacugggucaggcu

SEQ ID NO: 3289193 - RNA, 19 nt, Artificial Sequence
  Description of Artificial Sequence: Synthetic oligonucleotide
gcuccacugggucaggcuu

SEQ ID NO: 3289194 - RNA, 19 nt, Artificial Sequence
  Description of Artificial Sequence: Synthetic oligonucleotide
cuugggcugguuucaccgu

SEQ ID NO: 3289195 - RNA, 19 nt, Artificial Sequence
  Description of Artificial Sequence: Synthetic oligonucleotide
uugggcugguuucaccguu

SEQ ID NO: 3289196 - RNA, 19 nt, Artificial Sequence
  Description of Artificial Sequence: Synthetic oligonucleotide
gggcugguuucaccguuac

SEQ ID NO: 3289197 - RNA, 19 nt, Artificial Sequence
  Description of Artificial Sequence: Synthetic oligonucleotide
ggcugguuucaccguuaca

SEQ ID NO: 3289198 - RNA, 19 nt, Artificial Sequence
  Description of Artificial Sequence: Synthetic oligonucleotide
cugguuucaccguuacaga

SEQ ID NO: 3289199 - RNA, 19 nt, Artificial Sequence
  Description of Artificial Sequence: Synthetic oligonucleotide
guuucaccguuacagagga

SEQ ID NO: 3289200 - RNA, 19 nt, Artificial Sequence
  Description of Artificial Sequence: Synthetic oligonucleotide
agcagcauuugcauccacu

SEQ ID NO: 3289201 - RNA, 19 nt, Artificial Sequence
  Description of Artificial Sequence: Synthetic oligonucleotide
cacucccugggcacaucuu

SEQ ID NO: 3289202 - RNA, 19 nt, Artificial Sequence
  Description of Artificial Sequence: Synthetic oligonucleotide
cugcuccggcccugagugc

SEQ ID NO: 3289203 - RNA, 19 nt, Artificial Sequence
  Description of Artificial Sequence: Synthetic oligonucleotide
cuccggcccugagugccgg

SEQ ID NO: 3289204 - RNA, 19 nt, Artificial Sequence
  Description of Artificial Sequence: Synthetic oligonucleotide
uccggcccugagugccggc

SEQ ID NO: 3289205 - RNA, 19 nt, Artificial Sequence
  Description of Artificial Sequence: Synthetic oligonucleotide
cggcccugagugccggcug

SEQ ID NO: 3289206 - RNA, 19 nt, Artificial Sequence
  Description of Artificial Sequence: Synthetic oligonucleotide
cugagugccggcugaaggu

SEQ ID NO: 3289207 - RNA, 19 nt, Artificial Sequence
  Description of Artificial Sequence: Synthetic oligonucleotide
gagugccggcugaagguca

SEQ ID NO: 3289208 - RNA, 19 nt, Artificial Sequence
  Description of Artificial Sequence: Synthetic oligonucleotide
gccggcugaaggucaacac

SEQ ID NO: 3289209 - RNA, 19 nt, Artificial Sequence
  Description of Artificial Sequence: Synthetic oligonucleotide
ggcugaaggucaacacacc

SEQ ID NO: 3289210 - RNA, 19 nt, Artificial Sequence
  Description of Artificial Sequence: Synthetic oligonucleotide
ugaaggucaacacaccaca

SEQ ID NO: 3289211 - RNA, 19 nt, Artificial Sequence
  Description of Artificial Sequence: Synthetic oligonucleotide
ggcagcaguggggccauac

SEQ ID NO: 3289212 - RNA, 19 nt, Artificial Sequence
  Description of Artificial Sequence: Synthetic oligonucleotide
caguggggccauacugacc

SEQ ID NO: 3289213 - RNA, 19 nt, Artificial Sequence
  Description of Artificial Sequence: Synthetic oligonucleotide
aguggggccauacugacca

SEQ ID NO: 3289214 - RNA, 19 nt, Artificial Sequence
  Description of Artificial Sequence: Synthetic oligonucleotide
acugaccagcccaggaacu

SEQ ID NO: 3289215 - RNA, 19 nt, Artificial Sequence
  Description of Artificial Sequence: Synthetic oligonucleotide
ugaccagcccaggaacucu

SEQ ID NO: 3289216 - RNA, 19 nt, Artificial Sequence
  Description of Artificial Sequence: Synthetic oligonucleotide
gcccaggaacucuccccuc

SEQ ID NO: 3289217 - RNA, 19 nt, Artificial Sequence
  Description of Artificial Sequence: Synthetic oligonucleotide
uccccuccuccaaaagcug

SEQ ID NO: 3289218 - RNA, 19 nt, Artificial Sequence
  Description of Artificial Sequence: Synthetic oligonucleotide
aaagcugcugcaauaagcu

SEQ ID NO: 3289219 - RNA, 19 nt, Artificial Sequence
  Description of Artificial Sequence: Synthetic oligonucleotide
agcugcugcaauaagcuuu

SEQ ID NO: 3289220 - RNA, 19 nt, Artificial Sequence
  Description of Artificial Sequence: Synthetic oligonucleotide
ugcaauaagcuuugugguu

SEQ ID NO: 3289221 - RNA, 19 nt, Artificial Sequence
  Description of Artificial Sequence: Synthetic oligonucleotide
auaagcuuugugguuggga

SEQ ID NO: 3289222 - RNA, 19 nt, Artificial Sequence
  Description of Artificial Sequence: Synthetic oligonucleotide
uaagcuuugugguugggaa

SEQ ID NO: 3289223 - RNA, 19 nt, Artificial Sequence
  Description of Artificial Sequence: Synthetic oligonucleotide
uugugguugggaaagccuu

SEQ ID NO: 3289224 - RNA, 19 nt, Artificial Sequence
  Description of Artificial Sequence: Synthetic oligonucleotide
cuuuccucugacugcacgg

SEQ ID NO: 3289225 - RNA, 19 nt, Artificial Sequence
  Description of Artificial Sequence: Synthetic oligonucleotide
cucugacugcacggugcuu

SEQ ID NO: 3289226 - RNA, 19 nt, Artificial Sequence
  Description of Artificial Sequence: Synthetic oligonucleotide
acugcacggugcuucaacc

SEQ ID NO: 3289227 - RNA, 19 nt, Artificial Sequence
  Description of Artificial Sequence: Synthetic oligonucleotide
ugcacggugcuucaacccc

SEQ ID NO: 3289228 - RNA, 19 nt, Artificial Sequence
  Description of Artificial Sequence: Synthetic oligonucleotide
cggcaccagcgugguguac

SEQ ID NO: 3289229 - RNA, 19 nt, Artificial Sequence
  Description of Artificial Sequence: Synthetic oligonucleotide
ggcaccagcgugguguaca

SEQ ID NO: 3289230 - RNA, 19 nt, Artificial Sequence
  Description of Artificial Sequence: Synthetic oligonucleotide
gcaccagcgugguguacag

SEQ ID NO: 3289231 - RNA, 19 nt, Artificial Sequence
  Description of Artificial Sequence: Synthetic oligonucleotide
gguguacagugggguucau

SEQ ID NO: 3289232 - RNA, 19 nt, Artificial Sequence
  Description of Artificial Sequence: Synthetic oligonucleotide
guguacagugggguucauu

SEQ ID NO: 3289233 - RNA, 19 nt, Artificial Sequence
  Description of Artificial Sequence: Synthetic oligonucleotide
uguacagugggguucauuc

SEQ ID NO: 3289234 - RNA, 19 nt, Artificial Sequence
  Description of Artificial Sequence: Synthetic oligonucleotide
guacagugggguucauucc

SEQ ID NO: 3289235 - RNA, 19 nt, Artificial Sequence
  Description of Artificial Sequence: Synthetic oligonucleotide
agugggguucauuccuccu

SEQ ID NO: 3289236 - RNA, 19 nt, Artificial Sequence
  Description of Artificial Sequence: Synthetic oligonucleotide
gugggguucauuccuccuu

SEQ ID NO: 3289237 - RNA, 19 nt, Artificial Sequence
  Description of Artificial Sequence: Synthetic oligonucleotide
ggguucauuccuccuucgc

SEQ ID NO: 3289238 - RNA, 19 nt, Artificial Sequence
  Description of Artificial Sequence: Synthetic oligonucleotide
gguucauuccuccuucgcu

SEQ ID NO: 3289239 - RNA, 19 nt, Artificial Sequence
  Description of Artificial Sequence: Synthetic oligonucleotide
guucauuccuccuucgcuc

SEQ ID NO: 3289240 - RNA, 19 nt, Artificial Sequence
  Description of Artificial Sequence: Synthetic oligonucleotide
uucauuccuccuucgcucc

SEQ ID NO: 3289241 - RNA, 19 nt, Artificial Sequence
  Description of Artificial Sequence: Synthetic oligonucleotide
cuccuucgcucccaggaca

SEQ ID NO: 3289242 - RNA, 19 nt, Artificial Sequence
  Description of Artificial Sequence: Synthetic oligonucleotide
gcugucuggaguuuuuggg

SEQ ID NO: 3289243 - RNA, 19 nt, Artificial Sequence
  Description of Artificial Sequence: Synthetic oligonucleotide
cuuuucugaaguuuuguaa

SEQ ID NO: 3289244 - RNA, 19 nt, Artificial Sequence
  Description of Artificial Sequence: Synthetic oligonucleotide
uucugaaguuuuguaaguu

SEQ ID NO: 3289245 - RNA, 19 nt, Artificial Sequence
  Description of Artificial Sequence: Synthetic oligonucleotide
cugaaguuuuguaaguuua

SEQ ID NO: 3289246 - RNA, 19 nt, Artificial Sequence
  Description of Artificial Sequence: Synthetic oligonucleotide
ugaaguuuuguaaguuuaa

SEQ ID NO: 3289247 - RNA, 19 nt, Artificial Sequence
  Description of Artificial Sequence: Synthetic oligonucleotide
aaauauguuuauauaaagg

SEQ ID NO: 3289248 - RNA, 19 nt, Artificial Sequence
  Description of Artificial Sequence: Synthetic oligonucleotide
aauauguuuauauaaaggu

SEQ ID NO: 3289249 - RNA, 19 nt, Artificial Sequence
  Description of Artificial Sequence: Synthetic oligonucleotide
uguuuauauaaaggugcuu

SEQ ID NO: 3289250 - RNA, 19 nt, Artificial Sequence
  Description of Artificial Sequence: Synthetic oligonucleotide
uccgcgcacggacgggacc

SEQ ID NO: 3289251 - RNA, 19 nt, Artificial Sequence
  Description of Artificial Sequence: Synthetic oligonucleotide
cuccgcgcacggacgggac

SEQ ID NO: 3289252 - RNA, 19 nt, Artificial Sequence
  Description of Artificial Sequence: Synthetic oligonucleotide
cacggcuccgcgcacggac

SEQ ID NO: 3289253 - RNA, 19 nt, Artificial Sequence
  Description of Artificial Sequence: Synthetic oligonucleotide
gaggcuuccgcacggcucc

SEQ ID NO: 3289254 - RNA, 19 nt, Artificial Sequence
  Description of Artificial Sequence: Synthetic oligonucleotide
cuccgaggcuuccgcacgg

SEQ ID NO: 3289255 - RNA, 19 nt, Artificial Sequence
  Description of Artificial Sequence: Synthetic oligonucleotide
ccucgcuguccagugcugc

SEQ ID NO: 3289256 - RNA, 19 nt, Artificial Sequence
  Description of Artificial Sequence: Synthetic oligonucleotide
gggcgucccccucgcuguc

SEQ ID NO: 3289257 - RNA, 19 nt, Artificial Sequence
  Description of Artificial Sequence: Synthetic oligonucleotide
uucugggcgucccccucgc

SEQ ID NO: 3289258 - RNA, 19 nt, Artificial Sequence
  Description of Artificial Sequence: Synthetic oligonucleotide
cccgaagcgcagcuucugg

SEQ ID NO: 3289259 - RNA, 19 nt, Artificial Sequence
  Description of Artificial Sequence: Synthetic oligonucleotide
auggcccgaagcgcagcuu

SEQ ID NO: 3289260 - RNA, 19 nt, Artificial Sequence
  Description of Artificial Sequence: Synthetic oligonucleotide
cauggcccgaagcgcagcu

SEQ ID NO: 3289261 - RNA, 19 nt, Artificial Sequence
  Description of Artificial Sequence: Synthetic oligonucleotide
cagccauggcccgaagcgc

SEQ ID NO: 3289262 - RNA, 19 nt, Artificial Sequence
  Description of Artificial Sequence: Synthetic oligonucleotide
agcagccauggcccgaagc

SEQ ID NO: 3289263 - RNA, 19 nt, Artificial Sequence
  Description of Artificial Sequence: Synthetic oligonucleotide
ggcguucagcagccauggc

SEQ ID NO: 3289264 - RNA, 19 nt, Artificial Sequence
  Description of Artificial Sequence: Synthetic oligonucleotide
acggcguucagcagccaug

SEQ ID NO: 3289265 - RNA, 19 nt, Artificial Sequence
  Description of Artificial Sequence: Synthetic oligonucleotide
cagcagaggccgcgguaca

SEQ ID NO: 3289266 - RNA, 19 nt, Artificial Sequence
  Description of Artificial Sequence: Synthetic oligonucleotide
uccagcagaggccgcggua

SEQ ID NO: 3289267 - RNA, 19 nt, Artificial Sequence
  Description of Artificial Sequence: Synthetic oligonucleotide
ggucgauccagcagaggcc

SEQ ID NO: 3289268 - RNA, 19 nt, Artificial Sequence
  Description of Artificial Sequence: Synthetic oligonucleotide
cgggucgauccagcagagg

SEQ ID NO: 3289269 - RNA, 19 nt, Artificial Sequence
  Description of Artificial Sequence: Synthetic oligonucleotide
ccgggucgauccagcagag

SEQ ID NO: 3289270 - RNA, 19 nt, Artificial Sequence
  Description of Artificial Sequence: Synthetic oligonucleotide
gguccgggucgauccagca

SEQ ID NO: 3289271 - RNA, 19 nt, Artificial Sequence
  Description of Artificial Sequence: Synthetic oligonucleotide
cgguccgggucgauccagc

SEQ ID NO: 3289272 - RNA, 19 nt, Artificial Sequence
  Description of Artificial Sequence: Synthetic oligonucleotide
gcgguccgggucgauccag

SEQ ID NO: 3289273 - RNA, 19 nt, Artificial Sequence
  Description of Artificial Sequence: Synthetic oligonucleotide
ggcgguccgggucgaucca

SEQ ID NO: 3289274 - RNA, 19 nt, Artificial Sequence
  Description of Artificial Sequence: Synthetic oligonucleotide
cggcgguccgggucgaucc

SEQ ID NO: 3289275 - RNA, 19 nt, Artificial Sequence
  Description of Artificial Sequence: Synthetic oligonucleotide
acggcgguccgggucgauc

SEQ ID NO: 3289276 - RNA, 19 nt, Artificial Sequence
  Description of Artificial Sequence: Synthetic oligonucleotide
uacggcgguccgggucgau

SEQ ID NO: 3289277 - RNA, 19 nt, Artificial Sequence
  Description of Artificial Sequence: Synthetic oligonucleotide
gauacggcgguccgggucg

SEQ ID NO: 3289278 - RNA, 19 nt, Artificial Sequence
  Description of Artificial Sequence: Synthetic oligonucleotide
agauacggcgguccggguc

SEQ ID NO: 3289279 - RNA, 19 nt, Artificial Sequence
  Description of Artificial Sequence: Synthetic oligonucleotide
aagauacggcgguccgggu

SEQ ID NO: 3289280 - RNA, 19 nt, Artificial Sequence
  Description of Artificial Sequence: Synthetic oligonucleotide
gaagauacggcgguccggg

SEQ ID NO: 3289281 - RNA, 19 nt, Artificial Sequence
  Description of Artificial Sequence: Synthetic oligonucleotide
ggaagauacggcgguccgg

SEQ ID NO: 3289282 - RNA, 19 nt, Artificial Sequence
  Description of Artificial Sequence: Synthetic oligonucleotide
cggaagauacggcgguccg

SEQ ID NO: 3289283 - RNA, 19 nt, Artificial Sequence
  Description of Artificial Sequence: Synthetic oligonucleotide
gcggaagauacggcggucc

SEQ ID NO: 3289284 - RNA, 19 nt, Artificial Sequence
  Description of Artificial Sequence: Synthetic oligonucleotide
ugcggaagauacggcgguc

SEQ ID NO: 3289285 - RNA, 19 nt, Artificial Sequence
  Description of Artificial Sequence: Synthetic oligonucleotide
augcggaagauacggcggu

SEQ ID NO: 3289286 - RNA, 19 nt, Artificial Sequence
  Description of Artificial Sequence: Synthetic oligonucleotide
caagggaugcggaagauac

SEQ ID NO: 3289287 - RNA, 19 nt, Artificial Sequence
  Description of Artificial Sequence: Synthetic oligonucleotide
gcguugugcuuccaaggga

SEQ ID NO: 3289288 - RNA, 19 nt, Artificial Sequence
  Description of Artificial Sequence: Synthetic oligonucleotide
ggcguugugcuuccaaggg

SEQ ID NO: 3289289 - RNA, 19 nt, Artificial Sequence
  Description of Artificial Sequence: Synthetic oligonucleotide
uggcguugugcuuccaagg

SEQ ID NO: 3289290 - RNA, 19 nt, Artificial Sequence
  Description of Artificial Sequence: Synthetic oligonucleotide
ugacauccuuccuggcguu

SEQ ID NO: 3289291 - RNA, 19 nt, Artificial Sequence
  Description of Artificial Sequence: Synthetic oligonucleotide
uggugacauccuuccuggc

SEQ ID NO: 3289292 - RNA, 19 nt, Artificial Sequence
  Description of Artificial Sequence: Synthetic oligonucleotide
uucgcccaggccuugaaga

SEQ ID NO: 3289293 - RNA, 19 nt, Artificial Sequence
  Description of Artificial Sequence: Synthetic oligonucleotide
cuucgcccaggccuugaag

SEQ ID NO: 3289294 - RNA, 19 nt, Artificial Sequence
  Description of Artificial Sequence: Synthetic oligonucleotide
ccugccgcuggccuucgcc

SEQ ID NO: 3289295 - RNA, 19 nt, Artificial Sequence
  Description of Artificial Sequence: Synthetic oligonucleotide
uaccugccgcuggccuucg

SEQ ID NO: 3289296 - RNA, 19 nt, Artificial Sequence
  Description of Artificial Sequence: Synthetic oligonucleotide
ucguaccugccgcuggccu

SEQ ID NO: 3289297 - RNA, 19 nt, Artificial Sequence
  Description of Artificial Sequence: Synthetic oligonucleotide
cccucguaccugccgcugg

SEQ ID NO: 3289298 - RNA, 19 nt, Artificial Sequence
  Description of Artificial Sequence: Synthetic oligonucleotide
ccccucguaccugccgcug

SEQ ID NO: 3289299 - RNA, 19 nt, Artificial Sequence
  Description of Artificial Sequence: Synthetic oligonucleotide
cagcguuccccucguaccu

SEQ ID NO: 3289300 - RNA, 19 nt, Artificial Sequence
  Description of Artificial Sequence: Synthetic oligonucleotide
ucagcguuccccucguacc

SEQ ID NO: 3289301 - RNA, 19 nt, Artificial Sequence
  Description of Artificial Sequence: Synthetic oligonucleotide
ggauccucagcguuccccu

SEQ ID NO: 3289302 - RNA, 19 nt, Artificial Sequence
  Description of Artificial Sequence: Synthetic oligonucleotide
ggccggauccucagcguuc

SEQ ID NO: 3289303 - RNA, 19 nt, Artificial Sequence
  Description of Artificial Sequence: Synthetic oligonucleotide
uggccggauccucagcguu

SEQ ID NO: 3289304 - RNA, 19 nt, Artificial Sequence
  Description of Artificial Sequence: Synthetic oligonucleotide
uuggccggauccucagcgu

SEQ ID NO: 3289305 - RNA, 19 nt, Artificial Sequence
  Description of Artificial Sequence: Synthetic oligonucleotide
ggucuuccauuuggccgga

SEQ ID NO: 3289306 - RNA, 19 nt, Artificial Sequence
  Description of Artificial Sequence: Synthetic oligonucleotide
uuggucuuccauuuggccg

SEQ ID NO: 3289307 - RNA, 19 nt, Artificial Sequence
  Description of Artificial Sequence: Synthetic oligonucleotide
ugagugcuccucagggcgc

SEQ ID NO: 3289308 - RNA, 19 nt, Artificial Sequence
  Description of Artificial Sequence: Synthetic oligonucleotide
gaacaugugagugcuccuc

SEQ ID NO: 3289309 - RNA, 19 nt, Artificial Sequence
  Description of Artificial Sequence: Synthetic oligonucleotide
cagcaugaacaugugagug

SEQ ID NO: 3289310 - RNA, 19 nt, Artificial Sequence
  Description of Artificial Sequence: Synthetic oligonucleotide
gucguugcacuuggagcgg

SEQ ID NO: 3289311 - RNA, 19 nt, Artificial Sequence
  Description of Artificial Sequence: Synthetic oligonucleotide
cgucguugcacuuggagcg

SEQ ID NO: 3289312 - RNA, 19 nt, Artificial Sequence
  Description of Artificial Sequence: Synthetic oligonucleotide
ucgucguugcacuuggagc

SEQ ID NO: 3289313 - RNA, 19 nt, Artificial Sequence
  Description of Artificial Sequence: Synthetic oligonucleotide
gucgucguugcacuuggag

SEQ ID NO: 3289314 - RNA, 19 nt, Artificial Sequence
  Description of Artificial Sequence: Synthetic oligonucleotide
gcgggucgucguugcacuu

SEQ ID NO: 3289315 - RNA, 19 nt, Artificial Sequence
  Description of Artificial Sequence: Synthetic oligonucleotide
ugcgggucgucguugcacu

SEQ ID NO: 3289316 - RNA, 19 nt, Artificial Sequence
  Description of Artificial Sequence: Synthetic oligonucleotide
gugcgggucgucguugcac

SEQ ID NO: 3289317 - RNA, 19 nt, Artificial Sequence
  Description of Artificial Sequence: Synthetic oligonucleotide
ugugcgggucgucguugca

SEQ ID NO: 3289318 - RNA, 19 nt, Artificial Sequence
  Description of Artificial Sequence: Synthetic oligonucleotide
uugugcgggucgucguugc

SEQ ID NO: 3289319 - RNA, 19 nt, Artificial Sequence
  Description of Artificial Sequence: Synthetic oligonucleotide
cuugugcgggucgucguug

SEQ ID NO: 3289320 - RNA, 19 nt, Artificial Sequence
  Description of Artificial Sequence: Synthetic oligonucleotide
ccuugugcgggucgucguu

SEQ ID NO: 3289321 - RNA, 19 nt, Artificial Sequence
  Description of Artificial Sequence: Synthetic oligonucleotide
guagaccuugugcgggucg

SEQ ID NO: 3289322 - RNA, 19 nt, Artificial Sequence
  Description of Artificial Sequence: Synthetic oligonucleotide
cguagaccuugugcggguc

SEQ ID NO: 3289323 - RNA, 19 nt, Artificial Sequence
  Description of Artificial Sequence: Synthetic oligonucleotide
cgcguagaccuugugcggg

SEQ ID NO: 3289324 - RNA, 19 nt, Artificial Sequence
  Description of Artificial Sequence: Synthetic oligonucleotide
ccgcguagaccuugugcgg

SEQ ID NO: 3289325 - RNA, 19 nt, Artificial Sequence
  Description of Artificial Sequence: Synthetic oligonucleotide
caaccgcguagaccuugug

SEQ ID NO: 3289326 - RNA, 19 nt, Artificial Sequence
  Description of Artificial Sequence: Synthetic oligonucleotide
gcaaccgcguagaccuugu

SEQ ID NO: 3289327 - RNA, 19 nt, Artificial Sequence
  Description of Artificial Sequence: Synthetic oligonucleotide
ggcaaccgcguagaccuug

SEQ ID NO: 3289328 - RNA, 19 nt, Artificial Sequence
  Description of Artificial Sequence: Synthetic oligonucleotide
gaggcaaccgcguagaccu

SEQ ID NO: 3289329 - RNA, 19 nt, Artificial Sequence
  Description of Artificial Sequence: Synthetic oligonucleotide
ugaggcaaccgcguagacc

SEQ ID NO: 3289330 - RNA, 19 nt, Artificial Sequence
  Description of Artificial Sequence: Synthetic oligonucleotide
cugaggcaaccgcguagac

SEQ ID NO: 3289331 - RNA, 19 nt, Artificial Sequence
  Description of Artificial Sequence: Synthetic oligonucleotide
acgccugaggcaaccgcgu

SEQ ID NO: 3289332 - RNA, 19 nt, Artificial Sequence
  Description of Artificial Sequence: Synthetic oligonucleotide
gacgccugaggcaaccgcg

SEQ ID NO: 3289333 - RNA, 19 nt, Artificial Sequence
  Description of Artificial Sequence: Synthetic oligonucleotide
ggacgccugaggcaaccgc

SEQ ID NO: 3289334 - RNA, 19 nt, Artificial Sequence
  Description of Artificial Sequence: Synthetic oligonucleotide
gggacgccugaggcaaccg

SEQ ID NO: 3289335 - RNA, 19 nt, Artificial Sequence
  Description of Artificial Sequence: Synthetic oligonucleotide
ggggacgccugaggcaacc

SEQ ID NO: 3289336 - RNA, 19 nt, Artificial Sequence
  Description of Artificial Sequence: Synthetic oligonucleotide
cugucauuggggacgccug

SEQ ID NO: 3289337 - RNA, 19 nt, Artificial Sequence
  Description of Artificial Sequence: Synthetic oligonucleotide
ucugucauuggggacgccu

SEQ ID NO: 3289338 - RNA, 19 nt, Artificial Sequence
  Description of Artificial Sequence: Synthetic oligonucleotide
cucugucauuggggacgcc

SEQ ID NO: 3289339 - RNA, 19 nt, Artificial Sequence
  Description of Artificial Sequence: Synthetic oligonucleotide
ccucugucauuggggacgc

SEQ ID NO: 3289340 - RNA, 19 nt, Artificial Sequence
  Description of Artificial Sequence: Synthetic oligonucleotide
gaaccucugucauugggga

SEQ ID NO: 3289341 - RNA, 19 nt, Artificial Sequence
  Description of Artificial Sequence: Synthetic oligonucleotide
agaaccucugucauugggg

SEQ ID NO: 3289342 - RNA, 19 nt, Artificial Sequence
  Description of Artificial Sequence: Synthetic oligonucleotide
gcgccugccacagggcccc

SEQ ID NO: 3289343 - RNA, 19 nt, Artificial Sequence
  Description of Artificial Sequence: Synthetic oligonucleotide
gggcgccugccacagggcc

SEQ ID NO: 3289344 - RNA, 19 nt, Artificial Sequence
  Description of Artificial Sequence: Synthetic oligonucleotide
uguugcagggcgccugcca

SEQ ID NO: 3289345 - RNA, 19 nt, Artificial Sequence
  Description of Artificial Sequence: Synthetic oligonucleotide
aaaucguggugguugagca

SEQ ID NO: 3289346 - RNA, 19 nt, Artificial Sequence
  Description of Artificial Sequence: Synthetic oligonucleotide
aggccaaaucguggugguu

SEQ ID NO: 3289347 - RNA, 19 nt, Artificial Sequence
  Description of Artificial Sequence: Synthetic oligonucleotide
aaggccaaaucgugguggu

SEQ ID NO: 3289348 - RNA, 19 nt, Artificial Sequence
  Description of Artificial Sequence: Synthetic oligonucleotide
caaggccaaaucguggugg

SEQ ID NO: 3289349 - RNA, 19 nt, Artificial Sequence
  Description of Artificial Sequence: Synthetic oligonucleotide
uccaaggccaaaucguggu

SEQ ID NO: 3289350 - RNA, 19 nt, Artificial Sequence
  Description of Artificial Sequence: Synthetic oligonucleotide
gcgucagggcugcugcagc

SEQ ID NO: 3289351 - RNA, 19 nt, Artificial Sequence
  Description of Artificial Sequence: Synthetic oligonucleotide
cugcgucagggcugcugca

SEQ ID NO: 3289352 - RNA, 19 nt, Artificial Sequence
  Description of Artificial Sequence: Synthetic oligonucleotide
ccugcgucagggcugcugc

SEQ ID NO: 3289353 - RNA, 19 nt, Artificial Sequence
  Description of Artificial Sequence: Synthetic oligonucleotide
accugcgucagggcugcug

SEQ ID NO: 3289354 - RNA, 19 nt, Artificial Sequence
  Description of Artificial Sequence: Synthetic oligonucleotide
ccaaauccaccugcgucag

SEQ ID NO: 3289355 - RNA, 19 nt, Artificial Sequence
  Description of Artificial Sequence: Synthetic oligonucleotide
agguccaaauccaccugcg

SEQ ID NO: 3289356 - RNA, 19 nt, Artificial Sequence
  Description of Artificial Sequence: Synthetic oligonucleotide
guacggacugcagcagguc

SEQ ID NO: 3289357 - RNA, 19 nt, Artificial Sequence
  Description of Artificial Sequence: Synthetic oligonucleotide
aguacggacugcagcaggu

SEQ ID NO: 3289358 - RNA, 19 nt, Artificial Sequence
  Description of Artificial Sequence: Synthetic oligonucleotide
gcaguacggacugcagcag

SEQ ID NO: 3289359 - RNA, 19 nt, Artificial Sequence
  Description of Artificial Sequence: Synthetic oligonucleotide
ugcaguacggacugcagca

SEQ ID NO: 3289360 - RNA, 19 nt, Artificial Sequence
  Description of Artificial Sequence: Synthetic oligonucleotide
gagauguugcagugcugca

SEQ ID NO: 3289361 - RNA, 19 nt, Artificial Sequence
  Description of Artificial Sequence: Synthetic oligonucleotide
gccgagggcagagauguug

SEQ ID NO: 3289362 - RNA, 19 nt, Artificial Sequence
  Description of Artificial Sequence: Synthetic oligonucleotide
gggagccgagggcagagau

SEQ ID NO: 3289363 - RNA, 19 nt, Artificial Sequence
  Description of Artificial Sequence: Synthetic oligonucleotide
cacaggguuggcugggagc

SEQ ID NO: 3289364 - RNA, 19 nt, Artificial Sequence
  Description of Artificial Sequence: Synthetic oligonucleotide
caaggcauccccugugugu

SEQ ID NO: 3289365 - RNA, 19 nt, Artificial Sequence
  Description of Artificial Sequence: Synthetic oligonucleotide
ccucaggcaaggcaucccc

SEQ ID NO: 3289366 - RNA, 19 nt, Artificial Sequence
  Description of Artificial Sequence: Synthetic oligonucleotide
caggaagcagcagagcauc

SEQ ID NO: 3289367 - RNA, 19 nt, Artificial Sequence
  Description of Artificial Sequence: Synthetic oligonucleotide
gcccugggaggcagccauc

SEQ ID NO: 3289368 - RNA, 19 nt, Artificial Sequence
  Description of Artificial Sequence: Synthetic oligonucleotide
auccugaaacuguggcccu

SEQ ID NO: 3289369 - RNA, 19 nt, Artificial Sequence
  Description of Artificial Sequence: Synthetic oligonucleotide
ccuccaauccugaaacugu

SEQ ID NO: 3289370 - RNA, 19 nt, Artificial Sequence
  Description of Artificial Sequence: Synthetic oligonucleotide
gccuccaauccugaaacug

SEQ ID NO: 3289371 - RNA, 19 nt, Artificial Sequence
  Description of Artificial Sequence: Synthetic oligonucleotide
ggagggccccagccccguc

SEQ ID NO: 3289372 - RNA, 19 nt, Artificial Sequence
  Description of Artificial Sequence: Synthetic oligonucleotide
cucacucacagggagggcc

SEQ ID NO: 3289373 - RNA, 19 nt, Artificial Sequence
  Description of Artificial Sequence: Synthetic oligonucleotide
uggcacauuccucacucac

SEQ ID NO: 3289374 - RNA, 19 nt, Artificial Sequence
  Description of Artificial Sequence: Synthetic oligonucleotide
ccggggauggugcagggau

SEQ ID NO: 3289375 - RNA, 19 nt, Artificial Sequence
  Description of Artificial Sequence: Synthetic oligonucleotide
cucagccggggauggugca

SEQ ID NO: 3289376 - RNA, 19 nt, Artificial Sequence
  Description of Artificial Sequence: Synthetic oligonucleotide
aagaguagcuccucagccg

SEQ ID NO: 3289377 - RNA, 19 nt, Artificial Sequence
  Description of Artificial Sequence: Synthetic oligonucleotide
agacuggaagaguagcucc

SEQ ID NO: 3289378 - RNA, 19 nt, Artificial Sequence
  Description of Artificial Sequence: Synthetic oligonucleotide
gcgcgggguuggcagacug

SEQ ID NO: 3289379 - RNA, 19 nt, Artificial Sequence
  Description of Artificial Sequence: Synthetic oligonucleotide
ggcgcgggguuggcagacu

SEQ ID NO: 3289380 - RNA, 19 nt, Artificial Sequence
  Description of Artificial Sequence: Synthetic oligonucleotide
gaggcgcgggguuggcaga

SEQ ID NO: 3289381 - RNA, 19 nt, Artificial Sequence
  Description of Artificial Sequence: Synthetic oligonucleotide
ggaggcgcgggguuggcag

SEQ ID NO: 3289382 - RNA, 19 nt, Artificial Sequence
  Description of Artificial Sequence: Synthetic oligonucleotide
ugucaccugccgguggcgg

SEQ ID NO: 3289383 - RNA, 19 nt, Artificial Sequence
  Description of Artificial Sequence: Synthetic oligonucleotide
uaugucaccugccgguggc

SEQ ID NO: 3289384 - RNA, 19 nt, Artificial Sequence
  Description of Artificial Sequence: Synthetic oligonucleotide
ccuaugucaccugccggug

SEQ ID NO: 3289385 - RNA, 19 nt, Artificial Sequence
  Description of Artificial Sequence: Synthetic oligonucleotide
uccuaugucaccugccggu

SEQ ID NO: 3289386 - RNA, 19 nt, Artificial Sequence
  Description of Artificial Sequence: Synthetic oligonucleotide
cuccuaugucaccugccgg

SEQ ID NO: 3289387 - RNA, 19 nt, Artificial Sequence
  Description of Artificial Sequence: Synthetic oligonucleotide
ccuccuaugucaccugccg

SEQ ID NO: 3289388 - RNA, 19 nt, Artificial Sequence
  Description of Artificial Sequence: Synthetic oligonucleotide
cccuccuaugucaccugcc

SEQ ID NO: 3289389 - RNA, 19 nt, Artificial Sequence
  Description of Artificial Sequence: Synthetic oligonucleotide
gcccuccuaugucaccugc

SEQ ID NO: 3289390 - RNA, 19 nt, Artificial Sequence
  Description of Artificial Sequence: Synthetic oligonucleotide
gggggggcagcccuccuau

SEQ ID NO: 3289391 - RNA, 19 nt, Artificial Sequence
  Description of Artificial Sequence: Synthetic oligonucleotide
agggggggcagcccuccua

SEQ ID NO: 3289392 - RNA, 19 nt, Artificial Sequence
  Description of Artificial Sequence: Synthetic oligonucleotide
gagggggggcagcccuccu

SEQ ID NO: 3289393 - RNA, 19 nt, Artificial Sequence
  Description of Artificial Sequence: Synthetic oligonucleotide
ggagggggggcagcccucc

SEQ ID NO: 3289394 - RNA, 19 nt, Artificial Sequence
  Description of Artificial Sequence: Synthetic oligonucleotide
aggagggggggcagcccuc

SEQ ID NO: 3289395 - RNA, 19 nt, Artificial Sequence
  Description of Artificial Sequence: Synthetic oligonucleotide
caggagggggggcagcccu

SEQ ID NO: 3289396 - RNA, 19 nt, Artificial Sequence
  Description of Artificial Sequence: Synthetic oligonucleotide
ccaggagggggggcagccc

SEQ ID NO: 3289397 - RNA, 19 nt, Artificial Sequence
  Description of Artificial Sequence: Synthetic oligonucleotide
uccaggagggggggcagcc

SEQ ID NO: 3289398 - RNA, 19 nt, Artificial Sequence
  Description of Artificial Sequence: Synthetic oligonucleotide
guccaggagggggggcagc

SEQ ID NO: 3289399 - RNA, 19 nt, Artificial Sequence
  Description of Artificial Sequence: Synthetic oligonucleotide
uguccaggagggggggcag

SEQ ID NO: 3289400 - RNA, 19 nt, Artificial Sequence
  Description of Artificial Sequence: Synthetic oligonucleotide
auguccaggagggggggca

SEQ ID NO: 3289401 - RNA, 19 nt, Artificial Sequence
  Description of Artificial Sequence: Synthetic oligonucleotide
gauguccaggagggggggc

SEQ ID NO: 3289402 - RNA, 19 nt, Artificial Sequence
  Description of Artificial Sequence: Synthetic oligonucleotide
ugauguccaggaggggggg

SEQ ID NO: 3289403 - RNA, 19 nt, Artificial Sequence
  Description of Artificial Sequence: Synthetic oligonucleotide
gauagugauguccaggagg

SEQ ID NO: 3289404 - RNA, 19 nt, Artificial Sequence
  Description of Artificial Sequence: Synthetic oligonucleotide
guagauagugauguccagg

SEQ ID NO: 3289405 - RNA, 19 nt, Artificial Sequence
  Description of Artificial Sequence: Synthetic oligonucleotide
aguagauagugauguccag

SEQ ID NO: 3289406 - RNA, 19 nt, Artificial Sequence
  Description of Artificial Sequence: Synthetic oligonucleotide
ucgguaguagauagugaug

SEQ ID NO: 3289407 - RNA, 19 nt, Artificial Sequence
  Description of Artificial Sequence: Synthetic oligonucleotide
cucgguaguagauagugau

SEQ ID NO: 3289408 - RNA, 19 nt, Artificial Sequence
  Description of Artificial Sequence: Synthetic oligonucleotide
ccucgguaguagauaguga

SEQ ID NO: 3289409 - RNA, 19 nt, Artificial Sequence
  Description of Artificial Sequence: Synthetic oligonucleotide
uccucgguaguagauagug

SEQ ID NO: 3289410 - RNA, 19 nt, Artificial Sequence
  Description of Artificial Sequence: Synthetic oligonucleotide
uuccucgguaguagauagu

SEQ ID NO: 3289411 - RNA, 19 nt, Artificial Sequence
  Description of Artificial Sequence: Synthetic oligonucleotide
uuuccucgguaguagauag

SEQ ID NO: 3289412 - RNA, 19 nt, Artificial Sequence
  Description of Artificial Sequence: Synthetic oligonucleotide
cuuuccucgguaguagaua

SEQ ID NO: 3289413 - RNA, 19 nt, Artificial Sequence
  Description of Artificial Sequence: Synthetic oligonucleotide
guagaccaucuuuccucgg

SEQ ID NO: 3289414 - RNA, 19 nt, Artificial Sequence
  Description of Artificial Sequence: Synthetic oligonucleotide
gguagaccaucuuuccucg

SEQ ID NO: 3289415 - RNA, 19 nt, Artificial Sequence
  Description of Artificial Sequence: Synthetic oligonucleotide
ugguagaccaucuuuccuc

SEQ ID NO: 3289416 - RNA, 19 nt, Artificial Sequence
  Description of Artificial Sequence: Synthetic oligonucleotide
gcugucguccaccugcucc

SEQ ID NO: 3289417 - RNA, 19 nt, Artificial Sequence
  Description of Artificial Sequence: Synthetic oligonucleotide
gggcugguaggccagcaca

SEQ ID NO: 3289418 - RNA, 19 nt, Artificial Sequence
  Description of Artificial Sequence: Synthetic oligonucleotide
ccggguccaggggcuggua

SEQ ID NO: 3289419 - RNA, 19 nt, Artificial Sequence
  Description of Artificial Sequence: Synthetic oligonucleotide
ggggaacagcaccagccgc

SEQ ID NO: 3289420 - RNA, 19 nt, Artificial Sequence
  Description of Artificial Sequence: Synthetic oligonucleotide
cagcaaguccucaguguag

SEQ ID NO: 3289421 - RNA, 19 nt, Artificial Sequence
  Description of Artificial Sequence: Synthetic oligonucleotide
ggccggcacgcugcuccag

SEQ ID NO: 3289422 - RNA, 19 nt, Artificial Sequence
  Description of Artificial Sequence: Synthetic oligonucleotide
aggcgcguggccaggagcu

SEQ ID NO: 3289423 - RNA, 19 nt, Artificial Sequence
  Description of Artificial Sequence: Synthetic oligonucleotide
caggcgcguggccaggagc

SEQ ID NO: 3289424 - RNA, 19 nt, Artificial Sequence
  Description of Artificial Sequence: Synthetic oligonucleotide
cuugcacuucuucaggcgc

SEQ ID NO: 3289425 - RNA, 19 nt, Artificial Sequence
  Description of Artificial Sequence: Synthetic oligonucleotide
gcgacaaggcccagaagac

SEQ ID NO: 3289426 - RNA, 19 nt, Artificial Sequence
  Description of Artificial Sequence: Synthetic oligonucleotide
ugcugcgacaaggcccaga

SEQ ID NO: 3289427 - RNA, 19 nt, Artificial Sequence
  Description of Artificial Sequence: Synthetic oligonucleotide
cucgagcugcugcgacaag

SEQ ID NO: 3289428 - RNA, 19 nt, Artificial Sequence
  Description of Artificial Sequence: Synthetic oligonucleotide
ccucgagcugcugcgacaa

SEQ ID NO: 3289429 - RNA, 19 nt, Artificial Sequence
  Description of Artificial Sequence: Synthetic oligonucleotide
cccucgagcugcugcgaca

SEQ ID NO: 3289430 - RNA, 19 nt, Artificial Sequence
  Description of Artificial Sequence: Synthetic oligonucleotide
gguuccccgcccucgagcu

SEQ ID NO: 3289431 - RNA, 19 nt, Artificial Sequence
  Description of Artificial Sequence: Synthetic oligonucleotide
ggguuccccgcccucgagc

SEQ ID NO: 3289432 - RNA, 19 nt, Artificial Sequence
  Description of Artificial Sequence: Synthetic oligonucleotide
gggguuccccgcccucgag

SEQ ID NO: 3289433 - RNA, 19 nt, Artificial Sequence
  Description of Artificial Sequence: Synthetic oligonucleotide
uggggguuccccgcccucg

SEQ ID NO: 3289434 - RNA, 19 nt, Artificial Sequence
  Description of Artificial Sequence: Synthetic oligonucleotide
guugaguggggguuccccg

SEQ ID NO: 3289435 - RNA, 19 nt, Artificial Sequence
  Description of Artificial Sequence: Synthetic oligonucleotide
gguugaguggggguucccc

SEQ ID NO: 3289436 - RNA, 19 nt, Artificial Sequence
  Description of Artificial Sequence: Synthetic oligonucleotide
agguugaguggggguuccc

SEQ ID NO: 3289437 - RNA, 19 nt, Artificial Sequence
  Description of Artificial Sequence: Synthetic oligonucleotide
cagguugaguggggguucc

SEQ ID NO: 3289438 - RNA, 19 nt, Artificial Sequence
  Description of Artificial Sequence: Synthetic oligonucleotide
gagcagguugagugggggu

SEQ ID NO: 3289439 - RNA, 19 nt, Artificial Sequence
  Description of Artificial Sequence: Synthetic oligonucleotide
gguggagcagguugagugg

SEQ ID NO: 3289440 - RNA, 19 nt, Artificial Sequence
  Description of Artificial Sequence: Synthetic oligonucleotide
cccgguggagcagguugag

SEQ ID NO: 3289441 - RNA, 19 nt, Artificial Sequence
  Description of Artificial Sequence: Synthetic oligonucleotide
ucccgguggagcagguuga

SEQ ID NO: 3289442 - RNA, 19 nt, Artificial Sequence
  Description of Artificial Sequence: Synthetic oligonucleotide
gaugguggucuccugaucc

SEQ ID NO: 3289443 - RNA, 19 nt, Artificial Sequence
  Description of Artificial Sequence: Synthetic oligonucleotide
agcucugugcaaaacaccc

SEQ ID NO: 3289444 - RNA, 19 nt, Artificial Sequence
  Description of Artificial Sequence: Synthetic oligonucleotide
cggagcucugugcaaaaca

SEQ ID NO: 3289445 - RNA, 19 nt, Artificial Sequence
  Description of Artificial Sequence: Synthetic oligonucleotide
ccggagcucugugcaaaac

SEQ ID NO: 3289446 - RNA, 19 nt, Artificial Sequence
  Description of Artificial Sequence: Synthetic oligonucleotide
cccggagcucugugcaaaa

SEQ ID NO: 3289447 - RNA, 19 nt, Artificial Sequence
  Description of Artificial Sequence: Synthetic oligonucleotide
ugucgcggaagucccggag

SEQ ID NO: 3289448 - RNA, 19 nt, Artificial Sequence
  Description of Artificial Sequence: Synthetic oligonucleotide
gcugucgcggaagucccgg

SEQ ID NO: 3289449 - RNA, 19 nt, Artificial Sequence
  Description of Artificial Sequence: Synthetic oligonucleotide
cucccugcggcugucgcgg

SEQ ID NO: 3289450 - RNA, 19 nt, Artificial Sequence
  Description of Artificial Sequence: Synthetic oligonucleotide
gcucccugcggcugucgcg

SEQ ID NO: 3289451 - RNA, 19 nt, Artificial Sequence
  Description of Artificial Sequence: Synthetic oligonucleotide
cccgaagcagaggaagaug

SEQ ID NO: 3289452 - RNA, 19 nt, Artificial Sequence
  Description of Artificial Sequence: Synthetic oligonucleotide
aacuggggaaccagcuuca

SEQ ID NO: 3289453 - RNA, 19 nt, Artificial Sequence
  Description of Artificial Sequence: Synthetic oligonucleotide
uacucgcagaacuggggaa

SEQ ID NO: 3289454 - RNA, 19 nt, Artificial Sequence
  Description of Artificial Sequence: Synthetic oligonucleotide
guacucgcagaacugggga

SEQ ID NO: 3289455 - RNA, 19 nt, Artificial Sequence
  Description of Artificial Sequence: Synthetic oligonucleotide
aguacucgcagaacugggg

SEQ ID NO: 3289456 - RNA, 19 nt, Artificial Sequence
  Description of Artificial Sequence: Synthetic oligonucleotide
guaccaguacucgcagaac

SEQ ID NO: 3289457 - RNA, 19 nt, Artificial Sequence
  Description of Artificial Sequence: Synthetic oligonucleotide
ugcucguaccaguacucgc

SEQ ID NO: 3289458 - RNA, 19 nt, Artificial Sequence
  Description of Artificial Sequence: Synthetic oligonucleotide
ugcaccugcucguaccagu

SEQ ID NO: 3289459 - RNA, 19 nt, Artificial Sequence
  Description of Artificial Sequence: Synthetic oligonucleotide
uugagggaggaggcuccuc

SEQ ID NO: 3289460 - RNA, 19 nt, Artificial Sequence
  Description of Artificial Sequence: Synthetic oligonucleotide
guugagggaggaggcuccu

SEQ ID NO: 3289461 - RNA, 19 nt, Artificial Sequence
  Description of Artificial Sequence: Synthetic oligonucleotide
acguugccacuguugaggg

SEQ ID NO: 3289462 - RNA, 19 nt, Artificial Sequence
  Description of Artificial Sequence: Synthetic oligonucleotide
gacguugccacuguugagg

SEQ ID NO: 3289463 - RNA, 19 nt, Artificial Sequence
  Description of Artificial Sequence: Synthetic oligonucleotide
ugacguugccacuguugag

SEQ ID NO: 3289464 - RNA, 19 nt, Artificial Sequence
  Description of Artificial Sequence: Synthetic oligonucleotide
agucagagagcugcaggcu

SEQ ID NO: 3289465 - RNA, 19 nt, Artificial Sequence
  Description of Artificial Sequence: Synthetic oligonucleotide
gagucagagagcugcaggc

SEQ ID NO: 3289466 - RNA, 19 nt, Artificial Sequence
  Description of Artificial Sequence: Synthetic oligonucleotide
ugaaagagucagagagcug

SEQ ID NO: 3289467 - RNA, 19 nt, Artificial Sequence
  Description of Artificial Sequence: Synthetic oligonucleotide
gagguugaaagagucagag

SEQ ID NO: 3289468 - RNA, 19 nt, Artificial Sequence
  Description of Artificial Sequence: Synthetic oligonucleotide
aagagguugaaagagucag

SEQ ID NO: 3289469 - RNA, 19 nt, Artificial Sequence
  Description of Artificial Sequence: Synthetic oligonucleotide
ucgaagagguugaaagagu

SEQ ID NO: 3289470 - RNA, 19 nt, Artificial Sequence
  Description of Artificial Sequence: Synthetic oligonucleotide
cucgaagagguugaaagag

SEQ ID NO: 3289471 - RNA, 19 nt, Artificial Sequence
  Description of Artificial Sequence: Synthetic oligonucleotide
ucgauaagcucgaagaggu

SEQ ID NO: 3289472 - RNA, 19 nt, Artificial Sequence
  Description of Artificial Sequence: Synthetic oligonucleotide
cucgauaagcucgaagagg

SEQ ID NO: 3289473 - RNA, 19 nt, Artificial Sequence
  Description of Artificial Sequence: Synthetic oligonucleotide
gcucgauaagcucgaagag

SEQ ID NO: 3289474 - RNA, 19 nt, Artificial Sequence
  Description of Artificial Sequence: Synthetic oligonucleotide
ugcucgauaagcucgaaga

SEQ ID NO: 3289475 - RNA, 19 nt, Artificial Sequence
  Description of Artificial Sequence: Synthetic oligonucleotide
uugcucgauaagcucgaag

SEQ ID NO: 3289476 - RNA, 19 nt, Artificial Sequence
  Description of Artificial Sequence: Synthetic oligonucleotide
guauugcucgauaagcucg

SEQ ID NO: 3289477 - RNA, 19 nt, Artificial Sequence
  Description of Artificial Sequence: Synthetic oligonucleotide
ugugguauugcucgauaag

SEQ ID NO: 3289478 - RNA, 19 nt, Artificial Sequence
  Description of Artificial Sequence: Synthetic oligonucleotide
caugugguauugcucgaua

SEQ ID NO: 3289479 - RNA, 19 nt, Artificial Sequence
  Description of Artificial Sequence: Synthetic oligonucleotide
ugucagucugucugcaugu

SEQ ID NO: 3289480 - RNA, 19 nt, Artificial Sequence
  Description of Artificial Sequence: Synthetic oligonucleotide
ggagugucagucugucugc

SEQ ID NO: 3289481 - RNA, 19 nt, Artificial Sequence
  Description of Artificial Sequence: Synthetic oligonucleotide
gagggacacaggaagggag

SEQ ID NO: 3289482 - RNA, 19 nt, Artificial Sequence
  Description of Artificial Sequence: Synthetic oligonucleotide
ccgggggagggacacagga

SEQ ID NO: 3289483 - RNA, 19 nt, Artificial Sequence
  Description of Artificial Sequence: Synthetic oligonucleotide
gccgggggagggacacagg

SEQ ID NO: 3289484 - RNA, 19 nt, Artificial Sequence
  Description of Artificial Sequence: Synthetic oligonucleotide
gaggccgggggagggacac

SEQ ID NO: 3289485 - RNA, 19 nt, Artificial Sequence
  Description of Artificial Sequence: Synthetic oligonucleotide
ggaggccgggggagggaca

SEQ ID NO: 3289486 - RNA, 19 nt, Artificial Sequence
  Description of Artificial Sequence: Synthetic oligonucleotide
gcggaggccgggggaggga

SEQ ID NO: 3289487 - RNA, 19 nt, Artificial Sequence
  Description of Artificial Sequence: Synthetic oligonucleotide
cagcggaggccgggggagg

SEQ ID NO: 3289488 - RNA, 19 nt, Artificial Sequence
  Description of Artificial Sequence: Synthetic oligonucleotide
gacagcggaggccggggga

SEQ ID NO: 3289489 - RNA, 19 nt, Artificial Sequence
  Description of Artificial Sequence: Synthetic oligonucleotide
aagacagcggaggccgggg

SEQ ID NO: 3289490 - RNA, 19 nt, Artificial Sequence
  Description of Artificial Sequence: Synthetic oligonucleotide
ugcaagacagcggaggccg

SEQ ID NO: 3289491 - RNA, 19 nt, Artificial Sequence
  Description of Artificial Sequence: Synthetic oligonucleotide
gcucuuugcaagacagcgg

SEQ ID NO: 3289492 - RNA, 19 nt, Artificial Sequence
  Description of Artificial Sequence: Synthetic oligonucleotide
cugacccaguggagccaga

SEQ ID NO: 3289493 - RNA, 19 nt, Artificial Sequence
  Description of Artificial Sequence: Synthetic oligonucleotide
gccugacccaguggagcca

SEQ ID NO: 3289494 - RNA, 19 nt, Artificial Sequence
  Description of Artificial Sequence: Synthetic oligonucleotide
agccugacccaguggagcc

SEQ ID NO: 3289495 - RNA, 19 nt, Artificial Sequence
  Description of Artificial Sequence: Synthetic oligonucleotide
aagccugacccaguggagc

SEQ ID NO: 3289496 - RNA, 19 nt, Artificial Sequence
  Description of Artificial Sequence: Synthetic oligonucleotide
acggugaaaccagcccaag

SEQ ID NO: 3289497 - RNA, 19 nt, Artificial Sequence
  Description of Artificial Sequence: Synthetic oligonucleotide
aacggugaaaccagcccaa

SEQ ID NO: 3289498 - RNA, 19 nt, Artificial Sequence
  Description of Artificial Sequence: Synthetic oligonucleotide
guaacggugaaaccagccc

SEQ ID NO: 3289499 - RNA, 19 nt, Artificial Sequence
  Description of Artificial Sequence: Synthetic oligonucleotide
uguaacggugaaaccagcc

SEQ ID NO: 3289500 - RNA, 19 nt, Artificial Sequence
  Description of Artificial Sequence: Synthetic oligonucleotide
ucuguaacggugaaaccag

SEQ ID NO: 3289501 - RNA, 19 nt, Artificial Sequence
  Description of Artificial Sequence: Synthetic oligonucleotide
uccucuguaacggugaaac

SEQ ID NO: 3289502 - RNA, 19 nt, Artificial Sequence
  Description of Artificial Sequence: Synthetic oligonucleotide
aguggaugcaaaugcugcu

SEQ ID NO: 3289503 - RNA, 19 nt, Artificial Sequence
  Description of Artificial Sequence: Synthetic oligonucleotide
aagaugugcccagggagug

SEQ ID NO: 3289504 - RNA, 19 nt, Artificial Sequence
  Description of Artificial Sequence: Synthetic oligonucleotide
gcacucagggccggagcag

SEQ ID NO: 3289505 - RNA, 19 nt, Artificial Sequence
  Description of Artificial Sequence: Synthetic oligonucleotide
ccggcacucagggccggag

SEQ ID NO: 3289506 - RNA, 19 nt, Artificial Sequence
  Description of Artificial Sequence: Synthetic oligonucleotide
gccggcacucagggccgga

SEQ ID NO: 3289507 - RNA, 19 nt, Artificial Sequence
  Description of Artificial Sequence: Synthetic oligonucleotide
cagccggcacucagggccg

SEQ ID NO: 3289508 - RNA, 19 nt, Artificial Sequence
  Description of Artificial Sequence: Synthetic oligonucleotide
accuucagccggcacucag

SEQ ID NO: 3289509 - RNA, 19 nt, Artificial Sequence
  Description of Artificial Sequence: Synthetic oligonucleotide
ugaccuucagccggcacuc

SEQ ID NO: 3289510 - RNA, 19 nt, Artificial Sequence
  Description of Artificial Sequence: Synthetic oligonucleotide
guguugaccuucagccggc

SEQ ID NO: 3289511 - RNA, 19 nt, Artificial Sequence
  Description of Artificial Sequence: Synthetic oligonucleotide
gguguguugaccuucagcc

SEQ ID NO: 3289512 - RNA, 19 nt, Artificial Sequence
  Description of Artificial Sequence: Synthetic oligonucleotide
ugugguguguugaccuuca

SEQ ID NO: 3289513 - RNA, 19 nt, Artificial Sequence
  Description of Artificial Sequence: Synthetic oligonucleotide
guauggccccacugcugcc

SEQ ID NO: 3289514 - RNA, 19 nt, Artificial Sequence
  Description of Artificial Sequence: Synthetic oligonucleotide
ggucaguauggccccacug

SEQ ID NO: 3289515 - RNA, 19 nt, Artificial Sequence
  Description of Artificial Sequence: Synthetic oligonucleotide
uggucaguauggccccacu

SEQ ID NO: 3289516 - RNA, 19 nt, Artificial Sequence
  Description of Artificial Sequence: Synthetic oligonucleotide
aguuccugggcuggucagu

SEQ ID NO: 3289517 - RNA, 19 nt, Artificial Sequence
  Description of Artificial Sequence: Synthetic oligonucleotide
agaguuccugggcugguca

SEQ ID NO: 3289518 - RNA, 19 nt, Artificial Sequence
  Description of Artificial Sequence: Synthetic oligonucleotide
gaggggagaguuccugggc

SEQ ID NO: 3289519 - RNA, 19 nt, Artificial Sequence
  Description of Artificial Sequence: Synthetic oligonucleotide
cagcuuuuggaggagggga

SEQ ID NO: 3289520 - RNA, 19 nt, Artificial Sequence
  Description of Artificial Sequence: Synthetic oligonucleotide
agcuuauugcagcagcuuu

SEQ ID NO: 3289521 - RNA, 19 nt, Artificial Sequence
  Description of Artificial Sequence: Synthetic oligonucleotide
aaagcuuauugcagcagcu

SEQ ID NO: 3289522 - RNA, 19 nt, Artificial Sequence
  Description of Artificial Sequence: Synthetic oligonucleotide
aaccacaaagcuuauugca

SEQ ID NO: 3289523 - RNA, 19 nt, Artificial Sequence
  Description of Artificial Sequence: Synthetic oligonucleotide
ucccaaccacaaagcuuau

SEQ ID NO: 3289524 - RNA, 19 nt, Artificial Sequence
  Description of Artificial Sequence: Synthetic oligonucleotide
uucccaaccacaaagcuua

SEQ ID NO: 3289525 - RNA, 19 nt, Artificial Sequence
  Description of Artificial Sequence: Synthetic oligonucleotide
aaggcuuucccaaccacaa

SEQ ID NO: 3289526 - RNA, 19 nt, Artificial Sequence
  Description of Artificial Sequence: Synthetic oligonucleotide
ccgugcagucagaggaaag

SEQ ID NO: 3289527 - RNA, 19 nt, Artificial Sequence
  Description of Artificial Sequence: Synthetic oligonucleotide
aagcaccgugcagucagag

SEQ ID NO: 3289528 - RNA, 19 nt, Artificial Sequence
  Description of Artificial Sequence: Synthetic oligonucleotide
gguugaagcaccgugcagu

SEQ ID NO: 3289529 - RNA, 19 nt, Artificial Sequence
  Description of Artificial Sequence: Synthetic oligonucleotide
gggguugaagcaccgugca

SEQ ID NO: 3289530 - RNA, 19 nt, Artificial Sequence
  Description of Artificial Sequence: Synthetic oligonucleotide
guacaccacgcuggugccg

SEQ ID NO: 3289531 - RNA, 19 nt, Artificial Sequence
  Description of Artificial Sequence: Synthetic oligonucleotide
uguacaccacgcuggugcc

SEQ ID NO: 3289532 - RNA, 19 nt, Artificial Sequence
  Description of Artificial Sequence: Synthetic oligonucleotide
cuguacaccacgcuggugc

SEQ ID NO: 3289533 - RNA, 19 nt, Artificial Sequence
  Description of Artificial Sequence: Synthetic oligonucleotide
augaaccccacuguacacc

SEQ ID NO: 3289534 - RNA, 19 nt, Artificial Sequence
  Description of Artificial Sequence: Synthetic oligonucleotide
aaugaaccccacuguacac

SEQ ID NO: 3289535 - RNA, 19 nt, Artificial Sequence
  Description of Artificial Sequence: Synthetic oligonucleotide
gaaugaaccccacuguaca

SEQ ID NO: 3289536 - RNA, 19 nt, Artificial Sequence
  Description of Artificial Sequence: Synthetic oligonucleotide
ggaaugaaccccacuguac

SEQ ID NO: 3289537 - RNA, 19 nt, Artificial Sequence
  Description of Artificial Sequence: Synthetic oligonucleotide
aggaggaaugaaccccacu

SEQ ID NO: 3289538 - RNA, 19 nt, Artificial Sequence
  Description of Artificial Sequence: Synthetic oligonucleotide
aaggaggaaugaaccccac

SEQ ID NO: 3289539 - RNA, 19 nt, Artificial Sequence
  Description of Artificial Sequence: Synthetic oligonucleotide
gcgaaggaggaaugaaccc

SEQ ID NO: 3289540 - RNA, 19 nt, Artificial Sequence
  Description of Artificial Sequence: Synthetic oligonucleotide
agcgaaggaggaaugaacc

SEQ ID NO: 3289541 - RNA, 19 nt, Artificial Sequence
  Description of Artificial Sequence: Synthetic oligonucleotide
gagcgaaggaggaaugaac

SEQ ID NO: 3289542 - RNA, 19 nt, Artificial Sequence
  Description of Artificial Sequence: Synthetic oligonucleotide
ggagcgaaggaggaaugaa

SEQ ID NO: 3289543 - RNA, 19 nt, Artificial Sequence
  Description of Artificial Sequence: Synthetic oligonucleotide
uguccugggagcgaaggag

SEQ ID NO: 3289544 - RNA, 19 nt, Artificial Sequence
  Description of Artificial Sequence: Synthetic oligonucleotide
cccaaaaacuccagacagc

SEQ ID NO: 3289545 - RNA, 19 nt, Artificial Sequence
  Description of Artificial Sequence: Synthetic oligonucleotide
uuacaaaacuucagaaaag

SEQ ID NO: 3289546 - RNA, 19 nt, Artificial Sequence
  Description of Artificial Sequence: Synthetic oligonucleotide
aacuuacaaaacuucagaa

SEQ ID NO: 3289547 - RNA, 19 nt, Artificial Sequence
  Description of Artificial Sequence: Synthetic oligonucleotide
uaaacuuacaaaacuucag

SEQ ID NO: 3289548 - RNA, 19 nt, Artificial Sequence
  Description of Artificial Sequence: Synthetic oligonucleotide
uuaaacuuacaaaacuuca

SEQ ID NO: 3289549 - RNA, 19 nt, Artificial Sequence
  Description of Artificial Sequence: Synthetic oligonucleotide
ccuuuauauaaacauauuu

SEQ ID NO: 3289550 - RNA, 19 nt, Artificial Sequence
  Description of Artificial Sequence: Synthetic oligonucleotide
accuuuauauaaacauauu

SEQ ID NO: 3289551 - RNA, 19 nt, Artificial Sequence
  Description of Artificial Sequence: Synthetic oligonucleotide
aagcaccuuuauauaaaca

SEQ ID NO: 3289552 - RNA, 19 nt, Artificial Sequence
  Description of Artificial Sequence: Synthetic oligonucleotide
cgccaugagcagcuccgag

SEQ ID NO: 3289553 - RNA, 19 nt, Artificial Sequence
  Description of Artificial Sequence: Synthetic oligonucleotide
gcuccgaggaggugucgug

SEQ ID NO: 3289554 - RNA, 19 nt, Artificial Sequence
  Description of Artificial Sequence: Synthetic oligonucleotide
ccgaggaggugucguggau

SEQ ID NO: 3289555 - RNA, 19 nt, Artificial Sequence
  Description of Artificial Sequence: Synthetic oligonucleotide
cgaggaggugucguggauc

SEQ ID NO: 3289556 - RNA, 19 nt, Artificial Sequence
  Description of Artificial Sequence: Synthetic oligonucleotide
gaggugucguggaucucgu

SEQ ID NO: 3289557 - RNA, 19 nt, Artificial Sequence
  Description of Artificial Sequence: Synthetic oligonucleotide
aggugucguggaucucgug

SEQ ID NO: 3289558 - RNA, 19 nt, Artificial Sequence
  Description of Artificial Sequence: Synthetic oligonucleotide
ggugucguggaucucgugg

SEQ ID NO: 3289559 - RNA, 19 nt, Artificial Sequence
  Description of Artificial Sequence: Synthetic oligonucleotide
gugucguggaucucguggu

SEQ ID NO: 3289560 - RNA, 19 nt, Artificial Sequence
  Description of Artificial Sequence: Synthetic oligonucleotide
ugucguggaucucgugguu

SEQ ID NO: 3289561 - RNA, 19 nt, Artificial Sequence
  Description of Artificial Sequence: Synthetic oligonucleotide
gucguggaucucgugguuc

SEQ ID NO: 3289562 - RNA, 19 nt, Artificial Sequence
  Description of Artificial Sequence: Synthetic oligonucleotide
ggaucucgugguucugcgg

SEQ ID NO: 3289563 - RNA, 19 nt, Artificial Sequence
  Description of Artificial Sequence: Synthetic oligonucleotide
gaucucgugguucugcggc

SEQ ID NO: 3289564 - RNA, 19 nt, Artificial Sequence
  Description of Artificial Sequence: Synthetic oligonucleotide
aucucgugguucugcggcc

SEQ ID NO: 3289565 - RNA, 19 nt, Artificial Sequence
  Description of Artificial Sequence: Synthetic oligonucleotide
ucucgugguucugcggccu

SEQ ID NO: 3289566 - RNA, 19 nt, Artificial Sequence
  Description of Artificial Sequence: Synthetic oligonucleotide
ugguucugcggccugcgag

SEQ ID NO: 3289567 - RNA, 19 nt, Artificial Sequence
  Description of Artificial Sequence: Synthetic oligonucleotide
ggccugcgaggcaacgagu

SEQ ID NO: 3289568 - RNA, 19 nt, Artificial Sequence
  Description of Artificial Sequence: Synthetic oligonucleotide
gccugcgaggcaacgaguu

SEQ ID NO: 3289569 - RNA, 19 nt, Artificial Sequence
  Description of Artificial Sequence: Synthetic oligonucleotide
ccugcgaggcaacgaguuc

SEQ ID NO: 3289570 - RNA, 19 nt, Artificial Sequence
  Description of Artificial Sequence: Synthetic oligonucleotide
aguucuucugcgaggugga

SEQ ID NO: 3289571 - RNA, 19 nt, Artificial Sequence
  Description of Artificial Sequence: Synthetic oligonucleotide
cgagguggacgaggauuac

SEQ ID NO: 3289572 - RNA, 19 nt, Artificial Sequence
  Description of Artificial Sequence: Synthetic oligonucleotide
gagguggacgaggauuaca

SEQ ID NO: 3289573 - RNA, 19 nt, Artificial Sequence
  Description of Artificial Sequence: Synthetic oligonucleotide
agguggacgaggauuacau

SEQ ID NO: 3289574 - RNA, 19 nt, Artificial Sequence
  Description of Artificial Sequence: Synthetic oligonucleotide
gguggacgaggauuacauc

SEQ ID NO: 3289575 - RNA, 19 nt, Artificial Sequence
  Description of Artificial Sequence: Synthetic oligonucleotide
acauccaggacaaauucaa

SEQ ID NO: 3289576 - RNA, 19 nt, Artificial Sequence
  Description of Artificial Sequence: Synthetic oligonucleotide
auccaggacaaauucaacc

SEQ ID NO: 3289577 - RNA, 19 nt, Artificial Sequence
  Description of Artificial Sequence: Synthetic oligonucleotide
ccaggacaaauucaaccug

SEQ ID NO: 3289578 - RNA, 19 nt, Artificial Sequence
  Description of Artificial Sequence: Synthetic oligonucleotide
aaauucaaccugacggggc

SEQ ID NO: 3289579 - RNA, 19 nt, Artificial Sequence
  Description of Artificial Sequence: Synthetic oligonucleotide
aauucaaccugacggggcu

SEQ ID NO: 3289580 - RNA, 19 nt, Artificial Sequence
  Description of Artificial Sequence: Synthetic oligonucleotide
gacggggcugaacgagcag

SEQ ID NO: 3289581 - RNA, 19 nt, Artificial Sequence
  Description of Artificial Sequence: Synthetic oligonucleotide
gaacgagcaggugccgcac

SEQ ID NO: 3289582 - RNA, 19 nt, Artificial Sequence
  Description of Artificial Sequence: Synthetic oligonucleotide
aacgagcaggugccgcacu

SEQ ID NO: 3289583 - RNA, 19 nt, Artificial Sequence
  Description of Artificial Sequence: Synthetic oligonucleotide
acgagcaggugccgcacua

SEQ ID NO: 3289584 - RNA, 19 nt, Artificial Sequence
  Description of Artificial Sequence: Synthetic oligonucleotide
cgagcaggugccgcacuac

SEQ ID NO: 3289585 - RNA, 19 nt, Artificial Sequence
  Description of Artificial Sequence: Synthetic oligonucleotide
gagcaggugccgcacuacc

SEQ ID NO: 3289586 - RNA, 19 nt, Artificial Sequence
  Description of Artificial Sequence: Synthetic oligonucleotide
agcaggugccgcacuaccg

SEQ ID NO: 3289587 - RNA, 19 nt, Artificial Sequence
  Description of Artificial Sequence: Synthetic oligonucleotide
caggugccgcacuaccgac

SEQ ID NO: 3289588 - RNA, 19 nt, Artificial Sequence
  Description of Artificial Sequence: Synthetic oligonucleotide
ggugccgcacuaccgacag

SEQ ID NO: 3289589 - RNA, 19 nt, Artificial Sequence
  Description of Artificial Sequence: Synthetic oligonucleotide
gugccgcacuaccgacagg

SEQ ID NO: 3289590 - RNA, 19 nt, Artificial Sequence
  Description of Artificial Sequence: Synthetic oligonucleotide
cgcacuaccgacaggcgcu

SEQ ID NO: 3289591 - RNA, 19 nt, Artificial Sequence
  Description of Artificial Sequence: Synthetic oligonucleotide
gcacuaccgacaggcgcuc

SEQ ID NO: 3289592 - RNA, 19 nt, Artificial Sequence
  Description of Artificial Sequence: Synthetic oligonucleotide
cacuaccgacaggcgcucg

SEQ ID NO: 3289593 - RNA, 19 nt, Artificial Sequence
  Description of Artificial Sequence: Synthetic oligonucleotide
cuaccgacaggcgcucgac

SEQ ID NO: 3289594 - RNA, 19 nt, Artificial Sequence
  Description of Artificial Sequence: Synthetic oligonucleotide
uaccgacaggcgcucgaca

SEQ ID NO: 3289595 - RNA, 19 nt, Artificial Sequence
  Description of Artificial Sequence: Synthetic oligonucleotide
accgacaggcgcucgacau

SEQ ID NO: 3289596 - RNA, 19 nt, Artificial Sequence
  Description of Artificial Sequence: Synthetic oligonucleotide
ccgacaggcgcucgacaug

SEQ ID NO: 3289597 - RNA, 19 nt, Artificial Sequence
  Description of Artificial Sequence: Synthetic oligonucleotide
cgacaggcgcucgacauga

SEQ ID NO: 3289598 - RNA, 19 nt, Artificial Sequence
  Description of Artificial Sequence: Synthetic oligonucleotide
gacaggcgcucgacaugau

SEQ ID NO: 3289599 - RNA, 19 nt, Artificial Sequence
  Description of Artificial Sequence: Synthetic oligonucleotide
caggcgcucgacaugaucc

SEQ ID NO: 3289600 - RNA, 19 nt, Artificial Sequence
  Description of Artificial Sequence: Synthetic oligonucleotide
ggcgcucgacaugauccuc

SEQ ID NO: 3289601 - RNA, 19 nt, Artificial Sequence
  Description of Artificial Sequence: Synthetic oligonucleotide
gcgcucgacaugauccucg

SEQ ID NO: 3289602 - RNA, 19 nt, Artificial Sequence
  Description of Artificial Sequence: Synthetic oligonucleotide
cgcucgacaugauccucga

SEQ ID NO: 3289603 - RNA, 19 nt, Artificial Sequence
  Description of Artificial Sequence: Synthetic oligonucleotide
gcucgacaugauccucgac

SEQ ID NO: 3289604 - RNA, 19 nt, Artificial Sequence
  Description of Artificial Sequence: Synthetic oligonucleotide
cucgacaugauccucgacc

SEQ ID NO: 3289605 - RNA, 19 nt, Artificial Sequence
  Description of Artificial Sequence: Synthetic oligonucleotide
acaugauccucgaccucga

SEQ ID NO: 3289606 - RNA, 19 nt, Artificial Sequence
  Description of Artificial Sequence: Synthetic oligonucleotide
caugauccucgaccucgag

SEQ ID NO: 3289607 - RNA, 19 nt, Artificial Sequence
  Description of Artificial Sequence: Synthetic oligonucleotide
gauccucgaccucgagccu

SEQ ID NO: 3289608 - RNA, 19 nt, Artificial Sequence
  Description of Artificial Sequence: Synthetic oligonucleotide
cucgaccucgagccugacg

SEQ ID NO: 3289609 - RNA, 19 nt, Artificial Sequence
  Description of Artificial Sequence: Synthetic oligonucleotide
ucgaccucgagccugacga

SEQ ID NO: 3289610 - RNA, 19 nt, Artificial Sequence
  Description of Artificial Sequence: Synthetic oligonucleotide
gaccucgagccugacgagg

SEQ ID NO: 3289611 - RNA, 19 nt, Artificial Sequence
  Description of Artificial Sequence: Synthetic oligonucleotide
ccucgagccugacgaggag

SEQ ID NO: 3289612 - RNA, 19 nt, Artificial Sequence
  Description of Artificial Sequence: Synthetic oligonucleotide
ucgagccugacgaggaguu

SEQ ID NO: 3289613 - RNA, 19 nt, Artificial Sequence
  Description of Artificial Sequence: Synthetic oligonucleotide
gccugacgaggaguuggag

SEQ ID NO: 3289614 - RNA, 19 nt, Artificial Sequence
  Description of Artificial Sequence: Synthetic oligonucleotide
gaguuggaggacaacccga

SEQ ID NO: 3289615 - RNA, 19 nt, Artificial Sequence
  Description of Artificial Sequence: Synthetic oligonucleotide
aguuggaggacaacccgaa

SEQ ID NO: 3289616 - RNA, 19 nt, Artificial Sequence
  Description of Artificial Sequence: Synthetic oligonucleotide
guuggaggacaacccgaac

SEQ ID NO: 3289617 - RNA, 19 nt, Artificial Sequence
  Description of Artificial Sequence: Synthetic oligonucleotide
uuggaggacaacccgaacc

SEQ ID NO: 3289618 - RNA, 19 nt, Artificial Sequence
  Description of Artificial Sequence: Synthetic oligonucleotide
uggaggacaacccgaacca

SEQ ID NO: 3289619 - RNA, 19 nt, Artificial Sequence
  Description of Artificial Sequence: Synthetic oligonucleotide
ggaggacaacccgaaccag

SEQ ID NO: 3289620 - RNA, 19 nt, Artificial Sequence
  Description of Artificial Sequence: Synthetic oligonucleotide
aggacaacccgaaccagag

SEQ ID NO: 3289621 - RNA, 19 nt, Artificial Sequence
  Description of Artificial Sequence: Synthetic oligonucleotide
gacaacccgaaccagagcg

SEQ ID NO: 3289622 - RNA, 19 nt, Artificial Sequence
  Description of Artificial Sequence: Synthetic oligonucleotide
acccgaaccagagcgaucu

SEQ ID NO: 3289623 - RNA, 19 nt, Artificial Sequence
  Description of Artificial Sequence: Synthetic oligonucleotide
cccgaaccagagcgaucug

SEQ ID NO: 3289624 - RNA, 19 nt, Artificial Sequence
  Description of Artificial Sequence: Synthetic oligonucleotide
ccgaaccagagcgaucuga

SEQ ID NO: 3289625 - RNA, 19 nt, Artificial Sequence
  Description of Artificial Sequence: Synthetic oligonucleotide
cgaaccagagcgaucugau

SEQ ID NO: 3289626 - RNA, 19 nt, Artificial Sequence
  Description of Artificial Sequence: Synthetic oligonucleotide
gaaccagagcgaucugauc

SEQ ID NO: 3289627 - RNA, 19 nt, Artificial Sequence
  Description of Artificial Sequence: Synthetic oligonucleotide
aaccagagcgaucugaucg

SEQ ID NO: 3289628 - RNA, 19 nt, Artificial Sequence
  Description of Artificial Sequence: Synthetic oligonucleotide
accagagcgaucugaucga

SEQ ID NO: 3289629 - RNA, 19 nt, Artificial Sequence
  Description of Artificial Sequence: Synthetic oligonucleotide
cagagcgaucugaucgagc

SEQ ID NO: 3289630 - RNA, 19 nt, Artificial Sequence
  Description of Artificial Sequence: Synthetic oligonucleotide
cgagcaggcggccgaaaug

SEQ ID NO: 3289631 - RNA, 19 nt, Artificial Sequence
  Description of Artificial Sequence: Synthetic oligonucleotide
gagcaggcggccgaaaugc

SEQ ID NO: 3289632 - RNA, 19 nt, Artificial Sequence
  Description of Artificial Sequence: Synthetic oligonucleotide
agcaggcggccgaaaugcu

SEQ ID NO: 3289633 - RNA, 19 nt, Artificial Sequence
  Description of Artificial Sequence: Synthetic oligonucleotide
gcaggcggccgaaaugcuc

SEQ ID NO: 3289634 - RNA, 19 nt, Artificial Sequence
  Description of Artificial Sequence: Synthetic oligonucleotide
aggcggccgaaaugcucua

SEQ ID NO: 3289635 - RNA, 19 nt, Artificial Sequence
  Description of Artificial Sequence: Synthetic oligonucleotide
ggcggccgaaaugcucuac

SEQ ID NO: 3289636 - RNA, 19 nt, Artificial Sequence
  Description of Artificial Sequence: Synthetic oligonucleotide
gcggccgaaaugcucuacg

SEQ ID NO: 3289637 - RNA, 19 nt, Artificial Sequence
  Description of Artificial Sequence: Synthetic oligonucleotide
ggccgaaaugcucuacggc

SEQ ID NO: 3289638 - RNA, 19 nt, Artificial Sequence
  Description of Artificial Sequence: Synthetic oligonucleotide
aaaugcucuacggccucau

SEQ ID NO: 3289639 - RNA, 19 nt, Artificial Sequence
  Description of Artificial Sequence: Synthetic oligonucleotide
aaugcucuacggccucauc

SEQ ID NO: 3289640 - RNA, 19 nt, Artificial Sequence
  Description of Artificial Sequence: Synthetic oligonucleotide
ucuacggccucauccacgc

SEQ ID NO: 3289641 - RNA, 19 nt, Artificial Sequence
  Description of Artificial Sequence: Synthetic oligonucleotide
cuacggccucauccacgcg

SEQ ID NO: 3289642 - RNA, 19 nt, Artificial Sequence
  Description of Artificial Sequence: Synthetic oligonucleotide
gccucauccacgcgcgcua

SEQ ID NO: 3289643 - RNA, 19 nt, Artificial Sequence
  Description of Artificial Sequence: Synthetic oligonucleotide
ccucauccacgcgcgcuac

SEQ ID NO: 3289644 - RNA, 19 nt, Artificial Sequence
  Description of Artificial Sequence: Synthetic oligonucleotide
cucauccacgcgcgcuaca

SEQ ID NO: 3289645 - RNA, 19 nt, Artificial Sequence
  Description of Artificial Sequence: Synthetic oligonucleotide
uccacgcgcgcuacauccu

SEQ ID NO: 3289646 - RNA, 19 nt, Artificial Sequence
  Description of Artificial Sequence: Synthetic oligonucleotide
acauccucaccaaccgcgg

SEQ ID NO: 3289647 - RNA, 19 nt, Artificial Sequence
  Description of Artificial Sequence: Synthetic oligonucleotide
uccucaccaaccgcggcau

SEQ ID NO: 3289648 - RNA, 19 nt, Artificial Sequence
  Description of Artificial Sequence: Synthetic oligonucleotide
ccucaccaaccgcggcauc

SEQ ID NO: 3289649 - RNA, 19 nt, Artificial Sequence
  Description of Artificial Sequence: Synthetic oligonucleotide
gcggcaucgcgcagauguu

SEQ ID NO: 3289650 - RNA, 19 nt, Artificial Sequence
  Description of Artificial Sequence: Synthetic oligonucleotide
cggcaucgcgcagauguug

SEQ ID NO: 3289651 - RNA, 19 nt, Artificial Sequence
  Description of Artificial Sequence: Synthetic oligonucleotide
ucgcgcagauguuggagaa

SEQ ID NO: 3289652 - RNA, 19 nt, Artificial Sequence
  Description of Artificial Sequence: Synthetic oligonucleotide
cgcgcagauguuggagaaa

SEQ ID NO: 3289653 - RNA, 19 nt, Artificial Sequence
  Description of Artificial Sequence: Synthetic oligonucleotide
gcgcagauguuggagaaau

SEQ ID NO: 3289654 - RNA, 19 nt, Artificial Sequence
  Description of Artificial Sequence: Synthetic oligonucleotide
aaauaccagcagggcgauu

SEQ ID NO: 3289655 - RNA, 19 nt, Artificial Sequence
  Description of Artificial Sequence: Synthetic oligonucleotide
aauaccagcagggcgauuu

SEQ ID NO: 3289656 - RNA, 19 nt, Artificial Sequence
  Description of Artificial Sequence: Synthetic oligonucleotide
auaccagcagggcgauuuc

SEQ ID NO: 3289657 - RNA, 19 nt, Artificial Sequence
  Description of Artificial Sequence: Synthetic oligonucleotide
uaccagcagggcgauuucg

SEQ ID NO: 3289658 - RNA, 19 nt, Artificial Sequence
  Description of Artificial Sequence: Synthetic oligonucleotide
accagcagggcgauuucgg

SEQ ID NO: 3289659 - RNA, 19 nt, Artificial Sequence
  Description of Artificial Sequence: Synthetic oligonucleotide
ccagcagggcgauuucggg

SEQ ID NO: 3289660 - RNA, 19 nt, Artificial Sequence
  Description of Artificial Sequence: Synthetic oligonucleotide
cagcagggcgauuucgggu

SEQ ID NO: 3289661 - RNA, 19 nt, Artificial Sequence
  Description of Artificial Sequence: Synthetic oligonucleotide
agcagggcgauuucgggua

SEQ ID NO: 3289662 - RNA, 19 nt, Artificial Sequence
  Description of Artificial Sequence: Synthetic oligonucleotide
gcagggcgauuucggguac

SEQ ID NO: 3289663 - RNA, 19 nt, Artificial Sequence
  Description of Artificial Sequence: Synthetic oligonucleotide
cagggcgauuucggguacu

SEQ ID NO: 3289664 - RNA, 19 nt, Artificial Sequence
  Description of Artificial Sequence: Synthetic oligonucleotide
agggcgauuucggguacug

SEQ ID NO: 3289665 - RNA, 19 nt, Artificial Sequence
  Description of Artificial Sequence: Synthetic oligonucleotide
gggcgauuucggguacugc

SEQ ID NO: 3289666 - RNA, 19 nt, Artificial Sequence
  Description of Artificial Sequence: Synthetic oligonucleotide
ggcgauuucggguacugcc

SEQ ID NO: 3289667 - RNA, 19 nt, Artificial Sequence
  Description of Artificial Sequence: Synthetic oligonucleotide
gcgauuucggguacugccc

SEQ ID NO: 3289668 - RNA, 19 nt, Artificial Sequence
  Description of Artificial Sequence: Synthetic oligonucleotide
cgauuucggguacugcccc

SEQ ID NO: 3289669 - RNA, 19 nt, Artificial Sequence
  Description of Artificial Sequence: Synthetic oligonucleotide
gauuucggguacugccccc

SEQ ID NO: 3289670 - RNA, 19 nt, Artificial Sequence
  Description of Artificial Sequence: Synthetic oligonucleotide
auuucggguacugcccccg

SEQ ID NO: 3289671 - RNA, 19 nt, Artificial Sequence
  Description of Artificial Sequence: Synthetic oligonucleotide
uuucggguacugcccccgc

SEQ ID NO: 3289672 - RNA, 19 nt, Artificial Sequence
  Description of Artificial Sequence: Synthetic oligonucleotide
guacugcccccgcgucuac

SEQ ID NO: 3289673 - RNA, 19 nt, Artificial Sequence
  Description of Artificial Sequence: Synthetic oligonucleotide
cccgcgucuacugcgagaa

SEQ ID NO: 3289674 - RNA, 19 nt, Artificial Sequence
  Description of Artificial Sequence: Synthetic oligonucleotide
cgcgucuacugcgagaauc

SEQ ID NO: 3289675 - RNA, 19 nt, Artificial Sequence
  Description of Artificial Sequence: Synthetic oligonucleotide
gcgucuacugcgagaauca

SEQ ID NO: 3289676 - RNA, 19 nt, Artificial Sequence
  Description of Artificial Sequence: Synthetic oligonucleotide
cgucuacugcgagaaucag

SEQ ID NO: 3289677 - RNA, 19 nt, Artificial Sequence
  Description of Artificial Sequence: Synthetic oligonucleotide
gucuacugcgagaaucagc

SEQ ID NO: 3289678 - RNA, 19 nt, Artificial Sequence
  Description of Artificial Sequence: Synthetic oligonucleotide
ucuacugcgagaaucagcc

SEQ ID NO: 3289679 - RNA, 19 nt, Artificial Sequence
  Description of Artificial Sequence: Synthetic oligonucleotide
cuacugcgagaaucagccc

SEQ ID NO: 3289680 - RNA, 19 nt, Artificial Sequence
  Description of Artificial Sequence: Synthetic oligonucleotide
uacugcgagaaucagccca

SEQ ID NO: 3289681 - RNA, 19 nt, Artificial Sequence
  Description of Artificial Sequence: Synthetic oligonucleotide
caucgggcugucggacauc

SEQ ID NO: 3289682 - RNA, 19 nt, Artificial Sequence
  Description of Artificial Sequence: Synthetic oligonucleotide
ugucggacauccccgggga

SEQ ID NO: 3289683 - RNA, 19 nt, Artificial Sequence
  Description of Artificial Sequence: Synthetic oligonucleotide
acauccccggggaggcgau

SEQ ID NO: 3289684 - RNA, 19 nt, Artificial Sequence
  Description of Artificial Sequence: Synthetic oligonucleotide
cggggaggcgauggugaag

SEQ ID NO: 3289685 - RNA, 19 nt, Artificial Sequence
  Description of Artificial Sequence: Synthetic oligonucleotide
gugaagcuguacugcccca

SEQ ID NO: 3289686 - RNA, 19 nt, Artificial Sequence
  Description of Artificial Sequence: Synthetic oligonucleotide
ugaagcuguacugccccaa

SEQ ID NO: 3289687 - RNA, 19 nt, Artificial Sequence
  Description of Artificial Sequence: Synthetic oligonucleotide
aagcuguacugccccaaau

SEQ ID NO: 3289688 - RNA, 19 nt, Artificial Sequence
  Description of Artificial Sequence: Synthetic oligonucleotide
uacugccccaaauguaugg

SEQ ID NO: 3289689 - RNA, 19 nt, Artificial Sequence
  Description of Artificial Sequence: Synthetic oligonucleotide
cugccccaaauguauggac

SEQ ID NO: 3289690 - RNA, 19 nt, Artificial Sequence
  Description of Artificial Sequence: Synthetic oligonucleotide
gccccaaauguauggacgu

SEQ ID NO: 3289691 - RNA, 19 nt, Artificial Sequence
  Description of Artificial Sequence: Synthetic oligonucleotide
ccccaaauguauggacguu

SEQ ID NO: 3289692 - RNA, 19 nt, Artificial Sequence
  Description of Artificial Sequence: Synthetic oligonucleotide
cccaaauguauggacguuu

SEQ ID NO: 3289693 - RNA, 19 nt, Artificial Sequence
  Description of Artificial Sequence: Synthetic oligonucleotide
ccaaauguauggacguuua

SEQ ID NO: 3289694 - RNA, 19 nt, Artificial Sequence
  Description of Artificial Sequence: Synthetic oligonucleotide
aaauguauggacguuuaca

SEQ ID NO: 3289695 - RNA, 19 nt, Artificial Sequence
  Description of Artificial Sequence: Synthetic oligonucleotide
aauguauggacguuuacac

SEQ ID NO: 3289696 - RNA, 19 nt, Artificial Sequence
  Description of Artificial Sequence: Synthetic oligonucleotide
auguauggacguuuacacc

SEQ ID NO: 3289697 - RNA, 19 nt, Artificial Sequence
  Description of Artificial Sequence: Synthetic oligonucleotide
uguauggacguuuacaccc

SEQ ID NO: 3289698 - RNA, 19 nt, Artificial Sequence
  Description of Artificial Sequence: Synthetic oligonucleotide
guauggacguuuacacccc

SEQ ID NO: 3289699 - RNA, 19 nt, Artificial Sequence
  Description of Artificial Sequence: Synthetic oligonucleotide
uauggacguuuacaccccg

SEQ ID NO: 3289700 - RNA, 19 nt, Artificial Sequence
  Description of Artificial Sequence: Synthetic oligonucleotide
auggacguuuacaccccga

SEQ ID NO: 3289701 - RNA, 19 nt, Artificial Sequence
  Description of Artificial Sequence: Synthetic oligonucleotide
uggacguuuacaccccgaa

SEQ ID NO: 3289702 - RNA, 19 nt, Artificial Sequence
  Description of Artificial Sequence: Synthetic oligonucleotide
ggacguuuacaccccgaag

SEQ ID NO: 3289703 - RNA, 19 nt, Artificial Sequence
  Description of Artificial Sequence: Synthetic oligonucleotide
gacguuuacaccccgaagu

SEQ ID NO: 3289704 - RNA, 19 nt, Artificial Sequence
  Description of Artificial Sequence: Synthetic oligonucleotide
acguuuacaccccgaaguc

SEQ ID NO: 3289705 - RNA, 19 nt, Artificial Sequence
  Description of Artificial Sequence: Synthetic oligonucleotide
cguuuacaccccgaagucg

SEQ ID NO: 3289706 - RNA, 19 nt, Artificial Sequence
  Description of Artificial Sequence: Synthetic oligonucleotide
guuuacaccccgaagucgu

SEQ ID NO: 3289707 - RNA, 19 nt, Artificial Sequence
  Description of Artificial Sequence: Synthetic oligonucleotide
uuuacaccccgaagucguc

SEQ ID NO: 3289708 - RNA, 19 nt, Artificial Sequence
  Description of Artificial Sequence: Synthetic oligonucleotide
uuacaccccgaagucgucg

SEQ ID NO: 3289709 - RNA, 19 nt, Artificial Sequence
  Description of Artificial Sequence: Synthetic oligonucleotide
uacaccccgaagucgucgc

SEQ ID NO: 3289710 - RNA, 19 nt, Artificial Sequence
  Description of Artificial Sequence: Synthetic oligonucleotide
acaccccgaagucgucgcg

SEQ ID NO: 3289711 - RNA, 19 nt, Artificial Sequence
  Description of Artificial Sequence: Synthetic oligonucleotide
cgaagucgucgcggcacca

SEQ ID NO: 3289712 - RNA, 19 nt, Artificial Sequence
  Description of Artificial Sequence: Synthetic oligonucleotide
gaagucgucgcggcaccac

SEQ ID NO: 3289713 - RNA, 19 nt, Artificial Sequence
  Description of Artificial Sequence: Synthetic oligonucleotide
aagucgucgcggcaccacc

SEQ ID NO: 3289714 - RNA, 19 nt, Artificial Sequence
  Description of Artificial Sequence: Synthetic oligonucleotide
agucgucgcggcaccacca

SEQ ID NO: 3289715 - RNA, 19 nt, Artificial Sequence
  Description of Artificial Sequence: Synthetic oligonucleotide
ucgucgcggcaccaccaca

SEQ ID NO: 3289716 - RNA, 19 nt, Artificial Sequence
  Description of Artificial Sequence: Synthetic oligonucleotide
acaccgacggcgccuauuu

SEQ ID NO: 3289717 - RNA, 19 nt, Artificial Sequence
  Description of Artificial Sequence: Synthetic oligonucleotide
caccgacggcgccuauuuc

SEQ ID NO: 3289718 - RNA, 19 nt, Artificial Sequence
  Description of Artificial Sequence: Synthetic oligonucleotide
ccgacggcgccuauuucgg

SEQ ID NO: 3289719 - RNA, 19 nt, Artificial Sequence
  Description of Artificial Sequence: Synthetic oligonucleotide
acggcgccuauuucggcac

SEQ ID NO: 3289720 - RNA, 19 nt, Artificial Sequence
  Description of Artificial Sequence: Synthetic oligonucleotide
gcgccuauuucggcaccgg

SEQ ID NO: 3289721 - RNA, 19 nt, Artificial Sequence
  Description of Artificial Sequence: Synthetic oligonucleotide
cgccuauuucggcaccggu

SEQ ID NO: 3289722 - RNA, 19 nt, Artificial Sequence
  Description of Artificial Sequence: Synthetic oligonucleotide
ccuauuucggcaccgguuu

SEQ ID NO: 3289723 - RNA, 19 nt, Artificial Sequence
  Description of Artificial Sequence: Synthetic oligonucleotide
cuauuucggcaccgguuuc

SEQ ID NO: 3289724 - RNA, 19 nt, Artificial Sequence
  Description of Artificial Sequence: Synthetic oligonucleotide
auuucggcaccgguuuccc

SEQ ID NO: 3289725 - RNA, 19 nt, Artificial Sequence
  Description of Artificial Sequence: Synthetic oligonucleotide
uuucggcaccgguuucccc

SEQ ID NO: 3289726 - RNA, 19 nt, Artificial Sequence
  Description of Artificial Sequence: Synthetic oligonucleotide
cggcaccgguuucccccau

SEQ ID NO: 3289727 - RNA, 19 nt, Artificial Sequence
  Description of Artificial Sequence: Synthetic oligonucleotide
gcaccgguuucccccauau

SEQ ID NO: 3289728 - RNA, 19 nt, Artificial Sequence
  Description of Artificial Sequence: Synthetic oligonucleotide
caccgguuucccccauaug

SEQ ID NO: 3289729 - RNA, 19 nt, Artificial Sequence
  Description of Artificial Sequence: Synthetic oligonucleotide
accgguuucccccauaugc

SEQ ID NO: 3289730 - RNA, 19 nt, Artificial Sequence
  Description of Artificial Sequence: Synthetic oligonucleotide
ccgguuucccccauaugcu

SEQ ID NO: 3289731 - RNA, 19 nt, Artificial Sequence
  Description of Artificial Sequence: Synthetic oligonucleotide
cgguuucccccauaugcuc

SEQ ID NO: 3289732 - RNA, 19 nt, Artificial Sequence
  Description of Artificial Sequence: Synthetic oligonucleotide
gguuucccccauaugcucu

SEQ ID NO: 3289733 - RNA, 19 nt, Artificial Sequence
  Description of Artificial Sequence: Synthetic oligonucleotide
auggugcaccccgaauacc

SEQ ID NO: 3289734 - RNA, 19 nt, Artificial Sequence
  Description of Artificial Sequence: Synthetic oligonucleotide
uggugcaccccgaauaccg

SEQ ID NO: 3289735 - RNA, 19 nt, Artificial Sequence
  Description of Artificial Sequence: Synthetic oligonucleotide
ggugcaccccgaauaccgc

SEQ ID NO: 3289736 - RNA, 19 nt, Artificial Sequence
  Description of Artificial Sequence: Synthetic oligonucleotide
gugcaccccgaauaccgcc

SEQ ID NO: 3289737 - RNA, 19 nt, Artificial Sequence
  Description of Artificial Sequence: Synthetic oligonucleotide
ugcaccccgaauaccgccc

SEQ ID NO: 3289738 - RNA, 19 nt, Artificial Sequence
  Description of Artificial Sequence: Synthetic oligonucleotide
caccccgaauaccgcccca

SEQ ID NO: 3289739 - RNA, 19 nt, Artificial Sequence
  Description of Artificial Sequence: Synthetic oligonucleotide
ccccgaauaccgccccaag

SEQ ID NO: 3289740 - RNA, 19 nt, Artificial Sequence
  Description of Artificial Sequence: Synthetic oligonucleotide
cccgaauaccgccccaagc

SEQ ID NO: 3289741 - RNA, 19 nt, Artificial Sequence
  Description of Artificial Sequence: Synthetic oligonucleotide
gaauaccgccccaagcgcc

SEQ ID NO: 3289742 - RNA, 19 nt, Artificial Sequence
  Description of Artificial Sequence: Synthetic oligonucleotide
gcgccccgcaaaccaauuc

SEQ ID NO: 3289743 - RNA, 19 nt, Artificial Sequence
  Description of Artificial Sequence: Synthetic oligonucleotide
cgccccgcaaaccaauucg

SEQ ID NO: 3289744 - RNA, 19 nt, Artificial Sequence
  Description of Artificial Sequence: Synthetic oligonucleotide
gccccgcaaaccaauucgu

SEQ ID NO: 3289745 - RNA, 19 nt, Artificial Sequence
  Description of Artificial Sequence: Synthetic oligonucleotide
cccgcaaaccaauucgugc

SEQ ID NO: 3289746 - RNA, 19 nt, Artificial Sequence
  Description of Artificial Sequence: Synthetic oligonucleotide
ccgcaaaccaauucgugcc

SEQ ID NO: 3289747 - RNA, 19 nt, Artificial Sequence
  Description of Artificial Sequence: Synthetic oligonucleotide
cgcaaaccaauucgugccc

SEQ ID NO: 3289748 - RNA, 19 nt, Artificial Sequence
  Description of Artificial Sequence: Synthetic oligonucleotide
gcaaaccaauucgugccca

SEQ ID NO: 3289749 - RNA, 19 nt, Artificial Sequence
  Description of Artificial Sequence: Synthetic oligonucleotide
caaaccaauucgugcccag

SEQ ID NO: 3289750 - RNA, 19 nt, Artificial Sequence
  Description of Artificial Sequence: Synthetic oligonucleotide
aaccaauucgugcccaggc

SEQ ID NO: 3289751 - RNA, 19 nt, Artificial Sequence
  Description of Artificial Sequence: Synthetic oligonucleotide
accaauucgugcccaggcu

SEQ ID NO: 3289752 - RNA, 19 nt, Artificial Sequence
  Description of Artificial Sequence: Synthetic oligonucleotide
ccaauucgugcccaggcug

SEQ ID NO: 3289753 - RNA, 19 nt, Artificial Sequence
  Description of Artificial Sequence: Synthetic oligonucleotide
aauucgugcccaggcugua

SEQ ID NO: 3289754 - RNA, 19 nt, Artificial Sequence
  Description of Artificial Sequence: Synthetic oligonucleotide
uucgugcccaggcuguaug

SEQ ID NO: 3289755 - RNA, 19 nt, Artificial Sequence
  Description of Artificial Sequence: Synthetic oligonucleotide
ucgugcccaggcuguaugg

SEQ ID NO: 3289756 - RNA, 19 nt, Artificial Sequence
  Description of Artificial Sequence: Synthetic oligonucleotide
cgugcccaggcuguauggg

SEQ ID NO: 3289757 - RNA, 19 nt, Artificial Sequence
  Description of Artificial Sequence: Synthetic oligonucleotide
gcccaggcuguauggguuc

SEQ ID NO: 3289758 - RNA, 19 nt, Artificial Sequence
  Description of Artificial Sequence: Synthetic oligonucleotide
ccaggcuguauggguucaa

SEQ ID NO: 3289759 - RNA, 19 nt, Artificial Sequence
  Description of Artificial Sequence: Synthetic oligonucleotide
caggcuguauggguucaag

SEQ ID NO: 3289760 - RNA, 19 nt, Artificial Sequence
  Description of Artificial Sequence: Synthetic oligonucleotide
aggcuguauggguucaaga

SEQ ID NO: 3289761 - RNA, 19 nt, Artificial Sequence
  Description of Artificial Sequence: Synthetic oligonucleotide
ggcuguauggguucaagau

SEQ ID NO: 3289762 - RNA, 19 nt, Artificial Sequence
  Description of Artificial Sequence: Synthetic oligonucleotide
cuguauggguucaagaucc

SEQ ID NO: 3289763 - RNA, 19 nt, Artificial Sequence
  Description of Artificial Sequence: Synthetic oligonucleotide
uguauggguucaagaucca

SEQ ID NO: 3289764 - RNA, 19 nt, Artificial Sequence
  Description of Artificial Sequence: Synthetic oligonucleotide
ggguucaagauccacccca

SEQ ID NO: 3289765 - RNA, 19 nt, Artificial Sequence
  Description of Artificial Sequence: Synthetic oligonucleotide
ucaagauccaccccauggc

SEQ ID NO: 3289766 - RNA, 19 nt, Artificial Sequence
  Description of Artificial Sequence: Synthetic oligonucleotide
agauccaccccauggcgua

SEQ ID NO: 3289767 - RNA, 19 nt, Artificial Sequence
  Description of Artificial Sequence: Synthetic oligonucleotide
gauccaccccauggcguac

SEQ ID NO: 3289768 - RNA, 19 nt, Artificial Sequence
  Description of Artificial Sequence: Synthetic oligonucleotide
auccaccccauggcguacc

SEQ ID NO: 3289769 - RNA, 19 nt, Artificial Sequence
  Description of Artificial Sequence: Synthetic oligonucleotide
uccaccccauggcguacca

SEQ ID NO: 3289770 - RNA, 19 nt, Artificial Sequence
  Description of Artificial Sequence: Synthetic oligonucleotide
caccccauggcguaccagc

SEQ ID NO: 3289771 - RNA, 19 nt, Artificial Sequence
  Description of Artificial Sequence: Synthetic oligonucleotide
ccccauggcguaccagcug

SEQ ID NO: 3289772 - RNA, 19 nt, Artificial Sequence
  Description of Artificial Sequence: Synthetic oligonucleotide
gcaggccgccagcaacuuc

SEQ ID NO: 3289773 - RNA, 19 nt, Artificial Sequence
  Description of Artificial Sequence: Synthetic oligonucleotide
ggccgccagcaacuucaag

SEQ ID NO: 3289774 - RNA, 19 nt, Artificial Sequence
  Description of Artificial Sequence: Synthetic oligonucleotide
ccagcaacuucaagagccc

SEQ ID NO: 3289775 - RNA, 19 nt, Artificial Sequence
  Description of Artificial Sequence: Synthetic oligonucleotide
acuucaagagccccgugaa

SEQ ID NO: 3289776 - RNA, 19 nt, Artificial Sequence
  Description of Artificial Sequence: Synthetic oligonucleotide
cuucaagagccccgugaag

SEQ ID NO: 3289777 - RNA, 19 nt, Artificial Sequence
  Description of Artificial Sequence: Synthetic oligonucleotide
ucaagagccccgugaagac

SEQ ID NO: 3289778 - RNA, 19 nt, Artificial Sequence
  Description of Artificial Sequence: Synthetic oligonucleotide
ccccgugaagaccauccgc

SEQ ID NO: 3289779 - RNA, 19 nt, Artificial Sequence
  Description of Artificial Sequence: Synthetic oligonucleotide
cccgugaagaccauccgcu

SEQ ID NO: 3289780 - RNA, 19 nt, Artificial Sequence
  Description of Artificial Sequence: Synthetic oligonucleotide
gugaagaccauccgcugau

SEQ ID NO: 3289781 - RNA, 19 nt, Artificial Sequence
  Description of Artificial Sequence: Synthetic oligonucleotide
ugaagaccauccgcugaug

SEQ ID NO: 3289782 - RNA, 19 nt, Artificial Sequence
  Description of Artificial Sequence: Synthetic oligonucleotide
gaagaccauccgcugaugg

SEQ ID NO: 3289783 - RNA, 19 nt, Artificial Sequence
  Description of Artificial Sequence: Synthetic oligonucleotide
aagaccauccgcugauggg

SEQ ID NO: 3289784 - RNA, 19 nt, Artificial Sequence
  Description of Artificial Sequence: Synthetic oligonucleotide
agaccauccgcugaugggg

SEQ ID NO: 3289785 - RNA, 19 nt, Artificial Sequence
  Description of Artificial Sequence: Synthetic oligonucleotide
auccgcugauggggggauu

SEQ ID NO: 3289786 - RNA, 19 nt, Artificial Sequence
  Description of Artificial Sequence: Synthetic oligonucleotide
uccgcugauggggggauuu

SEQ ID NO: 3289787 - RNA, 19 nt, Artificial Sequence
  Description of Artificial Sequence: Synthetic oligonucleotide
ccgcugauggggggauuua

SEQ ID NO: 3289788 - RNA, 19 nt, Artificial Sequence
  Description of Artificial Sequence: Synthetic oligonucleotide
cgcugauggggggauuuau

SEQ ID NO: 3289789 - RNA, 19 nt, Artificial Sequence
  Description of Artificial Sequence: Synthetic oligonucleotide
gcugauggggggauuuaug

SEQ ID NO: 3289790 - RNA, 19 nt, Artificial Sequence
  Description of Artificial Sequence: Synthetic oligonucleotide
ggggggauuuauggggggg

SEQ ID NO: 3289791 - RNA, 19 nt, Artificial Sequence
  Description of Artificial Sequence: Synthetic oligonucleotide
gggggauuuaugggggggu

SEQ ID NO: 3289792 - RNA, 19 nt, Artificial Sequence
  Description of Artificial Sequence: Synthetic oligonucleotide
ggggauuuauggggggguu

SEQ ID NO: 3289793 - RNA, 19 nt, Artificial Sequence
  Description of Artificial Sequence: Synthetic oligonucleotide
gggauuuauggggggguuu

SEQ ID NO: 3289794 - RNA, 19 nt, Artificial Sequence
  Description of Artificial Sequence: Synthetic oligonucleotide
ggauuuauggggggguuua

SEQ ID NO: 3289795 - RNA, 19 nt, Artificial Sequence
  Description of Artificial Sequence: Synthetic oligonucleotide
gauuuauggggggguuuau

SEQ ID NO: 3289796 - RNA, 19 nt, Artificial Sequence
  Description of Artificial Sequence: Synthetic oligonucleotide
auuuauggggggguuuaug

SEQ ID NO: 3289797 - RNA, 19 nt, Artificial Sequence
  Description of Artificial Sequence: Synthetic oligonucleotide
uuuauggggggguuuaugg

SEQ ID NO: 3289798 - RNA, 19 nt, Artificial Sequence
  Description of Artificial Sequence: Synthetic oligonucleotide
uuauggggggguuuauggg

SEQ ID NO: 3289799 - RNA, 19 nt, Artificial Sequence
  Description of Artificial Sequence: Synthetic oligonucleotide
uauggggggguuuaugggg

SEQ ID NO: 3289800 - RNA, 19 nt, Artificial Sequence
  Description of Artificial Sequence: Synthetic oligonucleotide
auggggggguuuauggggu

SEQ ID NO: 3289801 - RNA, 19 nt, Artificial Sequence
  Description of Artificial Sequence: Synthetic oligonucleotide
guuuaugggguuuggggug

SEQ ID NO: 3289802 - RNA, 19 nt, Artificial Sequence
  Description of Artificial Sequence: Synthetic oligonucleotide
uuuaugggguuuggggugg

SEQ ID NO: 3289803 - RNA, 19 nt, Artificial Sequence
  Description of Artificial Sequence: Synthetic oligonucleotide
uuaugggguuugggguggg

SEQ ID NO: 3289804 - RNA, 19 nt, Artificial Sequence
  Description of Artificial Sequence: Synthetic oligonucleotide
guuugggguggggggguuu

SEQ ID NO: 3289805 - RNA, 19 nt, Artificial Sequence
  Description of Artificial Sequence: Synthetic oligonucleotide
ugggguggggggguuuaug

SEQ ID NO: 3289806 - RNA, 19 nt, Artificial Sequence
  Description of Artificial Sequence: Synthetic oligonucleotide
gggguggggggguuuaugg

SEQ ID NO: 3289807 - RNA, 19 nt, Artificial Sequence
  Description of Artificial Sequence: Synthetic oligonucleotide
ggguggggggguuuauggg

SEQ ID NO: 3289808 - RNA, 19 nt, Artificial Sequence
  Description of Artificial Sequence: Synthetic oligonucleotide
gguggggggguuuaugggg

SEQ ID NO: 3289809 - RNA, 19 nt, Artificial Sequence
  Description of Artificial Sequence: Synthetic oligonucleotide
guggggggguuuauggggu

SEQ ID NO: 3289810 - RNA, 19 nt, Artificial Sequence
  Description of Artificial Sequence: Synthetic oligonucleotide
ggggggguuuauggggucg

SEQ ID NO: 3289811 - RNA, 19 nt, Artificial Sequence
  Description of Artificial Sequence: Synthetic oligonucleotide
gggggguuuauggggucgg

SEQ ID NO: 3289812 - RNA, 19 nt, Artificial Sequence
  Description of Artificial Sequence: Synthetic oligonucleotide
ggggguuuauggggucggg

SEQ ID NO: 3289813 - RNA, 19 nt, Artificial Sequence
  Description of Artificial Sequence: Synthetic oligonucleotide
gggguuuauggggucgggg

SEQ ID NO: 3289814 - RNA, 19 nt, Artificial Sequence
  Description of Artificial Sequence: Synthetic oligonucleotide
ggguuuauggggucggggg

SEQ ID NO: 3289815 - RNA, 19 nt, Artificial Sequence
  Description of Artificial Sequence: Synthetic oligonucleotide
gguuuauggggucgggggg

SEQ ID NO: 3289816 - RNA, 19 nt, Artificial Sequence
  Description of Artificial Sequence: Synthetic oligonucleotide
guuuauggggucggggggg

SEQ ID NO: 3289817 - RNA, 19 nt, Artificial Sequence
  Description of Artificial Sequence: Synthetic oligonucleotide
uggggggauuuugggguca

SEQ ID NO: 3289818 - RNA, 19 nt, Artificial Sequence
  Description of Artificial Sequence: Synthetic oligonucleotide
ggauuuuggggucaauucg

SEQ ID NO: 3289819 - RNA, 19 nt, Artificial Sequence
  Description of Artificial Sequence: Synthetic oligonucleotide
auuuuggggucaauucgug

SEQ ID NO: 3289820 - RNA, 19 nt, Artificial Sequence
  Description of Artificial Sequence: Synthetic oligonucleotide
uuuuggggucaauucgugc

SEQ ID NO: 3289821 - RNA, 19 nt, Artificial Sequence
  Description of Artificial Sequence: Synthetic oligonucleotide
uuuggggucaauucgugcc

SEQ ID NO: 3289822 - RNA, 19 nt, Artificial Sequence
  Description of Artificial Sequence: Synthetic oligonucleotide
uuggggucaauucgugccg

SEQ ID NO: 3289823 - RNA, 19 nt, Artificial Sequence
  Description of Artificial Sequence: Synthetic oligonucleotide
ggggucaauucgugccguu

SEQ ID NO: 3289824 - RNA, 19 nt, Artificial Sequence
  Description of Artificial Sequence: Synthetic oligonucleotide
gggucaauucgugccguuu

SEQ ID NO: 3289825 - RNA, 19 nt, Artificial Sequence
  Description of Artificial Sequence: Synthetic oligonucleotide
ggucaauucgugccguuuu

SEQ ID NO: 3289826 - RNA, 19 nt, Artificial Sequence
  Description of Artificial Sequence: Synthetic oligonucleotide
caauucgugccguuuuggg

SEQ ID NO: 3289827 - RNA, 19 nt, Artificial Sequence
  Description of Artificial Sequence: Synthetic oligonucleotide
aauucgugccguuuugggu

SEQ ID NO: 3289828 - RNA, 19 nt, Artificial Sequence
  Description of Artificial Sequence: Synthetic oligonucleotide
auucgugccguuuuggguc

SEQ ID NO: 3289829 - RNA, 19 nt, Artificial Sequence
  Description of Artificial Sequence: Synthetic oligonucleotide
uucgugccguuuugggucc

SEQ ID NO: 3289830 - RNA, 19 nt, Artificial Sequence
  Description of Artificial Sequence: Synthetic oligonucleotide
ucgugccguuuuggguccg

SEQ ID NO: 3289831 - RNA, 19 nt, Artificial Sequence
  Description of Artificial Sequence: Synthetic oligonucleotide
cgugccguuuuggguccgu

SEQ ID NO: 3289832 - RNA, 19 nt, Artificial Sequence
  Description of Artificial Sequence: Synthetic oligonucleotide
gugccguuuuggguccgug

SEQ ID NO: 3289833 - RNA, 19 nt, Artificial Sequence
  Description of Artificial Sequence: Synthetic oligonucleotide
ugccguuuuggguccgugg

SEQ ID NO: 3289834 - RNA, 19 nt, Artificial Sequence
  Description of Artificial Sequence: Synthetic oligonucleotide
gccguuuuggguccgugga

SEQ ID NO: 3289835 - RNA, 19 nt, Artificial Sequence
  Description of Artificial Sequence: Synthetic oligonucleotide
ccguuuuggguccguggaa

SEQ ID NO: 3289836 - RNA, 19 nt, Artificial Sequence
  Description of Artificial Sequence: Synthetic oligonucleotide
cguuuuggguccguggaau

SEQ ID NO: 3289837 - RNA, 19 nt, Artificial Sequence
  Description of Artificial Sequence: Synthetic oligonucleotide
ggguccguggaaugaaaaa

SEQ ID NO: 3289838 - RNA, 19 nt, Artificial Sequence
  Description of Artificial Sequence: Synthetic oligonucleotide
uccguggaaugaaaaaaag

SEQ ID NO: 3289839 - RNA, 19 nt, Artificial Sequence
  Description of Artificial Sequence: Synthetic oligonucleotide
ccguggaaugaaaaaaaga

SEQ ID NO: 3289840 - RNA, 19 nt, Artificial Sequence
  Description of Artificial Sequence: Synthetic oligonucleotide
guggaaugaaaaaaagagc

SEQ ID NO: 3289841 - RNA, 19 nt, Artificial Sequence
  Description of Artificial Sequence: Synthetic oligonucleotide
gaaugaaaaaaagagccga

SEQ ID NO: 3289842 - RNA, 19 nt, Artificial Sequence
  Description of Artificial Sequence: Synthetic oligonucleotide
aaugaaaaaaagagccgag

SEQ ID NO: 3289843 - RNA, 19 nt, Artificial Sequence
  Description of Artificial Sequence: Synthetic oligonucleotide
augaaaaaaagagccgaga

SEQ ID NO: 3289844 - RNA, 19 nt, Artificial Sequence
  Description of Artificial Sequence: Synthetic oligonucleotide
ugaaaaaaagagccgagag

SEQ ID NO: 3289845 - RNA, 19 nt, Artificial Sequence
  Description of Artificial Sequence: Synthetic oligonucleotide
aaaagagccgagaggggaa

SEQ ID NO: 3289846 - RNA, 19 nt, Artificial Sequence
  Description of Artificial Sequence: Synthetic oligonucleotide
gagccgagaggggaauaaa

SEQ ID NO: 3289847 - RNA, 19 nt, Artificial Sequence
  Description of Artificial Sequence: Synthetic oligonucleotide
cucggagcugcucauggcg

SEQ ID NO: 3289848 - RNA, 19 nt, Artificial Sequence
  Description of Artificial Sequence: Synthetic oligonucleotide
cacgacaccuccucggagc

SEQ ID NO: 3289849 - RNA, 19 nt, Artificial Sequence
  Description of Artificial Sequence: Synthetic oligonucleotide
auccacgacaccuccucgg

SEQ ID NO: 3289850 - RNA, 19 nt, Artificial Sequence
  Description of Artificial Sequence: Synthetic oligonucleotide
gauccacgacaccuccucg

SEQ ID NO: 3289851 - RNA, 19 nt, Artificial Sequence
  Description of Artificial Sequence: Synthetic oligonucleotide
acgagauccacgacaccuc

SEQ ID NO: 3289852 - RNA, 19 nt, Artificial Sequence
  Description of Artificial Sequence: Synthetic oligonucleotide
cacgagauccacgacaccu

SEQ ID NO: 3289853 - RNA, 19 nt, Artificial Sequence
  Description of Artificial Sequence: Synthetic oligonucleotide
ccacgagauccacgacacc

SEQ ID NO: 3289854 - RNA, 19 nt, Artificial Sequence
  Description of Artificial Sequence: Synthetic oligonucleotide
accacgagauccacgacac

SEQ ID NO: 3289855 - RNA, 19 nt, Artificial Sequence
  Description of Artificial Sequence: Synthetic oligonucleotide
aaccacgagauccacgaca

SEQ ID NO: 3289856 - RNA, 19 nt, Artificial Sequence
  Description of Artificial Sequence: Synthetic oligonucleotide
gaaccacgagauccacgac

SEQ ID NO: 3289857 - RNA, 19 nt, Artificial Sequence
  Description of Artificial Sequence: Synthetic oligonucleotide
ccgcagaaccacgagaucc

SEQ ID NO: 3289858 - RNA, 19 nt, Artificial Sequence
  Description of Artificial Sequence: Synthetic oligonucleotide
gccgcagaaccacgagauc

SEQ ID NO: 3289859 - RNA, 19 nt, Artificial Sequence
  Description of Artificial Sequence: Synthetic oligonucleotide
ggccgcagaaccacgagau

SEQ ID NO: 3289860 - RNA, 19 nt, Artificial Sequence
  Description of Artificial Sequence: Synthetic oligonucleotide
aggccgcagaaccacgaga

SEQ ID NO: 3289861 - RNA, 19 nt, Artificial Sequence
  Description of Artificial Sequence: Synthetic oligonucleotide
cucgcaggccgcagaacca

SEQ ID NO: 3289862 - RNA, 19 nt, Artificial Sequence
  Description of Artificial Sequence: Synthetic oligonucleotide
acucguugccucgcaggcc

SEQ ID NO: 3289863 - RNA, 19 nt, Artificial Sequence
  Description of Artificial Sequence: Synthetic oligonucleotide
aacucguugccucgcaggc

SEQ ID NO: 3289864 - RNA, 19 nt, Artificial Sequence
  Description of Artificial Sequence: Synthetic oligonucleotide
gaacucguugccucgcagg

SEQ ID NO: 3289865 - RNA, 19 nt, Artificial Sequence
  Description of Artificial Sequence: Synthetic oligonucleotide
uccaccucgcagaagaacu

SEQ ID NO: 3289866 - RNA, 19 nt, Artificial Sequence
  Description of Artificial Sequence: Synthetic oligonucleotide
guaauccucguccaccucg

SEQ ID NO: 3289867 - RNA, 19 nt, Artificial Sequence
  Description of Artificial Sequence: Synthetic oligonucleotide
uguaauccucguccaccuc

SEQ ID NO: 3289868 - RNA, 19 nt, Artificial Sequence
  Description of Artificial Sequence: Synthetic oligonucleotide
auguaauccucguccaccu

SEQ ID NO: 3289869 - RNA, 19 nt, Artificial Sequence
  Description of Artificial Sequence: Synthetic oligonucleotide
gauguaauccucguccacc

SEQ ID NO: 3289870 - RNA, 19 nt, Artificial Sequence
  Description of Artificial Sequence: Synthetic oligonucleotide
uugaauuuguccuggaugu

SEQ ID NO: 3289871 - RNA, 19 nt, Artificial Sequence
  Description of Artificial Sequence: Synthetic oligonucleotide
gguugaauuuguccuggau

SEQ ID NO: 3289872 - RNA, 19 nt, Artificial Sequence
  Description of Artificial Sequence: Synthetic oligonucleotide
cagguugaauuuguccugg

SEQ ID NO: 3289873 - RNA, 19 nt, Artificial Sequence
  Description of Artificial Sequence: Synthetic oligonucleotide
gccccgucagguugaauuu

SEQ ID NO: 3289874 - RNA, 19 nt, Artificial Sequence
  Description of Artificial Sequence: Synthetic oligonucleotide
agccccgucagguugaauu

SEQ ID NO: 3289875 - RNA, 19 nt, Artificial Sequence
  Description of Artificial Sequence: Synthetic oligonucleotide
cugcucguucagccccguc

SEQ ID NO: 3289876 - RNA, 19 nt, Artificial Sequence
  Description of Artificial Sequence: Synthetic oligonucleotide
gugcggcaccugcucguuc

SEQ ID NO: 3289877 - RNA, 19 nt, Artificial Sequence
  Description of Artificial Sequence: Synthetic oligonucleotide
agugcggcaccugcucguu

SEQ ID NO: 3289878 - RNA, 19 nt, Artificial Sequence
  Description of Artificial Sequence: Synthetic oligonucleotide
uagugcggcaccugcucgu

SEQ ID NO: 3289879 - RNA, 19 nt, Artificial Sequence
  Description of Artificial Sequence: Synthetic oligonucleotide
guagugcggcaccugcucg

SEQ ID NO: 3289880 - RNA, 19 nt, Artificial Sequence
  Description of Artificial Sequence: Synthetic oligonucleotide
gguagugcggcaccugcuc

SEQ ID NO: 3289881 - RNA, 19 nt, Artificial Sequence
  Description of Artificial Sequence: Synthetic oligonucleotide
cgguagugcggcaccugcu

SEQ ID NO: 3289882 - RNA, 19 nt, Artificial Sequence
  Description of Artificial Sequence: Synthetic oligonucleotide
gucgguagugcggcaccug

SEQ ID NO: 3289883 - RNA, 19 nt, Artificial Sequence
  Description of Artificial Sequence: Synthetic oligonucleotide
cugucgguagugcggcacc

SEQ ID NO: 3289884 - RNA, 19 nt, Artificial Sequence
  Description of Artificial Sequence: Synthetic oligonucleotide
ccugucgguagugcggcac

SEQ ID NO: 3289885 - RNA, 19 nt, Artificial Sequence
  Description of Artificial Sequence: Synthetic oligonucleotide
agcgccugucgguagugcg

SEQ ID NO: 3289886 - RNA, 19 nt, Artificial Sequence
  Description of Artificial Sequence: Synthetic oligonucleotide
gagcgccugucgguagugc

SEQ ID NO: 3289887 - RNA, 19 nt, Artificial Sequence
  Description of Artificial Sequence: Synthetic oligonucleotide
cgagcgccugucgguagug

SEQ ID NO: 3289888 - RNA, 19 nt, Artificial Sequence
  Description of Artificial Sequence: Synthetic oligonucleotide
gucgagcgccugucgguag

SEQ ID NO: 3289889 - RNA, 19 nt, Artificial Sequence
  Description of Artificial Sequence: Synthetic oligonucleotide
ugucgagcgccugucggua

SEQ ID NO: 3289890 - RNA, 19 nt, Artificial Sequence
  Description of Artificial Sequence: Synthetic oligonucleotide
augucgagcgccugucggu

SEQ ID NO: 3289891 - RNA, 19 nt, Artificial Sequence
  Description of Artificial Sequence: Synthetic oligonucleotide
caugucgagcgccugucgg

SEQ ID NO: 3289892 - RNA, 19 nt, Artificial Sequence
  Description of Artificial Sequence: Synthetic oligonucleotide
ucaugucgagcgccugucg

SEQ ID NO: 3289893 - RNA, 19 nt, Artificial Sequence
  Description of Artificial Sequence: Synthetic oligonucleotide
aucaugucgagcgccuguc

SEQ ID NO: 3289894 - RNA, 19 nt, Artificial Sequence
  Description of Artificial Sequence: Synthetic oligonucleotide
ggaucaugucgagcgccug

SEQ ID NO: 3289895 - RNA, 19 nt, Artificial Sequence
  Description of Artificial Sequence: Synthetic oligonucleotide
gaggaucaugucgagcgcc

SEQ ID NO: 3289896 - RNA, 19 nt, Artificial Sequence
  Description of Artificial Sequence: Synthetic oligonucleotide
cgaggaucaugucgagcgc

SEQ ID NO: 3289897 - RNA, 19 nt, Artificial Sequence
  Description of Artificial Sequence: Synthetic oligonucleotide
ucgaggaucaugucgagcg

SEQ ID NO: 3289898 - RNA, 19 nt, Artificial Sequence
  Description of Artificial Sequence: Synthetic oligonucleotide
gucgaggaucaugucgagc

SEQ ID NO: 3289899 - RNA, 19 nt, Artificial Sequence
  Description of Artificial Sequence: Synthetic oligonucleotide
ggucgaggaucaugucgag

SEQ ID NO: 3289900 - RNA, 19 nt, Artificial Sequence
  Description of Artificial Sequence: Synthetic oligonucleotide
ucgaggucgaggaucaugu

SEQ ID NO: 3289901 - RNA, 19 nt, Artificial Sequence
  Description of Artificial Sequence: Synthetic oligonucleotide
cucgaggucgaggaucaug

SEQ ID NO: 3289902 - RNA, 19 nt, Artificial Sequence
  Description of Artificial Sequence: Synthetic oligonucleotide
aggcucgaggucgaggauc

SEQ ID NO: 3289903 - RNA, 19 nt, Artificial Sequence
  Description of Artificial Sequence: Synthetic oligonucleotide
cgucaggcucgaggucgag

SEQ ID NO: 3289904 - RNA, 19 nt, Artificial Sequence
  Description of Artificial Sequence: Synthetic oligonucleotide
ucgucaggcucgaggucga

SEQ ID NO: 3289905 - RNA, 19 nt, Artificial Sequence
  Description of Artificial Sequence: Synthetic oligonucleotide
ccucgucaggcucgagguc

SEQ ID NO: 3289906 - RNA, 19 nt, Artificial Sequence
  Description of Artificial Sequence: Synthetic oligonucleotide
cuccucgucaggcucgagg

SEQ ID NO: 3289907 - RNA, 19 nt, Artificial Sequence
  Description of Artificial Sequence: Synthetic oligonucleotide
aacuccucgucaggcucga

SEQ ID NO: 3289908 - RNA, 19 nt, Artificial Sequence
  Description of Artificial Sequence: Synthetic oligonucleotide
cuccaacuccucgucaggc

SEQ ID NO: 3289909 - RNA, 19 nt, Artificial Sequence
  Description of Artificial Sequence: Synthetic oligonucleotide
ucggguuguccuccaacuc

SEQ ID NO: 3289910 - RNA, 19 nt, Artificial Sequence
  Description of Artificial Sequence: Synthetic oligonucleotide
uucggguuguccuccaacu

SEQ ID NO: 3289911 - RNA, 19 nt, Artificial Sequence
  Description of Artificial Sequence: Synthetic oligonucleotide
guucggguuguccuccaac

SEQ ID NO: 3289912 - RNA, 19 nt, Artificial Sequence
  Description of Artificial Sequence: Synthetic oligonucleotide
gguucggguuguccuccaa

SEQ ID NO: 3289913 - RNA, 19 nt, Artificial Sequence
  Description of Artificial Sequence: Synthetic oligonucleotide
ugguucggguuguccucca

SEQ ID NO: 3289914 - RNA, 19 nt, Artificial Sequence
  Description of Artificial Sequence: Synthetic oligonucleotide
cugguucggguuguccucc

SEQ ID NO: 3289915 - RNA, 19 nt, Artificial Sequence
  Description of Artificial Sequence: Synthetic oligonucleotide
cucugguucggguuguccu

SEQ ID NO: 3289916 - RNA, 19 nt, Artificial Sequence
  Description of Artificial Sequence: Synthetic oligonucleotide
cgcucugguucggguuguc

SEQ ID NO: 3289917 - RNA, 19 nt, Artificial Sequence
  Description of Artificial Sequence: Synthetic oligonucleotide
agaucgcucugguucgggu

SEQ ID NO: 3289918 - RNA, 19 nt, Artificial Sequence
  Description of Artificial Sequence: Synthetic oligonucleotide
cagaucgcucugguucggg

SEQ ID NO: 3289919 - RNA, 19 nt, Artificial Sequence
  Description of Artificial Sequence: Synthetic oligonucleotide
ucagaucgcucugguucgg

SEQ ID NO: 3289920 - RNA, 19 nt, Artificial Sequence
  Description of Artificial Sequence: Synthetic oligonucleotide
aucagaucgcucugguucg

SEQ ID NO: 3289921 - RNA, 19 nt, Artificial Sequence
  Description of Artificial Sequence: Synthetic oligonucleotide
gaucagaucgcucugguuc

SEQ ID NO: 3289922 - RNA, 19 nt, Artificial Sequence
  Description of Artificial Sequence: Synthetic oligonucleotide
cgaucagaucgcucugguu

SEQ ID NO: 3289923 - RNA, 19 nt, Artificial Sequence
  Description of Artificial Sequence: Synthetic oligonucleotide
ucgaucagaucgcucuggu

SEQ ID NO: 3289924 - RNA, 19 nt, Artificial Sequence
  Description of Artificial Sequence: Synthetic oligonucleotide
gcucgaucagaucgcucug

SEQ ID NO: 3289925 - RNA, 19 nt, Artificial Sequence
  Description of Artificial Sequence: Synthetic oligonucleotide
cauuucggccgccugcucg

SEQ ID NO: 3289926 - RNA, 19 nt, Artificial Sequence
  Description of Artificial Sequence: Synthetic oligonucleotide
gcauuucggccgccugcuc

SEQ ID NO: 3289927 - RNA, 19 nt, Artificial Sequence
  Description of Artificial Sequence: Synthetic oligonucleotide
agcauuucggccgccugcu

SEQ ID NO: 3289928 - RNA, 19 nt, Artificial Sequence
  Description of Artificial Sequence: Synthetic oligonucleotide
gagcauuucggccgccugc

SEQ ID NO: 3289929 - RNA, 19 nt, Artificial Sequence
  Description of Artificial Sequence: Synthetic oligonucleotide
uagagcauuucggccgccu

SEQ ID NO: 3289930 - RNA, 19 nt, Artificial Sequence
  Description of Artificial Sequence: Synthetic oligonucleotide
guagagcauuucggccgcc

SEQ ID NO: 3289931 - RNA, 19 nt, Artificial Sequence
  Description of Artificial Sequence: Synthetic oligonucleotide
cguagagcauuucggccgc

SEQ ID NO: 3289932 - RNA, 19 nt, Artificial Sequence
  Description of Artificial Sequence: Synthetic oligonucleotide
gccguagagcauuucggcc

SEQ ID NO: 3289933 - RNA, 19 nt, Artificial Sequence
  Description of Artificial Sequence: Synthetic oligonucleotide
augaggccguagagcauuu

SEQ ID NO: 3289934 - RNA, 19 nt, Artificial Sequence
  Description of Artificial Sequence: Synthetic oligonucleotide
gaugaggccguagagcauu

SEQ ID NO: 3289935 - RNA, 19 nt, Artificial Sequence
  Description of Artificial Sequence: Synthetic oligonucleotide
gcguggaugaggccguaga

SEQ ID NO: 3289936 - RNA, 19 nt, Artificial Sequence
  Description of Artificial Sequence: Synthetic oligonucleotide
cgcguggaugaggccguag

SEQ ID NO: 3289937 - RNA, 19 nt, Artificial Sequence
  Description of Artificial Sequence: Synthetic oligonucleotide
uagcgcgcguggaugaggc

SEQ ID NO: 3289938 - RNA, 19 nt, Artificial Sequence
  Description of Artificial Sequence: Synthetic oligonucleotide
guagcgcgcguggaugagg

SEQ ID NO: 3289939 - RNA, 19 nt, Artificial Sequence
  Description of Artificial Sequence: Synthetic oligonucleotide
uguagcgcgcguggaugag

SEQ ID NO: 3289940 - RNA, 19 nt, Artificial Sequence
  Description of Artificial Sequence: Synthetic oligonucleotide
aggauguagcgcgcgugga

SEQ ID NO: 3289941 - RNA, 19 nt, Artificial Sequence
  Description of Artificial Sequence: Synthetic oligonucleotide
ccgcgguuggugaggaugu

SEQ ID NO: 3289942 - RNA, 19 nt, Artificial Sequence
  Description of Artificial Sequence: Synthetic oligonucleotide
augccgcgguuggugagga

SEQ ID NO: 3289943 - RNA, 19 nt, Artificial Sequence
  Description of Artificial Sequence: Synthetic oligonucleotide
gaugccgcgguuggugagg

SEQ ID NO: 3289944 - RNA, 19 nt, Artificial Sequence
  Description of Artificial Sequence: Synthetic oligonucleotide
aacaucugcgcgaugccgc

SEQ ID NO: 3289945 - RNA, 19 nt, Artificial Sequence
  Description of Artificial Sequence: Synthetic oligonucleotide
caacaucugcgcgaugccg

SEQ ID NO: 3289946 - RNA, 19 nt, Artificial Sequence
  Description of Artificial Sequence: Synthetic oligonucleotide
uucuccaacaucugcgcga

SEQ ID NO: 3289947 - RNA, 19 nt, Artificial Sequence
  Description of Artificial Sequence: Synthetic oligonucleotide
uuucuccaacaucugcgcg

SEQ ID NO: 3289948 - RNA, 19 nt, Artificial Sequence
  Description of Artificial Sequence: Synthetic oligonucleotide
auuucuccaacaucugcgc

SEQ ID NO: 3289949 - RNA, 19 nt, Artificial Sequence
  Description of Artificial Sequence: Synthetic oligonucleotide
aaucgcccugcugguauuu

SEQ ID NO: 3289950 - RNA, 19 nt, Artificial Sequence
  Description of Artificial Sequence: Synthetic oligonucleotide
aaaucgcccugcugguauu

SEQ ID NO: 3289951 - RNA, 19 nt, Artificial Sequence
  Description of Artificial Sequence: Synthetic oligonucleotide
gaaaucgcccugcugguau

SEQ ID NO: 3289952 - RNA, 19 nt, Artificial Sequence
  Description of Artificial Sequence: Synthetic oligonucleotide
cgaaaucgcccugcuggua

SEQ ID NO: 3289953 - RNA, 19 nt, Artificial Sequence
  Description of Artificial Sequence: Synthetic oligonucleotide
ccgaaaucgcccugcuggu

SEQ ID NO: 3289954 - RNA, 19 nt, Artificial Sequence
  Description of Artificial Sequence: Synthetic oligonucleotide
cccgaaaucgcccugcugg

SEQ ID NO: 3289955 - RNA, 19 nt, Artificial Sequence
  Description of Artificial Sequence: Synthetic oligonucleotide
acccgaaaucgcccugcug

SEQ ID NO: 3289956 - RNA, 19 nt, Artificial Sequence
  Description of Artificial Sequence: Synthetic oligonucleotide
uacccgaaaucgcccugcu

SEQ ID NO: 3289957 - RNA, 19 nt, Artificial Sequence
  Description of Artificial Sequence: Synthetic oligonucleotide
guacccgaaaucgcccugc

SEQ ID NO: 3289958 - RNA, 19 nt, Artificial Sequence
  Description of Artificial Sequence: Synthetic oligonucleotide
aguacccgaaaucgcccug

SEQ ID NO: 3289959 - RNA, 19 nt, Artificial Sequence
  Description of Artificial Sequence: Synthetic oligonucleotide
caguacccgaaaucgcccu

SEQ ID NO: 3289960 - RNA, 19 nt, Artificial Sequence
  Description of Artificial Sequence: Synthetic oligonucleotide
gcaguacccgaaaucgccc

SEQ ID NO: 3289961 - RNA, 19 nt, Artificial Sequence
  Description of Artificial Sequence: Synthetic oligonucleotide
ggcaguacccgaaaucgcc

SEQ ID NO: 3289962 - RNA, 19 nt, Artificial Sequence
  Description of Artificial Sequence: Synthetic oligonucleotide
gggcaguacccgaaaucgc

SEQ ID NO: 3289963 - RNA, 19 nt, Artificial Sequence
  Description of Artificial Sequence: Synthetic oligonucleotide
ggggcaguacccgaaaucg

SEQ ID NO: 3289964 - RNA, 19 nt, Artificial Sequence
  Description of Artificial Sequence: Synthetic oligonucleotide
gggggcaguacccgaaauc

SEQ ID NO: 3289965 - RNA, 19 nt, Artificial Sequence
  Description of Artificial Sequence: Synthetic oligonucleotide
cgggggcaguacccgaaau

SEQ ID NO: 3289966 - RNA, 19 nt, Artificial Sequence
  Description of Artificial Sequence: Synthetic oligonucleotide
gcgggggcaguacccgaaa

SEQ ID NO: 3289967 - RNA, 19 nt, Artificial Sequence
  Description of Artificial Sequence: Synthetic oligonucleotide
guagacgcgggggcaguac

SEQ ID NO: 3289968 - RNA, 19 nt, Artificial Sequence
  Description of Artificial Sequence: Synthetic oligonucleotide
uucucgcaguagacgcggg

SEQ ID NO: 3289969 - RNA, 19 nt, Artificial Sequence
  Description of Artificial Sequence: Synthetic oligonucleotide
gauucucgcaguagacgcg

SEQ ID NO: 3289970 - RNA, 19 nt, Artificial Sequence
  Description of Artificial Sequence: Synthetic oligonucleotide
ugauucucgcaguagacgc

SEQ ID NO: 3289971 - RNA, 19 nt, Artificial Sequence
  Description of Artificial Sequence: Synthetic oligonucleotide
cugauucucgcaguagacg

SEQ ID NO: 3289972 - RNA, 19 nt, Artificial Sequence
  Description of Artificial Sequence: Synthetic oligonucleotide
gcugauucucgcaguagac

SEQ ID NO: 3289973 - RNA, 19 nt, Artificial Sequence
  Description of Artificial Sequence: Synthetic oligonucleotide
ggcugauucucgcaguaga

SEQ ID NO: 3289974 - RNA, 19 nt, Artificial Sequence
  Description of Artificial Sequence: Synthetic oligonucleotide
gggcugauucucgcaguag

SEQ ID NO: 3289975 - RNA, 19 nt, Artificial Sequence
  Description of Artificial Sequence: Synthetic oligonucleotide
ugggcugauucucgcagua

SEQ ID NO: 3289976 - RNA, 19 nt, Artificial Sequence
  Description of Artificial Sequence: Synthetic oligonucleotide
gauguccgacagcccgaug

SEQ ID NO: 3289977 - RNA, 19 nt, Artificial Sequence
  Description of Artificial Sequence: Synthetic oligonucleotide
uccccggggauguccgaca

SEQ ID NO: 3289978 - RNA, 19 nt, Artificial Sequence
  Description of Artificial Sequence: Synthetic oligonucleotide
aucgccuccccggggaugu

SEQ ID NO: 3289979 - RNA, 19 nt, Artificial Sequence
  Description of Artificial Sequence: Synthetic oligonucleotide
cuucaccaucgccuccccg

SEQ ID NO: 3289980 - RNA, 19 nt, Artificial Sequence
  Description of Artificial Sequence: Synthetic oligonucleotide
uggggcaguacagcuucac

SEQ ID NO: 3289981 - RNA, 19 nt, Artificial Sequence
  Description of Artificial Sequence: Synthetic oligonucleotide
uuggggcaguacagcuuca

SEQ ID NO: 3289982 - RNA, 19 nt, Artificial Sequence
  Description of Artificial Sequence: Synthetic oligonucleotide
auuuggggcaguacagcuu

SEQ ID NO: 3289983 - RNA, 19 nt, Artificial Sequence
  Description of Artificial Sequence: Synthetic oligonucleotide
ccauacauuuggggcagua

SEQ ID NO: 3289984 - RNA, 19 nt, Artificial Sequence
  Description of Artificial Sequence: Synthetic oligonucleotide
guccauacauuuggggcag

SEQ ID NO: 3289985 - RNA, 19 nt, Artificial Sequence
  Description of Artificial Sequence: Synthetic oligonucleotide
acguccauacauuuggggc

SEQ ID NO: 3289986 - RNA, 19 nt, Artificial Sequence
  Description of Artificial Sequence: Synthetic oligonucleotide
aacguccauacauuugggg

SEQ ID NO: 3289987 - RNA, 19 nt, Artificial Sequence
  Description of Artificial Sequence: Synthetic oligonucleotide
aaacguccauacauuuggg

SEQ ID NO: 3289988 - RNA, 19 nt, Artificial Sequence
  Description of Artificial Sequence: Synthetic oligonucleotide
uaaacguccauacauuugg

SEQ ID NO: 3289989 - RNA, 19 nt, Artificial Sequence
  Description of Artificial Sequence: Synthetic oligonucleotide
uguaaacguccauacauuu

SEQ ID NO: 3289990 - RNA, 19 nt, Artificial Sequence
  Description of Artificial Sequence: Synthetic oligonucleotide
guguaaacguccauacauu

SEQ ID NO: 3289991 - RNA, 19 nt, Artificial Sequence
  Description of Artificial Sequence: Synthetic oligonucleotide
gguguaaacguccauacau

SEQ ID NO: 3289992 - RNA, 19 nt, Artificial Sequence
  Description of Artificial Sequence: Synthetic oligonucleotide
ggguguaaacguccauaca

SEQ ID NO: 3289993 - RNA, 19 nt, Artificial Sequence
  Description of Artificial Sequence: Synthetic oligonucleotide
gggguguaaacguccauac

SEQ ID NO: 3289994 - RNA, 19 nt, Artificial Sequence
  Description of Artificial Sequence: Synthetic oligonucleotide
cgggguguaaacguccaua

SEQ ID NO: 3289995 - RNA, 19 nt, Artificial Sequence
  Description of Artificial Sequence: Synthetic oligonucleotide
ucgggguguaaacguccau

SEQ ID NO: 3289996 - RNA, 19 nt, Artificial Sequence
  Description of Artificial Sequence: Synthetic oligonucleotide
uucgggguguaaacgucca

SEQ ID NO: 3289997 - RNA, 19 nt, Artificial Sequence
  Description of Artificial Sequence: Synthetic oligonucleotide
cuucgggguguaaacgucc

SEQ ID NO: 3289998 - RNA, 19 nt, Artificial Sequence
  Description of Artificial Sequence: Synthetic oligonucleotide
acuucgggguguaaacguc

SEQ ID NO: 3289999 - RNA, 19 nt, Artificial Sequence
  Description of Artificial Sequence: Synthetic oligonucleotide
gacuucgggguguaaacgu

SEQ ID NO: 3290000 - RNA, 19 nt, Artificial Sequence
  Description of Artificial Sequence: Synthetic oligonucleotide
cgacuucgggguguaaacg

SEQ ID NO: 3290001 - RNA, 19 nt, Artificial Sequence
  Description of Artificial Sequence: Synthetic oligonucleotide
acgacuucgggguguaaac

SEQ ID NO: 3290002 - RNA, 19 nt, Artificial Sequence
  Description of Artificial Sequence: Synthetic oligonucleotide
gacgacuucgggguguaaa

SEQ ID NO: 3290003 - RNA, 19 nt, Artificial Sequence
  Description of Artificial Sequence: Synthetic oligonucleotide
cgacgacuucgggguguaa

SEQ ID NO: 3290004 - RNA, 19 nt, Artificial Sequence
  Description of Artificial Sequence: Synthetic oligonucleotide
gcgacgacuucggggugua

SEQ ID NO: 3290005 - RNA, 19 nt, Artificial Sequence
  Description of Artificial Sequence: Synthetic oligonucleotide
cgcgacgacuucggggugu

SEQ ID NO: 3290006 - RNA, 19 nt, Artificial Sequence
  Description of Artificial Sequence: Synthetic oligonucleotide
uggugccgcgacgacuucg

SEQ ID NO: 3290007 - RNA, 19 nt, Artificial Sequence
  Description of Artificial Sequence: Synthetic oligonucleotide
guggugccgcgacgacuuc

SEQ ID NO: 3290008 - RNA, 19 nt, Artificial Sequence
  Description of Artificial Sequence: Synthetic oligonucleotide
gguggugccgcgacgacuu

SEQ ID NO: 3290009 - RNA, 19 nt, Artificial Sequence
  Description of Artificial Sequence: Synthetic oligonucleotide
ugguggugccgcgacgacu

SEQ ID NO: 3290010 - RNA, 19 nt, Artificial Sequence
  Description of Artificial Sequence: Synthetic oligonucleotide
ugugguggugccgcgacga

SEQ ID NO: 3290011 - RNA, 19 nt, Artificial Sequence
  Description of Artificial Sequence: Synthetic oligonucleotide
aaauaggcgccgucggugu

SEQ ID NO: 3290012 - RNA, 19 nt, Artificial Sequence
  Description of Artificial Sequence: Synthetic oligonucleotide
gaaauaggcgccgucggug

SEQ ID NO: 3290013 - RNA, 19 nt, Artificial Sequence
  Description of Artificial Sequence: Synthetic oligonucleotide
ccgaaauaggcgccgucgg

SEQ ID NO: 3290014 - RNA, 19 nt, Artificial Sequence
  Description of Artificial Sequence: Synthetic oligonucleotide
gugccgaaauaggcgccgu

SEQ ID NO: 3290015 - RNA, 19 nt, Artificial Sequence
  Description of Artificial Sequence: Synthetic oligonucleotide
ccggugccgaaauaggcgc

SEQ ID NO: 3290016 - RNA, 19 nt, Artificial Sequence
  Description of Artificial Sequence: Synthetic oligonucleotide
accggugccgaaauaggcg

SEQ ID NO: 3290017 - RNA, 19 nt, Artificial Sequence
  Description of Artificial Sequence: Synthetic oligonucleotide
aaaccggugccgaaauagg

SEQ ID NO: 3290018 - RNA, 19 nt, Artificial Sequence
  Description of Artificial Sequence: Synthetic oligonucleotide
gaaaccggugccgaaauag

SEQ ID NO: 3290019 - RNA, 19 nt, Artificial Sequence
  Description of Artificial Sequence: Synthetic oligonucleotide
gggaaaccggugccgaaau

SEQ ID NO: 3290020 - RNA, 19 nt, Artificial Sequence
  Description of Artificial Sequence: Synthetic oligonucleotide
ggggaaaccggugccgaaa

SEQ ID NO: 3290021 - RNA, 19 nt, Artificial Sequence
  Description of Artificial Sequence: Synthetic oligonucleotide
augggggaaaccggugccg

SEQ ID NO: 3290022 - RNA, 19 nt, Artificial Sequence
  Description of Artificial Sequence: Synthetic oligonucleotide
auaugggggaaaccggugc

SEQ ID NO: 3290023 - RNA, 19 nt, Artificial Sequence
  Description of Artificial Sequence: Synthetic oligonucleotide
cauaugggggaaaccggug

SEQ ID NO: 3290024 - RNA, 19 nt, Artificial Sequence
  Description of Artificial Sequence: Synthetic oligonucleotide
gcauaugggggaaaccggu

SEQ ID NO: 3290025 - RNA, 19 nt, Artificial Sequence
  Description of Artificial Sequence: Synthetic oligonucleotide
agcauaugggggaaaccgg

SEQ ID NO: 3290026 - RNA, 19 nt, Artificial Sequence
  Description of Artificial Sequence: Synthetic oligonucleotide
gagcauaugggggaaaccg

SEQ ID NO: 3290027 - RNA, 19 nt, Artificial Sequence
  Description of Artificial Sequence: Synthetic oligonucleotide
agagcauaugggggaaacc

SEQ ID NO: 3290028 - RNA, 19 nt, Artificial Sequence
  Description of Artificial Sequence: Synthetic oligonucleotide
gguauucggggugcaccau

SEQ ID NO: 3290029 - RNA, 19 nt, Artificial Sequence
  Description of Artificial Sequence: Synthetic oligonucleotide
cgguauucggggugcacca

SEQ ID NO: 3290030 - RNA, 19 nt, Artificial Sequence
  Description of Artificial Sequence: Synthetic oligonucleotide
gcgguauucggggugcacc

SEQ ID NO: 3290031 - RNA, 19 nt, Artificial Sequence
  Description of Artificial Sequence: Synthetic oligonucleotide
ggcgguauucggggugcac

SEQ ID NO: 3290032 - RNA, 19 nt, Artificial Sequence
  Description of Artificial Sequence: Synthetic oligonucleotide
gggcgguauucggggugca

SEQ ID NO: 3290033 - RNA, 19 nt, Artificial Sequence
  Description of Artificial Sequence: Synthetic oligonucleotide
uggggcgguauucggggug

SEQ ID NO: 3290034 - RNA, 19 nt, Artificial Sequence
  Description of Artificial Sequence: Synthetic oligonucleotide
cuuggggcgguauucgggg

SEQ ID NO: 3290035 - RNA, 19 nt, Artificial Sequence
  Description of Artificial Sequence: Synthetic oligonucleotide
gcuuggggcgguauucggg

SEQ ID NO: 3290036 - RNA, 19 nt, Artificial Sequence
  Description of Artificial Sequence: Synthetic oligonucleotide
ggcgcuuggggcgguauuc

SEQ ID NO: 3290037 - RNA, 19 nt, Artificial Sequence
  Description of Artificial Sequence: Synthetic oligonucleotide
gaauugguuugcggggcgc

SEQ ID NO: 3290038 - RNA, 19 nt, Artificial Sequence
  Description of Artificial Sequence: Synthetic oligonucleotide
cgaauugguuugcggggcg

SEQ ID NO: 3290039 - RNA, 19 nt, Artificial Sequence
  Description of Artificial Sequence: Synthetic oligonucleotide
acgaauugguuugcggggc

SEQ ID NO: 3290040 - RNA, 19 nt, Artificial Sequence
  Description of Artificial Sequence: Synthetic oligonucleotide
gcacgaauugguuugcggg

SEQ ID NO: 3290041 - RNA, 19 nt, Artificial Sequence
  Description of Artificial Sequence: Synthetic oligonucleotide
ggcacgaauugguuugcgg

SEQ ID NO: 3290042 - RNA, 19 nt, Artificial Sequence
  Description of Artificial Sequence: Synthetic oligonucleotide
gggcacgaauugguuugcg

SEQ ID NO: 3290043 - RNA, 19 nt, Artificial Sequence
  Description of Artificial Sequence: Synthetic oligonucleotide
ugggcacgaauugguuugc

SEQ ID NO: 3290044 - RNA, 19 nt, Artificial Sequence
  Description of Artificial Sequence: Synthetic oligonucleotide
cugggcacgaauugguuug

SEQ ID NO: 3290045 - RNA, 19 nt, Artificial Sequence
  Description of Artificial Sequence: Synthetic oligonucleotide
gccugggcacgaauugguu

SEQ ID NO: 3290046 - RNA, 19 nt, Artificial Sequence
  Description of Artificial Sequence: Synthetic oligonucleotide
agccugggcacgaauuggu

SEQ ID NO: 3290047 - RNA, 19 nt, Artificial Sequence
  Description of Artificial Sequence: Synthetic oligonucleotide
cagccugggcacgaauugg

SEQ ID NO: 3290048 - RNA, 19 nt, Artificial Sequence
  Description of Artificial Sequence: Synthetic oligonucleotide
uacagccugggcacgaauu

SEQ ID NO: 3290049 - RNA, 19 nt, Artificial Sequence
  Description of Artificial Sequence: Synthetic oligonucleotide
cauacagccugggcacgaa

SEQ ID NO: 3290050 - RNA, 19 nt, Artificial Sequence
  Description of Artificial Sequence: Synthetic oligonucleotide
ccauacagccugggcacga

SEQ ID NO: 3290051 - RNA, 19 nt, Artificial Sequence
  Description of Artificial Sequence: Synthetic oligonucleotide
cccauacagccugggcacg

SEQ ID NO: 3290052 - RNA, 19 nt, Artificial Sequence
  Description of Artificial Sequence: Synthetic oligonucleotide
gaacccauacagccugggc

SEQ ID NO: 3290053 - RNA, 19 nt, Artificial Sequence
  Description of Artificial Sequence: Synthetic oligonucleotide
uugaacccauacagccugg

SEQ ID NO: 3290054 - RNA, 19 nt, Artificial Sequence
  Description of Artificial Sequence: Synthetic oligonucleotide
cuugaacccauacagccug

SEQ ID NO: 3290055 - RNA, 19 nt, Artificial Sequence
  Description of Artificial Sequence: Synthetic oligonucleotide
ucuugaacccauacagccu

SEQ ID NO: 3290056 - RNA, 19 nt, Artificial Sequence
  Description of Artificial Sequence: Synthetic oligonucleotide
aucuugaacccauacagcc

SEQ ID NO: 3290057 - RNA, 19 nt, Artificial Sequence
  Description of Artificial Sequence: Synthetic oligonucleotide
ggaucuugaacccauacag

SEQ ID NO: 3290058 - RNA, 19 nt, Artificial Sequence
  Description of Artificial Sequence: Synthetic oligonucleotide
uggaucuugaacccauaca

SEQ ID NO: 3290059 - RNA, 19 nt, Artificial Sequence
  Description of Artificial Sequence: Synthetic oligonucleotide
ugggguggaucuugaaccc

SEQ ID NO: 3290060 - RNA, 19 nt, Artificial Sequence
  Description of Artificial Sequence: Synthetic oligonucleotide
gccaugggguggaucuuga

SEQ ID NO: 3290061 - RNA, 19 nt, Artificial Sequence
  Description of Artificial Sequence: Synthetic oligonucleotide
uacgccaugggguggaucu

SEQ ID NO: 3290062 - RNA, 19 nt, Artificial Sequence
  Description of Artificial Sequence: Synthetic oligonucleotide
guacgccaugggguggauc

SEQ ID NO: 3290063 - RNA, 19 nt, Artificial Sequence
  Description of Artificial Sequence: Synthetic oligonucleotide
gguacgccaugggguggau

SEQ ID NO: 3290064 - RNA, 19 nt, Artificial Sequence
  Description of Artificial Sequence: Synthetic oligonucleotide
ugguacgccauggggugga

SEQ ID NO: 3290065 - RNA, 19 nt, Artificial Sequence
  Description of Artificial Sequence: Synthetic oligonucleotide
gcugguacgccauggggug

SEQ ID NO: 3290066 - RNA, 19 nt, Artificial Sequence
  Description of Artificial Sequence: Synthetic oligonucleotide
cagcugguacgccaugggg

SEQ ID NO: 3290067 - RNA, 19 nt, Artificial Sequence
  Description of Artificial Sequence: Synthetic oligonucleotide
gaaguugcuggcggccugc

SEQ ID NO: 3290068 - RNA, 19 nt, Artificial Sequence
  Description of Artificial Sequence: Synthetic oligonucleotide
cuugaaguugcuggcggcc

SEQ ID NO: 3290069 - RNA, 19 nt, Artificial Sequence
  Description of Artificial Sequence: Synthetic oligonucleotide
gggcucuugaaguugcugg

SEQ ID NO: 3290070 - RNA, 19 nt, Artificial Sequence
  Description of Artificial Sequence: Synthetic oligonucleotide
uucacggggcucuugaagu

SEQ ID NO: 3290071 - RNA, 19 nt, Artificial Sequence
  Description of Artificial Sequence: Synthetic oligonucleotide
cuucacggggcucuugaag

SEQ ID NO: 3290072 - RNA, 19 nt, Artificial Sequence
  Description of Artificial Sequence: Synthetic oligonucleotide
gucuucacggggcucuuga

SEQ ID NO: 3290073 - RNA, 19 nt, Artificial Sequence
  Description of Artificial Sequence: Synthetic oligonucleotide
gcggauggucuucacgggg

SEQ ID NO: 3290074 - RNA, 19 nt, Artificial Sequence
  Description of Artificial Sequence: Synthetic oligonucleotide
agcggauggucuucacggg

SEQ ID NO: 3290075 - RNA, 19 nt, Artificial Sequence
  Description of Artificial Sequence: Synthetic oligonucleotide
aucagcggauggucuucac

SEQ ID NO: 3290076 - RNA, 19 nt, Artificial Sequence
  Description of Artificial Sequence: Synthetic oligonucleotide
caucagcggauggucuuca

SEQ ID NO: 3290077 - RNA, 19 nt, Artificial Sequence
  Description of Artificial Sequence: Synthetic oligonucleotide
ccaucagcggauggucuuc

SEQ ID NO: 3290078 - RNA, 19 nt, Artificial Sequence
  Description of Artificial Sequence: Synthetic oligonucleotide
cccaucagcggauggucuu

SEQ ID NO: 3290079 - RNA, 19 nt, Artificial Sequence
  Description of Artificial Sequence: Synthetic oligonucleotide
ccccaucagcggauggucu

SEQ ID NO: 3290080 - RNA, 19 nt, Artificial Sequence
  Description of Artificial Sequence: Synthetic oligonucleotide
aauccccccaucagcggau

SEQ ID NO: 3290081 - RNA, 19 nt, Artificial Sequence
  Description of Artificial Sequence: Synthetic oligonucleotide
aaauccccccaucagcgga

SEQ ID NO: 3290082 - RNA, 19 nt, Artificial Sequence
  Description of Artificial Sequence: Synthetic oligonucleotide
uaaauccccccaucagcgg

SEQ ID NO: 3290083 - RNA, 19 nt, Artificial Sequence
  Description of Artificial Sequence: Synthetic oligonucleotide
auaaauccccccaucagcg

SEQ ID NO: 3290084 - RNA, 19 nt, Artificial Sequence
  Description of Artificial Sequence: Synthetic oligonucleotide
cauaaauccccccaucagc

SEQ ID NO: 3290085 - RNA, 19 nt, Artificial Sequence
  Description of Artificial Sequence: Synthetic oligonucleotide
cccccccauaaaucccccc

SEQ ID NO: 3290086 - RNA, 19 nt, Artificial Sequence
  Description of Artificial Sequence: Synthetic oligonucleotide
acccccccauaaauccccc

SEQ ID NO: 3290087 - RNA, 19 nt, Artificial Sequence
  Description of Artificial Sequence: Synthetic oligonucleotide
aacccccccauaaaucccc

SEQ ID NO: 3290088 - RNA, 19 nt, Artificial Sequence
  Description of Artificial Sequence: Synthetic oligonucleotide
aaacccccccauaaauccc

SEQ ID NO: 3290089 - RNA, 19 nt, Artificial Sequence
  Description of Artificial Sequence: Synthetic oligonucleotide
uaaacccccccauaaaucc

SEQ ID NO: 3290090 - RNA, 19 nt, Artificial Sequence
  Description of Artificial Sequence: Synthetic oligonucleotide
auaaacccccccauaaauc

SEQ ID NO: 3290091 - RNA, 19 nt, Artificial Sequence
  Description of Artificial Sequence: Synthetic oligonucleotide
cauaaacccccccauaaau

SEQ ID NO: 3290092 - RNA, 19 nt, Artificial Sequence
  Description of Artificial Sequence: Synthetic oligonucleotide
ccauaaacccccccauaaa

SEQ ID NO: 3290093 - RNA, 19 nt, Artificial Sequence
  Description of Artificial Sequence: Synthetic oligonucleotide
cccauaaacccccccauaa

SEQ ID NO: 3290094 - RNA, 19 nt, Artificial Sequence
  Description of Artificial Sequence: Synthetic oligonucleotide
ccccauaaacccccccaua

SEQ ID NO: 3290095 - RNA, 19 nt, Artificial Sequence
  Description of Artificial Sequence: Synthetic oligonucleotide
accccauaaacccccccau

SEQ ID NO: 3290096 - RNA, 19 nt, Artificial Sequence
  Description of Artificial Sequence: Synthetic oligonucleotide
caccccaaaccccauaaac

SEQ ID NO: 3290097 - RNA, 19 nt, Artificial Sequence
  Description of Artificial Sequence: Synthetic oligonucleotide
ccaccccaaaccccauaaa

SEQ ID NO: 3290098 - RNA, 19 nt, Artificial Sequence
  Description of Artificial Sequence: Synthetic oligonucleotide
cccaccccaaaccccauaa

SEQ ID NO: 3290099 - RNA, 19 nt, Artificial Sequence
  Description of Artificial Sequence: Synthetic oligonucleotide
aaacccccccaccccaaac

SEQ ID NO: 3290100 - RNA, 19 nt, Artificial Sequence
  Description of Artificial Sequence: Synthetic oligonucleotide
cauaaacccccccacccca

SEQ ID NO: 3290101 - RNA, 19 nt, Artificial Sequence
  Description of Artificial Sequence: Synthetic oligonucleotide
ccauaaacccccccacccc

SEQ ID NO: 3290102 - RNA, 19 nt, Artificial Sequence
  Description of Artificial Sequence: Synthetic oligonucleotide
cccauaaacccccccaccc

SEQ ID NO: 3290103 - RNA, 19 nt, Artificial Sequence
  Description of Artificial Sequence: Synthetic oligonucleotide
ccccauaaacccccccacc

SEQ ID NO: 3290104 - RNA, 19 nt, Artificial Sequence
  Description of Artificial Sequence: Synthetic oligonucleotide
accccauaaacccccccac

SEQ ID NO: 3290105 - RNA, 19 nt, Artificial Sequence
  Description of Artificial Sequence: Synthetic oligonucleotide
cgaccccauaaaccccccc

SEQ ID NO: 3290106 - RNA, 19 nt, Artificial Sequence
  Description of Artificial Sequence: Synthetic oligonucleotide
ccgaccccauaaacccccc

SEQ ID NO: 3290107 - RNA, 19 nt, Artificial Sequence
  Description of Artificial Sequence: Synthetic oligonucleotide
cccgaccccauaaaccccc

SEQ ID NO: 3290108 - RNA, 19 nt, Artificial Sequence
  Description of Artificial Sequence: Synthetic oligonucleotide
ccccgaccccauaaacccc

SEQ ID NO: 3290109 - RNA, 19 nt, Artificial Sequence
  Description of Artificial Sequence: Synthetic oligonucleotide
cccccgaccccauaaaccc

SEQ ID NO: 3290110 - RNA, 19 nt, Artificial Sequence
  Description of Artificial Sequence: Synthetic oligonucleotide
ccccccgaccccauaaacc

SEQ ID NO: 3290111 - RNA, 19 nt, Artificial Sequence
  Description of Artificial Sequence: Synthetic oligonucleotide
cccccccgaccccauaaac

SEQ ID NO: 3290112 - RNA, 19 nt, Artificial Sequence
  Description of Artificial Sequence: Synthetic oligonucleotide
ugaccccaaaaucccccca

SEQ ID NO: 3290113 - RNA, 19 nt, Artificial Sequence
  Description of Artificial Sequence: Synthetic oligonucleotide
cgaauugaccccaaaaucc

SEQ ID NO: 3290114 - RNA, 19 nt, Artificial Sequence
  Description of Artificial Sequence: Synthetic oligonucleotide
cacgaauugaccccaaaau

SEQ ID NO: 3290115 - RNA, 19 nt, Artificial Sequence
  Description of Artificial Sequence: Synthetic oligonucleotide
gcacgaauugaccccaaaa

SEQ ID NO: 3290116 - RNA, 19 nt, Artificial Sequence
  Description of Artificial Sequence: Synthetic oligonucleotide
ggcacgaauugaccccaaa

SEQ ID NO: 3290117 - RNA, 19 nt, Artificial Sequence
  Description of Artificial Sequence: Synthetic oligonucleotide
cggcacgaauugaccccaa

SEQ ID NO: 3290118 - RNA, 19 nt, Artificial Sequence
  Description of Artificial Sequence: Synthetic oligonucleotide
aacggcacgaauugacccc

SEQ ID NO: 3290119 - RNA, 19 nt, Artificial Sequence
  Description of Artificial Sequence: Synthetic oligonucleotide
aaacggcacgaauugaccc

SEQ ID NO: 3290120 - RNA, 19 nt, Artificial Sequence
  Description of Artificial Sequence: Synthetic oligonucleotide
aaaacggcacgaauugacc

SEQ ID NO: 3290121 - RNA, 19 nt, Artificial Sequence
  Description of Artificial Sequence: Synthetic oligonucleotide
cccaaaacggcacgaauug

SEQ ID NO: 3290122 - RNA, 19 nt, Artificial Sequence
  Description of Artificial Sequence: Synthetic oligonucleotide
acccaaaacggcacgaauu

SEQ ID NO: 3290123 - RNA, 19 nt, Artificial Sequence
  Description of Artificial Sequence: Synthetic oligonucleotide
gacccaaaacggcacgaau

SEQ ID NO: 3290124 - RNA, 19 nt, Artificial Sequence
  Description of Artificial Sequence: Synthetic oligonucleotide
ggacccaaaacggcacgaa

SEQ ID NO: 3290125 - RNA, 19 nt, Artificial Sequence
  Description of Artificial Sequence: Synthetic oligonucleotide
cggacccaaaacggcacga

SEQ ID NO: 3290126 - RNA, 19 nt, Artificial Sequence
  Description of Artificial Sequence: Synthetic oligonucleotide
acggacccaaaacggcacg

SEQ ID NO: 3290127 - RNA, 19 nt, Artificial Sequence
  Description of Artificial Sequence: Synthetic oligonucleotide
cacggacccaaaacggcac

SEQ ID NO: 3290128 - RNA, 19 nt, Artificial Sequence
  Description of Artificial Sequence: Synthetic oligonucleotide
ccacggacccaaaacggca

SEQ ID NO: 3290129 - RNA, 19 nt, Artificial Sequence
  Description of Artificial Sequence: Synthetic oligonucleotide
uccacggacccaaaacggc

SEQ ID NO: 3290130 - RNA, 19 nt, Artificial Sequence
  Description of Artificial Sequence: Synthetic oligonucleotide
uuccacggacccaaaacgg

SEQ ID NO: 3290131 - RNA, 19 nt, Artificial Sequence
  Description of Artificial Sequence: Synthetic oligonucleotide
auuccacggacccaaaacg

SEQ ID NO: 3290132 - RNA, 19 nt, Artificial Sequence
  Description of Artificial Sequence: Synthetic oligonucleotide
uuuuucauuccacggaccc

SEQ ID NO: 3290133 - RNA, 19 nt, Artificial Sequence
  Description of Artificial Sequence: Synthetic oligonucleotide
cuuuuuuucauuccacgga

SEQ ID NO: 3290134 - RNA, 19 nt, Artificial Sequence
  Description of Artificial Sequence: Synthetic oligonucleotide
ucuuuuuuucauuccacgg

SEQ ID NO: 3290135 - RNA, 19 nt, Artificial Sequence
  Description of Artificial Sequence: Synthetic oligonucleotide
gcucuuuuuuucauuccac

SEQ ID NO: 3290136 - RNA, 19 nt, Artificial Sequence
  Description of Artificial Sequence: Synthetic oligonucleotide
ucggcucuuuuuuucauuc

SEQ ID NO: 3290137 - RNA, 19 nt, Artificial Sequence
  Description of Artificial Sequence: Synthetic oligonucleotide
cucggcucuuuuuuucauu

SEQ ID NO: 3290138 - RNA, 19 nt, Artificial Sequence
  Description of Artificial Sequence: Synthetic oligonucleotide
ucucggcucuuuuuuucau

SEQ ID NO: 3290139 - RNA, 19 nt, Artificial Sequence
  Description of Artificial Sequence: Synthetic oligonucleotide
cucucggcucuuuuuuuca

SEQ ID NO: 3290140 - RNA, 19 nt, Artificial Sequence
  Description of Artificial Sequence: Synthetic oligonucleotide
uuccccucucggcucuuuu

SEQ ID NO: 3290141 - RNA, 19 nt, Artificial Sequence
  Description of Artificial Sequence: Synthetic oligonucleotide
uuuauuccccucucggcuc

SEQ ID NO: 3290142 - RNA, 19 nt, Artificial Sequence
  Description of Artificial Sequence: Synthetic oligonucleotide
ucagcggugccuacacucc

SEQ ID NO: 3290143 - RNA, 19 nt, Artificial Sequence
  Description of Artificial Sequence: Synthetic oligonucleotide
cagcggugccuacacuccu

SEQ ID NO: 3290144 - RNA, 19 nt, Artificial Sequence
  Description of Artificial Sequence: Synthetic oligonucleotide
agcggugccuacacuccug

SEQ ID NO: 3290145 - RNA, 19 nt, Artificial Sequence
  Description of Artificial Sequence: Synthetic oligonucleotide
cggugccuacacuccugga

SEQ ID NO: 3290146 - RNA, 19 nt, Artificial Sequence
  Description of Artificial Sequence: Synthetic oligonucleotide
cuacacuccuggaaaggau

SEQ ID NO: 3290147 - RNA, 19 nt, Artificial Sequence
  Description of Artificial Sequence: Synthetic oligonucleotide
cuccuggaaaggauaaacc

SEQ ID NO: 3290148 - RNA, 19 nt, Artificial Sequence
  Description of Artificial Sequence: Synthetic oligonucleotide
uccuggaaaggauaaaccu

SEQ ID NO: 3290149 - RNA, 19 nt, Artificial Sequence
  Description of Artificial Sequence: Synthetic oligonucleotide
ccuggaaaggauaaaccug

SEQ ID NO: 3290150 - RNA, 19 nt, Artificial Sequence
  Description of Artificial Sequence: Synthetic oligonucleotide
aaggauaaaccugaucugc

SEQ ID NO: 3290151 - RNA, 19 nt, Artificial Sequence
  Description of Artificial Sequence: Synthetic oligonucleotide
aggauaaaccugaucugcc

SEQ ID NO: 3290152 - RNA, 19 nt, Artificial Sequence
  Description of Artificial Sequence: Synthetic oligonucleotide
ggauaaaccugaucugccc

SEQ ID NO: 3290153 - RNA, 19 nt, Artificial Sequence
  Description of Artificial Sequence: Synthetic oligonucleotide
cuggaagaggaauuuccga

SEQ ID NO: 3290154 - RNA, 19 nt, Artificial Sequence
  Description of Artificial Sequence: Synthetic oligonucleotide
uggaagaggaauuuccgau

SEQ ID NO: 3290155 - RNA, 19 nt, Artificial Sequence
  Description of Artificial Sequence: Synthetic oligonucleotide
ggaagaggaauuuccgauc

SEQ ID NO: 3290156 - RNA, 19 nt, Artificial Sequence
  Description of Artificial Sequence: Synthetic oligonucleotide
gaagaggaauuuccgaucu

SEQ ID NO: 3290157 - RNA, 19 nt, Artificial Sequence
  Description of Artificial Sequence: Synthetic oligonucleotide
aagaggaauuuccgaucug

SEQ ID NO: 3290158 - RNA, 19 nt, Artificial Sequence
  Description of Artificial Sequence: Synthetic oligonucleotide
agaggaauuuccgaucugc

SEQ ID NO: 3290159 - RNA, 19 nt, Artificial Sequence
  Description of Artificial Sequence: Synthetic oligonucleotide
gaggaauuuccgaucugcc

SEQ ID NO: 3290160 - RNA, 19 nt, Artificial Sequence
  Description of Artificial Sequence: Synthetic oligonucleotide
aggaauuuccgaucugccc

SEQ ID NO: 3290161 - RNA, 19 nt, Artificial Sequence
  Description of Artificial Sequence: Synthetic oligonucleotide
gaauuuccgaucugcccug

SEQ ID NO: 3290162 - RNA, 19 nt, Artificial Sequence
  Description of Artificial Sequence: Synthetic oligonucleotide
uccgaucugcccugaaccg

SEQ ID NO: 3290163 - RNA, 19 nt, Artificial Sequence
  Description of Artificial Sequence: Synthetic oligonucleotide
cgaucugcccugaaccgga

SEQ ID NO: 3290164 - RNA, 19 nt, Artificial Sequence
  Description of Artificial Sequence: Synthetic oligonucleotide
gaucugcccugaaccggaa

SEQ ID NO: 3290165 - RNA, 19 nt, Artificial Sequence
  Description of Artificial Sequence: Synthetic oligonucleotide
aucugcccugaaccggaag

SEQ ID NO: 3290166 - RNA, 19 nt, Artificial Sequence
  Description of Artificial Sequence: Synthetic oligonucleotide
ccggaaggaggaguugcgu

SEQ ID NO: 3290167 - RNA, 19 nt, Artificial Sequence
  Description of Artificial Sequence: Synthetic oligonucleotide
cggaaggaggaguugcgug

SEQ ID NO: 3290168 - RNA, 19 nt, Artificial Sequence
  Description of Artificial Sequence: Synthetic oligonucleotide
aaggaggaguugcguguag

SEQ ID NO: 3290169 - RNA, 19 nt, Artificial Sequence
  Description of Artificial Sequence: Synthetic oligonucleotide
aggaggaguugcguguagc

SEQ ID NO: 3290170 - RNA, 19 nt, Artificial Sequence
  Description of Artificial Sequence: Synthetic oligonucleotide
ggaggaguugcguguagcu

SEQ ID NO: 3290171 - RNA, 19 nt, Artificial Sequence
  Description of Artificial Sequence: Synthetic oligonucleotide
gaggaguugcguguagcug

SEQ ID NO: 3290172 - RNA, 19 nt, Artificial Sequence
  Description of Artificial Sequence: Synthetic oligonucleotide
aggaguugcguguagcuga

SEQ ID NO: 3290173 - RNA, 19 nt, Artificial Sequence
  Description of Artificial Sequence: Synthetic oligonucleotide
ggaguugcguguagcugaa

SEQ ID NO: 3290174 - RNA, 19 nt, Artificial Sequence
  Description of Artificial Sequence: Synthetic oligonucleotide
aguugcguguagcugaaga

SEQ ID NO: 3290175 - RNA, 19 nt, Artificial Sequence
  Description of Artificial Sequence: Synthetic oligonucleotide
guugcguguagcugaagau

SEQ ID NO: 3290176 - RNA, 19 nt, Artificial Sequence
  Description of Artificial Sequence: Synthetic oligonucleotide
uugcguguagcugaagauc

SEQ ID NO: 3290177 - RNA, 19 nt, Artificial Sequence
  Description of Artificial Sequence: Synthetic oligonucleotide
ugcguguagcugaagaucg

SEQ ID NO: 3290178 - RNA, 19 nt, Artificial Sequence
  Description of Artificial Sequence: Synthetic oligonucleotide
cguguagcugaagaucgga

SEQ ID NO: 3290179 - RNA, 19 nt, Artificial Sequence
  Description of Artificial Sequence: Synthetic oligonucleotide
guguagcugaagaucggag

SEQ ID NO: 3290180 - RNA, 19 nt, Artificial Sequence
  Description of Artificial Sequence: Synthetic oligonucleotide
uguagcugaagaucggagc

SEQ ID NO: 3290181 - RNA, 19 nt, Artificial Sequence
  Description of Artificial Sequence: Synthetic oligonucleotide
guagcugaagaucggagca

SEQ ID NO: 3290182 - RNA, 19 nt, Artificial Sequence
  Description of Artificial Sequence: Synthetic oligonucleotide
gaagaucggagcaaagacc

SEQ ID NO: 3290183 - RNA, 19 nt, Artificial Sequence
  Description of Artificial Sequence: Synthetic oligonucleotide
agaucggagcaaagacccc

SEQ ID NO: 3290184 - RNA, 19 nt, Artificial Sequence
  Description of Artificial Sequence: Synthetic oligonucleotide
ccacgacccacacaagguc

SEQ ID NO: 3290185 - RNA, 19 nt, Artificial Sequence
  Description of Artificial Sequence: Synthetic oligonucleotide
cacgacccacacaaggucu

SEQ ID NO: 3290186 - RNA, 19 nt, Artificial Sequence
  Description of Artificial Sequence: Synthetic oligonucleotide
acgacccacacaaggucua

SEQ ID NO: 3290187 - RNA, 19 nt, Artificial Sequence
  Description of Artificial Sequence: Synthetic oligonucleotide
cgacccacacaaggucuau

SEQ ID NO: 3290188 - RNA, 19 nt, Artificial Sequence
  Description of Artificial Sequence: Synthetic oligonucleotide
gacccacacaaggucuaug

SEQ ID NO: 3290189 - RNA, 19 nt, Artificial Sequence
  Description of Artificial Sequence: Synthetic oligonucleotide
acacaaggucuaugaguuu

SEQ ID NO: 3290190 - RNA, 19 nt, Artificial Sequence
  Description of Artificial Sequence: Synthetic oligonucleotide
cacaaggucuaugaguuug

SEQ ID NO: 3290191 - RNA, 19 nt, Artificial Sequence
  Description of Artificial Sequence: Synthetic oligonucleotide
ggucuaugaguuugugauc

SEQ ID NO: 3290192 - RNA, 19 nt, Artificial Sequence
  Description of Artificial Sequence: Synthetic oligonucleotide
gucuaugaguuugugaucu

SEQ ID NO: 3290193 - RNA, 19 nt, Artificial Sequence
  Description of Artificial Sequence: Synthetic oligonucleotide
ucuaugaguuugugaucuc

SEQ ID NO: 3290194 - RNA, 19 nt, Artificial Sequence
  Description of Artificial Sequence: Synthetic oligonucleotide
cuaugaguuugugaucuca

SEQ ID NO: 3290195 - RNA, 19 nt, Artificial Sequence
  Description of Artificial Sequence: Synthetic oligonucleotide
uaugaguuugugaucucag

SEQ ID NO: 3290196 - RNA, 19 nt, Artificial Sequence
  Description of Artificial Sequence: Synthetic oligonucleotide
ugaguuugugaucucagga

SEQ ID NO: 3290197 - RNA, 19 nt, Artificial Sequence
  Description of Artificial Sequence: Synthetic oligonucleotide
gaguuugugaucucaggag

SEQ ID NO: 3290198 - RNA, 19 nt, Artificial Sequence
  Description of Artificial Sequence: Synthetic oligonucleotide
guuugugaucucaggagcu

SEQ ID NO: 3290199 - RNA, 19 nt, Artificial Sequence
  Description of Artificial Sequence: Synthetic oligonucleotide
ugaucucaggagcugggaa
